United States Patent Application Publication US 2011/0296543 A1 - sequence listing, part 3

SEQ ID NO: 9331 - DNA, 417 bp, Unknown
  Obtained from environmental sample
  misc_feature (1)..(417): n is a, c, g, or t
atgaaagtttccggtcatgtacaggcgattattgacgccgcctataacgaagcaaaggtgcgaaaacatgagtaccttactcccgagcatatactttacgccgcccttgcttttgatgaagttcagggggtgttgttttcgtgcggggctgacttggcccagatcaaacatggaatggaaaatttctttgagcaaaaaatgacgacttctttcggggaacctacaaaaaccgtgggttttcacaacataattgaacgcgctttgatacattgcaaatcagcccaaaaagacatgatcgatgtggcggatattcttgtctccctttacgacgaagaaagatgctacagcagctattatctgcgncaggcgggaaatatgcggctgaaactttgcaggtactgtccacagntacggtaa

SEQ ID NO: 9332 - protein, 138 aa, Unknown
  Obtained from environmental sample
  DOMAIN (14)...(64): Clp amino terminal domain
  misc_feature (1)..(138): Xaa is any amino acid
MKVSGHVQAIIDAAYNEAKVRKHEYLTPEHILYAALAFDEVQGVLFSCGADLAQIKHGMENFFEQKMTTSFGEPTKTVGFHNIIERALIHCKSAQKDMIDVADILVSLYDEERCYSSYYLRQAGNMRLKLCRYCPQXR

SEQ ID NO: 9333 - DNA, 783 bp, Unknown
  Obtained from environmental sample
  misc_feature (1)..(783): n is a, c, g, or t
gtgcgggttgtcctttcggtgtttgtgggcctgtgcctcgtctttattgtgtccctctacgggactattctattcggctgttttgtaaaagcctggggaattgattattcttttaccctgtcgaatttcggcgacgccttttcccggggttggcagtctatcagcaatacggttacccttgcggcggcggcaacgcctatcgcggggatcattgccatggccgcggctcttatggtggtacgccagaccttcgtgggcaagcgaattctggaagtcctcctcatgacgccctttgcgataccgggcacccttttgggtatttcctacattcttgcctttaacaagccgcccctcttgctggtggggaccgcggcaatcatagtcataaactacatcgtgcgggaacttccggtgggccttgaaaccggggcggcaaatctgcgccagattgacaaatccattgaggaagccgcccaagacttgggggcggacatgtccaaggtctttacttcagtggtgcttcccctgatacggcccagttttttaaccagtatgtcctatacctttgtacgttccatgaccgcggtgagcgccattatctttttgatctccgccaggtggtatcacctgacggtgcagatatacaacttctccgaaaatctgcgtttcggcatggctagtgtgctttcaatggtgcttatcgtcattgtgctggccgctttcggcctgatgcagcttatggtccgggatcgcggcattaacgccaaaaatatttcacgatag

SEQ ID NO: 9334 - protein, 260 aa, Unknown
  Obtained from environmental sample
  SIGNAL (1)...(21)
  DOMAIN (50)...(253): Binding-protein-dependent transport system inner membrane component
  misc_feature (1)..(260): Xaa is any amino acid
MRVVLSVFVGLCLVFIVSLYGTILFGCFVKAWGIDYSFTLSNFGDAFSRGWQSISNTVTLAAAATPIAGIIAMAAALMVVRQTFVGKRILEVLLMTPFAIPGTLLGISYILAFNKPPLLLVGTAAIIVINYIVRELPVGLETGAANLRQIDKSIEEAAQDLGADMSKVFTSVVLPLIRPSFLTSMSYTFVRSMTAVSAIIFLISARWYHLTVQIYNFSENLRFGMASVLSMVLIVIVLAAFGLMQLMVRDRGINAKNISR

SEQ ID NO: 9335 - DNA, 360 bp, Unknown
  Obtained from environmental sample
  misc_feature (1)..(360): n is a, c, g, or t
atggccgcttttgcgaggggcggtacaaggcttctgatgcccgaagcgtggctggggtctacaataacaggcagatgcgatttttgctttagaagcgcgaccgcggataaatccagcgtattgcgcgtcattgtttcaaaggtgcgaataccgcgctcacaaagtataacctgcgtgtttcctgcggatacgatatattccgcgctcattaatagttcttctattgtgttggccagtccgcgcttcaatagcacaggctttttcaacctgccgacttctttaagcaaatcaaagttctgcatgttcctggcgccgatttgcataatatcaacatcattgaacaaatcgatctgcgtttga

SEQ ID NO: 9336 - protein, 119 aa, Unknown
  Obtained from environmental sample
  misc_feature (1)..(119): Xaa is any amino acid
MAAFARGGTRLLMPEAWLGSTITGRCDFCFRSATADKSSVLRVIVSKVRIPRSQSITCVFPADTIYSALINSSSIVLASPRFNSTGFFNLPTSLSKSKFCMFLAPICIISTSLNKSICV

SEQ ID NO: 9337 - DNA, 942 bp, Unknown
  Obtained from environmental sample
  misc_feature (1)..(942): n is a, c, g, or t
atggagagcacagacgggccgccgcacagcaaagcgcggtctgcaaaaccaacagcgcagcctgagcaagccaccgcaaagccaaacgcgcccgccaaaaagcccgaccagaccaaggcccagccagaaagacaggcaaaagaggcgaatgtgcccatcgcggttgcggaggcaccggccgagcggccgagccacgcaagcgaggctctggagcgtgcaaagccatcgtcacagcagatgaacatgaccggcgccagccccaaggcggcggaagcggcggacgaggcaaaagagatacggggcgccaagtcctttgaaaacatcgtgttcagggcagaggtcaatctgaccaaggattcggccaccaagggtgttggccaagaggcaaagactttcgacgcgaaaatccacatggggcacaacgagggacactttgccgtcggtagtcattccagcgcggatgtgtccggggcggcgcaaaaacagcccgccgcgcccattgtgcatcggcaattcctacccccccaagcacccatgtcccagttggaaggcagcgtcaagtggcttctgcggagcaacgcaaagggcgccgaaatccaactgcaccccgaaagccttggcagggtgacggtccaactgaaggtggaaggctccgacgtccacgccaaagtgtgggcatccgaagcctccacgatgccgctcttgaaggaacacaaggcgtttctggaatccagcctcaaggatcagggcctcacactgagcagttttgacctccagcacggcaagggcggccaccaagcgcagggcgaaaacgacaggcaccaccagcacttcgccccgccgatgagggagacctggaccggcacagaattcangcaagagatgcccacgcagatagtggcgcagcacatagatgaaagcggtgtcgaggtttacgcctaa

SEQ ID NO: 9338 - protein, 313 aa, Unknown
  Obtained from environmental sample
  DOMAIN (120)...(262): Flagellar hook-length control protein
  misc_feature (1)..(313): Xaa is any amino acid
MESTDGPPHSKARSAKPTAQPEQATAKPNAPAKKPDQTKAQPERQAKEANVPIAVAEAPAERPSHASEALERAKPSSQQMNMTGASPKAAEAADEAKEIRGAKSFENIVFRAEVNLTKDSATKGVGQEAKTFDAKIHMGHNEGHFAVGSHSSADVSGAAQKQPAAPIVHRQFLPPQAPMSQLEGSVKWLLRSNAKGAEIQLHPESLGRVTVQLKVEGSDVHAKVWASEASTMPLLKEHKAFLESSLKDQGLTLSSFDLQHGKGGHQAQGENDRHHQHFAPPMRETWTGTEFXQEMPTQIVAQHIDESGVEVYA

SEQ ID NO: 9339 - DNA, 816 bp, Unknown
  Obtained from environmental sample
  misc_feature (1)..(816): n is a, c, g, or t
atgtttcnggtgaaaatagacaaggtggtaaaggaatatgcaaatattccaggcgttagagaagatgtgacagacatcattttgaacttgaagtccattcgcgttaaacttttgggcgataaagacgaaactntgcgccttgatgtttcgggcgaaggcgatgtgacggcaaaagacatagatgcaaatccggcggttgttattctcaatcccgatgtacatatagcaaccctcagcggtgataacgcttctctttgcatagagatgaaagtttctccgggtcgcggctatgttcccgcagacgatccagaccgcagaagggctgctgaaaatgctcctgtgggcgaaattttaatagatgccaattacaatcctgttttgaatgtggctatgtatgtttccgataccagagttgaggaacgcacggatttcaatcgtttggaactggatataaccacagatggaagcatagacccagaagatgctcttgcttatgccgccaaactgttgatagatcatttggaaatattcataaactttgagtgcgatttggatggtccagaaggacccgagcttgattctgacgtgcaggctgttgttcaaaaactattgctgaatgtggacgatttggaactttccgtgcgttccagcaattgcttgaggcaggcaggaattcgcacaatagcagaactcgttcgccacaaagaaaacgatatgctgaaacacaaaaactttggcagaaaatctttgatagagctaaacgaattgctatcttcaatgggacttagctttggcatggatgtggatgcctattaa

SEQ ID NO: 9340 - protein, 271 aa, Unknown
  Obtained from environmental sample
  DOMAIN (72)...(179): RNA polymerase Rpb3/Rpb11 dimerisation domain
  misc_feature (1)..(271): Xaa is any amino acid
MFXVKIDKVVKEYANIPGVREDVTDIILNLKSIRVKLLGDKDETXRLDVSGEGDVTAKDIDANPAVVILNPDVHIATLSGDNASLCIEMKVSPGRGYVPADDPDRRRAAENAPVGEILIDANYNPVLNVAMYVSDTRVEERTDFNRLELDITTDGSIDPEDALAYAAKLLIDHLEIFINFECDLDGPEGPELDSDVQAVVQKLLLNVDDLELSVRSSNCLRQAGIRTIAELVRHKENDMLKHKNFGRKSLIELNELLSSMGLSFGMDVDAY

SEQ ID NO: 9341 - DNA, 681 bp, Unknown
  Obtained from environmental sample
  misc_feature (1)..(681): n is a, c, g, or t
atgaaaaaccaactaaaactattaagacttgctattatggttatggcaatcttttttagtcttccatttacagcctgcggacagaaagcagatcccgaaaccgattttgaggcattgccggttgtaggcggaaaaggagtggcgataacaagatatttagggaaaaaatgggaagtcgtaataccttctaaaatacgcggcatacctgttactcatattggggaagaagcgtttagaaataaaagccttatcaacgttatcattcctgacagcgttatttacattggggaagaagcgtttagcgaaaaccaacttacaaaaattatcattcctaaaagcgttacttacatcggtgactatgcgtttggcaacaaccaactaacaagcattaccattcctaacagcgttaccacgattggggaaagcgcgtttgccagcaaccaactgacaagcgttaccataccggatagtgttacaatcattaaggcattagctttttttagcgacagccttacaggcgtaacgttcgaagggacagttccttcggcgaactttgatattaatgcttttggttatctcggtgacttacgcgataagttttacgcagcagacccaaccnacgggacaccgggaacatatacgagaccagatagctncagtacaacgtggacgaagcagtag

SEQ ID NO: 9342 - protein, 226 aa, Unknown
  Obtained from environmental sample
  SIGNAL (1)...(25)
  misc_feature (1)..(226): Xaa is any amino acid
MKNQLKLLRLAIMVMAIFFSLPFTACGQKADPETDFEALPVVGGKGVAITRYLGKKWEVVIPSKIRGIPVTHIGEEAFRNKSLINVIIPDSVIYIGEEAFSENQLTKIIIPKSVTYIGDYAFGNNQLTSITIPNSVTTIGESAFASNQLTSVTIPDSVTIIKALAFFSDSLTGVTFEGTVPSANFDINAFGYLGDLRDKFYAADPTXGTPGTYTRPDSXSTTWTKQ

SEQ ID NO: 9343 - DNA, 591 bp, Unknown
  Obtained from environmental sample
  misc_feature (1)..(591): n is a, c, g, or t
gtgatggcgggtgctctttgcttggcgccgcgcaggctttcttctgttcagggaatggaaatagctcaagccataaactctttgccttcggcagtagaagaaactttaaaacttagcgatgaaattttaaaaattgctgaggtgtatcacaagcactcaaactttctttaccttggcaggcactatcattatccggttgctatggaaggtgctttaaagttaaaggagataagctatattcacgcagaaggctacccagcagcggagatgaagcacggccccatagctttgatagatgcaaatatgcctgttgtgatagttgcgcccaaagatgctctttttgataaaattgtttcaaatgccagagagattaaggctcgcggcggaaagctaattgttgtaactactagtgattccgtgcctttagatgaatttgtagatcatataataagggtgcctactgtgaacagcgctcttatgcctgtgataacaagcgtgcctttgcaacttttggcatatcacatagccgtgctgcgcggcaacgatattgaccaaccgaggaatttggcaaagagcgtgactgtggagtaa

SEQ ID NO: 9344 - protein, 196 aa, Unknown
  Obtained from environmental sample
  DOMAIN (46)...(182): SIS domain
  misc_feature (1)..(196): Xaa is any amino acid
MMAGALCLAPRRLSSVQGMEIAQAINSLPSAVEETLKLSDEILKIAEVYHKHSNFLYLGRHYHYPVAMEGALKLKEISYIHAEGYPAAEMKHGPIALIDANMPVVIVAPKDALFDKIVSNAREIKARGGKLIVVTTSDSVPLDEFVDHIIRVPTVNSALMPVITSVPLQLLAYHIAVLRGNDIDQPRNLAKSVTVE

SEQ ID NO: 9345 - DNA, 432 bp, Unknown
  Obtained from environmental sample
  misc_feature (1)..(432): n is a, c, g, or t
atgactagcctacgtctctatgctggagagcggcttcacacgcaagcgctttctcacgccggcgcggcgggaatgtggcagttcatgccgcacaccgcccgccgctacggactgcgcgtagacggcggcgtagacgaacgcaccgaccctgaaaaagccaccaaagccgccgccgcctacttcaaagacctcattgcgatcttcggctcccgcagctccgtgctactctgcatggccgcctacaacgccggcgaacaacgcgtaataaacgccctaaaacgcatagacgacccggttcacgacagagacttctggcacctataccgaatgggttggctagccaaagagacaaacgaatacataccgcaagtaatcgcgcttataataatatcggataatcctaaagaattcggatttaaggataatgattaa

SEQ ID NO: 9346 - protein, 143 aa, Unknown
  Obtained from environmental sample
  DOMAIN (3)...(104): Transglycosylase SLT domain
  misc_feature (1)..(143): Xaa is any amino acid
MTSLRLYAGERLHTQALSHAGAAGMWQFMPHTARRYGLRVDGGVDERTDPEKATKAAAAYFKDLIAIFGSRSSVLLCMAAYNAGEQRVINALKRIDDPVHDRDFWHLYRMGWLAKETNEYIPQVIALIIISDNPKEFGFKDND

SEQ ID NO: 9347 - DNA, 390 bp, Unknown
  Obtained from environmental sample
  misc_feature (1)..(390): n is a, c, g, or t
atgaaacgccgtatcgcaattatcattatcatcatcaccgtactaacggtaaccgccgtagccatgtactattacggcaacggcgataaccgcggccttgccgacccaacccgctccgttatggtcaataaaaaaacaaaaatcccgccgcgaccgctgccggatactataacaacggcattttacaacgtagagaatctctttgacttcaacctagacggctccgagtacgacgagttcaaaccgggatggcacggatggagcgccgagatgcaaaaaaaacgtttgcaaagcgccgcccaagtagtcgcggcgctcaacgccgacgtgatagggctttgcgagatcgaggatgagaacacgctgagggaattagcggtcgtgctttga

SEQ ID NO: 9348 - protein, 129 aa, Unknown
  Obtained from environmental sample
  SIGNAL (1)...(21)
  misc_feature (1)..(129): Xaa is any amino acid
MKRRIAIIIIIITVLTVTAVAMYYYGNGDNRGLADPTRSVMVNKKTKIPPRPLPDTITTAFYNVENLFDFNLDGSEYDEFKPGWHGWSAEMQKKRLQSAAQVVAALNADVIGLCEIEDENTLRELAVVL

SEQ ID NO: 9349 - DNA, 507 bp, Unknown
  Obtained from environmental sample
  misc_feature (1)..(507): n is a, c, g, or t
gtgcgggagctgtccgcgctgacaaacggctactacgccgaaatcagcggcggcgccgagaccgctaccgtggagtatgcccccaaaatcaaatgcgatatttttgacacgggggagtggcaaaacgcatatttaatatcattggcgcaacgccgcgaaagggacgccgaacttcagtacacggcgaccggcccgcaccgcgacgacctgcgtttcacgctgggcggcagggcggcgaagaatcacgcgtcgcaaggtcagtgccgcagtttcgccctctccctgaagctcgcctcggcgcggttcatagagcaaaggcgcggcggcgggatggtatttttagtcgacgacgcggtctcggaactcgatccggagcggacgtcgcgggtctaccccctgcttgagggcagaggccaagtcttcatagcaacgccccgctgccacgcggcgttgggcgggagggtgttacggtgcgcggtagaatcaggaaaagtgacgattgcctga

SEQ ID NO: 9350 - protein, 168 aa, Unknown
  Obtained from environmental sample
  misc_feature (1)..(168): Xaa is any amino acid
MRELSALTNGYYAEISGGAETATVEYAPKIKCDIFDTGEWQNAYLISLAQRRERDAELQYTATGPHRDDLRFTLGGRAAKNHASQGQCRSFALSLKLASARFIEQRRGGGMVFLVDDAVSELDPERTSRVYPLLEGRGQVFIATPRCHAALGGRVLRCAVESGKVTIA

SEQ ID NO: 9351 - DNA, 642 bp, Unknown
  Obtained from environmental sample
  misc_feature (1)..(642): n is a, c, g, or t
ttgctcgatgccgggcgggctgggcgtttcgtgcatgaacgcctttacatggctgttggctcaggcggagatggcaaactgcctgttctggaaaagcaggctgatgagtttgccgcgcctcacaggcgggaattggtgaacaagatcgtcgatcagattctaaaagaaacacagaacatcgctctnatcggcatgcccggctgcgggaaaagtaccgttggccgcatccttgcccatgctatggaacggccattcgcggatattgatgagcggattgttgcggccgcgggaaagagcatccctcaaattttcaccgaggacggtgaagaaaagttccgccagttggaaacgcgcatacttggcgaggaaaccaggaaaagcggtatggtactggcaacaggcggcggcgtggttacgcggcaagaaaatctcgacctgttgcggcaaaacagcataattgtgtatatggaacgcgaattaagtgagcttattaccgacggcaggccgctgtccaaaggcgtggggattcatgtccttgccgaacagcggctgccgttatacgaaatgtggagcgattgcgttattcaggtagaagcaaggccggagctgaccgcggcgcggattcaggaagtggtagggtag

SEQ ID NO: 9352 - protein, 213 aa, Unknown
  Obtained from environmental sample
  DOMAIN (66)...(213): Shikimate kinase
  misc_feature (1)..(213): Xaa is any amino acid
MLDAGRAGRFVHERLYMAVGSGGDGKLPVLEKQADEFAAPHRRELVNKIVDQILKETQNIALIGMPGCGKSTVGRILAHAMERPFADIDERIVAAAGKSIPQIFTEDGEEKFRQLETRILGEETRKSGMVLATGGGVVTRQENLDLLRQNSIIVYMERELSELITDGRPLSKGVGIHVLAEQRLPLYEMWSDCVIQVEARPELTAARIQEVVG

SEQ ID NO: 9353 - DNA, 741 bp, Unknown
  Obtained from environmental sample
  misc_feature (1)..(741): n is a, c, g, or t
atggcatattttaacggtcccaactcgcttaaggagcgcatagaaaaccccgtacccagaaacgtaaacgggaaagatacctacattgtcagaatgatggttcccatcatcaactcccgtaacaaagaagtagtgggaggcgtgggcggccttttggttatagacggattgcagaccctggttacgaataccataaaaaattatgacgagatcgccttgatggtaatatactccggcgacgggacgattatggcgcattttattccggagcgcatcggcaaaaatacaacggaggccgatgtggagataggcgacggaaggccggcgcttgtaaaggcaattggcgacagaacggtgttttccggcgaaacggatgatccggctttaaaagcgcatgtgtactttaaaatggtgcccattcaaatcggcacttcggacatgaactgggggatattggtaggaacctttcaatcatttatatttagagaaatcaacaatattaccagatttaccattattcttgccgcgttatcccttgtagtggccgcggtaattatgtacttcatcctccataccaccaccaaaccaatagtcaatgtaaccgacaacctcaaagaaatatccgaaggcgagggagacctgaccaaaaggctggctgttaactccagggacgagatcggcgatctatccaaatatttcaataatactcttggggctataggcgcccttattaaaggataa

SEQ ID NO: 9354 - protein, 246 aa, Unknown
  Obtained from environmental sample
  DOMAIN (171)...(242): HAMP domain
  misc_feature (1)..(246): Xaa is any amino acid
MAYFNGPNSLKERIENPVPRNVNGKDTYIVRMMVPIINSRNKEVVGGVGGLLVIDGLQTLVTNTIKNYDEIALMVIYSGDGTIMAHFIPERIGKNTTEADVEIGDGRPALVKAIGDRTVFSGETDDPALKAHVYFKMVPIQIGTSDMNWGILVGTFQSFIFREINNITRFTIILAALSLVVAAVIMYFILHTTTKPIVNVTDNLKEISEGEGDLTKRLAVNSRDEIGDLSKYFNNTLGAIGALIKG

SEQ ID NO: 9355 - DNA, 909 bp, Unknown
  Obtained from environmental sample
  misc_feature (1)..(909): n is a, c, g, or t
atgaaagccctggtaatggaaaacctcccgattacattcaagcaccttgcctatgaggaagccattgaagttttcaggaaaaacaaccagacggacaccgtgctgcttctggatcagcgcggcacttcgcggataaagataaacgaatgtaataacaacatcgatatttacgtcgaacccttggcgccgcgcaccggcttgctttccgcttttgagctgaatccctaccaggaaggcttcctgctccgcttccccactgccggcaaaggcaggatcgtcggcccctttacggacgatcctaaaattttcgacgtttttaacgagtataaaaaatgggggcgcgtagtcggggtacgggtggtaggcgatctcaattcccttatcgcgaaaagaaatatccgcgattacataagaatcgccgaggcgcaccaggcgcggaaaatgtcggagatagccgaacagatatacaaaaagaaagacactataaaaaccgtcctgctcgccgggccttcaagctccggcaaaaccaccagcgcgaaacggctttccatagaacttttggtattggggataaaacctattgccatcagccttgacagctattatgtggggaatgaccagactccaaggaatgaaaaaggcgagccggattacgaatgccttaaagcactggacatccccctgttaaacgatcatcttctggcgctgtacaggggcgaagagataagcctgcccgtttacgattttaagacgggcgcgagtatcagagacgcgggcaaaaagatccgcatggaagataagcgcacggtgcttattgtcgaaggcatccacgcccttaacgacgcccttacgcctgccattgggcgtgacaccaaattcaagatttatatttcccgctctacccgttga

SEQ ID NO: 9356 - protein, 302 aa, Unknown
  Obtained from environmental sample
  misc_feature (1)..(302): Xaa is any amino acid
MKALVMENLPITFKHLAYEEAIEVFRKNNQTDTVLLLDQRGTSRIKINECNNNIDIYVEPLAPRTGLLSAFELNPYQEGFLLRFPTAGKGRIVGPFTDDPKIFDVFNEYKKWGRVVGVRVVGDLNSLIAKRNIRDYIRIAEAHQARKMSEIAEQIYKKKDTIKTVLLAGPSSSGKTTSAKRLSIELLVLGIKPIAISLDSYYVGNDQTPRNEKGEPDYECLKALDIPLLNDHLLALYRGEEISLPVYDFKTGASIRDAGKKIRMEDKRTVLIVEGIHALNDALTPAIGRDTKFKIYISRSTR

SEQ ID NO: 9357 - DNA, 426 bp, Unknown
  Obtained from environmental sample
  misc_feature (1)..(426): n is a, c, g, or t
atggcggaggtctatcttactgggacgttccgcaggcaaaggtataaacctttcccttatattaaagatgaaatgccgcacgtaatggcggcggctgaacttgttatgggcagaagcggagcgggtatttgggagtgggccgtacttggaaaaccaatgctgctaataccgttaaggggttccggcacaaggggcgatcaagtgcagaacgccgaatattttcaaaaagccggggccgcgcaggtgttaggtgaaaaaacaacgccgtgggcgttaataaacgcggttaattctattgcgcaggacggggaaaaaagaaaaaaaatgtcctgggcttccgcaaaaataggggaaagagacggcgctttaataatcgcccgcgctcttgcggatgatattgcgcggcgtttcggaggggacagatga

SEQ ID NO: 9358 - protein, 141 aa, Unknown
  Obtained from environmental sample
  DOMAIN (1)...(125): Glycosyltransferase family 28 C-terminal domain
  misc_feature (1)..(141): Xaa is any amino acid
MAEVYLTGTFRRQRYKPFPYIKDEMPHVMAAAELVMGRSGAGIWEWAVLGKPMLLIPLRGSGTRGDQVQNAEYFQKAGAAQVLGEKTTPWALINAVNSIAQDGEKRKKMSWASAKIGERDGALIIARALADDIARRFGGDR

SEQ ID NO: 9359 - DNA, 480 bp, Unknown
  Obtained from environmental sample
  misc_feature (1)..(480): n is a, c, g, or t
atgagtttttccgccattgattttatatttatcggattaatagggctttttatgatccgttgtttcctgaaaggttttgtaagcgaaatattatccatggcggcattggtgcttggacttcttgccgcgttatttctctataaaaacggcggcgagtttttaagaaatcaattctggcccggattaaatgtaattcctgaaattgccgcgtttgttattctgtttataattgtttttttagccgttaaaataatagaaaaaatgctggtcaatataattgaaagagtgagcctttccggcgccaacagttttctaggccttatttttggcctggcggaaggcatagcgcttgtaagtttaatacttttacttttaaagatacagccgctttttgactncagctcattgctgcagaacagtttttttgcaaggattatactgccattaattgccggcaaggagaaaatcataagtgtttga

SEQ ID NO: 9360 - protein, 159 aa, Unknown
  Obtained from environmental sample
  DOMAIN (5)...(159): Colicin V production protein
  misc_feature (1)..(159): Xaa is any amino acid
MSFSAIDFIFIGLIGLFMIRCFLKGFVSEILSMAALVLGLLAALFLYKNGGEFLRNQFWPGLNVIPEIAAFVILFIIVFLAVKIIEKMLVNIIERVSLSGANSFLGLIFGLAEGIALVSLILLLLKIQPLFDXSSLLQNSFFARIILPLIAGKEKIISV

SEQ ID NO: 9361 - DNA, 363 bp, Unknown
  Obtained from environmental sample
  misc_feature (1)..(363): n is a, c, g, or t
atggttgatttcttcaggcgcgccctaaaaaaaattaacaagctcaatactgaacagcgcaaggagcttttaatttccgccgtggaagaaatcgacctgcttggaaacgttcttgattcaatagacatgggcattcttgtgtgtgataacagggataatcttgtactggcgaataaatgcgcccttagaatgatatcaatgaattacatagaaggagttaagctggaagacgcaattttagacgatcaatttattgaaacttttaaggaaataatcgccaaccgagaaaagataattgataaggagatagaaatagatcaacaggagcgcagaagattatactccggaactcggccaatctga

SEQ ID NO: 9362 - protein, 120 aa, Unknown
  Obtained from environmental sample
  misc_feature (1)..(120): Xaa is any amino acid
MVDFFRRALKKINKLNTEQRKELLISAVEEIDLLGNVLDSIDMGILVCDNRDNLVLANKCALRMISMNYIEGVKLEDAILDDQFIETFKEIIANREKIIDKEIEIDQQERRRLYSGTRPI

SEQ ID NO: 9363 - DNA, 807 bp, Unknown
  Obtained from environmental sample
  misc_feature (1)..(807): n is a, c, g, or t
atgataattgcgttaaagtcaggcgttaatcaggaagacataaaaatactggtagccgatcttgaaaagctcggcgtaaaagttgattattcgcagggagcaaatcaaactgtacttggtcttgtaggtgatactacggtaatcaacgatgaggcgctaagggcaaaccgtattgtagaaaaagtaattcgtgttcaggaaccgtataaacgcgcaaaccgcgcgtttcatcctatggatacggtactggaatttgaatcaggcgataaaaccgcaaagattggcagcggctatttcgcggtaattgcgggtccatgttccgtggaaagccgcgagcaggttgtctgtatcgcaaaggaagtgaaaaatgcgggagccgcttttcttcgcggcggcgcatttaaaccgcgaacaagcccctacagttttcagggaatgggcggcgcggggattgatcttctgcttgaggcaaaaaaagaatgcggtcttccaatcgttacggaattaatggaaatcagccagattgaattatttgaaaatgtagacatgattcaggttggagcgcgtaacatgcagaatttcaacctgttaaaagagctgggacattccagaaaaccggttttgttaaaacgcggtatggcttctaccatgaccgagcttcttatggccgccgagtatgtcatggcaggcggaaacgacaaggtcgtgctttgtgagcggggtatccgcggctttgataatttttcacgtaacattctggatttggcggttgttccggcgctaaaaaaaagacgcatctgcccgtga

SEQ ID NO: 9364 - protein, 268 aa, Unknown
  Obtained from environmental sample
  DOMAIN (80)...(268): DAHP synthetase I family
  misc_feature (1)..(268): Xaa is any amino acid
MIIALKSGVNQEDIKILVADLEKLGVKVDYSQGANQTVLGLVGDTTVINDEALRANRIVEKVIRVQEPYKRANRAFHPMDTVLEFESGDKTAKIGSGYFAVIAGPCSVESREQVVCIAKEVKNAGAAFLRGGAFKPRTSPYSFQGMGGAGIDLLLEAKKECGLPIVTELMEISQIELFENVDMIQVGARNMQNFNLLKELGHSRKPVLLKRGMASTMTELLMAAEYVMAGGNDKVVLCERGIRGFDNFSRNILDLAVVPALKKRRICP

SEQ ID NO: 9365 - DNA, 771 bp, Unknown
  Obtained from environmental sample
  misc_feature (1)..(771): n is a, c, g, or t
ttgatttttgttgacgacggctcgaaagatggcacgttgaaggttttacggcaacttgccgactccgacagccgtgtccattacctttcgttctctcgtaatttcgggaaggaggcggccatacttgccggattacatgcggcgcgtggtgaatatattgtgacaatcgacgccgacgggcaggatccgccgtcgcttattccgcaaatgcttgaatgcgtcgcctctggagagcacgattgcgccgcgacccggagggtaaatcgcttgggagaaccgccaatacgctcttttttcgcacgctgtttctattcgcttatgaaaaaaataaccgatattgaagtcgtagacggcgcacgtgactttcgcttgatgaatagaaaatatttagatgcgcttcttgaattacctgaaagaaataggttttcgaagggtatctttccgtggataggttttaggacaaagtggtttgagtatgaaaatatagagcggaaggagggcaaaacgaagtggtctttctggaagttgtttttatactctctcgacggtataatagctttttcgtcaaaaccgctcgctatagcctccgtatttgggttatttatgttggtcgtcgcgatttcgactatagttctcatagtcgtccgcaaactggtatggggcgatccggtcagcgggtgggcgtcaactgtctgcgtcattcttttttgttcgggaattcaattgttcacgataggcgtatggggcagatatggcctcggccgaatctga

SEQ ID NO: 9366 - protein, 256 aa, Unknown
  Obtained from environmental sample
  misc_feature (1)..(256): Xaa is any amino acid
MIFVDDGSKDGTLKVLRQLADSDSRVHYLSFSRNFGKEAAILAGLHAARGEYIVTIDADGQDPPSLIPQMLECVASGEHDCAATRRVNRLGEPPIRSFFARCFYSLMKKITDIEVVDGARDFRLMNRKYLDALLELPERNRFSKGIFPWIGFRTKWFEYENIERKEGKTKWSFWKLFLYSLDGIIAFSSKPLAIASVFGLFMLVVAISTIVLIVVRKLVWGDPVSGWASTVCVILFCSGIQLFTIGVWGRYGLGRI

SEQ ID NO: 9367 - DNA, 747 bp, Unknown
  Obtained from environmental sample
  misc_feature (1)..(747): n is a, c, g, or t
atggataatacaaaaagcgggacggcagcggttacagtaactgaaaacatcttcaacggtggtgaaaccttaaccagcacaagcgctgagcaagtaacgagaaaagttaacggttatgattacgaactgtggaaccagaataagcagggaacaacaagcatgacgattccagcctccggaagcagcgcaaacggcggtatttttaaatgcagttggaacgacattgaaaacgtattattccgcgccggcagaaagtataataagacacagacacattctcaaatcggcactttttcaattgattacgaagcaactgtttcgataacgggcgatgtgggttatctgtctgtatacggttgggtaagcggcggttccccggatgatttaatcgagtattatatcgtagaaaggcgtgggagttataatcccggaagtgcgggaaccaataaaggtacggtaacaattgacggcggaacttatactatttatgaaacaacaagaacaaatcagccttccattgaaggaacgaaaacttttaaacagtattggagtatccgtacctcaaaccgtacaagcggaacaatatccgtttcggaacattttaaggcctggaatgacaaggggatggtaagcataaacaacggtaaattgtatgaagtagctttaaaagtagaaggttatagaaacagaggttccgccgaaattactcagaacatacttaaagtaaacggcgttccgatagagtag

SEQ ID NO: 9368 - protein, 248 aa, Unknown
  Obtained from environmental sample
  DOMAIN (34)...(237): Glycosyl hydrolases family 11
  misc_feature (1)..(248): Xaa is any amino acid
MDNTKSGTAAVTVTENIFNGGETLTSTSAEQVTRKVNGYDYELWNQNKQGTTSMTIPASGSSANGGIFKCSWNDIENVLFRAGRKYNKTQTHSQIGTFSIDYEATVSITGDVGYLSVYGWVSGGSPDDLIEYYIVERRGSYNPGSAGTNKGTVTIDGGTYTIYETTRTNQPSIEGTKTFKQYWSIRTSNRTSGTISVSEHFKAWNDKGMVSINNGKLYEVALKVEGYRNRGSAEITQNILKVNGVPIE

SEQ ID NO: 9369 - DNA, 804 bp, Unknown
  Obtained from environmental sample
  misc_feature (1)..(804): n is a, c, g, or t
atgtttggatatgcaaaactgagaacccttgaatttcttttgggaaaagacggcttagaaaccgcccgctttgctaaacgccctctccaaccacgactaccggcaggcaatttctatattttagttatggattggtactacatagactcctctaaaccggagggtaaaaggagaaacggaccttggtctccgaggcagatgcttttatttgccgagcaaggtgcttttttgccagaaacccttgtgtggagagatggatttgatggctggcgtccttggggcatagccgagccggagcttaaaacgcagttccagacagaaacggtaaagcagattgtggaagaggagattttgcccaatatcaatgccagcaaaaccgagtatgctggatttttgataaggctgtgcgctttttcgatagatgcagttattttgcaactaatctttgttctgctaaccccaatccatgcgagttttggcattatctcggaagtgaccccgcagacaaccgtggcggagcttatgcccaccatgctttttgcattttgcctgatattcttttacaactccttttttgtgaagaatttttccggaacccttggaaaaattgtgtttggcttggctgttgtgcgccatagcgggaaacccatgacatggagctgcgcttttttaagggctttcatcgcatttttttccagctctttctttggtgcgggctgcttgattgccgcgtttgacattgaaaaacgggctttgcacgattttatggcagacaccagggttttaaaattgcagaggacctaa

SEQ ID NO: 9370 - protein, 267 aa, Unknown
  Obtained from environmental sample
  DOMAIN (128)...(263): RDD family
  misc_feature (1)..(267): Xaa is any amino acid
MFGYAKLRTLEFLLGKDGLETARFAKRPLQPRLPAGNFYILVMDWYYIDSSKPEGKRRNGPWSPRQMLLFAEQGAFLPETLVWRDGFDGWRPWGIAEPELKTQFQTETVKQIVEEEILPNINASKTEYAGFLIRLCAFSIDAVILQLIFVLLTPIHASFGIISEVTPQTTVAELMPTMLFAFCLIFFYNSFFVKNFSGTLGKIVFGLAVVRHSGKPMTWSCAFLRAFIAFFSSSFFGAGCLIAAFDIEKRALHDFMADTRVLKLQRT

SEQ ID NO: 9371 - DNA, 504 bp, Unknown
  Obtained from environmental sample
  misc_feature (1)..(504): n is a, c, g, or t
ttgtcgcggcgattatggacgacgcactttttggactcgctcctgtcaaccaagtacgtggagttcggcgggcgcggcgtgctggattttgggacgggcggggggctacctgggattccgttggccattgtcttccgggacgccagagttactttgctcgactcgaaaaagaagaagattgcggcgttgaggggggcggcggaggcgttggaacttgagaattgctatttttcggatcaacggattgaggatattatcgaacggagttgttttgacataatcgtttctcgctctgtcaagattgagcctgcatataaaccgatattgctgcggttgctcaaatcggggggggagattgtgctttataagagtaggatccttgacgacgtgtatcaatttgacgatgttgaggtatttaacgcggaggcggcggagttgggacttggggagcggaggattgcggtggtacggccgctaccgcccgggaaaaatcttgccaagtga

SEQ ID NO: 9372 - protein, 167 aa, Unknown
  Obtained from environmental sample
  DOMAIN (28)...(119): Methyltransferase domain
  misc_feature (1)..(167): Xaa is any amino acid
MSRRLWTTHFLDSLLSTKYVEFGGRGVLDFGTGGGLPGIPLAIVFRDARVTLLDSKKKKIAALRGAAEALELENCYFSDQRIEDIIERSCFDIIVSRSVKIEPAYKPILLRLLKSGGEIVLYKSRILDDVYQFDDVEVFNAEAAELGLGERRIAVVRPLPPGKNLAK

SEQ ID NO: 9373 - DNA, 567 bp, Unknown
  Obtained from environmental sample
  misc_feature (1)..(567): n is a, c, g, or t
atgcgttgttcaaaacatttttcggatattataaaaaaagatttggaatggcttggttttgaatggcaaagcgagagcattcaaagcgagagatatgaaatttatgaaaagtattttgaaatgttgcagaaaaaaaatntgctatatgaattctacaaaaccgataaaccaaaaattatgctgaaaaatccagaaggcgaagattttgccattaaagatgctttggaacaatggacataccagtttgccgttgttattgacgattttgaagagggcatagatttgattgtgcggggcgaagatttgaaagattccgttgataagcaaataacccttgcaaaaatcataggcagaacagagatgccgatattcattcaccactccctcatttacgattcaaacggaaaaaaactgagcaagagagacggctcagacggaatttgcagggagagagaaaacggagtttcaccaaaaaaggttttaagcgaaatttgccgccttatgttgccggataaggatattccagaggagattgggtgggaagaggctatcctcattcagttataa

SEQ ID NO: 9374 - protein, 188 aa, Unknown
  Obtained from environmental sample
  DOMAIN (2)...(187): tRNA synthetases class I (E and Q), catalytic domain
  misc_feature (1)..(188): Xaa is any amino acid
MRCSKHFSDIIKKDLEWLGFEWQSESIQSERYEIYEKYFEMLQKKNXLYEFYKTDKPKIMLKNPEGEDFAIKDALEQWTYQFAVVIDDFEEGIDLIVRGEDLKDSVDKQITLAKIIGRTEMPIFIHHSLIYDSNGKKLSKRDGSDGICRERENGVSPKKVLSEICRLMLPDKDIPEEIGWEEAILIQL

SEQ ID NO: 9375 - DNA, 945 bp, Unknown
  Obtained from environmental sample
  misc_feature (1)..(945): n is a, c, g, or t
ttgaaattaagcgaatcgggtattcccgattttaaatttacggaatttccaccagtaagccgtactgaaaggttaaatctggaaaaacagttgatcggtttttatttttcaggtcatccgttagatgaatataaagaaatctggcaggatgtagtgaccgtgaatctgggacaaattgacacttctaaaataggaggctgcgttcttattggaataattaaaaatataaagcaaataaataccgcaaaaggcggcaagatggcatttgcgacacttgaagattacaacggcgaaattgaagtcacttttttttcaggtccgtgggaaaggtgccagaatattatcaaggaggattccgtcatcatattaaaaggaaaaattgattatcaaaaagataaagacaagtacagtttccttgccgatggcgttataagcaaacaggaagttacgtccgtagtaaaagaagttaaagaacttgatgaaaaaaataaattgcataaaaacacatggctttacatggcggatttaaaaagctcatatattatgcaggcaaaaaaaggcaattatacggttataggttacttaaaatcgatcagggattataaggatagaaaaggaaacgacatggcgtttgggacattacaggattttgaaggtgaaatttcccttgtatttttttcaagagtgtatgccgaatgccgccatctgcttaagcttgatgagatgatcgctttaaagggaagcatagacccggaaaatgaacaaaaacccggacaggtaagttttaaagtttcaagcatggctgatttgccgtttttaagccgtaacgcctcananaaagcagccgcaaacgagaaactgccggtgcccgatcttgtaaaaaacaacgaaagacatcctgatgaaatacacataaaactgcataaaaggcgcttcggaatataa

SEQ ID NO: 9376 - protein, 314 aa, Unknown
  Obtained from environmental sample
  DOMAIN (189)...(270): OB-fold nucleic acid binding domain
  misc_feature (1)..(314): Xaa is any amino acid
MKLSESGIPDFKFTEFPPVSRTERLNLEKQLIGFYFSGHPLDEYKEIWQDVVTVNLGQIDTSKIGGCVLIGIIKNIKQINTAKGGKMAFATLEDYNGEIEVTFFSGPWERCQNIIKEDSVIILKGKIDYQKDKDKYSFLADGVISKQEVTSVVKEVKELDEKNKLHKNTWLYMADLKSSYIMQAKKGNYTVIGYLKSIRDYKDRKGNDMAFGTLQDFEGEISLVFFSRVYAECRHLLKLDEMIALKGSIDPENEQKPGQVSFKVSSMADLPFLSRNASXKAAANEKLPVPDLVKNNERHPDEIHIKLHKRRFGI

SEQ ID NO: 9377 - DNA, 597 bp, Unknown
  Obtained from environmental sample
  misc_feature (1)..(597): n is a, c, g, or t
atgataggcaggcttaggggagagctggtccaaaagaccacggggggcgcgctggtggagtgcggcggagtgggctacgcctgctcaatatcactggccacttacgggtcgctgcccgacgaggggcgcgaagtgacgctcttcgtcgagacccttttgagggaaaacgacctgagcctcttgggctttgcaagcgaaagggagagaatcctctaccgcctgctggtcaaggtggacggggtggggccgaagctggctctggcggccctgggcgccctgccgatggaggacctcatatccgcaatcagggggcgcgacacaaaggcccttacgcgcatccccggcgtgggcaaaaagacggccgaaaaaatctgtttcgagttaagcgaaaagctgggcggactttcaggccttgacggcctttccggcaacgcggttcctgttgattcttgggaatcagacctcagctccgcgctcacgaacctgggattcaaagacgaagccgttgtgccgctgttggcgcagttcaagcaaggcgccgatagaccacacttggcggacgcgatacgcatttgcctgaagtcactgcggcgctga

SEQ ID NO: 9378 - protein, 198 aa, Unknown
  Obtained from environmental sample
  DOMAIN (150)...(197): RuvA, C-terminal domain
  misc_feature (1)..(198): Xaa is any amino acid
MIGRLRGELVQKTTGGALVECGGVGYACSISLATYGSLPDEGREVTLFVETLLRENDLSLLGFASERERILYRLLVKVDGVGPKLALAALGALPMEDLISAIRGRDTKALTRIPGVGKKTAEKICFELSEKLGGLSGLDGLSGNAVPVDSWESDLSSALTNLGFKDEAVVPLLAQFKQGADRPHLADAIRICLKSLRR

SEQ ID NO: 9379 - DNA, 474 bp, Unknown
  Obtained from environmental sample
  misc_feature (1)..(474): n is a, c, g, or t
gtgttgggatatagaacccagggggagaattcaaaagccgcgtggtataaagaagaagtaggaaatgccgttaaggtggcaaacaaattaaaagaactgggctggcgttttgcgtcgcatagctatggacatttgaatatgcccaaagtatccatgaagcggtttatcaatgacgctcaattatgggataaagaagtgagaccgattttgggcgagacagacctttacatatatccctatggagcgaatctgggaaaacaggaggagaagcataaaatactgcgtgacagaaattttatggtattctttggcgttggcaacggatggggttacaaggtcggcccgagatcagactatatttttttaacccgcaggaatattgacggcacttatttcagggcatacagatacagcagcaaacaactatttgatattgataaagtaatggataaggaaaaccggggcatcaggtaa

SEQ ID NO: 9380 - protein, 157 aa, Unknown
  Obtained from environmental sample
  misc_feature (1)..(157): Xaa is any amino acid
MLGYRTQGENSKAAWYKEEVGNAVKVANKLKELGWRFASHSYGHLNMPKVSMKRFINDAQLWDKEVRPILGETDLYIYPYGANLGKQEEKHKILRDRNFMVFFGVGNGWGYKVGPRSDYIFLTRRNIDGTYFRAYRYSSKQLFDIDKVMDKENRGIR

SEQ ID NO: 9381 - DNA, 429 bp, Unknown
  Obtained from environmental sample
  misc_feature (1)..(429): n is a, c, g, or t
atgttgggatttttacagatattagcttttactattattggcgctattctgctctggttcggttttaatcttttcatcggacaatgggcaagaattcgctcaaaatacgaccagctccggcgagcatcaaaagggtttggatccgccggtgacccccaggtttgcccgatttgttcttcaagactcaacaaaggcgatttggtgagaaccctggcttttccttcgataaccggaggcaaagaccgtctgatgcatatccggggttgcatctactgcgttaatgggggcctgaaacgggaatgtcccgtctgcggttcacccctcagtatcaccgatgtattggtagcccgcatatttgagcgcccccattttcgcgcccatgtccatattgccggctgtaataaatgcagacgcacaggcctaatttaa

SEQ ID NO: 9382 - protein, 142 aa, Unknown
  Obtained from environmental sample
  misc_feature (1)..(142): Xaa is any amino acid
MLGFLQILAFTIIGAILLWFGFNLFIGQWARIRSKYDQLRRASKGFGSAGDPQVCPICSSRLNKGDLVRTLAFPSITGGKDRLMHIRGCIYCVNGGLKRECPVCGSPLSITDVLVARIFERPHFRAHVHIAGCNKCRRTGLI

SEQ ID NO: 9383 - DNA, 918 bp, Unknown
  Obtained from environmental sample
  misc_feature (1)..(918): n is a, c, g, or t
atgtttgttggcgagcgaagccaccatgcccgcggccgccgcctcgttcatcttcagcagggcgccgattttcatgagcggttcgccgaaccagcgggtgatcagaaacaccatggggtaggcgccgaggagcacgcaggcgatcttgccgatcacttccatggcgcggatgtcgcccgcagcgaccgcgggatcggagaaaatcggatcaagccccggaatgagggcgatgcccagttggtctttgaacacggcgacggcaagacccaccgtgatgacgcccacgagtatcttggcgaaaatctgaaagccggagatcagcgcttccggcacgaatttcaagccgagcgcgatgagcagcgccacgatgatcacggggatcatgttgagaaagatcatggagagggtgaagttgaccggctgcccatcaatgacgacgcccgacgccatggccacaagcccgccggctatgcagccgatcggcacggtgacgatgccggccaggatgcccatggcgagaaagcggcggtcggccttgtcaatgatgccaagccccacggggatggaaaacacgatggtggggcccatcatggagccgaggatcacgccggcgtacatccaggccgccgtgtcgcccccggccagttccttggccagcgggaacccgcccatgtcaatggcgagcagcgtggtcgcgaacatggccgggttggcgccgagcgccttgtatacgggcgtgacgatgacgccgagcagactcgccagcaccggggccagggcgatgaccccgaccatggccagggcaagcgcgcccatcgccatgaagccttcctcaaactgtttgcccgccccgccgattgcccggccaagaaagcccagaccgatcttgccgagcacctcctcggcgccgccgaatga

SEQ ID NO: 9384 - protein, 305 aa, Unknown
  Obtained from environmental sample
  misc_feature (1)..(305): Xaa is any amino acid
MFVGERSHHARGRRLVHLQQGADFHERFAEPAGDQKHHGVGAEEHAGDLADHFHGADVARSDRGIGENRIKPRNEGDAQLVFEHGDGKTHRDDAHEYLGENLKAGDQRFRHEFQAERDEQRHDDHGDHVEKDHGEGEVDRLPINDDARRHGHKPAGYAADRHGDDAGQDAHGEKAAVGLVNDAKPHGDGKHDGGAHHGAEDHAGVHPGRRVAPGQFLGQREPAHVNGEQRGREHGRVGAERLVYGRDDDAEQTRQHRGQGDDPDHGQGKRAHRHEAFLKLFARPADCPAKKAQTDLAEHLLGAAE

SEQ ID NO: 9385 - DNA, 462 bp, Unknown
  Obtained from environmental sample
  misc_feature (1)..(462): n is a, c, g, or t
ttgtccggcagcacgatctggctcaatgcggagcggctgcccatccgcaacgttcctgttctgcaatccgggctggaatggaagcgcgccgcgccggatcagcttgcgcggtcgtggtccgccgccgcgaaacgcatggatctcgaccctgtcgcggatttgtacgccctggccatccccggcgacatgccggcggcgtataaggaagtgctcgccgtgagccttgccttgcggcagttcaacgagcatcaccccaacagggagcatccgctcattgtcatcgccaggcaggatttcggcaaagcgctgggcatggaattgcagccgcagttggcaggccgggaacttgcggtcattgacgaggttgaaacccgcgacggggattatgtggatatcggaaaaccgtttttcggcggggagatcgtcccgctcaccgtcaagtcgttggcctttccggcctag

SEQ ID NO: 9386 - protein, 153 aa, Unknown
  Obtained from environmental sample
  DOMAIN (1)...(152): Ethanolamine utilisation protein EutA
  misc_feature (1)..(153): Xaa is any amino acid
MSGSTIWLNAERLPIRNVPVLQSGLEWKRAAPDQLARSWSAAAKRMDLDPVADLYALAIPGDMPAAYKEVLAVSLALRQFNEHHPNREHPLIVIARQDFGKALGMELQPQLAGRELAVIDEVETRDGDYVDIGKPFFGGEIVPLTVKSLAFPA

SEQ ID NO: 9387 - DNA, 531 bp, Unknown
  Obtained from environmental sample
  misc_feature (1)..(531): n is a, c, g, or t
atggaccgcgatccgcacgggaacgtacaggtttcgctgatcgagacggaaaaactcctcatcggcatggtgaagaaaaaactccacgatctaaagacctcgggagcctataagggaaaattctccgcccttgcccatttcttcggctatgagggaaggtgcgccttcccctccaactttgactccgactactgttattccctgggttacagcgcctttgtgttaatcgccgagggccttaccggctatctttccagcgtgcggaacctgacggccaaagcttccgaatggactgccggcggcgttcctataaccatgatgatgaacatcgagcagcgccacggcgagggaaaacccgtcatcaagaaagcccttgtcgaactggacagcaaacccttcaagaccttcaaagcaatacgcgacgaatgggccgtgaagaccagctttaaagtacccggctccatacagtatttcggcccgcccgaagtctgcgacgaaccgacaattacgttgaagctggaaaaaaattag

SEQ ID NO: 9388 - protein, 176 aa, Unknown
  Obtained from environmental sample
  misc_feature (1)..(176): Xaa is any amino acid
MDRDPHGNVQVSLIETEKLLIGMVKKKLHDLKTSGAYKGKFSALAHFFGYEGRCAFPSNFDSDYCYSLGYSAFVLIAEGLTGYLSSVRNLTAKASEWTAGGVPITMMMNIEQRHGEGKPVIKKALVELDSKPFKTFKAIRDEWAVKTSFKVPGSIQYFGPPEVCDEPTITLKLEKN

SEQ ID NO: 9389 - DNA, 789 bp, Unknown
  Obtained from environmental sample
  misc_feature (1)..(789): n is a, c, g, or t
ttgagtgagcaggcccttttcaacggcttttgccttgatgacaacagggtctatgccctngccgtcgtcttcgatctcaactacaacgctgtcgccttcgtgcctagcgcgcagcaccaccagacccgtctcaggtttgccggcggctttgcggacttcgggaagttctatcccgtggtccgccgagttgcggatgaggtggatcagtgggtcgccaagctcttcgatgaggctcttgtcaatttcggtctcttctccgaccatctgcagttcgatctttttgccgcttccctttgccaagtccctaagcatgcgcgggaatttgctaaacacggatttgaccggcaccatgcggatgctcatgaccgaggcctgtatctctttggacacttgatccaaagacgtgctggctctatggagttcggcgaccagcgccgcaacggcgtcgccgaaattggaaccctcaaattgttccactacgtggttgaccatcgttttgctcatgatgagttcgccaacaacgttcatgaaagtgtccaattttgcttggctgacgcggattgtgtccgcgctcttgtcgggcttggcagcaccgcccgcagccgaatcggctgggtgcagcccgccgccatctgcgggcggatgggtcgctgctgcggctgggggtgccgctgctgcggccgctggtggcggcgccgctggcggcgggggagctttggccgttgctacagggccggctgcactgaatgtcagttcttctaccatgccatctcccttaaagtgaaatag

SEQ ID NO: 9390 - protein, 262 aa, Unknown
  Obtained from environmental sample
  misc_feature (1)..(262): Xaa is any amino acid
MSEQALFNGFCLDDNRVYALAVVFDLNYNAVAFVPSAQHHQTRLRFAGGFADFGKFYPVVRRVADEVDQWVAKLFDEALVNFGLFSDHLQFDLFAASLCQVPKHAREFAKHGFDRHHADAHDRGLYLFGHLIQRRAGSMEFGDQRRNGVAEIGTLKLFHYVVDHRFAHDEFANNVHESVQFCLADADCVRALVGLGSTARSRIGWVQPAAICGRMGRCCGWGCRCCGRWWRRRWRRGSFGRCYRAGCTECQFFYHAISLKVK

SEQ ID NO: 9391 - DNA, 807 bp, Unknown
  Obtained from environmental sample
  misc_feature (1)..(807): n is a, c, g, or t
atgttaggcaactggtctttgggggactactttaaagaagaagcgattaaaatgagttttgaatttcttacttcccctcagtggctgaatattccggttgaaaaattgggagtgacggtttttaagggcgagggcgatgtcccaagagacgatgaatctgcggcaatttggaaacagttgggaatccctgaaaaccgtatcgcttatttgccaagagaagataattggtggggacccgccggaaccacaggtccttgcggtcccgatactgaaatgttttattacataggcgacgcgccttgcggtcccgattgcaaaccgggctgttcctgcaaaaaatggctggaaatctggaacgatgtttttatgcagtacaacaaaaacgcatcgggcggttatgagccgcttacgcgaaaatgcgtagatacgggcatgggcattgaaagaactgtaaccgttcttaacggcaaaaaaagcgtttacgataccgatattttcgcgcctgttatcgcggcgattgaagcggcatcgaacggctgcaagtacggacaggataacgataaagattattcgatacggattatagcggatcatgtgcgctccgcgacttttattttgggagacccaaaggcggtaagcccttccaatgtgggagcgggttatgttctgcgtcgtttgatacgccgcgccgtccgccacgggcgaaaacttaacaacgagaagttcagtctttctccaatcgcgcaggttgttgtggaacagctaanaggcgcttatccggaacttgaacaaaccgcgcttttataa

SEQ ID NO: 9392 - protein, 268 aa, Unknown
  Obtained from environmental sample
  DOMAIN (1)...(268): tRNA synthetases class II (A)
  misc_feature (1)..(268): Xaa is any amino acid
MLGNWSLGDYFKEEAIKMSFEFLTSPQWLNIPVEKLGVTVFKGEGDVPRDDESAAIWKQLGIPENRIAYLPREDNWWGPAGTTGPCGPDTEMFYYIGDAPCGPDCKPGCSCKKWLEIWNDVFMQYNKNASGGYEPLTRKCVDTGMGIERTVTVLNGKKSVYDTDIFAPVIAAIEAASNGCKYGQDNDKDYSIRIIADHVRSATFILGDPKAVSPSNVGAGYVLRRLIRRAVRHGRKLNNEKFSLSPIAQVVVEQLXGAYPELEQTALL

SEQ ID NO: 9393 - DNA, 300 bp, Unknown
  Obtained from environmental sample
  misc_feature (1)..(300): n is a, c, g, or t
atgagcgggcaagggccttttatgaacaaactaaaagccatggccgaggaacaggtattggagtaccttgaacgggccattaaagatttgcaggctctccaccggacgctgaccgctcttgatgaatatttcaaggccagcgtaccaagagaagaacgtgaccagataaaaggaattaaacctgaattggcttctgtcaaaaattgttttgtcaaggcaaaccagattcggcacgaatacagcgctcagaaagaagaagaagaacagatgagaaaattgggcattaatcccgatgattaa

SEQ ID NO: 9394 - protein, 99 aa, Unknown
  Obtained from environmental sample
  misc_feature (1)..(99): Xaa is any amino acid
MSGQGPFMNKLKAMAEEQVLEYLERAIKDLQALHRTLTALDEYFKASVPREERDQIKGIKPELASVKNCFVKANQIRHEYSAQKEEEEQMRKLGINPDD

SEQ ID NO: 9395 - DNA, 492 bp, Unknown
  Obtained from environmental sample
  misc_feature (1)..(492): n is a, c, g, or t
atggatcgatatggggtagctccaaaaaaaatcgtatacgctattattctctgtattatcattttttccggctgtgcgtccgtaaaatcagcgccacagcaggctgaaacagacgcttttgatcttccgtccgcgccggataggccggaatttgccgaaagccgcccccgcgtacagacccgtgacgagcttaccgttaccttttccaaaaacgaggtagaactggatttccgcaaatcgtttctggcaagcgaggcgcagttattcaccgcgatttacgaggggcttttttcatatcatccttttaccatggaacctattcccgccgcggcggaaaaatgggagctttcagaagataaaaagcagtggacatttacgataaggcagaacgcgaaattctggaatggggatccgctcagggcgaaagatttcgcgccgcgtggctntcgatgctgtcgccgcagcgtgacgctccctatttcagcctgttga

SEQ ID NO: 9396 - protein, 163 aa, Unknown
  Obtained from environmental sample
  SIGNAL (1)...(30)
  misc_feature (1)..(163): Xaa is any amino acid
MDRYGVAPKKIVYAIILCIIIFSGCASVKSAPQQAETDAFDLPSAPDRPEFAESRPRVQTRDELTVTFSKNEVELDFRKSFLASEAQLFTAIYEGLFSYHPFTMEPIPAAAEKWELSEDKKQWTFTIRQNAKFWNGDPLRAKDFAPRGXRCCRRSVTLPISAC

SEQ ID NO: 9397 - DNA, 906 bp, Unknown
  Obtained from environmental sample
  misc_feature (1)..(906): n is a, c, g, or t
atgcgggaaaacctgaactatcggaccgacagttcttggtggtacgccgacagcaattcctattgcggccaatacggccgcctatacgcttggaacgcggcgatgtccgcttgcccctccggctggcacttgccgttaggttgggagtgggacagtctggcgctggaggtaggaggccaaaagccgaccaatacgcaaacgcaaagtaacacttggcgcgatgtcggtaaggtattgaaagcgaaaaacggttggaaaaaatggcgccacaccagcggcaacggaacggatgaattcggcttttccgccctgcccggcggccaccgcgctttcgccggcggcgcatacaacaacgccggatactacggatattggtggacgaacgcgaaatataataaaaacaacgccttcgcccgtaccatggattacgacagcggtcatctattcaatgaaatgggaaacatccgctacggctattccgtgcggtgcatcaaagacgaggatccggaaaaaatacaaagaaaaaaggatgaggaacagaggaaaaaggacgaggcgcagagaaaaattgacgaagagcggacaaggattgagaaggtatccacctattttaccgattcgcgggacggccgcaagtatcgcgccgtaaaaataggcgataagacgtggatggccgagaatctgaattttcggcccaaaacatggggtaactcttggtgctataataatgatacttcccactgcaacagatacggccggctgtatgattggagcacggcgaagaaagtttgcccgccgaagtggcacctgccgtctcgcggggagtgggcggagttgggaaaagncggtagggagcgaaagaagaaccttcgacaacggcactgtagactggtacggcgcgggtag

SEQ ID NO: 9398 - protein, 301 aa, Unknown
  Obtained from environmental sample
  misc_feature (1)..(301): Xaa is any amino acid
MRENLNYRTDSSWWYADSNSYCGQYGRLYAWNAAMSACPSGWHLPLGWEWDSLALEVGGQKPTNTQTQSNTWRDVGKVLKAKNGWKKWRHTSGNGTDEFGFSALPGGHRAFAGGAYNNAGYYGYWWTNAKYNKNNAFARTMDYDSGHLFNEMGNIRYGYSVRCIKDEDPEKIQRKKDEEQRKKDEAQRKIDEERTRIEKVSTYFTDSRDGRKYRAVKIGDKTWMAENLNFRPKTWGNSWCYNNDTSHCNRYGRLYDWSTAKKVCPPKWHLPSRGEWAELGKXGRERKKNLRQRHCRLVRRG

SEQ ID NO: 9399 - DNA, 726 bp, Unknown
  Obtained from environmental sample
  misc_feature (1)..(726): n is a, c, g, or t
atggcgctggggacggaatctattccccgcgtcgatgtaattgccgggcctggaaataaatacgtggcggcggccaagcggcttttatacggcgaagtgggaattgattttatcgcggggccgtctgatgtgcttattgttagcgataattccacaacgaaagacatagcgcaaaacgccaatttaatcgctgctgatatgatcgcccaagcggaacacgatcctgacgcgcgcgccagggcgttgattccgaacagggagcttgcggacaaaattgccgaggctgttgaagtacagctcgctaaacttccaacggcagaaaacgcccgctcttcacttgaatcaggcggccttatcgtcgtttatgaaggaaaagaggaagccgttcgcattgcaaacgccatcgcccctgaacatctggaacttcatgtaacagatcctgattgctggatcccaaaattaaaaaactacggttcacttttttctggcgctctttcggcggaagtcctgggggattattccgccggaattaaccatacgcttcccacttcgggaagtgcccgctttacaggcgggctctccgtcaggcattttctaaaaaccgtcacaactttgcgctgtacttcaggcgaaggttttgaaaaaacccgcaaagcggcggaaattcttgccgccgccgaagggctgccaggccatgcccaaagcgccgcaataaggaaagcttaa

SEQ ID NO: 9400 - protein, 241 aa, Unknown
  Obtained from environmental sample
  DOMAIN (1)...(241): Histidinol dehydrogenase
  misc_feature (1)..(241): Xaa is any amino acid
MALGTESIPRVDVIAGPGNKYVAAAKRLLYGEVGIDFIAGPSDVLIVSDNSTTKDIAQNANLIAADMIAQAEHDPDARARALIPNRELADKIAEAVEVQLAKLPTAENARSSLESGGLIVVYEGKEEAVRIANAIAPEHLELHVTDPDCWIPKLKNYGSLFSGALSAEVLGDYSAGINHTLPTSGSARFTGGLSVRHFLKTVTTLRCTSGEGFEKTRKAAEILAAAEGLPGHAQSAAIRKA

SEQ ID NO: 9401 - DNA, 738 bp, Unknown
  Obtained from environmental sample
  misc_feature (1)..(738): n is a, c, g, or t
ttgtcgattcagctccgttacggacacaggagcagggcggctatggaaaagctcctgggcaaaattgaaaggcttgcgggtttttcgctcaggggccgaaaagagcttccgtttgtggaacgtttgcggcagtgcagggagcgtatccttgaagtgaacgaaacccggtatcacattgaggctgatccgtccttttcctttgaggggcggcttgaccgggtgattgccgctgcgctggaaaccgccgagcggatgcttggcctgaaaagcgaaggcgaattgtttccgaggatgtatcggctgcgccagatatgctgggaccggattgtcctgccgggcatagacagcctgaaagatatgccgcccgttgatcgcggcgcggcggatcttctcgcgggggaagcctggcatatcgggcggcatcaggaactggtggatttctgctggtactttcgcgttccgcttccggccgaagactcaactttgcacgaccaggttgagtatgtgcagaacctttgggattttgccaaccgtactatgggcggcgcgtttgccgacaggataaccatagctccccggaaaattattatccatgccgagccggttatcaatctgaccgagcgccttccttcttatcagaaggataaaaaggccgccgtcgcgcaggcgctggccgatctggaaaaggcatacttaaatagtgttaatgaaataaacaggcttgaaccgggaggataa

SEQ ID NO: 9402 - protein, 245 aa, Unknown
  Obtained from environmental sample
  misc_feature (1)..(245): Xaa is any amino acid
MSIQLRYGHRSRAAMEKLLGKIERLAGFSLRGRKELPFVERLRQCRERILEVNETRYHIEADPSFSFEGRLDRVIAAALETAERMLGLKSEGELFPRMYRLRQICWDRIVLPGIDSLKDMPPVDRGAADLLAGEAWHIGRHQELVDFCWYFRVPLPAEDSTLHDQVEYVQNLWDFANRTMGGAFADRITIAPRKIIIHAEPVINLTERLPSYQKDKKAAVAQALADLEKAYLNSVNEINRLEPGG

SEQ ID NO: 9403 - DNA, 516 bp, Unknown
  Obtained from environmental sample
  misc_feature (1)..(516): n is a, c, g, or t
ttggaaaagcgggacggtcttatgcttgggatttgtaacggttttcaggctcttatcaaaacaggacttgtgccctatggccgtatcatgcccttaacggatgcggctcctacactcactttcaacacactgggacgccacgtgtcccggatggtacgtaccagggtaatgcagaacatctccccctggctcagccttgaggaaccaggcagcatacacgtgataccggtaagccacggcgaaggccgcctggttattcaggacggggaggccgatgccctgttcgccagcgggcaggttcctttctgttacgctgatgctgaaggaaaagcgacaatggcggaacctgataatcccaacggttctgctttcgccatagagggccttaccaattccgatggcaggatacttggcaaaatggcgcactcagagcgctgcggggaatttgtccatatcaacattccgggaaacaaacgccaaaagatcttcgaagcaggggtcaggtattttagataa

SEQ ID NO: 9404 - protein, 171 aa, Unknown
  Obtained from environmental sample
  misc_feature (1)..(171): Xaa is any amino acid
MEKRDGLMLGICNGFQALIKTGLVPYGRIMPLTDAAPTLTFNTLGRHVSRMVRTRVMQNISPWLSLEEPGSIHVIPVSHGEGRLVIQDGEADALFASGQVPFCYADAEGKATMAEPDNPNGSAFAIEGLTNSDGRILGKMAHSERCGEFVHINIPGNKRQKIFEAGVRYFR

SEQ ID NO: 9405 - DNA, 879 bp, Unknown
  Obtained from environmental sample
  misc_feature (1)..(879): n is a, c, g, or t
ttgcaggctcatcttcgatttgacgagatcaaggtgcacgccaagctgtgcctcatcacccgcaaagacgcgggggagatacaatatatcacgcaggtggggaccggcaactacaacgagatcaccgccgagttctacaccgacctcacgctcatcaccgccgaccaaaagataggcgcggaagccaaccgcttcttcaggaacatggccgtggcgcacctaaacgacaactacgaatatttattggtcgcgccggccaatctcaaaagcggcgtctcggcgctgatagacgagcagatcgcgcttggggaaaaagggcgcataattatgaagctgaactccatgacggatatagacataatacaaaagctctcggaggcctcctgcgccggcgtgaagatagacttgatcatacgcggcatctgctgcctgatacccggactgcccggcgccacggagaacatatcggtcataagcatagttggccgcttcttggagcactcgcgcgtctacagcttcggcgtaggcgcggcgcaaaagatctacatagcctccgccgacatgatgacgcggaacacgacgcgccgcgtcgaggtggccgccccgatattaaacgagcagataaaggcgaccataaataagatgatcgatacggaactatgcgacaacgtgaaagcgcgccgcctgcgcagcgacgggtactacgaaaaaatacatagcgacggcgagagtgtggacagccaagaactgctgataaaggaagcggcgcaacgtttggaactcgcccggcggcaggagatgaccgtgacggacaaaaaaaaaagcgtggtgcgttccacgctcaaggattggctggggcggcttacggattggatgtga

SEQ ID NO: 9406 - protein, 292 aa, Unknown
  Obtained from environmental sample
  DOMAIN (1)...(257): Polyphosphate kinase
  misc_feature (1)..(292): Xaa is any amino acid
MQAHLRFDEIKVHAKLCLITRKDAGEIQYITQVGTGNYNEITAEFYTDLTLITADQKIGAEANRFFRNMAVAHLNDNYEYLLVAPANLKSGVSALIDEQIALGEKGRIIMKLNSMTDIDIIQKLSEASCAGVKIDLIIRGICCLIPGLPGATENISVISIVGRFLEHSRVYSFGVGAAQKIYIASADMMTRNTTRRVEVAAPILNEQIKATINKMIDTELCDNVKARRLRSDGYYEKIHSDGESVDSQELLIKEAAQRLELARRQEMTVTDKKKSVVRSTLKDWLGRLTDWM

SEQ ID NO: 9407 - DNA, 594 bp, Unknown
  Obtained from environmental sample
  misc_feature (1)..(594): n is a, c, g, or t
gtgcctcatcacccgcaaagacgcgggggagatacaatatatcacgcaggtggggaccggcaactacaacgagatcaccgccgagttctacaccgacctcacgctcatcaccgccgaccaaaagataggcgcggaagccaaccgcttcttcaggaacatggccgtggcgcacctaaacgacaactacgaatatttattggtcgcgccggccaatctcaaaagcggcgtctcggcgctgatagacgagcagatcgcgcttggggaaaaagggcgcataattatgaagctgaactccatgacggatatagacataatacaaaagctctcggaggcctcctgcgccggcgtgaagatagacttgatcatacgcggcatctgctgcctgatacccggactgcccggcgccacggagaacatatcggtcataagcatagttggccgcttcttggagcactcgcgcgtctacagcttcggcgtaggcgcggcgcaaaagatctacatagcctccgccgacatgatgacgcggaacacgacgcgccgcgtcgaggtggccgccccgatattaaacgagcagataaaggcgaccataaataa

SEQ ID NO: 9408 - protein, 197 aa, Unknown
  Obtained from environmental sample
  misc_feature (1)..(197): Xaa is any amino acid
MPHHPQRRGGDTIYHAGGDRQLQRDHRRVLHRPHAHHRRPKDRRGSQPLLQEHGRGAPKRQLRIFIGRAGQSQKRRLGADRRADRAWGKRAHNYEAELHDGYRHNTKALGGLLRRREDRLDHTRHLLPDTRTARRHGEHIGHKHSWPLLGALARLQLRRRRGAKDLHSLRRHDDAEHDAPRRGGRPDIKRADKGDHK

SEQ ID NO: 9409 - DNA, 600 bp, Unknown
  Obtained from environmental sample
  misc_feature (1)..(600): n is a, c, g, or t
atgaaaaaaatatcaatcgtattatgtgtgatttttttattatcctcctgcgcgacaacaagcgttaaacgtataacgccgggcagccaaagtgatttaagcggctactggaacgccgttgacgttaaaattatctgtgaaagtttgattaacgattgtctttcaagcgcgagggtcaatcaggaaatcaaggcaaggggaagcaggaaaccggtggttattgtaggcaggtttaagaacgcaagcgacgaacacattgacacggaaattatttcctccactatggaaaatgtaatttttaacagcggcaagcttgattttgtagcgggcggcgatacaagaaacgcccttcgctctgaaaagcaggatcaactggggaacgcaagcgaagaaaccgcggcgcgtctgggaaatgaaactggcgcggattttatgcttacaggttcgttaagaacaatagttgacagggagggaaaccgcagtattagaacttattttgttacagcggaacttaccaatcttgaaaccaatgtaagattgtggatgggtcaggataattctattacaaaagttgttacaagaccaaaaaacaaactctag

SEQ ID NO: 9410 - protein, 199 aa, Unknown
  Obtained from environmental sample
  SIGNAL (1)...(23)
  misc_feature (1)..(199): Xaa is any amino acid
MKKISIVLCVIFLLSSCATTSVKRITPGSQSDLSGYWNAVDVKIICESLINDCLSSARVNQEIKARGSRKPVVIVGRFKNASDEHIDTEIISSTMENVIFNSGKLDFVAGGDTRNALRSEKQDQLGNASEETAARLGNETGADFMLTGSLRTIVDREGNRSIRTYFVTAELTNLETNVRLWMGQDNSITKVVTRPKNKL

SEQ ID NO: 9411 - DNA, 594 bp, Unknown
  Obtained from environmental sample
  misc_feature (1)..(594): n is a, c, g, or t
ttgccgatcattgtcagccgttttattaaaaatgccgtttttaacacgccttatatcgcggcttttgtcacttatggaagcagtcccggagggacgcttgccgcggcgtgcagaattctgaaacggaaatacaaaggcggcgtcttttttggacgcattcccgccgtagaaaattacatagctatctttggccccccaaaagagaagaccgcgcggaaacggctggccatgcagcgtgaggcgacagatctggcggcccgcgccgttattgagcggcgtacaaacaaaataaataccatccgccccttatcggcttttatttcattgttgttctcgcttggcgcaaaaattttttataaaacctacaaagttgttgacgtgtgcaacggctgcggggtctgcgtgaaaatatgccctgtatcgtgcattacaatggttgacaaccgtccgcggttttccggaaaatgcgaacattgtaacggctgccttaactggtgcccgcaaaaggctatacattttggacgtttgaaatcggacacagcccggtatcatcacccggaaatcagcgttaacgacttaacagggaacagataa

SEQ ID NO: 9412 - protein, 197 aa, Unknown
  Obtained from environmental sample
  DOMAIN (121)...(144): 4Fe-4S binding domain
  misc_feature (1)..(197): Xaa is any amino acid
MPIIVSRFIKNAVFNTPYIAAFVTYGSSPGGTLAAACRILKRKYKGGVFFGRIPAVENYIAIFGPPKEKTARKRLAMQREATDLAARAVIERRTNKINTIRPLSAFISLLFSLGAKIFYKTYKVVDVCNGCGVCVKICPVSCITMVDNRPRFSGKCEHCNGCLNWCPQKAIHFGRLKSDTARYHHPEISVNDLTGNR

SEQ ID NO: 9413 - DNA, 717 bp, Unknown
  Obtained from environmental sample
  misc_feature (1)..(717): n is a, c, g, or t
atggagctttcctcggcaaattcaattaatatcagccggttgattccccaggcggcctattacaccgcggctgctggccgcgccgcctctggctgtgctgtcggcataacgctctgcgttccttccggcaacttcggcaaccttactgccggattatacgccatgaagatgggcgcaccgataaaggcgttcatcgccgcgaccaacatcaacaaaacatttcccgattaccttgcgacaggcgaataccaggcccgtatctcacaggcaactatttccaacgctatggatgtgggagcgcccagcaactttgagcggatggcggcacatttttcgttagatgaaatgcggcggctcatactgggcgtttccgtatctgatgaggaaaccagggaaaccatcgtgaaagtacacggtgaaacaggctacttcctggacccgcacagcgcggtcggctggaagggcgtggacaaactgctcgctaaaaacaacccaaacagcaagctcttgtccgaagggccaatcggagtgctttccacggcgcacccggcaaaatttaatgaaaccgtcgagccgctgatcggccccgtgcccctgcccgactccctcgcctgcgcgatgaagcggaccgtgcaatcccaaaccattcccgcggaagtttccgcgttaatcgacatgctaaacagggaggccgcgtcctccagggaggacgaatga

SEQ ID NO: 9414 - protein, 238 aa, Unknown
  Obtained from environmental sample
  misc_feature (1)..(238): Xaa is any amino acid
MELSSANSINISRLIPQAAYYTAAAGRAASGCAVGITLCVPSGNFGNLTAGLYAMKMGAPIKAFIAATNINKTFPDYLATGEYQARISQATISNAMDVGAPSNFERMAAHFSLDEMRRLILGVSVSDEETRETIVKVHGETGYFLDPHSAVGWKGVDKLLAKNNPNSKLLSEGPIGVLSTAHPAKFNETVEPLIGPVPLPDSLACAMKRTVQSQTIPAEVSALIDMLNREAASSREDE

SEQ ID NO: 9415 - DNA, 969 bp, Unknown
  Obtained from environmental sample
  misc_feature (1)..(969): n is a, c, g, or t
ttgtctaggaagcttttagatccggcggttctttttttccttttgctggccgcctgttcagacccttctgcggaaggaacaggagagggttattttaccataagccttagcgccagtgaaaacacgaggacggtttaccctccgaccaacgctaacgaccttagattttcggtgaaattcaagaataccgtaagcggcgcggagaaaaccttcaactcgaatggaagcgggtcaatacagggcaaaatagatttaggaagctatatagtcacgatggacgtttcgcttatttcggatggcagcccttacgctcgtggcattgcttatgataatccgatagtaatagactcagggcaaaactcaattaaggtttatgcttatgacgtaaacaacgccgaaccgcctattataagcgccaaatcagagggagatacatacaccagtggagctacagttgcggctttaaccgttacagctttggtaaacgacgggggtttgctttcatatcagtggtacagtaatacaaccaatagcgtttccggcggtacagcaatcgacggcgcaatatcacccagctatatgccatccactgcaacgccgggaaccacctggtactatgtcattctcaagaacaccagctccggtaagcccacaacaataagcactgtccctgtcgccataattgttagttctggtacaggctcagcggatgacccattcctggtatacgatgtcgccagcctgcaaaaagtcggctccggaaccgacggctggacattggacgcgcattacaaacaaacagaggccatcgacttggcttcagtggcgaattggacgccgattggttcggaggcaacatgctttactggtagttatgacggaaacggtaagacaataagcaaccttactattnatgctcccactgaagattatcaaggtttgttcggcaaattagtgcttctacagtag

SEQ ID NO: 9416 - protein, 322 aa, Unknown
  Obtained from environmental sample
  SIGNAL (1)...(24)
  misc_feature (1)..(322): Xaa is any amino acid
MSRKLLDPAVLFFLLLAACSDPSAEGTGEGYFTISLSASENTRTVYPPTNANDLRFSVKFKNTVSGAEKTFNSNGSGSIQGKIDLGSYIVTMDVSLISDGSPYARGIAYDNPIVIDSGQNSIKVYAYDVNNAEPPIISAKSEGDTYTSGATVAALTVTALVNDGGLLSYQWYSNTTNSVSGGTAIDGAISPSYMPSTATPGTTWYYVILKNTSSGKPTTISTVPVAIIVSSGTGSADDPFLVYDVASLQKVGSGTDGWTLDAHYKQTEAIDLASVANWTPIGSEATCFTGSYDGNGKTISNLTIXAPTEDYQGLFGKLVLLQ

SEQ ID NO: 9417 - DNA, 414 bp, Unknown
  Obtained from environmental sample
  misc_feature (1)..(414): n is a, c, g, or t
atgtacggcaacaccagggctgctctggacgctgttatatggggaatcgaaaaagaaggcgtaccatacactctccaccgcgttcctgacgaaaatatctcttatgttcttgccgcggcttacaaatgttccggccttgttatagcaatgcctacttatgaatacgccgtctttcccccaatggcctacgcgctggacattttccggcgcaagcatattttcggcaagaaggccctccgcgtcggttcctggggctgggttggtggggcaaagaaagaatacgatgcagttcttgagaaccttaaatgggacagcgtagattcctatgaatgggcaggttatccaaatgaggcagattttgcgttcctggaagcaaggggcaaggagctggcccgaaaagtgaaagcgggctaa

SEQ ID NO: 9418 - protein, 137 aa, Unknown
  Obtained from environmental sample
  misc_feature (1)..(137): Xaa is any amino acid
MYGNTRAALDAVIWGIEKEGVPYTLHRVPDENISYVLAAAYKCSGLVIAMPTYEYAVFPPMAYALDIFRRKHIFGKKALRVGSWGWVGGAKKEYDAVLENLKWDSVDSYEWAGYPNEADFAFLEARGKELARKVKAG

SEQ ID NO: 9419 - DNA, 369 bp, Unknown
  Obtained from environmental sample
  misc_feature (1)..(369): n is a, c, g, or t
atgaccctggcgctgatggttctgggaggcaccgctgtttttaccggtattttcattctgggggccacggtgtgtttttttacgcttgaaggacttgaggtgatcaacatctttactgacggcggaagggaacttgccagctacccgctgccgatttacggcaagtggattgcccgcttcttcacgtttatcattccctttggctgcatgaactaccttccgcttctctacctcacaggccgcacccagggcgtcttcttgcctgcctgggtttatatgctcatgcccctactgggctttgtgttcatcctgccctgcgttttcgtctggcgctttggcgtaaggcactacagctccgcggggtcttga

SEQ ID NO: 9420 - protein, 122 aa, Unknown
  Obtained from environmental sample
  misc_feature (1)..(122): Xaa is any amino acid
MTLALMVLGGTAVFTGIFILGATVCFFTLEGLEVINIFTDGGRELASYPLPIYGKWIARFFTFIIPFGCMNYLPLLYLTGRTQGVFLPAWVYMLMPLLGFVFILPCVFVWRFGVRHYSSAGS

SEQ ID NO: 9421 - DNA, 867 bp, Unknown
  Obtained from environmental sample
  misc_feature (1)..(867): n is a, c, g, or t
atgaaaaaacagccaatagaattggctttaatgcttaattatatgaacttgttagagaattcacctatggtgtataatgtggatatgaaacctagaaaaacccttcccaagaccgcccttccgcggctctactttattgaccgtgaaattgcgtcgggtaaatatccaaacgctcccgcgctggcaaaaaaatatgagaccagtttgtccagcattaaccgcgacatagactatatgcgcaccatgatgaacgcgcccattgagtatgacttttttaagaaaggcttttactataccgagaaaacattcaggcttcccgccgcttacgccacagccgatgacttgctggctttgggcatggcgaaaaacctccttgatttatacaggaatacccccatacatgaagccgccctaaaccttctggaaaatattttaacgccgctgcattgcgaaccaaacaccggatggtttcttaaccgtattattatccctaaaacagcttcggcccctgtagacgcgcaggtatggaataacattgtaataggccttcgggaaaacagagtaattacttttcattacgaagacgccgaagccaaaagactttacaccagagagaaaacacaaaaacaaaaactggccgcccgccgtgttcatccttatcagcttatttttgaccgcagcaactggtatctgtatgcctttgatgaagacagaaaagaattaaggttattttcggttgcaagaatgaacaatgtcgcgctaaaagcggaaaactttgcgattaaaaaggactttgattaccgcagcatggaaggcataagttatttcggcatatacaagggggcgcagacactcggccgaatctga

SEQ ID NO: 9422 - protein, 288 aa, Unknown
  Obtained from environmental sample
  misc_feature (1)..(288): Xaa is any amino acid
MKKQPIELALMLNYMNLLENSPMVYNVDMKPRKTLPKTALPRLYFIDREIASGKYPNAPALAKKYETSLSSINRDIDYMRTMMNAPIEYDFFKKGFYYTEKTFRLPAAYATADDLLALGMAKNLLDLYRNTPIHEAALNLLENILTPLHCEPNTGWFLNRIIIPKTASAPVDAQVWNNIVIGLRENRVITFHYEDAEAKRLYTREKTQKQKLAARRVHPYQLIFDRSNWYLYAFDEDRKELRLFSVARMNNVALKAENFAIKKDFDYRSMEGISYFGIYKGAQTLGRI

SEQ ID NO: 9423 - DNA, 930 bp, Unknown
  Obtained from environmental sample
  misc_feature (1)..(930): n is a, c, g, or t
ttgtttatnntggttcaaccctgtgtttttgtcgtacagcctcatcancaggcggcggtttatcactttggaaaacttaaaccctcttccataaaagatccgggtcttcattttaagtttccctggccgatagataaaacggaaatatacgatgtccgccgcgtcgcttccatgcaaatcggttatgaggcgtcgggaaccgcgaattttttatggacgcaaaggcacgatgtcggcgagtatatgctgctgctcggcaacggcaatgaaatggcagcggtaaatttaaaaattgtgtatgtgatttccgatttatattcctatatcaaaaccagcgcaaacgcggaagccgtgttaagcgccgccgcttacaacgcgcttatgacgcgcacaatcaatactacgcttgattcgtttttaaacgtggacaggaattccctttcggcgtctcttatggacgagttgtcgcaattttgtaaatcggaaaaactggggctttccgtcgtgcagattgttattgaaaacatacaccccccggttgatatcgcggatgtttatcaaaatgttgtaagcgcttccgttgataaaaccacggcgattacaagggcgcaatcctatgcctcggcaagagtgatagaagcggcaaaacagggcaagttcgctattgacggagcaagggccatgcggtttagcaggacaagcgacgcccaaaaagaaacgtcggttttttacgccgcggcggacgcgtatagaatctctcccggctcttatgaattaaccaaaaaccttgacgtataccaaaaaattatcagcggtcataaagtgtatgtattttcacgcggcgcggaaaacggcatatcaaagtttattattggaaaagtaaacgctgtaaatctgccgagcgctgacaaaggagacggcaatgagtaa

SEQ ID NO: 9424 - protein, 309 aa, Unknown
  Obtained from environmental sample
  DOMAIN (8)...(207): SPFH domain / Band 7 family
  misc_feature (1)..(309): Xaa is any amino acid
MFXXVQPCVFVVQPHXQAAVYHFGKLKPSSIKDPGLHFKFPWPIDKTEIYDVRRVASMQIGYEASGTANFLWTQRHDVGEYMLLLGNGNEMAAVNLKIVYVISDLYSYIKTSANAEAVLSAAAYNALMTRTINTTLDSFLNVDRNSLSASLMDELSQFCKSEKLGLSVVQIVIENIHPPVDIADVYQNVVSASVDKTTAITRAQSYASARVIEAAKQGKFAIDGARAMRFSRTSDAQKETSVFYAAADAYRISPGSYELTKNLDVYQKIISGHKVYVFSRGAENGISKFIIGKVNAVNLPSADKGDGNE

SEQ ID NO: 9425 - DNA, 549 bp, Unknown
  Obtained from environmental sample
  misc_feature (1)..(549): n is a, c, g, or t
ttgatggcgagggatccgatttctcaatcctcaataaatacaaccgctaccaccagatcgcgttttgactatgcccagattgtttttggtcttaacctgcgcgcggaattcgccgtacatctgaccgaagaccttaacggcgacgacggctccgtgcgtaaccctttcatcggctggtcctttggttttgacaggcaattgccttggggaatttacgccaatgtgcagtgtaacgaaaccatacgccttttaaacggcaaggtgggaagtaaccccgtcatggactcggaagcggacaccgacgttacatccacccgcattaccatgcagctttccaaaaaatacctaagggacactcttgaaagcaaagtgtcaattatctgggatatagaaaattccggctgctatgtcatacccgccgttgtctggacaatgggagggctcagcgcggaactttccgccggtatttttgccggaaaggaaaaaggcgagcttggacagtactgggaaaacagctttatcagagtcggtcttaaatactcgttttaa

SEQ ID NO: 9426 - protein, 182 aa, Unknown
  Obtained from environmental sample
  misc_feature (1)..(182): Xaa is any amino acid
MMARDPISQSSINTTATTRSRFDYAQIVFGLNLRAEFAVHLTEDLNGDDGSVRNPFIGWSFGFDRQLPWGIYANVQCNETIRLLNGKVGSNPVMDSEADTDVTSTRITMQLSKKYLRDTLESKVSIIWDIENSGCYVIPAVVWTMGGLSAELSAGIFAGKEKGELGQYWENSFIRVGLKYSF

SEQ ID NO: 9427 - DNA, 930 bp, Unknown
  Obtained from environmental sample
  misc_feature (1)..(930): n is a, c, g, or t
atgcgcgaggctttctgtgggccctgtttcggcgcgggagacacccccgccaacaacgaactctcaatacgtcacgccacccggaatttccccanccgcgaaggctcgaaacccggcgagggtcagatcgcttcggtggcgcttatggacgcgcgttccatagcggctaccgccattaacaagggcaggatcacagccgcaacggagatacaggttccttttggcaagtacaagtttttctttgacaggagcgtgtacgacaagcgggtttataacggaacttcaaagcccctgcctcaaacagatcttgtacttggccccaacatcagggactggcccgcgatacccgtccttacggaaaacatccttatcaatatctgttgttttattaccgacccggtaactaccaccgatgagttaatcccctcaggcgagacatcttcataccggtcaaaccccttaaggctggcggaattcaccttaagccgcaaagaccccgcttatgttcaacgggctaaagatatacatgcccttgagcaagcgcgccaaaacaataagcaaaacccggaaatcgccgcgcttttcaataaaatccgggacattcccggctgcacaaatatcgatctttctgtgatcggcatcggcagcgcgatattcgcgcgtaaacccggcgatggttccgcccgcgagcaggccgcttcctgccagcgtgtattgggcgcgtcggcgaatttcgccctggaatacgctaccaagcgctaccgttccaaccttatcaactggggaatactcccctttattatcgccgatgagaaagcccttgactttaacagctggatttttattccgaacattcaaaaacatgtgcgggaaaaggctcagatgatcaaaggttatgtgttaggcggaaaatcatggaaatcgccgtaa

SEQ ID NO: 9428 - protein, 309 aa, Unknown
  Obtained from environmental sample
  misc_feature (1)..(309): Xaa is any amino acid
MREAFCGPCFGAGDTPANNELSIRHATRNFPXREGSKPGEGQIASVALMDARSIAATAINKGRITAATEIQVPFGKYKFFFDRSVYDKRVYNGTSKPLPQTDLVLGPNIRDWPAIPVLTENILINICCFITDPVTTTDELIPSGETSSYRSNPLRLAEFTLSRKDPAYVQRAKDIHALEQARQNNKQNPEIAALFNKIRDIPGCTNIDLSVIGIGSAIFARKPGDGSAREQAASCQRVLGASANFALEYATKRYRSNLINWGILPFIIADEKALDFNSWIFIPNIQKHVREKAQMIKGYVLGGKSWKSP

SEQ ID NO: 9429 - DNA, 735 bp, Unknown
  Obtained from environmental sample
  misc_feature (1)..(735): n is a, c, g, or t
ttgattttttccaaaagcaaaaatcagtctttgtccaatcaatttaccgtcgattttgacgagataaaaaaattgggcaaagagtacaatacggtaaactggggggggtatacacgtctgggattttcccccctgtggaacgataattttctcctttctgcggcaatgcttttcggcgcttcctttaaggacgcaaaccctttagcctgggacgctgcggcattggaaaaatcaatggtttttatcaataagtggacaaacgagattaataccagtactcaggctgaagacgattttactttcaggtacttttttgagccgcccgaaaaactgattcaaagcggtcgaattcttttttcttacatagagagcgacgaccttttcttaatgagcgaagaaagcaaaaatcagcttgatttccgctgggttatggaacaaaacaaaatcatggttgcggaaaaccttgtatatttaggtatgccgaaaagggttaaatccaaaagagcagcaaaagcgtttattgtctggttttttaattttgaaagccaacgccgtattttggagtatacaagggcaaacaggataaacgaaagtattttcggtatctgcgggggtttttcctcgttaaatgttgttaccgaacaaatctaccctcttttttaccccgaacttttgggaaggatgcccccgtcggatttttttacaataccgccattctgcccgccaactgggtga

SEQ ID NO: 9430 - protein, 244 aa, Unknown
  Obtained from environmental sample
  misc_feature (1)..(244): Xaa is any amino acid
MIFSKSKNQSLSNQFTVDFDEIKKLGKEYNTVNWGGYTRLGFSPLWNDNFLLSAAMLFGASFKDANPLAWDAAALEKSMVFINKWTNEINTSTQAEDDFTFRYFFEPPEKLIQSGRILFSYIESDDLFLMSEESKNQLDFRWVMEQNKIMVAENLVYLGMPKRVKSKRAAKAFIVWFFNFESQRRILEYTRANRINESIFGICGGFSSLNVVTEQIYPLFYPELLGRMPPSDFFTIPPFCPPTG

SEQ ID NO: 9431 - DNA, 543 bp, Unknown
  Obtained from environmental sample
  misc_feature (1)..(543): n is a, c, g, or t
atgaacgcccttgctgatattgtccggcagggaaaagcgttatatgcgggaatctcaaattacaacgctaaagaaagcgctgcggcaatttccgcactgcgttcccttggcgtcccctgcctgattcaccaggcgagttattccatgctgaaccgctggacggaagaagggcttcttgatgttttggaaagagaaggaacaggctgcatttgcttttcccccctggcgcaagggctcttaaccaacaggtatcttgacggctccatcccttctggctcaagggcctcaaaaggcgttttcctgaaagcgtctgtaataacggatgagcttctgaaaaagctgaacgcgctaaacgctgtagcacgggaaggaggcagaaccctggcaaccatggctatacgctggatcctgcgcgaccaacgcaatacctcggttcttgtcggtgccagctcttccgcccaattgaaagagaacctttcatcgttggcgcaagcgccgcttacagccgaggaactggaaaaaatagacaggattctttcttaa

SEQ ID NO: 9432 - protein, 180 aa, Unknown
  Obtained from environmental sample
  DOMAIN (1)...(180): Aldo/keto reductase family
  misc_feature (1)..(180): Xaa is any amino acid
MNALADIVRQGKALYAGISNYNAKESAAAISALRSLGVPCLIHQASYSMLNRWTEEGLLDVLEREGTGCICFSPLAQGLLTNRYLDGSIPSGSRASKGVFLKASVITDELLKKLNALNAVAREGGRTLATMAIRWILRDQRNTSVLVGASSSAQLKENLSSLAQAPLTAEELEKIDRILS

SEQ ID NO: 9433 - DNA, 747 bp, Unknown
  Obtained from environmental sample
  misc_feature (1)..(747): n is a, c, g, or t
ttgatggccgagtatccgcgaggccttgttgaatttattcctgaaattaagaaattgattgaagaacttaacgataccatagccgatgaagaggaaagcttttcatcactaacaaatttcgcggatcaattgcagtggttcgcaggtaggctttcagacatttcttacggtattttaaaaacccttcccgccgaaatcgcgcagcaatttttgatggaccgtgatcctcacgggaacgtgcaggtttcaagaatagaaactgataaactattggtcggaatgacagaaaaaaaattgagaatcatgaaggaaaagaaactgtacaaaggcaaattcagcgccctgacgcattttttcggttacgaaggacgctgtgcgttcccttcaaattttgacgcagactattgctacagtctcggttacagcgcctttgtgctgatcgcttcgggattgacaggctatctttccagcgtaagaaatcttacagctcccgcggacaagtggatagcgggaggagtaccccttacaatgatgatggaccttgaacagcggcacggctcaaaaaaaccggttataaagaaagcccttgttgaattagacagcaaaccttttaaaacattcgaagaaaaacgcgaaatatgggcggaaaaaacttgtttccttgtccccggatcaattcaatatttcgggccgcctgaagtctgcgatacctcgactgtaacgcttcgccttgaacacggtttataa

SEQ ID NO: 9434 - protein, 248 aa, Unknown
  Obtained from environmental sample
  misc_feature (1)..(248): Xaa is any amino acid
MMAEYPRGLVEFIPEIKKLIEELNDTIADEEESFSSLTNFADQLQWFAGRLSDISYGILKTLPAEIAQQFLMDRDPHGNVQVSRIETDKLLVGMTEKKLRIMKEKKLYKGKFSALTHFFGYEGRCAFPSNFDADYCYSLGYSAFVLIASGLTGYLSSVRNLTAPADKWIAGGVPLTMMMDLEQRHGSKKPVIKKALVELDSKPFKTFEEKREIWAEKTCFLVPGSIQYFGPPEVCDTSTVTLRLEHGL

SEQ ID NO: 9435 - DNA, 324 bp, Unknown
  Obtained from environmental sample
  misc_feature (1)..(324): n is a, c, g, or t
gtgcttatagagggcaagaaccgtgaaatccgccgggtcttttcccatttccatctgcaccccatgcgcctgcgccgcgtgcgcataggcccggtaaagctgggggaactggaagaaggggaatcgagggcgcttaaaaaatttgagattgaagccctgcgagaagggaacagggaacagggatcagggaacagggaaaagggaaaagggaaaagagatagttgttcgaaatctgagcgtgttgggaattcgaataattttcatactaatctccccgttccccgttccccgttccctggtcccccaaggagcatgacatggtaa

SEQ ID NO: 9436 - protein, 107 aa, Unknown
  Obtained from environmental sample
  misc_feature (1)..(107): Xaa is any amino acid
MLIEGKNREIRRVFSHFHLHPMRLRRVRIGPVKLGELEEGESRALKKFEIEALREGNREQGSGNREKGKGKRDSCSKSERVGNSNNFHTNLPVPRSPFPGPPRSMTW

SEQ ID NO: 9437 - DNA, 621 bp, Unknown
  Obtained from environmental sample
  misc_feature (1)..(621): n is a, c, g, or t
atgaaagcgataaatttattcccatttttattcacgttcctcattcttgcttgctctaatgatgatgaaaagggagacggaaagaagcctcctccatcttatacctcatcttcacaggtatatatgaaggttgatacattgcatctggaagggttggggcaatcttacaagacaatgaaaataggttcgctaatctggtttgctcaaaacttaaatgaaattcctacttcgggaaagtggtggtgcaatggagatattgctacgcgttgcgataaatacggagcatattatgactgggaagcagcaaaaaatgtttgccctaatggttggcacttgccaagcaaaaatgaatgggaagatttatcagactttttattaagctatccgaataacattcttacggatgcttggtggaatccgacttatgctggatacagatatgaagatggtcgttggtttccactggatcaaaagggatactggtggtcttctacaggagcaggtagtggccgtgcatatagttatcacgctacaataggacaaaagcggttggatagcgactccggtaatggtgagaaaataggagaaggtcagtcagttcgttgcgtaaagaataactga

SEQ ID NO: 9438 - protein, 206 aa, Unknown
  Obtained from environmental sample
  SIGNAL (1)...(20)
  misc_feature (1)..(206): Xaa is any amino acid
MKAINLFPFLFTFLILACSNDDEKGDGKKPPPSYTSSSQVYMKVDTLHLEGLGQSYKTMKIGSLIWFAQNLNEIPTSGKWWCNGDIATRCDKYGAYYDWEAAKNVCPNGWHLPSKNEWEDLSDFLLSYPNNILTDAWWNPTYAGYRYEDGRWFPLDQKGYWWSSTGAGSGRAYSYHATIGQKRLDSDSGNGEKIGEGQSVRCVKNN

SEQ ID NO: 9439 - DNA, 300 bp, Unknown
  Obtained from environmental sample
  misc_feature (1)..(300): n is a, c, g, or t
atggaaatttttgacattttcttcccgatattcgtgctagggcttatggctgtggctgttccttttggaatgatgtttgcaaactgggtgctttcgcctcaaactcagttgaaaaacaaggttaaaacagatgcttatgaatgtgggctttcaaaagtgataggctctgcctcggagagattccccgttaaatattatgtggtggcaatgctctttttggtttttgatttggaagtagcttttctctaccctctcgccactgaatatatgcacggcggttgggatttattcatcagatga

SEQ ID NO: 9440 - protein, 99 aa, Unknown
  Obtained from environmental sample
  DOMAIN (19)...(96): NADH-ubiquinone/plastoquinone oxidoreductase, chain 3
  misc_feature (1)..(99): Xaa is any amino acid
MEIFDIFFPIFVLGLMAVAVPFGMMFANWVLSPQTQLKNKVKTDAYECGLSKVIGSASERFPVKYYVVAMLFLVFDLEVAFLYPLATEYMHGGWDLFIR

SEQ ID NO: 9441 - DNA, 555 bp, Unknown
  Obtained from environmental sample
  misc_feature (1)..(555): n is a, c, g, or t
ttgcacattgttgcttatgattttgaaattaaatacaatattctacgaaatttgcaactagctggaatgcgagttagcgttgttccctcaaaaacaagcgctgaagatgttttggcaatgaaacccgatggcgtgtttctctccaatggtcctggcgacccagccgctgttggttatgccattgagaatgtgcgaaaattgataggcaaagttcccattatgggaatttgcttggggcaccagattatagggcttgcacttggcggcaaaactcaaaaactcaaattcggtcaccacggctgcaaccatccggttatggacacttctagcaactgcattgaaatttcctcacaaaaccacaactatatgattatgccgcagggaattgaagacaaagcggagataacctatctaaacctaaacgatggcagtgttgaaggcttgaagctgaaaaacgaaaacgtattttccattcaattccaccccgaagctgccccaggccctcacgattctctgcatttgtttaaaaagttcagggagaatttatctcgctaa

SEQ ID NO: 9442 - protein, 184 aa, Unknown
  Obtained from environmental sample
  DOMAIN (3)...(163): Peptidase C26
  misc_feature (1)..(184): Xaa is any amino acid
MHIVAYDFEIKYNILRNLQLAGMRVSVVPSKTSAEDVLAMKPDGVFLSNGPGDPAAVGYAIENVRKLIGKVPIMGICLGHQIIGLALGGKTQKLKFGHHGCNHPVMDTSSNCIEISSQNHNYMIMPQGIEDKAEITYLNLNDGSVEGLKLKNENVFSIQFHPEAAPGPHDSLHLFKKFRENLSR

SEQ ID NO: 9443 - DNA, 792 bp, Unknown
  Obtained from environmental sample
  misc_feature (1)..(792): n is a, c, g, or t
ttgaagaaagcactccaacaaccggcgtggggacggcgattggtatgtgagctattacaacccggacgttctccgctggggtcaaacagcaacagcgacggcaagatatatctatacacgcaagcgtggccggtactcgcggatattgccacggaggagcacgggcgcacggcgctcgactcagcccgcaagatgctcaacacgaagaaggggctcaagctctccacgccgggcttcaacggctacgaccagtctaagggcggcataaccacctacccgcccggggccaaggagaacggcggcatattcctccacaccaatccgtggatgatgatcgccgaggcggtcatgggcgacggcaaccgcgcctacgagtactacaaccagatcaacccggccacaaaaaacgatattatcgacgagtacgagtgcgaaccctacgtctacccgcagaacattttgggcgacgagcacccgctcttcggacttgcgcgcaacagctggctctccggaacatcgtcgtggacatatcaagcggcgagccgatacataatggggatccgtccgcagatggacggcctcttagtcgatccgtgcgtccccgccgattggaagcgcttctccgtggagcgcaatttcagaggatgccgctatgtgataaacgtggagaatccggggcgcgtctgcaagggcgtaaaatcaatatccgttgacggaaagacgcttgacaaacccgtcgtccccgcctttacggacgggaagacgcacgaagttaacgtgaccatgggctaa

SEQ ID NO: 9444 - protein, 263 aa, Unknown
  Obtained from environmental sample
  misc_feature (1)..(263): Xaa is any amino acid
MKKALQQPAWGRRLVCELLQPGRSPLGSNSNSDGKIYLYTQAWPVLADIATEEHGRTALDSARKMLNTKKGLKLSTPGFNGYDQSKGGITTYPPGAKENGGIFLHTNPWMMIAEAVMGDGNRAYEYYNQINPATKNDIIDEYECEPYVYPQNILGDEHPLFGLARNSWLSGTSSWTYQAASRYIMGIRPQMDGLLVDPCVPADWKRFSVERNFRGCRYVINVENPGRVCKGVKSISVDGKTLDKPVVPAFTDGKTHEVNVTMG

SEQ ID NO: 9445 - DNA, 480 bp, Unknown
  Obtained from environmental sample
  misc_feature (1)..(480): n is a, c, g, or t
atgaagtacggcgattttgtcgacgaggcgcgggagtacgtcataacaaaccccaagacccccgtgaagtggatcaactatatcggcaacctgtctttcggcgggtttgtggaccataccggcggcgcgctcgtctgcaagggcgacccgtcgctaaaccgcataaccaagtatatccagcaaatgccctcatccgacttcaagggcgagacgctctatatgaggataaagaaggatggcggttacaagaccttttcgcccttcttcgtgccgacgctcgacgggtacgactcctttgagtgccgcgtggggcttggctataacaagatcgtctcagtgttctccggccgtcaaaccgaatgcacgatcttcataccgcaggacgcccaagtcgagatccgcgacatccgagtgacgaaagtctccggggcaccgctcgaaatcgacgttcattccggtactcaaataccccccccctga

SEQ ID NO: 9446 - protein, 159 aa, Unknown
  Obtained from environmental sample
  DOMAIN (66)...(154): Glycosyltransferase family 36
  misc_feature (1)..(159): Xaa is any amino acid
MKYGDFVDEAREYVITNPKTPVKWINYIGNLSFGGFVDHTGGALVCKGDPSLNRITKYIQQMPSSDFKGETLYMRIKKDGGYKTFSPFFVPTLDGYDSFECRVGLGYNKIVSVFSGRQTECTIFIPQDAQVEIRDIRVTKVSGAPLEIDVHSGTQIPPP

SEQ ID NO: 9447 - DNA, 822 bp, Unknown
  Obtained from environmental sample
  misc_feature (1)..(822): n is a, c, g, or t
ttgacatccctcgcactattgatgggatgcgcaaatccggtagacgacgacgcggccggcgggcgctttatcttcgccgtcgccgatgtgggacaaggcctcgcccagttcggcgtagtcggcaagcgcgccgttgcatgggatgtcgggaaggattacgttacgtggcggagcgcctacataagtctgggcagtccgcgcattgaatcaataataatctcgcacaccgaatccgatcactgcggcgccctgcaatccttcggctccagccttgactggagcggggagatcgtggtctcgatctacgaggataccgccaaactgcgagaatcggctacggcttggacgaatcgaatcaagttcaaaacctgcgttcgcggcgacacgctgcggacgcttggccccgccgtggacatagtatgcctgtggccgccgcccgatcttgaccaaaccctgttttccggagagtggaagaatcgctatggcttagtcttttcaatccgccacggaagcgcccgcgccctgataacctccgacatcgacaacgccgccatgaccgaaatagccgcccacagccgttacgacctgcgctctcaaatcctatccgtcccccaccacggcagcgccggctcggtcaacccgctcttcttttcttacgtaaaccctgagacagccgtcatatcctgttcaatcaacaacgcctacggccacccgtcgccgcaaatggttgaagaattgcagcgtcaatctgaaagaataatgtatacatataatgatggtacgatcacattcagcagtaacagatactattggaactattga

SEQ ID NO: 9448 - protein, 273 aa, Unknown
  Obtained from environmental sample
  misc_feature (1)..(273): Xaa is any amino acid
MTSLALLMGCANPVDDDAAGGRFIFAVADVGQGLAQFGVVGKRAVAWDVGKDYVTWRSAYISLGSPRIESIIISHTESDHCGALQSFGSSLDWSGEIVVSIYEDTAKLRESATAWTNRIKFKTCVRGDTLRTLGPAVDIVCLWPPPDLDQTLFSGEWKNRYGLVFSIRHGSARALITSDIDNAAMTEIAAHSRYDLRSQILSVPHHGSAGSVNPLFFSYVNPETAVISCSINNAYGHPSPQMVEELQRQSERIMYTYNDGTITFSSNRYYWNY

SEQ ID NO: 9449 - DNA, 654 bp, Unknown
  Obtained from environmental sample
  misc_feature (1)..(654): n is a, c, g, or t
atgagagcagcaatattaaccaatgaatacccgccgaacatttacggcggcgcaggcatacacgttgaatatttaacaaaggaactgaaaaatctttgcgaaatatctgtgcattgctttgcagatgcccatgttcgcagatttggtgaatttgaagaccaaaaattcaaaaaaatccttggaccactggatataaatttgcaatggatttctacaatgcacgacatagacattgtgcattgccacacgtggtattctcattttgccggagtgcttgcaagtcgcttgtatcaggttcctcttgtgctaacaacacattcattagaaccgcataggccttggaaatctgagcagcttggcaaaggtggctatgcgatgagttgttggattgagaaaagtgcctacaaaagcgcagacggagtaattgccgttagcaaggatatgaaacaagatgttattgaactttacggagttgatgaaaataaggttagggttatttacaacggtatagatccagatttttatcacccaatttctgacgaatcaattttgaaaaaacacggcataaatccgcaaaggccttttgtgctttttgttggcagaataacaaggcaaaaaggtatttctcagctattcaggccattccgaaaatag

SEQ ID NO: 9450 - protein, 217 aa, Unknown
  Obtained from environmental sample
  misc_feature (1)..(217): Xaa is any amino acid
MRAAILTNEYPPNIYGGAGIHVEYLTKELKNLCEISVHCFADAHVRRFGEFEDQKFKKILGPLDINLQWISTMHDIDIVHCHTWYSHFAGVLASRLYQVPLVLTTHSLEPHRPWKSEQLGKGGYAMSCWIEKSAYKSADGVIAVSKDMKQDVIELYGVDENKVRVIYNGIDPDFYHPISDESILKKHGINPQRPFVLFVGRITRQKGISQLFRPFRK

SEQ ID NO: 9451 - DNA, 798 bp, Unknown
  Obtained from environmental sample
  misc_feature (1)..(798): n is a, c, g, or t
gtggaattctatttgggtgcgaatatggaacaagccgctaacgatgtgcgagataaggtttctcgcgctcagaggtttctccccgatgatgcggatattccggtagtttcaaaagcagatgccaattctacgcctatagttgtactttcactaggcagcaacactatgagcttgcttgacctctcggattacggcgaaagagttcaggagaaaattcagacagttcctggagtggcggaagtgagggtatggggtataaaaaggtatgcaatgcgcatttacatagaccctgtgcgaatggcaggagctaatttaaccatagacgtaataaggtctgcgcttgaaagggaaaatgcggaaattcccgccgggcaattggaaggaacagcggcagctgtgagtttgcgttcaagttctaaattgaaaacagaagaggattttcgcaatgttattctgctcgcaaataaggaaaaatttgtgcgtctgagcgatgtggcagaagttgtgctcggtgcagaaaacgaaagaaacacggttaggatgaatacaagacccatggtttctctagctgttattccacagccgggttctgaccaaatcaaaatagcggacgaagttttaagcagattggagaacattcgcaaagacctgccggaatccattattatccagctttcctttgacaacactaggtttgtgcgagccgcgctctcggaagtcaaagaaaccattgcaatagcttttatgcttgttgtagccattattttcctgtttttaagagatgttaaacaactttga

SEQ ID NO: 9452 - protein, 265 aa, Unknown
  Obtained from environmental sample
  misc_feature (1)..(265): Xaa is any amino acid
MEFYLGANMEQAANDVRDKVSRAQRFLPDDADIPVVSKADANSTPIVVLSLGSNTMSLLDLSDYGERVQEKIQTVPGVAEVRVWGIKRYAMRIYIDPVRMAGANLTIDVIRSALERENAEIPAGQLEGTAAAVSLRSSSKLKTEEDFRNVILLANKEKFVRLSDVAEVVLGAENERNTVRMNTRPMVSLAVIPQPGSDQIKIADEVLSRLENIRKDLPESIIIQLSFDNTRFVRAALSEVKETIAIAFMLVVAIIFLFLRDVKQL

SEQ ID NO: 9453 - DNA, 474 bp, Unknown
  Obtained from environmental sample
  misc_feature (1)..(474): n is a, c, g, or t
gtggacggcgaggctctggcaacgctggtggtcaacaagatccgcggcaccctcaacatagccgccgtcaaggcccctggctttggcgaccgcaggaaggccatgctggaagacatagccgtgctgacgggtggcaaggccataagcgaagacttggggcttaagctggagaacctgaccctgagcgacctgggcactgcccgcaaggttgtcattgacaaagagaacaccaccatagtggaaggctctggcacggccgaggccatacagggccgcgtcaagcagatccgcagccagatagagcaaagcacgtcggactacgacaaagagaagctgcaagagcgcctggccaaactggtgggcggcgtcgcggtgatcaaggtgggagccgcgtccgaaacggaaatgaaaaaaaaaagggcccgcgtcgaagacgccatgcatgcacccaaagccgccttgaaaacggcataa

SEQ ID NO: 9454 - protein, 157 aa, Unknown
  Obtained from environmental sample
  misc_feature (1)..(157): Xaa is any amino acid
MDGEALATLVVNKIRGTLNIAAVKAPGFGDRRKAMLEDIAVLTGGKAISEDLGLKLENLTLSDLGTARKVVIDKENTTIVEGSGTAEAIQGRVKQIRSQIEQSTSDYDKEKLQERLAKLVGGVAVIKVGAASETEMKKKRARVEDAMHAPKAALKTA

SEQ ID NO: 9455 - DNA, 309 bp, Unknown
  Obtained from environmental sample
  misc_feature (1)..(309): n is a, c, g, or t
atggttctgaacggagctgtggagcaggaagaattaacgctgataccggtagacgggaatgacgccgtttacgaaacagagaatccatcgccggcttttatcttcagtgatgattttgaagatgaagatgatttcgaagacgaagatgatttcgaggacgaagacgacgaattggacgacgaagaggacgaggacgaagaggacgactacgaagacgacgaagatgacgacgactatgaagatgatgacgaagaagactacgaggacgaagaagaagacgaagacgactgggaagacgacgaagaataa

SEQ ID NO: 9456 - protein, 102 aa, Unknown
  Obtained from environmental sample
  misc_feature (1)..(102): Xaa is any amino acid
MVLNGAVEQEELTLIPVDGNDAVYETENPSPAFIFSDDFEDEDDFEDEDDFEDEDDELDDEEDEDEEDDYEDDEDDDDYEDDDEEDYEDEEEDEDDWEDDEE

SEQ ID NO: 9457 - DNA, 390 bp, Unknown
  Obtained from environmental sample
  misc_feature (1)..(390): n is a, c, g, or t
ttggaaggaactttgatggaagatatgtcacaggaaattaacaaacaagccgtgtctttaggttctcttttacaggaacataacgggcagaatgtttgcgtactggatttacgcgggattaataattggacagacttttttattatcgcgacagccacgagtaaaacgcacatagacggtcttgaaaagcacattaaagaattctgctgcgagaagaaaatagaaatattcggcagttcacgcagaaattcagacgatgaatggcgtctgctcgaccttgggacaataatcatacacttgatgacttccggcgtacgagaattttacgaacttgaaaaactttgggctcccgttcctgattttcagaacggaacgcagattattaattaa

SEQ ID NO: 9458 - protein, 129 aa, Unknown
  Obtained from environmental sample
  DOMAIN (14)...(116): Domain of unknown function DUF143
  misc_feature (1)..(129): Xaa is any amino acid
MEGTLMEDMSQEINKQAVSLGSLLQEHNGQNVCVLDLRGINNWTDFFIIATATSKTHIDGLEKHIKEFCCEKKIEIFGSSRRNSDDEWRLLDLGTIIIHLMTSGVREFYELEKLWAPVPDFQNGTQIIN

SEQ ID NO: 9459 - DNA, 861 bp, Unknown
  Obtained from environmental sample
  misc_feature (1)..(861): n is a, c, g, or t
atggaatctgcaagacgcgaaaggccgcaaagcggccgaaggcacttatgtcgccagaggcgttatcactacaaaggccggcaagacggagagggtatccgtacttgtaaatgtgcaaagatagtgaaaggatacgcaatgtccgactttttatcaacaataaccgcaccgatacccggcgcccccttcggctccgacgtcaaccatgacgttgactacgaggcgcttaaggttgagatgggaaaactcggcgatatcgatgtcaaaacggtggagtcgctttccgtcaagatactcgccgaaaaatctaaggacgtgagggcgctgtcgtttttggcatacgcgatgctcaggataggcgactacgagcgcctagccgatgttttttgcgccttggcggattattgtatggatagttacgacgacatatttccgcagcgtgacggggcgaaactgtcggcactgcgttggctctcagaggcgcgtttcacaagcgcctgtccaaaggtcgacgcctcggcgcaagacgcggaacacgtcgccaggctgctgaacgcgctgttgagattgaaaagcgcgttggaaaagcggttctcatctatcagcgccccgtttccgctgttgctgtacaagcgggcgctggagtgggatagttccgtaaagagcgcgccggagacaaaaccggaggctgcgtccgtaccaacctatggcggcgcgaagagagccgacgccgccaccgccggtcttgtattggcggagcgcggcggtcaaatcgcaaatgtgccggtaaacgcggatgggcgtaaggagatagcgaggtgcttgaaacggattgcggaagtattggagatgggaatatag

SEQ ID NO: 9460 - protein, 286 aa, Unknown
  Obtained from environmental sample
  DOMAIN (87)...(148): ImpA-related N-terminal
  misc_feature (1)..(286): Xaa is any amino acid
MESARRERPQSGRRHLCRQRRYHYKGRQDGEGIRTCKCAKIVKGYAMSDFLSTITAPIPGAPFGSDVNHDVDYEALKVEMGKLGDIDVKTVESLSVKILAEKSKDVRALSFLAYAMLRIGDYERLADVFCALADYCMDSYDDIFPQRDGAKLSALRWLSEARFTSACPKVDASAQDAEHVARLLNALLRLKSALEKRFSSISAPFPLLLYKRALEWDSSVKSAPETKPEAASVPTYGGAKRADAATAGLVLAERGGQIANVPVNADGRKEIARCLKRIAEVLEMGI

SEQ ID NO: 9461 - DNA, 888 bp, Unknown
  Obtained from environmental sample
  misc_feature (1)..(888): n is a, c, g, or t
gtgtctaaggtggcggcggcctgccactgcccgtttgtcggcgcggcgactcctagtttcttcgcaaaagagaaggcgatagacctcaccaagatagaggatctgcacaactacatggagcgctctgagtttntgcgttggaactcgtttagaagcaccgaggacagccgctacgtgggcctcacgctcccgcgtttctctctgcgcctgccctacgggccagacacgctgccggtcaaagagttcgtgtacaaggagaacgtggccggccagaacagcgacaaatatctctggggcaacgcctcgttcgcgttcgcctccaacatggttaggtcattcatagataacggttggtgtgttcaaattcgcggccccgaagctggaggaaaggtagacaacctgccggtgcatgtatttgacgccggacgcgggacggaggtgaagataccaaccgaaattttaattcccgaaacccgggagttcgagttcgcccaagaggggttcattcccctctctttctacaagaatagggactacgcctgcttcttctcggcgaactcggcgcagaggccgcaagagttcgacaaccccattgtcaccgccaacatgcgaataaactcgcggctgccctacatcttcctgatatcgcgcatagcccactacctgaaagtgatccaacgcgaaaacatcgggtcgacaaagagccgcaaagtattgcatgaggagttgacaagatggataaagaagttagtaacagagatgaaagacccgggcccggaactcatagccacgcatccgttaaaggacgcggacgtggacgtgagcgagattgaggacaatcccggcttcttcagagtcagcctgtcggttattccgcacttcagatag

SEQ ID NO: 9462 - protein, 295 aa, Unknown
  Obtained from environmental sample
  SIGNAL (1)...(22)
  DOMAIN (1)...(295): Protein of unknown function (DUF877)
  misc_feature (1)..(295): Xaa is any amino acid
MSKVAAACHCPFVGAATPSFFAKEKAIDLTKIEDLHNYMERSEFXRWNSFRSTEDSRYVGLTLPRFSLRLPYGPDTLPVKEFVYKENVAGQNSDKYLWGNASFAFASNMVRSFIDNGWCVQIRGPEAGGKVDNLPVHVFDAGRGTEVKIPTEILIPETREFEFAQEGFIPLSFYKNRDYACFFSANSAQRPQEFDNPIVTANMRINSRLPYIFLISRIAHYLKVIQRENIGSTKSRKVLHEELTRWIKKLVTEMKDPGPELIATHPLKDADVDVSEIEDNPGFFRVSLSVIPHFR

SEQ ID NO: 9463 - DNA, 648 bp, Unknown
  Obtained from environmental sample
  misc_feature (1)..(648): n is a, c, g, or t
atgctatacttaataacacagacaggagagtgctttatggaaatgaccgtgagtgaaagacccataccaaccggggaaggtcttaccttcgagaaggtatgggcaatgtctcaggaaactgaccggatagtgaaggaagttgcccaaattgtcagggaaaatgcggaacgacagaaagaaaccgaacggcaaatgaaaaagacccaccggagaatgggcgatttgtacaaccgctttggggaaatggctgaacacctggtggcccccggcatagccaagcgtttcaatgaacggggatttcattttgacagcataatgcccggcggcataagaattgttgatgaacagggacaaaccaaaacggagatagacctgctgctggaaaatggcgaatatattatcgccatagaagtaaaggccaccgtcagaccccatgatgttgagcaccatatccggcggctggaaatattacgggaacaccgtaaaaaaaagcaagacaatcggaggatacagggagccatagccggggccatatttggagcggcggaaaagcaggcggttatagaagcgggcttctatgcgcttgaacaatccggcgacacgatgaaaatggtcatacccagtaattttgttccccgggaattttaa

SEQ ID NO: 9464 - protein, 215 aa, Unknown
  Obtained from environmental sample
  misc_feature (1)..(215): Xaa is any amino acid
MLYLITQTGECFMEMTVSERPIPTGEGLTFEKVWAMSQETDRIVKEVAQIVRENAERQKETERQMKKTHRRMGDLYNRFGEMAEHLVAPGIAKRFNERGFHFDSIMPGGIRIVDEQGQTKTEIDLLLENGEYIIAIEVKATVRPHDVEHHIRRLEILREHRKKKQDNRRIQGAIAGAIFGAAEKQAVIEAGFYALEQSGDTMKMVIPSNFVPREF

SEQ ID NO: 9465 - DNA, 582 bp, Unknown
  Obtained from environmental sample
  misc_feature (1)..(582): n is a, c, g, or t
ttgtcagctaacgctttttacagcataattcttgcgtggctcagcgaacttcccatagaaaaagaaataatttcttttggcagggggatttttgccgccgcgcagaattttaacaatttggacgacaaacgccgcgcggcggaaagggcggcggataaccgcgctgactgcgacacattaacggtgctgaacacggcaggtaaagttcagattgaagttcacagaatgcaaggccttttgcggttttcagtgaatgaagacggtgaatatgtcgcaaggtgcgaacctgatcattttattcttccatgtattaaagagttctttaccgcccgttttggagatacaccctgggcaattattgatgaaaagaggggtttacgcttaagccgcaagccgggagaacgggcaaaaatcaatattttagataaatcccccgaaaatgttccctgcgccaaaaacgacgaatgggaggagctttggaagcactaccacaaaacaattaacaatgaagaccgtaaaaataccgatttacagcggcaattaatgcccaaacgttactggaaacatctgcctgaaatgtaa

SEQ ID NO: 9466 - protein, 193 aa, Unknown
  Obtained from environmental sample
  misc_feature (1)..(193): Xaa is any amino acid
MSANAFYSIILAWLSELPIEKEIISFGRGIFAAAQNFNNLDDKRRAAERAADNRADCDTLTVLNTAGKVQIEVHRMQGLLRFSVNEDGEYVARCEPDHFILPCIKEFFTARFGDTPWAIIDEKRGLRLSRKPGERAKINILDKSPENVPCAKNDEWEELWKHYHKTINNEDRKNTDLQRQLMPKRYWKHLPEM

SEQ ID NO: 9467 - DNA, 534 bp, Unknown
  Obtained from environmental sample
  misc_feature (1)..(534): n is a, c, g, or t
ttggcggcgggacagccgcagctcctgtttgttcccggtggcaaaacccgccgcgcttcggtttataacgccctttccctgcttacggcccataatccccggtatgtgcttattcacgacggggccagaccctgggtaagcccttccctgattgagcggatcattgaggcggtaataaaatacaacgccgttattcccctgctccccctgaccgacacgcccaaggaatgtggcgcatcattgtgggaacttcaaccgcaggcggaaacctcccggcctgaggattatccccctgcttttattacgcggcatcttaaacgcgcaaataccggaattgcccaaaccccccaggcttttgcctttcccgaaatactgagcgcccatgaaaaagccgcagagcaagagttggagggaaatgaggaattcacggatgacgcggaagtatggggcaagttccgcggcccggtagcggttattcccggcgcagaggaaaaccgcaaaattacctttccgggggatttaacccggccatga

SEQ ID NO: 9468 - protein, 177 aa, Unknown
  Obtained from environmental sample
  DOMAIN (1)...(176): Uncharacterized protein family UPF0007
  misc_feature (1)..(177): Xaa is any amino acid
MAAGQPQLLFVPGGKTRRASVYNALSLLTAHNPRYVLIHDGARPWVSPSLIERIIEAVIKYNAVIPLLPLTDTPKECGASLWELQPQAETSRPEDYPPAFITRHLKRANTGIAQTPQAFAFPEILSAHEKAAEQELEGNEEFTDDAEVWGKFRGPVAVIPGAEENRKITFPGDLTRP

SEQ ID NO: 9469 - DNA, 666 bp, Unknown
  Obtained from environmental sample
  misc_feature (1)..(666): n is a, c, g, or t
atggaagtgtccagccgcgccgtggacaacgccgatatggttctgtatgtactggacgcgtcccgcgctcctggccccgaggaagaagctgttgccaaactcctcgcgcccctggctgaaaaaaccgtcgctgcggtcaacaaaatggatgcccgcgacgctgattttgagcgtgccaaaaatttccttttggggcagcttccggctcttgccgggcgctgtttcggcatttccgcgaaaaacaacgaaggcatcgacgagcttctccacgcgctctatgccatggcgccggttggcgaagctatgtacgacggcgaatactacaccgaccaggaaaccgacttccgtattgcggaaataatccgcgaacacgcaatcaaccgcctacgtcaggaattgccccactcgctgtatgtggatgtagcggatacggagttaacggacggcaaactctgggtaagggcttttatcgtggtggaaagggaatcccaaaaaggcatggtagtaggcaaggacggtaaaatgatcaaggccatccgcctggccgcgctgcgggacttaagccgcatctttgactggaaaatcgatcttgatctgcgggtaaaaaccggcaaggactggcggcataacgatcataccctgcgccgattaattgacctgcaatag

SEQ ID NO: 9470 - protein, 221 aa, Unknown
  Obtained from environmental sample
  DOMAIN (155)...(219): KH domain
  misc_feature (1)..(221): Xaa is any amino acid
MEVSSRAVDNADMVLYVLDASRAPGPEEEAVAKLLAPLAEKTVAAVNKMDARDADFERAKNFLLGQLPALAGRCFGISAKNNEGIDELLHALYAMAPVGEAMYDGEYYTDQETDFRIAEIIREHAINRLRQELPHSLYVDVADTELTDGKLWVRAFIVVERESQKGMVVGKDGKMIKAIRLAALRDLSRIFDWKIDLDLRVKTGKDWRHNDHTLRRLIDLQ

SEQ ID NO: 9471 - DNA, 402 bp, Unknown
  Obtained from environmental sample
  misc_feature (1)..(402): n is a, c, g, or t
gtgtaccaggagttacgcgaaaatacggcgctaaggtcgctgcttctccaaaaaaaggcctttgccagccttgagattcactgcggcggacaggtcgcctcacaggtgctgcgaacggaggatttcacggaattgggagccatcaacgatgactccgacggctttgtcaacctcccccttagggccagggaaatcgtgatttcaatcatgatcaaagaaagcaggaaggggaaggtcaaatgttccatgagatcaaaaggggcgatagacgtttcaaaaatcgcccacgatttcgggggcggcgggcatattaacgcctcgggttttaacagcgattttaatatcgaccagacgctcgccttaaccctgacaaaaataaccgcgtatttaggaataaaatga

SEQ ID NO: 9472 - protein, 133 aa, Unknown
  Obtained from environmental sample
  DOMAIN (63)...(124): DHHA1 domain
  misc_feature (1)..(133): Xaa is any amino acid
MYQELRENTALRSLLLQKKAFASLEIHCGGQVASQVLRTEDFTELGAINDDSDGFVNLPLRAREIVISIMIKESRKGKVKCSMRSKGAIDVSKIAHDFGGGGHINASGFNSDFNIDQTLALTLTKITAYLGIK

SEQ ID NO: 9473 - DNA, 798 bp, Unknown
  Obtained from environmental sample
  misc_feature (1)..(798): n is a, c, g, or t
ttgatggccgaggtaaagctttcgcgccaacttattgcccagaaatatgaaattgactacataatcgacgacggtcttttaattcgggatgaccgcatccttgcaggacattccgcaaagaaggaaaaaaccttcatggcagccataaaagtcgcgctttttgacggaaaggcgcacagggacgaagtggccaagaaactacagggagagaggactaaaagaattctaattcttgggacttccgaaaaaatggtcaataaaatagcgtcccgcctgcaactgccggctccgtcaaagttgataaaaatcgaggacatttctacccaggaagagattgaaaaagccattcataccaggcgcattgagggaaaacacgttattcccgtgccgtccatagaaataaagaaaagctatccgaatatattctttaacgccatcaaaattttaaggagaaaaaaaggacccgttggttttggcgctacgcccagcgtccatgaaaaatcggtggtacgccctgaatattccaagcaggggaaggtgataatatcgcaggcagcgctcagccagatggtaattcattgcatagatgaatacaacagaaatatcaagataaaaaaaattgtcgttaaagacgatgaaataggataccggctggtaattacaattgacgttccgtttggcactcaactgggaggaaatatccacgaattgcagcgatacctgattgataacatcgggcgttataccggaatcctgattgaggaagtaaatataattatagacaagatcacgcagtaa

SEQ ID NO: 9474 - protein, 265 aa, Unknown
  Obtained from environmental sample
  misc_feature (1)..(265): Xaa is any amino acid
MMAEVKLSRQLIAQKYEIDYIIDDGLLIRDDRILAGHSAKKEKTFMAAIKVALFDGKAHRDEVAKKLQGERTKRILILGTSEKMVNKIASRLQLPAPSKLIKIEDISTQEEIEKAIHTRRIEGKHVIPVPSIEIKKSYPNIFFNAIKILRRKKGPVGFGATPSVHEKSVVRPEYSKQGKVIISQAALSQMVIHCIDEYNRNIKIKKIVVKDDEIGYRLVITIDVPFGTQLGGNIHELQRYLIDNIGRYTGILIEEVNIIIDKITQ

SEQ ID NO: 9475 - DNA, 909 bp, Unknown
  Obtained from environmental sample
  misc_feature (1)..(909): n is a, c, g, or t
atgaaagctatagaaatgggctatatgttggcagaagccaagcaaactacggttgaagagctttctgaatattttgcggcaaaatataaaatgctggcagaagcaataactactcccaaaacattgaatgagtttttcttaaaaggctatgttgccgagataaacaagcagcaagatgcggcaataaaatattacaatcaagcagtgcaactaaaacctgattttgcagaggcatataaaaacatcggtgatatttacaagaacaagaaaaattacgctgaagccgcaaagaactataaaaaagcagttgaacataacccaagttacgcacatacatataaatatatggaagatggttattttacaaaagatttttttgttgattccagaaatggcaaaatctataaatatgtgaaaatagacaagcaaacttggatgtcagaaaatctgaattacaaaacaggcaattcttggtgctttgacgaccttaaagagaactgtgaaaaatacggccgcctttacgattggaattccgcaaagaatgcctgccccgcaggttggcatttgccaagcgaggaggaatggcaaaagctcatagatgttgctgggggcaaagacaatgccagaactattaaggcaaagcacagttggagcaggggaggcggaacagatgattttggcttttatgcaatgcctggcggccttcgcaaatcttctcgttttacaggaatagatttaaatgccgcttggtggactgccacagagcaagaacatttagatgtttcggctaaatacgtattgattaaccaatactgctctgaaatgngttatatttgctatgatgttatgctttcggatataggttccaagagcgaacttgggctttctgtgncgtgcgtgaagaattaa

SEQ ID NO: 9476 - protein, 302 aa, Unknown
  Obtained from environmental sample
  DOMAIN (42)...(75): Tetratricopeptide repeat
  misc_feature (1)..(302): Xaa is any amino acid
MKAIEMGYMLAEAKQTTVEELSEYFAAKYKMLAEAITTPKTLNEFFLKGYVAEINKQQDAAIKYYNQAVQLKPDFAEAYKNIGDIYKNKKNYAEAAKNYKKAVEHNPSYAHTYKYMEDGYFTKDFFVDSRNGKIYKYVKIDKQTWMSENLNYKTGNSWCFDDLKENCEKYGRLYDWNSAKNACPAGWHLPSEEEWQKLIDVAGGKDNARTIKAKHSWSRGGGTDDFGFYAMPGGLRKSSRFTGIDLNAAWWTATEQEHLDVSAKYVLINQYCSEMXYICYDVMLSDIGSKSELGLSVXCVKN

SEQ ID NO: 9477 - DNA, 393 bp, Unknown
  Obtained from environmental sample
  misc_feature (1)..(393): n is a, c, g, or t
ttgcagattttaggcactttcaaaattgatagcgagggttggggtttaaccgtttggagaggcaactggcttatgagcaatggcggttcttcgcttcttgaactttcaccaaaagatatgagcgtaactaataaaataaagactcctattgctttattgaacgaattggaagctgttggtgataccctttacgccaatgtgtggcaaagcgattccattgctgttattttactgccaagtggcaatgtgataaaatggctggatttttcggagcaggcaaagagcataagaaaaaagcacccccaagcggaagtgctgaatggaatagcttttgacggtaagaacttgtggattacgggaaagaactggccttggatttatagggtggattag

SEQ ID NO: 9478 - protein, 130 aa, Unknown
  Obtained from environmental sample
  DOMAIN (1)...(130): Glutamine cyclotransferase
  misc_feature (1)..(130): Xaa is any amino acid
MQILGTFKIDSEGWGLTVWRGNWLMSNGGSSLLELSPKDMSVTNKIKTPIALLNELEAVGDTLYANVWQSDSIAVILLPSGNVIKWLDFSEQAKSIRKKHPQAEVLNGIAFDGKNLWITGKNWPWIYRVD

SEQ ID NO: 9479 - DNA, 426 bp, Unknown
  Obtained from environmental sample
  misc_feature (1)..(426): n is a, c, g, or t
ttgtacggcattaatataatggatgtcaaggagatagtccgggttcaggcgatccgggcaattccaaacgctccgacttatgtagaaggaatattcaaccttagaagcgagataatacccattataaacctgcataaacgtttccatttgaagaaaatggccagctcggaggaagacgagttgttgtccggctttgtcatccttgatatagacggaatgaaactggggatcatcattgatcgtatatccagggttataacaattgaaaaagaagatatacagccgccgccccaaatgttctcaggtattggagcggaatacataatgggagtagtgcgccaggagcagggctacctgattattctggatatccgggacttgtttaatcccaaagaactccaaaaaatcgccgagttgagacgttag

SEQ ID NO: 9480 - protein, 141 aa, Unknown
  Obtained from environmental sample
  DOMAIN (1)...(132): CheW-like domain
  misc_feature (1)..(141): Xaa is any amino acid
MYGINIMDVKEIVRVQAIRAIPNAPTYVEGIFNLRSEIIPIINLHKRFHLKKMASSEEDELLSGFVILDIDGMKLGIIIDRISRVITIEKEDIQPPPQMFSGIGAEYIMGVVRQEQGYLIILDIRDLFNPKELQKIAELRR

SEQ ID NO: 9481 - DNA, 633 bp, Unknown
  Obtained from environmental sample
  misc_feature (1)..(633): n is a, c, g, or t
gtgcatcttgggacgctgggttttattgccggcatggacaggcatgaatggtctggagtttacagtcagtggcttgcgggcaaaataaagccttcaaggcgctgtatgctggaattttccattgaaaggggcggtaaatatgccgttaataatagtatatgcctgaacgatgtggttatttcttctttgggaatagcaaagttgatacgtttgcaggcaaaaacagaggttgcccccggcgaatttgtggaaattggctgctatcgttcggacgggcttataatcgctactcccaccggttcaacaggatattccatgtcgtccggcgggccaatattggatccggagatggaagcgcagatcatcagcccaatttgtccctttgctttatcgaatcgcccgctggtgcttccttcacagcaaacattgcagataacggtagacagggatcagcgaagcggggtgctgttgacctgtgacggacaggaaacatttgatctggaacctggtgatttaatcaccataaaacatgcgccgcattacgcgcttctggtcaccgccgggtattcatcgtattacaaagcgcttgcggataaactggcatgggcctctgacggaggtggtcatgcttga

SEQ ID NO: 9482 - protein, 210 aa, Unknown
  Obtained from environmental sample
  DOMAIN (5)...(187): ATP-NAD kinase
  misc_feature (1)..(210): Xaa is any amino acid
MHLGTLGFIAGMDRHEWSGVYSQWLAGKIKPSRRCMLEFSIERGGKYAVNNSICLNDVVISSLGIAKLIRLQAKTEVAPGEFVEIGCYRSDGLIIATPTGSTGYSMSSGGPILDPEMEAQIISPICPFALSNRPLVLPSQQTLQITVDRDQRSGVLLTCDGQETFDLEPGDLITIKHAPHYALLVTAGYSSYYKALADKLAWASDGGGHA

SEQ ID NO: 9483 - DNA, 837 bp, Unknown
  Obtained from environmental sample
  misc_feature (1)..(837): n is a, c, g, or t
atggatatagcggtttcaacggataaaacctgccccataggggttatcaattttgatgttgaccgcagcgattggagcaaactggaagaattgcctcataaaaccatagccagagattttaatttgagcgggcgtttctctgccattgaattggaacaatacaacttgctcacgctttcccgtatgctggcaaaacattatgtgtctggcaggctttctatgagcggcgggcaggtaagattggagtgtaggctgtataccacaagttccagagatttggtagcgaattttgtttacacaagttctattgatcaagttcgcgcttcgctccacaaatgctcagacaaagtggtacatcaactttggggtgctcaaggctttgcttctactcaaatggcatgggttagcaaaatagacggtagcaagcaagttgtgataggcgattacgatggttttcgcaaaaggcaattgaccaagcataacagcactaattttatgccagcttggagcgtggataacacaaagatatattttgcaagccttaggaatggcaaatctcagatttttgaaagaaatttgctaaccaactcagaaaaacttctcttccctcaaatagaccaagcatttagcccttctgtgaacccgaaagatggaacattgcttttctcgattatagggcagaacggcacggatatttggcaaggcgaccctcagacgggcaaagcgtctcgccttatattttcaaaggatatagaggttagcccttcttggagcccgcaagggacagctttcttgttctcgagcgataagggcgggcagccgcaaattacagcttaa

SEQ ID NO: 9484 - protein, 278 aa, Unknown
  Obtained from environmental sample
  DOMAIN (155)...(190): WD40-like Beta Propeller Repeat
  misc_feature (1)..(278): Xaa is any amino acid
MDIAVSTDKTCPIGVINFDVDRSDWSKLEELPHKTIARDFNLSGRFSAIELEQYNLLTLSRMLAKHYVSGRLSMSGGQVRLECRLYTTSSRDLVANFVYTSSIDQVRASLHKCSDKVVHQLWGAQGFASTQMAWVSKIDGSKQVVIGDYDGFRKRQLTKHNSTNFMPAWSVDNTKIYFASLRNGKSQIFERNLLTNSEKLLFPQIDQAFSPSVNPKDGTLLFSIIGQNGTDIWQGDPQTGKASRLIFSKDIEVSPSWSPQGTAFLFSSDKGGQPQITA

SEQ ID NO: 9485 - DNA, 561 bp, Unknown
  Obtained from environmental sample
  misc_feature (1)..(561): n is a, c, g, or t
atgacggctgtcgcgggaaaactgcaggaatggaggccgcgcaatgtggttattgatccggtgatgtacgcgaaaaacggcgcccccctgatggaagcggacgctatcagcacgctgattaaggaagtgctgccgttggctgatttaataacgccgaatatccccgaagcggaaaagatatcgggaatggcaataaaaacattagacgctatgcgggaagcggcgcggcgtattcacgcgatgggctgccgcgccgttgtcgttaaaggcgggcatatcgagggagacgcgacggatattttgtttgacggaaaaaaaatttacgaatacccgtcgccaaggatagacacaaagcatactcacggaacaggctgtactttttcttcggcaatcgcttcaaatcttgccctcgggcttcctgtttacaaagcggtcgaaaacgcgaaggcgtatataaacacggcaattacccacgcgccaaaactgggaaaaggacacgggcctacacatcatttttacgcgttatacgaaaattttttcagagacaaaaaaaatggctaa

SEQ ID NO: 9486 - protein, 186 aa, Unknown
  Obtained from environmental sample
  DOMAIN (1)...(170): Phosphomethylpyrimidine kinase
  misc_feature (1)..(186): Xaa is any amino acid
MTAVAGKLQEWRPRNVVIDPVMYAKNGAPLMEADAISTLIKEVLPLADLITPNIPEAEKISGMAIKTLDAMREAARRIHAMGCRAVVVKGGHIEGDATDILFDGKKIYEYPSPRIDTKHTHGTGCTFSSAIASNLALGLPVYKAVENAKAYINTAITHAPKLGKGHGPTHHFYALYENFFRDKKNG

SEQ ID NO: 9487 - DNA, 393 bp, Unknown
  Obtained from environmental sample
  misc_feature (1)..(393): n is a, c, g, or t
gtgggcaacctcaatatggtcatacgcttcatatccgagaggttggaggcggcgggttgcaccatgaagcagcaggcgcagatgactatcgcggcggaggaggtgtttgtcaatatagcccgctacgcgtacgaccaaaggagcggcggcgccacggtgcgcgtggcggtcggcgacgagataatggtagagtttgaggatggcggaaaaccatataacccgatagacaaaaaagatccggacatcacggccggcgcggagaaacgcgaggttgggggcctgggggtctttatggtcaagaagcttatggacagcgtggagtataagcgcgataacgggaaaaatgttttaacgttgcggaaaaaagtggcgtcggcgccggctttggtttga

SEQ ID NO: 9488 - protein, 130 aa, Unknown
  Obtained from environmental sample
  misc_feature (1)..(130): Xaa is any amino acid
MGNLNMVIRFISERLEAAGCTMKQQAQMTIAAEEVFVNIARYAYDQRSGGATVRVAVGDEIMVEFEDGGKPYNPIDKKDPDITAGAEKREVGGLGVFMVKKLMDSVEYKRDNGKNVLTLRKKVASAPALV

SEQ ID NO: 9489 - DNA, 822 bp, Unknown
  Obtained from environmental sample
  misc_feature (1)..(822): n is a, c, g, or t
atggggtattttaattttaatttgggaagcaatccgcgccgctggttttcccatagcggccctgaactaatcccaattcttggtgacgaaataattcaattcagggaatggaacccctggaaccctgttcgcggcgttaacccgttggtcgctcttgccctggagctagagcaagactattttgcgaacaaggcgaattcccagttgctaaaaaacaacgctataccgcaaggcatactgaaaactgaacagacactgcgaccggaagaagccgaccagcttgaaaagcgatgggaaagcaagtatggggctgttagggcagggcgcaagattgcggttttgggaaaaggaacaagttttgaggcgttaagctttagccctgacgttgtaaagctatttgaattaaaaaaatggaacctttacacgatacttgcgaagtacggaataccgccgagagtagccaacattagcgataggactactgcgctttccggcaaggatacagccgaacagcacagcgcattttggaaatatacattaattccaatcctgaaacagtttgagcaaatactggagagccaattttttcttaggtttggcattggggagcgaggtgtctttgatttatgggatgttccagagttacaggaaagcgaagacgcacaaagcaaaagagatattgcggaaataaatgccggattaaaaacaatcaacgatgtgttaaaagagcgtggcaaggagcctaagccctggggcgatgtttggtatcgccccaagaactttgtcccaactaacagcggcaaggacggcgatggcgaataa

SEQ ID NO: 9490 - protein, 273 aa, Unknown
  Obtained from environmental sample
  DOMAIN (1)...(242): Phage portal protein
  misc_feature (1)..(273): Xaa is any amino acid
MGYFNFNLGSNPRRWFSHSGPELIPILGDEIIQFREWNPWNPVRGVNPLVALALELEQDYFANKANSQLLKNNAIPQGILKTEQTLRPEEADQLEKRWESKYGAVRAGRKIAVLGKGTSFEALSFSPDVVKLFELKKWNLYTILAKYGIPPRVANISDRTTALSGKDTAEQHSAFWKYTLIPILKQFEQILESQFFLRFGIGERGVFDLWDVPELQESEDAQSKRDIAEINAGLKTINDVLKERGKEPKPWGDVWYRPKNFVPTNSGKDGDGE

SEQ ID NO: 9491 - DNA, 828 bp, Unknown
  Obtained from environmental sample
  misc_feature (1)..(828): n is a, c, g, or t
atgacttctcttttctggagtcatatatgcggtttgataaagaacgatataaaaaagaagaatgaaaagcttacaacggatattgcggtatttcaggctgtatatattatcgaggttattaacagcttttttagatctacggcggccaagcggcgggagacggaaacggcttttagaaatttggagagccagctggccaagccgccttatttatacaccatggatcaaatagtgaagttttcagggcccggaggggggcctcttttaggtcagtatacctccgatgaactttccgaatggatgaaaaggcaaataactgaaagcaaaaacgatgaacttccggctttgcttattgtcaaggtaaaaaccagagacgaacaacagtactttttacttaaagaaaaagtgatgcctctttgcgcccggcttcttcatgacggaaaaattctgattagaagggcaattaccaagcagtggagcaaattaatctcaaatttcgaaaatgatttggcaatgacatatgacgatgagtttgagaagctccttgccaagactgccgagaagcactgccctgaactcatgtctctgatttctgatccaaaattctttttgatattccaggagatggataaaaaggatagcatcccgcctgccatgagaattatttatgaagggaaacttcttccttattcttccttgtttcttatcaagcgaaaggccatgctacaggaagcaaagtttgcgcttcctttctggttttccatgccccttatctccgatttaattaaattttttaaaaatctcttaaaaaagaaaagaaggtggtaa

SEQ ID NO: 9492 - protein, 275 aa, Unknown
  Obtained from environmental sample
  misc_feature (1)..(275): Xaa is any amino acid
MTSLFWSHICGLIKNDIKKKNEKLTTDIAVFQAVYIIEVINSFFRSTAAKRRETETAFRNLESQLAKPPYLYTMDQIVKFSGPGGGPLLGQYTSDELSEWMKRQITESKNDELPALLIVKVKTRDEQQYFLLKEKVMPLCARLLHDGKILIRRAITKQWSKLISNFENDLAMTYDDEFEKLLAKTAEKHCPELMSLISDPKFFLIFQEMDKKDSIPPAMRIIYEGKLLPYSSLFLIKRKAMLQEAKFALPFWFSMPLISDLIKFFKNLLKKKRRW

SEQ ID NO: 9493 - DNA, 636 bp, Unknown
  Obtained from environmental sample
  misc_feature (1)..(636): n is a, c, g, or t
gtgaataaaaaaataataggccttaccggtaactactgcgcggggaaaaactatgtggctgccattttggagcggcgtttcattccggttcttgatgttgacaagctgaggcaccatgccatcgagactgaaaaaaagcggcttntggaacgttttggcaatgacatcntgagccaagacgggtctatgtctatgtctatcgatcgcaagcggctgggcaataaagtttttggaaaaccggaagaactacaggccctggaggaaataatccaccctgtcgcaaacagggaaacccttgcgtggatcaatgcgcggcgggaaagcgcctgcgtaataaacgcggctctgcttcatcgctcgtcggcttttgaaatgctggatgcggtcattatcgttgaagcccccttttttgtcaggcttctcagggccagaaagcgggatcgcctgccgtggacagcccttttaaagcgttttaaaagccaaaaaaaattcaaagctcaactttttaagaaaatagccgatatatacaaagtgaagaactctgcttgtttcagttttaataaggattcctcagaaaaaaagctggacaaacggatcaacgaaattctttcgattgaagggataacgctggtgtaa

SEQ ID NO: 9494 - protein, 211 aa, Unknown
  Obtained from environmental sample
  DOMAIN (4)...(185): Dephospho-CoA kinase
  misc_feature (1)..(211): Xaa is any amino acid
MNKKIIGLTGNYCAGKNYVAAILERRFIPVLDVDKLRHHAIETEKKRLXERFGNDIXSQDGSMSMSIDRKRLGNKVFGKPEELQALEEIIHPVANRETLAWINARRESACVINAALLHRSSAFEMLDAVIIVEAPFFVRLLRARKRDRLPWTALLKRFKSQKKFKAQLFKKIADIYKVKNSACFSFNKDSSEKKLDKRINEILSIEGITLV

SEQ ID NO: 9495 - DNA, 525 bp, Unknown
  Obtained from environmental sample
  misc_feature (1)..(525): n is a, c, g, or t
ttgagtatgaatttacatactctgattttaacgaaagagggtaagatgacagataacaaaataaaaatgataaacccgctgtttacggcgattctatttttcggcctgttctctgttccgctttttgcgcagacagccgacgaactggaagaacttttgcaagttaaaaccgtaaattacgcgcaggcggcgcgttttgtactggaagcggcggacgcggcggcgctgaaagacgcaaacgcggcttttacgtttgccgcagaacgcgcgtggcttccggaaaaagcgtccgcggagcaagctgtaagacttgactgcattgcgcttcttctcatgatggcgttcgaggtcaagggcggtatttggtattcaattgcgaaaaacccacactacgcgtaccgtgaacttgtatatcaggatattattcaaggcaaaaccgacccggaaatgactttaacaggggaacagtttttatttattgttaacaggcttctgtctctccgtgaaggaagggatcaaaaatga

SEQ ID NO: 9496 - protein, 174 aa, Unknown
  Obtained from environmental sample
  misc_feature (1)..(174): Xaa is any amino acid
MSMNLHTLILTKEGKMTDNKIKMINPLFTAILFFGLFSVPLFAQTADELEELLQVKTVNYAQAARFVLEAADAAALKDANAAFTFAAERAWLPEKASAEQAVRLDCIALLLMMAFEVKGGIWYSIAKNPHYAYRELVYQDIIQGKTDPEMTLTGEQFLFIVNRLLSLREGRDQK

SEQ ID NO: 9497 - DNA, 351 bp, Unknown
  Obtained from environmental sample
  misc_feature (1)..(351): n is a, c, g, or t
atggcgagtgtggcggagttatcaaaatatttagccgagcatttgaaaaacattatcccaatatacaaggaaaaacgcgaccaaatggtgaattgcattgaaaagtattttccaaaatctttcaaatatcaagttccgaatggcggtatgtttgtatggggctattttgacgatgaacgcgacttgcttgcgtgtttcaaagaaatagttgatcttggagtggcatatttgcccggcacgcactttttcccagatggtggtgggaagaatactatgaggttgaatttctcaaatgctacgcttgagcagatagagaagggaattaagattattggggagtattttgtctga

SEQ ID NO: 9498 - protein, 116 aa, Unknown
  Obtained from environmental sample
  misc_feature (1)..(116): Xaa is any amino acid
MASVAELSKYLAEHLKNIIPIYKEKRDQMVNCIEKYFPKSFKYQVPNGGMFVWGYFDDERDLLACFKEIVDLGVAYLPGTHFFPDGGGKNTMRLNFSNATLEQIEKGIKIIGEYFV

SEQ ID NO: 9499 - DNA, 537 bp, Unknown
  Obtained from environmental sample
  misc_feature (1)..(537): n is a, c, g, or t
atgtatctacttcacctgaaaaaaacatgtaatctttttgaaaacatagttaaaaaccttaataaagctttctctaatttaaagtacgaaggagtaaagtttgaagcaaagtctaaaccaaagcagatatggaattacgaagaagttgaagacaaaatggatggatcaaaaagctatcttgctagtactatttcaactaataaaattaatttcagttttccttatgatggaggctctagctttaatttaattattagaagtaagaaaaaacaaaatgaagtacttttaaaagtatctaaaggacaattcggcggtaccaaagcttgtcgcgtaaaatttgatgatgatcctcctgttttttacgattacgaaggcacaactgattacagcagtgatgttatctttttcaacaatccaaaaaaatttattaccagcctgaaaaaagctaaaaaactaatgataggatgtacattttttcaagagggagtaagaataatagagtttgatgatgtacagagtttagaatgggacagataa

SEQ ID NO: 9500 - protein, 178 aa, Unknown
  Obtained from environmental sample
  misc_feature (1)..(178): Xaa is any amino acid
MYLLHLKKTCNLFENIVKNLNKAFSNLKYEGVKFEAKSKPKQIWNYEEVEDKMDGSKSYLASTISTNKINFSFPYDGGSSFNLIIRSKKKQNEVLLKVSKGQFGGTKACRVKFDDDPPVFYDYEGTTDYSSDVIFFNNPKKFITSLKKAKKLMIGCTFFQEGVRIIEFDDVQSLEWDR

SEQ ID NO: 9501 - DNA, 456 bp, Unknown
  Obtained from environmental sample
  misc_feature (1)..(456): n is a, c, g, or t
ttgatcgataccaggcgcggtgaaaacctgaattggtttataataacggcagacagttttgtccgctttgtcacggcccagcaaaaagaaattctaaacacggatgggcatctgtacataaaacggatcatcgcgattcccggcgacgagatcagcatgaacaattttgtcttcagggtaaagccagagggcaatatgtatgtttttacggaatttgaactttccgaccgcccctattacccgaacataccccaggtacccgtcatttgggatgagacgcttcccttttcagggtacatggacagcataacgctcggccccggcgagtatttcgtcgtttccgacgacaggggcaattcaggcgattcgcgaacatgggggccggttaaagcgaaaaaattaattggaaagcccgtattccggttctggcccatcccgcgaatcggccggccttag

SEQ ID NO: 9502 - protein, 151 aa, Unknown
  Obtained from environmental sample
  misc_feature (1)..(151): Xaa is any amino acid
MIDTRRGENLNWFIITADSFVRFVTAQQKEILNTDGHLYIKRIIAIPGDEISMNNFVFRVKPEGNMYVFTEFELSDRPYYPNIPQVPVIWDETLPFSGYMDSITLGPGEYFVVSDDRGNSGDSRTWGPVKAKKLIGKPVFRFWPIPRIGRP

SEQ ID NO: 9503 - DNA, 636 bp, Unknown
  Obtained from environmental sample
  misc_feature (1)..(636): n is a, c, g, or t
ttgctgcgcagcgtccgccgctgctgcaatgcccgccgccgggcggtgatcgtattctttgccgaaaccgtgaaataccagataatatacgccgatcctccgtggaagtacctttggggcgggggcaaagacggagggcatttcgcccccgaaaagcactacgaaacgatgtccaccgacgagatatgcgccctggacgtgaaacggctgcgcgacaaaaactgcgccctcttcctttgggcaaccatgcccgcccttcgcgacgcgtttgcggtcatggatgcctggggctttaagtacaagacctgcgccttttcgtgggtaaagacgaaaaaagacggcaccccgctgcacggcatgggaagctacacaaaagcaaacatcgaaatttgcctgcttgggatgaaggggcatattaaatccgtagacaaaaccgtcccccagatagtaatgcacccaaggatggggcactcggtaaagccgcccgttgtcagggacaggattgtccagctctttggggacctaaagcgccttgaagttttcgcccgccaaaagacggaaggctgggatgccatcggctatggcattgacgggataagcgttcaggagaaaatcagggctatgtgcggaatgtag

SEQ ID NO: 9504 - protein, 211 aa, Unknown
  Obtained from environmental sample
  DOMAIN (26)...(195): MT-A70
  misc_feature (1)..(211): Xaa is any amino acid
MLRSVRRCCNARRRAVIVFFAETVKYQIIYADPPWKYLWGGGKDGGHFAPEKHYETMSTDEICALDVKRLRDKNCALFLWATMPALRDAFAVMDAWGFKYKTCAFSWVKTKKDGTPLHGMGSYTKANIEICLLGMKGHIKSVDKTVPQIVMHPRMGHSVKPPVVRDRIVQLFGDLKRLEVFARQKTEGWDAIGYGIDGISVQEKIRAMCGM

SEQ ID NO: 9505 - DNA, 492 bp, Unknown
  Obtained from environmental sample
  misc_feature (1)..(492): n is a, c, g, or t
gtgaacgagtttaagaaaacaacaataggtaaacccgcgcaatggcttatagaggccgccgccgaaatagggctggacgtttcagggcttgcccatgaagtaacaaacagctttatagaccatgtgtttaagcagcacggaaacgaaaaaagcgaaagggcgcgaggtcaaatcgccgttacgcaggacgatatcgcaaaaatacccggcatagtgaaagagcctgactatgcgattataggcataaggagagacggcgaaacccttatagcctattcaaaaaaatatgaaaacaacacggccatttattatgaggaagttttgaccggcaaaaaaaataagtcattaagaagcaagactatgtttattaaaataggggacatgagcaatgaggcttttataaacattgcggggaaccatgcgcacgtcgatatgtcaggggtaaaaatagtggtaggggccggaggccatcccgacgggggaacgcagtaa

SEQ ID NO: 9506 - protein, 163 aa, Unknown
  Obtained from environmental sample
  misc_feature (1)..(163): Xaa is any amino acid
MNEFKKTTIGKPAQWLIEAAAEIGLDVSGLAHEVTNSFIDHVFKQHGNEKSERARGQIAVTQDDIAKIPGIVKEPDYAIIGIRRDGETLIAYSKKYENNTAIYYEEVLTGKKNKSLRSKTMFIKIGDMSNEAFINIAGNHAHVDMSGVKIVVGAGGHPDGGTQ

SEQ ID NO: 9507 - DNA, 417 bp, Unknown
  Obtained from environmental sample
  misc_feature (1)..(417): n is a, c, g, or t
gtggtaccccgcctagctccctccgccgaagacatccccgatatgattttcggcttgagggcggtaacttttgtaagatcaaacgccatattggttgttaaagacctagccgcgacaggcataagcggcgggcaagtgaaccgcatctggcctacaacgcaagcccttgaacgaagcgccgccgcaattgaggcagccgcaggaaaagacggcccactagcggacggccagcacgccagggttctagcctcggacgctttctttcctttcgcggacggggtcgaggccgccgccgccgccggaataaaagccatcatccagcccggcggttccgtcaacgataacctttccatcgaagcctgcgacagtttgggtgtcgcgatggtatttacgggaacaaggcattttaagcattag

SEQ ID NO: 9508 - protein, 138 aa, Unknown
  Obtained from environmental sample
  misc_feature (1)..(138): Xaa is any amino acid
MVPRLAPSAEDIPDMIFGLRAVTFVRSNAILVVKDLAATGISGGQVNRIWPTTQALERSAAAIEAAAGKDGPLADGQHARVLASDAFFPFADGVEAAAAAGIKAIIQPGGSVNDNLSIEACDSLGVAMVFTGTRHFKH

SEQ ID NO: 9509 - DNA, 570 bp, Unknown
  Obtained from environmental sample
  misc_feature (1)..(570): n is a, c, g, or t
ttggaagaatatgtcgacgctttcactttcagccgttttgagcctaacggcatggtgcagggacatgattacgtgaaaatggcgacaagcgttattgattatgtgttccgcgatcttgcgatcagttatctgaaacgcagtgatttgggacaggtaaaacctgaggatcttgttgccaccgcgacaaaaaatgaaattgatatgccggaaggaaaacagcgtactgaaaaacaggaaaaacaaccggcgggatttaggcctcacgcgacagtcgccgcttcttccgctcccgcgccgcagtcagttaggcaggttatgaaaggggcaggaaaccagggaagtgtaaccaaagccgcgaattactcatcgccgtttgcggcgcagccgcagacacaagtcgcggtgctggaagaatcctatcctgaagaaagcgaagttataaaaatagtacaggcgcgtatcaagggttacgaaggcgatccgtgttcttcctgcggttcatttactcttgtaagaaacggaacgtgcatgaaatgcgatacctgcggcggtactacaggctgttcataa

SEQ ID NO: 9510 - protein, 189 aa, Unknown
  Obtained from environmental sample
  misc_feature (1)..(189): Xaa is any amino acid
MEEYVDAFTFSRFEPNGMVQGHDYVKMATSVIDYVFRDLAISYLKRSDLGQVKPEDLVATATKNEIDMPEGKQRTEKQEKQPAGFRPHATVAASSAPAPQSVRQVMKGAGNQGSVTKAANYSSPFAAQPQTQVAVLEESYPEESEVIKIVQARIKGYEGDPCSSCGSFTLVRNGTCMKCDTCGGTTGCS

SEQ ID NO: 9511 - DNA, 594 bp, Unknown
  Obtained from environmental sample
  misc_feature (1)..(594): n is a, c, g, or t
atgaaagacgccgcgttaccagctacattcggccacttcgacgactccgcccgcgagtacgtcatcacaaacccccaaacgccgtacccgtggataaactacctcgggaaccaagactttttctccctcatctccaacacggccggcgggtactgcttttacaaggacgcgaggctgcgacgcataacgcgataccgttataacagcgtccccatagacaccaacgggcgctacttctacataaacgacggcggcgacgtttggtcgccctcctggaagcccgtcaaggcagacgtttcggactactcctgccgccacggcatggggtacacagtcataagcggcgcccgtaacggcatagccgccgaggcgctcttcttcgtaccgctcaatttcaacggcgaggtgcacaaggtcaaattgacgaacacctccaaaaacgcgaaaaagttcaccctattctcaatggtggaattctgcctttggaacgcccaagacgactccacgaactaccagcgcaacctanacaccggcgaggtggagatcgacgggtctaccgtctaccacaaaaccgaatacccgggagaggcgtaa

SEQ ID NO: 9512 - protein, 197 aa, Unknown
  Obtained from environmental sample
  DOMAIN (8)...(71): Putative carbohydrate binding domain
  misc_feature (1)..(197): Xaa is any amino acid
MKDAALPATFGHFDDSAREYVITNPQTPYPWINYLGNQDFFSLISNTAGGYCFYKDARLRRITRYRYNSVPIDTNGRYFYINDGGDVWSPSWKPVKADVSDYSCRHGMGYTVISGARNGIAAEALFFVPLNFNGEVHKVKLTNTSKNAKKFTLFSMVEFCLWNAQDDSTNYQRNLXTGEVEIDGSTVYHKTEYPGEA

SEQ ID NO: 9513 - DNA, 474 bp, Unknown
  Obtained from environmental sample
  misc_feature (1)..(474): n is a, c, g, or t
ttgtacttcggcggatcgggaagccatcctgccggtgaatcgtattcgctggcgcgtgttgcaaagcttagcgaagatatgctgcagtttgccgaagaaccaagacctattgttcttttagacaagaaaggcaaacccattagaggaaattacgaattttttgaagctgcatggatgcacaaatacaacggaaaatactatttttcctattctaccggtcattcacattttttgtgttatgcgataggcgataatccctacggaccgtttacatatgggggaattattttaactccggtagtaggctggactactcatcattcaattgtcgagttcaagggaaagtggtggttgttttttcacgacagccgtccctccggcgatgtaacatggcttaggagcataaaggtaattgaaatgagatacaacgaggatgggacgattcaaacgattaagggcggcggttattggtaa

SEQ ID NO: 9514 - protein, 157 aa, Unknown
  Obtained from environmental sample
  misc_feature (1)..(157): Xaa is any amino acid
MYFGGSGSHPAGESYSLARVAKLSEDMLQFAEEPRPIVLLDKKGKPIRGNYEFFEAAWMHKYNGKYYFSYSTGHSHFLCYAIGDNPYGPFTYGGIILTPVVGWTTHHSIVEFKGKWWLFFHDSRPSGDVTWLRSIKVIEMRYNEDGTIQTIKGGGYW

SEQ ID NO: 9515 - DNA, 747 bp, Unknown
  Obtained from environmental sample
  misc_feature (1)..(747): n is a, c, g, or t
gtgggaaaaaccgagcttgcaaaaacgctcgcggattttttgttcaatgacgaaaaagcccttacccgcatcgacatgagcgagtacggagaaaaacactcggtaagcagattaatcggcgctcctcccggctacgtcggttacgagcagggcggccagttaacggaggcggtacggcggcggccttacagcgtgatcctctttgacgaaatagaaaaagcccatcaggaagtgttcaatgttttcttgcagatactcgacgacggccgcctgacagacggacaggggcgcgttgtagattttaagaatgttatcattattatgaccagcaacttaggctcggacttgattctcagcgcgaaaaaccctgaaactttgcgtaactcgcttttggaattattgaaacaaagtttcaggccggagttcttaaacaggatagacgagacagtaattttcaacaggctggagaaaaacgaaatcaacaaaatcgtggatattcagctaacgcgtctttcgcacaggcttgcggagcgcaagattacgctgaaggtgacagacgcggcaaagtccctgcttgccgaaaggggctatgatcccatgttcggagcgcgtcctttgaagcgcacgattcagtccgaccttgagaacccgctggcaaagcaggttattgcgggcgcaatccgcgacggagagacggtgacggcggacgtgtcgggcggcgggattgtgtttaagaagcaaaaatag

SEQ ID NO: 9516 - protein, 248 aa, Unknown
  Obtained from environmental sample
  DOMAIN (2)...(149): ATPase family associated with various cellular activities (AAA)
  misc_feature (1)..(248): Xaa is any amino acid
MGKTELAKTLADFLFNDEKALTRIDMSEYGEKHSVSRLIGAPPGYVGYEQGGQLTEAVRRRPYSVILFDEIEKAHQEVFNVFLQILDDGRLTDGQGRVVDFKNVIIIMTSNLGSDLILSAKNPETLRNSLLELLKQSFRPEFLNRIDETVIFNRLEKNEINKIVDIQLTRLSHRLAERKITLKVTDAAKSLLAERGYDPMFGARPLKRTIQSDLENPLAKQVIAGAIRDGETVTADVSGGGIVFKKQK

SEQ ID NO: 9517 - DNA, 678 bp, Unknown
  Obtained from environmental sample
  misc_feature (1)..(678): n is a, c, g, or t
ttggccgcggttacatcggcgagaggtacgactgcgagaggtgcggctgcgaatcaggaccaaacgtctgggactgctaccggaacttcgcaatacaatcccgtgcaaacaaccaccgcgccgggtactaccgtaacctcaggccagttgccagggataaatgtcgtggttacaaattcatctccggttaccactcccaccgctcccgtgtatcctccagcttatcctcctcccgtgtatccgtaccctcctcccacgtaccctcccgcatattcaagaagtgaaccaaatagtggtgacagaataatagtaattaacacaaatcctaacccttcttatccgccgtcggcatccgcgcctttaccggcgccaacgccagcagcatcttcatcacaaagtaacagcgcgtatttggcatggatgatggcaatgaccgtagaagcgcgcgaaatgagggcggctcgngaagaacgtgaaatgcgcgaggcgagggaagcgcgcgaaatacggggattacggattgcccgcgaagaacgtgaggcaagagaaattcgcgagatgaggggagaaagggaagcccggaaagcgagagccgcgcagattgcccgtgaagagcgtgaggcaagggaagcccgcgatgcgntggatgacttaataataggagagttatcaccatga

SEQ ID NO: 9518 - protein, 225 aa, Unknown
  Obtained from environmental sample
  misc_feature (1)..(225): Xaa is any amino acid
MAAVTSARGTTARGAAANQDQTSGTATGTSQYNPVQTTTAPGTTVTSGQLPGINVVVTNSSPVTTPTAPVYPPAYPPPVYPYPPPTYPPAYSRSEPNSGDRIIVINTNPNPSYPPSASAPLPAPTPAASSSQSNSAYLAWMMAMTVEAREMRAAREEREMREAREAREIRGLRIAREEREAREIREMRGEREARKARAAQIAREEREAREARDAXDDLIIGELSP

SEQ ID NO: 9519 - DNA, 405 bp, Unknown
  Obtained from environmental sample
  misc_feature (1)..(405): n is a, c, g, or t
atgaaactcaggcggcacaaaaagcccggcatactggaatcatccgcggcaagcgatctggctttcctgctgattatctattttattgtcattgccggttttaatatcaacaaggggttcctggtaaacctgcccgccaaagattccacgcgcatgatcctcaaggaagacctcctgcgtttcagcctggacaacgacgggtatctgcttttcgagggcgagtcagtcagtatccgggaagccggaaatttaataagatcggcaagggcagctaaccccgatatagccgtaattctgaccatagaccctcaggcaaaatggcaaagggtggtatcgtttgtggagcttgcccagcagcagaaaattgaggcgttctcgttcacattgaagaaggatgcagaatga

SEQ ID NO: 9520 - protein, 134 aa, Unknown
  Obtained from environmental sample
  DOMAIN (13)...(132): Biopolymer transport protein ExbD/TolR
  misc_feature (1)..(134): Xaa is any amino acid
MKLRRHKKPGILESSAASDLAFLLIIYFIVIAGFNINKGFLVNLPAKDSTRMILKEDLLRFSLDNDGYLLFEGESVSIREAGNLIRSARAANPDIAVILTIDPQAKWQRVVSFVELAQQQKIEAFSFTLKKDAE

SEQ ID NO: 9521 - DNA, 318 bp, Unknown
  Obtained from environmental sample
  misc_feature (1)..(318): n is a, c, g, or t
atggtctgcattaatcccctggagaacggttttaacttccttgtcgcgcttggctcgctttccccgctgaccggttttttgggaacagtatcgggaatgataggcgcgttcaggtccatagccgaggcaaccgaggtaaacgcgcaaatcgtcgccaacggcatatacgaggctctgattaccacggtattcggccttatcatcgcgatagcggctatggtattccattcggtctttacccacatcgtcgataaattcgccgccgaagtggaaaagaactgctccgacctgatcgcggaaatcgccggccagcaataa

SEQ ID NO: 9522 - protein, 105 aa, Unknown
  Obtained from environmental sample
  DOMAIN (1)...(95): MotA/TolQ/ExbB proton channel family
  misc_feature (1)..(105): Xaa is any amino acid
MVCINPLENGFNFLVALGSLSPLTGFLGTVSGMIGAFRSIAEATEVNAQIVANGIYEALITTVFGLIIAIAAMVFHSVFTHIVDKFAAEVEKNCSDLIAEIAGQQ

SEQ ID NO: 9523 - DNA, 897 bp, Unknown
  Obtained from environmental sample
  misc_feature (1)..(897): n is a, c, g, or t
atggtcagaatcggcacgagnttatatgaaaattatgaaaatatacagggtattaataccataggacgatatagcggtctgtggtattcgcggaattttaatattgataattttgtcagtaacagtatcattagaaattcgttgtggttttcatttcttaaaatttcccctcccccatttagaaaaattatttatgacgacggtcaatattggaaaatcatgaaaaataacgagctaaatgaagaatttattaactcctacgctattctggattttctacccaatctaaccgcctatgattctgaaaagccttccgcccaattaatcactaacgagacaactcatcaaccgattttacttcaatatccgtcatatacgcctgttaaaaatgtaacgaattacggcattggtaaatattcgaaagatcgttattttcatattaacagcgcggcttatcttaaaataggagaatggtttgaagaactgaaaaagaatcatgtttacaataactcaaggattattattgtttcagatcatggttccaatataaatgctgaaattgctgatacggaattgacaataccttatgaacgaagagagtcatataatccgatacttttatttaagaattttaacaataccggtaaattaaaaattgataatattcttatgactaacgccgatgttccgtttcttgcgttagatggaatcgctcaaacaataaatccttttacaggaaagtcattaaatgaaaatccaaaatctcaaggattatatattacaacaaatcatttatggcagccgtttaaacatagcaaaaaaacatttaatattagtaatgatcaatggctttttgtacatgataatatttttgatcctaatattgggaaaaggtaa

SEQ ID NO: 9524 - protein, 298 aa, Unknown
  Obtained from environmental sample
  misc_feature (1)..(298): Xaa is any amino acid
MVRIGTXLYENYENIQGINTIGRYSGLWYSRNFNIDNFVSNSIIRNSLWFSFLKISPPPFRKIIYDDGQYWKIMKNNELNEEFINSYAILDFLPNLTAYDSEKPSAQLITNETTHQPILLQYPSYTPVKNVTNYGIGKYSKDRYFHINSAAYLKIGEWFEELKKNHVYNNSRIIIVSDHGSNINAEIADTELTIPYERRESYNPILLFKNFNNTGKLKIDNILMTNADVPFLALDGIAQTINPFTGKSLNENPKSQGLYITTNHLWQPFKHSKKTFNISNDQWLFVHDNIFDPNIGKR

SEQ ID NO: 9525 - DNA, 708 bp, Unknown
  Obtained from environmental sample
  misc_feature (1)..(708): n is a, c, g, or t
ttgccggatgggaccgggatgcaggtatacgcgcctatagcggagcgctatgggctacgggcttcggcggccaacgacgtgacgtcggtggctctggcggagcttatgttcggggcggggcgcggggttcagaacatggtctgcttcgccctcggaaccggcgtgggcgggggcatcgtgaccaacggacggctctacaagggcagccacgggatggcgggagagatcgggcacattgtggtggagacggacggggagctgtgcccgtgcggccagcgcggctgcgtggagcgatacgcctcggcgccggggatcgtgaaagcggcggttgatgcggtcaccttgggcgtcggttggacgacggagcttgcaaaaatcgttcgcgaaaatccgggcgacgttaccagcaagacggtgtatgagtacgtggctaagggcgacgcgctggcgttgcacgtacatgagaaagcctgcgacatgctcgggcgcgccgtggggataatcatcaacaccttctcgcccgacagggtggttttgggtggtggcgtgatgatggcggggagcgtggtgcttgaggcggtcaaaaaatacgcggcgctccactgctggccggagatattcaagctctgcgagatcgtgcccgcgcagatgggcgaggattccggggtgcttggcgctggcgcgcttgcgcttgaggagttcggctga

SEQ ID NO: 9526 - protein, 235 aa, Unknown
  Obtained from environmental sample
  DOMAIN (2)...(105): ROK family
  misc_feature (1)..(235): Xaa is any amino acid
MPDGTGMQVYAPIAERYGLRASAANDVTSVALAELMFGAGRGVQNMVCFALGTGVGGGIVTNGRLYKGSHGMAGEIGHIVVETDGELCPCGQRGCVERYASAPGIVKAAVDAVTLGVGWTTELAKIVRENPGDVTSKTVYEYVAKGDALALHVHEKACDMLGRAVGIIINTFSPDRVVLGGGVMMAGSVVLEAVKKYAALHCWPEIFKLCEIVPAQMGEDSGVLGAGALALEEFG

SEQ ID NO: 9527 - DNA, 804 bp, Unknown
  Obtained from environmental sample
  misc_feature (1)..(804): n is a, c, g, or t
gtgggcgacgacgaccagagcatctacggctggcgcggcgcgaagattgagaatatcctcacgttgnaagaggcgttcccgggcacgaaggtattcaagctggaggagaattaccgatcgacgagcgcgattttgaagttcgctaacgccgcggtgaagccgaatttggtccgcgcccgaaaggagttgtggacgagcgtggccgagggggcgccggtgactatcagccgtttccgggacgaccgccaggaggcggattacgtcgcctcggagtgcgatgggctgctgcggaggatggccgggacggaggtcgcggtgctcttcaggacaaactcccagtcgcgggtcttcgaggagtctttccgtaagcgccgtattccatacgttttggtgggcggcacgagtttctacgagcgggcggaggtgaaggactgcatggcctacctgcgtctgcttgtgaatcccaaagacggcgtgagcttcgagcgtatagcgaacgttccggccaggggccttggcgataaggcgctcgagtcgctatccgtgttggccaaagagaggggcatgtcgctgctgcaggccgttttgtcgggcgaggccgaggcgctgaacgtccgcagcaggaaggggtttgccgatttgcgggagttgtacgcgttgcttatcgagcaattggaggccggctcgccgcccgccgaggtgttgagggatatgcttaaggtgagcggctacatggacatgctgaccgagcgcgccgcgcaatcggaggaggaagcggctcgtgtggaaaacggaacgagctga

SEQ ID NO: 9528 - protein, 267 aa, Unknown
  Obtained from environmental sample
  DOMAIN (2)...(244): UvrD/REP helicase
  misc_feature (1)..(267): Xaa is any amino acid
MGDDDQSIYGWRGAKIENILTLXEAFPGTKVFKLEENYRSTSAILKFANAAVKPNLVRARKELWTSVAEGAPVTISRFRDDRQEADYVASECDGLLRRMAGTEVAVLFRTNSQSRVFEESFRKRRIPYVLVGGTSFYERAEVKDCMAYLRLLVNPKDGVSFERIANVPARGLGDKALESLSVLAKERGMSLLQAVLSGEAEALNVRSRKGFADLRELYALLIEQLEAGSPPAEVLRDMLKVSGYMDMLTERAAQSEEEAARVENGTS

SEQ ID NO: 9529 - DNA, 489 bp, Unknown
  Obtained from environmental sample
  misc_feature (1)..(489): n is a, c, g, or t
gtggccaggggaactgcggcgtcttactccgcccgctggcgttttgatcttggtctgcgcctggcagctaccgatctcttgccgggcgaaaagaagcgagcggtagttttcgtaggagcgggcgttgcttccggcgcatccggaagtcttggctcctttgatcaatacagcctttcggagcttgccgcgtacctttccaacaacaatgtggttttttgcgccgtcatagtaggcggcggatctgccgccgccgacgtgcgcttcctttgcgagcaaacgggcggcaaggttctttcgctgtaccgaagcgaaggcatcacgcccgaaatccgcagtctgcgtgaaaggtcatccggctactacgtcctaagttacagatcacagttgccgacggatttcgggcgggcatacctgcctcttgaagcggaagtgtaccttatggagagatcgggcagggacagcaccggttatttctcgcctatccaataa

SEQ ID NO: 9530 - protein, 162 aa, Unknown
  Obtained from environmental sample
  misc_feature (1)..(162): Xaa is any amino acid
MARGTAASYSARWRFDLGLRLAATDLLPGEKKRAVVFVGAGVASGASGSLGSFDQYSLSELAAYLSNNNVVFCAVIVGGGSAAADVRFLCEQTGGKVLSLYRSEGITPEIRSLRERSSGYYVLSYRSQLPTDFGRAYLPLEAEVYLMERSGRDSTGYFSPIQ

SEQ ID NO: 9531 - DNA, 486 bp, Unknown
  Obtained from environmental sample
  misc_feature (1)..(486): n is a, c, g, or t
gtgttggcccacagtctttcgacaggagcgctttgggaggatattcgcatgaagggcggagcttacggcgcgtttgcgcaaagcgatacccttgataactgtgtttctttcgcgacataccgcgaccccaaccccctgcgctctcttgaaactttttccgcgatactgaataacagcgcgtacggagaatgtgatgaagacgaacttgtaaaaaacatcatcgggtgttatgcgaaagagacttacccaaagacaaacagcgaaaaagggaagatggatttttcccgttttctgacaggtatggatgaaagttaccgaaaaagaaggatagaacgccttgtatcaatttccgccgcggatatcaaggctgctttttcttcactgggaaaaagacccgcaacgggctcggtaattatcgcggggacaaaagccgcggaacaggcggcaaaagcgcttggaaccgacgtgcaagttctgccggtgtga

SEQ ID NO: 9532 - protein, 161 aa, Unknown
  Obtained from environmental sample
  misc_feature (1)..(161): Xaa is any amino acid
MLAHSLSTGALWEDIRMKGGAYGAFAQSDTLDNCVSFATYRDPNPLRSLETFSAILNNSAYGECDEDELVKNIIGCYAKETYPKTNSEKGKMDFSRFLTGMDESYRKRRIERLVSISAADIKAAFSSLGKRPATGSVIIAGTKAAEQAAKALGTDVQVLPV

SEQ ID NO: 9533 - DNA, 324 bp, Unknown
  Obtained from environmental sample
  misc_feature (1)..(324): n is a, c, g, or t
ttgcctacgggaatagtcgtcgcctgccagaatgagcgcagtcagataaaaaaccgcgcgattgccatgagtatgcttaaggcgcggctttacgagtattacagagaggagaaggagaaggaaaacgaaaaatattcgcaggagaaaaaagatatttcatggggacaccagataagatcgtatgtgttccagccgtatacaatggtaaaagattaccgtacaaaagttgaaaagggaaatattcaggctgtaatggacggcgatatcgacccttttattgaggagtatttaaaattttcatggcgtaatggagagatgaattga

SEQ ID NO: 9534 - protein, 107 aa, Unknown
  Obtained from environmental sample
  DOMAIN (1)...(73): Peptidyl-tRNA hydrolase domain
  misc_feature (1)..(107): Xaa is any amino acid
MPTGIVVACQNERSQIKNRAIAMSMLKARLYEYYREEKEKENEKYSQEKKDISWGHQIRSYVFQPYTMVKDYRTKVEKGNIQAVMDGDIDPFIEEYLKFSWRNGEMN

SEQ ID NO: 9535 - DNA, 633 bp, Unknown
  Obtained from environmental sample
  misc_feature (1)..(633): n is a, c, g, or t
atgggcgggggaagcccggacagtaacccgcggctgcgtaccgccatcctcaaggcgcggggcgcgaacatgcccaaggacaatatcgaccgagccattaaaaagggaaccggcgagcttgaaggcgtcagttacgaggaacttgtctatgaagcatacgcgccgggaggggtggcgatttttattgaggtgttaaccgacaataaaaaccgggccgcggcggacatacgcaatatcctcaccagggcgggcgggcagcttgccacgtcgggttctgtttcccgtctgttcaaacggcagggggtcattactcttgacggcgaaaaatacaccgaggatgcggtgatggaagcagccattgaaggcggcgcggaagacgtgtcaacatcagacggcatcatcgaggtgaccagcgctcccgaggattttgaaagcgtgatgaacgccctgcagtccaaaaactttgaaaccatgagcgccgaaatcagcatggttgccgaagtggaagtctcccttgaaaatgaagccacggcaaaagtcctcaagctggttgacaagctggaagacaacgaagacgtgcagaacgtctacaccaatatcagcatccccgaagggtatgagggtgacgcctaa

SEQ ID NO: 9536 - protein, 210 aa, Unknown
  Obtained from environmental sample
  DOMAIN (1)...(201): Domain of unknown function DUF28
  misc_feature (1)..(210): Xaa is any amino acid
MGGGSPDSNPRLRTAILKARGANMPKDNIDRAIKKGTGELEGVSYEELVYEAYAPGGVAIFIEVLTDNKNRAAADIRNILTRAGGQLATSGSVSRLFKRQGVITLDGEKYTEDAVMEAAIEGGAEDVSTSDGIIEVTSAPEDFESVMNALQSKNFETMSAEISMVAEVEVSLENEATAKVLKLVDKLEDNEDVQNVYTNISIPEGYEGDA

SEQ ID NO: 9537 - DNA, 387 bp, Unknown
  Obtained from environmental sample
  misc_feature (1)..(387): n is a, c, g, or t
gtgaaaatgaggaaggaatttataacctacagcgaggcgttcaagatgcaagttgtagaggagattaggcaaggcaaatttgcctcgatactacaagcacaaaaagcttatggcatttgcgggatgaacacgatacggacatggatcaaaaaatatggcaaggaggaattgctgccaaaacgagtgagggtggaaacgatgacagagattgacgagctaaaggaagcaaaaaagaggatacgcgatttggaaaaagcgctctctgacgcgcacatggactactgccttgaaagagcgtttcttgaaatagcgtgcgaacaaatgggcaccagccgggaagacttaaaaaaaaacaacgccataaggcttgcggacgggcgaagatga

SEQ ID NO: 9538 - protein, 128 aa, Unknown
  Obtained from environmental sample
  DOMAIN (7)...(87): Transposase
  misc_feature (1)..(128): Xaa is any amino acid
MKMRKEFITYSEAFKMQVVEEIRQGKFASILQAQKAYGICGMNTIRTWIKKYGKEELLPKRVRVETMTEIDELKEAKKRIRDLEKALSDAHMDYCLERAFLEIACEQMGTSREDLKKNNAIRLADGRR

SEQ ID NO: 9539 - DNA, 537 bp, Unknown
  Obtained from environmental sample
  misc_feature (1)..(537): n is a, c, g, or t
atggttcccgcgttacagcgaacaaaaataaggacgctgtttctcagccccaccagcgaaggacttcccactgtgtatccttttgacggagtgggcatatatgaccgcgagcgttttatccgtttgggaggatatgacggaacattcaaaagcgcctattggcagcttatggatttcggttttcgcgcctacctttggggcgaagaaatctcttccacgcaggcgctcaaactgtcttacgagtcatccgttcccgctgaagaaaataaaggcggtgtggactataaccgcttttaccttaaaaatcttgcccccctattccagggcgacagcgcccaactgcccctgcgccgcttccccggtttcttgctgcaaaccgacggcagcatttttgccgcatgggatgatttttccgaaacccgccgctgggtaaacgccaaccgtttccgctggcactgcgaccatcgcgccattgttaaacgttgggatctggaatccgccgaagaaaactttttccccggaaacgggggacgttaa

SEQ ID NO: 9540 - protein, 178 aa, Unknown
  Obtained from environmental sample
  misc_feature (1)..(178): Xaa is any amino acid
MVPALQRTKIRTLFLSPTSEGLPTVYPFDGVGIYDRERFIRLGGYDGTFKSAYWQLMDFGFRAYLWGEEISSTQALKLSYESSVPAEENKGGVDYNRFYLKNLAPLFQGDSAQLPLRRFPGFLLQTDGSIFAAWDDFSETRRWVNANRFRWHCDHRAIVKRWDLESAEENFFPGNGGR

SEQ ID NO: 9541 - DNA, 804 bp, Unknown
  Obtained from environmental sample
  misc_feature (1)..(804): n is a, c, g, or t
atgcgcgtaacaggaggcggcgatcccagagccggccttagggataccctatcgggcaagctgccccagatcaaaatcgcgctagaggctgcagcaggttattcatcttacggcaatcaaatcggccttgccacggggcaggtcgccgagttctaccatagcggctttctcgccaagcgtatggagctgggcgcggtaatcggcgcggtaccggaggcctgggtgcgccgtgaggaacccgttccaggcgacctggtgattctcgtggggggcagaaccggcagggacggcatcggtggcgcaaccggttcctccaaggttcacaccggcgaatccgtggagagcgccggggcggaagtgcagaagggaaacgccgtagaagagcgaaagctccagcgccttttccgtaaaagcgaagtaagccgcctgattaagcgctgcaacgactttggcgcgggcggcgtttccgtcgcggtaggggagcttgccggcggccttgacataaacctcgacgcggtgccgaaaaagtacgccggccttgacggcacggagctggctatttcggaatcccaggaaagaatggcggtactttgttcatcagacgatgcggaagcttttatcaaagcggcggcaacggaaaacctcgaggcggttatcatcgctaaagtgaaaagcgataaccgcctgcgcatgagctggcgtggcaaaaccatcgttgacatatcgcggaactttctggacaccaacggcgctccccgtactgcgaaagtcttattagtgcctgacatcaaacacgctaactaa

SEQ ID NO: 9542 - protein, 267 aa, Unknown
  Obtained from environmental sample
  DOMAIN (81)...(234): AIR synthase related protein, C-terminal domain
  misc_feature (1)..(267): Xaa is any amino acid
MRVTGGGDPRAGLRDTLSGKLPQIKIALEAAAGYSSYGNQIGLATGQVAEFYHSGFLAKRMELGAVIGAVPEAWVRREEPVPGDLVILVGGRTGRDGIGGATGSSKVHTGESVESAGAEVQKGNAVEERKLQRLFRKSEVSRLIKRCNDFGAGGVSVAVGELAGGLDINLDAVPKKYAGLDGTELAISESQERMAVLCSSDDAEAFIKAAATENLEAVIIAKVKSDNRLRMSWRGKTIVDISRNFLDTNGAPRTAKVLLVPDIKHAN

SEQ ID NO: 9543 - DNA, 612 bp, Unknown
  Obtained from environmental sample
  misc_feature (1)..(612): n is a, c, g, or t
gtggtcggcaacgccatccgcgtcggctgtgaaacgctcatggaagcgatgcgcaagcccggcggcggattctacgactacaagggcctgaaggacgcagggcgcgaagtccgccagaagggcgtatggacggccccggctgccgcctgcgacgaaaaaggcaagggcgctcccttctgctgttacatgtatggcctgttcatggccgaagtggcggtcgagcttgccaccggcaagaccacggtcgaaaaaatgaccatggtcgcagacatcggcaagatcaacaacagggtgatcgttgacggccagatatacggcggcctcgcgcagggcgtgggcctcgcgctcagcgaagattatgaggacatcaaaaagcacagcaccataaccggagcgggtattccccacatcgaggacattccggacgatatggaactcatctatgtggaaaccccgcgtcccgacgggccgcacggcgcttccggcgtgggcgagattccgctgtgcgcgccgcacccggccatcatcaacgccatcgccgccgcgtgcggcgctcgcatacggcacctgcccgcataccccgacaaggtgctgaaggctttgaagaagtaa

SEQ ID NO: 9544 - protein, 203 aa, Unknown
  Obtained from environmental sample
  misc_feature (1)..(203): Xaa is any amino acid
MVGNAIRVGCETLMEAMRKPGGGFYDYKGLKDAGREVRQKGVWTAPAAACDEKGKGAPFCCYMYGLFMAEVAVELATGKTTVEKMTMVADIGKINNRVIVDGQIYGGLAQGVGLALSEDYEDIKKHSTITGAGIPHIEDIPDDMELIYVETPRPDGPHGASGVGEIPLCAPHPAIINAIAAACGARIRHLPAYPDKVLKALKK

SEQ ID NO: 9545 - DNA, 552 bp, Unknown
  Obtained from environmental sample
  misc_feature (1)..(552): n is a, c, g, or t
atgaaaaaactctcaaaattcgcacaagtggcaggtattatgcttgccttgacattcactttttcctgctctggcggcgatgacgaaggcggtggaggcggtgttgtttatggcgagcccgtgacattcaacggtgaaacatacaagaccgtgaaaatcggctctcagacttgggctctcttttacttttcaggcacctgggatggatctaaaacggcttgtgcctctcttggcaacggttggcatttgccgagcaaagaagaatggacaaccttgattaatcacgctggcgggacaaatactgccggaaagaagctgaaagcaacgggcgattgcaatggcacagatgattacggcttttcggctgggtgtagtggtggctaccgcaactcttacggtacttaccgcgatagcgacatacagtattattggtcaactaccgtgtacggtagtagcgactacgtagccttagctctaagtaagtccgacggtgccagctttggtcatttgacttacgacagccaggcgcctgcgcgttgcgtgaagaactga

SEQ ID NO: 9546 - protein, 183 aa, Unknown
  Obtained from environmental sample
  SIGNAL (1)...(25)
  misc_feature (1)..(183): Xaa is any amino acid
MKKLSKFAQVAGIMLALTFTFSCSGGDDEGGGGGVVYGEPVTFNGETYKTVKIGSQTWALFYFSGTWDGSKTACASLGNGWHLPSKEEWTTLINHAGGTNTAGKKLKATGDCNGTDDYGFSAGCSGGYRNSYGTYRDSDIQYYWSTTVYGSSDYVALALSKSDGASFGHLTYDSQAPARCVKN

SEQ ID NO: 9547 - DNA, 495 bp, Unknown
  Obtained from environmental sample
  misc_feature (1)..(495): n is a, c, g, or t
atgggcagcgttaacaaagtcattctggtcggcaacctgggccaggaccccaagaccagcaccgggcccagcggcaagaccgtctgccgcttttccctggccaccaccgacaagttcgggggcgaggaacggacggaatggcataacatagtcctcttcgaccgtcaggcggaaatagccgacaagtatctcagcaagggccgccaggcctatattgaaggccgcctccaataccgcaagtatgaggacaaggagaccgggcaggaacgctcccggaccgagataatcggccagaccctgcaacttctgggcagccgtcccgccggcgagaattacgaaccggccgcccgccccgcggcccctccccggccgccggcccctccccgcccggcccgaccggcccccccgggccagaaccccttcggcgatgaccccttcgccggccccaaccccttagccgagccgccctcggaggacgacattcttcctttttaa

SEQ ID NO: 9548 - protein, 164 aa, Unknown
  Obtained from environmental sample
  DOMAIN (4)...(103): Single-strand binding protein family
  misc_feature (1)..(164): Xaa is any amino acid
MGSVNKVILVGNLGQDPKTSTGPSGKTVCRFSLATTDKFGGEERTEWHNIVLFDRQAEIADKYLSKGRQAYIEGRLQYRKYEDKETGQERSRTEIIGQTLQLLGSRPAGENYEPAARPAAPPRPPAPPRPARPAPPGQNPFGDDPFAGPNPLAEPPSEDDILPF

SEQ ID NO: 9549 - DNA, 465 bp, Unknown
  Obtained from environmental sample
  misc_feature (1)..(465): n is a, c, g, or t
gtggcgtccaagcacttcaaatgcacaaagtgcgagaatgtctttgagttcctgaacccaatgcaggatgggcagggcgccccccccagacaggagccaagggagccgaaggatttgacgggcggccacgcccgcctcggcgaccgcgccacttttgcggcgcgtgggcgcggcgtgatgcacttggtccacctgacgggccccagggcctccatgtcgctcgaattgactagccccaggacggtgataggaagggacgatggcgacatagtcacgaaggaccccgaaacatccaggcgccacgccatgattgaaatcatggatgacggcacagcgtggctctccgaccttggctcgaaaaacggcacattcaccggaggcaccgctatcgcaggcagaacacagctcgccgaccgccaagagttcacctgcggcaagagcgcgttcatgatcaggatgacgtga

SEQ ID NO: 9550 - protein, 154 aa, Unknown
  Obtained from environmental sample
  DOMAIN (81)...(145): FHA domain
  misc_feature (1)..(154): Xaa is any amino acid
MASKHFKCTKCENVFEFLNPMQDGQGAPPRQEPREPKDLTGGHARLGDRATFAARGRGVMHLVHLTGPRASMSLELTSPRTVIGRDDGDIVTKDPETSRRHAMIEIMDDGTAWLSDLGSKNGTFTGGTAIAGRTQLADRQEFTCGKSAFMIRMT

SEQ ID NO: 9551 - DNA, 336 bp, Unknown
  Obtained from environmental sample
  misc_feature (1)..(336): n is a, c, g, or t
atgaacaagtggatcaagccgtcaatagtgataatgggcgaaggcaactactccgacgcgcacctattccccatcgcatacaaactgaaggggctgggcagcacggtgggtatgccagtgccagggacgggaacctntgtgtggtgggagacccagatagacccgaccctcgtattcggcataccacagggcggctggcgcacactggacggcaagttcgccgaaaacaaccaactggagcctgatataaaggtggccaacgaccccgccgccctgtccaagggcagggacaaccagcttgagaccgccgtgcgctcgctgatgggggggaactag

SEQ ID NO: 9552 - protein, 111 aa, Unknown
  Obtained from environmental sample
  misc_feature (1)..(111): Xaa is any amino acid
MNKWIKPSIVIMGEGNYSDAHLFPIAYKLKGLGSTVGMPVPGTGTXVWWETQIDPTLVFGIPQGGWRTLDGKFAENNQLEPDIKVANDPAALSKGRDNQLETAVRSLMGGN

SEQ ID NO: 9553 - DNA, 912 bp, Unknown
  Obtained from environmental sample
  misc_feature (1)..(912): n is a, c, g, or t
gtgactttcctggttcttttccaggcccaggagagacgcgattctcaggcttattgccggggtcactttttctttctaggaggaaagatgagaagaaccaaagcgctatgcgctccgcttgccgcggcgcttgtaatattgctgttttttgccatgatgtccgcatgcagtgtttttttggggcctgaacccgatatcgggccgcaactggtattaaaaaatctctggaatgattttaacgaaatccacgcgtatattgacatcagaatgagttataacaggaactttgaaagctgggataatgtatacgaatactacaacaaaacattgctggacagaataccggttcctggcggctccatagacggcaagtatcttttttatctctgttgtgatatgctgggtgaactgtcggatcctcatgtaagcctgttcgcgccgggcggaaattttttctggtcaagggctgatgatacgcagaaaatagaagaaagctggttcattctttcgcttattagggaaagatatttgaaagaccagggaataaacaatggaagtttttttacttatggaaaatttatcgaaccctttaataatataggttatatgcatatcgcgtcttttattaacaacgataaacaggaaaaacaggattgggtgcgggaaattgacggcatcatggatttttttaataataatggcggtattaacgcgattgttattgatattcgcaacaattcaggcggttcaggcccggttgcggaatatatcgcctcacgttttacctccgtacaaaaaaattatatgaaagcaagcgctaaaaacggcccangccgcaatgacttttcctcgcccatgacattcaaggtaggcccgagggaacaacgttcacanaacgtacggcgttattga

SEQ ID NO: 9554 - protein, 303 aa, Unknown
  Obtained from environmental sample
  misc_feature (1)..(303): Xaa is any amino acid
MTFLVLFQAQERRDSQAYCRGHFFFLGGKMRRTKALCAPLAAALVILLFFAMMSACSVFLGPEPDIGPQLVLKNLWNDFNEIHAYIDIRMSYNRNFESWDNVYEYYNKTLLDRIPVPGGSIDGKYLFYLCCDMLGELSDPHVSLFAPGGNFFWSRADDTQKIEESWFILSLIRERYLKDQGINNGSFFTYGKFIEPFNNIGYMHIASFINNDKQEKQDWVREIDGIMDFFNNNGGINAIVIDIRNNSGGSGPVAEYIASRFTSVQKNYMKASAKNGPXRNDFSSPMTFKVGPREQRSXNVRRY

SEQ ID NO: 9555 - DNA, 348 bp, Unknown
  Obtained from environmental sample
  misc_feature (1)..(348): n is a, c, g, or t
gtgggctccatcgccccgacaaccagtatgcgcatggacggctttgtcgagatgacatttcaactgggccttgtcgggatgattggtaagggggatcgcagcgattttgtccccggcctttgcaaaaaatacggcggaatctatttcctcggcacaggcggggcctcggcgcttatttcaaaacaagttaaaagctgcgaggtgttcgcgtgggaagatttgggaacagagtccgttaaaaagttggaagttgaaaatttgcgcctgattgtcggcatagacgctcagggcagggttttccaggacggggagattgctaaataccgtcgtaatgccaccagttgctga

SEQ ID NO: 9556 - protein, 115 aa, Unknown
  Obtained from environmental sample
  misc_feature (1)..(115): Xaa is any amino acid
MGSIAPTTSMRMDGFVEMTFQLGLVGMIGKGDRSDFVPGLCKKYGGIYFLGTGGASALISKQVKSCEVFAWEDLGTESVKKLEVENLRLIVGIDAQGRVFQDGEIAKYRRNATSC

SEQ ID NO: 9557 - DNA, 486 bp, Unknown
  Obtained from environmental sample
  misc_feature (1)..(486): n is a, c, g, or t
atgctgcgggatgttaagctttcacaaggcctggaatccatagggatcaacgcgtttgcgtataacaaactggaaaacattgagcttcccgacaacctgaaagacataagagacagcgcttttgagaacaacaatctgacctctataaccataggtgacgaggttattttaataggaagaaacgcgttcgcgaataataatatacaaagtatatccattggaaacagcgttacttccattggggattttacttttcagaacaaccagctaagcggcgttatcataccagacaatgtaaaattcatcggggaattcgctttcaggaacaaccagttgaccagtataaccattggtgatgacgtatcgcttggcagggacacgttcggcgacgggtttgaggttttatataacgctttcggaaaggccgccggcgtttataagcgggataatactgtcagcaactggtggcattacgacggtatttag

SEQ ID NO: 9558 - protein, 161 aa, Unknown
  Obtained from environmental sample
  misc_feature (1)..(161): Xaa is any amino acid
MLRDVKLSQGLESIGINAFAYNKLENIELPDNLKDIRDSAFENNNLTSITIGDEVILIGRNAFANNNIQSISIGNSVTSIGDFTFQNNQLSGVIIPDNVKFIGEFAFRNNQLTSITIGDDVSLGRDTFGDGFEVLYNAFGKAAGVYKRDNTVSNWWHYDGI

SEQ ID NO: 9559 - DNA, 456 bp, Unknown
  Obtained from environmental sample
  misc_feature (1)..(456): n is a, c, g, or t
gtgcgttcggctgcgcccgatgagatattcgtttccactaccggcatggcgtcgcgggaactatacgagttgcgtaaaatggagcggatggggcacgagcgggattttttgactgtcggttcaatggggcacgcttcgtcgcttgcgctggcgatagctgcgtttaaaccggaacttcgggtgaactgcattgacggcgacggcgcggcgctcatgcacttgggcgctatggcggccgtcgggacggtctcgccggcgaatctgcggcacatagttttgaataacggcgcgcacgattcggtcggcgggcagccgacgatcgcccggcggatcgacctcgccggcatagcccgcgcttgcggctacgccctcgtatattccgtcaaaacggcgggaagagttgcgcaaggcgctcggcgaaaccgcccggcaaacgggcggcgtcgtttttattga

SEQ ID NO: 9560 - protein, 151 aa, Unknown
  Obtained from environmental sample
  DOMAIN (13)...(144): Thiamine pyrophosphate enzyme, C-terminal TPP binding domain
  misc_feature (1)..(151): Xaa is any amino acid
MRSAAPDEIFVSTTGMASRELYELRKMERMGHERDFLTVGSMGHASSLALAIAAFKPELRVNCIDGDGAALMHLGAMAAVGTVSPANLRHIVLNNGAHDSVGGQPTIARRIDLAGIARACGYALVYSVKTAGRVAQGARRNRPANGRRRFY

SEQ ID NO: 9561 - DNA, 810 bp, Unknown
  Obtained from environmental sample
  misc_feature (1)..(810): n is a, c, g, or t
atgaaggagtcgtgcatcatcgtcctagacccggtcaaccgcgacgtgatcgaacgcggcctgaaatccggcgtcagagacttcgccggcggcaactgcactgtcagccttatgctcatggcgctctccggactcttcaaacacgggcttgtagagtggatatcaagcatgacctaccaagccgccagcggcgccggcgctaagaacatgatcgaactcgccgctcagatggcgcaccttacggccgcggccaagccccttttggacaatccggcgtcgggcgccctcgatatagaccgcgcggtcaccgccgaactgcgcggaagctccatccccaccgccaacttcggcgcgccgctggccgcctcgctcatcccttggatagacaaacaggtagacggcggtcagacgcgagaggagtggaagggcgtcgcggagaccaacaagatactgggactgggtaaggaaaagacaatccccgtcgacggcatctgcgtgcgcgtgggggctatgcgctgccacagccaggggctcacgataaagatgactaaggatgttccgctaagtgaggtgaacgacatgatcgccaaggcgcacgagtgggtgaaagtcgtgcccaatgataaggagagcacgcttaaggaactgacccctacggcggtgagcggaactttgactgtgcctatcgggcggatacacaagatgaacatcgggccggagtatttgacggcgtttacggtgggcgatcagttgctttggggtgcggcggagccggtcaggaggatgttgaaaatcgccttggaattctaa

SEQ ID NO: 9562 - protein, 269 aa, Unknown
  Obtained from environmental sample
  DOMAIN (42)...(253): Semialdehyde dehydrogenase, dimerisation domain
  misc_feature (1)..(269): Xaa is any amino acid
MKESCIIVLDPVNRDVIERGLKSGVRDFAGGNCTVSLMLMALSGLFKHGLVEWISSMTYQAASGAGAKNMIELAAQMAHLTAAAKPLLDNPASGALDIDRAVTAELRGSSIPTANFGAPLAASLIPWIDKQVDGGQTREEWKGVAETNKILGLGKEKTIPVDGICVRVGAMRCHSQGLTIKMTKDVPLSEVNDMIAKAHEWVKVVPNDKESTLKELTPTAVSGTLTVPIGRIHKMNIGPEYLTAFTVGDQLLWGAAEPVRRMLKIALEF

SEQ ID NO: 9563 - DNA, 792 bp, Unknown
  Obtained from environmental sample
  misc_feature (1)..(792): n is a, c, g, or t
atggcgtcggagacgctgccggtcggtcatgaggcgttgacgccgtcggtcaacgcgcccgccaatgcaaaggcgccgtctgctcccgtagccgcgatggccgacacgagggcgcccgcgtccgccagcacgcctcccaacgcgcttgtcaatacaaaagttccgcccgttgatacaaaggccgcgcccgacgacttgaaatccgcgacgttcagcccgaaggttgacacggccgcctatgtttcggcgccgtttgtcgcgtcgagagcgattttgaccgaggcgaggtctgtgccgttcaacacgatggccgcgcggctccaggcggagttcgcgccgcccaaaacaaatgttgcgccgccccccgccgcgccgcctccggccgcagtggctacgctgtcggtcgttacgccgccggccgatgttcccaaaaagaagcccgatcccaacgcgccgctgggctacaggctcgcgtcgaccgccgtctgcgccgccgtggaaaatagggcgcctaagggcgtggccgacaagttttcaaaggaatccggcgccgtctactacttcacgcatatcgtgggctccacctccgacagcgcggccgtcatgcatcgctggtaccgcgaggggaaactcatacaaacctccattttagagatcaagtcgcccaactggcgcacgcacagcaagcgtaacttaaccactgtggatgagccggcggggaattggagggtggaagttgtggatcggaggtctgggaaagtattggagtcggcgtcgtttgtggttgaatga

SEQ ID NO: 9564 - protein, 263 aa, Unknown
  Obtained from environmental sample
  misc_feature (1)..(263): Xaa is any amino acid
MASETLPVGHEALTPSVNAPANAKAPSAPVAAMADTRAPASASTPPNALVNTKVPPVDTKAAPDDLKSATFSPKVDTAAYVSAPFVASRAILTEARSVPFNTMAARLQAEFAPPKTNVAPPPAAPPPAAVATLSVVTPPADVPKKKPDPNAPLGYRLASTAVCAAVENRAPKGVADKFSKESGAVYYFTHIVGSTSDSAAVMHRWYREGKLIQTSILEIKSPNWRTHSKRNLTTVDEPAGNWRVEVVDRRSGKVLESASFVVE

SEQ ID NO: 9565 - DNA, 552 bp, Unknown
  Obtained from environmental sample
  misc_feature (1)..(552): n is a, c, g, or t
atgacggataaaacagcggaaacatttttaagttttaagcagaaattgttgaattttatccgctcgcgggttaaccgcgttgaagacgcggaggatattttacaggatgtattctatcaatttacccgggtgaataatataattaacccgatagaaaacatttcagcatggctgtaccgcgccgcccgcaacagaataattgaccatcacagaaaggaaaaagatgatccgctgcccgcgtcatacgatgaagacaatgacgaatatatttttgacgagataacggacattatctacggcaaagaggcgacgccggaaacagaaatgttgcgttcactggtttttgcggagatacaaaccgcccttgccgatttgccccaggaacagcgtgaagttttccagatgaccgaattgctggatttttcggtaaaagaaaccgcggaaaaaacccatacgccggttaacacggttctttcgcgcaagcattacgcggtaaaatttctgcgaaaaagactgggagaattatataatgatgttatgggcatgtcttga

SEQ ID NO: 9566 - protein, 183 aa, Unknown
  Obtained from environmental sample
  DOMAIN (121)...(170): Sigma-70, region 4
  misc_feature (1)..(183): Xaa is any amino acid
MTDKTAETFLSFKQKLLNFIRSRVNRVEDAEDILQDVFYQFTRVNNIINPIENISAWLYRAARNRIIDHHRKEKDDPLPASYDEDNDEYIFDEITDIIYGKEATPETEMLRSLVFAEIQTALADLPQEQREVFQMTELLDFSVKETAEKTHTPVNTVLSRKHYAVKFLRKRLGELYNDVMGMS

SEQ ID NO: 9567 - DNA, 756 bp, Unknown
  Obtained from environmental sample
  misc_feature (1)..(756): n is a, c, g, or t
atgatacggctggtattgcagacagtcccgattttcagcgacaacatggttttacagcgcgggaagccgatccctgtttggggatggagcggagatgaaaagggtacggtcagtgtccgctgggaatgcggggaatacagcgtttccgcgtcaaccaccgtgtatcgcagcgagtggagtctgttactgccgccccttgccgccggattaagcggcgagttggtcatcagcgacagatgggatgaggtacgttttcgtaatgtaataaccggcgacgtatggtttgccggcggccagagcaatatggaactggaactggtaaactgcaaaaacggtcccgccgaacttgccgcctgcgccaattccaatatacgtttttatcaggtcgttaaacgcgccattgtagacgatgattacctgcgcgaagaggcgcaggcgcgatggcaaatctgcgcgccggataccgccgccatgctgagcgcggcggcttatttttttgcccgtaaaattaacgccgacctgaacattcccatcggtattatcaactgttcgtggggcggcacttcgatcagcacatggatgagcagggaacagcttgagcgcagccgcgccggacagcgttttatcgatgattatgccgcgaaagtaggcaataaaaccgacgcccaatacaacgccgaaatggaagagtattttgtccaatggagggaatgggatgcccgtattcgcgcccgacaggaaaaagagcggatgtaa

SEQ ID NO: 9568 - protein, 251 aa, Unknown
  Obtained from environmental sample
  DOMAIN (160)...(239): Domain of unknown function (DUF303)
  misc_feature (1)..(251): Xaa is any amino acid
MIRLVLQTVPIFSDNMVLQRGKPIPVWGWSGDEKGTVSVRWECGEYSVSASTTVYRSEWSLLLPPLAAGLSGELVISDRWDEVRFRNVITGDVWFAGGQSNMELELVNCKNGPAELAACANSNIRFYQVVKRAIVDDDYLREEAQARWQICAPDTAAMLSAAAYFFARKINADLNIPIGIINCSWGGTSISTWMSREQLERSRAGQRFIDDYAAKVGNKTDAQYNAEMEEYFVQWREWDARIRARQEKERM

SEQ ID NO: 9569 - DNA, 426 bp, Unknown
  Obtained from environmental sample
  misc_feature (1)..(426): n is a, c, g, or t
ttggagaaggagttccgctccgccgcgcatgagtttgagcttatgactgacgacggaagttacggcaagaaagggcttgtaactgaagcgttgaaagcatctctcgacaagggtgaaaaatacgatgaagtaatcgctattgggcccctgattatgatgaagtttatcgccgccactacaaaaccttacggcgtaaaaactactgtcagcatgaaccctatcatggttgatggaacgggaatgtgcggaggctgccgccttagcgttggcggtaaaatgaagtttgcctgcgttgacggtccggattttgacgggcatgaggttgattttggcgaagcgctcacaagaggcggcatgtaccgcccatttgaggcaaaggcctacgagacggcctgtaatctttttaaaaaggcggcggcgcaatga

SEQ ID NO: 9570 - protein, 141 aa, Unknown
  Obtained from environmental sample
  misc_feature (1)..(141): Xaa is any amino acid
MEKEFRSAAHEFELMTDDGSYGKKGLVTEALKASLDKGEKYDEVIAIGPLIMMKFIAATTKPYGVKTTVSMNPIMVDGTGMCGGCRLSVGGKMKFACVDGPDFDGHEVDFGEALTRGGMYRPFEAKAYETACNLFKKAAAQ

SEQ ID NO: 9571 - DNA, 876 bp, Unknown
  Obtained from environmental sample
  misc_feature (1)..(876): n is a, c, g, or t
atgattgatgaatcgggtatgtgtttaaatacattacctgattnttatatatcctctttttccgaagtcatcttaggagcattactgtttggatacaaagtggttgagtttgaattatttgatcctgttttatgccttgaactaatccaaaaggagaaatgctcgtggatattcggcgtaccttccgtatttatggctttgatgatgaatccccgttacaatgaatttgatctgcaaagcctcagacacatttgcattggcggaacaaactgcccggcggaattgttaaaaaatattttggttaaaatgaaactgaaaagcctgtaccacgggtatggccttacggaaacgtcgccttttatcagcagtatattgatatcggatccatcggatcccctaataagcacaataggtttccctctgccgggaatggaaatcagcattcgtgacacctgtaacaatgaatgtcctgtaaatgtggaaggagaaatttgcaccagaggctttggtgtaatgcaaggttattataaaatggaagatgccactaaagaaataatagacgcggaaggctggctgcacacaggcgatctgggacatctgctggaaggcggctgcttaatgataggcgggcggctcaaggaattgataatccgaagcggggaaaatatatatcccaaagaagtagagaaccttctgcttaccatacctgccatacatgacgtgcaggtggtgggcatcccctcagagaaacaaggtgaagaagtaggcgcttttgttattcttaaaccggggcagactgccgctgaaaaggatattatagatttctgtaaggaaaagatcagctttttcaaaacgccgagctatgtgttcttgtga

SEQ ID NO: 9572 - protein, 291 aa, Unknown
  Obtained from environmental sample
  DOMAIN (1)...(243): AMP-binding enzyme
  misc_feature (1)..(291): Xaa is any amino acid
MIDESGMCLNTLPDXYISSFSEVILGALLFGYKVVEFELFDPVLCLELIQKEKCSWIFGVPSVFMALMMNPRYNEFDLQSLRHICIGGTNCPAELLKNILVKMKLKSLYHGYGLTETSPFISSILISDPSDPLISTIGFPLPGMEISIRDTCNNECPVNVEGEICTRGFGVMQGYYKMEDATKEIIDAEGWLHTGDLGHLLEGGCLMIGGRLKELIIRSGENIYPKEVENLLLTIPAIHDVQVVGIPSEKQGEEVGAFVILKPGQTAAEKDIIDFCKEKISFFKTPSYVFL

SEQ ID NO: 9573 - DNA, 420 bp, Unknown
  Obtained from environmental sample
  misc_feature (1)..(420): n is a, c, g, or t
ttgctcgcttgcggcgcggcgcagccttcggcgcgccgggcgaaagcgtttgagccggacgcggctaagcctgcggacaaagcgtccgcagtccggtcggacggcgggacatcggcggcggcgtccgcggcgccggctggtcaatacgctacgcctaagaaaatcgagaaccacttaataaaatcgatcatcgctacggtctgctgttgcggcgtttcgttcggcatagtggggataatatacgccatgaaggtaggcgcatttctgaagcagggtaaccgcgccgccgcggaggatgcgggcaggaaggccggcttgtggggtaacttggcaataggcgtagggctggtgtattatttgctggtatttatgttaacggtggtttatcagctgaaaacattgaatttgccgtcgctgtaa

SEQ ID NO: 9574 - protein, 139 aa, Unknown
  Obtained from environmental sample
  misc_feature (1)..(139): Xaa is any amino acid
MLACGAAQPSARRAKAFEPDAAKPADKASAVRSDGGTSAAASAAPAGQYATPKKIENHLIKSIIATVCCCGVSFGIVGIIYAMKVGAFLKQGNRAAAEDAGRKAGLWGNLAIGVGLVYYLLVFMLTVVYQLKTLNLPSL

SEQ ID NO: 9575 - DNA, 873 bp, Unknown
  Obtained from environmental sample
  misc_feature (1)..(873): n is a, c, g, or t
atgaattactttgaaaacgtggcggttgaccagaggcggtcacagtacgaagcgaccctgatatctgtttttgaggataatcccgattttgtccgtatattcactatctggagaccgaatgccctagacgggcaagacgctagaaatataggtcgcgtcggctcaactgaaacagggcagttcgcttttgcattaggaaaggaaaccggtgaaatagtgcctcaagtcagcagccaagttgcgtcggtaatggaatatcttagggctagtacaccggcgaccactgaggaggtaagccatcccaccacagcgatgcttctggggaaagaaatcaatcagatcagaatgatagttcccattttaaatggcgcccgtactcaagtagtcggagtcgtaggcgctcaagtaaatacggatataatacagccccgtattttgacaactatcaaagagttcgatgaaatttccgcgatgtctatttactccagcaacggatttgttatggcgagctacagagatgaacggataggaaaaatgatgcctgacgtggaagtacaattcggcagctatataaccgaagctttcgaggctgttaaaaccggaaaagaatttcagtgctacagttgggctcctacgatgaaaacatatctgcaaatcgccgttgtccctgttaaacttggtaattcggacacaacttggtcgataatggcaggtacagaaaactggtacataatgagggatattaccccgatgattacatttgccattattatcgcggtggtggcgataatagcggcggcggtaattatgttctttgttctgaccgcaactacccgccccatcactaaagtagccgatgttttaaaaatatag

SEQ ID NO: 9576 - protein, 290 aa, Unknown
  Obtained from environmental sample
  misc_feature (1)..(290): Xaa is any amino acid
MNYFENVAVDQRRSQYEATLISVFEDNPDFVRIFTIWRPNALDGQDARNIGRVGSTETGQFAFALGKETGEIVPQVSSQVASVMEYLRASTPATTEEVSHPTTAMLLGKEINQIRMIVPILNGARTQVVGVVGAQVNTDIIQPRILTTIKEFDEISAMSIYSSNGFVMASYRDERIGKMMPDVEVQFGSYITEAFEAVKTGKEFQCYSWAPTMKTYLQIAVVPVKLGNSDTTWSIMAGTENWYIMRDITPMITFAIIIAVVAIIAAAVIMFFVLTATTRPITKVADVLKI

SEQ ID NO: 9577 - DNA, 453 bp, Unknown
  Obtained from environmental sample
  misc_feature (1)..(453): n is a, c, g, or t
atgggaattttattaagcgatgtttttgatccgcgatccataagattaaatcttgagggcaaaaccaaggaagaaattttcattgaactggccgaagcgataaccgcagctcaccctgaatgtgaccgcgcttcgatgcttgcttcattatgggaacgtgaaaacaagttaacgacaggcatcggttccggtattgccattcctcacaccctatgcagaggaattaaaaacatagccggagcaatcggcatatcgcaaacaggcattgagtacggcgctcttgatcaaaaacctgtttacgttgtgtttatgctggcaataagcaacaaggcagcggaaaaccatttgcttattttgaaccagctttttgtgcttgcccaatccgaggcaattacagttataagagaaacgcaaaatacgcaggccgtaaaagatattctgtcctgtttttga

SEQ ID NO: 9578 - protein, 150 aa, Unknown
  Obtained from environmental sample
  DOMAIN (7)...(150): Phosphoenolpyruvate-dependent sugar phosphotransferase system, EIIA 2
  misc_feature (1)..(150): Xaa is any amino acid
MGILLSDVFDPRSIRLNLEGKTKEEIFIELAEAITAAHPECDRASMLASLWERENKLTTGIGSGIAIPHTLCRGIKNIAGAIGISQTGIEYGALDQKPVYVVFMLAISNKAAENHLLILNQLFVLAQSEAITVIRETQNTQAVKDILSCF

SEQ ID NO: 9579 - DNA, 843 bp, Unknown
  Obtained from environmental sample
  misc_feature (1)..(843): n is a, c, g, or t
gtgtttgaaaatttgcttggacagggcgcggcaggccagctcattgcggacattgaaggttctgctcttgccccggcaatgcttttctccggccccccggcttccggaaagggaactgcggccctggaattggcgcgggttatttcctgcgaggcggcagccaatcgggccgcgtggaaatgtccctgcgcgtcctgttcccgccaccggcttttgattcatcctgatctcctctgcctcggttacaagcctttctctgctgaaattgccgcctcggcttcttcttttttaagggaggccgcgtcttctgctgaagccggaagctccccgtcgcgcattcttttcattcgctcggtacgcaaactccttgcgcgtttcagtcccgtgctttgggaagacgagccaaaggccggtaaaatttctccccttgtaaattcgctggaagaggaccttgatgagatggcctttatatccgcccaaagtcctatagaaatgaataccgtgaagaaactgacagaggaaattattaaaggcgcttttaagctggagtccgaagggatgagtgaaacaattcccatcggtcagataaggcgtgccgctttttggagccgccttgctccggcttccggcgggaagacgcttgtcattgaaaacgcccaccgaatgcaggacgaggccaggaattcgctttttaagcttcttgaggaaccgcctgtccgcctgactgtggtgctgaccgcccccagaccggcagccttattcccgacattgtctncaggctcaggccttatgtttttcatccagggatgccgagtcgagcgggaagtatccaaaaggttttaa

SEQ ID NO: 9580 - protein, 280 aa, Unknown
  Obtained from environmental sample
  misc_feature (1)..(280): Xaa is any amino acid
MFENLLGQGAAGQLIADIEGSALAPAMLFSGPPASGKGTAALELARVISCEAAANRAAWKCPCASCSRHRLLIHPDLLCLGYKPFSAEIAASASSFLREAASSAEAGSSPSRILFIRSVRKLLARFSPVLWEDEPKAGKISPLVNSLEEDLDEMAFISAQSPIEMNTVKKLTEEIIKGAFKLESEGMSETIPIGQIRRAAFWSRLAPASGGKTLVIENAHRMQDEARNSLFKLLEEPPVRLTVVLTAPRPAALFPTLSXGSGLMFFIQGCRVEREVSKRF

SEQ ID NO: 9581 - DNA, 459 bp, Unknown
  Obtained from environmental sample
  misc_feature (1)..(459): n is a, c, g, or t
atgaaattgataaaaaaatttttaggaattgccgcaattatcgcggtaactggattcatagttctgcctatgacaggatgcccggtccccgatgacggcagcaacaaagacggcgataaaagcggaggtagagacaccgttatcagtattaaagccattgaaggcgttaccgctccggtaacagacgtgactccggtaacagagattaccgctaacgcgcagtacacgggaacagtaacatggaaaaacgccgctaatgaaagcgtggctgcttttgccgctgagaccgtctacacagcgaccattaccctgacggcaaaaaccggctacactctgaccggcgtaacggcaaacttctttaccgttacggaggcgacaactgtaactaacgcggctaactccggcgttattaccgccgtatttccggcaactgattcccccctaaagattttcgggtag

SEQ ID NO: 9582 - protein, 152 aa, Unknown
  Obtained from environmental sample
  SIGNAL (1)...(18)
  misc_feature (1)..(152): Xaa is any amino acid
MKLIKKFLGIAAIIAVTGFIVLPMTGCPVPDDGSNKDGDKSGGRDTVISIKAIEGVTAPVTDVTPVTEITANAQYTGTVTWKNAANESVAAFAAETVYTATITLTAKTGYTLTGVTANFFTVTEATTVTNAANSGVITAVFPATDSPLKIFG

SEQ ID NO: 9583 - DNA, 720 bp, Unknown
  Obtained from environmental sample
  misc_feature (1)..(720): n is a, c, g, or t
ttgcgcattattatccgaagcaggcagaagctttcgccgagatttaccgaagcaaggaacggtttaaagtatattggcatggcattgaagcggaaattaaatcgtatatggccggaaaaccgtacagattgtatttctttcatgaaaaaatcaagaaaaattaggagggagattatgggcaagctaaaagggaattttgctggctatgagactgacggcgttattgttgccgcatcctctccggcaaccgagagcatcgggaagatattggaatgtcagaaaaacggcgccgctgcggtcatattaaaaactgcgtcaaagacgaggacgccttcttcatgctccacaccgcgccggtgctttgtacgcgacggattgttttgggcaaaatcgtcctttaacagggagatattaacattggaacagggcgaggcgcttgtcaggagctgtaaaacttcaggtatcacgattcccgtcgccgcaagcgtcacggaattgtcacttgagatttccgactggcttgaagactgcaaacgaatggaattggcaggagccgatgcgatccagctagatttcttttatgtagaaaatatgctttccgaacttagctttgaaagcaggtttgtaaaattgttgtgtataatccgtgagaacatccgcattcccattatgcctaagctgaacatcgcgcttccggcaggatacgcggcgcatttataa

SEQ ID NO: 9584 - protein, 239 aa, Unknown
  Obtained from environmental sample
  misc_feature (1)..(239): Xaa is any amino acid
MRIIIRSRQKLSPRFTEARNGLKYIGMALKRKLNRIWPENRTDCISFMKKSRKIRREIMGKLKGNFAGYETDGVIVAASSPATESIGKILECQKNGAAAVILKTASKTRTPSSCSTPRRCFVRDGLFWAKSSFNREILTLEQGEALVRSCKTSGITIPVAASVTELSLEISDWLEDCKRMELAGADAIQLDFFYVENMLSELSFESRFVKLLCIIRENIRIPIMPKLNIALPAGYAAHL

SEQ ID NO: 9585 - DNA, 363 bp, Unknown
  Obtained from environmental sample
  misc_feature (1)..(363): n is a, c, g, or t
atgcttacagcggtagttggtataaactggggcgatgaaggcaaaggcagaatggtcgatttgctttcggaaggttacgaggttatctgccgttatcagggcggcaataacgccggtcacaccgtcatcaacgacaggggaaaatttattttaaaccttttgccgtcaggcattctgcgcgaaggaaccgtaaacgttatgggaaacggcatggtagtcgatttggagcatttgtgcggtgaaatcaaagcgttaaaggaaaaaggcattaatgttacccccgatactttaaaagtcagcgacaaagcttttatttgcctgccgtatcacaaaacacaggacatactgaagaagaacggttag

SEQ ID NO: 9586 - protein, 120 aa, Unknown
  Obtained from environmental sample
  DOMAIN (2)...(120): Adenylosuccinate synthetase
  misc_feature (1)..(120): Xaa is any amino acid
MLTAVVGINWGDEGKGRMVDLLSEGYEVICRYQGGNNAGHTVINDRGKFILNLLPSGILREGTVNVMGNGMVVDLEHLCGEIKALKEKGINVTPDTLKVSDKAFICLPYHKTQDILKKNG

SEQ ID NO: 9587 - DNA, 315 bp, Unknown
  Obtained from environmental sample
  misc_feature (1)..(315): n is a, c, g, or t
atggctactgaaaatattctaatgtactgcgtaaaaaaaggcggcgacaggcaggctctccacgagagaataaggcttcattccgtagaggcggcaaaaaaaataaagttgcaaggcggggacaatgatttaatcacccgcattttagctgactcatcttttggaatgaccgaaaaagaaatgaatgacctgctttccgccgaacaatttacgggcagggcgaaagaacaaacggaagaatttttatccgaagttaaaaatattcttgataagaataaggaacttttaggcgtagatgttaagataacggtttaa

SEQ ID NO: 9588 - protein, 104 aa, Unknown
  Obtained from environmental sample
  misc_feature (1)..(104): Xaa is any amino acid
MATENILMYCVKKGGDRQALHERIRLHSVEAAKKIKLQGGDNDLITRILADSSFGMTEKEMNDLLSAEQFTGRAKEQTEEFLSEVKNILDKNKELLGVDVKITV

SEQ ID NO: 9589 - DNA, 378 bp, Unknown
  Obtained from environmental sample
  misc_feature (1)..(378): n is a, c, g, or t
atgtggcgggtacaattatataaaataaattacgatgaaaaggaatatcaggctgtcagggaagttctcgactcgggatggcttaccatgagtcagaaaacctatgattttgaagcggccttttcaggttttttgggatatgacgcgcaatctcttgctgtttcaaattgcaccgctgcgctgcacatggcgcttttggctttggggataggaaaaggcgatgaagtaatcaccccggcgctgacctttatagccgatcaaaatgttacgcgcatggccggcgccgaanatgtcctggccgatattaccctcatggaagactggtcaatggattgcgatgacatagaggcgcgtatcacgtcaaaacaaaggctgtga

SEQ ID NO: 9590 - protein, 125 aa, Unknown
  Obtained from environmental sample
  misc_feature (1)..(125): Xaa is any amino acid
MWRVQLYKINYDEKEYQAVREVLDSGWLTMSQKTYDFEAAFSGFLGYDAQSLAVSNCTAALHMALLALGIGKGDEVITPALTFIADQNVTRMAGAEXVLADITLMEDWSMDCDDIEARITSKQRL

SEQ ID NO: 9591 - DNA, 492 bp, Unknown
  Obtained from environmental sample
  misc_feature (1)..(492): n is a, c, g, or t
gtgaacgagtttaaaaaaacaataataggaaaacccgcgcaatggcttatagaggcggcggcctccatagggctggacgtttcagagcttacacatgaggtaacaaacagctttataacccatgtttttaagcagcacggaaacgaaaaaagcgagagggcgcggggtcaaatcgccgttacgcaggacgacatcgaaaaaatacccggcatagtgaaagagcccgactatgcgattataggcataaagagagacggcgaaacccttatagcgtactcaaaaaaatatgaaaacaacacggccatttattatgaggaagtgttaacgggcaaaaaaagcaggtcattaagaagcaagactatgttcataaaaataggaaagatgagcaatgaggcttttataaatatcgctggaaatcacgcgcacgtcgacatgtcgggaacaaaaatagtggtaggggccggaggccatcccgacggggggacgcggtaa

SEQ ID NO: 9592 - protein, 163 aa, Unknown
  Obtained from environmental sample
  misc_feature (1)..(163): Xaa is any amino acid
MNEFKKTIIGKPAQWLIEAAASIGLDVSELTHEVTNSFITHVFKQHGNEKSERARGQIAVTQDDIEKIPGIVKEPDYAIIGIKRDGETLIAYSKKYENNTAIYYEEVLTGKKSRSLRSKTMFIKIGKMSNEAFINIAGNHAHVDMSGTKIVVGAGGHPDGGTR

SEQ ID NO: 9593 - DNA, 939 bp, Unknown
  Obtained from environmental sample
  misc_feature (1)..(939): n is a, c, g, or t
ttgatggccgagctgagactggttacgcttaacggtttgagcaataatgatatttatttggtaaaagttaatacctcaaaatatattgtagacgctgccgataccggcggccttcccggttcatcgccaaacacgtcaccaaacattcagggtgattggtacgcgccggataatgtgttaccccgtaaaggtcacgaggcggcggaaaaattcaacgccaatcccccgcccattgttgacgcgggaccgcgcagatcgagggctgtttttgttcctcctaaagtcggcgatccaaggatgttctgggtagaaagttattataatagcggaacatgggtacagaaacaggcaaccttgagggctaccggacaatggggaaatatctgggttatggacgaagattatggctccggagtcaataaaataactgacgcgcgggcaaaggaactgtctaataaatttgacttaatttatcctgttgagacgaatcttctgggctttgaatacggcggagggccgggcggggacggcggtaaagacggcgacccaaaaattcagatcctcatttatagtattcttaacgctcaaggtgatggagccggagtgggcggatttttctggagcaaggatttttatgaaaattgggccggttcaaacctgggggaagtattttatataaacacgaataccgcatatggaagtcccgagtatacatattctgttttgattcatgaatttcaacacatgatcaattataatatgaaatacttgagattgagaaagagttcagaaacctggtatgacgaaatgctttctatggcggccgaggacataatcggaccattgataggtcttccgccaacaaattggtatcatacgacacagcaaaggatgccggtatttttgggcacttatagtctggttggtgtaacggaatga

SEQ ID NO: 9594 - protein, 312 aa, Unknown
  Obtained from environmental sample
  misc_feature (1)..(312): Xaa is any amino acid
MMAELRLVTLNGLSNNDIYLVKVNTSKYIVDAADTGGLPGSSPNTSPNIQGDWYAPDNVLPRKGHEAAEKFNANPPPIVDAGPRRSRAVFVPPKVGDPRMFWVESYYNSGTWVQKQATLRATGQWGNIWVMDEDYGSGVNKITDARAKELSNKFDLIYPVETNLLGFEYGGGPGGDGGKDGDPKIQILIYSILNAQGDGAGVGGFFWSKDFYENWAGSNLGEVFYINTNTAYGSPEYTYSVLIHEFQHMINYNMKYLRLRKSSETWYDEMLSMAAEDIIGPLIGLPPTNWYHTTQQRMPVFLGTYSLVGVTE

SEQ ID NO: 9595 - DNA, 840 bp, Unknown
  Obtained from environmental sample
  misc_feature (1)..(840): n is a, c, g, or t
atgtcaaagatggatgaaacctctttacattacataatcattaccgccgcgctggcgtttttgttcggcctttccatgttctttgccttttgcgaaacttcctttacatcgctgagccggatcaagctgaagaacatggctgaaaaaaacagggaatcgcggaaggccgcgcgggcgcgcctcgtgttaaaacttctggattcttacgacaagctgctctcctcgattctgatcggaaacaccatcgttaatgtggttacctctgccctggcgaccatgctttttatggggctgtttggcgctaaaggcgtaagcattgcctccgttgttgtcaccgtgctggtgctggtctttggggaaatttccccaaagacgctggcgaaggaatccccggaacttaccgcgcttagatccgctcctctgctgcgtttttttattattattttcaaaccgttaaattaccttgcctcggcatggggaaacatcattataaaaatttttccgtcaaacgcgaacaggcatattaccgaggacgaattgctgacttttgtggaagaggtaaggcaggaagggggaatcaaccggcgtgaggagcatatgatccgccaggccattgaatttgacgacattaccgccgcggagattatgaccccgcggatggatatggcggctgtttctgaaaccgacacggcgggacatattgaatcgttgtttgaggagacgggcttttcccgcctgcccgtttaccgcgacaatattgataatattacagggatcatactgctgaaggatttttacagcgaagtaataaaaaagctcgtgccgctcggcngaatctga

SEQ ID NO: 9596 - protein, 279 aa, Unknown
  Obtained from environmental sample
  DOMAIN (13)...(197): Domain of unknown function DUF21
  misc_feature (1)..(279): Xaa is any amino acid
MSKMDETSLHYIIITAALAFLFGLSMFFAFCETSFTSLSRIKLKNMAEKNRESRKAARARLVLKLLDSYDKLLSSILIGNTIVNVVTSALATMLFMGLFGAKGVSIASVVVTVLVLVFGEISPKTLAKESPELTALRSAPLLRFFIIIFKPLNYLASAWGNIIIKIFPSNANRHITEDELLTFVEEVRQEGGINRREEHMIRQAIEFDDITAAEIMTPRMDMAAVSETDTAGHIESLFEETGFSRLPVYRDNIDNITGIILLKDFYSEVIKKLVPLGXI

SEQ ID NO: 9597 - DNA, 375 bp, Unknown
  Obtained from environmental sample
  misc_feature (1)..(375): n is a, c, g, or t
atgattcacattatctgggatttggacggcacgctcgttgattctcaagccgagattttatatcatctgaaactcgccttgcaagacgcgtccgtggacattcgcgaccaagtaaaacctatcaagatagggccgccgttggacattatgctaagagagtcttttacggccgaaaaacttaccgcggaaaaggtgaacgaggtaatatcccgctatagggagcggtacgacaactccggtttcaaaatgacgggcccattcgacggaattgatgagattgtctccgatacggttaatttcacgcatcacatagtcaccaataaacccaacccgtcggcgcggcgtattgtggaaaaagntgggttgggcggataa

SEQ ID NO: 9598 - protein, 124 aa, Unknown
  Obtained from environmental sample
  misc_feature (1)..(124): Xaa is any amino acid
MIHIIWDLDGTLVDSQAEILYHLKLALQDASVDIRDQVKPIKIGPPLDIMLRESFTAEKLTAEKVNEVISRYRERYDNSGFKMTGPFDGIDEIVSDTVNFTHHIVTNKPNPSARRIVEKXGLGG

SEQ ID NO: 9599 - DNA, 381 bp, Unknown
  Obtained from environmental sample
  misc_feature (1)..(381): n is a, c, g, or t
atgaatatctggttcgccacaaataatacccacaaaaaaaaagagcttgaggcagtgcttggaacaaaattacaaataccttccgaatgcgcaattgcctttaaggcggaagagaccgcaatgactttccgcgaaaacgcccttataaaagcccgtgaattaaaaaaactcatcaataaaaacgagcctgtaatagcggacgactcgggactttgcgttgacgctcttgacggaagacccggcgtcttttcggcgcgttacggagaaacaaacggccgcaaacttacaagcggggagcaaaacctccttcttnctgaagagatgaataacagccgaaaaacgaagcgcgcgctttgtatgcgcgatggttcttctttttga

SEQ ID NO: 9600 - protein, 126 aa, Unknown
  Obtained from environmental sample
  DOMAIN (3)...(124): Ham1 family
  misc_feature (1)..(126): Xaa is any amino acid
MNIWFATNNTHKKKELEAVLGTKLQIPSECAIAFKAEETAMTFRENALIKARELKKLINKNEPVIADDSGLCVDALDGRPGVFSARYGETNGRKLTSGEQNLLLXEEMNNSRKTKRALCMRDGSSF

SEQ ID NO: 9601 - DNA, 690 bp, Unknown
  Obtained from environmental sample
  misc_feature (1)..(690): n is a, c, g, or t
atgatagaaaatttcaggctgcttatgcttgaacgaaagtcagaacccggcaggaagtggtccctttcccaatgcgtgcggatgttagtcgataatattgattactggagctaccttgttcttgaacacggaaaagatgaaaaaaaagcaaggtggaagtacggcaatatcgaatattttataaggatgattgaattttgggagaacgatcctgataaccttgacgcgggacttttcccctggcttaaccgtatcagtcttataacacgggacgaaggtgatgatgaaaacgaaggcaaggttaacctttctacgattcacgcggcaaaggggctagaatacccggttgtttttattgccggcgcggaaaacggtctgctccctcacgaaaaaagcattgaaaaacctgataaagccgataaaaatgaagaagaggatgaagccggcaacgttgaagaagagcggcggcttttctatgtagccataacgcgcgcaagggagaaattgtacataacaagctgccgtcagcgccgccgtatgcaaaataccgttgactgcgaaccttcaccgtttctttcggaaattccgcaggagttgattaagtaccatgaaaaaacggaagaatcaaaaatggcagacgacgagcaggcggaaaaatttatttcgcagatgaaagctatgttcggctaa

SEQ ID NO: 9602 - protein, 229 aa, Unknown
  Obtained from environmental sample
  misc_feature (1)..(229): Xaa is any amino acid
MIENFRLLMLERKSEPGRKWSLSQCVRMLVDNIDYWSYLVLEHGKDEKKARWKYGNIEYFIRMIEFWENDPDNLDAGLFPWLNRISLITRDEGDDENEGKVNLSTIHAAKGLEYPVVFIAGAENGLLPHEKSIEKPDKADKNEEEDEAGNVEEERRLFYVAITRAREKLYITSCRQRRRMQNTVDCEPSPFLSEIPQELIKYHEKTEESKMADDEQAEKFISQMKAMFG

SEQ ID NO: 9603 - DNA, 579 bp, Unknown
  Obtained from environmental sample
  misc_feature (1)..(579): n is a, c, g, or t
ttgccattaaaaaatgccattatgtatataaaaagactaatagacaacgaattattgaactggagcaaagaaaaagagcgtaagccgcttttgcttcgaggtgcaaggcagattggaaaatcatcttccgttaggaaattggccgaaaattttgaatattttattgaggttaattttgagaaaaacagcatggttcacgattgttttggaagaaatcttgatgttaaggaaatttgcgaccaaatcgccattcagtataaaaaaccgattgttccggacaaaacattactgttttttgatgaaatacaggcttgcccgcgtgctatttcggctttgcgttatttctatgaagattatcccgaattgcacgttattgcagccggttcactgcttgaatttgcattggaagaattgccttcgtttggcgttggacggataagatccttgtacatgtatcctttttcgtttcaggaatttatgagagcctgtggcgaagaacgtttgtggaaagaagtgtgtgaatcttcgcccgaaagccgatttttccggtatttcacgaacgttgtgtggcgctactga

SEQ ID NO: 9604 - protein, 192 aa, Unknown
  Obtained from environmental sample
  misc_feature (1)..(192): Xaa is any amino acid
MPLKNAIMYIKRLIDNELLNWSKEKERKPLLLRGARQIGKSSSVRKLAENFEYFIEVNFEKNSMVHDCFGRNLDVKEICDQIAIQYKKPIVPDKTLLFFDEIQACPRAISALRYFYEDYPELHVIAAGSLLEFALEELPSFGVGRIRSLYMYPFSFQEFMRACGEERLWKEVCESSPESRFFRYFTNVVWRY

SEQ ID NO: 9605 - DNA, 900 bp, Unknown
  Obtained from environmental sample
  misc_feature (1)..(900): n is a, c, g, or t
atgatnatcgaaatgtcctttgtgggcagggacgatatnatcgccataaccgaggggatgcttgtccatgtcttcaaaaaaaccctcggcgttgatttgccgtcccatttccgccgcttaagccatgaagaagcaatggaatgttacggctcggataagcccgacctgcgttttgatatgcccttacaggattttgccccttatgttgagacaggcggctttcaggcgtttaaggacgctcttgcccagggcgaaaccgagcggcagcagtcggcggcaaaaaaagttaccattgcgggcggcggagtaaaggcgctggtagtaaaaggtaaggcggattattcccgcaaacaaattgaggaactggaagcccatgcgaaaatttacaaagcccgcggcatggcgtggatgaaggttaccgaaagcggaagtttggaaggcggtgtcgccaaattctttactgacaacgcggcccaaatcatcagcgggctgggagccgcgccgggcgaccttatccttatagtggcggattcccggcgcaatgtcgccaataccgccctaggcgcggtgcgttccaaattgggcaaagacttaggacttggcgataagggtaaccgttttgaatttgtgtggatcgtcgattttcccctgtttgaatttaatgaagaagaaaaccgctgggaggcggcgcatcacctgttcagttggccgcaggaaaaatatcacgcaacgctggaaagcgatcccggcgcggtaaaaggcgacctgtatgatctggtgttaaacggctatgaacttgcctccggctccattcgtattcatgacccggttttgcagcagcggattttcagcatcgccggttttgatcccgccgaagcggaaaaacgattcggcttttaa

SEQ ID NO: 9606 - protein, 299 aa, Unknown
  Obtained from environmental sample
  DOMAIN (1)...(299): tRNA synthetases class II (D, K and N)
  misc_feature (1)..(299): Xaa is any amino acid
MXIEMSFVGRDDXIAITEGMLVHVFKKTLGVDLPSHFRRLSHEEAMECYGSDKPDLRFDMPLQDFAPYVETGGFQAFKDALAQGETERQQSAAKKVTIAGGGVKALVVKGKADYSRKQIEELEAHAKIYKARGMAWMKVTESGSLEGGVAKFFTDNAAQIISGLGAAPGDLILIVADSRRNVANTALGAVRSKLGKDLGLGDKGNRFEFVWIVDFPLFEFNEEENRWEAAHHLFSWPQEKYHATLESDPGAVKGDLYDLVLNGYELASGSIRIHDPVLQQRIFSIAGFDPAEAEKRFGF

SEQ ID NO: 9607 - DNA, 441 bp, Unknown
  Obtained from environmental sample
  misc_feature (1)..(441): n is a, c, g, or t
ttgaaaaatgaagacaatcttctgatggtgcgcaacgcgtacgaatccctgaaaagcggcggctcatttatcattgaaactttgggtaaggaaattgccgtccgcgattttacagacagggaatggtttgaacgcgccggttttatggtacttaccgaatatgaaactttggactcatggacattcttgaaaaatcgttggatactgattaaagacggtaaaaaaatcgaaagagtcttttctcaaagactctattcggcgtctgaattaaggtcgttgatgcttgaagcgggtttttccaaagtagatattttcggcgattgggacgaaagcccttacgacaagcgcgcggctaaacttatttgtatagggagaaaaatatgtccgcangttacgcaagttttgaaaaactggaatcctttnatgaagatgtttttataa

SEQ ID NO: 9608 - protein, 146 aa, Unknown
  Obtained from environmental sample
  misc_feature (1)..(146): Xaa is any amino acid
MKNEDNLLMVRNAYESLKSGGSFIIETLGKEIAVRDFTDREWFERAGFMVLTEYETLDSWTFLKNRWILIKDGKKIERVFSQRLYSASELRSLMLEAGFSKVDIFGDWDESPYDKRAAKLICIGRKICPXVTQVLKNWNPXMKMFL

SEQ ID NO: 9609 - DNA, 651 bp, Unknown
  Obtained from environmental sample
  misc_feature (1)..(651): n is a, c, g, or t
ttgtttgttgataattgggaaaaagtttgggataacgatttcttacggtgtaccgcccataaattagcggctttgacaggtatgcggtgtagtgaagttttaggattgcggggggaatatgtatttaatgaccatatttacctgtgcggacaatatgacgaatacggttacagagaaacaaaaaccaagataaaacaccatattccgcttgccgccgaagttatacaggatttgcggaacctgatgaagataaacggagaagggtttattttctctcttgacggcggggctacgccgatatgccgaaaacatatgtatatagggttgcggaacgcacttaaaaaaattggtattagtgataaagagagagtacaacgggggataaatattcatgcgtggcggcatttctgcaatacggaaatgcagaagggcgggctttcggtgcaaaaagtacaggcggttaccggacataaatcagaaaaaatgacggaacattacacccattttgacccttctgattttggggacgttccgaaaatacaagaaacattattaaagaagtctgataatcttacgaatgaacgacctgcgcttactttggtaaaaataccagaagaaaaaataccgattgaaagtaaacaggcttcataa

SEQ ID NO: 9610 - protein, 216 aa, Unknown
  Obtained from environmental sample
  DOMAIN (3)...(176): Phage integrase family
  misc_feature (1)..(216): Xaa is any amino acid
MFVDNWEKVWDNDFLRCTAHKLAALTGMRCSEVLGLRGEYVFNDHIYLCGQYDEYGYRETKTKIKHHIPLAAEVIQDLRNLMKINGEGFIFSLDGGATPICRKHMYIGLRNALKKIGISDKERVQRGINIHAWRHFCNTEMQKGGLSVQKVQAVTGHKSEKMTEHYTHFDPSDFGDVPKIQETLLKKSDNLTNERPALTLVKIPEEKIPIESKQAS

SEQ ID NO: 9611 - DNA, 750 bp, Unknown
  Obtained from environmental sample
  misc_feature (1)..(750): n is a, c, g, or t
ttgatcggcgagcggctcgatatttattttatagattggaaaatgcccggcatggacggcatacaacttgcccgtgaaataaagacgcatataacaaaaaattccattgtaacaatgataaccgccgccgaatggggcgatattgccgaagaagcgaaagaagccggcgttaataaatttctttccaaaccgctgttcccttccacaatcgcggaaatgattaatgaatgtcttggcgtggaaaatcaacaggcgaaaaaatcgcaggttgtggaaaataccggtatttttgccgggcatcgcatacttcttgttgaagacgtggaaataaaccgtgaaattgtactatccttgcttgaatcaacaaagctggagatagactgcgcggaaaacggaaaggaagcggtgcgtatgttcagcgaaacgcctgataaatacgaattgattttcatggatttacagatgcccgaaatggacggctacgaggcggcacggcgaatcagggatttagaagcggagcataacaagaaaattttagaagatattggcgagaattcagccgaaaataataacaacgacgcgaataatgggaatttgcgcaagcaaatccccattatcgcaatgactgcgaatgtttttagggaggacattgaaaaatgcctcgccgcaggcatgaacagccatgtgggcaagcctttggatctggaggacgtaatgggcattcttcacaaatatttggatgtattatga

SEQ ID NO: 9612 - protein, 249 aa, Unknown
  Obtained from environmental sample
  DOMAIN (100)...(243): Response regulator receiver domain
  misc_feature (1)..(249): Xaa is any amino acid
MIGERLDIYFIDWKMPGMDGIQLAREIKTHITKNSIVTMITAAEWGDIAEEAKEAGVNKFLSKPLFPSTIAEMINECLGVENQQAKKSQVVENTGIFAGHRILLVEDVEINREIVLSLLESTKLEIDCAENGKEAVRMFSETPDKYELIFMDLQMPEMDGYEAARRIRDLEAEHNKKILEDIGENSAENNNNDANNGNLRKQIPIIAMTANVFREDIEKCLAAGMNSHVGKPLDLEDVMGILHKYLDVL

SEQ ID NO: 9613 - DNA, 771 bp, Unknown
  Obtained from environmental sample
  misc_feature (1)..(771): n is a, c, g, or t
ttgacacggcaaatttccatgaaggcagcgttgtggatgtttgcgaaaagggctataaccttggcgagcggctgctgcgccctgctaaggtggttgttgccagcgggaacaatcccgcctaatttttgccccacccattttttcggagcgccccaaatggctggcaggacgattggcatagacttaggcacgactaacagttgcgcctgcgttttggagggcggaaagcacaaggtaataccgtccgcagaggggggaaggacaatcccatcaatcgtggcctttgccgagatcggggaggtgctggtgggccatgccgccaaaaggcaggctgttacaaacccaaggcgcacattgtttgcgataaaacggctgataggacagcgtttcgattctcaaaaggttcaggagacgataacccacctgccttaccccgtggtcagggccgccaatggcgacgcatgggtagccatcggcgaaaggcagtacgccccccctgaaatcagcgccatcgttttgggggaaattaagcgcgccgcagaagcctacacaagggagaaaattctcgatgccgtaattacagtcccagcgtatttcgacgatgcccagcgtcaggcgacaaaagatgcgggccgcatcgcggggctgaacgtactccgaatagtcaacgagcccaccgtcgctgcgttggcgtacggcattgacaagaaaaggaaaaaggaactgcttgccatctgcgacttgggaggcggaacctttgacttcccttga

SEQ ID NO: 9614 - protein, 256 aa, Unknown
  Obtained from environmental sample
  DOMAIN (57)...(256): Hsp70 protein
  misc_feature (1)..(256): Xaa is any amino acid
MTRQISMKAALWMFAKRAITLASGCCALLRWLLPAGTIPPNFCPTHFFGAPQMAGRTIGIDLGTTNSCACVLEGGKHKVIPSAEGGRTIPSIVAFAEIGEVLVGHAAKRQAVTNPRRTLFAIKRLIGQRFDSQKVQETITHLPYPVVRAANGDAWVAIGERQYAPPEISAIVLGEIKRAAEAYTREKILDAVITVPAYFDDAQRQATKDAGRIAGLNVLRIVNEPTVAALAYGIDKKRKKELLAICDLGGGTFDFP

SEQ ID NO: 9615 - DNA, 801 bp, Unknown
  Obtained from environmental sample
  misc_feature (1)..(801): n is a, c, g, or t
atgtccacaggcggagttagcacaaaaaataccggattaggttattataactgtgcgtttattgattgggttaccgttatctttatgttgcttgcggcgttaaattttaatttgtattacaggatttaccaaaaaaaaatccgagacgtaattaataataccgaatgtaacgtttatttttccatttttataattgccgcgttggtaatcagttttagtttgattcctcaatacggttcttttggtagcgcgttacgttacggttcatttcaaaccgcttcgatactgagtactgccggaaacgcaagagttgactattcaacgtggccagctcttgcgcaagcggttctttttctgcttatgtttatcggaggctgttcaggttccaccgcggggggtattaagataatacgatggtcggtacttttcaagcaaacaataaatgagtttcggcgcatactctaccctcagggggtttttactatccagctcaataaaaaagttggacgcaaagacgtagtgtatggggttgcgggttttatcttcctctactttataatcgtcgccataacgactcttgcgacagccgcgtcgggattcgatcttttttcatctttcagcaccgccctttgcgttacaggcaacgtaggaacgggctttggaataatcggtccgcatggaaattacagtgtctttcaacctcatcttaaaatactgtattcacttgtaatgatcgcggggcggttggaattatggactgttattgttcttttcactcccggttactggaagagtttatga

SEQ ID NO: 9616 - protein, 266 aa, Unknown
  Obtained from environmental sample
  DOMAIN (2)...(263): Cation transport protein
  misc_feature (1)..(266): Xaa is any amino acid
MSTGGVSTKNTGLGYYNCAFIDWVTVIFMLLAALNFNLYYRIYQKKIRDVINNTECNVYFSIFIIAALVISFSLIPQYGSFGSALRYGSFQTASILSTAGNARVDYSTWPALAQAVLFLLMFIGGCSGSTAGGIKIIRWSVLFKQTINEFRRILYPQGVFTIQLNKKVGRKDVVYGVAGFIFLYFIIVAITTLATAASGFDLFSSFSTALCVTGNVGTGFGIIGPHGNYSVFQPHLKILYSLVMIAGRLELWTVIVLFTPGYWKSL

SEQ ID NO: 9617 - DNA, 519 bp, Unknown
  Obtained from environmental sample
  misc_feature (1)..(519): n is a, c, g, or t
atgactcaattcaatccaaatgcaagcgcggcttcgtgggcattccgctttgcaggaagtttccccaatgtgattacggtattgagtggcatgacctttatggaacatttgcgagataatttgagcacatattctccgcttatgccgctaaacgaaagcgaaagggaaatgttgctcaaagtttcgcaggttatgcttgaataccgtaacataaactgcacggaatgtcagtactgtatgccctgtccttatggtcttgacattcccgaaataatcgcacactacaaccgctgtctcaacgaaggcaatttcccagacgacaagcagagcgaagactacaaaagagcgcgccgagcattccttgttgggctagaccgcaaaatagatccaatacgccaagcaaatagatgcacgaattgcaaaaaatgcgttcccaactgtccgcagaatataaaaattcctgaagagatgcaacgtatagacagatttgtagaaaccttgaaactggatattgtttag

SEQ ID NO: 9618 - protein, 172 aa, Unknown
  Obtained from environmental sample
  DOMAIN (130)...(153): 4Fe-4S binding domain
  misc_feature (1)..(172): Xaa is any amino acid
MTQFNPNASAASWAFRFAGSFPNVITVLSGMTFMEHLRDNLSTYSPLMPLNESEREMLLKVSQVMLEYRNINCTECQYCMPCPYGLDIPEIIAHYNRCLNEGNFPDDKQSEDYKRARRAFLVGLDRKIDPIRQANRCTNCKKCVPNCPQNIKIPEEMQRIDRFVETLKLDIV

SEQ ID NO: 9619 - DNA, 660 bp, Unknown
  Obtained from environmental sample
  misc_feature (1)..(660): n is a, c, g, or t
atgcaaaaagaaacagaaattttaagcgaaagcggtgcagagcggcgtaacctctttgctggttctgctattgcggcattgagctgtgctacaaagttgcgagccagccaaggcgatggcggtttaaccaatttaatagacaaaaaagttccaaaccgcaaaagaccgatagttccggcgggtgcaggcagcttcaaaaatttccacgaccgttgcttaggttgccagttatgcacttctgtttgccccaacgatgtgttgtctaataaagcgtttggaaccacaaaacccaatatgtcttatgagcgtggttattgccgcccggaatgcgttaaatgctctgaggtttgccctagcggagcaataaaaccaattttaagagccgaaaaatcttccatacaaataggctgcgcggtgtggaacaaggaactttgcatcataaatacagacaaagtagtttgcgacctatgctcacgcaaatgcccaaatgcagcgatagctatgataccccaaagcgcagatgcccccacagatgctccaaaaatcccaatgatagacaccaaccgttgcataggctgcggtgcctgcgagcatttatgccccgcccgcccgtatagtgcgattgttgttgagggcgttgaggtgcatagaactgtttag

SEQ ID NO: 9620 - protein, 219 aa, Unknown
  Obtained from environmental sample
  DOMAIN (65)...(88): 4Fe-4S binding domain
  misc_feature (1)..(219): Xaa is any amino acid
MQKETEILSESGAERRNLFAGSAIAALSCATKLRASQGDGGLTNLIDKKVPNRKRPIVPAGAGSFKNFHDRCLGCQLCTSVCPNDVLSNKAFGTTKPNMSYERGYCRPECVKCSEVCPSGAIKPILRAEKSSIQIGCAVWNKELCIINTDKVVCDLCSRKCPNAAIAMIPQSADAPTDAPKIPMIDTNRCIGCGACEHLCPARPYSAIVVEGVEVHRTV

SEQ ID NO: 9621 - DNA, 420 bp, Unknown
  Obtained from environmental sample
  misc_feature (1)..(420): n is a, c, g, or t
atgctaaaagaatctatgatgggttccgatatgtcttacgaagatgccgttaataacgaccctctttctgctcgctacgaacctgtgcttgctggttcggaagtttggaatggacaggattcctgggtgctggaattgaatgcaaagaaaaaaaccgaaagctacccaaaacgtaaattgtggatagacaagaaaaccggagatatgttgcactatgaactttatgctctctctggagcaaaactaaaagaatatagccttataaaagttggcacttttgcaaaccgccgttttccggttgaaattgagcttcgcgaccttttgaggaaaaacagcaaaacaacttttataatgaaaaacgtggttatggataaacccataccagacgcagtgtttagccaacggaatttggagagatag

SEQ ID NO: 9622 - protein, 139 aa, Unknown
  Obtained from environmental sample
  misc_feature (1)..(139): Xaa is any amino acid
MLKESMMGSDMSYEDAVNNDPLSARYEPVLAGSEVWNGQDSWVLELNAKKKTESYPKRKLWIDKKTGDMLHYELYALSGAKLKEYSLIKVGTFANRRFPVEIELRDLLRKNSKTTFIMKNVVMDKPIPDAVFSQRNLER

SEQ ID NO: 9623 - DNA, 396 bp, Unknown
  Obtained from environmental sample
  misc_feature (1)..(396): n is a, c, g, or t
ttgagaagtgcggcaaaagcaggcgatgatgtgtggcttgcaggctcgccaagcggtttagaaataggtccaataaccgtaaatccgcctcttaacttaggaaaagaactcgcaaaaataaaaggcattggagcctgcatagatacaagcgattccattgcggaaagtttgctgcatatatcagagcagtcaaaagttcgtttggatgtggaaaatgttattttaaatagtgcggaggatttttgtttattattcacggcaagagaatcggcgagggatagtattttgaaactcacaaaaaaatttcccataaataaaataggtaaagcaaaaaagggtagcggtatttttttaagtggaaaaaaaattgaggttaagggctggcagcatttttag

SEQ ID NO: 9624 - protein, 131 aa, Unknown
  Obtained from environmental sample
  misc_feature (1)..(131): Xaa is any amino acid
MRSAAKAGDDVWLAGSPSGLEIGPITVNPPLNLGKELAKIKGIGACIDTSDSIAESLLHISEQSKVRLDVENVILNSAEDFCLLFTARESARDSILKLTKKFPINKIGKAKKGSGIFLSGKKIEVKGWQHF

SEQ ID NO: 9625 - DNA, 756 bp, Unknown
  Obtained from environmental sample
  misc_feature (1)..(756): n is a, c, g, or t
atggataaatatctaaataaaattatatgcggtgattgcttgataacaatgaggaagatacctagcaactctattgacctagtggttacttccccaccatacaacctaaaaaactctaccggcaacgggatgaaaccatgtaccacaagcgggaagtgggcaaacgccgcattgcaaaacgggtacagccattacgacgataatatgccccacgagaagtacgtggcgtggcaacgtgaatgtttgactgaaatgtttcgattaattaaagacaccggcgcaattttttacaatcacaaatggcgtgtacaagatggtttactacaagataggcaagacattgtaaccgggtttccggtacgacaaatcattatttggcggagaaaaggtgggataaattttaatcccggctatttcttgccgacgtatgaagtgatttatttaattgcgaaacccaaatttaaacttgtgccaaaagcaaatgcggtaggtgatgtttgggaatttacgcaagaaatgaacaatgaccacccggccccgtttcctctcgctttaattaacagaattattcggtctacgagtgcgaaaatcgttttagacccttttatggggagtggaacaacagcagtcgcagcaatcgggttagatcgtgattatatcggtatagatatatctcctgattattgcaaacttgcaaagaaaagaattgctaactttgctaaacatgaaaaatcgcacgaattgtgtccggcataa

SEQ ID NO: 9626 - protein, 251 aa, Unknown
  Obtained from environmental sample
  DOMAIN (25)...(234): DNA methylase
  misc_feature (1)..(251): Xaa is any amino acid
MDKYLNKIICGDCLITMRKIPSNSIDLVVTSPPYNLKNSTGNGMKPCTTSGKWANAALQNGYSHYDDNMPHEKYVAWQRECLTEMFRLIKDTGAIFYNHKWRVQDGLLQDRQDIVTGFPVRQIIIWRRKGGINFNPGYFLPTYEVIYLIAKPKFKLVPKANAVGDVWEFTQEMNNDHPAPFPLALINRIIRSTSAKIVLDPFMGSGTTAVAAIGLDRDYIGIDISPDYCKLAKKRIANFAKHEKSHELCPA

SEQ ID NO: 9627 - DNA, 615 bp, Unknown
  Obtained from environmental sample
  misc_feature (1)..(615): n is a, c, g, or t
atgagcgagaaaaaaggcggctttgcagggatgctgaaactcggcgttgtcctggccctttacgcagtcgcggcctgtgtcggcctggcctttgtatacgccggtacggaaaaagtcattgcccagcggcagcgcgccgatctcgaagcgtcgttgagcgagttgtttagtgaagcggacgattttaaggcaatttccggtttaaaaagcggtgacccaacagtaaccatcgaagaagacggagctttcgcggcttataaaaatggggaagtcattggcgcgatcctgagaacttccagggccagttacagcgggtcgatcaaaacactggtgggtgtcggcactaacggtaaaatcagggccgtaaaaatcctggagcacagcgatactccggggcttggggcaaatgcggcttcaagcacatactatgtggatcgggcaaaggggattcatttttacgatcagtttgcgggaaaagccgtgagcgatccctttgtgccgaaaagcgatgtgatcgctattaccgccgccaccataacaagccgggctgtggcggcatcggtcaaggcggcgggcgaagccgctttagcctggtttgccggaggcaagcggtga

SEQ ID NO: 9628 - protein, 204 aa, Unknown
  Obtained from environmental sample
  SIGNAL (1)...(24)
  DOMAIN (102)...(195): FMN-binding domain
  misc_feature (1)..(204): Xaa is any amino acid
MSEKKGGFAGMLKLGVVLALYAVAACVGLAFVYAGTEKVIAQRQRADLEASLSELFSEADDFKAISGLKSGDPTVTIEEDGAFAAYKNGEVIGAILRTSRASYSGSIKTLVGVGTNGKIRAVKILEHSDTPGLGANAASSTYYVDRAKGIHFYDQFAGKAVSDPFVPKSDVIAITAATITSRAVAASVKAAGEAALAWFAGGKR

SEQ ID NO: 9629 - DNA, 375 bp, Unknown
  Obtained from environmental sample
  misc_feature (1)..(375): n is a, c, g, or t
ttggtgtttcttcagttattggtttttattctggttatcgcgtcgctggttcagcttgtggagttttaccttaaaaaatccgcgcctgctctgtacaacgctatgggtatttaccttgccttaattacgaccaactgcgccattttggcggtaactctggacaatatttccaaagggtataattttgccgaatctttggcttacgccatcggcattgccctgggctttcttctttccatgttgcttttggcggggctcaggcggaggctcaggacaagcccgattccggcatttctaaaggggacgcccatactttttgtgtgcgcctgccttctttcgcttgcctttgcgggtttttcaggtttggtaaagtag

SEQ ID NO: 9630 - protein, 124 aa, Unknown
  Obtained from environmental sample
  DOMAIN (3)...(124): Rnf-Nqr subunit, membrane protein
  misc_feature (1)..(124): Xaa is any amino acid
MVFLQLLVFILVIASLVQLVEFYLKKSAPALYNAMGIYLALITTNCAILAVTLDNISKGYNFAESLAYAIGIALGFLLSMLLLAGLRRRLRTSPIPAFLKGTPILFVCACLLSLAFAGFSGLVK

SEQ ID NO: 9631 - DNA, 522 bp, Unknown
  Obtained from environmental sample
  misc_feature (1)..(522): n is a, c, g, or t
atgcagcgcgatttttatatggggagtttttcatttcagccgactttcaagatttttatggctactaaccacaagccggtgattaaaggcacggattacggcatttggcggcggataaagttaattcccttcgccacacggataccggaagaaaaacaggacaaacaccttgaattgaaattacaggaggaggcaagcggtattttgaactggctgttggaagggacggctcattggaagcgggaacaactgaaagcgcccaaggcggtattatttgctactgacgaatatcgggatgaaatggacgttatcggcaactttataaaagagaaatgcgtccagaagaaagaaatgtccattacgattaagaagttatacaaggcttattctgattggtgcgaggaaaaccacgaacaccctgtcagtgaacggttttttactttgcggcttaaagaaatggggtttgtgcagagtagaacctcaacggagagattttgggtggggattggggctttcgaatga

SEQ ID NO: 9632 - protein, 173 aa, Unknown
  Obtained from environmental sample
  DOMAIN (1)...(156): Poxvirus D5 protein-like
  misc_feature (1)..(173): Xaa is any amino acid
MQRDFYMGSFSFQPTFKIFMATNHKPVIKGTDYGIWRRIKLIPFATRIPEEKQDKHLELKLQEEASGILNWLLEGTAHWKREQLKAPKAVLFATDEYRDEMDVIGNFIKEKCVQKKEMSITIKKLYKAYSDWCEENHEHPVSERFFTLRLKEMGFVQSRTSTERFWVGIGAFE

SEQ ID NO: 9633 - DNA, 798 bp, Unknown
  Obtained from environmental sample
  misc_feature (1)..(798): n is a, c, g, or t
atggaagagccgcctttggtagcttgctccgaccccattgaacgcaaggaaaccgcgctgatggccattatccccgaaagccccaacaagccctacgatatgtacgaggtgataaaaatgatagtggacaacggcgagtaccttgatgtgcagggtgcgtttgcccccaacatcattaccgcctttgcgcgtttcaacggtatgtcggtgggcatagttgccaatcagcccaagtatttggcaggtgtactcgacatcaacgcctcgcgcaaggctgcgcgttttgtgcgcttttgcgatgcgttcaacattccgctcgttacgctcgtggacgtgccgggttttctgcccggtacggcgcaggagtacggcgcggtcattctgcacggcgcaaagctgctttacgcttacggcgaggctaccgtgccaaaggttacggttacgctgcgcaagtcttacggcggtgcgtactgcgtgatgagcagcaagcacctgcgcggcgacctcaactatgcgtggccaagcgcagagattgcggtgatgggcgttgacggtgctattgaggtgctgtacagcaaggaaattgccgcctccgaaaacccacaggaggcagccctccaaaaggctacggagtacgttgacaagtttgccaacccttacaacgccgccaagtacggctacattgacgatgtgattttgccaaagaatacgcgctttcgtatcattcgcgccttgcaacagctcagcacaaaaaaactgacaaatccggcgaaaaaacatgataatttgccgttgtag

SEQ ID NO: 9634 - protein, 265 aa, Unknown
  Obtained from environmental sample
  DOMAIN (1)...(263): Carboxyl transferase domain
  misc_feature (1)..(265): Xaa is any amino acid
MEEPPLVACSDPIERKETALMAIIPESPNKPYDMYEVIKMIVDNGEYLDVQGAFAPNIITAFARFNGMSVGIVANQPKYLAGVLDINASRKAARFVRFCDAFNIPLVTLVDVPGFLPGTAQEYGAVILHGAKLLYAYGEATVPKVTVTLRKSYGGAYCVMSSKHLRGDLNYAWPSAEIAVMGVDGAIEVLYSKEIAASENPQEAALQKATEYVDKFANPYNAAKYGYIDDVILPKNTRFRIIRALQQLSTKKLTNPAKKHDNLPL

SEQ ID NO: 9635 - DNA, 486 bp, Unknown
  Obtained from environmental sample
  misc_feature (1)..(486): n is a, c, g, or t
gtgcgcgaagctaaagagaagggctacactgagcccgacccaagagacgaccttaacgcaatggacgccgcgcgtaaagttttaattcttgcaagggaatgtggtcttaaccttgaatttaagaacgtaaaaatcgatcctattctgcccaaagcttgctttagtgcaagaaatatagacgctttttttaaagagcttaaaaaagccgacgctgattttgaaaaacggcgcgcgcaggcggcggcggaaagcaaacaacttcgctatgtcgccgtgatagaagaaggaaaggcaaaactttctttccgcgccgaagaagaaggaagccccttccgctcgttagtggacagcgataatatcgtcgttattacaacaaaccgttattcaaaactccctatggttatcaaaggaccgggagcgggcgctcaagttacggctacgggagtgttcgccgacattctgcgcaccgcaagaacgttggtatag

SEQ ID NO: 9636 - protein, 161 aa, Unknown
  Obtained from environmental sample
  DOMAIN (1)...(154): Homoserine dehydrogenase
  misc_feature (1)..(161): Xaa is any amino acid
MREAKEKGYTEPDPRDDLNAMDAARKVLILARECGLNLEFKNVKIDPILPKACFSARNIDAFFKELKKADADFEKRRAQAAAESKQLRYVAVIEEGKAKLSFRAEEEGSPFRSLVDSDNIVVITTNRYSKLPMVIKGPGAGAQVTATGVFADILRTARTLV

SEQ ID NO: 9637 - DNA, 585 bp, Unknown
  Obtained from environmental sample
  misc_feature (1)..(585): n is a, c, g, or t
atgccgcagggcgaacagtgggatataggcttttcgcatgagttagtcgatcatttgagaataaaaaaatgcgtcgtcaatataaaggacggcgtagacgcggtttaccagtcattaaaagaggggggattgctgctaaacaggcaggcgacaattaacacccccgcaagaatcagaatgtcagtcctctacgctgtttccgccattgtcggagggcgcgtggcgaatacctgcaaccttagcgaggactgggtcggctattccacgaaattcggggacagcgccggtgatttcagccctttgtccggcctgacggtaaccgaggtaaaggctgtcgggagagaactgggcctgccctcaaaatttatcgacaagatgccggcggacgggctttccggcctgtccgatgaagacaatctcggattttcatataatgttcttgacaggtatatccgtgaaggaatttgcgaaaataaatccgtcaaagaaaaaattgacaacctgcacaggaacaacctgcacaagcttaaccctatgcctggttatgagttgaaattactaaatcattacgataatttgtcgtaa

SEQ ID NO: 9638 - protein, 194 aa, Unknown
  Obtained from environmental sample
  DOMAIN (1)...(179): NAD synthase
  misc_feature (1)..(194): Xaa is any amino acid
MPQGEQWDIGFSHELVDHLRIKKCVVNIKDGVDAVYQSLKEGGLLLNRQATINTPARIRMSVLYAVSAIVGGRVANTCNLSEDWVGYSTKFGDSAGDFSPLSGLTVTEVKAVGRELGLPSKFIDKMPADGLSGLSDEDNLGFSYNVLDRYIREGICENKSVKEKIDNLHRNNLHKLNPMPGYELKLLNHYDNLS

SEQ ID NO: 9639 - DNA, 312 bp, Unknown
  Obtained from environmental sample
  misc_feature (1)..(312): n is a, c, g, or t
ttggcttcccttgcctctctggcttcttntgcctcacgcgcttcccttgcctcgcgcgcttctcttgcctctcttaactctcttgcctcacgcgcctcccttgcagtccttgcctccctaatttcacgttcttccctaatttctcttaattcccttgcctcacgcgcttctcttgcctctcttgcctcacgcgcttcccttgcttcaacagtcataaccatcaaccatgcaaggaattcaggatcattgctgtttgcgccggaaaagagagcctctttagcagttggatcgcttacaaaaaattcaggatag

SEQ ID NO: 9640 - protein, 103 aa, Unknown
  Obtained from environmental sample
  SIGNAL (1)...(23)
  misc_feature (1)..(103): Xaa is any amino acid
MASLASLASXASRASLASRASLASLNSLASRASLAVLASLISRSSLISLNSLASRASLASLASRASLASTVITINHARNSGSLLFAPEKRASLAVGSLTKNSG

SEQ ID NO: 9641 - DNA, 501 bp, Unknown
  Obtained from environmental sample
  misc_feature (1)..(501): n is a, c, g, or t
gtggcaccaaaaacaaaaacagaactatnnnagtcggagtctagtcatttagttactttccaccttggggaggaactgtacggtgttaatataatggatgtaaaagaaattgtccgcgtacaggcaattcgtccaattcccaacgccncaatttatgtagagggaatattcaaccttagaagtgaaattattccaattatcagtctgcataaacgtttccatttaaagaaattggcagtttccgaagaagatgaattgttgtccggctttgtaattgtcgatatagacggaataaaattagggatcattattgacagaatttcaagggtcgtaacaatagaaaaagatgacattcagccgccgcctcagatgttttccggcattggcgctgagtatattcagggtgttgttcatcaggaagatggatatttaattattcttgatataagagacctctttaatccaaaagaacttaagaaaatttccgaacttagaagatag

SEQ ID NO: 9642 - protein, 166 aa, Unknown
  Obtained from environmental sample
  DOMAIN (16)...(157): CheW-like domain
  misc_feature (1)..(166): Xaa is any amino acid
MAPKTKTELXXSESSHLVTFHLGEELYGVNIMDVKEIVRVQAIRPIPNAXIYVEGIFNLRSEIIPIISLHKRFHLKKLAVSEEDELLSGFVIVDIDGIKLGIIIDRISRVVTIEKDDIQPPPQMFSGIGAEYIQGVVHQEDGYLIILDIRDLFNPKELKKISELRR

SEQ ID NO: 9643 - DNA, 645 bp, Unknown
  Obtained from environmental sample
  misc_feature (1)..(645): n is a, c, g, or t
gtgcggtttaccctggaaagcctgcccggacaaacttttagcggaagggtagaaaccctgcgtatggttcccgtggtttccagtaacgtggtttcttatacggtgcttgtcagggttgaaaacgtccgtggcaatctgttttcgggaatgacctgtgcggttgacttcattgttgaaaacagcgagaacacacttatggtttccaacgccgctctgcgctaccagcccaatagtctaagcgcggaaacaattgcggacatggtgtttgccgccagccttgaaaacatgaacgaagaacagcgggtggccgcggtggtaaaccgagaacagccacgagcgcagaacgtgaaccaggccccgaacacgggaggaacaggaataacagacgtgctgatgggcggcggaagggctcccggcgggttcggaggcgggcaatttgtcgcgggaaggcaaggacaggggcaaggcaggaatatcaatacctcagctccgtcagtcgttgtgcggaatttatggtatatcaacaatgagggcaaacttgaggtgatgcaggtacggaccggtatctcctctggctcttataccgagatttacgccgcagaagatttcgaaggaaaacaagttatcttaagggagaagatataa

SEQ ID NO: 9644 - protein, 214 aa, Unknown
  Obtained from environmental sample
  misc_feature (1)..(214): Xaa is any amino acid
MRFTLESLPGQTFSGRVETLRMVPVVSSNVVSYTVLVRVENVRGNLFSGMTCAVDFIVENSENTLMVSNAALRYQPNSLSAETIADMVFAASLENMNEEQRVAAVVNREQPRAQNVNQAPNTGGTGITDVLMGGGRAPGGFGGGQFVAGRQGQGQGRNINTSAPSVVVRNLWYINNEGKLEVMQVRTGISSGSYTEIYAAEDFEGKQVILREKI

SEQ ID NO: 9645 - DNA, 555 bp, Unknown
  Obtained from environmental sample
  misc_feature (1)..(555): n is a, c, g, or t
atgacagaacaactgattgaaattggcggcaggcttagagggctcagaagcattatgggtatttcgatggaaaagatggccgaagaccttaagcttggcattgacgactaccttgcgtttgaacgcggcgagcacgatttttcgtttagctttctttttaatgcggcaaatatattgggcgtagatattgtggacattatcagcggggagactccaaaactgaccacatgttccctagtacggaaaggcgaagggtttgatataaggcgaagcgaagcttacgactacaagcatcttgcttttacttttaaaaagaaaaaggctgaacctttcatagtaactgtagaaccaaacacaggcgacgaggttgatttgcacacgcatgagggacaggaatttaactacatggtttcaggcagcatggaatttcaccttgacgatatggcatacgagcttaacgaaggcgacagtgtgtatttcgattcaagcataccgcatgcgatgaaagctacaggcaagcacccggcaaaatttatcgccgttgtgattaaataa

SEQ ID NO: 9646 - protein, 184 aa, Unknown
  Obtained from environmental sample
  DOMAIN (111)...(182): Cupin domain
  misc_feature (1)..(184): Xaa is any amino acid
MTEQLIEIGGRLRGLRSIMGISMEKMAEDLKLGIDDYLAFERGEHDFSFSFLFNAANILGVDIVDIISGETPKLTTCSLVRKGEGFDIRRSEAYDYKHLAFTFKKKKAEPFIVTVEPNTGDEVDLHTHEGQEFNYMVSGSMEFHLDDMAYELNEGDSVYFDSSIPHAMKATGKHPAKFIAVVIK

SEQ ID NO: 9647 - DNA, 870 bp, Unknown
  Obtained from environmental sample
  misc_feature (1)..(870): n is a, c, g, or t
ttgctggggcacccgttgccagaaagcacaattaaagttgcagaggctgcgggagctatattgtttggctcggttgggggaccaaaatgggaaaaattgccaccggaacttcaacccgaaagaggcgcgcttttgccgcttcgcaaacactttaaactttattgcaacttgagaccagcaagagtatataaggctctcgccagtgcctgcccgctaagagcagatattgtaggcgatggttttgatattctttgcgttagggaattgactggcgatgtttattttgggcagcctaaaggcagagagggtacgggagaaaacgaaaagggctttgacacaatggtttatagccgctacgaggtggaacgcattgcccgctttgcttttgaagccgctgctctccgcagaaaaaaacttgcaagcatagacaaagccaatgttctaaccaccagcgttttttggcgcgaagttgttaaagaaatatcaaaagaattcccgcaagttgaactggaacatatatatgtggataatgcggcaatgcaactcataaaacgcccacgagattttgatgttatgctctgccccaacctgtttggcgatattctaagcgatgaatgtgcaatgctaaccggctccatggggcttttgccaagcgcaagcatagcagaaggtgcctttgggctttacgaacccgcaggcggctccgcgccagatattgctggcaagggcatagcaaacccaatagcgcaaatactctcggtagcccttatgcttcgctacacctttaaagaagatgcagcggcaaaggcaattgagcaagcagttgaagatgttatatccaaaggcattcgcaccggagatattgggtga

SEQ ID NO: 9648 - protein, 289 aa, Unknown
  Obtained from environmental sample
  DOMAIN (1)...(289): Isocitrate/isopropylmalate dehydrogenase
  misc_feature (1)..(289): Xaa is any amino acid
MLGHPLPESTIKVAEAAGAILFGSVGGPKWEKLPPELQPERGALLPLRKHFKLYCNLRPARVYKALASACPLRADIVGDGFDILCVRELTGDVYFGQPKGREGTGENEKGFDTMVYSRYEVERIARFAFEAAALRRKKLASIDKANVLTTSVFWREVVKEISKEFPQVELEHIYVDNAAMQLIKRPRDFDVMLCPNLFGDILSDECAMLTGSMGLLPSASIAEGAFGLYEPAGGSAPDIAGKGIANPIAQILSVALMLRYTFKEDAAAKAIEQAVEDVISKGIRTGDIG

SEQ ID NO: 9649 - DNA, 432 bp, Unknown
  Obtained from environmental sample
  misc_feature (1)..(432): n is a, c, g, or t
atgatcaccgccctttccggtgactcaaacgaactgcgggcctttgacaacctggcggatgactttatcgcgaagcccttttccatgcagatacttctgaaaagggtcgaggccctcttgagacgaagcggcgctttgcaaaaagaaatacgctttgcttccctttgcctaaaccgcgaaacattcaaggctttttgggcggaggaagaattgccgcttacccttaaagaatttgagatccttgctcttcttgcaaacaacgagaatagggtggtgtcgcacgaaactctcctcaataagatatggggttacgactactacagcagcgagggtacggttcacacccacattaagaacctgcgcgcaaaattgccggttaatatcattaaaaccgtccgcggcgtcggatattgtctgggggaagctgaatga

SEQ ID NO: 9650 - protein, 143 aa, Unknown
  Obtained from environmental sample
  DOMAIN (68)...(139): Transcriptional regulatory protein, C terminal
  misc_feature (1)..(143): Xaa is any amino acid
MITALSGDSNELRAFDNLADDFIAKPFSMQILLKRVEALLRRSGALQKEIRFASLCLNRETFKAFWAEEELPLTLKEFEILALLANNENRVVSHETLLNKIWGYDYYSSEGTVHTHIKNLRAKLPVNIIKTVRGVGYCLGEAE

SEQ ID NO: 9651 - DNA, 405 bp, Unknown
  Obtained from environmental sample
  misc_feature (1)..(405): n is a, c, g, or t
atgaaaaataaaagcccgcgaatattcttaaagatatttatctacaccgtttttctcgttctgcttatctgtctgacagcggtattgcttttttcgcgtcagtttctttctttttaccgtacggagcaggtacgtcagctttcagcgtcttttcagcccgtgattaactcaataacggcagcagggacgcccgaagaaatggaggacattgcgcgcacattcgctgatagcaaccagtcgttcaggtttcagattcaggaagaaagcggcaatgttattttttcaaccggggattttattgacgaggagtctgtcggtccctttaacagagtaacgatacgtcnttgtaatatttcaagagaccagattttaggaggcgagattccgccgggagctcaattctaa

SEQ ID NO: 9652 - protein, 134 aa, Unknown
  Obtained from environmental sample
  SIGNAL (1)...(26)
  misc_feature (1)..(134): Xaa is any amino acid
MKNKSPRIFLKIFIYTVFLVLLICLTAVLLFSRQFLSFYRTEQVRQLSASFQPVINSITAAGTPEEMEDIARTFADSNQSFRFQIQEESGNVIFSTGDFIDEESVGPFNRVTIRXCNISRDQILGGEIPPGAQF

SEQ ID NO: 9653 - DNA, 312 bp, Unknown
  Obtained from environmental sample
  misc_feature (1)..(312): n is a, c, g, or t
ttggggaaaatcggctacaattacaacgctatgaaagagtcgggctattctttccctgtaatagaagtttccgccaagtatatagattccctccgatttttagatcgcgctattataaaggcaatacttttggagtacgagaacaggttgaaaatacaatatgaaattcgcaatgtaaaaaccggagccgtagtaaccaaaggttataccacgcaaatggcctttgatgttaatgccggtgaatcctgtttttattgcccgaaaatattggttgagaaaattgaagcctttattgagaaagaaaaaccatga

SEQ ID NO: 9654 - protein, 103 aa, Unknown
  Obtained from environmental sample
  misc_feature (1)..(103): Xaa is any amino acid
MGKIGYNYNAMKESGYSFPVIEVSAKYIDSLRFLDRAIIKAILLEYENRLKIQYEIRNVKTGAVVTKGYTTQMAFDVNAGESCFYCPKILVEKIEAFIEKEKP

SEQ ID NO: 9655 - DNA, 540 bp, Unknown
  Obtained from environmental sample
  misc_feature (1)..(540): n is a, c, g, or t
ttgtcgcgagcctcttcaaaatctaattgcgtaacagttggatttccaaatctagctgccataagagccgcctcgttcacgaggttttccaaatctgctccggcaagccccggcgttccttttgcaatatcttttacattaacttctttgtctaacggcactttgcgtttttccaaatgcactctcaaaattgcctcgcgcccaaccaaatccggaagccccacaacaacctgcctatcaaagcgaccaggtcttagcaatgctttatccaaaacatcggggcggtttgtggctgcaactaaaataactccttcgtttggagcaaaaccatccatttcaacaagcaattggttcaaggtttgctcacgctcatcgtgcccgccaccaagccctgcaccgcgttgcctgccaaccgcgtcaatttcgtctatgaacaaaatacagggggcattcttttttcccgtttcaaacaaatccctaacacggcttgcaccaacgcccacaaacatctcaacaaaatccgaaccgctcatgctataa

SEQ ID NO: 9656 - protein, 179 aa, Unknown
  Obtained from environmental sample
  misc_feature (1)..(179): Xaa is any amino acid
MSRASSKSNCVTVGFPNLAAIRAASFTRFSKSAPASPGVPFAISFTLTSLSNGTLRFSKCTLKIASRPTKSGSPTTTCLSKRPGLSNALSKTSGRFVAATKITPSFGAKPSISTSNWFKVCSRSSCPPPSPAPRCLPTASISSMNKIQGAFFFPVSNKSLTRLAPTPTNISTKSEPLML

SEQ ID NO: 9657 - DNA, 387 bp, Unknown
  Obtained from environmental sample
  misc_feature (1)..(387): n is a, c, g, or t
gtgggcgaccggcaggaagacagcaaacaggtcagggacgagtttctaaaaagccgcatcggggcgatactgcgctgcgccgagataatggtcgacaattccaaagaagcccagggcgcagaaaattcggcggaaccggaaggtttcaccaaggtaacgcagcttaccacaatagcgaagatgaaatcccacgcggactataatgcagccaaagccggcgatgcgaaggccgcggagcggcttgtaagggacatgatggcgggcaaggcgcagcaggacaaaatcaaggccctggcggaaaggcacccgggcgcagtactggtcgccgtccacgcgaaagagcggacagggaaaaacgcaataccgcaaataatgcagaatatatga

SEQ ID NO: 9658 - protein, 128 aa, Unknown
  Obtained from environmental sample
  misc_feature (1)..(128): Xaa is any amino acid
MGDRQEDSKQVRDEFLKSRIGAILRCAEIMVDNSKEAQGAENSAEPEGFTKVTQLTTIAKMKSHADYNAAKAGDAKAAERLVRDMMAGKAQQDKIKALAERHPGAVLVAVHAKERTGKNAIPQIMQNI

SEQ ID NO: 9659 - DNA, 510 bp, Unknown
  Obtained from environmental sample
  misc_feature (1)..(510): n is a, c, g, or t
ttggccgagtctctgcgatacacttttcttatttttgaactgccttcatggactaaaccaaacagactcaacaaaaaatttgtaaaacagaaaaaactgtattttaccgataccagcctgctctgccatataatgcaaagagatatggaagatgtatataaaaacgacaagacggtaatgggacatatattcgagaactttatcgccacagagattatgaaggcggcaaagtcgcttgattcatacagcgtgtcgcattttaatcccgtgcagaatcagggcagggaaatagattttgtcattgaaagccccaatggaaaaactgtcggaatagaggtaaaaattgacagtaccatcaatgaaaaagactggaccaatatgaacactttccaggaaacgatgggagacagttttctgaaagggatcattatctataccgggtctgatcttgtgcaggtcagccggaaaatatgggctgttccggtacagtatttgtggacgcaagagtaa

SEQ ID NO: 9660 - protein, 169 aa, Unknown
  Obtained from environmental sample
  misc_feature (1)..(169): Xaa is any amino acid
MAESLRYTFLIFELPSWTKPNRLNKKFVKQKKLYFTDTSLLCHIMQRDMEDVYKNDKTVMGHIFENFIATEIMKAAKSLDSYSVSHFNPVQNQGREIDFVIESPNGKTVGIEVKIDSTINEKDWTNMNTFQETMGDSFLKGIIIYTGSDLVQVSRKIWAVPVQYLWTQE

SEQ ID NO: 9661 - DNA, 435 bp, Unknown
  Obtained from environmental sample
  misc_feature (1)..(435): n is a, c, g, or t
ttgcgcgtcctgccgccggaaagttcctgggaagaagaaaccgcgcccgccgcctatgacgccattctnggcggcatgagttccggcggcattgttctggcaagtctggccggatacctgataggggaatttttcaattccgtactgctttcaaaaattaaagtgatgatgcaggggcggctgctctggttcagggccgttacttccagtctggtgggagaactgttggacagcctgatttttgtatcaatagcgtgcctgaccggggttttcggctggcatctgtttattacgctggcgctgaccaactatatcctgaaatgccttatcgaagcgctggtcttgccggttacttatgcggtagtgcgcctgttgaaaaaacgcgaaggaatcgatgtgtacgacattggagtgaagtaccggccttttggataa

SEQ ID NO: 9662 - protein, 144 aa, Unknown
  Obtained from environmental sample
  DOMAIN (1)...(108): Uncharacterized ACR, YhhQ family COG1738
  misc_feature (1)..(144): Xaa is any amino acid
MRVLPPESSWEEETAPAAYDAILGGMSSGGIVLASLAGYLIGEFFNSVLLSKIKVMMQGRLLWFRAVTSSLVGELLDSLIFVSIACLTGVFGWHLFITLALTNYILKCLIEALVLPVTYAVVRLLKKREGIDVYDIGVKYRPFG

SEQ ID NO: 9663 - DNA, 900 bp, Unknown
  Obtained from environmental sample
  misc_feature (1)..(900): n is a, c, g, or t
atgttgatcatggttatttttggccccctgtgcgactggacgaattttgaaggccgcaatattacctatattttcttccagttcagttatgtttttattctggctacaggaatggttcaatgtataattatatgcggaattgacctttcagtcggttcggtggtcgcttttgtaggcgccataagcgtaatgatttacaataccggcgtaggaatgtttgttactttaattgcttctcttataatgggtttagccgtcggcgcttttcagggctggtttatagcgtatcccaaaattccaccctttatcgctacgttggcaggtatgttacttttccggggacttacctatattgtaaccaatgtaagcccggtaaacccgcatgatgacgtttattcctacttttctacaggaacgatagattatgatttactgcacatggaagatccggtcattcttggttattatccgacaccttttatatttgcgttaattattattgtaatcttatggatagtagaattcaaaaacaggaaaaccaggatagcccatgatcatactgtttctcctctggtcgttactattgttaaactggcgcttatgagcattttgttactcattcttgcggaacgttttgcctcttacctcgggcttcccattgtcgtaatcgtgttgttagtaacggtaggtcttttccactttattatgaaaaacaccgtccttggcaggtatatttacgcggttggcggcaatgaacgctccgcaaagctgtccggtattaatactgaattaattacatttattgtgtactgtattatgggagtgttgtcggggcttgcggctgtagtgagtacagggtacatgaacagcgcccttccacaagccgggaaatatgtttga

SEQ ID NO: 9664 - protein, 299 aa, Unknown
  Obtained from environmental sample
  DOMAIN (20)...(299): Branched-chain amino acid transport system / permease component
  misc_feature (1)..(299): Xaa is any amino acid
MLIMVIFGPLCDWTNFEGRNITYIFFQFSYVFILATGMVQCIIICGIDLSVGSVVAFVGAISVMIYNTGVGMFVTLIASLIMGLAVGAFQGWFIAYPKIPPFIATLAGMLLFRGLTYIVTNVSPVNPHDDVYSYFSTGTIDYDLLHMEDPVILGYYPTPFIFALIIIVILWIVEFKNRKTRIAHDHTVSPLVVTIVKLALMSILLLILAERFASYLGLPIVVIVLLVTVGLFHFIMKNTVLGRYIYAVGGNERSAKLSGINTELITFIVYCIMGVLSGLAAVVSTGYMNSALPQAGKYV

SEQ ID NO: 9665 - DNA, 801 bp, Unknown
  Obtained from environmental sample
  misc_feature (1)..(801): n is a, c, g, or t
ttggtcttcacaatatcgcaaagcggcgaaacagcggatacctttgccgcactcaaagaagcccagaacaaaggggcaactgtgctatctatatgcaatgtggttggctcatccatagccagagcctcaaacggcggagtttatctacacatagggccggaaattggggttgcaagcacaaaggctttcaacgcgcaggtcaccgttttggctttggtagcccttttgctggggcggcaacgcaggctctccgctgttcaaggaatggaaattgcgcaggctataagttccctgccagccgcgatggagcaaacgcttaaattaaatgccgagattatggaaattgcaaaggtgtattgcaatcatacaaattttctctacttgggcaggcactaccattatccagttgctatggaaggtgcgttaaaattaaaggagattagctacatccatgcggagggttatcctgccgcagagatgaaacacggccccatagcgttgatagatgcgaatatgcctgtggtgatagtggctcccaaagatgccctttttgataaaattgtctctaacgcaagggagataaaagcccgcagcggaaaactgatagttataacaacagatgattgcgctccttttgacgaaattgccgaccacataataaaagtgccttctgtgaacaacccgttgatgcccgtgataacgagcattcctttgcagctcttggcatatcacattgcggttttgcgcggcaacgatgttgaccaaccgaggaatttggcaaagagcgtgacggtggagtaa

SEQ ID NO: 9666 - protein, 266 aa, Unknown
  Obtained from environmental sample
  DOMAIN (115)...(252): SIS domain
  misc_feature (1)..(266): Xaa is any amino acid
MVFTISQSGETADTFAALKEAQNKGATVLSICNVVGSSIARASNGGVYLHIGPEIGVASTKAFNAQVTVLALVALLLGRQRRLSAVQGMEIAQAISSLPAAMEQTLKLNAEIMEIAKVYCNHTNFLYLGRHYHYPVAMEGALKLKEISYIHAEGYPAAEMKHGPIALIDANMPVVIVAPKDALFDKIVSNAREIKARSGKLIVITTDDCAPFDEIADHIIKVPSVNNPLMPVITSIPLQLLAYHIAVLRGNDVDQPRNLAKSVTVE

SEQ ID NO: 9667 - DNA, 834 bp, Unknown
  Obtained from environmental sample
  misc_feature (1)..(834): n is a, c, g, or t
gtgcaagaagtttttgcaggtaacggctccgatgaaatcttagcgttcgctttcggctctttttttgaaagcggtgaaaaagcagggcagatactttttcccgacatcacatacagtttttatcctgtttacgccaatctttgggaaatcccttaccgtacaatcgctcttacgcaggatttttcaattaacataaaagattataaaaccccttgcggcggcgtgatatttcccaatccaaacgccccaacagcggtcgccttgccgttagacgatattctgtctctcgccgaataccttgaaaaacagggaaaaatccttattgttgacgaagcctacatagcgttttcaggttcaagcgacataaaatcggcggtttgctccataaaaaatcaccccaatctgttaacagtgcatacaatgtcaaaatccgcgtctcttgccggtttgcgttttggttttgccgtcggcaatgaaaaattaatcgaaggtctttgcagaatacgcgattcgtttaattcctacaccgtcgattttcttgctcttacgggagcaacggcggcagtctccgacgcgtcatattacgaagaaattaaccgccgtgttattgccacgcgggaacggacagcggaaactttgcgcagtcttggctttacagttctgccgtcgtcggctaatttcctatttgtaaagcctcccaatatcggcggcgctgaatttttcgccgcgtttagaaataggaatattctgggtaggcatttncacaaagacagaatagcggactttttgcgtatcagtatccgaacagacgccgacatggataaaagttcttga

SEQ ID NO: 9668 - protein, 277 aa, Unknown
  Obtained from environmental sample
  DOMAIN (1)...(275): Aminotransferase class I and II
  misc_feature (1)..(277): Xaa is any amino acid
MQEVFAGNGSDEILAFAFGSFFESGEKAGQILFPDITYSFYPVYANLWEIPYRTIALTQDFSINIKDYKTPCGGVIFPNPNAPTAVALPLDDILSLAEYLEKQGKILIVDEAYIAFSGSSDIKSAVCSIKNHPNLLTVHTMSKSASLAGLRFGFAVGNEKLIEGLCRIRDSFNSYTVDFLALTGATAAVSDASYYEEINRRVIATRERTAETLRSLGFTVLPSSANFLFVKPPNIGGAEFFAAFRNRNILGRHXHKDRIADFLRISIRTDADMDKSS

SEQ ID NO: 9669 - DNA, 735 bp, Unknown
  Obtained from environmental sample
  misc_feature (1)..(735): n is a, c, g, or t
atgatagttgatgttaattggcttagctcgtcaaatgtaatgcaggccatttacgcggagcatgaaggctcctaccttgtcggcgtcgccgcggcgttaaaagcccaggaagacaaaatcgccaatccgcggtttggttttattggcggagttcccggcgctgttattacaaagtttgaagtcggttatgtgcagggcattctttccgtaatacccaacgcgcaaattgtcgattactatgtaaacagctggggcgaacctgctctcgcgaaaacacaggcgaaaaactggtatgattccggcgtatatgttatttattccgcggcaggcggcagcggcaacggaacaatcgcgcaggcgaaagaataccgctcatccggcagaaatgtatgggctataggcgtggattccgaccagcatgaggaaggcatttacaatgacaaaggagattccgcggtgcttacatccatgcttaaaaaggttgagagcagtatagtttacgcgcttaactcagttaaaaataatacttttaagggcgagattattacattcgatttaaaagcggacggcgtaggctattctacagttaattccgccatgagtcccgccatcaaaagcaagcttgaggatgttaagaaacaaatttcaaacggcgaaattaaaattgcccctactctttccgccgcgattcgcttaccgggctttccgcanaatttaagagcaattgacgactaa

SEQ ID NO: 9670 - protein, 244 aa, Unknown
  Obtained from environmental sample
  DOMAIN (1)...(226): Basic membrane protein
  misc_feature (1)..(244): Xaa is any amino acid
MIVDVNWLSSSNVMQAIYAEHEGSYLVGVAAALKAQEDKIANPRFGFIGGVPGAVITKFEVGYVQGILSVIPNAQIVDYYVNSWGEPALAKTQAKNWYDSGVYVIYSAAGGSGNGTIAQAKEYRSSGRNVWAIGVDSDQHEEGIYNDKGDSAVLTSMLKKVESSIVYALNSVKNNTFKGEIITFDLKADGVGYSTVNSAMSPAIKSKLEDVKKQISNGEIKIAPTLSAAIRLPGFPXNLRAIDD

SEQ ID NO: 9671 - DNA, 573 bp, Unknown
  Obtained from environmental sample
  misc_feature (1)..(573): n is a, c, g, or t
atgttgagcgattttctggggtcaaaaccctcaggcgatgacgcgaaaaaagtggtagaatccgcccagcaaggcatggagatcgtggggagcaagtttgaaaaaggggagtattttgtgggggacctgatttttgcgggggaactgctgacttcctgtattgaaaaacttaagcccctcttgggttcgggcgggacgagcacgcggggaacgatagtcctgggaacggtagaaggggacattcacgacattgggaaaaatatctttaagggcatggccgaagcggcggggtttaaggttgtggatatcgggatagatcagaaggctgaagtatttgtgaaagcggtgaaggaaaataagccgaaagtggtaggattttcaggggtattgaccctttcgatagattcaatgaaacggacgatacaggcgtttaaggacgcgggggtgcgggacgggattaaggtgatcatagggggaaatgcggtaaacgaagaggcgtgcaaatacgttggcgcagattcgtggagcaggaacgcggcggaagcggtaaaggtttgtggttcctgggtttaa

SEQ ID NO: 9672 - protein, 190 aa, Unknown
  Obtained from environmental sample
  DOMAIN (70)...(189): B12 binding domain
  misc_feature (1)..(190): Xaa is any amino acid
MLSDFLGSKPSGDDAKKVVESAQQGMEIVGSKFEKGEYFVGDLIFAGELLTSCIEKLKPLLGSGGTSTRGTIVLGTVEGDIHDIGKNIFKGMAEAAGFKVVDIGIDQKAEVFVKAVKENKPKVVGFSGVLTLSIDSMKRTIQAFKDAGVRDGIKVIIGGNAVNEEACKYVGADSWSRNAAEAVKVCGSWV

SEQ ID NO: 9673 - DNA, 366 bp, Unknown
  Obtained from environmental sample
  misc_feature (1)..(366): n is a, c, g, or t
ttggagttgaagctgcgggaagaagcgagcggaattcttaactggcttctggaaggcacggcgaaatggaagcgggaaggcttaaaggctccgaaagcggtattgctggctaccgatgagtaccggggcgaaatggacgttatcggcaatttcttaaaggagcggtgcatccagcaaaaggagctttcgataaggattagggaattatacaaggcttatactgactggtgcgatgagaacaacgaacacgctgtaagcgagcggtttctttccatgcggcttaaagaaatggggtttgagcagaccaggacggcagaggcgaggtattgggtggggattgggttaaaaataacagataacaaataa

SEQ ID NO: 9674 - protein, 121 aa, Unknown
  Obtained from environmental sample
  misc_feature (1)..(121): Xaa is any amino acid
MELKLREEASGILNWLLEGTAKWKREGLKAPKAVLLATDEYRGEMDVIGNFLKERCIQQKELSIRIRELYKAYTDWCDENNEHAVSERFLSMRLKEMGFEQTRTAEARYWVGIGLKITDNK

SEQ ID NO: 9675 - DNA, 864 bp, Unknown
  Obtained from environmental sample
  misc_feature (1)..(864): n is a, c, g, or t
ttgttcaatcctgataaatcttcaaaacaaataaaagatgttttgagtgaaataaatactaaattagctagtgtcggcgcaaacttttcagcctcgctcaatagttctggagagatagttataataggagatttggaaaacgaccaaaatttcacaagtaaaaaagaccctaattccgccgatgatactcttctcgcaccagaccgtgcaaaacccgaaaaccaaaaaacctttttggaacaagtaaaaattcaaataggatcgtttaaatctaatggtgctggaggagaagagattgatgttcttaaaaaagacatgggcactttggcaaaccgcaatatttttaaagaagagaatgttataaccgaagcgcaaaacgctttttatagcatagatggaatgtctgttagctcgcagagcaacgacgacgacaaaactgtagctggtaccattttcagtctaaaaaaagttacagcaccagaccaagtagtaaaactcactttagaacctgacatgagtgcccttgcagacaaaataagcgaatttgttgaagaattcaacgagttattgaaattcatagacgaaaacgcaaaagcagaggtagtggaacaaaccgattcaagtggcaaaaaagtgagcaatcgcgtagttggtgcattcacaggcgatgctgccatctctagcctgcgcgaaaatttaagaagcatgttctccaatacaataaacgaaatagccggtatgctcaacaacggctacaaaaccacttattcagcggcagcccgcgttggcatagttgcaaacaaagaaggattttacgatgtggacaaggaaaaattaaccaaggctttaaatttcagattttga

SEQ ID NO: 9676 - protein, 287 aa, Unknown
  Obtained from environmental sample
  DOMAIN (124)...(285): Flagellar hook-associated protein 2 C-terminus
  misc_feature (1)..(287): Xaa is any amino acid
MFNPDKSSKQIKDVLSEINTKLASVGANFSASLNSSGEIVIIGDLENDQNFTSKKDPNSADDTLLAPDRAKPENQKTFLEQVKIQIGSFKSNGAGGEEIDVLKKDMGTLANRNIFKEENVITEAQNAFYSIDGMSVSSQSNDDDKTVAGTIFSLKKVTAPDQVVKLTLEPDMSALADKISEFVEEFNELLKFIDENAKAEVVEQTDSSGKKVSNRVVGAFTGDAAISSLRENLRSMFSNTINEIAGMLNNGYKTTYSAAARVGIVANKEGFYDVDKEKLTKALNFRF

SEQ ID NO: 9677 - DNA, 822 bp, Unknown
  Obtained from environmental sample
  misc_feature (1)..(822): n is a, c, g, or t
ttgctggtggatgccactcagggggtgcaggcgcagaccctgtccaatatgtaccttgccctggaacataatcttgaaattgtgccggtcatcaataaaattgacatgcaggcggcggatatacccggcgttaaaaaacagattgacaaggatttggggctggatgccgaaagcgccctgctggtttcggcgcggcagggcacgggggtagatgaactttttgaggccatcgtacagcaaattccgccgccctcaggcgatcccgcttccccgctgcgggccttgatttttgactgccactacgatccctaccggggggtggtggtgcatctgcggcttttcgacggaaaagtcaaaaaaggaatgaaaatttcctttatgtcaaacagctcggtgtacgaggttgagaccgccggcgtattcaagctggcgttagttgaaactgatgaactgtccgccggcgatgtcggctacattatcgcgggcattaaaactgtcagcgacgtgcgggtcggcgacacggtaaccggcgcggacaatccctgcgcgcagcccctgcccggcttccgcgaggtaaagccggtggtcttttcctcgatttatccggttgattccaacgattacgaagaactgcgttccagcatggaaaaactgaaactcaacgacgcatcgctggtgtatgaaaaagattcttcggccgctctgggctttggtttccgctgcggctttttggggcttctgcatcttgaagtaatacaagaacggcttgaacgggaatttgaccagtcggtgatttttaccgcgcccttcngtaaagtataa

SEQ ID NO: 9678 - protein, 273 aa, Unknown
  Obtained from environmental sample
  DOMAIN (106)...(176): Elongation factor Tu domain 2
  misc_feature (1)..(273): Xaa is any amino acid
MLVDATQGVQAQTLSNMYLALEHNLEIVPVINKIDMQAADIPGVKKQIDKDLGLDAESALLVSARQGTGVDELFEAIVQQIPPPSGDPASPLRALIFDCHYDPYRGVVVHLRLFDGKVKKGMKISFMSNSSVYEVETAGVFKLALVETDELSAGDVGYIIAGIKTVSDVRVGDTVTGADNPCAQPLPGFREVKPVVFSSIYPVDSNDYEELRSSMEKLKLNDASLVYEKDSSAALGFGFRCGFLGLLHLEVIQERLEREFDQSVIFTAPFXKV

SEQ ID NO: 9679 - DNA, 801 bp, Unknown
  Obtained from environmental sample
  misc_feature (1)..(801): n is a, c, g, or t
atgaggcgaaacgtggagaacattctccttaaattgatacagagcgcgggcggcaacatatcagccgctgagagaggtattgtttatattgatgaaatcgacaagattgcccgcaaaggcgaaaatatttccattacacgagacgtttctggcgagggcgttcaacaggcacttttaaaaataatcgagggaactgtcgcgtctgttccgcctcaaggcggcagaaaacatcccaatcaggaaatgatacggattgacaccacaaatattcttttcatctgcggcggagcttttgtgggactggataaattaatcgcaaatagagttgtgaataatccgctcggtttcggttcggaatcaggcggaagaggggaaaaatctttaaaagacctttacgatgccatgcatcctgacgatttaatccgcttcggtatgattcccgaatttatcggaagacttcccattatggtcggtcttgacgaacttaaacgagaagatttaatgcgtattatcaccgagccccgcaacgctatcgtacgccagtatcaagcgtcgttggcttacgacaatgtaaaacttgagtttacggagaaggcaatcgacgcaatagccgacaaggcaattaagcaaaaaacaggagcgcgcggattaagggcgattgtcgaaaaacttatgaccgatattatgtttgaaattccttcgataccgggcgataaaaaaataataatttcccaagatacagtggaaaaatcagaaccgccgcagataatatatctggagcaaaaacaaaagagcgcataa

SEQ ID NO: 9680 - protein, 266 aa, Unknown
  Obtained from environmental sample
  DOMAIN (2)...(156): ATPase family associated with various cellular activities (AAA)
  misc_feature (1)..(266): Xaa is any amino acid
MRRNVENILLKLIQSAGGNISAAERGIVYIDEIDKIARKGENISITRDVSGEGVQQALLKIIEGTVASVPPQGGRKHPNQEMIRIDTTNILFICGGAFVGLDKLIANRVVNNPLGFGSESGGRGEKSLKDLYDAMHPDDLIRFGMIPEFIGRLPIMVGLDELKREDLMRIITEPRNAIVRQYQASLAYDNVKLEFTEKAIDAIADKAIKQKTGARGLRAIVEKLMTDIMFEIPSIPGDKKIIISQDTVEKSEPPQIIYLEQKQKSA

SEQ ID NO: 9681 - DNA, 816 bp, Unknown
  Obtained from environmental sample
  misc_feature (1)..(816): n is a, c, g, or t
atgaatcgtctcgccgaaattgccgggcatccggaaaaatgcgtcccagcttttcacgttgcaggctccaaggggaagggttcggtaaccggaatgatcgcggccatccttgaagcggcaggaattaaaaccgcccgttacgcttcgccccatgtaagcgatttcagggaaaggattacgattggggacagctttcttgacgaagagacttacgcccttgcgggaaaagagctaatggagcttgcgggtcaagtcaaattaaaaaatggtgaacagatgagctattttgagctttttaccatgtggttctttctttgcgcacgactttccaactgcaacgcaatggcggtagaaaccggcatgggcgggaggcttgacgcaacaaatatacttgatccgcttgtttcagttatcaccatcatagagcttgaacacaccgagtatctgggaaataccatcgccgccattgccgctgaaaaagcgggaataataaagcaaggccgacctcttatccttgctgaacaatccatacaggcgctggatgttttcagggaacacgcggagcgctgcacaagctcattactttatttcccggactgcggggaggtaaagaacactcgcattgataaaagcggcactgcctttgatctggtttttaatagtgaaacgattcccggcctttttgtaccgatacccggcgaagtccaagcgaggaacgctggactcgcagtgctggcggtaaaaagcgcttttcccgatattcaaaatcaatgcctttataatgggcttaataattctcgttcccgctcgcgataa

SEQ ID NO: 9682 - protein, 271 aa, Unknown
  Obtained from environmental sample
  DOMAIN (18)...(247): Mur ligase middle domain
  misc_feature (1)..(271): Xaa is any amino acid
MNRLAEIAGHPEKCVPAFHVAGSKGKGSVTGMIAAILEAAGIKTARYASPHVSDFRERITIGDSFLDEETYALAGKELMELAGQVKLKNGEQMSYFELFTMWFFLCARLSNCNAMAVETGMGGRLDATNILDPLVSVITIIELEHTEYLGNTIAAIAAEKAGIIKQGRPLILAEQSIQALDVFREHAERCTSSLLYFPDCGEVKNTRIDKSGTAFDLVFNSETIPGLFVPIPGEVQARNAGLAVLAVKSAFPDIQNQCLYNGLNNSRSRSR

SEQ ID NO: 9683 - DNA, 822 bp, Unknown
  Obtained from environmental sample
  misc_feature (1)..(822): n is a, c, g, or t
atggcaaaatttattaccaatggcgaccaaagtaaatcccaagacaaaattaacccgtactatgctgcggcggaagcaatactcaagtccgaacaggatgcgttgaagataatcaaccagggggggggggagtgtgcgctcaaacaggttgaaatgtccgaggcgatgctggaccttgcgtcaaattacattgtcgtcagcggaatttcccagaccatcctggggcagagaaatgaagacgcgctgaatgacgcgagaaaaacgctctacaagagcattatctaccttgaagggcttatcggcacttttgttgacgcgcctttttccgattatgagcagcagcttgccttaatcgaaaatataacccctgcccagcggtaccggttaatccgcaaaatgggcctggctattcaactgctggaagattcctacggcgacaacacaaaatggaaatggacatttgtggatatggagggccgttatgcggcggttgcgaaaaacatcatgaacctccgcgatatatttgtcaacagcgacatccgttctccgcattacgagccgaccgtccgtcatttgcggcttatccgaaagctcctcatgcaggccgctgaccgttaccgggaaaagtatgagttgtcaaccgacaatatagatgatttcaaagtgggtatttcttttctttccgcgctcaaacggctgaacattcttatgggggatcagattgaagcgacaaccgtcaaaaagaaacttgatatatggacagccaagctgaattcggatatagccaggcaggaaacccagaataagaaaaaagagcagtag

SEQ ID NO: 9684 - protein, 273 aa, Unknown
  Obtained from environmental sample
  misc_feature (1)..(273): Xaa is any amino acid
MAKFITNGDQSKSQDKINPYYAAAEAILKSEQDALKIINQGGGECALKQVEMSEAMLDLASNYIVVSGISQTILGQRNEDALNDARKTLYKSIIYLEGLIGTFVDAPFSDYEQQLALIENITPAQRYRLIRKMGLAIQLLEDSYGDNTKWKWTFVDMEGRYAAVAKNIMNLRDIFVNSDIRSPHYEPTVRHLRLIRKLLMQAADRYREKYELSTDNIDDFKVGISFLSALKRLNILMGDQIEATTVKKKLDIWTAKLNSDIARQETQNKKKEQ

SEQ ID NO: 9685 - DNA, 405 bp, Unknown
  Obtained from environmental sample
  misc_feature (1)..(405): n is a, c, g, or t
atgtccgccgcaaaacgcatggctcagcttgcagcggatactcttggcatttgtgccgtagaggttgccgtcgcttctacgggagttatcggcgtaccgctgccgattgaagtaatagaaaaaaatatcagcgccgttaaagcaagtctgcgctccgatgaacagggaaacgccgacgctcttgaagccatcatgacgaccgatatgtgcaagaaggaaatttgcgtggagggtgaaanntcgcgagagactgtgcgtatcggggcgataacaaaaggctcgggaatggatcatccccatatgccgaccatgcttacctttaatacaactggcgcggcggagaaaaaccgggtcttgattcgccctgcccccccccctaaaactttctttaaccccctaacctaa

SEQ ID NO: 9686 - protein, 134 aa, Unknown
  Obtained from environmental sample
  DOMAIN (2)...(134): ArgJ family
  misc_feature (1)..(134): Xaa is any amino acid
MSAAKRMAQLAADTLGICAVEVAVASTGVIGVPLPIEVIEKNISAVKASLRSDEQGNADALEAIMTTDMCKKEICVEGEXSRETVRIGAITKGSGMDHPHMPTMLTFNTTGAAEKNRVLIRPAPPPKTFFNPLT

SEQ ID NO: 9687 - DNA, 423 bp, Unknown
  Obtained from environmental sample
  misc_feature (1)..(423): n is a, c, g, or t
ttgggattatcggcganttatcgcggcatggcggaagactttgccgtggttatgcgtaaccgtattgaaaaagcccggcttctcctgcgtcctttcggggcggaggatttggaataccgtttccgcgccattttacagccccgcctgatacgccttgacgacgccaaagaggcgctgatcaacaacctgtccgcccaggttgccggacggcgcaaacggctggagttggcgcttgccgttcttgaagcgggcagtcccctttccgttatggaacggggtttttccgtggtgaccaacgcgcgaaccggcaaaattgtcaaacattcaggcgacgcccgcgccggcgaccgtttgaagatacgtccgcttaaggggacaattaccgcagttacggaggaatgttatggcgaaaacgcgcggtga

SEQ ID NO: 9688 - protein, 140 aa, Unknown
  Obtained from environmental sample
  misc_feature (1)..(140): Xaa is any amino acid
MGLSAXYRGMAEDFAVVMRNRIEKARLLLRPFGAEDLEYRFRAILQPRLIRLDDAKEALINNLSAQVAGRRKRLELALAVLEAGSPLSVMERGFSVVTNARTGKIVKHSGDARAGDRLKIRPLKGTITAVTEECYGENAR

SEQ ID NO: 9689 - DNA, 327 bp, Unknown
  Obtained from environmental sample
  misc_feature (1)..(327): n is a, c, g, or t
atggcgaaaacgcgcggtgaaaccgtgggcagtaaaagcggcagtaaaactgccggcggcggcaaggctgcctcaggcagtaaaaccgccgctatgaaaaattttgaggaacggctggagcggctggaagttctcggcgaacagattcgcaaaaccgatattcccctggatcatgcgctggcggcatttgaagagggaatcaagctggcgcggactctggaaaaagatttggaaaaaattgacagccgcattgaactgttgatgaacagcgccgaagcgcccggtgaagattccccggaactggaattatttgaatcggaaggttag

SEQ ID NO: 9690 - protein, 108 aa, Unknown
  Obtained from environmental sample
  DOMAIN (33)...(94): Exonuclease VII small subunit
  misc_feature (1)..(108): Xaa is any amino acid
MAKTRGETVGSKSGSKTAGGGKAASGSKTAAMKNFEERLERLEVLGEQIRKTDIPLDHALAAFEEGIKLARTLEKDLEKIDSRIELLMNSAEAPGEDSPELELFESEG

SEQ ID NO: 9691 - DNA, 645 bp, Unknown
  Obtained from environmental sample
  misc_feature (1)..(645): n is a, c, g, or t
gtggctgccgcgccttacgcgccggacgccaacatggtacataaaattggtgacattgcttccgttgccgccgccttccacgccgccgaggaagctcccgtttacggcgagccgcgctacgcgggaaaaatcttcggcgtttttctgttaatcgaatggggcgacaaactctttatcatagatcaacacgccgcccacgaacgtattttatataaccgttttcttgaatcccccatcccccaacaggaactgttaatacccattgttttcaacaccgaaagcgcggaagacgccgcttttcttgcggcgaaaaaagacgaactggccgcgttagccattgtcattgaaagggacggagacggctggcggattgacgcgctgccggaaggctggcagctaagcgactccgataccgtgaaggaaattcttgccctgcgcggcgccagcgaaaatatcgccgaacgctgggccgctactctctgctgtcatcaggcaataaaagacggcgactacctcgacgacgcggccgcccttgctctggcgaaagacgctctaaaccttcccgacccgcactgtccccacggtcgccccatatggaccgaaatcacccgcgaagcgctgtacaaagccgtacgccggacttaa

SEQ ID NO: 9692 - protein, 214 aa, Unknown
  Obtained from environmental sample
  misc_feature (1)..(214): Xaa is any amino acid
MAAAPYAPDANMVHKIGDIASVAAAFHAAEEAPVYGEPRYAGKIFGVFLLIEWGDKLFIIDQHAAHERILYNRFLESPIPQQELLIPIVFNTESAEDAAFLAAKKDELAALAIVIERDGDGWRIDALPEGWQLSDSDTVKEILALRGASENIAERWAATLCCHQAIKDGDYLDDAAALALAKDALNLPDPHCPHGRPIWTEITREALYKAVRRT

SEQ ID NO: 9693 - DNA, 714 bp, Unknown
  Obtained from environmental sample
  misc_feature (1)..(714): n is a, c, g, or t
ttgaccttatcgtctgtgttgccagcgttgcttctcctcctttcaggccccnggtttatcgatcgcgccctggcgcaggcggaaatagcgggcattccggcggccatagtctgcaacaagtacgatctcgcagaccctgatcttgccgattctgatttggctgacattgacatagaggaaaggctttcggatttcgagcgcattggctatcccgtttttcgcctgtcggcaaaaaatggaatgggcctggaagagttcaggcagtttatatccggaaaattttctgttttggtcgggcagtcggggacgggaaaatcaagcctgataaacgccctgattcctgcgctggaagtaaagacgggcgaaattaacgaaaaattcagcagggggaagcataccacaacccagggcgtcttgctggagagcatggatggcggcggagaaacgaattcgattcgcgtcattgacaccccagggattcgccgcttcgcgattgccggtttacagcccaacgagctgattttttatatgcgggagttcgcgccccttgcggggaagtgcagtttcggcctttcctgttcccatcaaaccgaaatcggctgcaagattatggaagcggtatgcgccggtgtgattcacgaagaccgctacgaaagctttataagaattcaggatgaaatagcgggcaagaatagttatgctgatacggattaa

SEQ ID NO: 9694 - protein, 237 aa, Unknown
  Obtained from environmental sample
  SIGNAL (1)...(27)
  DOMAIN (93)...(205): GTPase of unknown function
  misc_feature (1)..(237): Xaa is any amino acid
MTLSSVLPALLLLLSGPXFIDRALAQAEIAGIPAAIVCNKYDLADPDLADSDLADIDIEERLSDFERIGYPVFRLSAKNGMGLEEFRQFISGKFSVLVGQSGTGKSSLINALIPALEVKTGEINEKFSRGKHTTTQGVLLESMDGGGETNSIRVIDTPGIRRFAIAGLQPNELIFYMREFAPLAGKCSFGLSCSHQTEIGCKIMEAVCAGVIHEDRYESFIRIQDEIAGKNSYADTD

SEQ ID NO: 9695 - DNA, 705 bp, Unknown
  Obtained from environmental sample
  misc_feature (1)..(705): n is a, c, g, or t
ttgctttataaaaaatatgatttttattcagcaaaaattacttttcaacattcaattcgtgacattttaatcggagtaatttcccgtcagtatgatgaaataagaaaactcaaattacaatttggaaaattattcgatcacccttattgggaagatgataacaaacattctgcaaatagcgtttattcatttaatggaaaggatgtatgcggtttttcattagccgaagcgtgcgagagagagaaaatagtaatttcttttaaccatgacgattttatatttgtacagctttttatatccaaagacgacaaaaaaattacacttgataatttatttgaacacggacattatacgcagatagcttatcagcgaaattttattacttttgaagaatattgccgtaaaatgtttttaaagtcaaagttaaacttttctaaaattgaagcaaaacacggattttctttagttagaaaagatgaagaaaatttattctacaaagggcttaaaaaattttcagaattatcatggacacaaataggcgatgataaggggttgtatttcaaagaatataaaggcggtttcaagaatacgagcgaaaaaatatacgaatttagattttcagagaaatatcgttgttttggatataaaaaagatgataatttttttgttctccggtttgaattggagcataaattgggtaattag

SEQ ID NO: 9696 - protein, 234 aa, Unknown
  Obtained from environmental sample
  misc_feature (1)..(234): Xaa is any amino acid
MLYKKYDFYSAKITFQHSIRDILIGVISRQYDEIRKLKLQFGKLFDHPYWEDDNKHSANSVYSFNGKDVCGFSLAEACEREKIVISFNHDDFIFVQLFISKDDKKITLDNLFEHGHYTQIAYQRNFITFEEYCRKMFLKSKLNFSKIEAKHGFSLVRKDEENLFYKGLKKFSELSWTQIGDDKGLYFKEYKGGFKNTSEKIYEFRFSEKYRCFGYKKDDNFFVLRFELEHKLGN

SEQ ID NO: 9697 - DNA, 951 bp, Unknown
  Obtained from environmental sample
  misc_feature (1)..(951): n is a, c, g, or t
ttgatggccgagtaccgtttcatgcgcacattagtgcaaaatatacgcaatgggttaatggcttcgagtaaattggcagcccagcttgtcaccgcggaagaactggatcaatataaaaccattgcagacatgaagctcccgtcgtatcaggaattgcgccgcaagctccgtgaattcgccagggaaatggatgttttgtatgtctattttgaacgccccagcggagacaaactgcaagctattattgacaataacgatgttggcgaagaagcgcgcgttggtctggatacaaagccttatgcgttccgccgcgacaacgcatggatattacaggcgctggaaaaagggcagacagtctgttccgaatatcagcaatacatggagaattgggaaggtcttatgaccgcctattcgccggtatttgataaagacggaaagatcaccgcgattgtcggtgtggacatggatgacacgcccattgtcagggcaaggtggattatttattttctgacaatagcgcaggtcgtcatagtaatcatagtatttgtttacagcttaattggccttttgatttccagaaaggaagcggaaaaagccaatgccgcgaacgtagcaaaaaatagttttctttcccaaatgagccatgaaatccgcacccccctgaatgccattatgggaatgggagaattggcattgtattcggataccatgcccaaaatacatgaatacctgaaagggattaagcaggccgggcagaatctgctgctgctgatagacgatattctggatttttccaaaattgaaacaggtaatctgcagattattcgggctccgtattatctggcatccctccttgatgatacaattaatattattcagatacgaataggagaaaagccggttttatttacgccgatattgatcccatctgcccgcccgcctgctgggtga

SEQ ID NO: 9698 - protein, 316 aa, Unknown
  Obtained from environmental sample
  SIGNAL (1)...(32)
  DOMAIN (205)...(270): His Kinase A (phosphoacceptor) domain
  misc_feature (1)..(316): Xaa is any amino acid
MMAEYRFMRTLVQNIRNGLMASSKLAAQLVTAEELDQYKTIADMKLPSYQELRRKLREFAREMDVLYVYFERPSGDKLQAIIDNNDVGEEARVGLDTKPYAFRRDNAWILQALEKGQTVCSEYQQYMENWEGLMTAYSPVFDKDGKITAIVGVDMDDTPIVRARWIIYFLTIAQVVIVIIVFVYSLIGLLISRKEAEKANAANVAKNSFLSQMSHEIRTPLNAIMGMGELALYSDTMPKIHEYLKGIKQAGQNLLLLIDDILDFSKIETGNLQIIRAPYYLASLLDDTINIIQIRIGEKPVLFTPILIPSARPPAG

SEQ ID NO: 9699 - DNA, 930 bp, Unknown
  Obtained from environmental sample
  misc_feature (1)..(930): n is a, c, g, or t
ttgatggccgagacaaacggaaaagctatctgcaatgcagaagttgtgggttttagagaaaccagaaccctaattatgccccttggaccccttgaaggaattagacccggaatgtctgttgtggcaaaaggagataccctaagcgcacctgttggggaagaacttttgggcagagttattgacggaatgggaaacccaatggatgggcttggcgaagttaaatacaaagaacgccgctccatttactctagcccaccaagcgcaatggaaagaacccgcataaaagaacctatgttcacaggaattcgtgccatagatggttttttgacaattggcagggggcaaagaatgggcatttttgcaggctctggtgttggcaaaagcgtcactatggggatgatagcgagaaactgccttgcaaagattaatgttattgcccttattggcgagcggggtagggaagtgagggaatttatagagaaagatttggggccagagggcttaaaacgctccgttgttgttgttgctaccagcgaccagccagctcttgttaggctaaaggcaagcctgcttgcaataagcatagcggaattttttagagacgcaggcgaagatgtattttttttaatggattcaagtacgcgtctagcaatggctcaaagggaaataggtcttgcagttggagaaccgccagcaacaaaaggctacacaccctctgtttttgcattcttgcccaagctctttgagcgggcaggcaatagcacccaaggcagcataaccgccctttacacggttttggtggacggagacgatttggacgacccccattgcagactgcgtgcgttccattttagacgggcacattgtgctttcccgtgctttggcgaaacaaaacccactaccccgccattgacgtgctggcaagcataa

SEQ ID NO: 9700 - protein, 309 aa, Unknown
  Obtained from environmental sample
  DOMAIN (100)...(301): ATP synthase alpha/beta family, nucleotide-binding domain
  misc_feature (1)..(309): Xaa is any amino acid
MMAETNGKAICNAEVVGFRETRTLIMPLGPLEGIRPGMSVVAKGDTLSAPVGEELLGRVIDGMGNPMDGLGEVKYKERRSIYSSPPSAMERTRIKEPMFTGIRAIDGFLTIGRGQRMGIFAGSGVGKSVTMGMIARNCLAKINVIALIGERGREVREFIEKDLGPEGLKRSVVVVATSDQPALVRLKASLLAISIAEFFRDAGEDVFFLMDSSTRLAMAQREIGLAVGEPPATKGYTPSVFAFLPKLFERAGNSTQGSITALYTVLVDGDDLDDPHCRLRAFHFRRAHCAFPCFGETKPTTPPLTCWQA

SEQ ID NO: 9701 - DNA, 342 bp, Unknown
  Obtained from environmental sample
  misc_feature (1)..(342): n is a, c, g, or t
atgcttattgcaagcaggcttgcctttagcctaacaagagctggctggtcgctggtagcaacaacaacaacggagcgttttaagccctctggccccaaatctttctctataaattccctcacttccctaccccgctcgccaataagggcaataacattaatctttgcaaggcagtttctcgctatcatccccatagtgacgcttttgccaacaccagagcctgcaaaaatgcccattctttgccccctgccaattgtcaaaaaaccatctatggcacgaattcctgtgaacataggttcttttatgcgggttctttccattgcgcttggtgggctagagtaa

SEQ ID NO: 9702 - protein, 113 aa, Unknown
  Obtained from environmental sample
  SIGNAL (1)...(22)
  misc_feature (1)..(113): Xaa is any amino acid
MLIASRLAFSLTRAGWSLVATTTTERFKPSGPKSFSINSLTSLPRSPIRAITLIFARQFLAIIPIVTLLPTPEPAKMPILCPLPIVKKPSMARIPVNIGSFMRVLSIALGGLE

SEQ ID NO: 9703 - DNA, 384 bp, Unknown
  Obtained from environmental sample
  misc_feature (1)..(384): n is a, c, g, or t
ttggtatccacagttttagacattgtacgcaacgaaatggacattgccatnttagatgtatccgtatctgcccacatgccagattgcctggaaatgccttaccgccccatggttttgaacagcggaatgatatggattaagccatacacttacaggctcgccggaaactcctgcctcgccggggacatagccggagattactcttttgacaaaccgctgaaagtaggttccagaatagtttttttagatatgattcattacacaatggtaaaaacaacatttttcaacggcgtgaaacacccatctatagggatttggaagaataataagtttaacttggtgagaaagttttcttatgaggcttttagggataagctgtcgtga

SEQ ID NO: 9704 - protein, 127 aa, Unknown
  Obtained from environmental sample
  DOMAIN (2)...(106): Pyridoxal-dependent decarboxylase, C-terminal sheet domain
  misc_feature (1)..(127): Xaa is any amino acid
MVSTVLDIVRNEMDIAXLDVSVSAHMPDCLEMPYRPMVLNSGMIWIKPYTYRLAGNSCLAGDIAGDYSFDKPLKVGSRIVFLDMIHYTMVKTTFFNGVKHPSIGIWKNNKFNLVRKFSYEAFRDKLS

SEQ ID NO: 9705 - DNA, 930 bp, Unknown
  Obtained from environmental sample
  misc_feature (1)..(930): n is a, c, g, or t
atgtatgtaaagccccattcgctgcgttttgttgatcgcggaccggagattgagacggaagcggccttttttaccttgcccggagagaattttcccgccctgctcaggcggctttcaatcaaaaatatttccgcaaataaactaaatttggagtgtattgacggcctgcctatgcttcacccatttggcacccgtaactggatgttaaaaaacctgtcccgtctggccgaaggctggtttgccggggttcatttttccgaaaaaggcgtgccgtactacaaattgccggtggaggccctggacaggccggaaattgtcccgctgaacggcgcgcatttttactgcggcctccttaacggcgcgccgccggcttactgcattgaccctgacacggtttttggcgaacagcgggattttgcgtttccagccgtgtttctggaaaatgattcgccgtttacgatagacgccaatttcagcggtaaaaataaaaccccgtcggcaatggggtattttaaattgagccttgagccgaatgaccaggctgtgtactattcgatggtcgggcattgcggcgattatacgaatgttgacggcgcggcggctttgctgtctcaggaaggtttttttgaaaccaaagaaaaagaaaacgagggattgataaacggcataacgtcctgtgtggcaaccgaatccgcttacgaacagtttgatatttattgcaggcaaaattttcttgacaacgcgctgcgcggcggcttccccataaatatcggaaccgcgacatactacgcctattcgcgggttcatggcgacatggagcgcgagtacaacaattttatcgttcttgatgaatatttttcgcaagggaacggaaactaccgtgacgtgaatcagaacaggcgcagtgatgttttttttaacgtagtatag

SEQ ID NO: 9706 - protein, 309 aa, Unknown
  Obtained from environmental sample
  misc_feature (1)..(309): Xaa is any amino acid
MYVKPHSLRFVDRGPEIETEAAFFTLPGENFPALLRRLSIKNISANKLNLECIDGLPMLHPFGTRNWMLKNLSRLAEGWFAGVHFSEKGVPYYKLPVEALDRPEIVPLNGAHFYCGLLNGAPPAYCIDPDTVFGEQRDFAFPAVFLENDSPFTIDANFSGKNKTPSAMGYFKLSLEPNDQAVYYSMVGHCGDYTNVDGAAALLSQEGFFETKEKENEGLINGITSCVATESAYEQFDIYCRQNFLDNALRGGFPINIGTATYYAYSRVHGDMEREYNNFIVLDEYFSQGNGNYRDVNQNRRSDVFFNVV

SEQ ID NO: 9707 - DNA, 834 bp, Unknown
  Obtained from environmental sample
  misc_feature (1)..(834): n is a, c, g, or t
atgcgggaagaaaaggccccgcctgtccgcgtgcaatcatttgtgcgtaaagaccttccactctttctggaaggaccggtacattatctcaggctctgtcccggcggttccgttgcaaaagatttccaccggaatatgctggaaagcccgttatacgataaaaaattgaagatgataaaaataaacgcgccgcttgccggcgcgccgccgcttgccggcgcgccgcaggatataggcaggatcacggtttttacttccggctggcttgaaaacgaatcggtctggctgcacatggagtataaataccttctggaactgcttaggaacggccttgcggcggaatttttcagtatagccaaaaccgcgctggttcccttttttgatcccgccgtatacgggcgcagtgtttttgaaaacgcctcatttattgccagctccgcccatcccgaggaggccatacacggacagggctttgtcgctcgcctttccggggcgaccgccgagtttatttcgatttggatcgccctcacgtcgggccttgcgccgtttttcctgtccgagggcgtactatgccttgccttgcgtcccatgctgcccgccgattttttcacgggcaatacgtttacgtttaattttttgggctcctgtactgtcgtctatcacaatgagccgcgcaaagatactttcggtcagaaaagcgcggcggtactgtcatatcgcataacgtataatgacggcattgttgaggaaatcgcgggttcgcttataaagggcgccgccgcccgcgcggtgcgcgacgggaaagcccggcgtattgatgttacgcttggatag

SEQ ID NO: 9708 - protein, 277 aa, Unknown
  Obtained from environmental sample
  misc_feature (1)..(277): Xaa is any amino acid
MREEKAPPVRVQSFVRKDLPLFLEGPVHYLRLCPGGSVAKDFHRNMLESPLYDKKLKMIKINAPLAGAPPLAGAPQDIGRITVFTSGWLENESVWLHMEYKYLLELLRNGLAAEFFSIAKTALVPFFDPAVYGRSVFENASFIASSAHPEEAIHGQGFVARLSGATAEFISIWIALTSGLAPFFLSEGVLCLALRPMLPADFFTGNTFTFNFLGSCTVVYHNEPRKDTFGQKSAAVLSYRITYNDGIVEEIAGSLIKGAAARAVRDGKARRIDVTLG

SEQ ID NO: 9709 - DNA, 819 bp, Unknown
  Obtained from environmental sample
  misc_feature (1)..(819): n is a, c, g, or t
atggactattttatgcctgaaacggacggcatagaagcggtaaaaattatacgcagtctngggtacgctcatcctatcatcgccctgaccgccaacgctctggcagggcaggcggagatgttcatggaaaacgggttcgatggttttatttttaaaccgatagatatacgccagttggatctttcgttgaacaaattgatacgggacaaacagccgcctgaggtgcttgaagcggcgcggcagcaagccctcaaggaagtacagcctgcctcagactcggaactggcggtaattttcgcgcgggatgccgaaaaagccattgagtgtctgaatgcgattcactcgaacgcataccgtagagccgatgatatccggatgtttgtaatcaatgtccatgcgatgaaaagcgcccttgcgaacattggtgaagccgagctttccgctgccgcctacaaattagaaaaggcaggacgagcagaagatataaaagtaatgagatcagaaaccccggtgtttctggaagcgttgcgtgaagtgattgaaagaaacaaaccgaaagaagacgatagtgaggcggtacaggaagattctgagggcatatggacgtatttgagcgggaaactactcgttattcaaaaagcgtgcgaggagtatgacggaatagccgctaatacggtattggccgaactgagacaaaaaaaatggctgcgttctaccaacgaactgctggacactatcggtgagcatttattgcacagtgattttgaggaagctgcgaaacttgcggatgattatgtgaaaaataagaatatgcgctaa

SEQ ID NO: 9710 - protein, 272 aa, Unknown
  Obtained from environmental sample
  misc_feature (1)..(272): Xaa is any amino acid
MDYFMPETDGIEAVKIIRSLGYAHPIIALTANALAGQAEMFMENGFDGFIFKPIDIRQLDLSLNKLIRDKQPPEVLEAARQQALKEVQPASDSELAVIFARDAEKAIECLNAIHSNAYRRADDIRMFVINVHAMKSALANIGEAELSAAAYKLEKAGRAEDIKVMRSETPVFLEALREVIERNKPKEDDSEAVQEDSEGIWTYLSGKLLVIQKACEEYDGIAANTVLAELRQKKWLRSTNELLDTIGEHLLHSDFEEAAKLADDYVKNKNMR

SEQ ID NO: 9711 - DNA, 402 bp, Unknown
  Obtained from environmental sample
  misc_feature (1)..(402): n is a, c, g, or t
gtggctcttgcctgtatcagagccggagcggacgctctttcgcttgtaaattcattcaaggcaatggcaattgacgtaattaacaaaaaacctgtttttgattttacaacatcgggactttcagggcctgcgataaagccaatagcgcttcgcatggtatgggagctttacgaaactcttaaagaatcaaatatgcaggttcctattatcggtataggcggcatatcatgcgcaaatgacgctcttgaattcctcatggcaggcgcttgtgcaattcaaatcggttcctccacgtttgtaaatccttatacaatgccggatattattaaaggaataattcaatatatgcaaaataacggcatttttgagcttggaaaaatatcaatcaggaatgaaaaatga

SEQ ID NO: 9712 - protein, 133 aa, Unknown
  Obtained from environmental sample
  SIGNAL (1)...(23)
  misc_feature (1)..(133): Xaa is any amino acid
MALACIRAGADALSLVNSFKAMAIDVINKKPVFDFTTSGLSGPAIKPIALRMVWELYETLKESNMQVPIIGIGGISCANDALEFLMAGACAIQIGSSTFVNPYTMPDIIKGIIQYMQNNGIFELGKISIRNEK

SEQ ID NO: 9713 - DNA, 861 bp, Unknown
  Obtained from environmental sample
  misc_feature (1)..(861): n is a, c, g, or t
atgtttgaagaacccctgcgcaacctgggctgcgcggtcattcccgccgggccctccgaagcgagcacccagctggaaatcatgcaaaaactgcgcggctccggctatgtgggcacgccgagctacctgctgcacctgacccagcgcgccgaagaaaagggcctcaacctgcgcaaggatctctttctggaagtggccttcgtcaccggcgagcgcctgtcggaaaaaatgcgcggccagctggagaaaaagtacgacctcatcatgcgccagggctacggcacggcggatgtgggctgcatcggctacgaatgcttccagaaaaacgggctgcacatcgccaaccgctgctatgtggaaatctgccacccggataccagcattccgctgaaggacggcgaagtgggcgaaatcgtggtgacggccttcaacaaaacctatccgctcatccgcctcgccacaggcgatttgtcctatattgaccgcgcgccctgctcctgcgggcgcaccagcccgcgcctgggcagcatcgtgggccgcgtggacaccaccgcgcgcatcaagggcatgttcgtctacccgcatcaggtggagcaggtcatgagccgctttgaggaaatcaagcgctggcagatcgaggtcaccaaccccggcggcattgacgaaatgacgctcttcgtcgagagcagcaacttcaaacgcgaggacgaactgctccaccagttccgcgaaaagatcaagctgcgccccaacctgaccattctcgcgcccggcacgctgccgccgcagatacgccccatgaggacaggcgggagtgggattaggctatgtgacaaaaaggcaancgggcncnggccataa

SEQ ID NO: 9714 - protein, 286 aa, Unknown
  Obtained from environmental sample
  misc_feature (1)..(286): Xaa is any amino acid
MFEEPLRNLGCAVIPAGPSEASTQLEIMQKLRGSGYVGTPSYLLHLTQRAEEKGLNLRKDLFLEVAFVTGERLSEKMRGQLEKKYDLIMRQGYGTADVGCIGYECFQKNGLHIANRCYVEICHPDTSIPLKDGEVGEIVVTAFNKTYPLIRLATGDLSYIDRAPCSCGRTSPRLGSIVGRVDTTARIKGMFVYPHQVEQVMSRFEEIKRWQIEVTNPGGIDEMTLFVESSNFKREDELLHQFREKIKLRPNLTILAPGTLPPQIRPMRTGGSGIRLCDKKAXGXXP

SEQ ID NO: 9715 - DNA, 516 bp, Unknown
  Obtained from environmental sample
  misc_feature (1)..(516): n is a, c, g, or t
atgcaggctaatttccgcggcgaccccgcagcaaaaagtttcgaagaggtgatactctcataccccggctttcaggcaattaccgttcaccggcttgcacattatttctggaaggcgcaggttccccttatcccccgcatgatgagcgagatggttcatggcactaccggcattgacatccaccccggtgcggaaataggcgaatcgttctttatcgatcacggaactggtgtagtaattggcgagacaacggttatcggcaacaatgtaaaactataccagggcgttacccttggcgctctttcagtgaaaaaagaagaaggcaaccgcaaacgccatcctactatcgaagacgacgttactatttattccaacgcgacaattctgggcggcgaaacggtaattggccacggcagcataatcggcggcaatgtgtggataaccgaatctgttccgcctaacacgacggtctacacaagcgctggggagcaggtaaaaaagcagcagatacgatag

SEQ ID NO: 9716 - protein, 171 aa, Unknown
  Obtained from environmental sample
  misc_feature (1)..(171): Xaa is any amino acid
MQANFRGDPAAKSFEEVILSYPGFQAITVHRLAHYFWKAQVPLIPRMMSEMVHGTTGIDIHPGAEIGESFFIDHGTGVVIGETTVIGNNVKLYQGVTLGALSVKKEEGNRKRHPTIEDDVTIYSNATILGGETVIGHGSIIGGNVWITESVPPNTTVYTSAGEQVKKQQIR

SEQ ID NO: 9717 - DNA, 459 bp, Unknown
  Obtained from environmental sample
  misc_feature (1)..(459): n is a, c, g, or t
atgaaagctatgaccatgtacaggcccaacacaatccaaaacgcgctgagcgatttcgaccgctacttcgaatcgttctttggggattccgtactgtcgccagcaacgagaatcctaaaccggctgcccgcggtagatgtccgggaaaccgaaaaatcttacatagttgacatggaacttccgggctatgacgagaaggacattgaaatccacattgacggggcaagcctttccattgcctcaaagcaggaggaaaactccaacaaggaaaaggaaacggacaacggcacatggctcctgcgggagcggcatgtcagttccttcagccgttccttcaaactgcccgagaacgccaacccggaagaggttaacgccgaattcaaaaacggcatcctcaaaatggagatcaacaaacgtgccgaggcgcagaaaagggcgataaggatcaacgttaaataa

SEQ ID NO: 9718 - protein, 152 aa, Unknown
  Obtained from environmental sample
  DOMAIN (46)...(152): Hsp20/alpha crystallin family
  misc_feature (1)..(152): Xaa is any amino acid
MKAMTMYRPNTIQNALSDFDRYFESFFGDSVLSPATRILNRLPAVDVRETEKSYIVDMELPGYDEKDIEIHIDGASLSIASKQEENSNKEKETDNGTWLLRERHVSSFSRSFKLPENANPEEVNAEFKNGILKMEINKRAEAQKRAIRINVK

SEQ ID NO: 9719 - DNA, 351 bp, Unknown
  Obtained from environmental sample
  misc_feature (1)..(351): n is a, c, g, or t
atgactttgaaacaagtttttatccaaaatttgaaggaatttcgcaaaaaagaagggttttcacagatgaaattggcggaatattgcaatacaacgaccagttacattggacacattgaaactgggctaaaattcccttctatggatatgatagaaaaaatggctgaaatactaagaatagaaccttaccttttttttataaaaagaggtggcaaaaacgacaattctgatactgaaaatatctttccactcctgccaaactctatgaaaaagcaaatttcaacacaaattaaaacacagttagaccgtttcacaaacgaaattctgagtgaaattctgagcnaatactaa

SEQ ID NO: 9720 - protein, 116 aa, Unknown
  Obtained from environmental sample
  DOMAIN (11)...(65): Helix-turn-helix
  misc_feature (1)..(116): Xaa is any amino acid
MTLKQVFIQNLKEFRKKEGFSQMKLAEYCNTTTSYIGHIETGLKFPSMDMIEKMAEILRIEPYLFFIKRGGKNDNSDTENIFPLLPNSMKKQISTQIKTQLDRFTNEILSEILSXY

SEQ ID NO: 9721 - DNA, 486 bp, Unknown
  Obtained from environmental sample
  misc_feature (1)..(486): n is a, c, g, or t
atgcgacaaaaaaccaagactaaaaattatttcatctactcactaaaaaaaatcaaaatcggtattgccgaagaaaacaacgccataacaggggtgtattttggcgctgaaataccgggcggctttgtcaaagccgaaaccccgctgattaaaaaagccgcggcgcagattgaagaataccttaacggaaaacgcaaaaaattctctctgccgcttgccatgcatggtactgaattccagatggatgtctggagggcgctgcaaagcatcccttatggcgagacccgttcctacaaggaaattgccgaacttgtacacaggccgaaagcggtacgcgcggtagggatggcaaaccaccggaaccccatttcgataattgtgccatgccaccgcgtaataggccataatgggagcctgaccggttacggcggggggctaccccttaaaaaatatcttttggagctggaacaggatagtgttctgtaa

SEQ ID NO: 9722 - protein, 161 aa, Unknown
  Obtained from environmental sample
  DOMAIN (76)...(161): 6-O-methylguanine DNA methyltransferase, DNA binding domain
  misc_feature (1)..(161): Xaa is any amino acid
MRQKTKTKNYFIYSLKKIKIGIAEENNAITGVYFGAEIPGGFVKAETPLIKKAAAQIEEYLNGKRKKFSLPLAMHGTEFQMDVWRALQSIPYGETRSYKEIAELVHRPKAVRAVGMANHRNPISIIVPCHRVIGHNGSLTGYGGGLPLKKYLLELEQDSVL

SEQ ID NO: 9723 - DNA, 954 bp, Unknown
  Obtained from environmental sample
  misc_feature (1)..(954): n is a, c, g, or t
ttgtccacgtccgcacgatacgccctgaaagagatagcatacaatcctgagaaactcgggacgctgccgcgggaactcctgagcccggaattctgcctcgcggccgttcaagtgtccggcggcctggcgctggaattcgtcccggaggagttgaaaacgccggaactctgcctcgccgccgtgcaaagtgagcactgggcgcttgaatacgtgcccgaggcgctcaaaaccccggaactttgccttgcggccgtgcggaacaacggaagcgagcttgaacatgtgccggaggcgctcataaccccggaactctgccttgccgccgtgcaaagtccagagcagccttcacactacaaggcgcttcgatttgtgccggaggcgctcaaaaccccggaactctgccttgccgccgtgcggacggacggcattatgctctactatgtgccggaggcgctcaaaacgcctgaaatgtgccttgccgccattcagagtgacgaagacggcggttgcgaggcgttccgctatgtgcccgatgcgcgcaagacgccggaaatctgccttgccgccgttcagaaaaacggctgggtgctgtgccatgtgcctgaggagcgcagaagcccggaactctgcctcgctgccgtgcggcgctatggcccggcgctggaatttgtcccggaggagttgaaaacgccggagctttgcctcgccgccgttcaaagagacgggtgggtgcttaagtatgtgcctgaggcgctcaaaacgccggaactctaccgtaccgccgtatacacaaacggatgggcgcttaaacttgtgccggaggcgctgaagaccccgggactctgccgtgccgccgtgcagaatgacggcagtgcgcttgaatatgtaccggaggcgctcagaacgccggaactgtgcctcgcggccgtcagcagatacgctcggccgatctga

SEQ ID NO: 9724 - protein, 317 aa, Unknown
  Obtained from environmental sample
  misc_feature (1)..(317): Xaa is any amino acid
MSTSARYALKEIAYNPEKLGTLPRELLSPEFCLAAVQVSGGLALEFVPEELKTPELCLAAVQSEHWALEYVPEALKTPELCLAAVRNNGSELEHVPEALITPELCLAAVQSPEQPSHYKALRFVPEALKTPELCLAAVRTDGIMLYYVPEALKTPEMCLAAIQSDEDGGCEAFRYVPDARKTPEICLAAVQKNGWVLCHVPEERRSPELCLAAVRRYGPALEFVPEELKTPELCLAAVQRDGWVLKYVPEALKTPELYRTAVYTNGWALKLVPEALKTPGLCRAAVQNDGSALEYVPEALRTPELCLAAVSRYARPI

SEQ ID NO: 9725 - DNA, 435 bp, Unknown
  Obtained from environmental sample
  misc_feature (1)..(435): n is a, c, g, or t
ttgctcccccgactttcgagcttcagcgtcagtatcgggccaggcgactgccttcgctgttggtgttcttccagatatctacgcattccaccgctacacctggaattccatcgccctatcccacactcaagacttgcagtattaaaggccggacatgggttaagcccatgtattaaacccctaacttacaaacccgcctacgctccctttacgcccagtaattccgaacaacgctcgctccctacgtattaccgcggctgctggcacgtagttagccggagcttcctcgaacggtaccgtcataacatgttcttcgcatgtcttttcttcccgtccaacagagctttacaacccgaaggccgtcatcactcacgcggcgttgctgcgtcaggctttcgcccattgcgcaaaattccctactgctgcctcccgtag

SEQ ID NO: 9726 - protein, 144 aa, Unknown
  Obtained from environmental sample
  misc_feature (1)..(144): Xaa is any amino acid
MLPRLSSFSVSIGPGDCLRCWCSSRYLRIPPLHLEFHRPIPHSRLAVLKAGHGLSPCIKPLTYKPAYAPFTPSNSEQRSLPTYYRGCWHVVSRSFLERYRHNMFFACLFFPSNRALQPEGRHHSRGVAASGFRPLRKIPYCCLP

SEQ ID NO: 9727 - DNA, 909 bp, Unknown
  Obtained from environmental sample
  misc_feature (1)..(909): n is a, c, g, or t
gtgatgaaggaatttttaccgattttggaaaagacggtacaaaccgttcgtccgttgttggtaattgccgaagatgtggaaagcgaagcgttggccacattggtggtgaaccgtttgcgcgccaatctgaaaattgcagccgtgaaatcgccgggctttggcgatcgccgtaaggaaatgctcgaagatattgccattttgacaggtggtacagttatttcggaagaaaaaggcctgaaattggaagatgccgatttaaccatgctcggtcaagccgaaaaaatcacggtagataaagaaaataccacgattatcaacggtaaaggtcaaaaagccaatatcgaagctcgcgtggggcaaatcaagtcgcaaattgaaaaaaccacctcggactacgaccgcgaaaaactgcaggaacgcttggcgaaactcgccggaggcgttgccgtaatttacgttggcgctgcttcggaagtggaaatgaaagaaaagaaagaccgtttcgacgatgctttgcacgccactcgcgcagccatcgaagaaggcattatcccgggtggcggtgtggcctacattcgtgccatcgaagcgctcggcaaaattaaaggcgaaaacgaagaggaaaccatcggcgtaaacatcatccgtcgcgcattggaagaacctcttcgtcagattgtagccaatgccggattggaaggctctgtggtcgtaaatcaagtgcgttcgggaaaagctgactatggcttcaacgcccgcaccgaagtttacgaagaactttacaaagccggcgttatcgacccgaccaaagtggctcgcgtggcgctcgaaaacgcagcttccatcgcaggcatgttgcttacaaccgaatgncgtttagcggacatcaaagaagctcggccaatctga

SEQ ID NO: 9728 - protein, 302 aa, Unknown
  Obtained from environmental sample
  DOMAIN (1)...(297): TCP-1/cpn60 chaperonin family
  misc_feature (1)..(302): Xaa is any amino acid
MMKEFLPILEKTVQTVRPLLVIAEDVESEALATLVVNRLRANLKIAAVKSPGFGDRRKEMLEDIAILTGGTVISEEKGLKLEDADLTMLGQAEKITVDKENTTIINGKGQKANIEARVGQIKSQIEKTTSDYDREKLQERLAKLAGGVAVIYVGAASEVEMKEKKDRFDDALHATRAAIEEGIIPGGGVAYIRAIEALGKIKGENEEETIGVNIIRRALEEPLRQIVANAGLEGSVVVNQVRSGKADYGFNARTEVYEELYKAGVIDPTKVARVALENAASIAGMLLTTEXRLADIKEARPI

SEQ ID NO: 9729 - DNA, 600 bp, Unknown
  Obtained from environmental sample
  misc_feature (1)..(600): n is a, c, g, or t
atgatagacattttgctaggcactcaaatggtcgccaaaggtttgaactttcccggagtgcgccttgtcggcgtcgtctttgcggacaccgggcttcacctgcccgacttccgcgcctcggagcgcaccttttcacttattgtgcaggttgccgggcgcgccgggcgttacttccccgacggcaaagttattgttcaaacattaagaatggaagaccctgtcatcacccgctcctgcgcccttgatgtcgaaggctttttcaaagcggaactttcccagcgcagagcgcttaacttccctcccttctcaagactgatccgttttacaatacgttcaaaagacgagaaaagagcggatgccgccataaaacggcttgcgtctttcgcaaagccgctccttcccgcgaactcggacatgttaggccctgcggaatgtcccatcggaattatgaatgataaccacagaaggcagttaatcctgcgcagttcttcaatgggcgcgcttcacgccgcggcgcgcgagattctggcgaagtatgaaaaaggcagggacgcgagggcatatcttgaagtggatattgatcctgtgagtatgttgtag

SEQ ID NO: 9730 - protein, 199 aa, Unknown
  Obtained from environmental sample
  misc_feature (1)..(199): Xaa is any amino acid
MIDILLGTQMVAKGLNFPGVRLVGVVFADTGLHLPDFRASERTFSLIVQVAGRAGRYFPDGKVIVQTLRMEDPVITRSCALDVEGFFKAELSQRRALNFPPFSRLIRFTIRSKDEKRADAAIKRLASFAKPLLPANSDMLGPAECPIGIMNDNHRRQLILRSSSMGALHAAAREILAKYEKGRDARAYLEVDIDPVSML

SEQ ID NO: 9731 - DNA, 744 bp, Unknown
  Obtained from environmental sample
  misc_feature (1)..(744): n is a, c, g, or t
atgaacgcgcgcgcctgtataaaggcgccnggttttttacaggacgcgctggacgacctgaacacggcgaaaagactggagccggataattactggatccgcgtggacagggccgcggccctgattgagctgaaccgtaagcccgaagcgcttgaagaacttgatcgcgcggtcgaactggatcccggcggttttctggcttatgtctaccgggccgggatcagagatgaagccggcgattacaagggcgcggagcaggattacgcggcaataatgaagctgaaaccggattattattttgccgccgaagggcttggcgtaatcaaaatgaggaataatcaatatattgaagccagagacgccttccttgcggcgtacaaacaggcgccaaaggaattccgctacgctatgttagccgcaattaactggatgaagggcgggcgggtgaacgatcccaaacagtttctcgcgcaggtgctgcgcaccgttccccgcgatactcccgactggcatattctcaggctgtaccacgatctttcgggcgacgacggggtggcggatataataaacagggagcaaaaccccgacgcaaagttaaaaatgctgttctatatcgcgcaatattacgacgccagggggaatacggcccttgccaacaaatattttatagaagtaaaggatataaaccggccttactccgttgaatggaaaataaacgaggccatccttaaagacggggtttaa

SEQ ID NO: 9732 - protein, 247 aa, Unknown
  Obtained from environmental sample
  misc_feature (1)..(247): Xaa is any amino acid
MNARACIKAPGFLQDALDDLNTAKRLEPDNYWIRVDRAAALIELNRKPEALEELDRAVELDPGGFLAYVYRAGIRDEAGDYKGAEQDYAAIMKLKPDYYFAAEGLGVIKMRNNQYIEARDAFLAAYKQAPKEFRYAMLAAINWMKGGRVNDPKQFLAQVLRTVPRDTPDWHILRLYHDLSGDDGVADIINREQNPDAKLKMLFYIAQYYDARGNTALANKYFIEVKDINRPYSVEWKINEAILKDGV

SEQ ID NO: 9733 - DNA, 429 bp, Unknown
  Obtained from environmental sample
  misc_feature (1)..(429): n is a, c, g, or t
gtgcattaccgagcgcagtcgattgagaggcttgattcaaggaccgtgagggtggtgctgatagagggcaagaaccgggaaatccgccgggttttttcccatttccatctgcaccctttccgtgtgcgccgtacaagaataggaccggtaaagctgggggaactggaagaaggaaaatcgagggcgctgagaaagtttgaactggaggcctttatagggagtagggagtggggagtagggagtaggggaaagagagcagacaacagagaacagagaaaagagaacaggaagaaaagagcagagactaaggattgccattcggactacaaagcggctcgtgtgccatgctctgattatgataccaaaaccccactccccaatccccattccccactccctaaaaagccccaaaggggccttacatggtaa

SEQ ID NO: 9734 - protein, 142 aa, Unknown
  Obtained from environmental sample
  misc_feature (1)..(142): Xaa is any amino acid
MHYRAQSIERLDSRTVRVVLIEGKNREIRRVFSHFHLHPFRVRRTRIGPVKLGELEEGKSRALRKFELEAFIGSREWGVGSRGKRADNREQRKENRKKRAETKDCHSDYKAARVPCSDYDTKTPLPNPHSPLPKKPQRGLTW

SEQ ID NO: 9735 - DNA, 474 bp, Unknown
  Obtained from environmental sample
  misc_feature (1)..(474): n is a, c, g, or t
ttgtgctcaagcatttcccaatttgtggaagtcgtaaaaatggacaatacccgctttcggctgattaaccgtctttcacccggtccttacgtatttattttggaaacgttatcgggcacggaaaaatttcttgacatccgccgtcacgaacttggcgtgcgcattcccaatcatcctgttccaataagattgatagaaacgcttaaatcgccgctctattcaatcacggcgaaaaaaagcatggcaggcggcaacgccccctatgcgcgtcatgaagaggaaactgatacggaacttccgcctatacccgaagaagaactttttgaaagcggctgggaacttgaagatattgaaggcttgaatcttattttggacgacggggaggaacgcgagcggattttttccactattcttgatttatgcgaggatgaggtgaaagttttgcggtatggggcgggcgaatggagcgattag

SEQ ID NO: 9736 - protein, 157 aa, Unknown
  Obtained from environmental sample
  DOMAIN (1)...(151): yrdC domain
  misc_feature (1)..(157): Xaa is any amino acid
MCSSISQFVEVVKMDNTRFRLINRLSPGPYVFILETLSGTEKFLDIRRHELGVRIPNHPVPIRLIETLKSPLYSITAKKSMAGGNAPYARHEEETDTELPPIPEEELFESGWELEDIEGLNLILDDGEERERIFSTILDLCEDEVKVLRYGAGEWSD

SEQ ID NO: 9737 - DNA, 348 bp, Unknown
  Obtained from environmental sample
  misc_feature (1)..(348): n is a, c, g, or t
atgaggctaaaaattttcgccctagtatgccttgttctcatttgcggctgttcacgcagtaaggactgggtacagttccggggagagggcgggcgaggcgtaagctcatcccgtattactccgccccttggtctgcgctggaagataaaactccaagacaacgatgagcgaatactttcccttaacccgcccgtggtaatgggggacactatttatttcggttccgacgacggcaacttttacgctctggacgttgaaagcggatatatgcgctgggttttcaaaagcaggggcggagatcaactcaattccctacgccgacaaagatcaggtttactttggcagtaa

SEQ ID NO: 9738 - protein, 115 aa, Unknown
  Obtained from environmental sample
  SIGNAL (1)...(20)
  DOMAIN (69)...(106): PQQ enzyme repeat
  misc_feature (1)..(115): Xaa is any amino acid
MRLKIFALVCLVLICGCSRSKDWVQFRGEGGRGVSSSRITPPLGLRWKIKLQDNDERILSLNPPVVMGDTIYFGSDDGNFYALDVESGYMRWVFKSRGGDQLNSLRRQRSGLLWQ

SEQ ID NO: 9739 - DNA, 675 bp, Unknown
  Obtained from environmental sample
  misc_feature (1)..(675): n is a, c, g, or t
atggatcaaaccgcctgcgcaacaggcggggcggtagcaattgactttgaggatcccgccaatccgcaggtaagggaaattggcttcgatccggcttccgctggtttcgccctttgcattgtcaatacaaaaggaagccatgccgatcttaccgccgactatgcagcgattcccagcgagatgaaggcggtcgcttctttctttgggaaacacgtgcttagggagctggacgaaaaaacattcttttcccgtttgccggatttacggaacgctgtcggcgaccgggcggttctaagggccatgcactttttcagcgaaaactgcagagtggacgcaatgcttgccgcgctacacggtaaagctatagacacatttctggcccttgtccgcgagtccggtgattcgtcctgggaattgctgcagaatatttacccgcataaaaaaatcaccgagcagggcatgggtcttgccttggctttaacgaaaaattttctcgctgtaggcgatggcgcttgccgggtacacggcggcggttttgccggtaccattcaggcgtatattcccatggaaaggctaactgattaccgcaacctgatggaaggtatttttggaatcggggctcttactgttttgaggattaggcccatgggcgcaattgagacggatttcaaatag

SEQ ID NO: 9740 - protein, 224 aa, Unknown
  Obtained from environmental sample
  misc_feature (1)..(224): Xaa is any amino acid
MDQTACATGGAVAIDFEDPANPQVREIGFDPASAGFALCIVNTKGSHADLTADYAAIPSEMKAVASFFGKHVLRELDEKTFFSRLPDLRNAVGDRAVLRAMHFFSENCRVDAMLAALHGKAIDTFLALVRESGDSSWELLQNIYPHKKITEQGMGLALALTKNFLAVGDGACRVHGGGFAGTIQAYIPMERLTDYRNLMEGIFGIGALTVLRIRPMGAIETDFK

SEQ ID NO: 9741 - DNA, 501 bp, Unknown
  Obtained from environmental sample
  misc_feature (1)..(501): n is a, c, g, or t
atgaaagagaccgaccggcaaatgaaagagaccgaccggaaggtaaaggaagtctgcgacagggtagacagcgtttgcggcaaggtcggtggcatagacgcaaatctcggccaccatgccgaacagttctttcaggatgtatttgaaagaaaaaaggaattcggcgggataaaatacgatgatgtgatcccaaacttcggacgcaacgacaaagtcggaaaaatggaggttgatattgcgctgattaatggagattcggtggcgttaatagaagtgaaaaacagaatacatcctgattttgtaacagagttcgcggaaaaacgcgttggaaaatttagggcgctgtaccctcaatacgacaactacaagatctacttgggtattgcggctttttcttttgacaaaaaagtattagagtctgccaaggaaaacggcataggcatagtgaaacaagccggtgaaagcgttgagattgaggcggaaaacttgagggcttattga

SEQ ID NO: 9742 - protein, 166 aa, Unknown
  Obtained from environmental sample
  misc_feature (1)..(166): Xaa is any amino acid
MKETDRQMKETDRKVKEVCDRVDSVCGKVGGIDANLGHHAEQFFQDVFERKKEFGGIKYDDVIPNFGRNDKVGKMEVDIALINGDSVALIEVKNRIHPDFVTEFAEKRVGKFRALYPQYDNYKIYLGIAAFSFDKKVLESAKENGIGIVKQAGESVEIEAENLRAY

SEQ ID NO: 9743 - DNA, 303 bp, Unknown
  Obtained from environmental sample
  misc_feature (1)..(303): n is a, c, g, or t
atgggtggatatatgcagccccagggccatgtccaggtgataaccaatatgctggattttgaccttaatccccagcaggccctggacgccccacgctggcagtggatagaaggccggaaaatacaagtggagccgggttttagttctgaaattgcgcgtgtccttgcaaaccgggggcacgaggtaagcgtttcccttcaaacgtcaagcttcggcagggggcagtgtattgtccggctggataacggcgttcttgtaggcgctaccgaagggcgcacggatgggagtattgcgtgcgtgtaa

SEQ ID NO: 9744 - protein, 100 aa, Unknown
  Obtained from environmental sample
  misc_feature (1)..(100): Xaa is any amino acid
MGGYMQPQGHVQVITNMLDFDLNPQQALDAPRWQWIEGRKIQVEPGFSSEIARVLANRGHEVSVSLQTSSFGRGQCIVRLDNGVLVGATEGRTDGSIACV

SEQ ID NO: 9745 - DNA, 366 bp, Unknown
  Obtained from environmental sample
  misc_feature (1)..(366): n is a, c, g, or t
atgctcggttttgtcaccgcggcttttatcgcgggtattggcggctgcctttacgcgatggttaacggctttgttaaaccggatgtggcgcagttcctcagatccattgatttccttatttatgtcgttctgggcggtatgggttccatgaccggctcgattctttcggcttatgtccttacctatttgcaggaattcttgcgtttcctgcaggactaccgccttttgatatatcctgtgatactgatacttgtcatgctgttccgcccccagggtcttttgggaatgaaagaattttccatagtgggctttgttgacaaaatttacggcaaattcctacggcgggcaaagagaggggcggcgtga

SEQ ID NO: 9746 - protein, 121 aa, Unknown
  Obtained from environmental sample
  SIGNAL (1)...(21)
  misc_feature (1)..(121): Xaa is any amino acid
MLGFVTAAFIAGIGGCLYAMVNGFVKPDVAQFLRSIDFLIYVVLGGMGSMTGSILSAYVLTYLQEFLRFLQDYRLLIYPVILILVMLFRPQGLLGMKEFSIVGFVDKIYGKFLRRAKRGAA

SEQ ID NO: 9747 - DNA, 792 bp, Unknown
  Obtained from environmental sample
  misc_feature (1)..(792): n is a, c, g, or t
gtgaaaagcacagcaatgaccaaagatgtactctatgaccgcatggaaaaacatataaagaccgtgtttgaacatttcaggggcgatgtcggctggtgggatgtctgcaacgaagtggtcggcgatgactgcaagccccgcaaagcgggcgacccggccgacggcgggtcatggtacacgcaggttatgcaaaattccggttatacgggagatacaaatattaacaggtatgagtttgtactcaaagctttccagtttgcgcgtcaatacgcggacttgaacggcggacaaaacgtaaagctgttcctgaccgattacaacactgaacatcagccaggctggggcaagctggccgaattcctcagattggtagactaccttatagaaaacgacgctcccattgacggcgttggtttccagacccatatagacatcaaattcgatcccagtaacatttcaagggccattgatctggtgtacgcaaaaacaaggaaagacgggaaacacctgatgtcccaggtaaccgagctggatatgggtgtttacaagagtgacagcgaagcggagctctcgggcgcaacgttggatgccaggctgacggagcaggctgcattataccgccaactgtttgacatattcaaacaaaagtataccgagggaaaactcgacatggtgctgctatggggcacagacgacggtcatagctgggttggcacctcgaatggcagaaaaaatcatccgctgctgtttaccgggagtatcagcctaaagcggcgttcctggaactggtga

SEQ ID NO: 9748 - protein, 263 aa, Unknown
  Obtained from environmental sample
  DOMAIN (1)...(257): Glycosyl hydrolase family 10
  misc_feature (1)..(263): Xaa is any amino acid
MKSTAMTKDVLYDRMEKHIKTVFEHFRGDVGWWDVCNEVVGDDCKPRKAGDPADGGSWYTQVMQNSGYTGDTNINRYEFVLKAFQFARQYADLNGGQNVKLFLTDYNTEHQPGWGKLAEFLRLVDYLIENDAPIDGVGFQTHIDIKFDPSNISRAIDLVYAKTRKDGKHLMSQVTELDMGVYKSDSEAELSGATLDARLTEQAALYRQLFDIFKQKYTEGKLDMVLLWGTDDGHSWVGTSNGRKNHPLLFTGSISLKRRSWNW

SEQ ID NO: 9749 - DNA, 492 bp, Unknown
  Obtained from environmental sample
  misc_feature (1)..(492): n is a, c, g, or t
atggacgattttagaaaaggtaaaataaaaatacttgccgcaaccagcgttgtagaagtaggtgtagacgtgccgaatgccgcntgcatggtaatagaacacgccgaacgtttcggattatctgcgcttcatcaattacggggacgtgttggcaggggagaggagcagtcatactgtttccttgtttattcagatgatcttacggaagaaggcaaaacccgcttaaaagtaatgctggaaaacagcgacggttttgtaattgcggaagaagatttgaaattaagaggtcccggacaaattgcgggaacggaacaatccggctaccttgttcttggaatagccgacccgattcgtgacatggaaacattggaaagagcgagaaacgatgtgttttcgatattagagaacgatcccgatctgttactggagaataatcgtgtgattgcgagagtactggaacaggctttacctttcggcgaggttgtgctttaa

SEQ ID NO: 9750 - protein, 163 aa, Unknown
  Obtained from environmental sample
  DOMAIN (1)...(54): Helicase conserved C-terminal domain
  misc_feature (1)..(163): Xaa is any amino acid
MDDFRKGKIKILAATSVVEVGVDVPNAACMVIEHAERFGLSALHQLRGRVGRGEEQSYCFLVYSDDLTEEGKTRLKVMLENSDGFVIAEEDLKLRGPGQIAGTEQSGYLVLGIADPIRDMETLERARNDVFSILENDPDLLLENNRVIARVLEQALPFGEVVL

SEQ ID NO: 9751 - DNA, 780 bp, Unknown
  Obtained from environmental sample
  misc_feature (1)..(780): n is a, c, g, or t
gtgaaacacaacaagatttttactttaattgccgctacggcaataatactgggtattttaaattcttacctcataatgaaaacgcctgtatataacgctgaaaaatccaattatgacatgaataccgtaaaaacggatttggaaaacatagctaaggaaagccacactgtggcggatcaagccgcactcgggaaagtcagggagtatttattatcacgcttttctgaaatgggtattggaacgtctgtaaaatcgtatactgtgaataattggtttggcgaatatgagatcaataatatttttgcgcaaattgacggcaaacccggaaacccttatgtcttgatcatggcccactatgattctgtaatggagaatttgttaatggaacctaccaaatcaaccggcgcggcggacgacgggtacggtgtggtgacactcctgcaaatagcacagcaatattcaagaaatgcaaggcggcctgtaaacggaataaagttcctcattactgattcggaagaaacaggtccgggagaaggttcaaaagccgaagtaatgaacaatctagatttttacggcgatgtatccctgattattaatattgaaggaagaggttttgacggcccggtttatatgtttcaaacttcaacaggaaacagggctgtaatggatttgtacagtaagtcaaaaaacaggacggctaattcatttttattggggcttttcgggttatgccccatttacggatttacagccgtttttggaaagggctttcgggtatga

SEQ ID NO: 9752 - protein, 259 aa, Unknown
  Obtained from environmental sample
  SIGNAL (1)...(26)
  DOMAIN (111)...(258): Peptidase family M28
  misc_feature (1)..(259): Xaa is any amino acid
MKHNKIFTLIAATAIILGILNSYLIMKTPVYNAEKSNYDMNTVKTDLENIAKESHTVADQAALGKVREYLLSRFSEMGIGTSVKSYTVNNWFGEYEINNIFAQIDGKPGNPYVLIMAHYDSVMENLLMEPTKSTGAADDGYGVVTLLQIAQQYSRNARRPVNGIKFLITDSEETGPGEGSKAEVMNNLDFYGDVSLIINIEGRGFDGPVYMFQTSTGNRAVMDLYSKSKNRTANSFLLGLFGLCPIYGFTAVFGKGFRV

SEQ ID NO: 9753 - DNA, 567 bp, Unknown
  Obtained from environmental sample
  misc_feature (1)..(567): n is a, c, g, or t
atgattatgggttattacaaagtaaatcaaatttatccctggctttttagcataaaagatccgcaaaatgtgttttgttatttggtagtgggaaatgagcgggctcttctttttgatacggtatacggtatcggcagcctgcctgaaaccgtcagggaaataacggacaagcctttaaccgtagtgttggggcacggtcatcttgatcaagccaacggagcctgccaatttgaagaagcctggctgcacgaagctgattttgaactgtgccgcgagcatacgtcggaagaagtacgcaaggcgactttgaagcagttaaatgaatggggcgttgtactgccggatgattttgatcctgacgtatatgtcaaaggcggcacaggtaatttgaagaaattgtctgagggcatggtctttgatcttggcggcctgcattcggaagtagttgggatgggagggcacacggcaggctcaataggacttctcgttaaagaacacaaagtgctgttggacagcgattcggcaaacacccagacatggatgtttaaattgaatccttgtctttaa

SEQ ID NO: 9754 - protein, 188 aa, Unknown
  Obtained from environmental sample
  misc_feature (1)..(188): Xaa is any amino acid
MIMGYYKVNQIYPWLFSIKDPQNVFCYLVVGNERALLFDTVYGIGSLPETVREITDKPLTVVLGHGHLDQANGACQFEEAWLHEADFELCREHTSEEVRKATLKQLNEWGVVLPDDFDPDVYVKGGTGNLKKLSEGMVFDLGGLHSEVVGMGGHTAGSIGLLVKEHKVLLDSDSANTQTWMFKLNPCL

SEQ ID NO: 9755 - DNA, 414 bp, Unknown
  Obtained from environmental sample
  misc_feature (1)..(414): n is a, c, g, or t
atgccgcttgacgctgaccttgaccatgctcctgaagatttcgcccgttatcggatagatagagcgaggttatgtctgcaagacgccaagacgccgggcgtttcgtttgagaacgccgctaaccgttcttactactgtatatttaacgctatgagagcagtcttgtcgcttgaccggtttgactccaaaagacattccggcgtaatctccgcctttcgtaagggctacataagaaccggagtttttcctgtagagttttcctcgattattgataaagccttcgacatacgtcttgaaagcgattacgaggctttttatcttgtaccaaaagccgacgtangccgctcaggtcgaaaacgccgaaaggttctggaagcggttgagaagtattcagcgagagaatctcggccataa

SEQ ID NO: 9756 - protein, 137 aa, Unknown
  Obtained from environmental sample
  DOMAIN (12)...(131): Protein of unknown function DUF103
  misc_feature (1)..(137): Xaa is any amino acid
MPLDADLDHAPEDFARYRIDRARLCLQDAKTPGVSFENAANRSYYCIFNAMRAVLSLDRFDSKRHSGVISAFRKGYIRTGVFPVEFSSIIDKAFDIRLESDYEAFYLVPKADVXRSGRKRRKVLEAVEKYSARESRP

SEQ ID NO: 9757 - DNA, 345 bp, Unknown
  Obtained from environmental sample
  misc_feature (1)..(345): n is a, c, g, or t
atgtgcgacaaagccgtattggatgagataacgtcaagggtctgcgccgccgccaaagaggtcttgggcgacaagttggagaaggtaatccttttcggctcatacgcgaggggcgactacgacgaggagtcggacatagacatcatgatagtcgccgacatatcgttggaggagaggtctgcggcgcgggataagatacgtgcccataccggagacctcggtttggaatatgacgttgttgtcggtttgtgcatggattgcagccacatttatcacaaatataaggatgcgtccggtttctacataaacgtccagaaagacggggtgacattgtatgccgcttga

SEQ ID NO: 9758 - protein, 114 aa, Unknown
  Obtained from environmental sample
  DOMAIN (7)...(111): Nucleotidyltransferase domain
  misc_feature (1)..(114): Xaa is any amino acid
MCDKAVLDEITSRVCAAAKEVLGDKLEKVILFGSYARGDYDEESDIDIMIVADISLEERSAARDKIRAHTGDLGLEYDVVVGLCMDCSHIYHKYKDASGFYINVQKDGVTLYAA

SEQ ID NO: 9759 - DNA, 489 bp, Unknown
  Obtained from environmental sample
  misc_feature (1)..(489): n is a, c, g, or t
atggccgagtttcggcataatgaagtgaacgtaatcgcccttcatcaccatgaacggtgggacggaaagggatatcccgatcatttgaccggaaacgccattgatatgggcgccagaatcgtatctgtagccgacgcttttgaagctatggtaagcaagaaatcctacagggaatcaatcgaaggttatcaggccgtaaaaaacatgcttgcggataatgcccgccgttttgatcccgcggtaatcatggcctttacgaaaataatgggcatataccccataggctcaataatacgcttaaatgacgaatccgtagcaagggttttatccgtaaacagcaatgccccgctgcgcccggtagtggaattattaatcagtaaaaccggaaaagttaccaaatccggagagggagaggttatcgatttgcttgccgaaaagtccctctttataaaaaaagcgatagatccggctgaattttccggtacatga

SEQ ID NO: 9760 - protein, 162 aa, Unknown
  Obtained from environmental sample
  misc_feature (1)..(162): Xaa is any amino acid
MAEFRHNEVNVIALHHHERWDGKGYPDHLTGNAIDMGARIVSVADAFEAMVSKKSYRESIEGYQAVKNMLADNARRFDPAVIMAFTKIMGIYPIGSIIRLNDESVARVLSVNSNAPLRPVVELLISKTGKVTKSGEGEVIDLLAEKSLFIKKAIDPAEFSGT

SEQ ID NO: 9761 - DNA, 360 bp, Unknown
  Obtained from environmental sample
  misc_feature (1)..(360): n is a, c, g, or t
atgatgaacagcgtcagtttcggtaaaaaaggggaagaacaggcagccgccgctctggaatccgcaggaatgaagataatagcgaaaaatatccgttcaataaacggcgaagttgatattgtcgcactggacggcgaaacagttgtttttgtggaagttaaagcatggtcagcctacggcatggaagaccttcaatacggaattaacatcaaaaaacaacagaaaatcattaaaaccgctaagtattttctgtctgaaaatcgaaaatatagtaatatggcgattcgctttgacgttgttttcattgataaaaactcagttacccatcttgcgtcagccttcacggagcgtgtattataa

SEQ ID NO: 9762 - protein, 119 aa, Unknown
  Obtained from environmental sample
  DOMAIN (10)...(103): Uncharacterised protein family UPF0102
  misc_feature (1)..(119): Xaa is any amino acid
MMNSVSFGKKGEEQAAAALESAGMKIIAKNIRSINGEVDIVALDGETVVFVEVKAWSAYGMEDLQYGINIKKQQKIIKTAKYFLSENRKYSNMAIRFDVVFIDKNSVTHLASAFTERVL

SEQ ID NO: 9763 - DNA, 498 bp, Unknown
  Obtained from environmental sample
  misc_feature (1)..(498): n is a, c, g, or t
atgattggcgttatcgcggcaatggaaaaagaattaagtattctttgcaatgcaatgggaaaattcgaaactaaaaaaatcggcgtctttgaattttttaccggaaaaatcgaaggcagggacgttacgcttttgtgctgcggaatcggcaaggtaaacgcggcggtaggctgcgctttgcttattcagcagtttaagccttcctgcgtcatcaatacaggttccgccggcggcatcgatccgtcgctgaaggtgggagacgccgtaatatccaccggccttatttatcacgatgtcgatgttaccgcgtttaactacgctcccggacagcttccccgccagccgcagatttttcccgttgatgaaaaacttattaaacttgcggaaaacgcggttgacgagctaaaaaaggaaaactctcttccctcttcttttaattattgccgcggcataatcgggtcgggcgatgtttttatgcataaaccggaacanncatag

SEQ ID NO: 9764 - protein, 165 aa, Unknown
  Obtained from environmental sample
  DOMAIN (1)...(163): Phosphorylase family
  misc_feature (1)..(165): Xaa is any amino acid
MIGVIAAMEKELSILCNAMGKFETKKIGVFEFFTGKIEGRDVTLLCCGIGKVNAAVGCALLIQQFKPSCVINTGSAGGIDPSLKVGDAVISTGLIYHDVDVTAFNYAPGQLPRQPQIFPVDEKLIKLAENAVDELKKENSLPSSFNYCRGIIGSGDVFMHKPEXX

SEQ ID NO: 9765 - DNA, 366 bp, Unknown
  Obtained from environmental sample
  misc_feature (1)..(366): n is a, c, g, or t
ttgccggagataaagttcggaacatctcgccatggtataaaaaagggagtgcgcaacgatgacattccgtcccgtttcggcggcgaggaatttacggtgctattgcctcacacggagcagtcgacggcatggaatgtcgcggaacgcctgcgggtcaatgtctcggaaatgaaagtcccgtgggaaactcctctgccgcaggttacaatcagcttaggggtttattccttcgatcaaaattccggcgtggatgtaaacactatcatacggcgcgctgacgacgcgttatatacgtcaaaacagcagggacgaaaccgctgtactttatggaatccgggaattacacacccgcatcaggagggttaa

SEQ ID NO: 9766 - protein, 121 aa, Unknown
  Obtained from environmental sample
  DOMAIN (2)...(106): GGDEF domain
  misc_feature (1)..(121): Xaa is any amino acid
MPEIKFGTSRHGIKKGVRNDDIPSRFGGEEFTVLLPHTEQSTAWNVAERLRVNVSEMKVPWETPLPQVTISLGVYSFDQNSGVDVNTIIRRADDALYTSKQQGRNRCTLWNPGITHPHQEG

SEQ ID NO: 9767 - DNA, 330 bp, Unknown
  Obtained from environmental sample
  misc_feature (1)..(330): n is a, c, g, or t
ttgtttttaaggggaattgacaaaaaatgtctgaagattatcggaaacgccccctatggttttgctgcgccgtcgtccggggcggacatggctgcaaaaaacagcggctggatgaatccaagtttagcggaaaacgaagcggaaaaagcctcaggctggcggaggggacaacggcttttccatgatgattacggttacggctcggttgtggatgtacgggacagcgaggatgggcctgtggtacgggttatatttgagacggggaaggaactgcgcttcctcagcgaacaccagagctcgtcaattgtgaagataggtgacgatcaatga

SEQ ID NO: 9768 - protein, 109 aa, Unknown
  Obtained from environmental sample
  misc_feature (1)..(109): Xaa is any amino acid
MFLRGIDKKCLKIIGNAPYGFAAPSSGADMAAKNSGWMNPSLAENEAEKASGWRRGQRLFHDDYGYGSVVDVRDSEDGPVVRVIFETGKELRFLSEHQSSSIVKIGDDQ

SEQ ID NO: 9769 - DNA, 546 bp, Unknown
  Obtained from environmental sample
  misc_feature (1)..(546): n is a, c, g, or t
atgcagttatactggggtgtttacacaagtataaggtctaaagtgnaagactcggaaagtatgatacatagaaccataaaggtagtttcagaaaccggcgtggcgggcatatcggataaaatagttctaattgccggtttgccgattgaaagcccaaacatgataaacaatgtccgcgttgtaattatcggtacggttttggctcgttcaaacgccggcggttactcaaaccccgatattactcgcgcgcagggcaaagtaatccacgccgtaaatccagacgaagcttgcagaaaaatagcgtcttccggcgtcggtgatatactggtttgcaaagaacttaccgaagaatatttatctgttataagcatggtaagcggaataatttgtgaaggcgtttcggtaatcagcgaggaaaaattacgcatcttcaatcccaatctggtatggcttactcacctaagggatgccgcccaaaaactggaaaacggattaacggtaaccatcgacggaaaagaattgttggtgtatgagggaacaatttaa

SEQ ID NO: 9770 - protein, 181 aa, Unknown
  Obtained from environmental sample
  misc_feature (1)..(181): Xaa is any amino acid
MQLYWGVYTSIRSKVXDSESMIHRTIKVVSETGVAGISDKIVLIAGLPIESPNMINNVRVVIIGTVLARSNAGGYSNPDITRAQGKVIHAVNPDEACRKIASSGVGDILVCKELTEEYLSVISMVSGIICEGVSVISEEKLRIFNPNLVWLTHLRDAAQKLENGLTVTIDGKELLVYEGTI

SEQ ID NO: 9771 - DNA, 933 bp, Unknown
  Obtained from environmental sample
  misc_feature (1)..(933): n is a, c, g, or t
atggccgaaatatatgtcaaaaaatcggctgggtctgccggcgtcatcggcgatatgggtatgactgtccgtcttcttacggacgcttccggcgttgatgataaatcttttaatgccgccgcttggagaggtattctcgatttttacggcgatacagagaaaaaacaaaaacaaaaaggaaaagcttacgattgggttactactcaggatcaaagtatgtatgttcccaatcttagaatggttaccgatgaaggctatgatttaattatagtaaatggttatacatgggacgaatctttaaccgtggtttccaatgataaccctactcaaaaatatcttattgtcgatgtcgattgggtagaagccggcaatgtaatgcaggcggtttttgcggaacatgaaggctcttatcttgtcggcgtcgctgcggcgttaaaagcgcttgaagacggcatcgctgcgccgcgctttggttttatcggcggagactattcttcgactattaccaaatttgaggttggttatgtgcagggtattctttcaattattcccgatgcggaaattgtagattattatgtaaacagttggaatgaacccggacttgcgaaaactcaggcgatgaactggtatgattcgggcgtttatgcgatcttctccgccgcaggaaacagcggtaatggaactatcgctcaagcgaaggaataccgccttgcgggcaagaatgtttgggcaataggagtagattccgatcaatatgaagacgggctttacaataaaaaagattctgcggttcttacatctatgattaaacgtgtggagaacagcgttatttatgcgcttaatgcggttaaaaataatactttcgctccaagcgttatagtttttgatttaaagccgacggcgttggatattccgacaagaattccgcattag

SEQ ID NO: 9772 - protein, 310 aa, Unknown
  Obtained from environmental sample
  DOMAIN (4)...(308): Basic membrane protein
  misc_feature (1)..(310): Xaa is any amino acid
MAEIYVKKSAGSAGVIGDMGMTVRLLTDASGVDDKSFNAAAWRGILDFYGDTEKKQKQKGKAYDWVTTQDQSMYVPNLRMVTDEGYDLIIVNGYTWDESLTVVSNDNPTQKYLIVDVDWVEAGNVMQAVFAEHEGSYLVGVAAALKALEDGIAAPRFGFIGGDYSSTITKFEVGYVQGILSIIPDAEIVDYYVNSWNEPGLAKTQAMNWYDSGVYAIFSAAGNSGNGTIAQAKEYRLAGKNVWAIGVDSDQYEDGLYNKKDSAVLTSMIKRVENSVIYALNAVKNNTFAPSVIVFDLKPTALDIPTRIPH

SEQ ID NO: 9773 - DNA, 492 bp, Unknown
  Obtained from environmental sample
  misc_feature (1)..(492): n is a, c, g, or t
ttggccttcgcgtccagggctttctgcctttcttgtgtcgcgcgggccctggcgtcctccgccgatttctggttttgcgtactcaggaatgccacatttttcttgatgaggtcatcatacgcgtccgccgccgcggtatataaaggtgtcgccgcttttatttctgcggcggtactccgcttggcattggccgccgtacggtttttcgtttcggcattattccagtcagtcggtaaatttacattggctttggcgtcctgggcgtctttacgggatttatccgcccgcgctatcgccgcctgcagcgccttgttggcgtcgtctttatccttggcggcctgttgctggctctttctgacgacatcgtcgtacgcgtccgccgcggatacaaacagcgctgtagcagcctttatttcatccaccgttgtcgccttcgcgttctttgcggacgtgttttttgtctcggcgtttctccagtcattgggcagatag

SEQ ID NO: 9774 - protein, 163 aa, Unknown
  Obtained from environmental sample
  SIGNAL (1)...(20)
  misc_feature (1)..(163): Xaa is any amino acid
MAFASRAFCLSCVARALASSADFWFCVLRNATFFLMRSSYASAAAVYKGVAAFISAAVLRLALAAVRFFVSALFQSVGKFTLALASWASLRDLSARAIAACSALLASSLSLAACCWLFLTTSSYASAADTNSAVAAFISSTVVAFAFFADVFFVSAFLQSLGR

SEQ ID NO: 9775 - DNA, 792 bp, Unknown
  Obtained from environmental sample
  misc_feature (1)..(792): n is a, c, g, or t
gtgcttgtgttccaccaggcgcttggctttttcaatgaccatgtcggccacctggacatggcgggtggccggttcgtcgaaggtggagcttatgacttcgcctttgaccgagcgctgcatatcggtcacttcctcgggccgctcatcgatgagaagcatgatgaggatggtgtccggatggttcttggtgatggaattggctatattctgcagcaatatggttttgccggtgcggggaggcgagactatgagcccgcgctgccctttgccgatgggggtcatcatgtccatgatgcgcatggaatagtttttgccgtcgttttccagttgaatgcgtttctggggatagaggggagtgaggttgtcaaagaggattttgtcgcggttggaatcctccgggtcctcgaaattgcactgttccaccttcaagagggcatagtagcgttcgctctccttgggggggcgtatctggccggtgaccgtatcgccggtgcgcaggttgaagcgccgcacctggctgggagagacgtatatgtcgtccggtccaggcagatagttggattccggggcccgaagaaaaccgaagccgtcgggcagggtttccagaacgcctccgccgaaaatcatgccgttgtgttcggtctgggcctggagcagggcgaaaatcaactcctgcttgcgaagattggtggccccttcaattttgaattccttggccaaggcggtcaaatcgccaatcttcatttttttcaaatcggacagatccattttttcagtcatgctgattcctga

SEQ ID NO: 9776 - protein, 263 aa, Unknown
  Obtained from environmental sample
  misc_feature (1)..(263): Xaa is any amino acid
MLVFHQALGFFNDHVGHLDMAGGRFVEGGAYDFAFDRALHIGHFLGPLIDEKHDEDGVRMVLGDGIGYILQQYGFAGAGRRDYEPALPFADGGHHVHDAHGIVFAVVFQLNAFLGIEGSEVVKEDFVAVGILRVLEIALFHLQEGIVAFALLGGAYLAGDRIAGAQVEAPHLAGRDVYVVRSRQIVGFRGPKKTEAVGQGFQNASAENHAVVFGLGLEQGENQLLLAKIGGPFNFEFLGQGGQIANLHFFQIGQIHFFSHADS

SEQ ID NO: 9777 - DNA, 768 bp, Unknown
  Obtained from environmental sample
  misc_feature (1)..(768): n is a, c, g, or t
ttgccgaggatagacggcgcaggagtgcgcttttcggttcaggcgtaccccgacaagaagtacgccggcacggtgagccagatcaggctgcagccggatgtcgtgcagaacgtcgttacctataccgtggtgatattagccgataataacgacgggacgttgttgccgggcatgaccgcgaacgtggagttcatagaggcgcgggagacaaacgccctgacggtccccgcgtcggtattccgcttccagccgcccaaagaggcgcaagacaagttgaagaagatgatggacgaacgcaaagcggcgagggagagcggcgtcgggatggacggagggatgatgccggatgctgacggcgttggcgggatgaagatggccgtgattaaaaacgaaggcggcgggatgatgggcggcggcgacggtcaattcaaagtggatagggaacgccgtaaggacggcggcggacgcggcgaaggccgccgcgagggcggtcagggcgggggagggaagagaccgccgtccggcgtcgcgggcagccgcggagttctgtggacgttggacgaaaacggcgcgttcaaaccggtgttcgtgaagatagggctgagcgacggcgtgaccacagtcgtcaccggaagagatgatttgaccgaggggatgaagatcgtcgttggcgaggtgaggagcgacaaggacaataagccgtcggataagaaaaaacagaacaacccgcttacgccgggcggcgggggcggtccaaggaggatgtaa

SEQ ID NO: 9778 - protein, 255 aa, Unknown
  Obtained from environmental sample
  misc_feature (1)..(255): Xaa is any amino acid
MPRIDGAGVRFSVQAYPDKKYAGTVSQIRLQPDVVQNVVTYTVVILADNNDGTLLPGMTANVEFIEARETNALTVPASVFRFQPPKEAQDKLKKMMDERKAARESGVGMDGGMMPDADGVGGMKMAVIKNEGGGMMGGGDGQFKVDRERRKDGGGRGEGRREGGQGGGGKRPPSGVAGSRGVLWTLDENGAFKPVFVKIGLSDGVTTVVTGRDDLTEGMKIVVGEVRSDKDNKPSDKKKQNNPLTPGGGGGPRRM

SEQ ID NO: 9779 - DNA, 741 bp, Unknown
  Obtained from environmental sample
  misc_feature (1)..(741): n is a, c, g, or t
gtggcaaaagaactttcccccaatcttgatcccgtcggccaatccatccgcgtgggcgcgatccctgtcaaggtggtcggcgtgttgcgtgagcgcgggcagggcccggcgggcgatgatcaggacgacatccttctgatgccggttaccacggtcatgcagagaatgaacggcacgacgcgcttcgtcgatcagataatgatcagcgccgagtcgatggatgcgataaacgacgttcaggcgcaagcggaggaggcgttgcgggcggcgcatagactcgcgccgtcggcagacaacgacttcaacatccgcaaccagtctgagatgatggaacgcgccaccgagaccgcccgcgtaatgaccatgcttctcggcgcgatagccggcatttctctcgtggtcggcggcatcggcatcatgaacatcatgctcgtatcggttacggaacgcacacgcgaaatcggaatcagaatggccgtgggggcgcgcgagggggatatcttaatgcagtttttgatagaggcgatagttttaagcgtgacgggcgggctaataggcgtggcgttgtcgatcgctcttatttgggtgatgaacaatttcgtaggcgtgacgacagtgttcgcgccgcagacgattctgatgtcgatgggtttctccggattcgtgggcgtcttcttcgggttctatccggcgagaaaagcggcgcggctcaatccgattcaggcgcttaggtttgagtaa

SEQ ID NO: 9780 - protein, 246 aa, Unknown
  Obtained from environmental sample
  DOMAIN (63)...(239): Predicted permease
  misc_feature (1)..(246): Xaa is any amino acid
MAKELSPNLDPVGQSIRVGAIPVKVVGVLRERGQGPAGDDQDDILLMPVTTVMQRMNGTTRFVDQIMISAESMDAINDVQAQAEEALRAAHRLAPSADNDFNIRNQSEMMERATETARVMTMLLGAIAGISLVVGGIGIMNIMLVSVTERTREIGIRMAVGAREGDILMQFLIEAIVLSVTGGLIGVALSIALIWVMNNFVGVTTVFAPQTILMSMGFSGFVGVFFGFYPARKAARLNPIQALRFE

SEQ ID NO: 9781 - DNA, 318 bp, Unknown
  Obtained from environmental sample
  misc_feature (1)..(318): n is a, c, g, or t
ttgaaagaaatcgttcccgggatttcccccatagccgcctacggacacacgcccggacatacgctttatcttgttgaaaacggcaaagacaagctgttaataatcggagaccttctgcacatagctttggtacagtttcccgttcccgagatcagcgcgacttacgacatggatcaaaaagccgcggccgccgcacgcaggcaggtattagcttacgccgcgaagaacaaaatccctgttgcgggaatgcacattgtgtatccgggaacaggcggagtgagcgttgacgggagcgggtttaagtttactccccgataa

SEQ ID NO: 9782 - protein, 105 aa, Unknown
  Obtained from environmental sample
  misc_feature (1)..(105): Xaa is any amino acid
MKEIVPGISPIAAYGHTPGHTLYLVENGKDKLLIIGDLLHIALVQFPVPEISATYDMDQKAAAAARRQVLAYAAKNKIPVAGMHIVYPGTGGVSVDGSGFKFTPR

SEQ ID NO: 9783 - DNA, 387 bp, Unknown
  Obtained from environmental sample
  misc_feature (1)..(387): n is a, c, g, or t
ttgaacgatctttattcaatatgcggctactggcagaaaatcggcatttccaaatatttccagggaatagaaggcccggcgatcatggacggcataatggaagagtaccgtaaaaatccgcccaagacattaggcggcatagagataaaaaaagtccgcgacataaagaacggcgcggacggcctcccgcccagcgacgttctccaattcttcctcgcggacggcacagtagtaagcgcccgccccagcggcaccgaaccaaaaattaaattttacgcctcatgctgcgccgaactgggttcaggaggccttgtggccgccaaagccgaagtccagcgcaaactggacgctattaagaaggacatccgcgctgttatcggggagtaa

SEQ ID NO: 9784 - protein, 128 aa, Unknown
  Obtained from environmental sample
  misc_feature (1)..(128): Xaa is any amino acid
MNDLYSICGYWQKIGISKYFQGIEGPAIMDGIMEEYRKNPPKTLGGIEIKKVRDIKNGADGLPPSDVLQFFLADGTVVSARPSGTEPKIKFYASCCAELGSGGLVAAKAEVQRKLDAIKKDIRAVIGE

SEQ ID NO: 9785 - DNA, 609 bp, Unknown
  Obtained from environmental sample
  misc_feature (1)..(609): n is a, c, g, or t
atggccgagaagaggtcaagaagccgtaagctaataattctggatgaggatataacctcgaaagactcgaagcattatcaccactgctttcggctgttcgatgaaaagactggctatcgcttcccggacctgtttgaaattaataccctggaactgccgaaactgcccggtgaacctgatgggaccatgttgttcaactggctatggatgttcacggccaaaagcaaggaggaattagatatggtagccaaaaccagcccggagatagccaaggctgtgggcgtaatcatggagttgagcgaagatgagcagacgcgccttttagccgaagcacgggagaaataccgccgggacgaggaagcccgctgggaagacgcctttgaggacggtaaagaggaagggcggcaggaaggtgagctgaaagggcggttggaaggacgacaggaagggcagttggaagggcggcgggaaggtgagcgcaataaggcgacagatattgccagaagcctcttgctggagaaaattccgtttgaaacagtagccaagacgacagggctttccttggaagaagtcaaaattctggcctctgaattgccgctcaatcattga

SEQ ID NO: 9786 - protein, 202 aa, Unknown
  Obtained from environmental sample
  misc_feature (1)..(202): Xaa is any amino acid
MAEKRSRSRKLIILDEDITSKDSKHYHHCFRLFDEKTGYRFPDLFEINTLELPKLPGEPDGTMLFNWLWMFTAKSKEELDMVAKTSPEIAKAVGVIMELSEDEQTRLLAEAREKYRRDEEARWEDAFEDGKEEGRQEGELKGRLEGRQEGQLEGRREGERNKATDIARSLLLEKIPFETVAKTTGLSLEEVKILASELPLNH

SEQ ID NO: 9787 - DNA, 489 bp, Unknown
  Obtained from environmental sample
  misc_feature (1)..(489): n is a, c, g, or t
ttgagcggcaattcagaggccagaattttgacttcttccaaggaaagccctgtcgtcttggctactgtttcaaacggaattttctccagcaagaggcttctggcaatatctgtcgccttattgcgctcaccttcccgccgcccttccaactgcccttcctgtcgtccttccaaccgccctttcagctcaccttcctgccgcccttcctctttaccgtcctcaaaggcgtcttcccagcgggcttcctcgtcccggcggtatttctcccgtgcttcggctaaaaggcgcgtctgctcatcttcgctcaactccatgattacgcccacagccttggctatctccgggctggttttggctaccatatctaattcctccttgcttttggccgtgaacatccatagccagttgaacaacatggtcccatcaggttcaccgggcagtttcggcagttccagggtattaatttcaaacaggtccgggaagcgatag

SEQ ID NO: 9788 - protein, 162 aa, Unknown
  Obtained from environmental sample
  misc_feature (1)..(162): Xaa is any amino acid
MSGNSEARILTSSKESPVVLATVSNGIFSSKRLLAISVALLRSPSRRPSNCPSCRPSNRPFSSPSCRPSSLPSSKASSQRASSSRRYFSRASAKRRVCSSSLNSMITPTALAISGLVLATISNSSLLLAVNIHSQLNNMVPSGSPGSFGSSRVLISNRSGKR

SEQ ID NO: 9789 - DNA, 453 bp, Unknown
  Obtained from environmental sample
  misc_feature (1)..(453): n is a, c, g, or t
atgtttgtagtcctgtccggtgctgttcttgggagtttctacggcggtattgcggttcttattcttattgcggcggggcttataggaattccggtatttgtaattccgggcggtatcggggtttttaatactcctctcggcggctatataatcggttattttgccgcaagcctgtgcgccggactcatctgcggtcttccgaaaataagcgaaaaaaaaatcagtcttgttccgtttataaaactttgtgttgcgtctgtttcggggtttacccttattctcgtatgcggctctctttatatgatgtttcttagatcaatgacattaaaggcggcgtttttagccggaacagcgcctttcattataggcgatttaattaaacttgcgatctgtattcctcttgcgttttcgcttcgtccgacagccgcaaggtatataaacagcgaagagtaa

SEQ ID NO: 9790 - protein, 150 aa, Unknown
  Obtained from environmental sample
  DOMAIN (1)...(142): BioY family
  misc_feature (1)..(150): Xaa is any amino acid
MFVVLSGAVLGSFYGGIAVLILIAAGLIGIPVFVIPGGIGVFNTPLGGYIIGYFAASLCAGLICGLPKISEKKISLVPFIKLCVASVSGFTLILVCGSLYMMFLRSMTLKAAFLAGTAPFIIGDLIKLAICIPLAFSLRPTAARYINSEE

SEQ ID NO: 9791 - DNA, 558 bp, Unknown
  Obtained from environmental sample
  misc_feature (1)..(558): n is a, c, g, or t
atgcaggttgcggttgtaaaaataatttcatccgtctgcggaaaacaggcgtaccttcgctggccgaacgacgtgtacattaacaggcggaaaattgcgggtatcacttcggaaatttcgggagaaggaaatttaatatcatggctttcggcaggtataggggtaaacgtaaacaatccggctcctttagccagaacaacaagctgcatggaagttacaggacgctgtctttcgcgcagggagattcttgtcagtattcttgatgaaattgaaaaaacaaagaaaaaattcgcttcccatgccgtttattcacaggggaaccgcgagcttgcggcggaatggaattctctcgcggattgcgtaggagcgaaagccgttatttttgaaaccgataatgaagataaaaaccttaaggaaaaaaccggaaaaacacttgcaaaaggaacatttgcaggcattgatcccgccggacgctgtatattaaaaaccgagaaaggcattctttattttaatcacggtcttgtatcgcttgcgttcttaaacgcggataaccgttaa

SEQ ID NO: 9792 - protein, 185 aa, Unknown
  Obtained from environmental sample
  misc_feature (1)..(185): Xaa is any amino acid
MQVAVVKIISSVCGKQAYLRWPNDVYINRRKIAGITSEISGEGNLISWLSAGIGVNVNNPAPLARTTSCMEVTGRCLSRREILVSILDEIEKTKKKFASHAVYSQGNRELAAEWNSLADCVGAKAVIFETDNEDKNLKEKTGKTLAKGTFAGIDPAGRCILKTEKGILYFNHGLVSLAFLNADNR

SEQ ID NO: 9793 - DNA, 513 bp, Unknown
  Obtained from environmental sample
  misc_feature (1)..(513): n is a, c, g, or t
ttgcacacatcttcacaaggagcaaacgcacttactaccaaggaaacaggagaggtcacgattttctttttgccctcgctttcccagctcgcactcatgctcatagaatctttgccaacgggaattgcaattcccagcttggggcaaaagtccatgccaaccgctttcacagcttcgtataaggctgcgccttcgccttttgttgcggggtttgccatccagtttgcggagaggcgtatttttgatatgtcgctgatttttgctgcggcaatgtttgttatggcttctgcaaccgccattctagcggctgctccagagttcaaaagcgcaagcggggtgcgctcgccaatggaaaaagcctcgccagttatggaatccaatgtacttgttgttacagcgcagtccgcaacgggaacctgccacttccccaccatttgctcccgcacaatcatacctgtaacggagcggtcgcctattgtgattagaaaacctttgtctgctactgctgggtga

SEQ ID NO: 9794 - protein, 170 aa, Unknown
  Obtained from environmental sample
  misc_feature (1)..(170): Xaa is any amino acid
MHTSSQGANALTTKETGEVTIFFLPSLSQLALMLIESLPTGIAIPSLGQKSMPTAFTASYKAAPSPFVAGFAIQFAERRIFDMSLIFAAAMFVMASATAILAAAPEFKSASGVRSPMEKASPVMESNVLVVTAQSATGTCHFPTICSRTIIPVTERSPIVIRKPLSATAG

SEQ ID NO: 9795 - DNA, 630 bp, Unknown
  Obtained from environmental sample
  misc_feature (1)..(630): n is a, c, g, or t
atgggcgcaggacgcacggaattgatgatgagcatatttggcaagtcctacggtcaccgcagcgaaggcgaattgctgattaaaggcaaaaagtgcaatttcaacagcccgcgcgccgcgattagctccgggcttggttatatttccgaagaccgtaaaaaccttggactggtgttgattcaggatataaaaacgaatataacccattccagtttggataaaatttccaaatatgggataattgataatcaacaggaaattaaggaagcggagcgttaccgtaacgatttgaacataaggacaccgtcgataagccagtatgtccgtaacctgtccggaggcaaccagcagaaagttgtagtaagcaagacgctgtttgcaaacccggacatattaattgtagacgaaccgacaaggggtattgacgttggagccaaaacggaaatttacggcattcttaacaacatgatcgccgccggaaagagcgttattatggtcagttccgagcttcccgaagccctgggaatggcggacagaatttacgttatgaacgaaggaataatcaaaggggtgctgaacaaagaagaagcaacccaggaaaaaataatgcacatggcgctggttggataa

SEQ ID NO: 9796 - protein, 209 aa, Unknown
  Obtained from environmental sample
  DOMAIN (2)...(186): ABC transporter
  misc_feature (1)..(209): Xaa is any amino acid
MGAGRTELMMSIFGKSYGHRSEGELLIKGKKCNFNSPRAAISSGLGYISEDRKNLGLVLIQDIKTNITHSSLDKISKYGIIDNQQEIKEAERYRNDLNIRTPSISQYVRNLSGGNQQKVVVSKTLFANPDILIVDEPTRGIDVGAKTEIYGILNNMIAAGKSVIMVSSELPEALGMADRIYVMNEGIIKGVLNKEEATQEKIMHMALVG

SEQ ID NO: 9797 - DNA, 306 bp, Unknown
  Obtained from environmental sample
  misc_feature (1)..(306): n is a, c, g, or t
atgagcatgggcgctactgccggagcggtgttgcgtgtattcatgttaaacggcatagtggtgggcttcttcggctcgacgataggcgtgacatttggcgcggccttgggcttgttgcaggagaagtggcgtttcatccccataccgggcgaactgtattttgtcaacacgcttcctatggaagtgagtttgcttgacgtgggggtcatatatatcgcggcgaatttgatatgctgggcggcgacgatctatccggccagggcggcggcgtcgctgttgccggcggagtctataaggtatgaataa

SEQ ID NO: 9798 - protein, 101 aa, Unknown
  Obtained from environmental sample
  misc_feature (1)..(101): Xaa is any amino acid
MSMGATAGAVLRVFMLNGIVVGFFGSTIGVTFGAALGLLQEKWRFIPIPGELYFVNTLPMEVSLLDVGVIYIAANLICWAATIYPARAAASLLPAESIRYE

SEQ ID NO: 9799 - DNA, 534 bp, Unknown
  Obtained from environmental sample
  misc_feature (1)..(534): n is a, c, g, or t
atggaactgatggttgaagcaaaaaacgtccgcaagcagtttaaagacgacgccgggacatttgatgtcctaaaggacgccactttttccgtggaggccggggagatggtcgcgcttgtcggcgcttccggggcgggaaagaccacgctcttgcagatactcggcgggcttgacaaatgcgacgacgggacggtcgcggtcggcggcaagaatctggacaagctcaccgataacgagctggcgcagtatcggaaccgtcacattggcttcgtcttccagttccaccacctcttgccggatttcacggcgatagagaacgtgctgatacccggattgatttccgggaagagcaggcaggagtgtatgccgcgcgcttccgaccttctcaacattttcggcttgtcaaaacgcttccaccactacccgacggaattgtccggcggcgagcgtcagagggtggctttggccagggcgatgttcaacgagccggcgctggttttagccgacgagccgaccggaaattggacagggtga

SEQ ID NO: 9800 - protein, 177 aa, Unknown
  Obtained from environmental sample
  DOMAIN (34)...(177): ABC transporter
  misc_feature (1)..(177): Xaa is any amino acid
MELMVEAKNVRKQFKDDAGTFDVLKDATFSVEAGEMVALVGASGAGKTTLLQILGGLDKCDDGTVAVGGKNLDKLTDNELAQYRNRHIGFVFQFHHLLPDFTAIENVLIPGLISGKSRQECMPRASDLLNIFGLSKRFHHYPTELSGGERQRVALARAMFNEPALVLADEPTGNWTG

SEQ ID NO: 9801 - DNA, 729 bp, Unknown
  Obtained from environmental sample
  misc_feature (1)..(729): n is a, c, g, or t
ttggggcactgcgccgataacgatacctttgaacaaatcgcctgcgacgcgctcagtataaaccaaacaatactaaagacacacccggggatccctctgttcctgatgggtcattcctggggttcttttatcgcgcagcattatatcgaaaaccatgactgcaaggatctcgcgggatgcatactctccgggacaaggggaccaggcggattaattatcagcgcggggattcccttaatgatcttcctggccgctgtccgcggttccagacgcgggtcgtcaatatcgcgcgcgctggccgacgggccttataaccggcctttccgtcccaaccgcacgtcttttgactggatttcacgtgatgaagccgaagtagatgcctatgtcaatgatcctctatgcgggtttctctgctcatcgggtttctaccgcgatctggcaaagggcctgggtcggattcaccgtaaaaaagctatggcccggatccgccgggatctgcctgtttatatcttttgcggcggcgatgatcccgtcgggaatatgggagccagcccggcggcgctggtcaacgcataccgctcactgggattacagaaccttgaatttgtacagtaccccgaggccaggcatgagacgttaaacgaaaccaaccgtgaagaagtaatgggcaatctgtcctcgtggataagcaggataatagacaggaagcaggaattcggtcatccctaa

SEQ ID NO: 9802 - protein, 242 aa, Unknown
  Obtained from environmental sample
  misc_feature (1)..(242): Xaa is any amino acid
MGHCADNDTFEQIACDALSINQTILKTHPGIPLFLMGHSWGSFIAQHYIENHDCKDLAGCILSGTRGPGGLIISAGIPLMIFLAAVRGSRRGSSISRALADGPYNRPFRPNRTSFDWISRDEAEVDAYVNDPLCGFLCSSGFYRDLAKGLGRIHRKKAMARIRRDLPVYIFCGGDDPVGNMGASPAALVNAYRSLGLQNLEFVQYPEARHETLNETNREEVMGNLSSWISRIIDRKQEFGHP

SEQ ID NO: 9803 - DNA, 510 bp, Unknown
  Obtained from environmental sample
  misc_feature (1)..(510): n is a, c, g, or t
atgagcaggatggatcaccggaaccccaacgcggtcggagcgatactgatccacagcgagatgtcatgcgaaattatcgcggataatttccatatacaccccgatctgctccaactcctgttacgcgacaaacccatagagaaaatcgtcctgataacggacgggcttaaaccgaccgaacagagggaaggcccgttctttgccaacggggaggaagttgtttttaatgacggggctttccaccgggtctcggacggcgttatcgccggatcggggctgacgatgatccgggggatccaaaaccttgtcctggccggtttcagcctggttgacgcggttaaaaccgcgacgattaaccccgcccagattatgcgttatacgcaacaaggcgcgttaattcccggtaagctggcggatataacagttttcgacagggattttaacatacgccttgtaatgataaacggaaatattatcggggggaaaaacaatgcggatagttattcataa

SEQ ID NO: 9804 - protein, 169 aa, Unknown
  Obtained from environmental sample
  misc_feature (1)..(169): Xaa is any amino acid
MSRMDHRNPNAVGAILIHSEMSCEIIADNFHIHPDLLQLLLRDKPIEKIVLITDGLKPTEQREGPFFANGEEVVFNDGAFHRVSDGVIAGSGLTMIRGIQNLVLAGFSLVDAVKTATINPAQIMRYTQQGALIPGKLADITVFDRDFNIRLVMINGNIIGGKNNADSYS

SEQ ID NO: 9805 - DNA, 495 bp, Unknown
  Obtained from environmental sample
  misc_feature (1)..(495): n is a, c, g, or t
atgcaccaccaacatgaaccggtaaaatttcaatgggttaccccaggcaatattgtcaccgccgtcatcctcggcgtgggtggtctgctcaccctcatccgcttcacgcagggcatcggttccatcaccaacctggacgacaactttccctggggcatgtggatatcctttgacctgctgtgcggcgtgtgcctcgccgcgggcggctatttcacctcttcggcctgttatctgttcgggatgaaacgcttccactcggccgtgcggcccgccattctcacggccttcctcggctacttctttgtggtcgtggcgctgttgtatgacctcggccattggtaccgtctgccctatcccatcttctggtcgccgggcaccacctcggtactctatgaagtgggtctgtgcgtggcctgctatgtgaccgtgctgttcgtggaattttctccggcggccccatggaatggctcaacgacaaccccatcctcgcgataa

SEQ ID NO: 9806 - protein, 164 aa, Unknown
  Obtained from environmental sample
  misc_feature (1)..(164): Xaa is any amino acid
MHHQHEPVKFQWVTPGNIVTAVILGVGGLLTLIRFTQGIGSITNLDDNFPWGMWISFDLLCGVCLAAGGYFTSSACYLFGMKRFHSAVRPAILTAFLGYFFVVVALLYDLGHWYRLPYPIFWSPGTTSVLYEVGLCVACYVTVLFVEFSPAAPWNGSTTTPSSR

SEQ ID NO: 9807 - DNA, 411 bp, Unknown
  Obtained from environmental sample
  misc_feature (1)..(411): n is a, c, g, or t
atggacgccctgaccttcggcaagcgcgccgatctgctcaaactggccaaaaaacgcatcgatgcgcgtccggatatatataaggatcacgtttacggcgagtttgaagccggaggcaccaactggctttacatttccggcgcgcctttctcccaggtcggacttgacgaaagcgtcatcaaccgtccgtatgcggaacttaccgccggcgcgcttggcgcggtgccgatggtcatcggcgtctggccggtgctgctcggcggcgcgtatatgatttccaagcgccgcgaagccgtggccagggaagaaatccatgaggccgaagcgaaagcccgtgccgaagccggagaagccgcgctcgcgcggggcggcgcggaaggcgccaagaaaagcgaaggggaggatgcctag

SEQ ID NO: 9808 - protein, 136 aa, Unknown
  Obtained from environmental sample
  misc_feature (1)..(136): Xaa is any amino acid
MDALTFGKRADLLKLAKKRIDARPDIYKDHVYGEFEAGGTNWLYISGAPFSQVGLDESVINRPYAELTAGALGAVPMVIGVWPVLLGGAYMISKRREAVAREEIHEAEAKARAEAGEAALARGGAEGAKKSEGEDA

SEQ ID NO: 9809 - DNA, 705 bp, Unknown
  Obtained from environmental sample
  misc_feature (1)..(705): n is a, c, g, or t
atgatagccattgtggcggtcattgtgatgggtattgccataatacaattaaatcaggcgtccagtataagcctgaatttgagcaagcggggggtcaaatatctggccggccagcgcgccctgtactggaacggccgtataggcggttttttagaggtattaaagaccttgtcccaggtaatgggcaattttgaagatctggccgcggggtatcggcgggatcagtatgaagaaatgatgaggtctgtttttaatgagcagcccgatatagtgcggatgtttaccgtctggaagccaaacgccattgacggcatggacagctattacataggccgggtaggttcaaccgacacggggcagttcgcgtttgcgctgggaaaagaaaccggcaggacggtgcctcagaccagccaggtcgttcaggcggtaatggagcatattaccggccccaacgcgcgcaaacaatcggtgtccgatccatcccccatgatgctggcgggaacaaatacctatgtggtcaggctgttggtccccattatcaattcggccaccggtgaggtagtcgggggcgtaggttgtcagttaagtatcaatttgatacagcccagaatagaggctactataagagactatgaagaaattgccatgttgtctgtgtactccacaacgggtttattatggcaagctaccagccggaccggatag

SEQ ID NO: 9810 - protein, 234 aa, Unknown
  Obtained from environmental sample
  SIGNAL (1)...(20)
  misc_feature (1)..(234): Xaa is any amino acid
MIAIVAVIVMGIAIIQLNQASSISLNLSKRGVKYLAGQRALYWNGRIGGFLEVLKTLSQVMGNFEDLAAGYRRDQYEEMMRSVFNEQPDIVRMFTVWKPNAIDGMDSYYIGRVGSTDTGQFAFALGKETGRTVPQTSQVVQAVMEHITGPNARKQSVSDPSPMMLAGTNTYVVRLLVPIINSATGEVVGGVGCQLSINLIQPRIEATIRDYEEIAMLSVYSTTGLLWQATSRTG

SEQ ID NO: 9811 - DNA, 513 bp, Unknown
  Obtained from environmental sample
  misc_feature (1)..(513): n is a, c, g, or t
atgaaaaactgcccctgcggctcgggccgcccgtattcggactgctgcgaacaatatatcagcggcaaggcccttgccccgaccgccgaagccctcatgcgaagccgctattccgcctacgttgagcatgaaattgattatatcattaacacctgcgtccacaagggcaaagacgatatagactacaagtccacaaaggactggagcgaacaatcaaactggctggggctgaagattatctcggcggaaaaaggcgggatcggcgacaccgaggggacagtggaattcgaggcttcttatgagcgcgacggattaaaggacgtccaccacgaaaaagcgaaattcaaaaaagacaccgccgccacaggcggcgccacaggcgctcaatggctttacgacgagggccatatcacccccctcactgttgtccgcgcgggccccaaaaccggccgcaacgacccctgcccctgcggctcgggtaaaaagtacaagcattgctgtcttaataattag

SEQ ID NO: 9812 - protein, 170 aa, Unknown
  Obtained from environmental sample
  DOMAIN (2)...(20): SEC-C motif
  misc_feature (1)..(170): Xaa is any amino acid
MKNCPCGSGRPYSDCCEQYISGKALAPTAEALMRSRYSAYVEHEIDYIINTCVHKGKDDIDYKSTKDWSEQSNWLGLKIISAEKGGIGDTEGTVEFEASYERDGLKDVHHEKAKFKKDTAATGGATGAQWLYDEGHITPLTVVRAGPKTGRNDPCPCGSGKKYKHCCLNN

SEQ ID NO: 9813 - DNA, 315 bp, Unknown
  Obtained from environmental sample
  misc_feature (1)..(315): n is a, c, g, or t
gtgaaggtgcacggggaaaccggctatttcctggacccgcacagcgcggtcggctggaagggcgcggacaaactgctcgcggaaaacagcgcaaacagcaagctgttgtccgaagcggcagtagggattctttccacggcgcatcccgcgaagttcagtgaaaccgtcgagccgctgattggctccgcgccgatccctgagtccctggcccgcgcgatggggcggagcgtccggtcgcaaaccatccccgcggaagtttccgcgcttattgaggttctgaaaaaggaaaactcgccctccagggaggacggatga

SEQ ID NO: 9814 - protein, 104 aa, Unknown
  Obtained from environmental sample
  misc_feature (1)..(104): Xaa is any amino acid
MKVHGETGYFLDPHSAVGWKGADKLLAENSANSKLLSEAAVGILSTAHPAKFSETVEPLIGSAPIPESLARAMGRSVRSQTIPAEVSALIEVLKKENSPSREDG

SEQ ID NO: 9815 - DNA, 699 bp, Unknown
  Obtained from environmental sample
  misc_feature (1)..(699): n is a, c, g, or t
ttggacgatacctccggcagcggcaatatagccaacgcgaacaacgtttccacgaccataacagtgaacgggaacgtaacggtaagggccaatttcacgcagaaccagacccagtatacgctgaccgtcaaccgcaacccgacggcgggcgggacggtgaaggtgggtaacaacgactactcgtcgcctataacggtaaatagcgggacgtcgactgccatatcggctgccgcggcgagcgggtacacgtttacgaattggacggtgaccagcggttcggcgcagataaataacgcgaatagcgcgagcacgacggtttcgctcagcgggaacgccactataaccgccaatttcacgcaaaatcccgtaacgcccgcaacgtacacgctgaccgtaagccgccttccgagcaacagcgccggtacggtcaaggtaaacaacgcggattactcgtcgccggttaccgtgaacagcgggacggcggtcaatatagttgctacgccggcggccgattacaggttcaccaactggacggtggcgaccggtaccgcctccatagccaacgcgagcagcgcgacgacgacggtcaccctgagttcgcacgccacggttaccgccaacttcacatcgacctcatcagggtctacgggcggcggcaggaaggatactataaaggtagaagcgggagaactacactag

SEQ ID NO: 9816 - protein, 232 aa, Unknown
  Obtained from environmental sample
  misc_feature (1)..(232): Xaa is any amino acid
MDDTSGSGNIANANNVSTTITVNGNVTVRANFTQNQTQYTLTVNRNPTAGGTVKVGNNDYSSPITVNSGTSTAISAAAASGYTFTNWTVTSGSAQINNANSASTTVSLSGNATITANFTQNPVTPATYTLTVSRLPSNSAGTVKVNNADYSSPVTVNSGTAVNIVATPAADYRFTNWTVATGTASIANASSATTTVTLSSHATVTANFTSTSSGSTGGGRKDTIKVEAGELH

SEQ ID NO: 9817 - DNA, 441 bp, Unknown
  Obtained from environmental sample
  misc_feature (1)..(441): n is a, c, g, or t
gtgcgaatttcgctgatatttcccatacatcccgacctgctccagctcctgttacgcgacaagcccatagagaagatcatcctgataacggacggtcttaaacctaccgaacagcaggaaggccctttttttgccaacggggaggaagttgttttccatgacggcgcttttcaccgtgtttcggacgacattatcgcgggatcagggcttaccatgatcagggggattcaaaaccttgtcgcggaaggtttcagcctggtggacgcggtaaaaaccgcgacgattaacccggcgcaggttatgcgctatacccggcagggcgcgttaatacccggaaagctggccgatattacggtgttcgataaaaattttaacatacgccttgttattataggcggaaaaataatgaaaggagaaaacgatgcggatagtaattcataa

SEQ ID NO: 9818 - protein, 146 aa, Unknown
  Obtained from environmental sample
  misc_feature (1)..(146): Xaa is any amino acid
MRISLIFPIHPDLLQLLLRDKPIEKIILITDGLKPTEQQEGPFFANGEEVVFHDGAFHRVSDDIIAGSGLTMIRGIQNLVAEGFSLVDAVKTATINPAQVMRYTRQGALIPGKLADITVFDKNFNIRLVIIGGKIMKGENDADSNS

SEQ ID NO: 9819 - DNA, 660 bp, Unknown
  Obtained from environmental sample
  misc_feature (1)..(660): n is a, c, g, or t
atggaaacaacggaaaataaaaaatttcaaaaagaagttttacgttatttgggctatcacggaacggacgccgatgaacaaatcacttcgcaaatagcgcaagtgtccgaagagacggcggcggttttgaacgcaaaaaatgttttcggcatttgggattgtcagatagaaacggatacggtttctttgggcgagataaaaataaaaagtcaaaatcttgcccgccatttgaacggctgcaaccgtgtcattttgctggcggcgactcttggatcggaagcggatacgctcatacgcaaatacagcgcaatggatatggaaaaagcgttaatcgcccaagcggtatgcgccgttatgattgaagattactgcgatgccgtagtttgtgaagcggctcaaagtcccatcctgaaaagcttgtatcctaccagccgattcagtccggggtacggcgattttgatatcagttggcagaaagatatgctaaaattattgaactgtgaaaaacaaattgcgcttacgcttacagacggatatatgctgataccctcgaagtcggttacggcaattgtcggcttcgggaaagaaagagcggaacttgataaagaaaaatgcgcccgctgtacaaatacacaatgcgcatacaggaaagaaaattaa

SEQ ID NO: 9820 - protein, 219 aa, Unknown
  Obtained from environmental sample
  DOMAIN (85)...(202): Vitamin B12 dependent methionine synthase, activation domain
  misc_feature (1)..(219): Xaa is any amino acid
METTENKKFQKEVLRYLGYHGTDADEQITSQIAQVSEETAAVLNAKNVFGIWDCQIETDTVSLGEIKIKSQNLARHLNGCNRVILLAATLGSEADTLIRKYSAMDMEKALIAQAVCAVMIEDYCDAVVCEAAQSPILKSLYPTSRFSPGYGDFDISWQKDMLKLLNCEKQIALTLTDGYMLIPSKSVTAIVGFGKERAELDKEKCARCTNTQCAYRKEN

SEQ ID NO: 9821 - DNA, 438 bp, Unknown
  Obtained from environmental sample
  misc_feature (1)..(438): n is a, c, g, or t
gtggggttacaaagaacctgcgcgcttgctcccttaggcggtcttggcgaagatacggcgggttacaaaggttacggatacgctacagtcgtggaaatactcagcgccgccttacagcaggggcagtttttaaaagcgttgaacggtcttgacgcaaacggtaaaaaagttccgtatcatttgggtcatttttttatcgctatggatataaacgcttttattgagccggtgcaattcaaaaaaaccaccggcgatcttctccgcgaacttcgcgcgtccgccaaagcgccgggccattcgcgtatatataccgccggtgaaaaagaatacctcgcgtggctggatcgcaaagacaccggagtgccgctgaacgacagcctgataaaaacgcttaattcgcttattgaagagtataagctgcatgaatataaattctag

SEQ ID NO: 9822 - protein, 145 aa, Unknown
  Obtained from environmental sample
  misc_feature (1)..(145): Xaa is any amino acid
MGLQRTCALAPLGGLGEDTAGYKGYGYATVVEILSAALQQGQFLKALNGLDANGKKVPYHLGHFFIAMDINAFIEPVQFKKTTGDLLRELRASAKAPGHSRIYTAGEKEYLAWLDRKDTGVPLNDSLIKTLNSLIEEYKLHEYKF

SEQ ID NO: 9823 - DNA, 354 bp, Unknown
  Obtained from environmental sample
  misc_feature (1)..(354): n is a, c, g, or t
atgcaggtaatccttgccctgaattacggcggcagggatgaagtggcgcgggcggtaaaacggcttgccgcccaaagacttgccgaaggccgggatatggcggatgtcaccgaaaaggacattgccgcctgcctggacaatcccgatgtgcccgatcccgatttgatcatccgcagcgcgggcgaataccggctcagcaattttttgctgtgggaaggggcttacgctgaactgtatgtttcggcgaaattctggcccgactggaccggcgatgatcttgccggagcgctggatgcgtaccgcaatcgcgaccgccgctttggcggcattgcggctaacggagatgtaccatga

SEQ ID NO: 9824 - protein, 117 aa, Unknown
  Obtained from environmental sample
  DOMAIN (1)...(109): Putative undecaprenyl diphosphate synthase
  misc_feature (1)..(117): Xaa is any amino acid
MQVILALNYGGRDEVARAVKRLAAQRLAEGRDMADVTEKDIAACLDNPDVPDPDLIIRSAGEYRLSNFLLWEGAYAELYVSAKFWPDWTGDDLAGALDAYRNRDRRFGGIAANGDVP

SEQ ID NO: 9825 - DNA, 930 bp, Unknown
  Obtained from environmental sample
  misc_feature (1)..(930): n is a, c, g, or t
atggcgagacggagattgaatgatgcctttccgataggcaattcagacaatacctggaacgtaatgattgcggcaacggaaacgtacatcatgagagaagtccgcgagatgggcaggtttacaattatccttgccgcaatagctctgatagctgcggtggtattcatttatttttccctgagtacaattacaaagccaattgtcagggtagccgaaactctcaaggacatatcagaaggcgaaggcgacctgacacgaaccattgccgtccattccaaagacgaggtaggcgaccttgctttgtacttcaatgaaacgcttggaaaaatcaagggactggttcttctcattaaaaagcaggccggcgtgttatcagaaatcggcgctgacctgtccagcaacatgaccgaaacggcggcggcggtaaacgaaatcaccgccaatatacagggcattaaaagccgcgttattaaccagagcgccagcgtaactgaaaccaacgcgactatggagcaggttatcgccaatatcaataaactcaacggccttgtagaaaatcaggctgacaccatatcaaaacgatccgccttcattcaggcaatggtaaataatatcaattcagtaaatcagactttgctcaagaatctggaaaatgtacaaacgctcaaagaagcctctgaagtgggccgcgtcggtcttcaggatgtggcgcatgatattcaggaaatatcccgcgattccgaaggtttgctggagattaactcggtcatggaaaatattgccagccagaccaacctcctttcgatgaacgctgcgatagaagcggcgcacgccggagaagcaggcaaaggcttcgccgtagtcgccgatgaaatccgcaaactggctgaaagtccggcgagcagtctaaaacaattggcacggtactga

SEQ ID NO: 9826 - protein, 309 aa, Unknown
  Obtained from environmental sample
  DOMAIN (41)...(112): HAMP domain
  misc_feature (1)..(309): Xaa is any amino acid
MARRRLNDAFPIGNSDNTWNVMIAATETYIMREVREMGRFTIILAAIALIAAVVFIYFSLSTITKPIVRVAETLKDISEGEGDLTRTIAVHSKDEVGDLALYFNETLGKIKGLVLLIKKQAGVLSEIGADLSSNMTETAAAVNEITANIQGIKSRVINQSASVTETNATMEQVIANINKLNGLVENQADTISKRSAFIQAMVNNINSVNQTLLKNLENVQTLKEASEVGRVGLQDVAHDIQEISRDSEGLLEINSVMENIASQTNLLSMNAAIEAAHAGEAGKGFAVVADEIRKLAESPASSLKQLARY

SEQ ID NO: 9827 - DNA, 909 bp, Unknown
  Obtained from environmental sample
  misc_feature (1)..(909): n is a, c, g, or t
atggccgggggagacaaaagcatgagcgaaaaagtattaatgagcgggaacgaggcgattgccgaagccgccatccgcgccggctgcggggcgtattttggctaccccatcaccccgcagaacgaattgatcggctacatggcccatcacatgctggaaaggggcaggatatttatccaggcggaaagcgaggtcgcggcgattaacatggtttacggggcttcctgcgcgggagcgagggccatgaccagctcttcaagccccggcgtcagcttaaaacaggaaggaatttcctacggcgcgggcgccgatgtcccgatggttatagcgaatatcgtgcggggcggcccgggccttggcaatatcgcccccgcccagagcgactatattcaagccaccaggggagggggccacggtgactaccggtgcatagcgctggcccccaaaaacgtgcaggaatgcgccgaccttaccagccttgcctttgacctctcggacaagtaccgtatgccggcgattatccttgccgacggcatgctcgggcagatgatggaaggcgtcgtgttccagccggagaaatccccgcgagagattccctcccgcgactggactgccgggaaaatgactgaaagggtgccgacaaacggccgcagaacagcccgacacatcacttccattaatttgaaccctacggaactggaagccattaccaaggcccgctttgcccgctacgaaaccgtaaaagccaacgaaacccgttatgaggatattgactgcgaggacgccgatctggtactcgtcgcctacggcacttcagcgcgcgtctgcctgggagcgcgtatgctcgccgaaaaggaaggcataaaacttggcattttcagacccatcaccgtctgggctttcccctaa

SEQ ID NO: 9828 - protein, 302 aa, Unknown
  Obtained from environmental sample
  DOMAIN (22)...(242): Pyruvate flavodoxin/ferredoxin oxidoreductase, thiamine diP-binding domain
  misc_feature (1)..(302): Xaa is any amino acid
MAGGDKSMSEKVLMSGNEAIAEAAIRAGCGAYFGYPITPQNELIGYMAHHMLERGRIFIQAESEVAAINMVYGASCAGARAMTSSSSPGVSLKQEGISYGAGADVPMVIANIVRGGPGLGNIAPAQSDYIQATRGGGHGDYRCIALAPKNVQECADLTSLAFDLSDKYRMPAIILADGMLGQMMEGVVFQPEKSPREIPSRDWTAGKMTERVPTNGRRTARHITSINLNPTELEAITKARFARYETVKANETRYEDIDCEDADLVLVAYGTSARVCLGARMLAEKEGIKLGIFRPITVWAFP

SEQ ID NO: 9829 - DNA, 639 bp, Unknown
  Obtained from environmental sample
  misc_feature (1)..(639): n is a, c, g, or t
gtgttaaacgaaaacgtgattgtcntgacggatgtttgtccatacagtctcagcaccgaagctttaattgatacagggccaaatgaaaaagaaacattctgtgatattctaataaaacgcaacacaactcttcccgccaccgcctctaaaatatacacgacttcatgtgattatcaaacaaaagtacatgttaccgcgtatcagggtgaaagcctcgatcctgatgaaaactatttattaaactgttttgaactcagcggcataccaaaagccaaagcatacaaagaaaagataaatatccgctttgaatacgatttaaacggtattttgacggtacaggcggaaataatctctacgggtaaaaaggcggcagtaacggtgaacacgtcgcaaatgggtaagaatcttgatctttcaaaatggaaagacgttcccgaagcccgaaaatgccggcagataataaataaaacagaaaggtttataaagctttatggcaaagaaaaatccggcaaacttgaagccgccctcaatgaattgaaaaaagcgcttattatgaattgggacgatccggttatcgaaaaattaatagccgaccttgaagatgaaattgactacatggaaaaggatattaagaagtga

SEQ ID NO: 9830 - protein, 212 aa, Unknown
  Obtained from environmental sample
  misc_feature (1)..(212): Xaa is any amino acid
MLNENVIVXTDVCPYSLSTEALIDTGPNEKETFCDILIKRNTTLPATASKIYTTSCDYQTKVHVTAYQGESLDPDENYLLNCFELSGIPKAKAYKEKINIRFEYDLNGILTVQAEIISTGKKAAVTVNTSQMGKNLDLSKWKDVPEARKCRQIINKTERFIKLYGKEKSGKLEAALNELKKALIMNWDDPVIEKLIADLEDEIDYMEKDIKK

SEQ ID NO: 9831 - DNA, 759 bp, Unknown
  Obtained from environmental sample
  misc_feature (1)..(759): n is a, c, g, or t
ttgctgctcagcgcatggcgtaaccggcttcttcttgaatatgaaaagggaaaatattttccgacctggaactaccatgattcccgcgcctacctttccctttccgctgatgaaaagagaagtctggaagaactgctggaaaaacgccgggtaaaatcggaaaagatatgggaaacccacggaaagaaacttctttcgatactggttgaatcgtcggccatgctgccctgcgcggaagacctgggcgcggttccaccctgtgttcccaaagtgctgaccaaacttaaaattctcggcctgcgggtggtgcgctggcaccgccgctgggatcagaataaacagccttatattccgtttgaagaatatccggaactttcggtttgtaccgccgcggtgcatgacagctctactctccgcgaatggtgggaacgcgaggccgatcagaatcagtttgccggctttattggcttcccttccctgcccaggatgtacaatccgggaacggcaaaaaccattcttgccaaaaccgcgtccgcccgttcccgtttccgcgttttccagattcaggatttgctgcacctttcccccaaatggtacgcgcaagaccccgcttccgagcgagtcaatgtgccgggaaccaacaacgagtttaactggacatatcgtcttcccgcttccatcggcgaaatcgccaaggacaaggatatggtcaaggctgtcgcggaaataagcaaggtaaaagccgcaaaaaaggtataa

SEQ ID NO: 9832 - protein, 252 aa, Unknown
  Obtained from environmental sample
  DOMAIN (1)...(244): 4-alpha-glucanotransferase
  misc_feature (1)..(252): Xaa is any amino acid
MLLSAWRNRLLLEYEKGKYFPTWNYHDSRAYLSLSADEKRSLEELLEKRRVKSEKIWETHGKKLLSILVESSAMLPCAEDLGAVPPCVPKVLTKLKILGLRVVRWHRRWDQNKQPYIPFEEYPELSVCTAAVHDSSTLREWWEREADQNQFAGFIGFPSLPRMYNPGTAKTILAKTASARSRFRVFQIQDLLHLSPKWYAQDPASERVNVPGTNNEFNWTYRLPASIGEIAKDKDMVKAVAEISKVKAAKKV

SEQ ID NO: 9833 - DNA, 579 bp, Unknown
  Obtained from environmental sample
  misc_feature (1)..(579): n is a, c, g, or t
atggcggctgttgcttttgctcagaaacacgaccccgatgtcgaaaccgattggaacgatttttataaagatgaattatattctccgggcgaccaaaatttttacatttcattgggagtaggtttcccgacactgtttataaatcaaggtaaaaaagttgaaaatcacaatatcgaaccgccgataggaggaaccggaactcttagctatgtttattatttaacttcccgtttgtttacgggcggcgagcttagccttttgtttctgccgacagtagcggaaaacacgatattcattacttcactcggaggaagagttggaactcactttatttggaatcgatttgaattccctatttttgcctctctcggtatgacattacaaacatatcttgactattcgtattttggttattacatgaaagcgggaggctgcgttcttttcagagcgaccaatgattggtcattcggggtaatgtcaaatttttgctggtttccccaatgggtaaaaaaggatcctaaacaaaatgtcgatggattttttgttgatttatctcttgtagcaaggtatcatttttaa

SEQ ID NO: 9834 - protein, 192 aa, Unknown
  Obtained from environmental sample
  misc_feature (1)..(192): Xaa is any amino acid
MAAVAFAQKHDPDVETDWNDFYKDELYSPGDQNFYISLGVGFPTLFINQGKKVENHNIEPPIGGTGTLSYVYYLTSRLFTGGELSLLFLPTVAENTIFITSLGGRVGTHFIWNRFEFPIFASLGMTLQTYLDYSYFGYYMKAGGCVLFRATNDWSFGVMSNFCWFPQWVKKDPKQNVDGFFVDLSLVARYHF

SEQ ID NO: 9835 - DNA, 921 bp, Unknown
  Obtained from environmental sample
  misc_feature (1)..(921): n is a, c, g, or t
ttgcttcgtctaagggatatggatgaaaatttaaattttaaaaggatgctgcaaatagctgcggacagcgatttgcctgttttgctgacaggtgaatccggctccgggaaagaagttgcggcaagagagctacatgcccttagcaatagggggaacagggcgtttgtcgcggttaattgcggcgctatttccgcaggaattgccgaatccctcttttgcgggcacgttcggggggcttttacgggggcaaatagggaacaggcgggttttgtgagggcggcaaatggcggaaccctgtttttggacgaggttgcggaactttcaccggagattcagaaggcccttttgcgcaccctgcaagagaaaaccgtcacgcccgttggcagccaaagagaggtcaaggtggatttcaggctgatttgcgctacccacagggatttgcgcattttgattgaaaaggggctttttaggcaggatttgtatttcaggcttgccgctttgcctgttcaaattccgcctttgagggagcgaagtgatttgagaagcatagctcagtccctttggcgggggcaagagcctttggacgagcaccatttcaggattttgcagagctatttgtggcccggaaacataaggcagcttaaaaatgttttggagcgttacgcccttttaaaaaaacacggctatgagctggaatccgttataaaagcggagtttgagcaatgcaaattcagtttgcgcgaacctccgccgccaaaatacaggccaaatatccgcgaaatcggcgaagaaatacggaattgcagcgggaacaagagccacgccgcanagaaattaggcataagcaggggaaagttgtattataggatgcgtacggggggagtgaaactccntccccaaaaactttggcgccttttataa

SEQ ID NO: 9836 - protein, 306 aa, Unknown
  Obtained from environmental sample
  DOMAIN (25)...(167): ATPase family associated with various cellular activities (AAA)
  misc_feature (1)..(306): Xaa is any amino acid
MLRLRDMDENLNFKRMLQIAADSDLPVLLTGESGSGKEVAARELHALSNRGNRAFVAVNCGAISAGIAESLFCGHVRGAFTGANREQAGFVRAANGGTLFLDEVAELSPEIQKALLRTLQEKTVTPVGSQREVKVDFRLICATHRDLRILIEKGLFRQDLYFRLAALPVQIPPLRERSDLRSIAQSLWRGQEPLDEHHFRILQSYLWPGNIRQLKNVLERYALLKKHGYELESVIKAEFEQCKFSLREPPPPKYRPNIREIGEEIRNCSGNKSHAAXKLGISRGKLYYRMRTGGVKLXPQKLWRLL

SEQ ID NO: 9837 - DNA, 450 bp, Unknown
  Obtained from environmental sample
  misc_feature (1)..(450): n is a, c, g, or t
atggcacatgacaaggctttaaaagctatgaaacagtacagatttgcttatgcagggagaaaagacactttaaaagcgagtatatatgtaaaggatttggcacgtatttcattggagagtgcccaaaaaccaaaagagagggtgcagctttacaactgtacatatttccctgccccaaccattgagcatgttgcccaaactatgaaattggcaacgggtttgaatcgctctatcccctacattccccaaatcccgcttatggctacggcatccatcgctggaatgctcggaggctttgggtttggaatttgcccggagcgtgttcgtaaactcatggtttcaacaaatataagcggcgagaagttgaatgagaattatcctctcaaatattctcttaaagatgcttttgcggactggtttaaggattgcgagaaacgggggctggaatga

SEQ ID NO: 9838 - protein, 149 aa, Unknown
  Obtained from environmental sample
  misc_feature (1)..(149): Xaa is any amino acid
MAHDKALKAMKQYRFAYAGRKDTLKASIYVKDLARISLESAQKPKERVQLYNCTYFPAPTIEHVAQTMKLATGLNRSIPYIPQIPLMATASIAGMLGGFGFGICPERVRKLMVSTNISGEKLNENYPLKYSLKDAFADWFKDCEKRGLE

SEQ ID NO: 9839 - DNA, 324 bp, Unknown
  Obtained from environmental sample
  misc_feature (1)..(324): n is a, c, g, or t
ttgcgagaaacgggggctggaatgaaaaaatcatcttatgattatctgattgtaggtgcaggcttttttggagcggtgctcgcatttgaaatgaaaaaagctggaaaaaaatgcttagtcatagacaaacgaagccatattggtggaaattcctatacaaaaaaaatggcaggcatacaagtccacaaatacggagcgcacatattccatacaaacaataaaaaagtctgggattatctgaacggttttgctccattcaaccgcttcacaaattctcccatcgcaaattacaaaggcaaactctacagcctcccctttacatga

SEQ ID NO: 9840 - protein, 107 aa, Unknown
  Obtained from environmental sample
  misc_feature (1)..(107): Xaa is any amino acid
MRETGAGMKKSSYDYLIVGAGFFGAVLAFEMKKAGKKCLVIDKRSHIGGNSYTKKMAGIQVHKYGAHIFHTNNKKVWDYLNGFAPFNRFTNSPIANYKGKLYSLPFT

SEQ ID NO: 9841 - DNA, 843 bp, Unknown
  Obtained from environmental sample
  misc_feature (1)..(843): n is a, c, g, or t
gtgtacggtattaaaaataccggtatggagaccttaggcggcacaaggatgacaaacaccaacaggtttgttacagattccggaatatttatcataaacaacagttttgccggaaatgttgaaaaccaggcgcggggataccgggcctttatggacgcggttgccgcggcaggcggcgaaggcgtcatgtggtggggagcggactggttcgcgcctctcatgggcctgaacagcaatgttgaaaactcggcgatattcgatcaaaccggtaaggccctggacgttatgagggtgttaggcggcatcaagggtccaaacgccgcgaagccgggtaaagtcaccaatctcagggcaactgtgtcaggtactactgtcagtttaacatgggatacggtgaataccgcaatcaccaacagatacagcctggaacgcgcagcggcgtcgggaggcacctggacaacggttgatgataacatagcgggcaataataccggcacaggtacattcactgatacaggccttcaggaggaagtgacttataattaccgcgtcagggccaacaattcagtcggctgggggaattacagcgatactgcgtcaatcacaaccaccggtgtggtgcttgtggcgcctacgaacctcaggtcaaccggtatcacttccgattccatcagcctggcatggaacaccgttaccggggcggcctcttacaaactatacggcgctaaaggggcatccgcgcccgccaatgataccggctacactttgttgggtgacgcaatttccgatactacctatacccacagcagcttaactgccgatgatacctggtggtacaggtaa

SEQ ID NO: 9842 - protein, 280 aa, Unknown
  Obtained from environmental sample
  DOMAIN (110)...(196): Fibronectin type III domain
  misc_feature (1)..(280): Xaa is any amino acid
MYGIKNTGMETLGGTRMTNTNRFVTDSGIFIINNSFAGNVENQARGYRAFMDAVAAAGGEGVMWWGADWFAPLMGLNSNVENSAIFDQTGKALDVMRVLGGIKGPNAAKPGKVTNLRATVSGTTVSLTWDTVNTAITNRYSLERAAASGGTWTTVDDNIAGNNTGTGTFTDTGLQEEVTYNYRVRANNSVGWGNYSDTASITTTGVVLVAPTNLRSTGITSDSISLAWNTVTGAASYKLYGAKGASAPANDTGYTLLGDAISDTTYTHSSLTADDTWWYR

SEQ ID NO: 9843 - DNA, 858 bp, Unknown
  Obtained from environmental sample
  misc_feature (1)..(858): n is a, c, g, or t
atgacagattcggccgaggttgagattacgtatgacggcacaactctaaaggtgggcggtgagttggtggctgacagcaagagcataacgcttgaggacggcacggttctcaccaatggtgggggcggagagataacggtggaacagggcagtatcaaattggctcaagagtggacagttgatgcggctgatgcaatagcgaaagatagcactttagcttccggtagtgtgttgattgacgatattacgttgggagccggtacagtgataactaactccaatgtcgtggcccccggcagcatcactttcaaaagggaagacgaagacgatctcagcactcctttatacatacagttttccgctaacgatgctgtcagactcgaagctaaatacgacaaggccgacgtaggcgatagcgtaacctacatcttctcgaactaccaagccccgtcgtcacaactgaacgactccgtgatggcccaaatcggcgccaacagcggtcaaacgacattcgtctccataggcgatatgcgtgccaaagcgctcggtatagccgacgtggacatcggcagtaagtggggcgcggccaccgccatagagacggtgaacaacgctctgcaaaaggtctctcaccagcgtagctctctcggcgcgattcagaaccgtttggagcacacgatcaagaacctcgacaccgcggcggagaacttgcaagccgccgagagccggattcgcgacgtggatatggctaaggagatcatggagttcacgaagaacaacattctccagcaagcgtcgcaggcgatgttggcgcaggcgaattctcagccgcagagcgtgttgcagttgctcaggtaa

SEQ ID NO: 9844 - protein, 285 aa, Unknown
  Obtained from environmental sample
  DOMAIN (192)...(263): Bacterial flagellin C-terminus
  misc_feature (1)..(285): Xaa is any amino acid
MTDSAEVEITYDGTTLKVGGELVADSKSITLEDGTVLTNGGGGEITVEQGSIKLAQEWTVDAADAIAKDSTLASGSVLIDDITLGAGTVITNSNVVAPGSITFKREDEDDLSTPLYIQFSANDAVRLEAKYDKADVGDSVTYIFSNYQAPSSQLNDSVMAQIGANSGQTTFVSIGDMRAKALGIADVDIGSKWGAATAIETVNNALQKVSHQRSSLGAIQNRLEHTIKNLDTAAENLQAAESRIRDVDMAKEIMEFTKNNILQQASQAMLAQANSQPQSVLQLLR

SEQ ID NO: 9845 - DNA, 504 bp, Unknown
  Obtained from environmental sample
  misc_feature (1)..(504): n is a, c, g, or t
gtgcgccgaagacgaggttggcaacgctctcaacagacggtggaatcgctgcgccggctcattatcagcgacggcggacaggtgcttcaggcggcggcccgaaaggatttatctaagcggcttatcggtcaatacgagggcgatttcgcgacaatgaaggagaacataaacaccgtaatgcaatctctcgacgacgcgctcaggcaggtgtcggaggccgcgagccaggtgtcgggagcgagcggcgagatttccggcggggcgcagacccttgcccaaagttctaacgagcaggcgagttcgcttgaggaagtttcatcgagtttagaggagatatcgtcaatgacgaaacagaacgccgataattccaaccacgcgaagatactcgccacggaggcgcggacggcggcaaacgagggcgacgcggcgatgaagcgtatgtcggaagcgatcggcagcataaaacagtcgtccgacaaccccgcgaagaatcctcaggactaa

SEQ ID NO: 9846 - protein, 167 aa, Unknown
  Obtained from environmental sample
  misc_feature (1)..(167): Xaa is any amino acid
MRRRRGWQRSQQTVESLRRLIISDGGQVLQAAARKDLSKRLIGQYEGDFATMKENINTVMQSLDDALRQVSEAASQVSGASGEISGGAQTLAQSSNEQASSLEEVSSSLEEISSMTKQNADNSNHAKILATEARTAANEGDAAMKRMSEAIGSIKQSSDNPAKNPQD

SEQ ID NO: 9847 - DNA, 609 bp, Unknown
  Obtained from environmental sample
  misc_feature (1)..(609): n is a, c, g, or t
gtgcttataatagcgatagtattctcaagggcggtcgtcgcgctcgtaaaggagacggatgagttaaacaagcagctgctatccaagaacgagcgtttgaggatcttatctaccacggacgaactgaccgaactaaacaacaaacgctcctttatggagtacatggacatagtatggaagcaaaaccaccgcctgaaacttcccataaccgtgttgatgatagacgtggattatttcaaaaaatacaacgacgcgttgggccatttggagggagacaaagcgcttgtcgccgtggcgcggtgtataaagaatcacgccaaacgggaaacggatcttgtcgcgcggttcggcggcgaggagtttgtgtgcgtactcccgttcatagagaggaatgaagcggttaaattcgcgaacgcgcttgtggcgaaagttgaaaacatgaagatacctcaccccgagagcgaacactcaaagtacctgaccatcagcataggcatggccgacgtggtgccagacgacacctattcgtgcacgcggctgttaagcgaggcggacaaggcgctgtacatggccaagaggtcggggaggaatatgcttgtggtcggttaa

SEQ ID NO: 9848 - protein, 202 aa, Unknown
  Obtained from environmental sample
  DOMAIN (33)...(198): GGDEF domain
  misc_feature (1)..(202): Xaa is any amino acid
MLIIAIVFSRAVVALVKETDELNKQLLSKNERLRILSTTDELTELNNKRSFMEYMDIVWKQNHRLKLPITVLMIDVDYFKKYNDALGHLEGDKALVAVARCIKNHAKRETDLVARFGGEEFVCVLPFIERNEAVKFANALVAKVENMKIPHPESEHSKYLTISIGMADVVPDDTYSCTRLLSEADKALYMAKRSGRNMLVVG

SEQ ID NO: 9849 - DNA, 936 bp, Unknown
  Obtained from environmental sample
  misc_feature (1)..(936): n is a, c, g, or t
atgaaaaaaaccaaatcactgtatgaggcggaagctcatagaatcagtgaaatacaaaaaggcatattggttatttcagacaaggaagagccttatgacatattcatctgctacaaagataaggacgagaacaaaaatcggacattcgatagcgtgaaagcgcaggaaatctataacgtattaacaaaagacgggtacaaggtatttttttcttatattaccctcgaaaacaaactcggccatgagttcgagtcgtacatattcagcgcgctcaacagcgcaaaggtcatgcttgttataggtacacgtaaggagtactttgaggcggtgtgggttaaaaacgagtggagccgctttcttgcccttatggaggcggacgaatctaaacgattgataccgtgctatcaaaacatggacgccgatgatattccgaaagaactgtcaaagttgcactggcaccctcaggatatgtcggatgacggatttttccaagagattttgcatggcattagaaaaataccgggctcaaaaaaatccgatgagaaaaagtcgtccgcggcaggcgccgcgaccaccgaagtaacaacggcgagtgccaattttgaaaccttaatgatacgcggtaaacaattgttgaatgattccgactggaaaaaggcgtacgaacattttgacaatatgttgagtatattcccgcagtacgcgcccacgcatgtgggtatgttgtgcgcggagttgaatgtgcgtaatgaagaattgcttgtgaatagcgaaaaaccgcttacggagtacaatcattatcaacatgcgtataatcttgccgatgcggattatcgtgcgacgttggataggtataataaacagaatcaagagtggatcgcgaaagagcaggagcgtaagcggcaagatgaggaacgctatcgacaagaacagtag

SEQ ID NO: 9850 - protein, 311 aa, Unknown
  Obtained from environmental sample
  misc_feature (1)..(311): Xaa is any amino acid
MKKTKSLYEAEAHRISEIQKGILVISDKEEPYDIFICYKDKDENKNRTFDSVKAQEIYNVLTKDGYKVFFSYITLENKLGHEFESYIFSALNSAKVMLVIGTRKEYFEAVWVKNEWSRFLALMEADESKRLIPCYQNMDADDIPKELSKLHWHPQDMSDDGFFQEILHGIRKIPGSKKSDEKKSSAAGAATTEVTTASANFETLMIRGKQLLNDSDWKKAYEHFDNMLSIFPQYAPTHVGMLCAELNVRNEELLVNSEKPLTEYNHYQHAYNLADADYRATLDRYNKQNQEWIAKEQERKRQDEERYRQEQ

SEQ ID NO: 9851 - DNA, 804 bp, Unknown
  Obtained from environmental sample
  misc_feature (1)..(804): n is a, c, g, or t
ttgaaaaacttcatgttcctacacgccggtgcttacgatatggaccagcattcaaaacccacccctatagaaaaaaatattccagtcatcttgggattactcggaatttggtacaacaattttatgggcgcagattcctacacaattttgccntacgaccaatatatgcaccgctttgcggcatatttccagcaagcggatatggaatccaacggaaaaacaatagaccgcgatgggaacagggtggaataccaaaccggtcctattttatggggagaacctggcacaaatgggcagcacgctttttaccagttaattcaccaaggcacaaaattgataccctgcgatttcatagcccctgccaactcgctcaacaaggtgggcgaccatcaccgcaaattgctctccaacttttttgcccagcccgaagcccttttgaacggaaaaaccctggaagaagcccaaaacgagctaatccagtcagacaaaacagacgaagaagtggaatttttggcacctcacaaagtatttgatggcaacaagccatccaattccattatggtgaaaaaaatagacccaagaacattgggtgccttgatagcgatgtacgagcataaaatttttgtgcagggcgttgtttggaacataaacagctacgaccagtggggagtggaactaggcaagcagctcgccggaaaaatcctccccgaactagtagagggcgaatcttccccaacaattgaactaaaccacgattccagcaccaacgctttgataaggtggtatcttaagaatagggaatag

SEQ ID NO: 9852 - protein, 267 aa, Unknown
  Obtained from environmental sample
  DOMAIN (2)...(259): Phosphoglucose isomerase
  misc_feature (1)..(267): Xaa is any amino acid
MKNFMFLHAGAYDMDQHSKPTPIEKNIPVILGLLGIWYNNFMGADSYTILPYDQYMHRFAAYFQQADMESNGKTIDRDGNRVEYQTGPILWGEPGTNGQHAFYQLIHQGTKLIPCDFIAPANSLNKVGDHHRKLLSNFFAQPEALLNGKTLEEAQNELIQSDKTDEEVEFLAPHKVFDGNKPSNSIMVKKIDPRTLGALIAMYEHKIFVQGVVWNINSYDQWGVELGKQLAGKILPELVEGESSPTIELNHDSSTNALIRWYLKNRE

SEQ ID NO: 9853 - DNA, 888 bp, Unknown
  Obtained from environmental sample
  misc_feature (1)..(888): n is a, c, g, or t
atgtgggtcttgaataggggtagcgtttctgttatgaggagggagctaccagaggaggttcataggttaaaggcagacattggcaatccagattcggtgagagaggctataaaaggtctgaaatttgatgttatagcggactttatatgctttgagccggagcaggcaagggcggatattgaactttatggaagtatttgcaagcagttcatattcataagtagcgcatctgcctaccagaagccgctgggttcggtacctataacggaaagcactccgctgaagaacccatactggctatactcacgtaataagattgcttgtgaggagttgtttttcgaggaatatagggagagggattttcccataaccattgtacgcccatcgcatacttatgatacaatcatacccgctgccatgggcagctccggctggacgaattcggctaggatgcttgcaggtaagcccattattctgcacggggacggaaccacgctatggactctaacacacgcgaatgattttgcgagagcttttgtagccctgcttggtaacgaagccgccattggcaatgcctttcacataacaagcgacgagtggctcacttggcggcaaatttctctgtgcgtggcagatgccctaggtgcgccaaagccaaatttcgtgtgcattccgagcgagaaaatagcccagaaaaatcccgatttgggcgcaggtctgttaggcgacaaggcgtggtgcgctatttttgataattcaaagataaaaaaaattgctacggattggcgagctgagattccattcaaagagggaattaggatgacgattgggtggtttatggatgacgacaggagaaggaaaatcaacgcagaattgaatgcgttttag

SEQ ID NO: 9854 - protein, 295 aa, Unknown
  Obtained from environmental sample
  DOMAIN (1)...(196): NAD dependent epimerase/dehydratase family
  misc_feature (1)..(295): Xaa is any amino acid
MWVLNRGSVSVMRRELPEEVHRLKADIGNPDSVREAIKGLKFDVIADFICFEPEQARADIELYGSICKQFIFISSASAYQKPLGSVPITESTPLKNPYWLYSRNKIACEELFFEEYRERDFPITIVRPSHTYDTIIPAAMGSSGWTNSARMLAGKPIILHGDGTTLWTLTHANDFARAFVALLGNEAAIGNAFHITSDEWLTWRQISLCVADALGAPKPNFVCIPSEKIAQKNPDLGAGLLGDKAWCAIFDNSKIKKIATDWRAEIPFKEGIRMTIGWFMDDDRRRKINAELNAF

SEQ ID NO: 9855 - DNA, 447 bp, Unknown
  Obtained from environmental sample
  misc_feature (1)..(447): n is a, c, g, or t
atgcaccgttacagcgcgacaaagcttcctctgcttgccgaaaagatggatcgtaagataaaagcctccggtcttgacgccaccacccgctatgagcttttgggaaggctgtcaggtatgcccaaacataccaagctttgccacggcgactttaaccccagcaacgtgattatcaacgaaaaggacgaagcgtatatcatcgactggtcccacgccgcccagggcaacgcctcggcggatgcggcgcagacctacctgctgttctggcttgcgggtaacatcaccctggcggaaaagtaccttgcgctgttctgtaaaaagagcgacacggcgaaacagtacgttgaaaagtggctttccattgtggcggcttcacagcttcctaaggcaaggcctgaagaaaaagaatttttactgcattgggccaatgtagcggaataccaatag

SEQ ID NO: 9856 - protein, 148 aa, Unknown
  Obtained from environmental sample
  misc_feature (1)..(148): Xaa is any amino acid
MHRYSATKLPLLAEKMDRKIKASGLDATTRYELLGRLSGMPKHTKLCHGDFNPSNVIINEKDEAYIIDWSHAAQGNASADAAQTYLLFWLAGNITLAEKYLALFCKKSDTAKQYVEKWLSIVAASQLPKARPEEKEFLLHWANVAEYQ

SEQ ID NO: 9857 - DNA, 861 bp, Unknown
  Obtained from environmental sample
  misc_feature (1)..(861): n is a, c, g, or t
ttggtttttacaatattgggattggctttttcacgccagcttgccatgtttttaaaattatttaaaaacagctctgatttttccgtgcttgcgtttgggcttgccctaatcctcgccggcttttttgaaatgcacggcggacttgcgatgataatcggcgcttatattatggggctttcgctttccaagaccgatattgccgcagtgatacagggcaggcttgaagggctttatgagttttttgttcctctgtttttcgccattatgggaatgatggtgaatttgagggagcttttttccacgcaggttttaatattcggcggaatatatactattgccgcaatttttgcaaaggtaattggctgcgccagtcccgcgcttctgcttgggtttaatcttaaaggagcgttacggattggaataggcatggttccccgcggcgaagtcgcgcttataatagccggtattggattgacgttaggcgttcttgacaaccagcttttttcgattgtaattctgctgacgttaatttctactgttgccgcgcctccgcttttagccgcgtcgttaaaaattcatgggcagggaacgagaaaagccgtaagagacaaagacgccattcatatacaatgggattttaattctcatgatgtcgctaaacttatggtagacaggctgttgattgacatccgcgccgagggattctatgtgcagacgatgaatcttgataataacgtagctttagcccgtaaagaagacatttcttttacgattagctgtgaaggaaaagccgttactgtaaagacttcaaaatcggatttgccttttataaaaaatgttatttatgaagnatatacttaa

SEQ ID NO: 9858 - protein, 286 aa, Unknown
  Obtained from environmental sample
  misc_feature (1)..(286): Xaa is any amino acid
MVFTILGLAFSRQLAMFLKLFKNSSDFSVLAFGLALILAGFFEMHGGLAMIIGAYIMGLSLSKTDIAAVIQGRLEGLYEFFVPLFFAIMGMMVNLRELFSTQVLIFGGIYTIAAIFAKVIGCASPALLLGFNLKGALRIGIGMVPRGEVALIIAGIGLTLGVLDNQLFSIVILLTLISTVAAPPLLAASLKIHGQGTRKAVRDKDAIHIQWDFNSHDVAKLMVDRLLIDIRAEGFYVQTMNLDNNVALARKEDISFTISCEGKAVTVKTSKSDLPFIKNVIYEXYT

SEQ ID NO: 9859 - DNA, 885 bp, Unknown
  Obtained from environmental sample
  misc_feature (1)..(885): n is a, c, g, or t
ttggccgaggccccaatggacgggcgcgaattatttgataaattaaaaaaagataaagcgtttcagcgaatccccattatttttattaccgctaaaaacgattcggaaagcgaacttcttgccgccggagccgttgattttattaataagccgtttatgccggaaattgtcaaacttcgcgtaagaaatcaaataacgttaaaaaattacagcgataatctggaacaaatggttacggagaaaacggaggaagcgactaggacgctggaaaacgccctgcaagggcttgcgaatgttatcgaacaccgggatttggaatcgggcgaacatgttaaacggacgcagttatttgtaaaggcgttaattgattatttattgtcttcaaattcgatttatgccgaagaaattagaaaactccagccggatattatcgtaaaatctatggctcttcatgacgttggaaaaatagctatccctgataaaatccttttaaaacccggaaaactcgatcccgaagaatatgaagtaatgaaaacgcataccaccagaggcagggatattatccatgagcttggcgatgtaaattcgtctttatatctgaaacattgcgaggacatttgttacgggcatcatgaacgctgggacgggaaagggtatcctcgtcagttaaaaggcgaggaaataccgctttcagcgcgcctcgcggcgttagctgacgtatacgacgcgttggtatgcgcccgcgtctacaaagtggcgatgccctatgacgaagcgcttgcaattatcacacaaggcaaaggaactcaatttgatccaatcatcgctgacgcgattgtacatatccaaaatgagtttcangaaatatcaaggaagtatcaataa

SEQ ID NO: 9860 - protein, 294 aa, Unknown
  Obtained from environmental sample
  DOMAIN (107)...(244): HD domain
  misc_feature (1)..(294): Xaa is any amino acid
MAEAPMDGRELFDKLKKDKAFQRIPIIFITAKNDSESELLAAGAVDFINKPFMPEIVKLRVRNQITLKNYSDNLEQMVTEKTEEATRTLENALQGLANVIEHRDLESGEHVKRTQLFVKALIDYLLSSNSIYAEEIRKLQPDIIVKSMALHDVGKIAIPDKILLKPGKLDPEEYEVMKTHTTRGRDIIHELGDVNSSLYLKHCEDICYGHHERWDGKGYPRQLKGEEIPLSARLAALADVYDALVCARVYKVAMPYDEALAIITQGKGTQFDPIIADAIVHIQNEFXEISRKYQ

SEQ ID NO: 9861 - DNA, 591 bp, Unknown
  Obtained from environmental sample
  misc_feature (1)..(591): n is a, c, g, or t
atgggggaccaggcgttttcatggaaccaacttgtcagcgttaccatccccagcagccttacttcaattgaaagtaatgtgttttatgcgaacaagcttgtcagcgttaccatccctaacagtgtggtctctatcaaggatcgtgcgttttccgacaaccaactggctagcgttaccatccccagcagcgttatccgcattgagcattgggcgttttccaacaaccaactgaccagtgttactatccccaacagcgttacttacattggggaccaggcgtttatgtccaatcagctgacccacgttaccatcggtaacagtgttgtttctattggggacagcgcgttttacgacaaccaactgaccgatgttactatccccaacagcgttacttccatcgggggtgccgcttttcattctgaccaactgaccagtgttaccatcggggcaaatgtaacacttgatcatcaatatggtagtttcgatcgtattgataatgggtggggctttgataccgtctataacaataatggcaaggctgcgggcacgtatacacggcctaacaccacttctatttggaccaaacaataa

SEQ ID NO: 9862 - protein, 196 aa, Unknown
  Obtained from environmental sample
  misc_feature (1)..(196): Xaa is any amino acid
MGDQAFSWNQLVSVTIPSSLTSIESNVFYANKLVSVTIPNSVVSIKDRAFSDNQLASVTIPSSVIRIEHWAFSNNQLTSVTIPNSVTYIGDQAFMSNQLTHVTIGNSVVSIGDSAFYDNQLTDVTIPNSVTSIGGAAFHSDQLTSVTIGANVTLDHQYGSFDRIDNGWGFDTVYNNNGKAAGTYTRPNTTSIWTKQ

SEQ ID NO: 9863 - DNA, 636 bp, Unknown
  Obtained from environmental sample
  misc_feature (1)..(636): n is a, c, g, or t
atgcagattgttttcgcagagaaagaagtcagggacatggcaaaccatgttttgttgatgttttcccgttttaacaatgtaattcaatctctctttgaaatgcaggacaggcaggcggctgtaacgtcccttggccttgaattaagacaaaaagaagaatatgccgatcaaatgcgcgatcagattgccgcatttttaatgacatgcgcaagagaacagcttaatccgcgttcagaacaccgtgtttcacagttattgcgcgtcatttcagacctggaagaaatctccgatgactgctgcagtttaagctatattctggaaaacggcgtaaatgaaaaccttataatcaagaaaaaagaaatggatgcccttgtgccgtatttaaaccatgtagaaaatttccttaatctggttaaggataatcttggacgcaggctttcaacgaccacgctttcttacgcaagggaactggaaggtgaaattgatcgaaaccgcgacagacttcgcaaacttggccgcaaaaggctggaatccggcaagaatgtaaaaacggagcttttatttattgatattgtgcgaagaatcgaaaaacttggggattactgtttggaaatttccgagactcttgccgcgtaa

SEQ ID NO: 9864 - protein, 211 aa, Unknown
  Obtained from environmental sample
  misc_feature (1)..(211): Xaa is any amino acid
MQIVFAEKEVRDMANHVLLMFSRFNNVIQSLFEMQDRQAAVTSLGLELRQKEEYADQMRDQIAAFLMTCAREQLNPRSEHRVSQLLRVISDLEEISDDCCSLSYILENGVNENLIIKKKEMDALVPYLNHVENFLNLVKDNLGRRLSTTTLSYARELEGEIDRNRDRLRKLGRKRLESGKNVKTELLFIDIVRRIEKLGDYCLEISETLAA

SEQ ID NO: 9865 - DNA, 597 bp, Unknown
  Obtained from environmental sample
  misc_feature (1)..(597): n is a, c, g, or t
ttgatggccgagatatctatgaatcagaatggactcaaaaccgcgcttaccgcttttgatttggccgatgccgagggctttcccgtacaactttatgaagacgatattatgtatgtgtcacgccataacgaatataccggttatgatcagaaacttaccggcctcagacaggtagtagtggaaaattttcgggccatggtgggcggcggctgccataagctgctcatccccggagaccccgcgctccttgtcccgctggaaagcattttgcggacctaccttgaagacggcgttaccatcttcaccagcaaaccgtattttcttgaaatattgccgcccaatgtcaacaaaggcacggccctggaaaaggtcgcggatatgctggggattaatcagaatgatgtgatggccattggggattcgatgaacgatgaagccatgctccgctgggcaggcatgggcatagcaatggcaaacagcgatgagagaataaagaatatcgcggatctggtaacatcaaaagacaatgatgatgacggcgttgctgaagtcattgaaaaatatatcctttctaaaacggcggcttccaatgagtga

SEQ ID NO: 9866 - protein, 198 aa, Unknown
  Obtained from environmental sample
  DOMAIN (1)...(185): haloacid dehalogenase-like hydrolase
  misc_feature (1)..(198): Xaa is any amino acid
MMAEISMNQNGLKTALTAFDLADAEGFPVQLYEDDIMYVSRHNEYTGYDQKLTGLRQVVVENFRAMVGGGCHKLLIPGDPALLVPLESILRTYLEDGVTIFTSKPYFLEILPPNVNKGTALEKVADMLGINQNDVMAIGDSMNDEAMLRWAGMGIAMANSDERIKNIADLVTSKDNDDDGVAEVIEKYILSKTAASNE

SEQ ID NO: 9867 - DNA, 591 bp, Unknown
  Obtained from environmental sample
  misc_feature (1)..(591): n is a, c, g, or t
atgaaagttttttttcaaactaaagtttctgttaatgtaattgaagaaggagcaacaacggtttatggagataaattttttggaattataagtacatttccttataatgaaattgaattttcacaaaatgatattaccgcgataataaaaccgacaacgcaaaaaaaacctgaatataagttaaaaataatagcatcagaaaaatatcctgaatttcccgtttcttcctctgattcttttgaaatgccaattaaagatttcagagatatgatacaacaaagtattttcgccgtctccgatgatgaaactcgttatttcttaaatggtgcatattttgaaaaatttgaagataaaataaatatggtcgcgacagacggaagacgtttggcatttgtgggaaaaacgacagataaaaatataaaagatttttccggagtaattattccgcctaaaattttaaacactgttcttaaaagatccggcgatgaaggacttgtaagcatttcagttaacgacaaatcaatatttattaattttgcatcgtatcaattctcttctgttttgatagaaggaaaattttcccaattataa

SEQ ID NO: 9868 - protein, 196 aa, Unknown
  Obtained from environmental sample
  DOMAIN (81)...(195): DNA polymerase III beta subunit, central domain
  misc_feature (1)..(196): Xaa is any amino acid
MKVFFQTKVSVNVIEEGATTVYGDKFFGIISTFPYNEIEFSQNDITAIIKPTTQKKPEYKLKIIASEKYPEFPVSSSDSFEMPIKDFRDMIQQSIFAVSDDETRYFLNGAYFEKFEDKINMVATDGRRLAFVGKTTDKNIKDFSGVIIPPKILNTVLKRSGDEGLVSISVNDKSIFINFASYQFSSVLIEGKFSQL

SEQ ID NO: 9869 - DNA, 345 bp, Unknown
  Obtained from environmental sample
  misc_feature (1)..(345): n is a, c, g, or t
atgctgaactgtgtgatgatgaaaaccgttgacgaatatataaagcagtttccgcccgaaattcaaaaaggtctgaaagaattgcgggcctttataaaaaccgaggttcctgaggctgaggaaaaaattacttaccgaatgccggcttatcacctgaatggcgtgcttatatattttgccgcctttaaagaccactacagcctttacccaattccggcgggagctaaatcctttgaaaaagagcttgtcccatataaatccggaaaaagcaccctgcgttttccactggacaaacctttaccttgggagcttgtcaggaaagtcattcagttaaagaaacagtag

SEQ ID NO: 9870 - protein, 114 aa, Unknown
  Obtained from environmental sample
  misc_feature (1)..(114): Xaa is any amino acid
MLNCVMMKTVDEYIKQFPPEIQKGLKELRAFIKTEVPEAEEKITYRMPAYHLNGVLIYFAAFKDHYSLYPIPAGAKSFEKELVPYKSGKSTLRFPLDKPLPWELVRKVIQLKKQ

SEQ ID NO: 9871 - DNA, 351 bp, Unknown
  Obtained from environmental sample
  misc_feature (1)..(351): n is a, c, g, or t
ttgaattttgcaaagaatgccatagataccggctttagctccggtatgatagacggaagccaccacctttacgaaaaaaatgttgaagtgaccaaaaaagttgttgaatatgcccataaatacgatgttaccgtggaaggggagcttggtgtgctagctggcgtggaagatgatgtttcttctgaacattcacactatacccagcccgaagaagtgcaagatttcgttggcaaaacagngtgtagattcccttgccatatccataggcacaagccacggacgttgcaaattcaagccggaacagtgtacccgcaatcaagacggctgctcatccgctctcggccgatctga

SEQ ID NO: 9872 - protein, 116 aa, Unknown
  Obtained from environmental sample
  misc_feature (1)..(116): Xaa is any amino acid
MNFAKNAIDTGFSSGMIDGSHHLYEKNVEVTKKVVEYAHKYDVTVEGELGVLAGVEDDVSSEHSHYTQPEEVQDFVGKTXCRFPCHIHRHKPRTLQIQAGTVYPQSRRLLIRSRPI

SEQ ID NO: 9873 - DNA, 927 bp, Unknown
  Obtained from environmental sample
  misc_feature (1)..(927): n is a, c, g, or t
atgatcgcgcgggtttatgagctgctagcgcccgagcgcccgctctgccttccccgcgggtgcgagcgggttcggcccggctgtcgcagggaggtgcgattcggcaagatgacctaccggcgcaacccccaaaacggcgatcttctctccattctggcntacgggatgatgaggctgccgcgtgtgccccgcgcccgcaaggagtcgttgccggacgtgaacgacctcgaccaagaggcggtcaacgagcttgtggactacgccatagcccacggcgtgaactatttcgatacctcgcccgtctactgcaagggtttttccgaacgcgccacggggattgctctgagccgccacccccgcgacaagtatttcatcgccactaagatgtccaaccagcgcgccagaagccgcgaggagtcgctcgccatctaccgcaagtcgttcgaggagctgcgggtggattatatagattactacctgctgcactccgtcggcagccgcgataacttcaaggagcgctatttagacaacgggatgctagactttttggtgaaagagcgcgaggcggggcgcatacgcagcctcggctggtcgtttcacggcgagggcgacctttttgagtatctgatgtcggagtacaagtgggattttacaatgatacaggtgaactatttcgactggcggatggcggcggggactaaccgcagcgacatgagcgcccgtcgccaatacgagatattggccgaaaagggcgtcccggcggtgatcatggaaccgcttttgggcggcggcttggctatgccgcattacaaggcgcgggccaagatggtgcaggccgacccggacgcgagtgcggcgtcttgggccttccgcttcgccggtagcctgccgaacgtcatcaccgtcttgagcggcatgaccttatga

SEQ ID NO: 9874 - protein, 308 aa, Unknown
  Obtained from environmental sample
  DOMAIN (43)...(308): Aldo/keto reductase family
  misc_feature (1)..(308): Xaa is any amino acid
MIARVYELLAPERPLCLPRGCERVRPGCRREVRFGKMTYRRNPQNGDLLSILAYGMMRLPRVPRARKESLPDVNDLDQEAVNELVDYAIAHGVNYFDTSPVYCKGFSERATGIALSRHPRDKYFIATKMSNQRARSREESLAIYRKSFEELRVDYIDYYLLHSVGSRDNFKERYLDNGMLDFLVKEREAGRIRSLGWSFHGEGDLFEYLMSEYKWDFTMIQVNYFDWRMAAGTNRSDMSARRQYEILAEKGVPAVIMEPLLGGGLAMPHYKARAKMVQADPDASAASWAFRFAGSLPNVITVLSGMTL

SEQ ID NO: 9875 - DNA, 873 bp, Unknown
  Obtained from environmental sample
  misc_feature (1)..(873): n is a, c, g, or t
atgagccacatacccgacccgaacaaaaacgtcagcctcaccattgacggcatggcggttacggtgcccgaaggcacgaagatactggaagcggcgcggaaagcgaacgtgataattcccaccctctgcgatcaccccgatctgtgcaggcgcgcggtctgccgcctctgtgtggtggagtgcgacggtaaaggaaaattgctgaccgcctgcgccaacgacgtatgggaaggcgtaaaaatagttacgaataacagccgtattatcagcataaggaaaacgatagtcgagctgcttctggcaaaccatccgcaggattgccttaactgcgcggccaacacggactgcaaactgcaatcccttgcccggatttacggcatcagagaaacgcctttcaaatgcgaggttataaacaggcagcctcctaatgggcaaagcgggttaattcgcgacatggacaagtgcgtcaaatgcggccgttgcgtggaagcctgccaggagattcaaactgtccgcgccatcaacagttcccacaggagcgtcaattacaggatatcaacggcgtataaccagccctataccgacagctcctgcgttttctgcgggcactgcgaaacggtctgccctgtaggagcgatttacgaacaggatcaaagcgccgaagcctgggccgcgattaacgacagcgggcgcagtactgccgttcaaatcggcaaaatgtcgtgtagggaactgggtaaggcgctcggacttccggcggcaaccctcagcacggggaaaactgtcaccgcgcttaaacggctcggttttgacaaggtatatgacgcccaattcacattagacctcgcggctttcgactttgccctgaactga

SEQ ID NO: 9876 - protein, 290 aa, Unknown
  Obtained from environmental sample
  DOMAIN (148)...(175): 4Fe-4S binding domain
  misc_feature (1)..(290): Xaa is any amino acid
MSHIPDPNKNVSLTIDGMAVTVPEGTKILEAARKANVIIPTLCDHPDLCRRAVCRLCVVECDGKGKLLTACANDVWEGVKIVTNNSRIISIRKTIVELLLANHPQDCLNCAANTDCKLQSLARIYGIRETPFKCEVINRQPPNGQSGLIRDMDKCVKCGRCVEACQEIQTVRAINSSHRSVNYRISTAYNQPYTDSSCVFCGHCETVCPVGAIYEQDQSAEAWAAINDSGRSTAVQIGKMSCRELGKALGLPAATLSTGKTVTALKRLGFDKVYDAQFTLDLAAFDFALN

SEQ ID NO: 9877 - DNA, 492 bp, Unknown
  Obtained from environmental sample
  misc_feature (1)..(492): n is a, c, g, or t
atgccgaaaggagaaataattatggaaataccacaatataatgaactatttaacccccttttagaagccttacataaattaggcggttctggctcaattgaagagataaacaataaggtcatagaattacaaaattttcctgttgaaattgtagatgtacttcatggagaaggacctagaactgaaatagaatatagattagcttgggcaagaacatatttaaaaaaatatggtttacttgaaaattctagtcgtggaatatgggcaattttaaataataaacaaaatattaaaaaaatagatcaaaaagaagtagttaattttgtgcaatcattatcaaaagacaaaaaagataaaggtactgataattctattgaagaaaaagatgatgataatgaaaatgatagtaaagcatggaaagaagaattatgggattattatttttcatatcgccagacgcttttgaaagactttgtcaagaatattacgtga

SEQ ID NO: 9878 - protein, 163 aa, Unknown
  Obtained from environmental sample
  misc_feature (1)..(163): Xaa is any amino acid
MPKGEIIMEIPQYNELFNPLLEALHKLGGSGSIEEINNKVIELQNFPVEIVDVLHGEGPRTEIEYRLAWARTYLKKYGLLENSSRGIWAILNNKQNIKKIDQKEVVNFVQSLSKDKKDKGTDNSIEEKDDDNENDSKAWKEELWDYYFSYRQTLLKDFVKNIT

SEQ ID NO: 9879 - DNA, 396 bp, Unknown
  Obtained from environmental sample
  misc_feature (1)..(396): n is a, c, g, or t
gtgcgcaacgcttcgcggggtatagtcgagcagttggggaacgctctccccctgaggggaaaacttatccagcgccggcaggcccagggcctaatcgacaagggccgcgccgacaaagtcaaggaaggcgttgtctacgatatagtcaaaaaagaccgatcccagcttgcgaatcaggggattggccttgtttattcgccggaggatctggtgggaaaaatcactgtcgaatctgttgatgaggaagtggcttcaggaaagcttgtccgcaacgggttctttgaccgcatcgaggaaggcgacgatgttttctttatcccggaaagcggtttaaaaacccctgccgaaacagcggcgaacccggaactcagggccttactgcgcaccttacgatag

SEQ ID NO: 9880 - protein, 131 aa, Unknown
  Obtained from environmental sample
  misc_feature (1)..(131): Xaa is any amino acid
MRNASRGIVEQLGNALPLRGKLIQRRQAQGLIDKGRADKVKEGVVYDIVKKDRSQLANQGIGLVYSPEDLVGKITVESVDEEVASGKLVRNGFFDRIEEGDDVFFIPESGLKTPAETAANPELRALLRTLR

SEQ ID NO: 9881 - DNA, 648 bp, Unknown
  Obtained from environmental sample
  misc_feature (1)..(648): n is a, c, g, or t
gtggctctgtttgacgaaaaaacccatcgcgacgaagtcgccagaaaactccagagcgaaaagatcaagaaaatacttgttctgggaacatcagacaaaatggtcaataagatcgcggcgaggctgcaaatgcctaccccaaaaaaaataataaaaattgaggatatagcaagccaggaagagattgacaaggcaataaggacgcgccgtatagaaggcaagcatgtaataccggtgccgtccatcgaaataaaacgcagctatcccggcattttccacgacgcgatacgcatattcaagaaaagcatcgcgcctgcgggcataggcccgacccccagcgttcacgagaaatccgtagtacggcccgaatactcaaagcggggcaaggtaattatttccgaatccgcgttaagccagatggtcatacactgtgttgatgaatacaaccaaaacatcaggataaaaaaaataatcgtacacgacaatgaaatgggttacagttttgcgatcaccattgacgtgccttacgacatacagttgggaggcaatatgcatgatcttcagaattatattatagataatattgagcgttacacgggaatacttattgaggaagtgaatattattattgataagattatacaataa

SEQ ID NO: 9882 - protein, 215 aa, Unknown
  Obtained from environmental sample
  misc_feature (1)..(215): Xaa is any amino acid
MALFDEKTHRDEVARKLQSEKIKKILVLGTSDKMVNKIAARLQMPTPKKIIKIEDIASQEEIDKAIRTRRIEGKHVIPVPSIEIKRSYPGIFHDAIRIFKKSIAPAGIGPTPSVHEKSVVRPEYSKRGKVIISESALSQMVIHCVDEYNQNIRIKKIIVHDNEMGYSFAITIDVPYDIQLGGNMHDLQNYIIDNIERYTGILIEEVNIIIDKIIQ

SEQ ID NO: 9883 - DNA, 846 bp, Unknown
  Obtained from environmental sample
  misc_feature (1)..(846): n is a, c, g, or t
gtggatattttncataaaatatcccccgtgaaatacaatttctttggtgtaaacagctctgtttcaggtgttgggtataatattataaaagcattaaaaacattaggcgatgttccaatatttttctctataattggaaatgacatgtataaggaaattattttcagcgaactaaaaaaagacaaagtagactcagattatgtactgccattattggaaaaaacggttcagtccggcatattatatgacagaaacagaaggaaaatattactggatctaaaaaacatacaagaaattaattttccaatagatttaataaaagatgtcattaataaaatagatttagggattatatgcaatataaatttctcaaggaatcttttgcaagtgttaaaagaaaatggaaaaattgttgcaaccgatgtacatgttttaacggatataaacgataattataataacgattatataaagtattctgacatattatttttaagcaatgagggcattattggaaatgagaacgatatgataatagaattgtctcaaaaatacaaccacgaaataattgtaattacgatgggcggaaacggtttattaatgtatgcaaaagaaaaacacgaaataaagcactttccggcaataaaaacgcgggaagtagtcaatacaataggcgccggcgatgccttgttttcatgttttatacattactattgtgatacaagagacccttattattcaatacaattggcagcattatttgcatcgtacaaaataggtgaaaacggaggttcaaaaggctttttaacggaagaagaattaataaaacttaaaaacaagatataa

SEQ ID NO: 9884 - protein, 281 aa, Unknown
  Obtained from environmental sample
  DOMAIN (1)...(271): pfkB family carbohydrate kinase
  misc_feature (1)..(281): Xaa is any amino acid
MDIXHKISPVKYNFFGVNSSVSGVGYNIIKALKTLGDVPIFFSIIGNDMYKEIIFSELKKDKVDSDYVLPLLEKTVQSGILYDRNRRKILLDLKNIQEINFPIDLIKDVINKIDLGIICNINFSRNLLQVLKENGKIVATDVHVLTDINDNYNNDYIKYSDILFLSNEGIIGNENDMIIELSQKYNHEIIVITMGGNGLLMYAKEKHEIKHFPAIKTREVVNTIGAGDALFSCFIHYYCDTRDPYYSIQLAALFASYKIGENGGSKGFLTEEELIKLKNKI

SEQ ID NO: 9885 - DNA, 963 bp, Unknown
  Obtained from environmental sample
  misc_feature (1)..(963): n is a, c, g, or t
gtggacataggggtgcccgccttcctgcccggttcccaggtcgattcccggcccatcaagaacctggaaagcctggtcggccagtcctatgacttcaagatcttaaaatacaacaaacgccggggcaacgtggtcctgagccggcgggtcatcctggaagtggagcgggaagcccagaagaaacagaccctggccggcctgaccgtgggctcggaagtggaaggcctggtcaagaaccttaccgattacggcgccttcatcgacctgggcggcctggacggccttctccacgtcaccgacatgtcctggggccgcctgacccacccctcggagatgttctccgtgggcgaccgggtgcgggtcaaggtgctggacttcgaccgggaaaaatcacgcgtctccctgggcctaaagcagctccaggccgatccctggacgaccgtctccgaaaaataccaggtgggcggccgggtttccggcaaggtggtctccctggccgattacggggcctttgtggaattggacaagggcatcgagggcctcattcacgtttcggaaatgtcctggacccgcaaggtgcggaaccccgcctccattctcaaggtcaatgacgtggtggattgcgtcatcctgaaagtggataccgtggccaagcgcatttccctgggcatgaagcaggtcgaacccaacccctgggacaccgtggccgaacgctaccccatcggcaccataattgaaggcaaaatcaagaacatcaccgatttcggcgtcttcataggcattgacgagggcatcgacggcctggtccacatctccgacatctcctgggaccgccgctacaagcacccttccgacgtcttcaagaaggccgatgcggtccgggccctcatcctggccatcgaacgggaagcaggaagggtctccctgggcatcaacagcttgaagaaaacccctgttccatga

SEQ ID NO: 9886 - protein, 320 aa, Unknown
  Obtained from environmental sample
  DOMAIN (66)...(138): S1 RNA binding domain
  misc_feature (1)..(320): Xaa is any amino acid
MDIGVPAFLPGSQVDSRPIKNLESLVGQSYDFKILKYNKRRGNVVLSRRVILEVEREAQKKQTLAGLTVGSEVEGLVKNLTDYGAFIDLGGLDGLLHVTDMSWGRLTHPSEMFSVGDRVRVKVLDFDREKSRVSLGLKQLQADPWTTVSEKYQVGGRVSGKVVSLADYGAFVELDKGIEGLIHVSEMSWTRKVRNPASILKVNDVVDCVILKVDTVAKRISLGMKQVEPNPWDTVAERYPIGTIIEGKIKNITDFGVFIGIDEGIDGLVHISDISWDRRYKHPSDVFKKADAVRALILAIEREAGRVSLGINSLKKTPVP

SEQ ID NO: 9887 - DNA, 438 bp, Unknown
  Obtained from environmental sample
  misc_feature (1)..(438): n is a, c, g, or t
gtgcttgtagcggcggtcccaggagatgtcggagatgtggaccaggccgtcgatgccctcgtcaatgcctatgaagacgccgaaatcggtgatgttcttgattttgccttcaattatggtgccgatggggtagcgttcggccacggtgtcccaggggttgggttcgacctgcttcatgcccagggaaatgcgcttggccacggtatccactttcaggatgacgcaatccaccacgtcattgaccttgagaatggaggcggggttccgcaccttgcgggtccaggacatttccgaaacgtgaatgaggccctcgatgcccttgtccaattccacaaaggccccgtaatcggccagggagaccaccttgccggaaacccggccgcccacctggtatttttcggagacggtcgtccagggatcggcctggagctgctttag

SEQ ID NO: 9888 - protein, 145 aa, Unknown
  Obtained from environmental sample
  misc_feature (1)..(145): Xaa is any amino acid
MLVAAVPGDVGDVDQAVDALVNAYEDAEIGDVLDFAFNYGADGVAFGHGVPGVGFDLLHAQGNALGHGIHFQDDAIHHVIDLENGGGVPHLAGPGHFRNVNEALDALVQFHKGPVIGQGDHLAGNPAAHLVFFGDGRPGIGLELL

SEQ ID NO: 9889 - DNA, 669 bp, Unknown
  Obtained from environmental sample
  misc_feature (1)..(669): n is a, c, g, or t
atggaagcggtacaaacaacaaagtatccacaggatgcaactccccccagttntgagacagtttgggcggccttacaggaaacagataggattttaaaagaaaacgccgaacgacatgatcgggaaataaaagaatacgcagaacagcagaaagaatggcagcgagaaatgaaggaaaatgctgaacggagtgcccgggaaatggacaaacgcgcgaaacggcttgacaaacagctcggcaagctcggtggccgttttggtgaaatggtcgagtatatggttgcgccgaatctgtttaaaaaattccgtaagctgggtttagttttcaataaggcacatcaacagactaaaattaaagatgaggatgataaaactatcgcggaagttgacattacccttgaaaacggcgacaaggttatgtatgttgaggtcaagtccaagccgaccaccgaagatattacccatcacgtcaaacgcatggaaaagattagagcccacgcggactcacacaatgaaaaacggaaatttctgggcgctatcgccggtatggtttttaatgataatgaaaaggaatttgccataaagaacggtttttatgtcattgtaccgtcgggggatacatttatcatcaccgctcccgaaggtgaatattccccacgggaatggtaa

SEQ ID NO: 9890 - protein, 222 aa, Unknown
  Obtained from environmental sample
  misc_feature (1)..(222): Xaa is any amino acid
MEAVQTTKYPQDATPPSXETVWAALQETDRILKENAERHDREIKEYAEQQKEWQREMKENAERSAREMDKRAKRLDKQLGKLGGRFGEMVEYMVAPNLFKKFRKLGLVFNKAHQQTKIKDEDDKTIAEVDITLENGDKVMYVEVKSKPTTEDITHHVKRMEKIRAHADSHNEKRKFLGAIAGMVFNDNEKEFAIKNGFYVIVPSGDTFIITAPEGEYSPREW

SEQ ID NO: 9891 - DNA, 621 bp, Unknown
  Obtained from environmental sample
  misc_feature (1)..(621): n is a, c, g, or t
atggacagaattatacgagcggttgcggcggcggcgttggttgccgcgtttgccgggtctgcggtagcgcagcagacaggaacgttcaccgacggtagggacggtcataagtacaagacggtgaagattgggacgcagacttggatggcggagaatctcaattataagaccaaaagcgggtcttggtgctatagggacagcgcgtcctactgcaagaaatacggcagattgtacgactggacgacagcgacaacagtctgtcctaaaggatggaagttgcctgataccgctgattggaatagattggtgtcaacggtgggcagaaaagagattgcgggtaagaagttgaaatcaaagagcgggtggagttggagtgatcacaataatcgaaacggtaatggtactgatgatttcggattttcggccttacccggcggcaaccgcaacgccgatggcagtttctccgatgtcggctactacggccgctggtggacggctacggagtacgatgcgatattttggtgcggcgcctaccaccggaatatgaacctcatcgacggtgtgtacggggacggccttggcaagagctacggcttctcggtacgttgcgttgaggactga

SEQ ID NO: 9892 - protein, 206 aa, Unknown
  Obtained from environmental sample
  SIGNAL (1)...(23)
  misc_feature (1)..(206): Xaa is any amino acid
MDRIIRAVAAAALVAAFAGSAVAQQTGTFTDGRDGHKYKTVKIGTQTWMAENLNYKTKSGSWCYRDSASYCKKYGRLYDWTTATTVCPKGWKLPDTADWNRLVSTVGRKEIAGKKLKSKSGWSWSDHNNRNGNGTDDFGFSALPGGNRNADGSFSDVGYYGRWWTATEYDAIFWCGAYHRNMNLIDGVYGDGLGKSYGFSVRCVED

SEQ ID NO: 9893 - DNA, 726 bp, Unknown
  Obtained from environmental sample
  misc_feature (1)..(726): n is a, c, g, or t
ttgggcggagatcccgcgtattatatagcgcttttcaaaagtggtttctgtccgttaatgcttaaaagttatgtgatacgcaaagggcattttaccgacgctcaaagaaaagcctacgattcgttatatgaaaaatttataattccttttgcggacaacaaacttgattttcaaaatattttcgggaattccgccggcgttactcttgagattggttttggctcgggttttgccacggctgaaattgcgcaggcgaatcccgataaaaattatttaggcgtagaggttcaccgtcccggcatagggaagctgttatgggaaattgaaaagcgttcccttgataatatcaggattattgaatatgacgcggcggccgtaacggaaaaaatgatccctgaaaattcccttgacgcggtacacatttttttccccgacccctggcctaaaaaaaggcatcacaaacgccgccttattcaaaatccttttacgcatgcattggcagaccgccttaaacccggcggctatttatacatggttacggattgggaagattacgccgtctttgctcttgatgcccttgcttcctgcccctctttgaaaaatacttgcgaagattttgctgttccccaggactggcggccaaaaacaagatttgagcaaaaggggcttgccaaagatcataaaataaaggaacttttttttatccgcgcaaaggggaggctatag

SEQ ID NO: 9894 - protein, 241 aa, Unknown
  Obtained from environmental sample
  DOMAIN (69)...(176): Methyltransferase domain
  misc_feature (1)..(241): Xaa is any amino acid
MGGDPAYYIALFKSGFCPLMLKSYVIRKGHFTDAQRKAYDSLYEKFIIPFADNKLDFQNIFGNSAGVTLEIGFGSGFATAEIAQANPDKNYLGVEVHRPGIGKLLWEIEKRSLDNIRIIEYDAAAVTEKMIPENSLDAVHIFFPDPWPKKRHHKRRLIQNPFTHALADRLKPGGYLYMVTDWEDYAVFALDALASCPSLKNTCEDFAVPQDWRPKTRFEQKGLAKDHKIKELFFIRAKGRL

SEQ ID NO: 9895 - DNA, 321 bp, Unknown
  Obtained from environmental sample
  misc_feature (1)..(321): n is a, c, g, or t
atggtccttctggaaactttttctctattcgctggacggaataatctctttttctaccgtcccctggccatagcctggtatccggcatnttctgtccttgccgcgatcatcattatctgctatgtggtgataaagacccttctntacggtgatccggtggcgggctttcccacattaatctgcgtcatttgtttcatcgggggcatccagttattctgcatcggcattttggggcagtacctggctaaaacgtacctggaagtcaaaaagcgtcctgtttacatagtcaaagaaagcaaactggggcgtgttcccacctga

SEQ ID NO: 9896 - protein, 106 aa, Unknown
  Obtained from environmental sample
  misc_feature (1)..(106): Xaa is any amino acid
MVLLETFSLFAGRNNLFFYRPLAIAWYPAXSVLAAIIIICYVVIKTLLYGDPVAGFPTLICVICFIGGIQLFCIGILGQYLAKTYLEVKKRPVYIVKESKLGRVPT

SEQ ID NO: 9897 - DNA, 900 bp, Unknown
  Obtained from environmental sample
  misc_feature (1)..(900): n is a, c, g, or t
gtgctgaaaaaaatctgcgccaaggccgccgagtggcgcaattacgacggcctcatcatcaaacaggaatatcttaaactcagcattgagcttgaaaatgaaaaacaaaagaaagacaacgccgctcgccagcttgtggaaacgcagaacaagctggatttcaccaaccgggaaattgccgcgctgaaccagaagcgtctggattcggaacaggaactgcgggcccttgatcagagccttgccagtaatgacgctcaccggctctatgaggaaatcagggcgcgcattgaacgaatacaacacgaccttgcctataaaaaagaacaggccgaaaaataccgaagccttaaatcccagtgcgaaacccttttaaaccgcaagctgacagaagactttgacggggaagaagccgcccttgccggggaagcgaagaaataccagaacgaaaggtatgtcgccgaacggaaaaaggacgaagcgcaggacttgttacgcgacatacgctctgaactggcggaccttgaacggggcatactccgctatcccgacgctccgcgcgaactgcgggcggctcttgaaaaggccggcatcgaggctttttttctggcggaagccgcggagattaccgcgcctgactgggctgacgctgttgaaggctggcttaacacacagcgcttcgccgttctccttgaccccgtccattttcaaaaggctattgaagtttacaatcgacttccccgttccatcgccggagctcttattcccaatatcgaaaagatgcgggatgccgtggcaagacaaggttcacttgctgaaatttgtcaagcccgaaggtatgccccgcattacatcgactacacattgngaagggtaatgcgctgtgacctcgcaaatctttaa

SEQ ID NO: 9898 - protein, 299 aa, Unknown
  Obtained from environmental sample
  misc_feature (1)..(299): Xaa is any amino acid
MLKKICAKAAEWRNYDGLIIKQEYLKLSIELENEKQKKDNAARQLVETQNKLDFTNREIAALNQKRLDSEQELRALDQSLASNDAHRLYEEIRARIERIQHDLAYKKEQAEKYRSLKSQCETLLNRKLTEDFDGEEAALAGEAKKYQNERYVAERKKDEAQDLLRDIRSELADLERGILRYPDAPRELRAALEKAGIEAFFLAEAAEITAPDWADAVEGWLNTQRFAVLLDPVHFQKAIEVYNRLPRSIAGALIPNIEKMRDAVARQGSLAEICQARRYAPHYIDYTLXRVMRCDLANL

SEQ ID NO: 9899 - DNA, 705 bp, Unknown
  Obtained from environmental sample
  misc_feature (1)..(705): n is a, c, g, or t
atggatcttccgggacttctggaattcctccttaacggaaccgggaagataaggctaaggctgtcttcaatagagcctgagccaggactttttgacgatgtgtttctccgtgttctgaccgacaaaaggatacggccccattttcatctttccctgcaatcgggaagcgcggcaatactggcaaagatgggcaggccctatagcccggcagatatcgaaaaaattgtctcgcagctccgccgtatccgccaggatccatttttggcctgcgatattattgccgggtttcccggggaaacagaatgtgaatttgaagaaacctacacattgatggaaaagcttagctttgcatggatacacgcctttccgtattcaaaacggcctggaacggcggccttttggttttcaggcgatgtaaacgggaaggatgccacaagaagggtagagcttttaacaagcctggcgcggaagggccgcctggactatattcaacgctggaagggcagggaagtggaagcagttgtggaggcaggggaaaatctgcctaagggcatggttcaggcagttacggaaaactacctgaaagtctgcgtagattacggggaagaaaaagctcctgctccgggcagccttattcgctgccggatagcggaaattgcggaaaccgccagttatgacgccctggcatgttatgtatggccttga

SEQ ID NO: 9900 - protein, 234 aa, Unknown
  Obtained from environmental sample
  misc_feature (1)..(234): Xaa is any amino acid
MDLPGLLEFLLNGTGKIRLRLSSIEPEPGLFDDVFLRVLTDKRIRPHFHLSLQSGSAAILAKMGRPYSPADIEKIVSQLRRIRQDPFLACDIIAGFPGETECEFEETYTLMEKLSFAWIHAFPYSKRPGTAAFWFSGDVNGKDATRRVELLTSLARKGRLDYIQRWKGREVEAVVEAGENLPKGMVQAVTENYLKVCVDYGEEKAPAPGSLIRCRIAEIAETASYDALACYVWP

SEQ ID NO: 9901 - DNA, 411 bp, Unknown
  Obtained from environmental sample
  misc_feature (1)..(411): n is a, c, g, or t
atgttgccgctttgcctattgaccttccgccattcactgtttaaatttccatatatgactgatgtccataacgacgcattggaagatgaagattttgatactattctatcaaaggatataaatttttcgggaactctaaattttgaaaaaccttttctaataaggggaaagctttccggcaacattgttgcccacggacttttggtggtagatgaggaagccgtggtagaggcgaatatcaatgcctcaaaggtggttatccgcggttcggtaaaaggggatgttatcgcttctgaaaaagtggaaatatccgtaaccggcaaacttatcgggaatgtgaaggcccctgaaattttcatggaaacaggatgttccttcaacgggcgatgtaccatgacggaaaaaatataa

SEQ ID NO: 9902 - protein, 136 aa, Unknown
  Obtained from environmental sample
  DOMAIN (24)...(136): Protein of unknown function, DUF583
  misc_feature (1)..(136): Xaa is any amino acid
MLPLCLLTFRHSLFKFPYMTDVHNDALEDEDFDTILSKDINFSGTLNFEKPFLIRGKLSGNIVAHGLLVVDEEAVVEANINASKVVIRGSVKGDVIASEKVEISVTGKLIGNVKAPEIFMETGCSFNGRCTMTEKI

SEQ ID NO: 9903 - DNA, 942 bp, Unknown
  Obtained from environmental sample
  misc_feature (1)..(942): n is a, c, g, or t
atgaagccccgctatgaatcatatcaggcgcgtctggaaaaaatttgggattggatggcccaggaaggcatagccctggtcatgtttgaggataccgagggcaggcgtgacgcgaacattcgctggcttaccgggcagccgggtgactccctgctttttctttcccttgaccgcaaaagcattctcgtaccctgggacattattctggctaaagcgtatgctagggcggacgctattgtcccctataatgaatttgacaggacgcccaaaaaagcaatcaaaggggctatcgaacggctgaatatcccggccggttcaaaaattgaaatacctccggttactccttatccggttttccttgattttgtagccgagttacaggattttgatattatctgccggaacagaagcaccatggatcacgcaaaggatctgcggactttcaaagacgcggaagagattgtgattatccgaaaagcggcaatttttacaaataagattatcgatcttttggagaaaagagcaaaagccggaaagatcaaaaccgaaactgacgccgttatgctgattgagcttgagtccagaaaaatgggctgtgatggcgcggcttttgagattcttgccgctgggcaggacaggagttttggcatacacgcgttccccgcgtggacagacgccccctttggcgggaaaggtctgtccatcctggacttcggcgtgcggtattgcggatataacaccgacgttaccttgacctttgtgaaggatccagactcgcagcagcttaaaatggtaaacttggtagagaaagcatacaaagccgcggttgattcaattgcggccgggaacgatacaatggccacagccattcttgttgatgaattgctggcaaaatcaagaaaaacgcctggtacacggattaggacacggcattgggcttga

SEQ ID NO: 9904 - protein, 313 aa, Unknown
  Obtained from environmental sample
  misc_feature (1)..(313): Xaa is any amino acid
MKPRYESYQARLEKIWDWMAQEGIALVMFEDTEGRRDANIRWLTGQPGDSLLFLSLDRKSILVPWDIILAKAYARADAIVPYNEFDRTPKKAIKGAIERLNIPAGSKIEIPPVTPYPVFLDFVAELQDFDIICRNRSTMDHAKDLRTFKDAEEIVIIRKAAIFTNKIIDLLEKRAKAGKIKTETDAVMLIELESRKMGCDGAAFEILAAGQDRSFGIHAFPAWTDAPFGGKGLSILDFGVRYCGYNTDVTLTFVKDPDSQQLKMVNLVEKAYKAAVDSIAAGNDTMATAILVDELLAKSRKTPGTRIRTRHWA

SEQ ID NO: 9905 - DNA, 360 bp, Unknown
  Obtained from environmental sample
  misc_feature (1)..(360): n is a, c, g, or t
atgtcccttatagccgatgccatcaagttatcggccacagaaaaagaactccataatcttgactaccccttcaaaaccatccccgccatgaaaatagcaaaactggctgtttcctctcacttccagtcaaaatacagtggcatcggttccttaatggtagaaatggccatcgaaatcgccggagcctgtaacgaacaacactttgcctgtcgcttcatcaccgttgacgccgacattgaacacaacgaaaccgtcctgaatttctacctaaaaaacggcttcatccccaacgaagaaaccgccaacaaacgccgtaaaacaatcagtatgcgcagggatattttgtttagagctgaatga

SEQ ID NO: 9906 - protein, 119 aa, Unknown
  Obtained from environmental sample
  misc_feature (1)..(119): Xaa is any amino acid
MSLIADAIKLSATEKELHNLDYPFKTIPAMKIAKLAVSSHFQSKYSGIGSLMVEMAIEIAGACNEQHFACRFITVDADIEHNETVLNFYLKNGFIPNEETANKRRKTISMRRDILFRAE

SEQ ID NO: 9907 - DNA, 894 bp, Unknown
  Obtained from environmental sample
  misc_feature (1)..(894): n is a, c, g, or t
atgtttcattacgactcttgctgcctgtacaaggacaataagccgtggttcccgttaatgggcgaaattcattattcacgattacccgccgatgaatggcgcgacgcgctcctgaaaatgaaagcgggcggcattaacatcgcgggttcttattcgttttggattcatcatgaggaaattaaggacgagtgggatttttccggatgccgtaatttaaagcaatttacaaaaacgatcaaagactgcggcctgtatatgtttttgaggattggcccctggtcgcatggggaggcgagaaacggcgggttcccggattggctgcaaaattccggttgtgagctgcgtaccaataatgcccaatatttaaaatatgttgaaaaatattacacgaagctatacgaacaggtacgggggcttttatttaaagacggcggtcccataattggcttacagattgaaaacgaatacgggcactgcggcgggttaaccggcgaaacgggcgaagaacacatgcggacgctgacacggatggccagggaaatcgggtttgatgtcccgctatatacagccaccggctggaacggcgcagttacaggcggcctcttgccggtcatgggcgggtattgcgacgccccgtgngatcggcgcattgttgatatcgagccgtccggcaattacgtgttttctcatgagcgcaatgatctaagtatcgggagagattttagattaggttccgctctgtcatttgacatggcaaagtttccctatataacagcggaattgggcggcgggttgcaggttaccaagcacagacgggttattactttctcgcaggacattgcggcgatgagcgtggtaaaaatgggcagcgccgttaatctgctggggtactaa

SEQ ID NO: 9908 - protein, 297 aa, Unknown
  Obtained from environmental sample
  DOMAIN (8)...(277): Glycosyl hydrolases family 35
  misc_feature (1)..(297): Xaa is any amino acid
MFHYDSCCLYKDNKPWFPLMGEIHYSRLPADEWRDALLKMKAGGINIAGSYSFWIHHEEIKDEWDFSGCRNLKQFTKTIKDCGLYMFLRIGPWSHGEARNGGFPDWLQNSGCELRTNNAQYLKYVEKYYTKLYEQVRGLLFKDGGPIIGLQIENEYGHCGGLTGETGEEHMRTLTRMAREIGFDVPLYTATGWNGAVTGGLLPVMGGYCDAPXDRRIVDIEPSGNYVFSHERNDLSIGRDFRLGSALSFDMAKFPYITAELGGGLQVTKHRRVITFSQDIAAMSVVKMGSAVNLLGY

SEQ ID NO: 9909 - DNA, 618 bp, Unknown
  Obtained from environmental sample
  misc_feature (1)..(618): n is a, c, g, or t
atgaatcaaaagaatattttcaaacaatttttggagcgaaccttcccggggcgcgccgaggcgcttttgggggcgtttgagcgctatcacgcttggttggtatccgaaaacggcaagatcaatctattttcgcgtcagatggataccgacgatatatggacggtgcacttcctggattcgcttttgtcaaccaagtacgtggacttcggcgggcgcggcgtgttggacttcgggactggcggtggactgccggggattccgctggctattgtctttccggacgctgagattacgttgctcgactcaaagaagaagaagatcgcggcggtgagggaggcggcggagacgctgggtcttgggaattgcgaattttcggatcaacggatcgaggatattgccggacggaatagttttgacataatcgtttcccgttctgtcaagattgagccggtatacaaaccgatattgctacggctactcaaacccggcgggaagattgtcctctataagagcaagattcttgatgatgcgcgtcaatttgacaatgtggaaatttttgacgcggaggcggcggaattggggcttggggagcgcaggattgcggtgatagggggatga

SEQ ID NO: 9910 - protein, 205 aa, Unknown
  Obtained from environmental sample
  DOMAIN (75)...(168): Methyltransferase domain
  misc_feature (1)..(205): Xaa is any amino acid
MNQKNIFKQFLERTFPGRAEALLGAFERYHAWLVSENGKINLFSRQMDTDDIWTVHFLDSLLSTKYVDFGGRGVLDFGTGGGLPGIPLAIVFPDAEITLLDSKKKKIAAVREAAETLGLGNCEFSDQRIEDIAGRNSFDIIVSRSVKIEPVYKPILLRLLKPGGKIVLYKSKILDDARQFDNVEIFDAEAAELGLGERRIAVIGG

SEQ ID NO: 9911 - DNA, 870 bp, Unknown
  Obtained from environmental sample
  misc_feature (1)..(870): n is a, c, g, or t
atggccgagccaggttcatttcaggggatcccgggtcttacggaaaaagaagattttgaaacaggaagcatggctgccgccttcggcggcgtaacaacagtcgccgatatgccgaatgtagttccggttacggcaactgcggccgagtacagcaagaaagtaaaaacagcgaaagaaaaatcctatgtggacttcgccgtattcgcacttttaacaaataacaatttaaaagatatggatgggttaaaaaacgccggcgctcttggttttaaagtttttttcggaacatcaacgggcgatgttgccgccccttccgctccaatattgattcagcagatggaaaaaagcgtaaatctcggtatgcgtatcggattccattgtgaaacaagcgatttaaattcttgctttaccgagatttggaaaaagaaaaaagatttaaacgaaggtttcttgctctccaaggcaagacccgtaatatcggaaacattggcaataagaacggttattttttacgccgactacacaaaggcgaatattcacattcatcatattacttcaaacaaaagcgctttacttgtagcgcaggcgaaaaaaagaaaaataaatataaccgctgaaacctgtccgcactacctcttatttgacggagaacaatgcgtccacaaggtatatccgccaatccgcagtatggaacacggcaaagcgatttggaaagcgttgaaaaaaggcgtaattgacatgatagcaagcgatcatgcgccccatactcccgagcaaaaagctctgccgctttggacggctccggcaggtctttgcggtgtggaaactatcgtcccccttatgctgaacgaggtaaataagggcagttaa

SEQ ID NO: 9912 - protein, 289 aa, Unknown
  Obtained from environmental sample
  misc_feature (1)..(289): Xaa is any amino acid
MAEPGSFQGIPGLTEKEDFETGSMAAAFGGVTTVADMPNVVPVTATAAEYSKKVKTAKEKSYVDFAVFALLTNNNLKDMDGLKNAGALGFKVFFGTSTGDVAAPSAPILIQQMEKSVNLGMRIGFHCETSDLNSCFTEIWKKKKDLNEGFLLSKARPVISETLAIRTVIFYADYTKANIHIHHITSNKSALLVAQAKKRKINITAETCPHYLLFDGEQCVHKVYPPIRSMEHGKAIWKALKKGVIDMIASDHAPHTPEQKALPLWTAPAGLCGVETIVPLMLNEVNKGS

SEQ ID NO: 9913 - DNA, 792 bp, Unknown
  Obtained from environmental sample
  misc_feature (1)..(792): n is a, c, g, or t
atgaaattcttaattcatgggagtatagctttaaggttgaattatttaaattctacactagaggcatttatgcctttctaccaatcagagaacactgttatattcaacaataactgcctggaagtattgcagcacattcctgagaattccattgatatgatttttgccgatccgccgtatttattatcaaataacggctttacctgccaaaacggaaaaatggcaagcgtaaacaaaggcaagtgggataagagcagcggttttgaaatggataactcatttcacaatgaatggattttagcctgccgccgcattttaaggccggaaggcacgatttggatttcagggacttatcatagcatttaccaatgcggttaccttttgcaaaaaaataattttcatttcctaaatgatattgcgtggtttaaaccaaacgcttcgcccaatttaagctgccgattctttacagcctcgcatgaaacccttatttgggcgcgtaaagatgaaagggcaaaacacacgtttaattacgaggaaatgaagaacggtcattttccggaagacaaattaaaaaatgaaaacacccaaatgcgatccgtttggtcgataccaacgccaaaagccggtgaaaaagagcgagggaaacatcccacacaaaaaccgctggatttattaaagcgcattgtcattgcttcaacaaaagagaacgatgttgtattggatcctttttgcggcagtggaactacaggcgttgcgtgtaaagatgcaggcagccggtattcatcggaatga

SEQ ID NO: 9914 - protein, 263 aa, Unknown
  Obtained from environmental sample
  DOMAIN (51)...(263): DNA methylase
  misc_feature (1)..(263): Xaa is any amino acid
MKFLIHGSIALRLNYLNSTLEAFMPFYQSENTVIFNNNCLEVLQHIPENSIDMIFADPPYLLSNNGFTCQNGKMASVNKGKWDKSSGFEMDNSFHNEWILACRRILRPEGTIWISGTYHSIYQCGYLLQKNNFHFLNDIAWFKPNASPNLSCRFFTASHETLIWARKDERAKHTFNYEEMKNGHFPEDKLKNENTQMRSVWSIPTPKAGEKERGKHPTQKPLDLLKRIVIASTKENDVVLDPFCGSGTTGVACKDAGSRYSSE

SEQ ID NO: 9915 - DNA, 516 bp, Unknown
  Obtained from environmental sample
  misc_feature (1)..(516): n is a, c, g, or t
gtgaaaaaacagcagttgcagagagaaataagacttactgatttaaggttaagcgaactttactcagctaaaaagaaacttgatgagtcttttaatccatggatcgcggtnttcggtgagacaggattttttacggataatactctaaaaataataaatcttaaaacaggaaaaggaaacattgccggtgtttcgattcctgtatttgaaggcgcggaatttgaaacagcgaaatacgatcttgcgcgtactcccgcatggctggataaggcaattgatgtgataaaacaggctctcttgcttgatcttgaagcgcagattgttgaagaacagcgcagaaggcttgatcgtgagttgcgaataactactcagcgcgtaaatctttttgaaaaagtaaaaatacctgaggcaagaggaaatataaaaaaaattcaggtttaccttggtgatcagcaaaccgcttctgttgtccgcgggaaaatcgccaaaggcggaacagggaaggcggctatatga

SEQ ID NO: 9916 - protein, 171 aa, Unknown
  Obtained from environmental sample
  DOMAIN (1)...(167): ATP synthase subunit D
  misc_feature (1)..(171): Xaa is any amino acid
MKKQQLQREIRLTDLRLSELYSAKKKLDESFNPWIAVFGETGFFTDNTLKIINLKTGKGNIAGVSIPVFEGAEFETAKYDLARTPAWLDKAIDVIKQALLLDLEAQIVEEQRRRLDRELRITTQRVNLFEKVKIPEARGNIKKIQVYLGDQQTASVVRGKIAKGGTGKAAI

SEQ ID NO: 9917 - DNA, 651 bp, Unknown
  Obtained from environmental sample
  misc_feature (1)..(651): n is a, c, g, or t
atggaaaaacatagattaaagcccaataggcaaagcctggacatattgcttcgccgccacggtattgaattgaaaaaggaaactttggataagctatggctctttcacggtttgctcagggaaaataacaaagaccaagatttaactcgccttaacgcctttgaaaccatagtggaacgccattatgcggattgcataataataaattcctttgtcaaaaaatggcaagataaaatgcttgatataggctccggcgcgggttttcccggcataccgcttaaattgacaaaccctcatataaatctgattttatgcgagccgcgccccaatagaattaattttttggaaatggttataaaggaattgaatttgcagggtataagcgtttttgggcataaggttacgagttcctctatgaaggagcctgttggtggcattatctgccgcgcttttggcagcattgcggaaacattgcctcgcttgggcagttgtttaaaaaaaggcggaaaagcctattttatgaaaggccctgccgttaaagatgaactgcgcgattttaaatccgatgaatacaaaatctcagaaacgcatttttacaccatacccagcagcgttcagcaaagagcctttgatattttggagcggttgtaa

SEQ ID NO: 9918 - protein, 216 aa, Unknown
  Obtained from environmental sample
  DOMAIN (28)...(210): Glucose inhibited division protein
  misc_feature (1)..(216): Xaa is any amino acid
MEKHRLKPNRQSLDILLRRHGIELKKETLDKLWLFHGLLRENNKDQDLTRLNAFETIVERHYADCIIINSFVKKWQDKMLDIGSGAGFPGIPLKLTNPHINLILCEPRPNRINFLEMVIKELNLQGISVFGHKVTSSSMKEPVGGIICRAFGSIAETLPRLGSCLKKGGKAYFMKGPAVKDELRDFKSDEYKISETHFYTIPSSVQQRAFDILERL

SEQ ID NO: 9919 - DNA, 720 bp, Unknown
  Obtained from environmental sample
  misc_feature (1)..(720): n is a, c, g, or t
ttgatggccgagggattatatgaagagactgttgaggctgggacggcgggaacaacggtagctgcaacgccggagacgtctgtaataccggcggcgacggtaaaagcggtcgcggcggccgcggcgtcggcgcggaaggggacgtttaccgacagcagaaacgggcaaacgtacaaaacggtaacgataagcggcaagacgtggacggctgagaatatgaatataaagacgggcacatcgtggtgtcacggcgacgcggaatccaactgcaaaaaatacggacggctgtacaattggtcaacggcggctaagatggtctgtccgaccggctggcatctgccgacccgcgacgagtgggcggttttggctaaagccgccggaggttccggcgcttacggaggcggcggcatagccggcaagacgctgaaatcaacgagcggatggagtgatttttgcggccctgacggcgataaaccgtgtaaaagcggcaacggcacggatgatttcgggttcaacgccttgtccggctccagccgtatgcttttcaacgacgaatacaaccgcatcggcgaaaacagcggctggtggacggccaccgaggaagacaacctaagcgcctacggccgccacgcgagctttatcgacggccggttggaagagcaaagcaatcatagggattgcgggctttctgtccggtgtgtacaagatgcggggcagtaa

SEQ ID NO: 9920 - protein, 239 aa, Unknown
  Obtained from environmental sample
  misc_feature (1)..(239): Xaa is any amino acid
MMAEGLYEETVEAGTAGTTVAATPETSVIPAATVKAVAAAAASARKGTFTDSRNGQTYKTVTISGKTWTAENMNIKTGTSWCHGDAESNCKKYGRLYNWSTAAKMVCPTGWHLPTRDEWAVLAKAAGGSGAYGGGGIAGKTLKSTSGWSDFCGPDGDKPCKSGNGTDDFGFNALSGSSRMLFNDEYNRIGENSGWWTATEEDNLSAYGRHASFIDGRLEEQSNHRDCGLSVRCVQDAGQ

SEQ ID NO: 9921 - DNA, 582 bp, Unknown
  Obtained from environmental sample
  misc_feature (1)..(582): n is a, c, g, or t
ttgggcacttcaggcacgggcgagctgcgccagaaagaggcgctggaagccgcagtggtactgggtgttgccaggcacttcttggacctgcccgacgccaggttcacggaaggcgagccggagcgtctagctctgatgaaagcaatccgcgaactgcggccaacgattgtaatcctccccgcgtttgaggaccaccaccccgaccaccgcagggggcaccgacttgggcgcgaggccgtctattacgccggcctgaagaactacccctgcccccttgacccgtggagaccgccgtgcgtggcctgggtcgggggcgtcaacccagtcgagccgccggacttggtctttgacgtgagcgaagtatggcaacagcgcatggacgcattcgacgcctttggcagccagttcacaacggagccgggcaagccgccgactcgcatagcgaacccggcgttcagggcgggcatagtgggaagggccatgcactggggcagcctgatactgcgtccttacgccgagggcctgtggtgcgaaaagcctatacccgaagacctgctgagactgtggggctctctgtgctga

SEQ ID NO: 9922 - protein, 193 aa, Unknown
  Obtained from environmental sample
  DOMAIN (3)...(80): GlcNAc-PI de-N-acetylase
  misc_feature (1)..(193): Xaa is any amino acid
MGTSGTGELRQKEALEAAVVLGVARHFLDLPDARFTEGEPERLALMKAIRELRPTIVILPAFEDHHPDHRRGHRLGREAVYYAGLKNYPCPLDPWRPPCVAWVGGVNPVEPPDLVFDVSEVWQQRMDAFDAFGSQFTTEPGKPPTRIANPAFRAGIVGRAMHWGSLILRPYAEGLWCEKPIPEDLLRLWGSLC

SEQ ID NO: 9923 - DNA, 867 bp, Unknown
  Obtained from environmental sample
  misc_feature (1)..(867): n is a, c, g, or t
atggaaacagccctttctttttaccgttattcgctcggcatcacccccccaggggtntggcttcccgaattgggctggtcaaaagaattggacccgttcctgcgctcatataatttcaattacaccattgttgacagccatggttttgtactgggaaatccgccgccctcacggggcagtttttttcccgtgagaacaccgcagaacatcatggtgctggcccgtgattttttcgcctgcgccgatataaacagaatgtcccgggaagggccgtatcgtgacaacaaccgggatattggttatgaacttcccatcgcaatgctcagcccctttatcgcccaaaacggggcacgatgccagacagggtataaatactggcaggcgtcgcctaactcctctgggggcgaagacatcccctacgatccggctgcggcgcagaaagccgtggaggaacacgcgaggattttccttgaaaattgctgcagcaggcttgaatcggcccagcgttttatggaggaaatacccctttctctctgcgccttcaatgcggacagtttcggacgccattggcatgaagggccccaatttttggaaaccctgttccggcttgcggcggactaccgggagcttcagtttatgacccctacggagtacctgtaccggcagcccatttccgcgtttgaaatatcacttcccgaatattcttcctggggcgataacggttacgcccaggtctggctggattcctccaatgactggatttaccgccatctcagcttttccatcaaccggatgattgagctggccgaccggttttccggcagttcaagccttaaagagagaaccatgaatcaagccgccctgtga

SEQ ID NO: 9924 - protein, 288 aa, Unknown
  Obtained from environmental sample
  misc_feature (1)..(288): Xaa is any amino acid
METALSFYRYSLGITPPGVWLPELGWSKELDPFLRSYNFNYTIVDSHGFVLGNPPPSRGSFFPVRTPQNIMVLARDFFACADINRMSREGPYRDNNRDIGYELPIAMLSPFIAQNGARCQTGYKYWQASPNSSGGEDIPYDPAAAQKAVEEHARIFLENCCSRLESAQRFMEEIPLSLCAFNADSFGRHWHEGPQFLETLFRLAADYRELQFMTPTEYLYRQPISAFEISLPEYSSWGDNGYAQVWLDSSNDWIYRHLSFSINRMIELADRFSGSSSLKERTMNQAAL

SEQ ID NO: 9925 - DNA, 585 bp, Unknown
  Obtained from environmental sample
  misc_feature (1)..(585): n is a, c, g, or t
ttgtgcggcaatttagaaaaaagcgcggtggtaagaaaaaacgccctgccgcctttatcgtggattgtgtcccttgatacttccgatacccaacgctacgcagagttgcatggcaacggttttgccgaggcagaaactttagttaaaaaacttttttccctgtttccaaacgactgttatgtgcaagcggtgcgcgtaaaaggagcggaggacgatactgaaaaattctaccgttactggaaaactgcctctccaaaaaatgaaaaaaatataattattcaaaaatatgacgatttctgcggcgttcttgacaaaaaacaggcttccgatatttcgcccgttatacgacaatcatgctggcatattatgagggacatgcctgtcttaataaatggggacgttcccctgtgcagggaaaatctttcggtattaaaaggggaaaaaaaggatatacttggaaacatatttacggaacctcttgaagacatctggcaaaaaggggataagtattacaaggaacaatgcatgaaaaaatacgtgggactttgcgtggagtgtgatgaatactatacctacaatttttaa

SEQ ID NO: 9926 - protein, 194 aa, Unknown
  Obtained from environmental sample
  misc_feature (1)..(194): Xaa is any amino acid
MCGNLEKSAVVRKNALPPLSWIVSLDTSDTQRYAELHGNGFAEAETLVKKLFSLFPNDCYVQAVRVKGAEDDTEKFYRYWKTASPKNEKNIIIQKYDDFCGVLDKKQASDISPVIRQSCWHIMRDMPVLINGDVPLCRENLSVLKGEKKDILGNIFTEPLEDIWQKGDKYYKEQCMKKYVGLCVECDEYYTYNF

SEQ ID NO: 9927 - DNA, 972 bp, Unknown
  Obtained from environmental sample
  misc_feature (1)..(972): n is a, c, g, or t
ttggacggactgacggcagagcgggacaggggaattaccatagacgtcgcctaccgctactttacaacggagaaacgcagcttcatcgtcgccgacactccggggcacgaggagtacacccgcaatatggcggtgggcgcgtcgttcgcggacttggcggtgatcttggttgacgccgctcgcggagtttcgccgcaaacgctccgccacgccagaatttgctcgctgatgggcatccgcagctttgtgttcgccgtcaacaagatggatttggcgggctatagccaagagaggttcaacgctatatcgcgagagattgaaaaacttatcggtgatttgagacttgccgatgcggtcgtcatacccgtctccgccacagaaggcgacaatataaccgtccgtagcggtaatatgccttggtatgacggtaaagctctgctttcgcatttggaatcggcggatatcggcggcggtcagatagaggccgggttctatatgccggtgcagcgcgtctgccgccccgaccacaccttcagaggttttcaagggcagattgaatcgggaacggtctcgaccggcgatgagatttcagctttgccgtcgggtgaaacggccgtcgtaaaagctgtttatattaccgataaacaggcgaactccgctactgcgggacagcccgtgaccattcggcttgatagggaggtggatgtttccagaggctgcgtgctcgcacgggaggcagcgttgaaaacggccaaagagtttgaggcgacgttattgtggatggacaatcaaaaacttgccgtcggcagggagtattgggttaaagtcggcaccaaattattgccggccgccgtctcgaaaatcaaacataaggttgacatcaataccggagcgttaatggctgtcgatacggcggtaagaacgagattatcagatgctcgtgccgatctgatacatggnnnnnnnnaatag

SEQ ID NO: 9928 - protein, 323 aa, Unknown
  Obtained from environmental sample
  DOMAIN (178)...(243): Elongation factor Tu domain 2
  misc_feature (1)..(323): Xaa is any amino acid
MDGLTAERDRGITIDVAYRYFTTEKRSFIVADTPGHEEYTRNMAVGASFADLAVILVDAARGVSPQTLRHARICSLMGIRSFVFAVNKMDLAGYSQERFNAISREIEKLIGDLRLADAVVIPVSATEGDNITVRSGNMPWYDGKALLSHLESADIGGGQIEAGFYMPVQRVCRPDHTFRGFQGQIESGTVSTGDEISALPSGETAVVKAVYITDKQANSATAGQPVTIRLDREVDVSRGCVLAREAALKTAKEFEATLLWMDNQKLAVGREYWVKVGTKLLPAAVSKIKHKVDINTGALMAVDTAVRTRLSDARADLIHGXXX

SEQ ID NO: 9929 - DNA, 744 bp, Unknown
  Obtained from environmental sample
  misc_feature (1)..(744): n is a, c, g, or t
ttggaagccgcttttgaaaagagccctcttttcacaggcaaaattcaagggcttggcccacgctactgcccaagcatagaagacaaaataaagcgttttacagacaaagaaagccaccaattattcttagaacccgaaacaaaagaggcaaaaagaatttatataaacgggttcagctcaagcctgccagaagaagcacaaatacaagcaatgcgcacaataccagggctaaaaaatgcaagtgttttgcaaattggctatgccgttgaatacgatgcaataaaggctacggaactccacccaacccttgaatgcaagcagcactgcgggctttattttgcagggcaggtatgtggaacaagcggctacgaagaagctgccgcacagggcataatagctggcataaatgctgccttgaaaataaagggcaaagaaccctttatactttcaagggcagagagctatattggggttttaatagacgatataacgggaatggaatggagtgaaccctaccgaatgtttacaagccgcgcagaatatcgtttatttttaagagcagacaattcagagcaaaggctctgtgaaaaagcacacaaggctggaatgttgagcggggcagagtggaaaaattacgaggaagaaaggagcagggtagaggaggctaaaaaatttttgagcgagaattctggagagccagagcaaatcgcacctatttggcagaaagcggtcaagcgcaggtaa

SEQ ID NO: 9930 - protein, 247 aa, Unknown
  Obtained from environmental sample
  DOMAIN (1)...(145): Glucose inhibited division protein A
  misc_feature (1)..(247): Xaa is any amino acid
MEAAFEKSPLFTGKIQGLGPRYCPSIEDKIKRFTDKESHQLFLEPETKEAKRIYINGFSSSLPEEAQIQAMRTIPGLKNASVLQIGYAVEYDAIKATELHPTLECKQHCGLYFAGQVCGTSGYEEAAAQGIIAGINAALKIKGKEPFILSRAESYIGVLIDDITGMEWSEPYRMFTSRAEYRLFLRADNSEQRLCEKAHKAGMLSGAEWKNYEEERSRVEEAKKFLSENSGEPEQIAPIWQKAVKRR

SEQ ID NO: 9931 - DNA, 888 bp, Unknown
  Obtained from environmental sample
  misc_feature (1)..(888): n is a, c, g, or t
gtgagtgaacaattgaactccaccgtatctgtgcaaaaagatataaatctgagggaatggaaaaaaccatcactggagaacctcgcagactcccttgggaatttgaatccaaaccaagacgctgttgtattggttggcgtagagctaaatggttccactaaaaatccgcaaaaattatggaaagatatgactaaatatatcgatagcaacagcacggctccagtatattcattttgggatattggaatacaaaacggtgttattggcggaaatgtaattcttgcacctttagtaggaaaaaatataggattaattgccgaggcaattttggtggggaacgatacttataattctggatttagaagaagctcaaacatgcctatagttgacgaccaagcagccacaaacagaaaattgaaactgtataagcttcccccagaaaccatcagacttaacaaacaggaatcttggataatcagcaagtatcagcagtatgtatatagtatgaaaaacgcaattattgcagaacttgtgattatattgcttttaggattttccttttacacatatttcaaatattcaaacagaaaactattgcacgaaaaacgtgccgttgaaaaagcgagcaaggcaaagagtttgtttttggctaatatgagccacgaaataagaaatccccttaattcaatgcttggattttcagaattgcttttgagtaaaagcacaaacttaaacgatgagcaaagggaatggtgcaacaatatagagatatcctcttaccatttgcgcgacacatttaacaatatacttgatttttcaaaaattgaagccggaaatcttaaaatagaagaggaatgggttgatatattctcgctatgcgacgattga

SEQ ID NO: 9932 - protein, 295 aa, Unknown
  Obtained from environmental sample
  DOMAIN (211)...(278): His Kinase A (phosphoacceptor) domain
  misc_feature (1)..(295): Xaa is any amino acid
MSEQLNSTVSVQKDINLREWKKPSLENLADSLGNLNPNQDAVVLVGVELNGSTKNPQKLWKDMTKYIDSNSTAPVYSFWDIGIQNGVIGGNVILAPLVGKNIGLIAEAILVGNDTYNSGFRRSSNMPIVDDQAATNRKLKLYKLPPETIRLNKQESWIISKYQQYVYSMKNAIIAELVIILLLGFSFYTYFKYSNRKLLHEKRAVEKASKAKSLFLANMSHEIRNPLNSMLGFSELLLSKSTNLNDEQREWCNNIEISSYHLRDTFNNILDFSKIEAGNLKIEEEWVDIFSLCDD

SEQ ID NO: 9933 - DNA, 714 bp, Unknown
  Obtained from environmental sample
  misc_feature (1)..(714): n is a, c, g, or t
gtgtcgacaggatcgacagggtgtacgatcctcgcagaattgcgcgcttttgaggatgaactggaaaatttgttgggaatagacatccccttttccatagttattaccattgaaaacctgggcaagatcactgaccttattgaaggggtggaactattcatcccttcgccgagtgacgaattccacaacgagcgcataatgtttccttcgggggtgtgctatctggatggcgataaagccagggtttatatcacctacgagcttccggaagaaagcaatgaaatggccgtttaccgccgccagcgcttttttgtaggcttaatcaagcgcctgggagcgcaaaacagccttttaaaaaccccccagatctctggcgtgtttaattcccttctgaaaaccggactcaaggcgcgggcgcaaaacgcgctttttgagaaattagccgggatagacaccgacaggattaacattcaatccgtaagcggaaacgtcagggaagtttcggggcagcaattgatatttccgcattgggacggaaattggataaaagaaattgtccgccagacccttgcgagcctggttcagccttcaaatgagacgatgggcgacaggatctttactgtggagatccttattgggacaaccgttgccggcctcgcagggcgaacagggaaactctttggagggtttgggctacgaggtaatttcccatag

SEQ ID NO: 9934 - protein, 237 aa, Unknown
  Obtained from environmental sample
  misc_feature (1)..(237): Xaa is any amino acid
MSTGSTGCTILAELRAFEDELENLLGIDIPFSIVITIENLGKITDLIEGVELFIPSPSDEFHNERIMFPSGVCYLDGDKARVYITYELPEESNEMAVYRRQRFFVGLIKRLGAQNSLLKTPQISGVFNSLLKTGLKARAQNALFEKLAGIDTDRINIQSVSGNVREVSGQQLIFPHWDGNWIKEIVRQTLASLVQPSNETMGDRIFTVEILIGTTVAGLAGRTGKLFGGFGLRGNFP

SEQ ID NO: 9935 - DNA, 894 bp, Unknown
  Obtained from environmental sample
  misc_feature (1)..(894): n is a, c, g, or t
ttgatgcgttatgtgcaaggacctgacttcccaaccggcggtgtaattttcggaaggcacggtatccgcgaggcatataaaacaggccgcggcaaattactggtgcggggtaaatttaacatagaaacaacaaagcagggcaaagaaaaaatagtttttacggaaattccctacaacgtaaacaaagctttgctgctggaaaaaatcggacagctcatgcgggataaggttattgacagcatcgcgaatgcaaacgatgagtctgaccgtgacggtatccgcatagtaatagaattaaaaaaaggcgcgattgtcaaacttgtgcttaatcagcttttttcaaacacgcagctgcaaatttcatttagtatcattaatctggcgctggtgggaggtaaaccccagtgtctgacattgaaagaactaatatatcactttgttgaacaccgtgtcgaagtggtaacccgccgtacccgctacgaattacgcaaggctgaagaacgcgcccacattctggaagggcttgtgatcgctcttgccaatattgatgaagttatcgcagttatcaaaaaaagccgtgatgtggcaacagcacgactcaagctgcaggaacgtttcctgctttccgaggcgcagtcagaggcaattgtcgaaatgcggcttggccgccttaccagtcttgaaatcgaaaagatttcaacagaacttgaagaattaaaagtacaaatcgcttattataaatctctgttagctgatgaaaagaaactgcgcggtgtaataaagagcgaaacanaagaaattgccgaanaatacggcgaacaacggcgtacccgaattattgcccggagagtggaaaacatcaacattgaggacatgataaaaaaagaagaatga

SEQ ID NO: 9936 - protein, 297 aa, Unknown
  Obtained from environmental sample
  DOMAIN (1)...(272): DNA gyrase/topoisomerase IV, subunit A
  misc_feature (1)..(297): Xaa is any amino acid
MMRYVQGPDFPTGGVIFGRHGIREAYKTGRGKLLVRGKFNIETTKQGKEKIVFTEIPYNVNKALLLEKIGQLMRDKVIDSIANANDESDRDGIRIVIELKKGAIVKLVLNQLFSNTQLQISFSIINLALVGGKPQCLTLKELIYHFVEHRVEVVTRRTRYELRKAEERAHILEGLVIALANIDEVIAVIKKSRDVATARLKLQERFLLSEAQSEAIVEMRLGRLTSLEIEKISTELEELKVQIAYYKSLLADEKKLRGVIKSETXEIAEXYGEQRRTRIIARRVENINIEDMIKKEE

SEQ ID NO: 9937 - DNA, 624 bp, Unknown
  Obtained from environmental sample
  misc_feature (1)..(624): n is a, c, g, or t
atgaatgtcaaccctatgcgggagagacactgtgaaaaaaatactgacctttcgttatacgataatgatgtttcaggcctgaaagcgggagacattgtatatctttcagggctcctcatacnaggaagagatgaagtttaccgcagggttacggaagaaaaaatggcgctgcctttagacataaaaggaatggcaaattaccacgcgggaccgattgtcagaaaaaaagacaatgaatgggagcttgtttcgattgggccgacttcttcaatccgtttggaaaaatggacagaggactttatcgaaaaaacaggaataaaagtgatgattggcaagggcggaatgggagaaaaaaccgtatcagcctgccgtaaatacaaggtaattcactgcgtgtatcccggcggctgcgcagtacttggagcaagccaaatcgaaagaattgaaaatgtttattggcgggaacttggaatggcggaatgtctttgggtaatgaaaacatgtgaattcggcccgttaatagtcagtattgatgcttacggaaacagccttttttctgagaattcagcatattacgaagaatttaaacgtaagattttatcagattccccctttttttcttaa

SEQ ID NO: 9938 - protein, 207 aa, Unknown
  Obtained from environmental sample
  DOMAIN (1)...(191): Fumarase C-terminus
  misc_feature (1)..(207): Xaa is any amino acid
MNVNPMRERHCEKNTDLSLYDNDVSGLKAGDIVYLSGLLIXGRDEVYRRVTEEKMALPLDIKGMANYHAGPIVRKKDNEWELVSIGPTSSIRLEKWTEDFIEKTGIKVMIGKGGMGEKTVSACRKYKVIHCVYPGGCAVLGASQIERIENVYWRELGMAECLWVMKTCEFGPLIVSIDAYGNSLFSENSAYYEEFKRKILSDSPFFS

SEQ ID NO: 9939 - DNA, 918 bp, Unknown
  Obtained from environmental sample
  misc_feature (1)..(918): n is a, c, g, or t
atggccgagtattccaagggacgcgcggcaaaaatcagcagagaacttgaagcaattgcaggcgaaattaaatccggcaaactgactatagataatcaagcagaggatattcactcatttttagagactgctcttacaaagcggcttggcaatacgggaaaaatggttcatgcgggacgcagccgcaatgatcaggtagctgtggattttcgtctgtatctgaagcgcactatccccaaattactgaaagagctgtcagcgtcaatcaacaccatgcttgacgttgcacagttgcacataacaagtttaatgcccggttatacccaccttcaaagggcgcagcctgtaacgcttgggtttcacataacagcatggtgcgccgctcttgaaagggattattcccgttttaatgacgctcttttaaggctggatgaatgtccgcttgggagcggcgctcttgccggttccaccctgccgcttgatcgcagggcagtttctgttgctttggacttcaagcgcccgtcccttaactcaatggacgcgatagcggaccgggattttgttttggaattgtcaagcgcctgcgctattacaatggttcacctttcccgtttctgcgaagatgtggtactttggtcaagcgaagagtttaaatttatcgagctttcggaatcatggagcacgggatcttcgataatgcctcagaaaaaaaatcctgattttgcggaactaattcgcggcaaatcgggaagggccgtcggcaatcttgtaactctttttacaatgttaaaagggctaccctattcgtataacaaggatttgcangaagataaggaaagcctttttgacagtatcaaaactatttcaatttgcttacgaatgttttcagggatgataaaaacgctaatttcaccttaa

SEQ ID NO: 9940 - protein, 305 aa, Unknown
  Obtained from environmental sample
  DOMAIN (2)...(254): Lyase
  misc_feature (1)..(305): Xaa is any amino acid
MAEYSKGRAAKISRELEAIAGEIKSGKLTIDNQAEDIHSFLETALTKRLGNTGKMVHAGRSRNDQVAVDFRLYLKRTIPKLLKELSASINTMLDVAQLHITSLMPGYTHLQRAQPVTLGFHITAWCAALERDYSRFNDALLRLDECPLGSGALAGSTLPLDRRAVSVALDFKRPSLNSMDAIADRDFVLELSSACAITMVHLSRFCEDVVLWSSEEFKFIELSESWSTGSSIMPQKKNPDFAELIRGKSGRAVGNLVTLFTMLKGLPYSYNKDLXEDKESLFDSIKTISICLRMFSGMIKTLISP

SEQ ID NO: 9941 - DNA, 540 bp, Unknown
  Obtained from environmental sample
  misc_feature (1)..(540): n is a, c, g, or t
atggaatcatatttaaagttactggtatttgttatcgccggcctcttgttgctctggttctttttttccctgcatgaaaagcatgtgaagaaaaggaatcaggcaaatggagatatgcctgtggattttgatattaacctcccgggcccaggctccggtagcgcgcccggttccaacggcgtatctggctccaatggcgcgccgggcaccggcgcgatacctccgaggaaacagtacaagggcacggaaaactccggcggcctcatgatttgccccatttgtttatttaagatggataacggcgacatgataaaaaccacggcattccctcccctgacaccggacagcaaggacaggctgatgcacatacacggctgcgtttactgcaaagacgggaagagggagagaatatgccctgtatgcggtaaaaccatcagcgtaaaagatttcctgatagcgcgtatattcgatcgctcaatccggcgttcccatgtccatgtccttggctgtacccaatgcagaccgctaaagacaatgtag

SEQ ID NO: 9942 - protein, 179 aa, Unknown
  Obtained from environmental sample
  misc_feature (1)..(179): Xaa is any amino acid
MESYLKLLVFVIAGLLLLWFFFSLHEKHVKKRNQANGDMPVDFDINLPGPGSGSAPGSNGVSGSNGAPGTGAIPPRKQYKGTENSGGLMICPICLFKMDNGDMIKTTAFPPLTPDSKDRLMHIHGCVYCKDGKRERICPVCGKTISVKDFLIARIFDRSIRRSHVHVLGCTQCRPLKTM

SEQ ID NO: 9943 - DNA, 489 bp, Unknown
  Obtained from environmental sample
  misc_feature (1)..(489): n is a, c, g, or t
atggataacagcagatttataataggcgtcgatcttgacggcgtagtaggcgacttttacggagcgatacgaaaaattgccgccgagtggctaaacaaaccattggaagcccttacgcctgaagtttcctacggcctgcaggaatggggaattgacgagttcggcggctacgacagactgcaccgttttgccgtaacgcagaggaatattttccgcgacatgttacctatagaaaacgcgccagttattctgcgaaaactttcaaggcagaacatacgcatccgtatcataacgcaccggctcttccttaaatattcgcaccgcacttcaatccggcaaaccgtagactggctggacaactacgacattccctactgggacatctgtttcatgaacgataaaggcgccgtcggcgctcatatctacattgacgacgctcccgaaaatattatcggccttcgcaaacaaggatgtaaaaccatcgattaa

SEQ ID NO: 9944 - protein, 162 aa, Unknown
  Obtained from environmental sample
  misc_feature (1)..(162): Xaa is any amino acid
MDNSRFIIGVDLDGVVGDFYGAIRKIAAEWLNKPLEALTPEVSYGLQEWGIDEFGGYDRLHRFAVTQRNIFRDMLPIENAPVILRKLSRQNIRIRIITHRLFLKYSHRTSIRQTVDWLDNYDIPYWDICFMNDKGAVGAHIYIDDAPENIIGLRKQGCKTID

SEQ ID NO: 9945 - DNA, 459 bp, Unknown
  Obtained from environmental sample
  misc_feature (1)..(459): n is a, c, g, or t
ttgaaaaaacaaaacttgccaccgcttgtaaaagagatgatagctttccgcaagaggcaccccggctttatgcgccctgaattttttaccggccgcggcggggattacaaaggcatccccgatataagctggtttaccgaaaaaggagaaagcccggtttgggacaagatcggctattaccttgcattacatttgtacggcagtaaagctgaaatattcggcgaccgcgatgaaaatgatttttaccttatgtttaacgcaagccttgaaacacaggggtttaaactggcggaaccgccgcctaaaaaagaatggctgcgcgttatagatacgggacttcactcgccgaatgatattttgcctccgggaagcgaaaaaatacttccgtcccagcatgtgtatccggttaaagcccgcagtatggcaatattaatttcaaaggatataattcatggataa

SEQ ID NO: 9946 - protein, 152 aa, Unknown
  Obtained from environmental sample
  misc_feature (1)..(152): Xaa is any amino acid
MKKQNLPPLVKEMIAFRKRHPGFMRPEFFTGRGGDYKGIPDISWFTEKGESPVWDKIGYYLALHLYGSKAEIFGDRDENDFYLMFNASLETQGFKLAEPPPKKEWLRVIDTGLHSPNDILPPGSEKILPSQHVYPVKARSMAILISKDIIHG

SEQ ID NO: 9947 - DNA, 732 bp, Unknown
  Obtained from environmental sample
  misc_feature (1)..(732): n is a, c, g, or t
atgggaagcgaaataataagcgaaggcgggcatattgataaatttatcggagacgcgattatggctgtattcggagcattcgcaagcatggagaattccgctgaaaactcaatacgcgccgccataaaaatgcttgccgcccttgaagagatgaattcatcaaatatcaatatttcgcataataaaatagaaatcggaattggaattaactgcggcgaatgtattttgggcaacatcggctttcagaacaaaatggattacaccataataggtgatacagttaatctggcttcaagaatcgaaagtcttacaaaaaaatactgccacccgcttatagtatcagagtatgtatatgaagcgacaaaggataaatttattcaccgccaaatagacaatgtccgcgtaaaggggaaaataaaacctgccggtatatacgctgtttatacaggatttttaggcgtaaaaggagagagatataagtatgagaagagcgccgatttaccttccgtgccttctctgattgttgacagggagacgcttgttaattataacaaggggcttcgtactttttatttgcgtgaatggaaactggcgcgtgaatattttgaaaaatctcttgaaactagcaatcatgattctttatcaaaactttatcttgagcgctcaattgaatttgagcgtaatccgcctcctgataattgggacggcgttgttacacttgaagtaaaataa

SEQ ID NO: 9948 - protein, 243 aa, Unknown
  Obtained from environmental sample
  DOMAIN (3)...(149): Adenylate and Guanylate cyclase catalytic domain
  misc_feature (1)..(243): Xaa is any amino acid
MGSEIISEGGHIDKFIGDAIMAVFGAFASMENSAENSIRAAIKMLAALEEMNSSNINISHNKIEIGIGINCGECILGNIGFQNKMDYTIIGDTVNLASRIESLTKKYCHPLIVSEYVYEATKDKFIHRQIDNVRVKGKIKPAGIYAVYTGFLGVKGERYKYEKSADLPSVPSLIVDRETLVNYNKGLRTFYLREWKLAREYFEKSLETSNHDSLSKLYLERSIEFERNPPPDNWDGVVTLEVK

SEQ ID NO: 9949 - DNA, 732 bp, Unknown
  Obtained from environmental sample
  misc_feature (1)..(732): n is a, c, g, or t
atgggattgatatttgtcggtgattttatcgtattaaaaaatatcgaaaaaaagtatcgccgggaaaactccacagcggatacaaaggaaagttcggatgtcattcttaaagagggttatcctttattatntccatctcttgtcgtaggcgcggccctgttaattgtttttgtcgtaatgggattaatgcccgtaaccgtggtttgtttcgtgcttgggtgcgtcctaataatttttgccttattttgcatgtattttttcagagacccaaaaattgagatcacgcagggagatgggttaattctctcaccttgtaacggaacggttatggaagtgactgaagaagaagggcaaaaaattatccgcgtgtttctttctatttttagcgtccacttgcagcgctcgcccgtaagcgggactgtcgttgacgtgacgcacaaggacggaaaattttacgccgcctggaacccgctggcgcaatcacaaaatgagcagaatattatcactatcgggagcgaagacggcgtatatgtggtgcgccaaatcgcaggactgctggcaaggcggtgcgtttcgtgggttaaaaagggcgacactctgaaaattggggataaaatcggaatgattaaattcagttcccaggttgatctgcacctgccaaaaacggcggtgataaatcttaagcccggagataaaaccaaagcgggcattacggtaatggggaggaaataa

SEQ ID NO: 9950 - protein, 243 aa, Unknown
  Obtained from environmental sample
  DOMAIN (79)...(241): Phosphatidylserine decarboxylase
  misc_feature (1)..(243): Xaa is any amino acid
MGLIFVGDFIVLKNIEKKYRRENSTADTKESSDVILKEGYPLLXPSLVVGAALLIVFVVMGLMPVTVVCFVLGCVLIIFALFCMYFFRDPKIEITQGDGLILSPCNGTVMEVTEEEGQKIIRVFLSIFSVHLQRSPVSGTVVDVTHKDGKFYAAWNPLAQSQNEQNIITIGSEDGVYVVRQIAGLLARRCVSWVKKGDTLKIGDKIGMIKFSSQVDLHLPKTAVINLKPGDKTKAGITVMGRK

SEQ ID NO: 9951 - DNA, 498 bp, Unknown
  Obtained from environmental sample
  misc_feature (1)..(498): n is a, c, g, or t
ttgagcattttcatccccngccttataatgaacatgatcgacgatccgaaagacgcgaatgtggccatgaagatccgccgttcctgtgaagaatacctcgatttgagaattgaacacctcggcataatttaccgggattcagtccaggataccgcccttgcttcgagactgccggttgtgctttataagccccaatcggttttatcccaggctatttaccggatagcggataaaatacttcaaaccgaagaagaaaccttcggccttagcgataaagaaatcgaggatagctttcaggaagcaggaatggaagcggaagttgactttgaaacaaagatggattatgtggaggaccttttacattcaggagccctttcccagggtgatctgattgagaccgtaaaatcccaacagtttgaaatttcaaaattgaaaaaagaaaacaacttcttgaagtttaagctttcaaaagcttttgaaaaggggtttgagtcataa

SEQ ID NO: 9952 - protein, 165 aa, Unknown
  Obtained from environmental sample
  misc_feature (1)..(165): Xaa is any amino acid
MSIFIPXLIMNMIDDPKDANVAMKIRRSCEEYLDLRIEHLGIIYRDSVQDTALASRLPVVLYKPQSVLSQAIYRIADKILQTEEETFGLSDKEIEDSFQEAGMEAEVDFETKMDYVEDLLHSGALSQGDLIETVKSQQFEISKLKKENNFLKFKLSKAFEKGFES

SEQ ID NO: 9953 - DNA, 960 bp, Unknown
  Obtained from environmental sample
  misc_feature (1)..(960): n is a, c, g, or t
atgggcctgaaaaagcttgctcccatacccggagcagggagcattcgggacatatgtcgcgcgcgtgaaagtcccatagcccggggagattccgccgtaaagtggcttgttccgcttgatttttcaggcgctgataataccgggaacaaaacagtacaggtaaaagccggagacccaattgcgctcttatccgaagccatgccctcaggcaggtcgggttttgatgtgacgggaagggaaatcccgattgaaaaggctgaggccggttccgttggacatgataaatcaatcagggagttgccgcatggaaaggggaagcgtctcctggccgccagatcgggggaacttggctttgacgggaaaacgctgaagatccttcccaccaaaaccatacagggggatgtgaatcaggaaactgggaaaatcaagttttcaggcgaggtaaagatcaacgggaacgtgctttccggcggcatggtagtcggcggctcccacgtcactgtggacgggtatgccgaagaggcgatgatttcctcaggcggcaaggccacggttacaatgggctttaaaggcggcggcaagggaattctcaaggccagggccggcatttccgccgcgtttattgaacgggctctcgcgtcggcgttaggagacgtacagcttaaaaaaggctcaattctttcaagcataaaaacaaacgggaaactatctattacttctgaaaacgggaagctctcaggcgggatctgccaggcaaggctggggattgacgccgccgatattggctcggaaaaaggccttcgcaccgaaatttcctttggacaggattacttcctcaaagaacagataggggactgtgaggatgaaactgttaaaataaaaaacgccctgcagagctggaagaaaagatcagtctgctccgcgacaaaaaacaaagcctctgagactcggccgatctga

SEQ ID NO: 9954 - protein, 319 aa, Unknown
  Obtained from environmental sample
  DOMAIN (1)...(317): Protein of unknown function (DUF342)
  misc_feature (1)..(319): Xaa is any amino acid
MGLKKLAPIPGAGSIRDICRARESPIARGDSAVKWLVPLDFSGADNTGNKTVQVKAGDPIALLSEAMPSGRSGFDVTGREIPIEKAEAGSVGHDKSIRELPHGKGKRLLAARSGELGFDGKTLKILPTKTIQGDVNQETGKIKFSGEVKINGNVLSGGMVVGGSHVTVDGYAEEAMISSGGKATVTMGFKGGGKGILKARAGISAAFIERALASALGDVQLKKGSILSSIKTNGKLSITSENGKLSGGICQARLGIDAADIGSEKGLRTEISFGQDYFLKEQIGDCEDETVKIKNALQSWKKRSVCSATKNKASETRPI

SEQ ID NO: 9955 - DNA, 615 bp, Unknown
  Obtained from environmental sample
  misc_feature (1)..(615): n is a, c, g, or t
atggcgggacagccgccgggggcgaagccgtggccgcgctcttcggctttgaactcagtggcgggaattccccttcggggccggctattacctggaacacggcctggttctgcctccttcagccttggacgatatgggagaaaccgaagccctgcttctgggggccgtgggcgacccccgggtcaaacccggccccttggaacaggaactcctgttggccctgcgcttccatttcgaccaatacctgaacctccgcccggcccggagcttccctggagcgcccactccgctgcccctgccggacggccgccgcctggacgcggtggtggtccgggaaaacaccgaggatttttacatgggtctggggggccggggccagggcaggctggaaaccgacctcagaacccgacgcggcctctacgggctgaccggccgcctgaccctgagcctggacccggcggccgaagccgccgcctccatcggcctcttgacccggccgggagtggcccgcataacccgccgggccggggaactggcccggcgccggggagaaagaaatctgacagtggccaccaaggccaacgccgtgccccaactctacggcttctggaatga

SEQ ID NO: 9956 - protein, 204 aa, Unknown
  Obtained from environmental sample
  misc_feature (1)..(204): Xaa is any amino acid
MAGQPPGAKPWPRSSALNSVAGIPLRGRLLPGTRPGSASFSLGRYGRNRSPASGGRGRPPGQTRPLGTGTPVGPALPFRPIPEPPPGPELPWSAHSAAPAGRPPPGRGGGPGKHRGFLHGSGGPGPGQAGNRPQNPTRPLRADRPPDPEPGPGGRSRRLHRPLDPAGSGPHNPPGRGTGPAPGRKKSDSGHQGQRRAPTLRLLE

SEQ ID NO: 9957 - DNA, 558 bp, Unknown
  Obtained from environmental sample
  misc_feature (1)..(558): n is a, c, g, or t
ttgatagagaaccagataataaacgaaatactctcctcagctccggcatttttattaatagcggtcagagctcttgccatgatcgaagtcgctcctcttttcaattccgaatccgttcctcaagtggtaaaaatctctctggccggattcgcggcatatactgcgttttccatggcactggtaagggactgggttatcgcgcctttcggactgagttttgttttccttgttatcggggaagccctcatcggaattattattggtttttttattgcgcttatatttgccgccttttctacggcaggtcagtttttctcccttcaaatgggttttggcgcttcagaaacttttgatcccctgtcgcagattgaaaatccccttatgggccaatacctcaacaccgttgccatgctgatattcgttaccgtcgacgggttccgcgagctttttcttggaggcttctggcgttcactccagtcgattaatgtgatgagccttatagcgggccgtgaaaacatttgttcccttgtgctggcaggctttcgcggctttttttga

SEQ ID NO: 9958 - protein, 185 aa, Unknown
  Obtained from environmental sample
  SIGNAL (1)...(26)
  DOMAIN (8)...(182): Bacterial export proteins, family 1
  misc_feature (1)..(185): Xaa is any amino acid
MIENQIINEILSSAPAFLLIAVRALAMIEVAPLFNSESVPQVVKISLAGFAAYTAFSMALVRDWVIAPFGLSFVFLVIGEALIGIIIGFFIALIFAAFSTAGQFFSLQMGFGASETFDPLSQIENPLMGQYLNTVAMLIFVTVDGFRELFLGGFWRSLQSINVMSLIAGRENICSLVLAGFRGFF

SEQ ID NO: 9959 - DNA, 375 bp, Unknown
  Obtained from environmental sample
  misc_feature (1)..(375): n is a, c, g, or t
ttgataatggctgacgttgccagagccaatgtaaacgcgggaagcggagcccagaaagggctgggcctgaataatctgctcagactgggtcctggcggaagtttgaacgggactctcatggggctggcggtgttggtagtgctggcaatgtttatcgttcccctccccacggtgatccttgacgcgttaatggctttgaactttgttatttctcttttggtgcttctgattgttctggacaacaaaaagcctacggatatcagtctctttcccacatttcttctggtaataactatttttggcctggcgctgaacatatcttctacccggctcatccttatccagggaacgcgcttaacggctcggccgatctga

SEQ ID NO: 9960 - protein, 124 aa, Unknown
  Obtained from environmental sample
  misc_feature (1)..(124): Xaa is any amino acid
MIMADVARANVNAGSGAQKGLGLNNLLRLGPGGSLNGTLMGLAVLVVLAMFIVPLPTVILDALMALNFVISLLVLLIVLDNKKPTDISLFPTFLLVITIFGLALNISSTRLILIQGTRLTARPI

SEQ ID NO: 9961 - DNA, 525 bp, Unknown
  Obtained from environmental sample
  misc_feature (1)..(525): n is a, c, g, or t
ttgctggttattacggcgttgcttctacttgtcatttcgattccggacatcttttttcagcgttaccagtttaaagagtcgttaaagatgacccgcgaaacgttcaaggaggagttaaagcaggatgagggagatcctgacgtaaggcgcagactcaagaaccgttaccgggaaataatgcagtcacgaaatatgctgaacgccgtaccaaacgcggatgtggttattacaaacccgacccattattcggtggccctggaatacgacgcggcacgcatgaacgctcctactgtagtggcaaagggcgaagatgatcttgcccttcgtatcagagaagtggcaaaggaaaataatgtccctgttgtttctcatccgcctttaaccagaaccctgtatcaggaaaccgaagtgggagatcaaatcccaatcaggtactggaatgtggtggccctggtagtggggaaattcttcagttttgaccaaaaacaggcccggcgcgccgaaaccggcaggatgggggcttag

SEQ ID NO: 9962 - protein, 174 aa, Unknown
  Obtained from environmental sample
  DOMAIN (1)...(157): FlhB HrpN YscU SpaS Family
  misc_feature (1)..(174): Xaa is any amino acid
MLVITALLLLVISIPDIFFQRYQFKESLKMTRETFKEELKQDEGDPDVRRRLKNRYREIMQSRNMLNAVPNADVVITNPTHYSVALEYDAARMNAPTVVAKGEDDLALRIREVAKENNVPVVSHPPLTRTLYQETEVGDQIPIRYWNVVALVVGKFFSFDQKQARRAETGRMGA

SEQ ID NO: 9963 - DNA, 426 bp, Unknown
  Obtained from environmental sample
  misc_feature (1)..(426): n is a, c, g, or t
atgggggtattcattccgttaattgttgttaattgtattatcatgggacgcgtggagggctttgcctcgaaacgcccgttaagcgaatgtttggccgattcacttggcatgggtcttggctatacctgggtgcttgccggtatcgctctggtccgcgagcttctgggcaacggaacgattttgaattttcaggtgctgccctcaagttatcagccgctgcttttctttgtgctgccgcccgggggcttttttgttttcgccctgtttattgcccttaatatctatatcaagtcccggcttaaggagccttccgcggctgatgaaggcgagggctttggctgctgcaagatagatagctgcgccgccgcggactgctgcgcgaatgccggagccaaaactggtgcggatgcgggggttaaaaaatga

SEQ ID NO: 9964 - protein, 141 aa, Unknown
  Obtained from environmental sample
  DOMAIN (2)...(91): Rnf-Nqr subunit, membrane protein
  misc_feature (1)..(141): Xaa is any amino acid
MGVFIPLIVVNCIIMGRVEGFASKRPLSECLADSLGMGLGYTWVLAGIALVRELLGNGTILNFQVLPSSYQPLLFFVLPPGGFFVFALFIALNIYIKSRLKEPSAADEGEGFGCCKIDSCAAADCCANAGAKTGADAGVKK

SEQ ID NO: 9965 - DNA, 573 bp, Unknown
  Obtained from environmental sample
  misc_feature (1)..(573): n is a, c, g, or t
atgaatctttttaaaatattcctcgccgccttattgattgacaatgtcgtattaatgcgttttatcgcgttatgcccctttatcggcatgagcaccgacgaggacaaatccgtcggtatggggctggctgttgtgtttgtgacggtaatagccaccgccgtaacctggcctatctaccgttttatccttgagccgctgggccttgtgttccttcaattactggtttttattctggtgatcgcctcgcttgtgcagcttgtagagtattttcttaaaaaatccatacccggcctgtacaagggcatggggatttatctcgcgttgattacaactaactgcggcattctcgcggttaccctggacgtgataaacaacacctgcgtgtttaccggcaagccctatacgtttatcgaatctattgtctacgccataggcgtagccctggggttcctgcttttcatgctnnctatgncgggcataaggaacgggctaaggacgagccctgttcccctgtttctaaaagggacgcccgtgctttttgccggcccggctctttctttcatcggcctttag

SEQ ID NO: 9966 - protein, 190 aa, Unknown
  Obtained from environmental sample
  DOMAIN (2)...(190): Rnf-Nqr subunit, membrane protein
  misc_feature (1)..(190): Xaa is any amino acid
MNLFKIFLAALLIDNVVLMRFIALCPFIGMSTDEDKSVGMGLAVVFVTVIATAVTWPIYRFILEPLGLVFLQLLVFILVIASLVQLVEYFLKKSIPGLYKGMGIYLALITTNCGILAVTLDVINNTCVFTGKPYTFIESIVYAIGVALGFLLFMLXMXGIRNGLRTSPVPLFLKGTPVLFAGPALSFIGL

SEQ ID NO: 9967 - DNA, 876 bp, Unknown
  Obtained from environmental sample
  misc_feature (1)..(876): n is a, c, g, or t
gtgttnnnnngggttatggcgagtggggtggggtcgcgacggcgttggatatgtcgatctcaagttagacgcggcgatgcagttctattcgaatgtttcgagccctggcgtcattgtgtcgttgcttgtcgggttttagatgttgatgtttctcgttgtatagatgttactctcgttgtattgatggctctctcgtcgtatatgaattacttctcgttgtaccgttgtaattgtcaaccgctaaaaaataatacggagggaataatgccgcccacgcccaaggcaaattgcgcgaaatttatagtctccattgccgactacccgtcgtccgcgtttaccgtgactaaattcagcggcatagacgcggtcagtacgccgtattcgtttgatatagagtttcaaccgtccgaatcggcggcggcaccgggcgggaatacgccggaacccacggcggaacgcgttctcggcaaatcctgccgctttgaactgatccgcgacttgaacggcgagattacacggtacgacggcgtagtttctgagtttaagaagatgatccggtcaaaaccggtctacgcgatacgcttggtgccgtggctggaactcctatcgctcaatgtaaacaacaaggtcttccaaaagctgaaagtggtcgatattgtaaaaaaagtcatcaaggacgccggaatggatacgcgttgcgcctttaagtataaatgcggcgaatccgcgaatctgaaaatagacttttgcgtacagtaccgggagagcgacctcaattttatctcgcggctaatggaacanaacgggatatggtactactttgccgacgacggcggcgtggtcgtcacggatactttcgccgattttcctagatag

SEQ ID NO: 9968 - protein, 291 aa, Unknown
  Obtained from environmental sample
  misc_feature (1)..(291): Xaa is any amino acid
MXXXVMASGVGSRRRWICRSQVRRGDAVLFECFEPWRHCVVACRVLDVDVSRCIDVTLVVLMALSSYMNYFSLYRCNCQPLKNNTEGIMPPTPKANCAKFIVSIADYPSSAFTVTKFSGIDAVSTPYSFDIEFQPSESAAAPGGNTPEPTAERVLGKSCRFELIRDLNGEITRYDGVVSEFKKMIRSKPVYAIRLVPWLELLSLNVNNKVFQKLKVVDIVKKVIKDAGMDTRCAFKYKCGESANLKIDFCVQYRESDLNFISRLMEXNGIWYYFADDGGVVVTDTFADFPR

SEQ ID NO: 9969 - DNA, 459 bp, Unknown
  Obtained from environmental sample
  misc_feature (1)..(459): n is a, c, g, or t
ttggccgagttcaaggccgagaaagaggggtatcagcagattggctcgatattccgcgaaactgctcttaacgaaaaagaacacgcaaaaatttggtttaagtttctgcacaacaacgatgttccggctacaaccgtaaaccttaaggacgcggctgacggcgaaaattatgaatggacggatatgtacgcgggtttcgcgaaaacggcgaaagaagagggctttaccgaaatcgcggctttgtttgaaaaggtaggtcagatcgagaaagagcacgaagagcgttaccgcaaactgctcgccaatgttaacggcaatctggtgttctcgcgcgacggcgaacaaatttggcaatgcgccaactgcggacacattgttgtcggcaagaacgctcccgaactctgtccggtctgcaagcatcccaaggcgtattttcagattaaagcgaataattactga

SEQ ID NO: 9970 - protein, 152 aa, Unknown
  Obtained from environmental sample
  DOMAIN (114)...(145): Rubredoxin
  misc_feature (1)..(152): Xaa is any amino acid
MAEFKAEKEGYQQIGSIFRETALNEKEHAKIWFKFLHNNDVPATTVNLKDAADGENYEWTDMYAGFAKTAKEEGFTEIAALFEKVGQIEKEHEERYRKLLANVNGNLVFSRDGEQIWQCANCGHIVVGKNAPELCPVCKHPKAYFQIKANNY

SEQ ID NO: 9971 - DNA, 399 bp, Unknown
  Obtained from environmental sample
  misc_feature (1)..(399): n is a, c, g, or t
atggctaaagaacaaaaaagaaaaagcaaagaaatagcggtaacacccaataagtttttcctgtatacagacaactcaggacgagtgcagattaatgcgctttttcgtgatgaaacgctctggcttacgcagaanacgatggctgaattgtttgaagtggaaagaagtgttattactaaacatattggaaacatatataaagaaggagaattgcatgaaaaagcagtatgtgcaaattttgcacatactgccaccgatggaaaaaactataacactgctttttacaaccttgatatgattatcgctgtggggtatcgtgtcaattcaaaaaggcgacagcttttcgtatttgggcgacagaagttttacgggagtatatcatcaaaggttttgccttag

SEQ ID NO: 9972 - protein, 132 aa, Unknown
  Obtained from environmental sample
  misc_feature (1)..(132): Xaa is any amino acid
MAKEQKRKSKEIAVTPNKFFLYTDNSGRVQINALFRDETLWLTQXTMAELFEVERSVITKHIGNIYKEGELHEKAVCANFAHTATDGKNYNTAFYNLDMIIAVGYRVNSKRRQLFVFGRQKFYGSISSKVLP

SEQ ID NO: 9973 - DNA, 660 bp, Unknown
  Obtained from environmental sample
  misc_feature (1)..(660): n is a, c, g, or t
atgaaaacactatttggcaaactgcttatatcgttcggcgtcatcattctcctgatgattgtttcggtacttgcaagtttttttctggtctattcaaaaagctatgaaaaacagataattgccgaaaattcacggcaggctctgtttgtggcgcgttccctgcaatcattcatcaatgcggcttacaatgaagtcgaagaccttgcgtttaataacgatgttatttcgatgaatactcagcgtcagacaccggtgttcgtatcaacaataaaaagaagagattattttgaactcctttacgcgcagggcatggacggtatgcagacaggacgatcatcaggcaatttgggaaaccgcaaagaacgctggtggttcgttcaaatggaaaaacttaaaaaaccttttgtctcggaatcttattattcggtcgggacaaatatgccctgtgcttccgttttttatcccataatggatgaacagcanatgacaggcatcatggccggtgatataaaactttccgcccttcatgatttagttgttgaaaccgccgatacaggttcttattcctttattctggacggcaagggcgtagttgtagcgcacccggacagcacctatcaatcggaattaatacattacgcgaagctaacaaaaccgtaa

SEQ ID NO: 9974 - protein, 219 aa, Unknown
  Obtained from environmental sample
  SIGNAL (1)...(25)
  DOMAIN (136)...(214): Cache domain
  misc_feature (1)..(219): Xaa is any amino acid
MKTLFGKLLISFGVIILLMIVSVLASFFLVYSKSYEKQIIAENSRQALFVARSLQSFINAAYNEVEDLAFNNDVISMNTQRQTPVFVSTIKRRDYFELLYAQGMDGMQTGRSSGNLGNRKERWWFVQMEKLKKPFVSESYYSVGTNMPCASVFYPIMDEQXMTGIMAGDIKLSALHDLVVETADTGSYSFILDGKGVVVAHPDSTYQSELIHYAKLTKP

SEQ ID NO: 9975 - DNA, 903 bp, Unknown
  Obtained from environmental sample
  misc_feature (1)..(903): n is a, c, g, or t
gtggctcgtgggcgcaagcgcgcgtcttgccgtccgtttcggggtcaagccgttgcttgtaggcgtgaccgttgtggcatgggcacgagcgccccggagttcgtggtgagcgtgatggcggcgcacaacggcgtcggcggcatcgccgtgggaaacgtggtcgggtctaacatctgcaacaccgctctggttctagggctctcggctcttatatgccctatacttgtgtctaagcagttcttcaagtttgacataccggtactgataggcgcctcttttctagggtggtactttcttaatgacggcgctatacaagtgtgggagggtatagtaattttggtactcttcgccggatacatggcctacaacatcgccaacgcgaaaacggaaagcggcggcgacggggacttggtcgccgcggacggtaaaaaagtctcggtcgtcaagaacacgcttttagtgctgttgggcctagggatgcttatgggcggcgcgaatctcttggtcaaaggcgccgtggaaatagccgcgagtttcggcatgagcaaagcggtcataggccttaccatagtggctttcggcacaagcctgccggaactcgccacgtcggtagtggccgcggtcaggaaacacaacgacatagcgatcggaaacgtggtaggctccaatttattcaatattctctgtatcctaggcgtagtaggcgctatgggcccgattgacacggtcggcgtaggagaagaccgtggcgtggagtttaacgacctgatgatcatgtcgcttataaatttcatactattgactccgctgatagcgaaacgtaaattaaataggtggataggcggtttgttgacggggacttatgtggcttatatgttgatgttgactttacataaaatataa

SEQ ID NO: 9976 - protein, 300 aa, Unknown
  Obtained from environmental sample
  DOMAIN (8)...(123): Sodium/calcium exchanger protein
  misc_feature (1)..(300): Xaa is any amino acid
MARGRKRASCRPFRGQAVACRRDRCGMGTSAPEFVVSVMAAHNGVGGIAVGNVVGSNICNTALVLGLSALICPILVSKQFFKFDIPVLIGASFLGWYFLNDGAIQVWEGIVILVLFAGYMAYNIANAKTESGGDGDLVAADGKKVSVVKNTLLVLLGLGMLMGGANLLVKGAVEIAASFGMSKAVIGLTIVAFGTSLPELATSVVAAVRKHNDIAIGNVVGSNLFNILCILGVVGAMGPIDTVGVGEDRGVEFNDLMIMSLINFILLTPLIAKRKLNRWIGGLLTGTYVAYMLMLTLHKI

SEQ ID NO: 9977 - DNA, 573 bp, Unknown
  Obtained from environmental sample
  misc_feature (1)..(573): n is a, c, g, or t
ttggacggtgtctccgacttggcaggttccgtcggcttaggcgttacctccgatttggcgggttcggcgggtttggacggcgccggctccgtcttggcgggttcggcctgtttgggcggctcggcgggcttgacgggttcggacttgacaggctcggatttggcaggctcgggctttacaggctctgacttagccggttcggcgggcttcgcggcaggctcgggcttggccggttcggcttgctttgcggccggttcgggcttgacaggctcggacttggccggttctgccggcttcgcagccggttcgggcttggcaggttcggcttgctttgcggccggttcgggcttgacagactcggacttgaccggctcggcgggctttgcggcaggctcgggcttggccggctcaggctgctttttagactccgccggcggcgcggacttggccggttcgggctgttttttcggctcagccggcggcggcgccgcgggctgcggagccgtctgcgccggcgcttcagcttcgggcgccggagcgctcgcggcggctccgccggccttcttttcctga

SEQ ID NO: 9978 - protein, 190 aa, Unknown
  Obtained from environmental sample
  misc_feature (1)..(190): Xaa is any amino acid
MDGVSDLAGSVGLGVTSDLAGSAGLDGAGSVLAGSACLGGSAGLTGSDLTGSDLAGSGFTGSDLAGSAGFAAGSGLAGSACFAAGSGLTGSDLAGSAGFAAGSGLAGSACFAAGSGLTDSDLTGSAGFAAGSGLAGSGCFLDSAGGADLAGSGCFFGSAGGGAAGCGAVCAGASASGAGALAAAPPAFFS

SEQ ID NO: 9979 - DNA, 639 bp, Unknown
  Obtained from environmental sample
  misc_feature (1)..(639): n is a, c, g, or t
ttgaagcaggcaactgggatgcggaagactgcgagctctgtaagaagggcgttccgctggttaagcccggctcccggaagatttgatttaccaagagcgattatgaggcgccctcttttttcccttgtatacgaagatgaaaatatcgccgccgttgacaaaagttccggcatcgctgtaagtcctgaccgctgggatctttccagggagcggctggataaactcattgaggaatctcttggcatacaaaagatctacacggttcacaggattgaccgtgaaacttccgggctggtggttttcgcaaaaaacagcgagacccacaagaccctttcaatggcttttgaaaacaggcagattaaaaaacgctatatcgcggtggtttgcggacggccttcatggaaggaaaccgcttgcgacctcgcccttgttccgaacggaaacaagaagcatcttactatcatcgacaaattccgtggcaaaaatgcgctgactgccttccggcttttgggaagcgcgggaaattacagcgtccttgaagccctgccagaaaccggcaggattcaccagatacgcgtgcaccttgccgcgcttggccaccctgttgcctgcgacgagctttacggaaacgcaagctga

SEQ ID NO: 9980 - protein, 212 aa, Unknown
  Obtained from environmental sample
  DOMAIN (48)...(197): RNA pseudouridylate synthase
  misc_feature (1)..(212): Xaa is any amino acid
MKQATGMRKTASSVRRAFRWLSPAPGRFDLPRAIMRRPLFSLVYEDENIAAVDKSSGIAVSPDRWDLSRERLDKLIEESLGIQKIYTVHRIDRETSGLVVFAKNSETHKTLSMAFENRQIKKRYIAVVCGRPSWKETACDLALVPNGNKKHLTIIDKFRGKNALTAFRLLGSAGNYSVLEALPETGRIHQIRVHLAALGHPVACDELYGNAS

SEQ ID NO: 9981 - DNA, 624 bp, Unknown
  Obtained from environmental sample
  misc_feature (1)..(624): n is a, c, g, or t
atggacaaaacaaagggcggaataaccgaaggcgttgtttcagtattggttaatacggtgttatttgcggcgaaatactgggcaggcatagtaaccggttccctggcgctcatcgcggatgcctggcatacgctttcggattccatcagctctgttattgttattattgcggcaaaactggcggcaagaaaagctgataaagagcatccctttggccacggacgttgggaacaagtcgcggctctttttattgcgatgatcctgggaataatcggttatgatttcgcgaaatcctccataaccaggttcattatgaaagaaaaggttgaattcggcgtcatcgcaatcattgtgacgatcctttccattatagtcaaagaactattggcccaatacgcgttttatatcgcaagaaaaactgacaatgaaagcgtacgcgcggacggctggcatcacaggacagacgcgttatcctccgtagtcgtattggttggtattttattcgcaaggcaattctggtgggtagacagtgtaatgggatttatgattgccttgatgatattctacgcggcctataaaatcttaacaaatgtgataaacaagctgttgnggagaagaacctag

SEQ ID NO: 9982 - protein, 207 aa, Unknown
  Obtained from environmental sample
  DOMAIN (11)...(207): Cation efflux family
  misc_feature (1)..(207): Xaa is any amino acid
MDKTKGGITEGVVSVLVNTVLFAAKYWAGIVTGSLALIADAWHTLSDSISSVIVIIAAKLAARKADKEHPFGHGRWEQVAALFIAMILGIIGYDFAKSSITRFIMKEKVEFGVIAIIVTILSIIVKELLAQYAFYIARKTDNESVRADGWHHRTDALSSVVVLVGILFARQFWWVDSVMGFMIALMIFYAAYKILTNVINKLLXRRT

SEQ ID NO: 9983 - DNA, 891 bp, Unknown
  Obtained from environmental sample
  misc_feature (1)..(891): n is a, c, g, or t
gtggagtcttccggcgggtatctcaacttctttgtgacaagcggggaatgggcggcttcggttatcaagaactattctcacgccgctcctaggagtttgaaagattgcggcgtttctcctatcggtatgattgacgggcgttcgatgcgggcggtggtggagttcgcctcgcccaataccaataagccgctgcacctcgggcatcttcgcaacatgtccataggcgacagcgtctctcggatactctcgttttgcgggtgcgaagtctttaaggccagcatcaacaacgaccgcggcgtacacatctgcaagtccatgctggcttacaagcgtttcggaaacggggtcgcgccggaggaggtcggttgcaaatccgaccgctttgtgggcgactactacgttatgttcaacgataaatccgcgttcgacccctcttggggcgacgacgcgcaaaagatgctgagagattgggaggagggcgagccctcaaccgtagaattgtggaagagaatgaacaagtgggcgctggacggcttcagggagacctacaagctgttcggaatatcgtttgacaaggagtattacgagagcggcatctacaagaacggcaaggagatagtggcggaggggctggacaagggcatattccacagaagggaagacggcgcggtcgcggtcgacctcgaggaggagaaactgggcggcaaggtgctgctccgtcccgacggcacgagcgtctacatcgtgcaagatctgtacctggcgctgctcaaggataaagagttcaagtacgacaggtctttctacgtggtcggcaacgaacaggactaccacttcgcggtgcttatagccatattcaggaagctgggctacggcgggccgacaagataa

SEQ ID NO: 9984 - protein, 296 aa, Unknown
  Obtained from environmental sample
  DOMAIN (37)...(295): tRNA synthetases class I (R)
  misc_feature (1)..(296): Xaa is any amino acid
MESSGGYLNFFVTSGEWAASVIKNYSHAAPRSLKDCGVSPIGMIDGRSMRAVVEFASPNTNKPLHLGHLRNMSIGDSVSRILSFCGCEVFKASINNDRGVHICKSMLAYKRFGNGVAPEEVGCKSDRFVGDYYVMFNDKSAFDPSWGDDAQKMLRDWEEGEPSTVELWKRMNKWALDGFRETYKLFGISFDKEYYESGIYKNGKEIVAEGLDKGIFHRREDGAVAVDLEEEKLGGKVLLRPDGTSVYIVQDLYLALLKDKEFKYDRSFYVVGNEQDYHFAVLIAIFRKLGYGGPTR

SEQ ID NO: 9985 - DNA, 348 bp, Unknown
  Obtained from environmental sample
  misc_feature (1)..(348): n is a, c, g, or t
gtggaaggcttccagatttttgacagcatggtcgatgacatacgccaggagatagcgtctcgcctgcaccttgtgaggattcaagtcgcccccgcgggcggcggaggcgcgggccgtcccagcaggacaattgccacctctcagtcggcaagccacagcagcatgggcgcctttagctcttcaggcggagcctcaggttcagaatcccccaagggcgccggcgcgccgtataacggcgcgagccgccccgacggcgctaccgttatacgcggccatcccaaagtaggccgcaacgacccgtgcccctgcggcagcggccggaagtacaagcactgccacgggaagtaa

SEQ ID NO: 9986 - protein, 115 aa, Unknown
  Obtained from environmental sample
  DOMAIN (97)...(115): SEC-C motif
  misc_feature (1)..(115): Xaa is any amino acid
MEGFQIFDSMVDDIRQEIASRLHLVRIQVAPAGGGGAGRPSRTIATSQSASHSSMGAFSSSGGASGSESPKGAGAPYNGASRPDGATVIRGHPKVGRNDPCPCGSGRKYKHCHGK

SEQ ID NO: 9987 - DNA, 468 bp, Unknown
  Obtained from environmental sample
  misc_feature (1)..(468): n is a, c, g, or t
atggaattcagggaattacataaggaaactgagaaaacgcttaacagagcccttgggggaatgtgtaacgcatttgactctcttgttgaacttataacgactcccgccctgcccaaaaaattcaaacaactggggttttcgtttgacagaataacaagcattaagtgggcggaaaacgtatactcagaaattgacgcgctgcttgaaaacggcacgcaggcgatggtagttgaagtaaaaacaaaccttcggtatgcggatattgccgaccaccttaagcgcatgcaaaaagtgcgtgaatacgccgatgaacattatgacaaaaggcaattcatgggggcaatagccgccgccattaccgataaatccacaaaagaatacgccttgaaaaaaggactttttgttattgagccatgcggcgagggggttatagtttcaaagcctttggtggaaccgagggtttggtaa

SEQ ID NO: 9988 - protein, 155 aa, Unknown
  Obtained from environmental sample
  misc_feature (1)..(155): Xaa is any amino acid
MEFRELHKETEKTLNRALGGMCNAFDSLVELITTPALPKKFKQLGFSFDRITSIKWAENVYSEIDALLENGTQAMVVEVKTNLRYADIADHLKRMQKVREYADEHYDKRQFMGAIAAAITDKSTKEYALKKGLFVIEPCGEGVIVSKPLVEPRVW

SEQ ID NO: 9989 - DNA, 765 bp, Unknown
  Obtained from environmental sample
  misc_feature (1)..(765): n is a, c, g, or t
gtgatatacttatccatccgacgctgctggggaggtatgatgtcgggaaacaagtcagaatggagtgacagccaacggaaccttgccttacatatagccgctctgcaaagagaggttttaggcaaaaaaacagaagccgttccggtcgtaaaagaggaaaaggctgaaataaaacccgctgaagaaaaacttaaggaagacaaaaggcttcatgaggggaaaaggtttttccacatgagccgctgggataacgccctgaaagaattccggcttgtcgatacagaaaagatcaatgcccaggaaaaggcggagcttgcttactatctgggtttatgctacacaaaactggagcgttacgatgaagcggttctgtaccttgagcaggtcgtcatagccggaaatgatccgttgcgcgcttatcagtgtcgtataacgctcgcgctaatttatataagaaccaaccgcgccaagatggcggaattcgaactgaaacgccttataaacgcgggttttgaatcagcccccatgtataatgccatggcctatgcggtgtatgtccagaagcgttatcgtcaggcaataaattattatgaaaaaactctggagattgatattaataacgctaccgcaatgaacagcatgggttttatacttgttgacaagggatttgataacgttaagggcttgatgctttgccgcaaggcagttgccatcagaccccaaaacgcggcgtacatggattccctgggatctcggccgatctga

SEQ ID NO: 9990 - protein, 254 aa, Unknown
  Obtained from environmental sample
  DOMAIN (174)...(207): Tetratricopeptide repeat
  misc_feature (1)..(254): Xaa is any amino acid
MIYLSIRRCWGGMMSGNKSEWSDSQRNLALHIAALQREVLGKKTEAVPVVKEEKAEIKPAEEKLKEDKRLHEGKRFFHMSRWDNALKEFRLVDTEKINAQEKAELAYYLGLCYTKLERYDEAVLYLEQVVIAGNDPLRAYQCRITLALIYIRTNRAKMAEFELKRLINAGFESAPMYNAMAYAVYVQKRYRQAINYYEKTLEIDINNATAMNSMGFILVDKGFDNVKGLMLCRKAVAIRPQNAAYMDSLGSRPI

SEQ ID NO: 9991 - DNA, 435 bp, Unknown
  Obtained from environmental sample
  misc_feature (1)..(435): n is a, c, g, or t
atggcacatctccctgtcttgcttgccgaggttatcgccggactggcgtttcaaccggggatgcttgtcgtggattgcacattcggcggcggcggacattccgcggccatcgcccggcaaatcggagcgcagggacggctcatcgccttagaccaagacccgctggtcagcgaatatgcccgggccgtactggcggaatatcccaacatagagttgtgtccgcaaaatttctgtcatttaccggaagtacttgccgccagacaaatatcggccgtcgacggtatcttaatagacctgggtgtttcatcctttcaaatcgacgaccccggccgcgggtttagctggcaaaaagactgccctctcgatatgcgtatggacacccgtcaagctcaaaccgccgcggacatactggccgccgcggcagaatccgattag

SEQ ID NO: 9992 - protein, 144 aa, Unknown
  Obtained from environmental sample
  DOMAIN (1)...(144): MraW methylase family
  misc_feature (1)..(144): Xaa is any amino acid
MAHLPVLLAEVIAGLAFQPGMLVVDCTFGGGGHSAAIARQIGAQGRLIALDQDPLVSEYARAVLAEYPNIELCPQNFCHLPEVLAARQISAVDGILIDLGVSSFQIDDPGRGFSWQKDCPLDMRMDTRQAQTAADILAAAAESD

SEQ ID NO: 9993 - DNA, 327 bp, Unknown
  Obtained from environmental sample
  misc_feature (1)..(327): n is a, c, g, or t
atgaaccaaaatgtcaaagccgaactcgacaagatcgtaagtacgctggccgaaacggggatcgttaccaaaatcatcttgttcggctcttacgctaagggcgaagagacccctgatagcgatattgatttgtgcgtcctgaccacagtgagagatagacgttctgtagatgtcactaccgatttaaggctaaaactgtgggatgttcaaacgatgccgctggatctattcgccctcaatcaagacgatttttattctcacgccaaacgcccgaccactttccaatacgagatagctaataacggagtgctgatatatgaccgctga

SEQ ID NO: 9994 - protein, 108 aa, Unknown
  Obtained from environmental sample
  DOMAIN (2)...(91): Nucleotidyltransferase domain
  misc_feature (1)..(108): Xaa is any amino acid
MNQNVKAELDKIVSTLAETGIVTKIILFGSYAKGEETPDSDIDLCVLTTVRDRRSVDVTTDLRLKLWDVQTMPLDLFALNQDDFYSHAKRPTTFQYEIANNGVLIYDR

SEQ ID NO: 9995 - DNA, 765 bp, Unknown
  Obtained from environmental sample
  misc_feature (1)..(765): n is a, c, g, or t
atggaaggaacgggcaacgactacatttacgcgcacgcaagcgatctgccgcaggatatgacggagaaagctctcgccgaattggccgcgcgcatcagcgacaggcatttcggcgtcggcggcgacgggctggcgttgatctgccctccgcttgatccgtccaaagcggattttcgcatgcgcatattcaacaacgacgggtccgaagcgcatatgtgcggcaacgcttcgcgttgcataggcaaatatgtgtacgacaagggcctgaccacaaagacgtccgtgcttcttgaaacgtttgccggcgtcaagcagcttgatctgcgggtcgaagccggtcaagttcgggaagtgcgggtgaacatgggcgtcccctgtctgacgccgtccgaaattcccatgcgtgtggacggtgaaagcttcatcaaccgcgaaatcagcgttgacggccaggtgtaccggggcacggcggtttccatgggtaatccccacatggtgctgtgcgtgcccgatcccgacgccttggatctgacgcggctggggccgttgttcgagcgtcatccgttgtttcccgatcgcgtcaatacggaatttgtgagtgtcctcaatcgttcccgcatccgcatgcgggtatgggaacgcggctcgggagaaactctggcctgcggtaccggggcctgcgccgccgttgtggcctgcgtcctgaacgactttacggacagaacggtcgtcgtgcagttgcgcggcggcgatttgaacatttga

SEQ ID NO: 9996 - protein, 254 aa, Unknown
  Obtained from environmental sample
  DOMAIN (156)...(254): Diaminopimelate epimerase
  misc_feature (1)..(254): Xaa is any amino acid
MEGTGNDYIYAHASDLPQDMTEKALAELAARISDRHFGVGGDGLALICPPLDPSKADFRMRIFNNDGSEAHMCGNASRCIGKYVYDKGLTTKTSVLLETFAGVKQLDLRVEAGQVREVRVNMGVPCLTPSEIPMRVDGESFINREISVDGQVYRGTAVSMGNPHMVLCVPDPDALDLTRLGPLFERHPLFPDRVNTEFVSVLNRSRIRMRVWERGSGETLACGTGACAAVVACVLNDFTDRTVVVQLRGGDLNI

SEQ ID NO: 9997 - DNA, 834 bp, Unknown
  Obtained from environmental sample
  misc_feature (1)..(834): n is a, c, g, or t
gtgttccgcgtcgcagggcaatcgctgcagtacgaaaagaggctggaagccggcaataagccggggtttgtggaggtaatgtttgacgagcgtcgccgcgaattgtgggtttctaacatggaggaaaacaaggtatatatttttaaccttgatacgcttgagttaaaatcttcttatacaacaggagggacttttcccaaagtgataacgcaaagtcccgacggcgctcttacattggtgtccaactggatcactagagacataagcgtttttgattccaatacaaaaacgttattgcgccgtatccccgtaggcggaacaccgcgcggtatggcgttttcacctgacggctcttttttgtatgccgccatttacgacgcggcgcttgtcgcggtggttgatatgaaaactaacacggtggtaaaaaaatggcgctttaacgaaggcgaaggagccgcgcggcacattatttaccgcggcgacaagctctatgtttcggatatgttccgtggaaccgtaaatatactgaacgcttctacaggcgcgctcctaaagtcggcgcgcgtcggtcctaacataaataccattacaatgtcgcccgacggcaattacattttcgcctcttcgcgcgggcgtaataacgctgtggattatttattacccggtcccgattttggtgcggtttatatgttaaacgctcatgacttaaccgtaattgataaagtgtggggtcgtaatcagcccacaggccttgccgtttccccagatggaaaacttttagctttttacgattttttggacgcgaatctggaactgtataaaattgagatgtga

SEQ ID NO: 9998 - protein, 277 aa, Unknown
  Obtained from environmental sample
  misc_feature (1)..(277): Xaa is any amino acid
MFRVAGQSLQYEKRLEAGNKPGFVEVMFDERRRELWVSNMEENKVYIFNLDTLELKSSYTTGGTFPKVITQSPDGALTLVSNWITRDISVFDSNTKTLLRRIPVGGTPRGMAFSPDGSFLYAAIYDAALVAVVDMKTNTVVKKWRFNEGEGAARHIIYRGDKLYVSDMFRGTVNILNASTGALLKSARVGPNINTITMSPDGNYIFASSRGRNNAVDYLLPGPDFGAVYMLNAHDLTVIDKVWGRNQPTGLAVSPDGKLLAFYDFLDANLELYKIEM

SEQ ID NO: 9999 - DNA, 987 bp, Unknown
  Obtained from environmental sample
  misc_feature (1)..(987): n is a, c, g, or t
atggccgagacatcgntcatccacatccacgaagtaataaagccccataaaattattcgttcagttcagacaatgggcgatgattacgcggacgaacaaggctggctctttgaatcagacaccgagcgggcaaaaagacgcaatgactccatagagttctaccagcataaaaacaaatggacaaaccgcctcatagccggagacagccttgtcataatgaattccatgctcgaaaaagaaggaatggccggacaggtgcaaatggtctacatagacccgccctacggaataaaatacggctccaatttccagccctttgtgaacaagcgagacgtaaaagataaaaaagacgaagacctgacaacagaacctgaaatgataaaagcgttccgcgacacatgggaattgggcatacattcgtatttaacatatttgcgggacaggcttttgcttgcaaaggaattgctatcagataccggtagtgtttttgtacagattagtgatgagaatttacatttggttagaattctttgtgatgaagtatttgatagttcaaattttattaccattataaaatttcaaaaaacaggtggcctcgctagcaatttgatgagtagtacaactgattacatagtttggtatggtaaagataaaaatataacaaattatcatcaactatatttggaaagaaagataggcgatccttctttagatagatatgattatattgaattgaataatggtaatattttgaaattaactcgccctcaaattcttggtcaagaagaaattccagaaggaaaacgaatgcgttatacaacattgctatctgatggtgaaacaaacacatcaaatcaaacagtaaattttgaaaatgaaaaatatctaccacgacatggaaaacattggaaaactacagtcaatggtattaatnnatctatagaanaaaagagaatacaaaagctaggttcaaactattggntataa

SEQ ID NO: 10000 - protein, 328 aa, Unknown
  Obtained from environmental sample
  DOMAIN (86)...(269): DNA methylase
  misc_feature (1)..(328): Xaa is any amino acid
MAETSXIHIHEVIKPHKIIRSVQTMGDDYADEQGWLFESDTERAKRRNDSIEFYQHKNKWTNRLIAGDSLVIMNSMLEKEGMAGQVQMVYIDPPYGIKYGSNFQPFVNKRDVKDKKDEDLTTEPEMIKAFRDTWELGIHSYLTYLRDRLLLAKELLSDTGSVFVQISDENLHLVRILCDEVFDSSNFITIIKFQKTGGLASNLMSSTTDYIVWYGKDKNITNYHQLYLERKIGDPSLDRYDYIELNNGNILKLTRPQILGQEEIPEGKRMRYTTLLSDGETNTSNQTVNFENEKYLPRHGKHWKTTVNGINXSIEXKRIQKLGSNYWX

SEQ ID NO: 10001 - DNA, 648 bp, Unknown
  Obtained from environmental sample
  misc_feature (1)..(648): n is a, c, g, or t
atgtccctactggccgattttcataaccattcctgtctgtctccatgcggatctttggatctttctcccaatgcgctggcggatctggcggctctccggggggtcaaggtgttggccttaacggatcataattccagccttaactgtccggctttcgcaaaagtctgtcccccacgcggcattcttcccatcttcggcatggaggctaccacccaggaggaaattcatgtcctctgtctttttaccagcctccaagccagtcttgatttcagcgaatacgcttacagcctgttaatgccttttttaaacaaccccgacaaaaccggggatcaggtgtttgttgacgaagacgacaatatcgaaggggaagtcgaatattaccttgtgaaccccattgatttaagcatcgactcgatagaagcaaaagtagccgaatatgggggcataaccattcccgcccatgtggataggcccgctttttccatgaccagccagctcggggtgattgtcaaggggcaatggacagccattgagtgtacccggctgccgcccatgctaaacggacagcctctggatacgctgggttacccgttgatcacttcttctgacgcgcattaccccgagcatgtggccccggcgtccttttga

SEQ ID NO: 10002 - protein, 215 aa, Unknown
  Obtained from environmental sample
  SIGNAL (1)...(27)
  DOMAIN (5)...(208): PHP domain
  misc_feature (1)..(215): Xaa is any amino acid
MSLLADFHNHSCLSPCGSLDLSPNALADLAALRGVKVLALTDHNSSLNCPAFAKVCPPRGILPIFGMEATTQEEIHVLCLFTSLQASLDFSEYAYSLLMPFLNNPDKTGDQVFVDEDDNIEGEVEYYLVNPIDLSIDSIEAKVAEYGGITIPAHVDRPAFSMTSQLGVIVKGQWTAIECTRLPPMLNGQPLDTLGYPLITSSDAHYPEHVAPASF

SEQ ID NO: 10003 - DNA, 906 bp, Unknown
  Obtained from environmental sample
  misc_feature (1)..(906): n is a, c, g, or t
gtgatcaatccacttaattactcggagttgaccgatttaagcgattcgatgaatttaaagatcgcccgacccctaattcacgcttcgtaccgcatcggctctttctcaaaaatcgaaggcgtgttcgtaccggcgtttgaacccctgcgttacgccacagaagggcgctgggttcctacgcagatggcgcagttaagtcagcttcaagcgatgggggttccactagttaaggacgatacatcgacacttgaatacgcgcaggcgggagcaaggtttacaacgactatcggcccagctgactttggcttgcagtattactacgggcgtttaacaagacccgctgttacaatgacgcttgcgccgccctcgcctgtacccacatctatacgttttgcctataacccctatcaccagatcggcgctgattgggcgcaggtgctttttgggtttaatgtccgcgccgaacttgcggcaaaccttaccgatgatttttccggcgatgacggctcggtttacaaccctgcgcttttgttggcccttgggtttgaccgcgatctgggtttgggcattaacctcaacctccagtgcaacgaatcgatccgcctcatggataacaagattgcgaataaccctatgctggatatagaagcgggtaccgatatgacttccacgcaaatcatagccgccctttccaagaaattcctccgcgatgaactggaaacacgggttgccgttttgtacggagttgaagacggtgatttcctattcataccttcgcttatatggacaagggacgcggtatcgctggagttttcaggcggcatttttggcggcaataaagacgggcaaatcgggcagtaccgggacaacattttcgtgaaggtagcgctgactaatagtttttaa

SEQ ID NO: 10004 - protein, 301 aa, Unknown
  Obtained from environmental sample
  misc_feature (1)..(301): Xaa is any amino acid
MINPLNYSELTDLSDSMNLKIARPLIHASYRIGSFSKIEGVFVPAFEPLRYATEGRWVPTQMAQLSQLQAMGVPLVKDDTSTLEYAQAGARFTTTIGPADFGLQYYYGRLTRPAVTMTLAPPSPVPTSIRFAYNPYHQIGADWAQVLFGFNVRAELAANLTDDFSGDDGSVYNPALLLALGFDRDLGLGINLNLQCNESIRLMDNKIANNPMLDIEAGTDMTSTQIIAALSKKFLRDELETRVAVLYGVEDGDFLFIPSLIWTRDAVSLEFSGGIFGGNKDGQIGQYRDNIFVKVALTNSF

SEQ ID NO: 10005 - DNA, 714 bp, Unknown
  Obtained from environmental sample
  misc_feature (1)..(714): n is a, c, g, or t
atgaccaaaattaagttttacaaacatatattagcttgctttttattttttcttttatttttttcctgtgccacttcaaaaaacgtaaataattccggaaacataaaaaataaaaaaacggatcctgctatggtttattacgaaggtgatttacttaatattttttttcacgcgctgattgcgcgtccggaaattgcgtttagggggaatagaaaagatcattatagagaatggtttgttagctccgatgaatataaaaaaatactggatgaactgtatttacaaaattatgtattggtcgatataaaagaattttacaccgtaacgtatacaaataaaacaaaaactgttaaagcaaataaattattggttcctcagggaaaaagacccctcattttatccgttgacgatttatcatattatgatactaacaggaaaaatgggacagtacataaacttgtaattgataaaaacggcagcattgcggcatggactgatactccgtccggcggtgaaatatcatacgatctggatattattaccattacggaagactttattaaaaagcatcctgattttttcatccgcggggcanaaggtattattgcgcctacgggattnncaggggtactggggtatcgaaacgcagcgggtaattcaaaaacgcggggtataaaaagaaatgaaaacgcgttnaggtggcgaataaattaa

SEQ ID NO: 10006 - protein, 237 aa, Unknown
  Obtained from environmental sample
  SIGNAL (1)...(26)
  misc_feature (1)..(237): Xaa is any amino acid
MTKIKFYKHILACFLFFLLFFSCATSKNVNNSGNIKNKKTDPAMVYYEGDLLNIFFHALIARPEIAFRGNRKDHYREWFVSSDEYKKILDELYLQNYVLVDIKEFYTVTYTNKTKTVKANKLLVPQGKRPLILSVDDLSYYDTNRKNGTVHKLVIDKNGSIAAWTDTPSGGEISYDLDIITITEDFIKKHPDFFIRGAXGIIAPTGXXGVLGYRNAAGNSKTRGIKRNENAXRWRIN

SEQ ID NO: 10007 - DNA, 357 bp, Unknown
  Obtained from environmental sample
  misc_feature (1)..(357): n is a, c, g, or t
gtgaaattccccgagtataccgaggaaaacgccgtgaagatgaatgagcttatcaacgcgaacaagattcccgaatatgccgagaaaaatccgagggcaagcgccgcccaaatcgaggcgttcgcgaagacgcttgaaaaggaatataaacttgatctgtctcttcttaaacggctgataaggaacgaacttaacagaacgactatcgccccggtttatgatttggaatacgacatccagctgcaggaagctgtaaacatactccgcaatggatcatatcctcaattaatgaaaaactacaaaaccttaaaagctttgcaggaagaagcggaggaaaaactgccgcttgcgtcgtga

SEQ ID NO: 10008 - protein, 118 aa, Unknown
  Obtained from environmental sample
  misc_feature (1)..(118): Xaa is any amino acid
MKFPEYTEENAVKMNELINANKIPEYAEKNPRASAAQIEAFAKTLEKEYKLDLSLLKRLIRNELNRTTIAPVYDLEYDIQLQEAVNILRNGSYPQLMKNYKTLKALQEEAEEKLPLAS

SEQ ID NO: 10009 - DNA, 588 bp, Unknown
  Obtained from environmental sample
  misc_feature (1)..(588): n is a, c, g, or t
gtgaaacaatttctccttgccaaagagccggatgacggcatagtccggcttggcggcgatgattaccgctatctggtccgtgtccgccgccttgctcccggagaatttttcaccgccttattgccgggcggcgatgaaacattaattcaagtgctttctgtagaaaaaggcgttttaaccggcaaatgcgtccctgcgcaaaagcgatcgcaaaagcgggcgcaaaatcttcccgattcgccctccccctccatacccgcgattctcctgtttcaggctttacccaaaggcgagaaaatggacgtgattgtaaggcaggcggcggaaggcggcataacggaaatcgtcccctttgtttcagaattttcgattgcgaaggcaggcgcgggcgagcaaaaattttcccgctggcagcgcattatccgcgaggcgcgtcaacagtgcggctcanaaatcgctaccgccgtccgccgccctctgtcaaggaagagcttattaatattgggaggactgaaaaatccatgcgcagcgggcttggctgtatttcatctcaggtctgaaaaaaatcgctcacagtatctgatatag

SEQ ID NO: 10010 - protein, 195 aa, Unknown
  Obtained from environmental sample
  DOMAIN (15)...(184): Protein of unknown function (DUF558)
  misc_feature (1)..(195): Xaa is any amino acid
MKQFLLAKEPDDGIVRLGGDDYRYLVRVRRLAPGEFFTALLPGGDETLIQVLSVEKGVLTGKCVPAQKRSQKRAQNLPDSPSPSIPAILLFQALPKGEKMDVIVRQAAEGGITEIVPFVSEFSIAKAGAGEQKFSRWQRIIREARQQCGSXIATAVRRPLSRKSLLILGGLKNPCAAGLAVFHLRSEKNRSQYLI

SEQ ID NO: 10011 - DNA, 375 bp, Unknown
  Obtained from environmental sample
  misc_feature (1)..(375): n is a, c, g, or t
atgtcggaaagggtttggcgctgcggaagggaaatccgcggtttgaacattacatggaggtcaaatcctatgcaaatcaaccataacattcgtgctatggtgactcagcaatcgctgtctttaaacgacaatgcaatggctaggtcattagaaaaactctcaacaggcttaagaatcaatcgtgcccaagacgatgccgcangtcttgcgatgagtgaacagatgagaacccaaattcgcggtttgngtaaagcaaagcgaaacgcccaagacgggcaagcagctttgcagaatagcgaaagcgctctcggcgaaatcaccaatatgatgcaaagacagaagaaatggcagtgcaatctgccaacgatactctga

SEQ ID NO: 10012 - protein, 124 aa, Unknown
  Obtained from environmental sample
  DOMAIN (50)...(123): Bacterial flagellin N-terminus
  misc_feature (1)..(124): Xaa is any amino acid
MSERVWRCGREIRGLNITWRSNPMQINHNIRAMVTQQSLSLNDNAMARSLEKLSTGLRINRAQDDAAXLAMSEQMRTQIRGLXKAKRNAQDGQAALQNSESALGEITNMMQRQKKWQCNLPTIL

SEQ ID NO: 10013 - DNA, 339 bp, Unknown
  Obtained from environmental sample
  misc_feature (1)..(339): n is a, c, g, or t
atgaaaaccagcgtcagtgaggctttaatactctgctttgtaatggctgttgtgatattcttttgcaggatttttccgtttttgttttttcgggaaaaaaccggcaatatccggagcggctttcttgcatttgtcgaaaaaacagcgccgcctgtggctatgaccgttttggctttcaattccctcgccgtccctgtaaaatcaaaccccggcgggataatccccgttatagcggcggcaattttaaccgctttaatacatatctggaagcgtaacgctcttttaagcatctgcggcgggacggccttgtatatgctgttgattagggtgtggatataa

SEQ ID NO: 10014 - protein, 112 aa, Unknown
  Obtained from environmental sample
  DOMAIN (8)...(109): Branched-chain amino acid transport protein (AzlD)
  misc_feature (1)..(112): Xaa is any amino acid
MKTSVSEALILCFVMAVVIFFCRIFPFLFFREKTGNIRSGFLAFVEKTAPPVAMTVLAFNSLAVPVKSNPGGIIPVIAAAILTALIHIWKRNALLSICGGTALYMLLIRVWI

SEQ ID NO: 10015 - DNA, 372 bp, Unknown
  Obtained from environmental sample
  misc_feature (1)..(372): n is a, c, g, or t
atgacggatgaaaccttcgctctgttatcttcactcccccactctgaaaagaaatccgaacaaattacatntatgttccttgtcacacttctggatcagttctactgggtattgggcggattgatcggagcagtcgccggttcaataatccccttcaataccgatggaatagcatacgcccttacaccactgtttatagtccttatgatcgaacagattctccgcgtgcggaaacccggcatcttcattatttcggcgtctctcgcggtactgtgcgtgttactgttcccctcgcgcgtttcattgcttgcggcaatggcgctttcactggcggcagtacagttaatatataacaaaggaaaaaaattatga

SEQ ID NO: 10016 - protein, 123 aa, Unknown
  Obtained from environmental sample
  misc_feature (1)..(123): Xaa is any amino acid
MTDETFALLSSLPHSEKKSEQITXMFLVTLLDQFYWVLGGLIGAVAGSIIPFNTDGIAYALTPLFIVLMIEQILRVRKPGIFIISASLAVLCVLLFPSRVSLLAAMALSLAAVQLIYNKGKKL

SEQ ID NO: 10017 - DNA, 615 bp, Unknown
  Obtained from environmental sample
  misc_feature (1)..(615): n is a, c, g, or t
atggacgaatacgcgggcatcccgcctgagcaccctcaaagctatcatttctttatgatggaaaatctttttaaacatattgatattgatcttgccaatacccatttgctcgacggcatggcaaaagatcccgtggaggaatgtaaacgctacgaggaggccatcgcggaaaaaggcggcatagagcttttccttgggggcatgggcagcgacgggcatatcgcttttaacgagcctggctcttccctgcagtcaagaacaaggattaaaaccctcacccctgaaacaaaagtcgccaacgcccgttttttcggcggagatccctcaaaagtcccgtcaaccgcgctgaccgtaggcgtcggaacagtgatggacgcgcgcgaagtgctgatcatagcgagcggcagaaacaaggcccgcgccttacgcgccgttgtggaagacgggatcagccatatgtggacgctttcctgcctgcaaatgcaccacagggcgatcatagtctgcgatgaagatgcgaccgacgaacttaaggtgggaactgtccgttatttcaaggatttggaaaanatcgttaacgaaaataatttgaacgggacgggaaaagggaagtag

SEQ ID NO: 10018 - protein, 204 aa, Unknown
  Obtained from environmental sample
  DOMAIN (1)...(180): Glucosamine-6-phosphate isomerases/6-phosphogluconolactonase
  misc_feature (1)..(204): Xaa is any amino acid
MDEYAGIPPEHPQSYHFFMMENLFKHIDIDLANTHLLDGMAKDPVEECKRYEEAIAEKGGIELFLGGMGSDGHIAFNEPGSSLQSRTRIKTLTPETKVANARFFGGDPSKVPSTALTVGVGTVMDAREVLIIASGRNKARALRAVVEDGISHMWTLSCLQMHHRAIIVCDEDATDELKVGTVRYFKDLEXIVNENNLNGTGKGK

SEQ ID NO: 10019 - DNA, 609 bp, Unknown
  Obtained from environmental sample
  misc_feature (1)..(609): n is a, c, g, or t
atgttcggcttcattctggacaaggcaagcttaagatcaatacgaatctgtatctccggaggcggcccgctggctcccagcgtttttagaaagtacaaccagcttggaatcgactttgtacaaggttacgggcttactgaaacttctccgattataacgatcaatcctattgagcaatacaaagaaaccagcgtaggccgcacctgcccgcatgtagacatgaagatactcaacgccgacgagcgcggaataggagaggtaattgtaaagggtcctatggtaatgaaaggttattacaatctgccggaagagacagccgcggcgtttacatccgacggatacctgaaaaccggcgatttagggtacatggacagcgaaaattatctttaccttacagggcgcggcaagaacatgatcgttaccgaaggcggaaagaacgtatatccggaagaaatcgaaaacgaattccagctttacgacgagattgaacagatattaatacgcggctatgtgcttgacgcgaaaatgaaaagcgaaggcattgaagcccttgtatatccaaacccggaattcaaaaatgaagcaggcaacccagcctgccgagggtga

SEQ ID NO: 10020 - protein, 202 aa, Unknown
  Obtained from environmental sample
  misc_feature (1)..(202): Xaa is any amino acid
MFGFILDKASLRSIRICISGGGPLAPSVFRKYNQLGIDFVQGYGLTETSPIITINPIEQYKETSVGRTCPHVDMKILNADERGIGEVIVKGPMVMKGYYNLPEETAAAFTSDGYLKTGDLGYMDSENYLYLTGRGKNMIVTEGGKNVYPEEIENEFQLYDEIEQILIRGYVLDAKMKSEGIEALVYPNPEFKNEAGNPACRG

SEQ ID NO: 10021 - DNA, 381 bp, Unknown
  Obtained from environmental sample
  misc_feature (1)..(381): n is a, c, g, or t
ttgaaagaacattttccgaagataattcttgcggaagaaaataaagccgccgtaagtcttgcgagagaaaatttaagaggaacagagtctgaatttttcgctgtccgtgatacaaattggcataatgatctattgcgccgaaaagattcattcggctttgccgttgttgatccgccgagagcgggacttgcgccgaaaacggcggcggcgttggcgcaggagggaccgcctttgctcgcctatgtttcctgcgacgccgcttctcttgcccgtgacagtaaaatattaacaaatagcggatatcaaataaaaaaactcgccttttttgatttctatccgcagacagcgcatatagaaagtcttgctgtttttgaaagataa

SEQ ID NO: 10022 - protein, 126 aa, Unknown
  Obtained from environmental sample
  misc_feature (1)..(126): Xaa is any amino acid
MKEHFPKIILAEENKAAVSLARENLRGTESEFFAVRDTNWHNDLLRRKDSFGFAVVDPPRAGLAPKTAAALAQEGPPLLAYVSCDAASLARDSKILTNSGYQIKKLAFFDFYPQTAHIESLAVFER

SEQ ID NO: 10023 - DNA, 465 bp, Unknown
  Obtained from environmental sample
  misc_feature (1)..(465): n is a, c, g, or t
atgcttcaggatgaaagttattttgaaagccacgacggggctaaactttatctttatcgctggtcgcctgaacaaggaagcagggcagtactgcacattgttcatggaatggcggaacatgcgcttcgttaccgccgccttgccgaaaaattaactcaatcgggaattgaagtgtgggctgcggatcaaagagggcacggcaagacagccaattctgatgtaaacgagcttggtaagggcggacttttagggcattgcggagacaataacagcattgcctgcgtaaccgccgatgttcacgcccttaataatgaaatccataaaaaaataccgaatgttccgctgtttcttttaggtcattcatggngttcgtttatagtacagaaccatattgaatattcggacgacataaaaattacggatgtattttatcgggaacaaagggacccgggaatttcgagataa

SEQ ID NO: 10024 - protein, 154 aa, Unknown
  Obtained from environmental sample
  misc_feature (1)..(154): Xaa is any amino acid
MLQDESYFESHDGAKLYLYRWSPEQGSRAVLHIVHGMAEHALRYRRLAEKLTQSGIEVWAADQRGHGKTANSDVNELGKGGLLGHCGDNNSIACVTADVHALNNEIHKKIPNVPLFLLGHSWXSFIVQNHIEYSDDIKITDVFYREQRDPGISR

SEQ ID NO: 10025 - DNA, 774 bp, Unknown
  Obtained from environmental sample
  misc_feature (1)..(774): n is a, c, g, or t
atgctggtgcttaccagcgatcacgtattcaacccgcttgaagttnttttgaaagactccggcatagccgcgcggtntgcggcgcaggaccggcttgttgtatttggcatttccccatcaggaccggaaaccggttacggttatattgaggcggcggaaaaacttgacggggatgtttatgccgtcaccgcgtttcgtgaaaaacctgaccgggaaacggcggaacggtttcttgcttcaaaaaaacatttctggaattcggggatgtttgcctttcgttgtgaatttctggcggaagaataccgccgtttggcggcggatgtaaacagcccctttgaaaatcttaaaacccccgataaaaaatcatacacaaaaacaaaaggtctttgtgtgttagactcatgggcgggtctggataaagcctacaatcaggcaaagggtatttcctttgattatgccattgccgaaaaatgcgcgcaaactgttatgatccgcgcggattttgactggattgatgtaggcagctgggatgattatgcccggcttctttcaaacaattccgccaaggatgtatatgccgccgaaacaaacggttgctttgttgattccgatattcccgttgcccttgccggagttgatgatcttattgtggtaatccgttcaggcaaagatggttctcctcccgcggcgctgattacacaaaaaggtaaaacccagcttgtgcgcgatattgtcgaaaaaataaagcaggcggacagaacggaaattttatag

SEQ ID NO: 10026 - protein, 257 aa, Unknown
  Obtained from environmental sample
  DOMAIN (1)...(189): Nucleotidyl transferase
  misc_feature (1)..(257): Xaa is any amino acid
MLVLTSDHVFNPLEVXLKDSGIAARXAAQDRLVVFGISPSGPETGYGYIEAAEKLDGDVYAVTAFREKPDRETAERFLASKKHFWNSGMFAFRCEFLAEEYRRLAADVNSPFENLKTPDKKSYTKTKGLCVLDSWAGLDKAYNQAKGISFDYAIAEKCAQTVMIRADFDWIDVGSWDDYARLLSNNSAKDVYAAETNGCFVDSDIPVALAGVDDLIVVIRSGKDGSPPAALITQKGKTQLVRDIVEKIKQADRTEIL

SEQ ID NO: 10027 - DNA, 399 bp, Unknown
  Obtained from environmental sample
  misc_feature (1)..(399): n is a, c, g, or t
atgagcgaaagatttgtaaatatagacagggaaacgccgatgttgtttccagcggatatgagggaatggctgcccgaggatcatttagtctattttgtaatagaggcgatagaagaaataggggtggccggatttaaagtaaaccggcgcggcagcggaagcgaacagtacccgccggagatgatgttggcgttattggtatacagttatgtgacagggcggttcggatcgaggacgatagaagcggcgacatatacggacgtggcgctcagatacatatgcggaggggaagcgcatccggatcattccgtaatctgcgcgttccgcaaagataacaaggaagtatttgaggaaacatttacaaagatacttgttttagccaggcagagaaaaaactga

SEQ ID NO: 10028 - protein, 132 aa, Unknown
  Obtained from environmental sample
  misc_feature (1)..(132): Xaa is any amino acid
MSERFVNIDRETPMLFPADMREWLPEDHLVYFVIEAIEEIGVAGFKVNRRGSGSEQYPPEMMLALLVYSYVTGRFGSRTIEAATYTDVALRYICGGEAHPDHSVICAFRKDNKEVFEETFTKILVLARQRKN

SEQ ID NO: 10029 - DNA, 645 bp, Unknown
  Obtained from environmental sample
  misc_feature (1)..(645): n is a, c, g, or t
gtggcgcctatttcctatatgccgctggttcccataatacagcccgccgtgataaagctcacgacaacaaaaaaagaacgcatgatccggatgaaccccgcggcggcggatgacgttcccaaagcgcttaaaatcgtgttcccgataatcgttactgtcataacaggttttatttcgccgcaggcggtttcacttatcggctttttgatgttcggcaatttaatcagggaatgtacggtgctcgattcgctttccgagacagcacaaaaaacactttcaaaccttattaccttgctgttgggcattaccgtcgcctttaccatgcaggccgaggcgtttatcacgcttaaaaccctcatgatactgggattgggccttgcggcgtttatccttgataccgcgggaggggtgcttttcgcgaagctgttgaatatttttctgaaaacgaagatcaaccccatgattggcgcgacaggcatttccgcctttcccatgtcggcgcgggttatacagaaaatcgcgctaaaggaagaccccacaaatattttcctgatgcacgccataagcgccaatgtttcaggccagatttgttcggtagcggccgcggggcttgttttaagccttgtcatgccgtaccttaaataa

SEQ ID NO: 10030 - protein, 214 aa, Unknown
  Obtained from environmental sample
  DOMAIN (1)...(210): Na+-transporting methylmalonyl-CoA/oxaloacetate decarboxylase, beta subunit
  misc_feature (1)..(214): Xaa is any amino acid
MAPISYMPLVPIIQPAVIKLTTTKKERMIRMNPAAADDVPKALKIVFPIIVTVITGFISPQAVSLIGFLMFGNLIRECTVLDSLSETAQKTLSNLITLLLGITVAFTMQAEAFITLKTLMILGLGLAAFILDTAGGVLFAKLLNIFLKTKINPMIGATGISAFPMSARVIQKIALKEDPTNIFLMHAISANVSGQICSVAAAGLVLSLVMPYLK

SEQ ID NO: 10031 - DNA, 936 bp, Unknown
  Obtained from environmental sample
  misc_feature (1)..(936): n is a, c, g, or t
ttgccgcgctggctcttgccgcttgtccggcagaagacaagcgcagatcgtatccgggtggtgctggactggacgcctaacacaaaccacacgggcctgtatgtcgcgcaggagaaaggctggtttgccgaagaagggctgacggtggaaataatgcagccgccagaagacgggtcggtgttactgactggatcgggcaacgcggaattcggcattgaggctcaggaaatcatagggccggcgattgccaaaaaaagcgaagccctgccgataacggcggtggcggcaatcatcagccacaacacatcggggataatgtcgctggcggcaaagaatatcaaaagcccccgcgatttggccgggaaacgctatgaatcatgggaaacgccgctggttaccgcgctgataaaagaaattgttgaaaatgacggaggtaaatttgaagatgtaattatggtccccaattactccaccgatcctttatcagccctgcaaaccgacatggacgcgatttgggtgttctacgcatgggaagggcttgccgccgaagtgaatggccttgccattaattttattgatctgggcagcctggacagccgttatgatttctatacgccgatactcttcgccaataccgactggctgggaaaaaaccccgaaagcgcgaagaaattcatgaaggtcgtaagcaggggctatcaattcgccatagccaatcctgacgaggcagggaatatccttctgaagcacgcgcctgaactggaccctgcgcttgttatgcgaagccagaaataccttgtgaaccgctatcaggatgatgcgccgcgctggggtgaattgacagcgaacgctggggtaactttaccgctggatgtacggacacggccttttggaacagacatangctcaggcggttttaccatgagtattgcctag

SEQ ID NO: 10032 - protein, 311 aa, Unknown
  Obtained from environmental sample
  misc_feature (1)..(311): Xaa is any amino acid
MPRWLLPLVRQKTSADRIRVVLDWTPNTNHTGLYVAQEKGWFAEEGLTVEIMQPPEDGSVLLTGSGNAEFGIEAQEIIGPAIAKKSEALPITAVAAIISHNTSGIMSLAAKNIKSPRDLAGKRYESWETPLVTALIKEIVENDGGKFEDVIMVPNYSTDPLSALQTDMDAIWVFYAWEGLAAEVNGLAINFIDLGSLDSRYDFYTPILFANTDWLGKNPESAKKFMKVVSRGYQFAIANPDEAGNILLKHAPELDPALVMRSQKYLVNRYQDDAPRWGELTANAGVTLPLDVRTRPFGTDIXSGGFTMSIA

SEQ ID NO: 10033 - DNA, 354 bp, Unknown
  Obtained from environmental sample
  misc_feature (1)..(354): n is a, c, g, or t
atgcgccagaaggcggccttattgagaacctgtcagacaggcagcaagacaatacttcttgacgaacgttcttcgccctttgacgccataacccgcgcngaaatgcaaaactggtaccgggaaatcgccctggcaatggggctttcaacctttttcattacncatgacgtagaggaagccntgctgctttcagacactgtgtacatactcaagggcaagccgggaataatcacaaatatttttgaggtactgccatgccgaccaagaagccgggacttcgttgtttcgcgggagtttgctgagcagaaaaaagagatactggaagcgattcgaaccctgatccccgctccttag

SEQ ID NO: 10034 - protein, 117 aa, Unknown
  Obtained from environmental sample
  misc_feature (1)..(117): Xaa is any amino acid
MRQKAALLRTCQTGSKTILLDERSSPFDAITRAEMQNWYREIALAMGLSTFFITHDVEEAXLLSDTVYILKGKPGIITNIFEVLPCRPRSRDFVVSREFAEQKKEILEAIRTLIPAP

SEQ ID NO: 10035 - DNA, 546 bp, Unknown
  Obtained from environmental sample
  misc_feature (1)..(546): n is a, c, g, or t
ttgatgcggtttgggcgctcttccctgcttaacccggcaaagcgaaacaagacaggctttatcaacataaactccgttgaatgccccggcaaccccaataccgtgccggatcattcggttataaccgggcagatccacttcttcgacgaggcggaaggggaagcggttgtttcggaaatgaaagccgcagtctcaagttttgcggcacattgcgcggaaggggaaacgtgtactgcggacattgcgtttgttcatgactgcgcgccctggagcgtttccggcggcgatcccattatcacctatgccagggaagctgccgcaaaggcttcacttccctttgagttgggcgaatccagatcgggaagcgacgctcaggttattcaccagcgcggcgggaaggttgtcaaagtttccacgggaatgatgaagcctcactcaaaagaggagtacatcgaccttgaggatatgaaccggtgcgcggattatttgtggcaccttgcggtggcgtccccgccgccgttactcttttcatcggaggaactatga

SEQ ID NO: 10036 - protein, 181 aa, Unknown
  Obtained from environmental sample
  misc_feature (1)..(181): Xaa is any amino acid
MMRFGRSSLLNPAKRNKTGFININSVECPGNPNTVPDHSVITGQIHFFDEAEGEAVVSEMKAAVSSFAAHCAEGETCTADIAFVHDCAPWSVSGGDPIITYAREAAAKASLPFELGESRSGSDAQVIHQRGGKVVKVSTGMMKPHSKEEYIDLEDMNRCADYLWHLAVASPPPLLFSSEEL

SEQ ID NO: 10037 - DNA, 486 bp, Unknown
  Obtained from environmental sample
  misc_feature (1)..(486): n is a, c, g, or t
gtgcgcggattatttgtggcaccttgcggtggcgtccccgccgccgttactcttttcatcggaggaactatgaaatccataacacaggaactctggttcaacacaaagaagaatcgggagtttatcaacatcaccggagaggtggaaaaactgctgtcccagtctgggatacaggaagggctgtgtctggtaaacgccatgcacattaccgccagcgtttttatcaatgacgacgagtccggccttcaccatgactttgacgtatggctggaaaaacttgccccccatgagccggtggcttcgtaccgtcacaatacaggtgaaataaacgccgacgcccacatgaaacgccagatcatgggccgggaagtggttacagccgttaccgggggccgtcttcacctgggccccctgggacagatcttttacngcgagttcgacggacagcggcgcaaacgggtattgataaaaatcatcggggaatga

SEQ ID NO: 10038 - protein, 161 aa, Unknown
  Obtained from environmental sample
  DOMAIN (41)...(159): Uncharacterised protein family UPF0047
  misc_feature (1)..(161): Xaa is any amino acid
MRGLFVAPCGGVPAAVTLFIGGTMKSITQELWFNTKKNREFINITGEVEKLLSQSGIQEGLCLVNAMHITASVFINDDESGLHHDFDVWLEKLAPHEPVASYRHNTGEINADAHMKRQIMGREVVTAVTGGRLHLGPLGQIFYXEFDGQRRKRVLIKIIGE

SEQ ID NO: 10039 - DNA, 870 bp, Unknown
  Obtained from environmental sample
  misc_feature (1)..(870): n is a, c, g, or t
atgagccacgagatacgcacgccgatgaacgcgatcctgggcatcaccgaaattcaactggaaaacgacgctgttttaccggagatgaaggaagctttcagtgaaatttacaattcgggctatttgctgctgggtatcatcaacgacatactggacctttccaaaattgaggccggcaagatggaattatcaccatcggtctatgatgtgccaagcttcatcaacgataccgtgcatctcaatattatgcgatacgacagcaagccggtaggatttcatcttcatgtggatgagaacattccgttaaagttgtacggcgacgaactccgtatcaaacagattctaaataacctgctttccaatgcctttaaatatacggatgagggcgagatttcgctgtccgtcgccgccgaatatgccccgcagggcgccactcaggtaacgcttgtttttcaggtgagcgacacaggtcagggcatgaccggcgagcagttggtcaagctgttcgacgagtacacacgctttaacccggaatcaaaccgcacaacccagggttcgggtctgggcatgaacattacaaagcatctggtcaaaatgatggatggcgagatttccgtggagagcgagccaggtaaaggctctgtgtttaccgtgcgtctgccgcaggggattaccggagccgatactttaggcagcgaagtggtggaaaacctgaagcagttccgtgttgacagaaccggacaaaataaaaaaggcccccgaatagtacgtgagtttatgccctatggcaggattttgattgtcgacgatgtggaaacaaacctgtacgtcgcaaaaggactggtgtcaccatatggactgtctgtttga

SEQ ID NO: 10040 - protein, 289 aa, Unknown
  Obtained from environmental sample
  DOMAIN (1)...(59): His Kinase A (phosphoacceptor) domain
  misc_feature (1)..(289): Xaa is any amino acid
MSHEIRTPMNAILGITEIQLENDAVLPEMKEAFSEIYNSGYLLLGIINDILDLSKIEAGKMELSPSVYDVPSFINDTVHLNIMRYDSKPVGFHLHVDENIPLKLYGDELRIKQILNNLLSNAFKYTDEGEISLSVAAEYAPQGATQVTLVFQVSDTGQGMTGEQLVKLFDEYTRFNPESNRTTQGSGLGMNITKHLVKMMDGEISVESEPGKGSVFTVRLPQGITGADTLGSEVVENLKQFRVDRTGQNKKGPRIVREFMPYGRILIVDDVETNLYVAKGLVSPYGLSV

SEQ ID NO: 10041 - DNA, 849 bp, Unknown
  Obtained from environmental sample
  misc_feature (1)..(849): n is a, c, g, or t
ttgccccttggaagtcaaacctgcgcggagatgctcaggtttttctttacaagagttaacgagcttgatcctttaaccgacagcttcgccgccggaatttttatcaactattttatacgccttgctttgccgattcttttggtgggtatagcggctgctcttttttcaaatgtggtacagacaggttttctttttactacaaagccactggaacctgatttttccaaggttttgccgaagtttgcccgctattttcagcgcatcttttcggtagaagggcttgttaaccttggcaaatcaatagttaaaatgggtcttatcggcgcagttgcctttttcattatccagtcgaaattcagagagctggccaatctccaaacggcgggcctgtggtcgggaataacccttgtcgcaacactggcggcgcaattactggttgttacagctttgctcctccttgttatttcaattcctgacatttttttccagcgctaccagtttaaagaatccttgaagatgacccgtgaagcgttcaaggaggagttaaagcaggatgagggagatcccgacgtaaggaacagactcaagagccgttaccgggaaatgctgtcacggaatatgctgaacgccgtgcccaacgcggatgtggttattacaaacccgacccattattctgtggccctgcaatacgacatggatgccaaaatggaggcgcccgtagtcgttgccaagggagaagatgagcttgcgctcagaattcgtgaggtggcgaaagcgaatggcgtacccgtggaatcccacccgcctttgactcgtgcgctttatcaagaaccgaggtgggggatataa

SEQ ID NO: 10042 - protein, 282 aa, Unknown
  Obtained from environmental sample
  DOMAIN (1)...(281): FlhB HrpN YscU SpaS Family
  misc_feature (1)..(282): Xaa is any amino acid
MPLGSQTCAEMLRFFFTRVNELDPLTDSFAAGIFINYFIRLALPILLVGIAAALFSNVVQTGFLFTTKPLEPDFSKVLPKFARYFQRIFSVEGLVNLGKSIVKMGLIGAVAFFIIQSKFRELANLQTAGLWSGITLVATLAAQLLVVTALLLLVISIPDIFFQRYQFKESLKMTREAFKEELKQDEGDPDVRNRLKSRYREMLSRNMLNAVPNADVVITNPTHYSVALQYDMDAKMEAPVVVAKGEDELALRIREVAKANGVPVESHPPLTRALYQEPRWGI

SEQ ID NO: 10043 - DNA, 936 bp, Unknown
  Obtained from environmental sample
  misc_feature (1)..(936): n is a, c, g, or t
atgaacggcgcaagcaagttcatttccggaaacgtcacatccgcgattctggttaccgttattgacgctttgggcggcctcattataggagcggccctcacgggggagcctttaaccacggctctgacaacctatacttctctctcaataggcgacggactcctttcgcagcttcctgcccttcttatttctaccgccatgggtatcgtggtaacccgcgcggcggctccgggcgatttgggcgaacaagtcgcgatacagttttcaagagactcaagggcctattggatcgcgtcggtggttcttttcggcattgcctggctgccgggtttcccaaaatatgtgcttattcccatgtccgtactcatcggtttctatgcttttaatataggccgggtacagaaaaagcaggaaagttttaatgaaatgatgaccaaaacgggggaggcgggcaggaaggccaaagatgataaaggggatattcctcaaatggaaccgcctgatcacctgtcccttgagctgggcttcggccttattccccttgtggacaaggacaagggagctgagcttctggaacgcatgcagggaatgcgccgccagatcgctttggacatgggaattgtaattccaaaaatcaggatcattgacaacatacagttgggttcttccgaatactgttttaaaatccgcggggtagatgttggaaagagtacaatcaggatgggtaactacctttgcattaaccccggaacggccaaggaagaattgtccggggagaagacaacggatcccgcgtttggccttccggcaatctggattggcgaagacaagcgggacgaggctgaacgggcgggctataccgttgtggatcctccctcgataattgcgacccatcttaccgagataatcaaacgccaatgcctcggccgattctga

SEQ ID NO: 10044 - protein, 311 aa, Unknown
  Obtained from environmental sample
  DOMAIN (1)...(311): FHIPEP family
  misc_feature (1)..(311): Xaa is any amino acid
MNGASKFISGNVTSAILVTVIDALGGLIIGAALTGEPLTTALTTYTSLSIGDGLLSQLPALLISTAMGIVVTRAAAPGDLGEQVAIQFSRDSRAYWIASVVLFGIAWLPGFPKYVLIPMSVLIGFYAFNIGRVQKKQESFNEMMTKTGEAGRKAKDDKGDIPQMEPPDHLSLELGFGLIPLVDKDKGAELLERMQGMRRQIALDMGIVIPKIRIIDNIQLGSSEYCFKIRGVDVGKSTIRMGNYLCINPGTAKEELSGEKTTDPAFGLPAIWIGEDKRDEAERAGYTVVDPPSIIATHLTEIIKRQCLGRF

SEQ ID NO: 10045 - DNA, 714 bp, Unknown
  Obtained from environmental sample
  misc_feature (1)..(714): n is a, c, g, or t
atggatgaattcaggattcacggcgttaacgcccccgttccggtagtacggaaataccccctgcagggcggaagaattgaaaccagagccgtcgatctgggtgaaggaagtaatggcgtattaaaacttgaagcttccggcggcaggattgccgtacgggacgcaaaaatcaacaatgaattcaagcggaacggcaggttccgtttttccgatgattctgaaatgcaattttttatccgcagttcggaaaatccttaccgctgggacggtccatggcaggccgtaacgcccggcgcggatattgtcggcattattcaaggacgttatgtgcaatttgcggttgatttttatccatcggcaaacggcgaatcaagtccgtatcttgaagaactgggcataacgtatcttcccgatgagcctccccttccccctgcccaacttaccgccattgccatggacggcgcggtacaacttcgttggaaaagcagccccgaccaaaatacccgcggctatctggtgtattacggcacggcaagcgacgattatttcggcgaagatgccgtactggggatttctcccattgatgtcggtaaacaaaatactatttacattgacggcctgaaaaacggcaccttgtattatttccgcgtggcggcctatacccaccatgccggtgaattctcccgcgaagtgcgggcacggcctttgcagtaa

SEQ ID NO: 10046 - protein, 237 aa, Unknown
  Obtained from environmental sample
  DOMAIN (141)...(228): Fibronectin type III domain
  misc_feature (1)..(237): Xaa is any amino acid
MDEFRIHGVNAPVPVVRKYPLQGGRIETRAVDLGEGSNGVLKLEASGGRIAVRDAKINNEFKRNGRFRFSDDSEMQFFIRSSENPYRWDGPWQAVTPGADIVGIIQGRYVQFAVDFYPSANGESSPYLEELGITYLPDEPPLPPAQLTAIAMDGAVQLRWKSSPDQNTRGYLVYYGTASDDYFGEDAVLGISPIDVGKQNTIYIDGLKNGTLYYFRVAAYTHHAGEFSREVRARPLQ

SEQ ID NO: 10047 - DNA, 849 bp, Unknown
  Obtained from environmental sample
  misc_feature (1)..(849): n is a, c, g, or t
atgaatgcggcaatagaagcggctcacgcgggcgaaattggcaaagggttcgcggtggttgcgacagaagtacgaaagcttgccgaaagcacgactaagaattcaaaacaaatcgccgcctcgctaaaatccatcattgatcagataaatggcgcgaaggcggccagcgatagcgccggcaaaacatttttgaatgttaagaatgatgtcgaaatatttattgaggctcttcaggaaatagcccattcgaattctgaattgcacaccagtacgaatcgtatattcagttctatggatgaattaaaatctatctccggtgaaatagcggtatgcagcaaagagattgttgccggtactgataacattgattcagttttacgatcaacaaaggagttttctgaaaaactggcaaccgaggtgggtgaaatcgaagaaaagatatatgacatcagcggcgcgcaaagcggaattaccctgtatttggtggataccaataaaaatattgagggcttttaccagaagatgatggaaaaaggggaacttgagaaggaagaccacctgtttaattatgacttaatcgtacttatgcaccgtaactggctgatacagttacgggcttttttggacggcaggaaagaaaacctgaaagccacttcggaagatcatttgaaatgcgatttggggcggtggatatacggagaaggcaaacgttttcagtcaagcagaagctacaatgaattggaatcccaacatagaaacttccatgcgaaggccggggcgataataaaggcaaaaacagaaggaaaaaaagagcaggccgagcaaatgtatcaggaactgatgaaatga

SEQ ID NO: 10048 - protein, 282 aa, Unknown
  Obtained from environmental sample
  misc_feature (1)..(282): Xaa is any amino acid
MNAAIEAAHAGEIGKGFAVVATEVRKLAESTTKNSKQIAASLKSIIDQINGAKAASDSAGKTFLNVKNDVEIFIEALQEIAHSNSELHTSTNRIFSSMDELKSISGEIAVCSKEIVAGTDNIDSVLRSTKEFSEKLATEVGEIEEKIYDISGAQSGITLYLVDTNKNIEGFYQKMMEKGELEKEDHLFNYDLIVLMHRNWLIQLRAFLDGRKENLKATSEDHLKCDLGRWIYGEGKRFQSSRSYNELESQHRNFHAKAGAIIKAKTEGKKEQAEQMYQELMK

SEQ ID NO: 10049 - DNA, 480 bp, Unknown
  Obtained from environmental sample
  misc_feature (1)..(480): n is a, c, g, or t
atgtatacaatcggcaccccgaggctctcaccttgcgttaagggcctgataatcgccaacgtcgcggtgttcatattgcagctgcttcccggcggcataggcggcatggtgaccggtttcggcgcgatgaatcctatatacgcgttcaaatacttccagctttggcgtcttgtgacgtacatgtttttgcactcgcccgacatgctgttccacatcctattcaacatgctctccctatggtggttcggcgtggagcttgaggacatttggggcaagcgcaagtttttgattttctactttgtttgcggtgtcggatcgggcctgtttacgcttttttattttcttgtgaacccttatgttattgtgataggcgcctccggcgcggtactgggattgctcacggcctacgctgtgttctacccgcagaggcaggtgctgattttcggcattttccctatgaagatgcggacgcttggatag

SEQ ID NO: 10050 - protein, 159 aa, Unknown
  Obtained from environmental sample
  DOMAIN (48)...(159): Rhomboid family
  misc_feature (1)..(159): Xaa is any amino acid
MYTIGTPRLSPCVKGLIIANVAVFILQLLPGGIGGMVTGFGAMNPIYAFKYFQLWRLVTYMFLHSPDMLFHILFNMLSLWWFGVELEDIWGKRKFLIFYFVCGVGSGLFTLFYFLVNPYVIVIGASGAVLGLLTAYAVFYPQRQVLIFGIFPMKMRTLG

SEQ ID NO: 10051 - DNA, 981 bp, Unknown
  Obtained from environmental sample
  misc_feature (1)..(981): n is a, c, g, or t
atgaaagaagattattcccaatacaaagtaaggggccattatactaaaaacggaatccttggcgcgtacttccgcgcgcttatgtggtttggcagaatcaattttactcttggcggcgaaaacaacgaagctaaagaggcggcaaaaaaaattgcccctgtcgctcttttgattaccgacataacagataattccccccaaataaaaaaactctggcagtccctttttgatcccattacagaactcataggcgcgtcggatgatataagtttttatgaactcgctccgctttggaatagaattaaaggcgccggttttgtgcaatggtataatgatcccgcaaaacttgaaacttttgtttcaaaaaattataaggaacttcgcgctccggtaatttccggtttttcattatttgagggtcctcatgacggcggagatatgccggaagatcgccttcctccggcaggatggcgtctgttcggccaacgttatactatggacagcgaaatacataattttgcttcttctccaagactttacggacgtatgatggtcagcgggcttgatataatgaaggtctttggatcaaaaaccgcggatcgcttattaaaggaaagcgaatattccagccagcccacactggagaatgtattgaattcgctgcagcaaagcttaatgaaagtaaaagacgatttttggttttcgacatattattcaaacatcctgtaccagataaaaacccaggcactttttgaaaacggcgccggtttttattttacagaaaaacccggctggaacctaaaggcaatgaactcagctcacggaacctgggccgaactcaggcatgatacaatcctttatgtaaaccaagctacgccgaaatgggaggaggagactgggaagttacgtacagaactaaaccccttcggaaactgtccattactggaccgaaagtaccgttctgggttacttccgcaatag

SEQ ID NO: 10052 - protein, 326 aa, Unknown
  Obtained from environmental sample
  misc_feature (1)..(326): Xaa is any amino acid
MKEDYSQYKVRGHYTKNGILGAYFRALMWFGRINFTLGGENNEAKEAAKKIAPVALLITDITDNSPQIKKLWQSLFDPITELIGASDDISFYELAPLWNRIKGAGFVQWYNDPAKLETFVSKNYKELRAPVISGFSLFEGPHDGGDMPEDRLPPAGWRLFGQRYTMDSEIHNFASSPRLYGRMMVSGLDIMKVFGSKTADRLLKESEYSSQPTLENVLNSLQQSLMKVKDDFWFSTYYSNILYQIKTQALFENGAGFYFTEKPGWNLKAMNSAHGTWAELRHDTILYVNQATPKWEEETGKLRTELNPFGNCPLLDRKYRSGLLPQ

SEQ ID NO: 10053 - DNA, 759 bp, Unknown
  Obtained from environmental sample
  misc_feature (1)..(759): n is a, c, g, or t
atgataaaacaagcggttatagtcgcggcgggtcttggctctcgtcttaaagaaaaaacggtttcaaagcccaaaggatttcttgaattgggcggaatcgccattgttgaatggtcggttcaaaaattgctcgcctgcggcgttgaacaaattattattgggacgggttatcgcgccgaagtatatgatgagcttgcgaaaaaatacccggctattcaaacggtgttaagtgccgattatgaaacaacaagcagtatggctacccttagcgtatgcgctccattcgttacaggcgattttctgcttttggaatcagaccttatttacgacgacattggacttactgtcctttgcaatgatattcatgaaaatgttattctcgcttccggcgcgaccaattcgggcgacgaggtgtatcttgaagcggcaaacggccattttttaaaagcgctttcaaaaaacaaagccgaactggcttcaacttacggcgaacttgtcggaatctcgaagatttcccacgcgcttctttcggcaatgtgcgcatattacgaaaaaaaacgcgccgagcttcctaagcttgactatgaacacgcaatcatggcgtgtaccgcgtcaaatccggtatttatccgcaaaattgaatattacgcgtggcgcgaaattgacgacgaaagccatcttgatatggcgcatcgtgttattctgccgcgtatttctgaaaatgatcgntacgtcaaatacgacgcgaagtcttgttaa

SEQ ID NO: 10054 - protein, 252 aa, Unknown
  Obtained from environmental sample
  misc_feature (1)..(252): Xaa is any amino acid
MIKQAVIVAAGLGSRLKEKTVSKPKGFLELGGIAIVEWSVQKLLACGVEQIIIGTGYRAEVYDELAKKYPAIQTVLSADYETTSSMATLSVCAPFVTGDFLLLESDLIYDDIGLTVLCNDIHENVILASGATNSGDEVYLEAANGHFLKALSKNKAELASTYGELVGISKISHALLSAMCAYYEKKRAELPKLDYEHAIMACTASNPVFIRKIEYYAWREIDDESHLDMAHRVILPRISENDRYVKYDAKSC

SEQ ID NO: 10055 - DNA, 648 bp, Unknown
  Obtained from environmental sample
  misc_feature (1)..(648): n is a, c, g, or t
gtgatgcaaaaaatgcaaaatttttctttgataaagcaaatcaggccgccggcgcaaaaaataacggtaaaaagaaaaaaaatgacggaaattgactggtctgtctttacggagaacggacttccacttgaacaaaaaaaaacatctttaactgtcggcgtttttgacggagtacaccgcgggcatcaggcactgatcgcaaatatcgtttcgtataacgctgaatatgttccggtagttgttacatttcgcgaaccaaaaattaaaggcagaattcaatctttccggcagaaggctgaaatgctggaaagtttgggcgtaaaaatactggtggttattgattttaccgaatcattcaagcaaattaaagggatagagtttctagaaatactgctcaagcacggtaatctcggtttttttacggttggcggcagtttccgctgcggttatcaactggacacaggcgcacaggagataaaaacttttttcacttctcataatattcctgtaacaatttttcctgaagttatggaggggtctcttcctgtcagttcaagccgtatacgttctgcaattaattcaggcgatctccggcttgcagaggttatgcttggccgtccattttcccttgaaatacatacttgctga

SEQ ID NO: 10056 - protein, 215 aa, Unknown
  Obtained from environmental sample
  DOMAIN (46)...(187): FAD synthetase
  misc_feature (1)..(215): Xaa is any amino acid
MMQKMQNFSLIKQIRPPAQKITVKRKKMTEIDWSVFTENGLPLEQKKTSLTVGVFDGVHRGHQALIANIVSYNAEYVPVVVTFREPKIKGRIQSFRQKAEMLESLGVKILVVIDFTESFKQIKGIEFLEILLKHGNLGFFTVGGSFRCGYQLDTGAQEIKTFFTSHNIPVTIFPEVMEGSLPVSSSRIRSAINSGDLRLAEVMLGRPFSLEIHTC

SEQ ID NO: 10057 - DNA, 891 bp, Unknown
  Obtained from environmental sample
  misc_feature (1)..(891): n is a, c, g, or t
gtgcggatgtactcggtcgagcacgtgatgtcgtgcttcgcgggcctggagatcgacaactgccgcgtggaggtcaacgcacaggagataccgctcatggacggcagcgccatgccgtacgtcaacctcgtgcaaaaagccggcatagtggagcaaagcgcggaacgcacctacataaacatagacgaaccgctgatgttcgtcaagggcgacatcgctttaggcgtctttccgctcgactacctacgcgtcacgctggagatcgactacaaataccccgcgcttggcgcccagtacacgaccatgttctcgctaaaagactacgtcgccgacttcgccccgtcgcgcactttctgcttcctctccgaaatacaaaaactgcgcgaacagggcctcattaaaggcggcagcctagacagcgccctggtcgtccaagatgtggagttgacagaggagaaaatagagtacatacgcaaactattcgacaactacaaaggccccgtaggccccggacaaaacggctacctcaacaacacggaactgcgcttctggaacgaaccgtgccgccacaaggcgctcgacctcataggcgacctctacctgctgggcaaaccgataaacgcgcacatactggccgcccgcaccggccatgccgccaacatagagaccgctaagatgatccgcgaacaagtcaaaaaacaagaaaaaaagagggccggagaggcgattaaactcacatacgaggatatcacaaagatactcccccaccgcttcccgttcctattaatagataaagtggtcagcataatcccagacaaagaaatcatagcgttaaagaacgtctcctttaacgagactacttcaacggccactttcccggcaatccggtaa

SEQ ID NO: 10058 - protein, 296 aa, Unknown
  Obtained from environmental sample
  DOMAIN (3)...(232): UDP-3-O-acyl N-acetylglycosamine deacetylase
  misc_feature (1)..(296): Xaa is any amino acid
MRMYSVEHVMSCFAGLEIDNCRVEVNAQEIPLMDGSAMPYVNLVQKAGIVEQSAERTYINIDEPLMFVKGDIALGVFPLDYLRVTLEIDYKYPALGAQYTTMFSLKDYVADFAPSRTFCFLSEIQKLREQGLIKGGSLDSALVVQDVELTEEKIEYIRKLFDNYKGPVGPGQNGYLNNTELRFWNEPCRHKALDLIGDLYLLGKPINAHILAARTGHAANIETAKMIREQVKKQEKKRAGEAIKLTYEDITKILPHRFPFLLIDKVVSIIPDKEIIALKNVSFNETTSTATFPAIR

SEQ ID NO: 10059 - DNA, 930 bp, Unknown
  Obtained from environmental sample
  misc_feature (1)..(930): n is a, c, g, or t
ttggtactggtagattcgggtcagacgcttttttccgccgatgccggttcgatttccgggactgtaaaccagatgaagttctgctcgtatgaattgatcaactgggtaaaggaacatgacgcaacattatttttaacagcccatgtaacaaaagagggacttattgcaggtcccaaaacccttgaacacatggtggacaccgttatctactttgagcaaaacgacaaaacttccggtatgagcggaactgtagactgccgttttctgagggctgtaaaaaataggtttggttctatagatgaaatcgggatttttacaatgggagaacacggtctttcacctgttgaagatacaggtcgcctttttctggtcagacgagacggagaattgcctgcgggggtggcgactgccgcggtgcttgaaggcacaagaacgatccttgttgaaattcaagcgcttactattcccgctaaagggactataagccgtgtgttttcagacagaatcgattcaggcagggtatcgcgtatttccgcagctctggagaaacatcttgggctgcgcctttcggatcaagacatttacataaacgccgcgggaggcattcgcattaccgaagtcggcgttgaacttgctcttgcctgcgcattgtactcggcaagaacaggacttcccctgcccactgatcttgtaattgcaggagagctttccctgactggagaaataagaccggtacagcggcttgcggcgcgcgttaagacggctgtaaatttgggatatagctcatttttgggtccggttacagaatctcaacaggatcaaaccataccagaattgaaagtttctaaaaacataaaatccgctattaagatgatttataataatgcgagtattaatgaaaataataacaaaataacgaaaataacttga

SEQ ID NO: 10060 - protein, 309 aa, Unknown
  Obtained from environmental sample
  misc_feature (1)..(309): Xaa is any amino acid
MVLVDSGQTLFSADAGSISGTVNQMKFCSYELINWVKEHDATLFLTAHVTKEGLIAGPKTLEHMVDTVIYFEQNDKTSGMSGTVDCRFLRAVKNRFGSIDEIGIFTMGEHGLSPVEDTGRLFLVRRDGELPAGVATAAVLEGTRTILVEIQALTIPAKGTISRVFSDRIDSGRVSRISAALEKHLGLRLSDQDIYINAAGGIRITEVGVELALACALYSARTGLPLPTDLVIAGELSLTGEIRPVQRLAARVKTAVNLGYSSFLGPVTESQQDQTIPELKVSKNIKSAIKMIYNNASINENNNKITKIT

SEQ ID NO: 10061 - DNA, 492 bp, Unknown
  Obtained from environmental sample
  misc_feature (1)..(492): n is a, c, g, or t
atgccaaaacctatacttaaaacaccgcaccaaacccaacaggagagtatcctgagcgctacgggccggcaggcgcaaagcaaacaagcgcggcagatggacaaaatgaaactagacaggcttntgcggcaaacacgctcaaaaacatatatggacacgcttcgagcgttggacgcgggcggtcgtgtacacaatcaagataaagtcaacgatattatcaatacactgaaaagcgaatttcctgagatcgatttggggggtgttctccttggttacgtatccgtctgttatttgggaaaaccgtacgaggtgcatacgctcgacgtcaccggcggaattatagagcattatgaggccggacgctcccttcctaacggtatggaaaaggcgcggtcgatagccatgagaggcggttatgattttattgaggtttatgtcgattgctgcagagccgtaagcggcaacggggttgtatccgttataccgacataa

SEQ ID NO: 10062 - protein, 163 aa, Unknown
  Obtained from environmental sample
  misc_feature (1)..(163): Xaa is any amino acid
MPKPILKTPHQTQQESILSATGRQAQSKQARQMDKMKLDRLXRQTRSKTYMDTLRALDAGGRVHNQDKVNDIINTLKSEFPEIDLGGVLLGYVSVCYLGKPYEVHTLDVTGGIIEHYEAGRSLPNGMEKARSIAMRGGYDFIEVYVDCCRAVSGNGVVSVIPT

SEQ ID NO: 10063 - DNA, 879 bp, Unknown
  Obtained from environmental sample
  misc_feature (1)..(879): n is a, c, g, or t
gtgatatccggcagtgcggttttagggctgtttatgggggttattctttggtttgcaacgccttctatagtggctctaatgggtttaagcggagagcctgcagatgcggctattaaatttttgcacacaatagcacctgcggtaatgttcagggctttgcaaggaaccctaaccagccttgtggcaactcatggatatactatatggaatttgtttgcgaacataataacccttataataaacgtcgctttgaactatatatttctggaaggttattttggcgttcctgtttttatgcaaggagtttatggcgtagcaatagcaactggtttgtcttgggctatttccgtaatagcattatggataattgttctttaccatcttgaacataaaacatatgtaagagatataaaaaaaggctattatttgcttttgcccgaatggctccgcatagggattccagcggctgttgaacctgtgagtttccaactgtttcaggtttttgttatggccatgtttgttaaactaggtcatgatctcggcgacgcatcaatagtaccggctagggttttttctggagcttttgcaatgttcgcggtggttttaagtgttgggcttggaagcggaagccaaatactggtggctcatttggttgggaacaaggagtttgataaagcgaataaaagaatgcaccaaagccttgtttggagcagttcaagcgcatttgtggtggctgtgttggtggctctaactgggcagcatctgttatctttttacacaactgaccctaacatactgcatttggggggtttgctcctttggtgcgatgttgctctgcaaccgttcaaagcatccaatattgttataacaaatgcttga

SEQ ID NO: 10064 - protein, 292 aa, Unknown
  Obtained from environmental sample
  SIGNAL (1)...(24)
  DOMAIN (154)...(290): MatE
  misc_feature (1)..(292): Xaa is any amino acid
MISGSAVLGLFMGVILWFATPSIVALMGLSGEPADAAIKFLHTIAPAVMFRALQGTLTSLVATHGYTIWNLFANIITLIINVALNYIFLEGYFGVPVFMQGVYGVAIATGLSWAISVIALWIIVLYHLEHKTYVRDIKKGYYLLLPEWLRIGIPAAVEPVSFQLFQVFVMAMFVKLGHDLGDASIVPARVFSGAFAMFAVVLSVGLGSGSQILVAHLVGNKEFDKANKRMHQSLVWSSSSAFVVAVLVALTGQHLLSFYTTDPNILHLGGLLLWCDVALQPFKASNIVITNA

SEQ ID NO: 10065 - DNA, 930 bp, Unknown
  Obtained from environmental sample
  misc_feature (1)..(930): n is a, c, g, or t
gtgttcatgcccgtgggaccagccggcaccgttaaggcaatgaccgttgaagacttaaaagaaatcggttttgagattatcctttccaatacctaccacctgtacctccgccccggcatggaagtcatggcaggcgcgggagggctgcatcgttttatgaactgggatcgtaatatattaaccgattccggaggctttcaggttttttcgctttccgccctgcgtaaagtgggctccgaaggggcatggttccagtcgcacattgacggttcccggcattttttaagcccggaaaaagcggttgatattcaatgtatcataaacagcgatattcagatgcagcttgatgtgtgcagcggctggggcagcagccgcaaggattcggaacaggcccttgcgataaccattgaatggatgacaagggcgtacagcacctgggacatgcggcgggcggaaggctaccagggtagtttattcagtattgtgcaggggaattttttccccgatctgcggaagcgcagcgttgagacttgtaatgccgccggtacgccgggcatcgccataggcgggctttccgtgggtgagccgcccgaaatcttttccgagactcttacccttaccgccgccctgctgcccgatgaaaaaccccgctatgttatgggtattgggacgccggaatatatccttgaagccatagaaaacggcatagatatgtttgattgcgtgctgcccaccagggaggggagaaacggcagggtgtatacccgcaacggcccttttgccctgaaaaagagcgaaaatcgcatggattttatgccgatagataaggagtgtacctgtaaagtatgccggcagtacacgagggcataccttcgccacctgtataaaacccaggagatacttgttccatgtggcaagtttcggcgataa

SEQ ID NO: 10066 - protein, 309 aa, Unknown
  Obtained from environmental sample
  DOMAIN (98)...(309): Queuine tRNA-ribosyltransferase
  misc_feature (1)..(309): Xaa is any amino acid
MFMPVGPAGTVKAMTVEDLKEIGFEIILSNTYHLYLRPGMEVMAGAGGLHRFMNWDRNILTDSGGFQVFSLSALRKVGSEGAWFQSHIDGSRHFLSPEKAVDIQCIINSDIQMQLDVCSGWGSSRKDSEQALAITIEWMTRAYSTWDMRRAEGYQGSLFSIVQGNFFPDLRKRSVETCNAAGTPGIAIGGLSVGEPPEIFSETLTLTAALLPDEKPRYVMGIGTPEYILEAIENGIDMFDCVLPTREGRNGRVYTRNGPFALKKSENRMDFMPIDKECTCKVCRQYTRAYLRHLYKTQEILVPCGKFRR

SEQ ID NO: 10067 - DNA, 504 bp, Unknown
  Obtained from environmental sample
  misc_feature (1)..(504): n is a, c, g, or t
atgagttctgttgacgtattcaaggaaatacaaaaaaaaaccgccgaccttaacgtccgcgtgaacgaaagacagaacaaggtttccgcccttgcgcttgcccttgaagataccctgcgcgcggggccttcctcggaaaactggaaccgcaggaacaaccagtttaccgcttttcagcgggaaacacaggtactgcaagccatgcaaaaggatcgcagcctttccctgtattggcttgaattttacaagaaattctccatcccattcggggcattttcgtttatttttcttgcagtttctttggggcttatggcaaaacgaagcggacagactgttggttttatttttgggcttatcattgcggtcttttactgggcgctgcttctggccgggcagaccttgggaatacgattcaacacttctcccttctggtcaatgtggatgcccaatattttggcgttatcggcgggtcttattctggctattatcaaggtagcaaaatga

SEQ ID NO: 10068 - protein, 167 aa, Unknown
  Obtained from environmental sample
  misc_feature (1)..(167): Xaa is any amino acid
MSSVDVFKEIQKKTADLNVRVNERQNKVSALALALEDTLRAGPSSENWNRRNNQFTAFQRETQVLQAMQKDRSLSLYWLEFYKKFSIPFGAFSFIFLAVSLGLMAKRSGQTVGFIFGLIIAVFYWALLLAGQTLGIRFNTSPFWSMWMPNILALSAGLILAIIKVAK

SEQ ID NO: 10069 - DNA, 453 bp, Unknown
  Obtained from environmental sample
  misc_feature (1)..(453): n is a, c, g, or t
gtggatgcccaatattttggcgttatcggcgggtcttattctggctattatcaaggtagcaaaatgaggataatgatactggaccgctatctggtacgccagtttctgcccatttttgccgtagccagcgccatgtttatgctcctcctttcgttaattgatctgtttgcaaatctggtacgttatctcaactatgaggttccctttgcccagatcatgaagataagcctattcttcctgcccaagagtttttcttacgccctgcccatatccctgctttttgcctcggcctatactctgggagacttgtatgcccgcaacgaacttacttctatcttttcttcgggaatccctttctggcgattcagtatgccgttggtgtttatcggggtctttgcttcggtcttttcattttttttgacgatagggttgtcatacctacgatgcaggtaa

SEQ ID NO: 10070 - protein, 150 aa, Unknown
  Obtained from environmental sample
  misc_feature (1)..(150): Xaa is any amino acid
MDAQYFGVIGGSYSGYYQGSKMRIMILDRYLVRQFLPIFAVASAMFMLLLSLIDLFANLVRYLNYEVPFAQIMKISLFFLPKSFSYALPISLLFASAYTLGDLYARNELTSIFSSGIPFWRFSMPLVFIGVFASVFSFFLTIGLSYLRCR

SEQ ID NO: 10071 - DNA, 324 bp, Unknown
  Obtained from environmental sample
  misc_feature (1)..(324): n is a, c, g, or t
atggcgagcttcggattggaacttgccgggctttcgctgaatgtttccatagtctccgcgtttgttttggcggcggcggtcaactacactctatgcatcctaatcttgtttcaacacaactcgcgatggaataacctcggggaactttcgctctatttgctgtcggtcgcgttaatgggcgccatagactacggaatgacgcacgggttaatcgcgctgtcgtgcggcgcgcttgtatccaaattcatcgccgcgatcgccggatttatcggaaactttgttttgaggcgttgggtggtttttccggaaaagaagagggcataa

SEQ ID NO: 10072 - protein, 107 aa, Unknown
  Obtained from environmental sample
  SIGNAL (1)...(24)
  misc_feature (1)..(107): Xaa is any amino acid
MASFGLELAGLSLNVSIVSAFVLAAAVNYTLCILILFQHNSRWNNLGELSLYLLSVALMGAIDYGMTHGLIALSCGALVSKFIAAIAGFIGNFVLRRWVVFPEKKRA

SEQ ID NO: 10073 - DNA, 885 bp, Unknown
  Obtained from environmental sample
  misc_feature (1)..(885): n is a, c, g, or t
atggacgcgcaacgccgcctggaaggcatgatcagccgctttgccgcacgcggcagggcttggggcatcgtcaacgccgccgccctgcttatccactgtccgagtatggaaatccgcgcgctcgtcggttcggcggattttcacaacagcagcctgcaaggccaggtggacggcacacgggcgcggcgctcgcccggctccaccctcaagccgttcatctatgcgctggccctggatcagggtctcattcatcccatgagcatgctcatggacagcccgcgcagcttcggcggttatgatccggaaaatttcgacaaaaactttcgtggcccgctcgcggccaaggacgccctggccgcgagccgcaacctccccgctctcagcctggcggcgcgtctggcgaatcccgacctctacgcctttctgcgccgcgcagggacggaatttccccacgatgccgaacactacggcttgagcctcgtgcttggcggggccgaactgaccatgcgcgaactcggcgcgctctacgccatgctggccaacaaaggtttgtggcgtccggcgcgcctgcgcgcggacaaccagccgccgcccgtacccctgctgtcgcccgaagcggccttcatcacccgcgacatgttgcgcgatccggcccagaccgtgcgcggccgaaccggacatctgccgctctatctcanaaccggcacatccaacggcttccgcgatgcctggacggccggacttgtaggcccctatgcgctggtggtctgggcgggcaatttcgacaacagcgcgaatcctctgctcgtcggcgcggaaacggcgctcccgctctttgttgatatcgcccaaagcttgcggaacacgaaaagcttgaagacatga

SEQ ID NO: 10074 - protein, 294 aa, Unknown
  Obtained from environmental sample
  DOMAIN (26)...(276): Penicillin binding protein transpeptidase domain
  misc_feature (1)..(294): Xaa is any amino acid
MDAQRRLEGMISRFAARGRAWGIVNAAALLIHCPSMEIRALVGSADFHNSSLQGQVDGTRARRSPGSTLKPFIYALALDQGLIHPMSMLMDSPRSFGGYDPENFDKNFRGPLAAKDALAASRNLPALSLAARLANPDLYAFLRRAGTEFPHDAEHYGLSLVLGGAELTMRELGALYAMLANKGLWRPARLRADNQPPPVPLLSPEAAFITRDMLRDPAQTVRGRTGHLPLYLXTGTSNGFRDAWTAGLVGPYALVVWAGNFDNSANPLLVGAETALPLFVDIAQSLRNTKSLKT

SEQ ID NO: 10075 - DNA, 837 bp, Unknown
  Obtained from environmental sample
  misc_feature (1)..(837): n is a, c, g, or t
ttgtttaatgataaacaagacgcgtcaaggggaattctacggtatgtgattcaatcgttggatctgggagttaatgctatggaaacaaagagcataaaagaattaaacgatctggctctggaaatgcgaaaaaccgtccttcgcatgactaaccgtgcgggagcaggccatgtaggaggttccttgtcggaaattgaaatactgacggccctctatttttgcgttatgaaaattgacgcaaaaaatcctgactgggaggaacgggatcgttttatcctttcaaagggacattcgagtccgggatattatacggcgctggcgtaccggggttattttcctcttgacctcttggatacctttgacgaatgtgattcaaaattgcaggcccacccggatatgcataaatgccctggcattgatttcagtaccggttctcttgggcagggagtttctattgggcttggcatggccattgccgcagaaaagcaaaacaaacaatggacggtatttgttcttattggcgatggagaagcgcaggaagggcaagtctgggaagcattgatgtacgccgcggccaataaggtaaaaaatattgtttttatttttgatgccaataacgtacaacttgcttcaaaaaatttggccggtaccgatgcggacgctcttgtctgcaaactaaagggttttgatattgttactatcgatacagacggccataatctggaattactgatcccgtctctggagaaggcggtcaacgtgggcaagggagctccggtcgcggtggtagcccgtaccgtaaaaggcaagggaattagttttaggaagggtctttga

SEQ ID NO: 10076 - protein, 278 aa, Unknown
  Obtained from environmental sample
  DOMAIN (34)...(278): Transketolase, thiamine diphosphate binding domain
  misc_feature (1)..(278): Xaa is any amino acid
MFNDKQDASRGILRYVIQSLDLGVNAMETKSIKELNDLALEMRKTVLRMTNRAGAGHVGGSLSEIEILTALYFCVMKIDAKNPDWEERDRFILSKGHSSPGYYTALAYRGYFPLDLLDTFDECDSKLQAHPDMHKCPGIDFSTGSLGQGVSIGLGMAIAAEKQNKQWTVFVLIGDGEAQEGQVWEALMYAAANKVKNIVFIFDANNVQLASKNLAGTDADALVCKLKGFDIVTIDTDGHNLELLIPSLEKAVNVGKGAPVAVVARTVKGKGISFRKGL

SEQ ID NO: 10077 - DNA, 744 bp, Unknown
  Obtained from environmental sample
  misc_feature (1)..(744): n is a, c, g, or t
atgtacaaatcggcaattaagcccataggcgctccctattcggggaaaacccttaatatgatgaacggaactttcagcatcaccggcgcggagccggccacggaagaagaaatctttagtaccataaaagtcatgggcggcgaggactgggagttgtggatgcgggcgctggaacaagagggcctcttttccccgcagacacgcgctgtagcgtacacctacctgggccctgaactttcatggccggtgtataaaaacggaaccctcggcagggccaagcaggacctggaacgggcctgccgggaaatcaataaaacctgcgcgggaaaaatcgccggggcctgggtctcggtaaacaaggctcttgtaacccggtccagcgcggtcatccccatcatcccgttttatgtttcctgtttgttcagggtgatgaaggagatgggcctgcacgaaggatgcatcgagcagattgcgcggctgtatcgcgaacggctctacaccgccggggacccggcacgggttcccgtggacagcgaaggcaggatacgcattgacgactgggagatgcgggaggacgttcaaagggcggtcatggagagaatgagcatggtaacgccgganaacgtgtttgccgaaaccgatgtcgccggtttcaagcatgattttcttgaagcccacggctttgatgtggcgggcgttgattacggcgcggatgttgatccttttcagaacaagcacctatag

SEQ ID NO: 10078 - protein, 247 aa, Unknown
  Obtained from environmental sample
  DOMAIN (1)...(239): Short-chain alcohol dehydrogenase
  misc_feature (1)..(247): Xaa is any amino acid
MYKSAIKPIGAPYSGKTLNMMNGTFSITGAEPATEEEIFSTIKVMGGEDWELWMRALEQEGLFSPQTRAVAYTYLGPELSWPVYKNGTLGRAKQDLERACREINKTCAGKIAGAWVSVNKALVTRSSAVIPIIPFYVSCLFRVMKEMGLHEGCIEQIARLYRERLYTAGDPARVPVDSEGRIRIDDWEMREDVQRAVMERMSMVTPXNVFAETDVAGFKHDFLEAHGFDVAGVDYGADVDPFQNKHL

SEQ ID NO: 10079 - DNA, 762 bp, Unknown
  Obtained from environmental sample
  misc_feature (1)..(762): n is a, c, g, or t
ttgagccaggagaacatcgaagcgggcaaggaaaagttcaaagccggcacggcggaggtcaagaagcggatcagccttctgcctttcaggaacatggtcgagaaaaaaataccagccgaaaccagagcgaagtttcctgttttgaataagcttataccgcttacaaactttatatttgtcgcccttgctgctctcgtcgttgtagccgcaattcccaaaggcggcagttcaggcggtttaggcgggagagcaaactccgcctcagatttcagcttcgaccttaccgaagacggcaaaggcattaagatcaccgattacaacggaaaagccgttaaggttgtcgttccatccaagatcgagggtctacccgtggtggaaatcgggaatagtgcttttagtggcagtaccacaagatatagtcatgttaccgattctagagtcgtagtagataacccgaaagcgggaataacttccgtttacattcccgacagcgtaactgaaatagggagatttattttctttgaatctaaagcacttcaggaagtgcgcctttcggacaatattatcagaattcctcgaggtgcgtttgattcttcaggaatcagaaaggtaaacctacctaaaaacctcaaagaaatcgaaaacactgccttttcgtcctgcggggaattaaccgatcttcttataccctctgatatcaaagtaatacggtttctagactggggcggtgaaaaagaagacccccggcatattgctttttaa

SEQ ID NO: 10080 - protein, 253 aa, Unknown
  Obtained from environmental sample
  misc_feature (1)..(253): Xaa is any amino acid
MSQENIEAGKEKFKAGTAEVKKRISLLPFRNMVEKKIPAETRAKFPVLNKLIPLTNFIFVALAALVVVAAIPKGGSSGGLGGRANSASDFSFDLTEDGKGIKITDYNGKAVKVVVPSKIEGLPVVEIGNSAFSGSTTRYSHVTDSRVVVDNPKAGITSVYIPDSVTEIGRFIFFESKALQEVRLSDNIIRIPRGAFDSSGIRKVNLPKNLKEIENTAFSSCGELTDLLIPSDIKVIRFLDWGGEKEDPRHIAF

SEQ ID NO: 10081 - DNA, 804 bp, Unknown
  Obtained from environmental sample
  misc_feature (1)..(804): n is a, c, g, or t
atgcgctccaataatattgccgacgcctccaaattacagacggggatgcggctggtgattccttcccggacaggcagcccgcagacgggcaatctgcggactgaaagctcacggagtgaaaatccacggactgaaagtccgcggattgaaaatccgcctgcccctattgccacccctgccaatccggtctttttcctgtatacggtgacaaaaaacgataccctctacagcatagcccgttcacggggcgtaacgcttcaggctttgcgcgatattaacgggttttccaaaaattatgttctgaaaacaggcgaaaaaataaaaataccgggttccgcgcccgctcccacaacggtaacgataacggcagccaataaaacgccctcaaaatcctccgcgcaaagtacggcaaaaacggctgacccctcaatccgctggccggtcgcggcaaaggaagtgctgtacatgagcagcaattcgggagtgctggtgtccggcaaggaatccgaatcaatcaaaagcctgagcggaggggttgtcgttcatgcaagcccctggcggggttatggcaatgtagcggtagtagaaacagacgacggctaccggtatttatacggttcctgtgaaactctttcggtcagaaagggagacatcatagaaccgggaaccgaattgggaaagttgggaatctatccggcgtcgaanaagccggatttggttttaatcgtatcgcataacggatccccggtggatccggcaaaggcccccagattttnaggagatatgaaaatggcaaagcagtaa

SEQ ID NO: 10082 - protein, 267 aa, Unknown
  Obtained from environmental sample
  DOMAIN (67)...(110): LysM domain
  misc_feature (1)..(267): Xaa is any amino acid
MRSNNIADASKLQTGMRLVIPSRTGSPQTGNLRTESSRSENPRTESPRIENPPAPIATPANPVFFLYTVTKNDTLYSIARSRGVTLQALRDINGFSKNYVLKTGEKIKIPGSAPAPTTVTITAANKTPSKSSAQSTAKTADPSIRWPVAAKEVLYMSSNSGVLVSGKESESIKSLSGGVVVHASPWRGYGNVAVVETDDGYRYLYGSCETLSVRKGDIIEPGTELGKLGIYPASXKPDLVLIVSHNGSPVDPAKAPRFXGDMKMAKQ

SEQ ID NO: 10083 - DNA, 687 bp, Unknown
  Obtained from environmental sample
  misc_feature (1)..(687): n is a, c, g, or t
ttgaaaatgataaatgctaaaggcgaggctgtcactggtattcacagtgcaataggcaaactgggttttgagcaggcaaaggatataagtatggaagcgtccatgtccagagtttttgagcttaaaaattctaaagtggatttgcaaaaattctgggaccattgcagcgcggttggcattgtggcacgcatcatcgctcaggaatacgagcctaatttggcagccgatgcttttacagcggggcttgtgcacgatattgggaaaaatgttctgttgcaatatatgggcagcgaatttgaacgggcaataaccttgagcaaaaaccgcccttgcgaattgcacttggcagaaaaggaacttatgggattagaccacggtcaaataggggcgttgctcgcggaaaattggcagctccctcgttccataagcgaagttatacaatatcaccacgatttgtccagagcggagattaacaagcccttggttgcccttgtgagctttgcggatatcctctgtagaattttgaatgccggcgatggcggaaattatgccccccctgtatttaacgcggaactcgcgcaggaactcggcaaatggcgtataaatttggaattgagcgctttgcaaccccttatgcttttatgcatagacgagttgaataagagaaatttaacccagtatggatag

SEQ ID NO: 10084 - protein, 228 aa, Unknown
  Obtained from environmental sample
  DOMAIN (51)...(174): HD domain
  misc_feature (1)..(228): Xaa is any amino acid
MKMINAKGEAVTGIHSAIGKLGFEQAKDISMEASMSRVFELKNSKVDLQKFWDHCSAVGIVARIIAQEYEPNLAADAFTAGLVHDIGKNVLLQYMGSEFERAITLSKNRPCELHLAEKELMGLDHGQIGALLAENWQLPRSISEVIQYHHDLSRAEINKPLVALVSFADILCRILNAGDGGNYAPPVFNAELAQELGKWRINLELSALQPLMLLCIDELNKRNLTQYG

SEQ ID NO: 10085 - DNA, 345 bp, Unknown
  Obtained from environmental sample
  misc_feature (1)..(345): n is a, c, g, or t
atggacgaaaacgcgaacgtaaacccgaccgccgccgtaaacgcggacgtcggtcctaagcccaaaaggttcggcaaggacttgaccgagggcagcgtcccgaggcacctcatcagcctcgccgtgcccatgctcctcgccaacctcctcggcacgagctacagcctcgtagacgccatctggatagggcgctacgtgggcaaggaggccatcggcgcggtggcggtcagcttcccggtcatgttcatattcataggcgtcgccgccggcgcgaccatagccaccacggtgctggtatcccagttctacggcgcgcgcaaccaagccatgctcggcaaaccatag

SEQ ID NO: 10086 - protein, 114 aa, Unknown
  Obtained from environmental sample
  misc_feature (1)..(114): Xaa is any amino acid
MDENANVNPTAAVNADVGPKPKRFGKDLTEGSVPRHLISLAVPMLLANLLGTSYSLVDAIWIGRYVGKEAIGAVAVSFPVMFIFIGVAAGATIATTVLVSQFYGARNQAMLGKP

SEQ ID NO: 10087 - DNA, 318 bp, Unknown
  Obtained from environmental sample
  misc_feature (1)..(318): n is a, c, g, or t
atgaaattagttgccgacaagcagatctacaaggtcgaagaggctttcgccgacatgggcgacgtcaccgccgtatcgggggggatgatttcgcgggagctgctctccgacgccgatattctcctcgtccgctccgtcacgcaggtgaacgccgcgctgctcgaggggacgcccgtcaagttcgtggccagcgcctctataggggtcgaccacgttgacgtcggctttttgcgggagagctgcataggcttcgcccacgcgcccggctcaagcgccgactccgggcggagtngtcgcggcggcgctcggccgatctga

SEQ ID NO: 10088 - protein, 105 aa, Unknown
  Obtained from environmental sample
  misc_feature (1)..(105): Xaa is any amino acid
MKLVADKQIYKVEEAFADMGDVTAVSGGMISRELLSDADILLVRSVTQVNAALLEGTPVKFVASASIGVDHVDVGFLRESCIGFAHAPGSSADSGRSXRGGARPI

SEQ ID NO: 10089 - DNA, 411 bp, Unknown
  Obtained from environmental sample
  misc_feature (1)..(411): n is a, c, g, or t
gtgcggggcggtatggaggagctgttcgtcgccgagctttgctacagccagccgaacaggtttttcaggtttccgggacgccggaacattgagtttctgacatggcgcgggggcggggattattccaagtatagcaacaccctgatattcggtttttcgcaggatatgatctccccgggattttggcggatgtacgcagggataaacttgggcatatacatcaaaagcaggaatagggccgacgacaggataagttccgagtttaccttcggcgaaagggtttttctcggttatcgcgttacaaaagattatattttggagttgtacggacggcatttttccaacggcgggctgacggaaaaaaacggcgggcagaattttatcgggttgagcgtcgcccggaatttttag

SEQ ID NO: 10090 - protein, 136 aa, Unknown
  Obtained from environmental sample
  misc_feature (1)..(136): Xaa is any amino acid
MRGGMEELFVAELCYSQPNRFFRFPGRRNIEFLTWRGGGDYSKYSNTLIFGFSQDMISPGFWRMYAGINLGIYIKSRNRADDRISSEFTFGERVFLGYRVTKDYILELYGRHFSNGGLTEKNGGQNFIGLSVARNF

SEQ ID NO: 10091 - DNA, 651 bp, Unknown
  Obtained from environmental sample
  misc_feature (1)..(651): n is a, c, g, or t
gtggacggcatactcaggcctgtcaccggcgagcgtctggaaatacccccgctgaaagagccctatgggatcaggggctcgtcatttaccgatatatgggaagaaaagagggaccccttctttgggcttgactggatacgcaacctcgcgtccacggcatggtcaagactgcgctcccccgctttcggaaaccttaacgaaattgaggtacacagcgatcttttttcccaactgatcctcagaaccagaaacaatacaactatttactcctatcccggttttctggaaaacgccggatacggcgtcgaagggctgctgccgctgctctatttactggccattgacgagccgggcaagttctaccttgccgcggtaaacaacgagacaggcccgcccgcgaccgaggacaatcccagaggtccgccccggatgcgccaatatttccatatagcggcgtttgtcccttactttagcgaaagcggcgttttccacgtcgccgtgtttgaaagcgcggaggaaacctccatcagcgcgttcaggaaccgctatccgctcagcgagaaaacagttgacggagaaaagagactcttccccaacgggcactacgtcaatctggtgcgtatccccgtagagacggcatttgaaccctaa

SEQ ID NO: 10092 - protein, 216 aa, Unknown
  Obtained from environmental sample
  misc_feature (1)..(216): Xaa is any amino acid
MDGILRPVTGERLEIPPLKEPYGIRGSSFTDIWEEKRDPFFGLDWIRNLASTAWSRLRSPAFGNLNEIEVHSDLFSQLILRTRNNTTIYSYPGFLENAGYGVEGLLPLLYLLAIDEPGKFYLAAVNNETGPPATEDNPRGPPRMRQYFHIAAFVPYFSESGVFHVAVFESAEETSISAFRNRYPLSEKTVDGEKRLFPNGHYVNLVRIPVETAFEP

SEQ ID NO: 10093 - DNA, 522 bp, Unknown
  Obtained from environmental sample
  misc_feature (1)..(522): n is a, c, g, or t
atgaagggaaggatatggattgagtcggaactcggcaagggcgcgaaatttatttttaccataaaggttaaacagggggcgcagaccgcggagaaaaaaacgggcgcgcccgccggaataaaagcggctgacctgcatttacagggttataccatattggctgcggaagacatggaattcaacagggaagttcttgccaagtatctggaaaagaccggcgtaacaatagattttgccgaaaacggcaaaatatgcgttgacaagttcaaagagaatcccgataaatactctttaatttttatggacattaacatgccggaaatggccggagatgaggcgacaaaggtaataagagcgcttgatatgaagaaagcaagggagatacccattgtcgccatgacagcggatgtttttaaggaagacgttgaaaaatgcctgtcaataggcatgaatgatcatatctcaaaaccgattgttccgaaaattgtttatgcgaaattaaaacaacatctgagattataa

SEQ ID NO: 10094 - protein, 173 aa, Unknown
  Obtained from environmental sample
  DOMAIN (50)...(168): Response regulator receiver domain
  misc_feature (1)..(173): Xaa is any amino acid
MKGRIWIESELGKGAKFIFTIKVKQGAQTAEKKTGAPAGIKAADLHLQGYTILAAEDMEFNREVLAKYLEKTGVTIDFAENGKICVDKFKENPDKYSLIFMDINMPEMAGDEATKVIRALDMKKAREIPIVAMTADVFKEDVEKCLSIGMNDHISKPIVPKIVYAKLKQHLRL

SEQ ID NO: 10095 - DNA, 456 bp, Unknown
  Obtained from environmental sample
  misc_feature (1)..(456): n is a, c, g, or t
ttgactaccaacacggacggccaatttctcaaatccggctttagccgtgacaaaatatgttcaccccaaggcgaccttgcatatttccaatgctcccgcccctgcaataataacatttatcccaacgaacaaatgataaaagaaatgctacttaacatcttgcctgacgaattccgattgccaaccgaacacataccccgctgccctcaatgcggagactgccttgtccccaacataagaaccggaaataattttgtcgaaaaaccctggataaaaaactatgccacactcaatgaattaataactgtctgtaggagaaaaaatatcctgcttctggaattaggcgtgggcgtgaacacccccggcataatccgctatccctttgaacaactggccctacagcggaaaaacacaacattattccgaataaacatgaatattgatcatttgacctaa

SEQ ID NO: 10096 - protein, 151 aa, Unknown
  Obtained from environmental sample
  misc_feature (1)..(151): Xaa is any amino acid
MTTNTDGQFLKSGFSRDKICSPQGDLAYFQCSRPCNNNIYPNEQMIKEMLLNILPDEFRLPTEHIPRCPQCGDCLVPNIRTGNNFVEKPWIKNYATLNELITVCRRKNILLLELGVGVNTPGIIRYPFEQLALQRKNTTLFRINMNIDHLT

SEQ ID NO: 10097 - DNA, 681 bp, Unknown
  Obtained from environmental sample
  misc_feature (1)..(681): n is a, c, g, or t
ttggtgattaggatcgttatcaaatggtatctattgattaatattgacgtttcgtttagttatcaattaataagaatttttacagaggtgcggcggcaaatgcaagtatctgacgaaaaaaacgccgagggcggccaaatcggttcggaagcggccggccatggcaagaagatgtactactccataagcgaggcgtgcgccatgacgggccttgaaccgcacatcctgcgctactgggagaaggagttttcgctgctgcggcccaagaagaacagcggggggaaacgcgcttataaggagaaggatattgaagttatcgtaaaaataaagcgcatgctggaggatgagaagtatacgctgcagggggccaagagcaaactgctcgacgagcggcgggagcggcggctgggggtgaaccctaccgacatgagacgccggaagaccgattttgcggagagcgacgagcgggaggggtcgacggcgacggattcatctaagccgaagccgacggcggctatgccgttgatatcaataccgacggacgcgttcgacaaagtgacgtcgcgggaatttgtttctatcggcaataataatagcggtgatggcagtggtgataacaaggcgtttattatgggcttacgggatgaacttacggagatactggaactgctggaatcataa

SEQ ID NO: 10098 - protein, 226 aa, Unknown
  Obtained from environmental sample
  DOMAIN (61)...(98): MerR family regulatory protein
  misc_feature (1)..(226): Xaa is any amino acid
MVIRIVIKWYLLINIDVSFSYQLIRIFTEVRRQMQVSDEKNAEGGQIGSEAAGHGKKMYYSISEACAMTGLEPHILRYWEKEFSLLRPKKNSGGKRAYKEKDIEVIVKIKRMLEDEKYTLQGAKSKLLDERRERRLGVNPTDMRRRKTDFAESDEREGSTATDSSKPKPTAAMPLISIPTDAFDKVTSREFVSIGNNNSGDGSGDNKAFIMGLRDELTEILELLES

SEQ ID NO: 10099 - DNA, 648 bp, Unknown
  Obtained from environmental sample
  misc_feature (1)..(648): n is a, c, g, or t
gtgcataagagcgtgtggattatgggcggagacggctgggcttatgatattggctacggtggcttagaccacgttcttgccagcggcgaaaatgtgaatattttggttttggataccgaggtgtattccaacacgggcggtcaggctagcaaaagtaccaacttggcagcagttgctcagtttgccgcaagcggcaaacgtgctcccaaaaaagaccttggcttaatcgctatgagctataaaaacgtgtatgttggcaaagtcgctatgggcgcaaacgatatgcacacaatcaaggtgttccgcgaagcagaagcccacaacggtccctcgcttatactcgcctactccccttgcatttcgcacggcataaaagatatgcgttatatgcttcaccagcaaaaaatggcagtggatagcggctactggcccctgctccgctacattccagcaaacttggacgagggcaaaaatccctttgttttggattccaaagcaccgagcctgccggttaaagattatatctacaccgagaaccgctacaaaatgctaaccgcttctaacccagcagccgcagaggaacttgcaaacagactgcaagcatttgtggattctaggtggaaacagtatgaggatttggcgaaatag

SEQ ID NO: 10100 - protein, 215 aa, Unknown
  Obtained from environmental sample
  misc_feature (1)..(215): Xaa is any amino acid
MHKSVWIMGGDGWAYDIGYGGLDHVLASGENVNILVLDTEVYSNTGGQASKSTNLAAVAQFAASGKRAPKKDLGLIAMSYKNVYVGKVAMGANDMHTIKVFREAEAHNGPSLILAYSPCISHGIKDMRYMLHQQKMAVDSGYWPLLRYIPANLDEGKNPFVLDSKAPSLPVKDYIYTENRYKMLTASNPAAAEELANRLQAFVDSRWKQYEDLAK

SEQ ID NO: 10101 - DNA, 624 bp, Unknown
  Obtained from environmental sample
  misc_feature (1)..(624): n is a, c, g, or t
atgttcagagctattttgaaaaaaagtccagaagcagcggaggcaaattatcaatatgggcgctttataatgcaaagaggggattttaaaaaatcgcaggaatatctggaaaaagcggtaaaaattgaaccatataattcacgctatctagctcgtttgggaatggcagaattttacctgaaacgtgattcagatgcggaaagcctttacaaaaaagctctgaaaataaatccttacgatggcaatacttggttcaacctcggtgagctttatcttagcaaggcaaacgaaagtggctatatatttgaagttcgcaacaaaacgaaaagtgctttggaagcatatttaaaaactatagaactagattctctgcacgcaaatgcacatcatcgcataggcattatattaaatgcaaacggcgggttcaaagaagctatacggcatttaacaatagctttggaaaaaatgccagaaaacacagctgttatgatgcaactgggttctgcctatatgcagctcggagatactgcgaagtatattgattatttgaataatgttttgagaatagacccctttgacagagtggcggcaagccaatttaagcggttaaaaatggagaactaa

SEQ ID NO: 10102 - protein, 207 aa, Unknown
  Obtained from environmental sample
  DOMAIN (47)...(80): Tetratricopeptide repeat
  misc_feature (1)..(207): Xaa is any amino acid
MFRAILKKSPEAAEANYQYGRFIMQRGDFKKSQEYLEKAVKIEPYNSRYLARLGMAEFYLKRDSDAESLYKKALKINPYDGNTWFNLGELYLSKANESGYIFEVRNKTKSALEAYLKTIELDSLHANAHHRIGIILNANGGFKEAIRHLTIALEKMPENTAVMMQLGSAYMQLGDTAKYIDYLNNVLRIDPFDRVAASQFKRLKMEN

SEQ ID NO: 10103 - DNA, 576 bp, Unknown
  Obtained from environmental sample
  misc_feature (1)..(576): n is a, c, g, or t
ttgctatgctatatggatggcatttttcacagcagccatactatcctttttccccttggaaagcacctgcgaaaaaatgaagagaaaatcaaaataatcaaaaatccggcggctctgcaaaaattttctaaaaaaatgcaagctcagggaaaaagcataggtttggttccaactatgggtgccttgcataaagggcagacttcccttattgaactgtctgcaaaaaataacgatatcaccatcgtgagtatttttgtgaatcccacccacttcggtgtgaacgaagacttagcaaaatatccgcgcaggcttgaaatagatgttgaagtttgcgcccccgcaggtgcaaatattgtttttgcgccagaaccgcaagctatgtacccatctccgcttcaaacctttgtgcataactcaggtcttgaacatctatattgcggaaaataccgccccgtgcatttcgcgggcgttttgagtgttgtggcaaagttgttcaacatagcccagccaaacaaggcatatttggcgaaaaagattttcagcaacgccatgaataaaaatctcggccgatgctga

SEQ ID NO: 10104 - protein, 191 aa, Unknown
  Obtained from environmental sample
  DOMAIN (30)...(190): Pantoate-beta-alanine ligase
  misc_feature (1)..(191): Xaa is any amino acid
MLCYMDGIFHSSHTILFPLGKHLRKNEEKIKIIKNPAALQKFSKKMQAQGKSIGLVPTMGALHKGQTSLIELSAKNNDITIVSIFVNPTHFGVNEDLAKYPRRLEIDVEVCAPAGANIVFAPEPQAMYPSPLQTFVHNSGLEHLYCGKYRPVHFAGVLSVVAKLFNIAQPNKAYLAKKIFSNAMNKNLGRC

SEQ ID NO: 10105 - DNA, 411 bp, Unknown
  Obtained from environmental sample
  misc_feature (1)..(411): n is a, c, g, or t
atgcattacgaccttatacttaaaaacggaacaattgtaacttcaaaagaaagtttaaaaactgacattgcggtaaaaaacgggaagattgccaaaactgggagcctagaaaattcctgtacggcggatgatatttatgacgcggcgggtatgtatatactcccaggaattattgacgcgcatgttcatttcagagatccaggtcttacggaaaaagaagattttgaaacaggaagcatcgcggcggctttcggaggaattacaacaatagccgatatgccgaatactgtacctgtaacatcgaatttacttcggtttaatgaaaaaacctgtattgcgaaagaaaaatcctgtgtggatttcgctcttttcgctcttcttccaaacgaaagaacggaattgaagcgttaa

SEQ ID NO: 10106 - protein, 136 aa, Unknown
  Obtained from environmental sample
  misc_feature (1)..(136): Xaa is any amino acid
MHYDLILKNGTIVTSKESLKTDIAVKNGKIAKTGSLENSCTADDIYDAAGMYILPGIIDAHVHFRDPGLTEKEDFETGSIAAAFGGITTIADMPNTVPVTSNLLRFNEKTCIAKEKSCVDFALFALLPNERTELKR

SEQ ID NO: 10107 - DNA, 894 bp, Unknown
  Obtained from environmental sample
  misc_feature (1)..(894): n is a, c, g, or t
ttggccgagaagctggtctcggtcgtcggcccattcaacaattgggactcaaaccgccacaaactctccgctcgcggggacggttccggcatttgggaggggttcatccccggcctgtcgcacgggacgctctacaagttccacatcgattccagtaccggacgctacaaggtcaacaagggcgacccgttcgccgtgttttgggagcagcctccggccacctcccctatcgtctgggacatggcctacaaatggggcgacagcggctggatggggaagcgcaaggagaagaacagcctgaacgcgccgatttccatctacgaggttcacctaagctcttggaagcacaagggggaaaagggggacgagtggttaagctacagggagcttgcgccggagctggccgactattgcgcccgactcgggttcacgcacgtcgagttcctgccggtgatggagcaccctttcggcgggtcgtgggggtatcagacggtcggttacttcgcgcccacaagccgcttcggcacgccgcaggatttcatgtatttggttgattatctgcaccagcacgatatcggcgtgatactagactgggtgccttcgcactttcccagcgacgagcacgggcttgtctactacgacgggacgtgcctctatgagcacgccgaccccaaaaagggtttccatccggattggaagagctacatcttcaactacgggcgcaacgaagtgcaggcgttcctgctcagcagcgccatcttttggctcgaccgttaccatgccgacgccatccgcgtggacgccgtggcctccatgctctacttagactactcccgcaaggagggcgagtggattcccaacagttcggcggacgggagaacttggaggcgatag

SEQ ID NO: 10108 - protein, 297 aa, Unknown
  Obtained from environmental sample
  misc_feature (1)..(297): Xaa is any amino acid
MAEKLVSVVGPFNNWDSNRHKLSARGDGSGIWEGFIPGLSHGTLYKFHIDSSTGRYKVNKGDPFAVFWEQPPATSPIVWDMAYKWGDSGWMGKRKEKNSLNAPISIYEVHLSSWKHKGEKGDEWLSYRELAPELADYCARLGFTHVEFLPVMEHPFGGSWGYQTVGYFAPTSRFGTPQDFMYLVDYLHQHDIGVILDWVPSHFPSDEHGLVYYDGTCLYEHADPKKGFHPDWKSYIFNYGRNEVQAFLLSSAIFWLDRYHADAIRVDAVASMLYLDYSRKEGEWIPNSSADGRTWRR

SEQ ID NO: 10109 - DNA, 702 bp, Unknown
  Obtained from environmental sample
  misc_feature (1)..(702): n is a, c, g, or t
ttgaaaacgcggagtcaaaacaagattcacttaagaaagggcgttatcggctccgagcgctggggcgaaaaaatgcgcaaacgcatcgccaacgaactcggggttgagttatacgacatttacggtttaacggaaatttacggccccggcatcggcattaactgccaaaaacaggacgccatgcacatgtggacggactttttttattacgagattatcgatccaaaaaacggcgaagttttacccgaaggcaaaacgggcgaaattgtcataacaacgctgtgcaaggaaggcgcccccctcatccgctacaggacgcatgaccttacaaaagcgattcacggcaagtgtgaatgcgggcttgagtatccgagaatcggcacgatcatcggtcgaagcgatgacatggtcaaggttcgcggcgccattatttacccaagccgcgtggacgagcttcttgccaccgtagacggggtaagcagcgagtatcagatcatgatcgatcacatgaacggaaaagacatacttacccttttctttgaaacgcgcgaaacaggcgacgccgcccacaatctggaaaaaaccgttgagcatgaattcaaggaaaggattggccttacgccaaaggcaaaagccgtcggcatgggcgagcttccgagaagcgagaaaaaatcgacgcgggtgtttgataacaggtattag

SEQ ID NO: 10110 - protein, 233 aa, Unknown
  Obtained from environmental sample
  misc_feature (1)..(233): Xaa is any amino acid
MKTRSQNKIHLRKGVIGSERWGEKMRKRIANELGVELYDIYGLTEIYGPGIGINCQKQDAMHMWTDFFYYEIIDPKNGEVLPEGKTGEIVITTLCKEGAPLIRYRTHDLTKAIHGKCECGLEYPRIGTIIGRSDDMVKVRGAIIYPSRVDELLATVDGVSSEYQIMIDHMNGKDILTLFFETRETGDAAHNLEKTVEHEFKERIGLTPKAKAVGMGELPRSEKKSTRVFDNRY

SEQ ID NO: 10111 - DNA, 495 bp, Unknown
  Obtained from environmental sample
  misc_feature (1)..(495): n is a, c, g, or t
atgaaagatggcaacgcctgggccaccacgatgctagacttttatggcctgcccaaagattttccggggcaaaacgaaatccgcgacacgaatgacgcgtacaaaaatgtcgagctgctcgaaacgcgctttgcagaagcattgggcaatgagcgtgaacgatttatcccctttataacgctgttcgaattcgaggcactggtattcagttcgccagttgcggtagccagccactttggatccaccatgtttgaaagcgccctgcaaagcatcgttgaggatgccaagtcgcccgaattgatcaatggcggcgagaacacccacccaaaatggcggctgatgcagttactcagggggcagtcccacccctacaaacctgcaaatgacggcccaaccattctgcacaaaataggcatccaagcaatcagggcggcctgtccgcacttcaacgcttggattacgcgccttgaatcactggatgctgccccgcaatga

SEQ ID NO: 10112 - protein, 164 aa, Unknown
  Obtained from environmental sample
  misc_feature (1)..(164): Xaa is any amino acid
MKDGNAWATTMLDFYGLPKDFPGQNEIRDTNDAYKNVELLETRFAEALGNERERFIPFITLFEFEALVFSSPVAVASHFGSTMFESALQSIVEDAKSPELINGGENTHPKWRLMQLLRGQSHPYKPANDGPTILHKIGIQAIRAACPHFNAWITRLESLDAAPQ

SEQ ID NO: 10113 - DNA, 642 bp, Unknown
  Obtained from environmental sample
  misc_feature (1)..(642): n is a, c, g, or t
atgagagattacaaacaggaaacggaaaaaaggattgaatttatccgcgatatgataaaatcatcaggcgcggacggaatcgtctacgggaacagcggcggaaaagacagcgcgcttgtcggaatcctctgcaaaatggcgtgcgataacacgctcgggataattatgccatgcggctccaaacgtaattacgaaatcgacaaaaccgacgccgaaacaatagcgaaacagtttaatattaccgtgcgcgttatagatttaacgccggtaaaaaacgaacttatccgggttatcggcgaaagcgcgcggcttaccgatctcgcccttgccaacatgtcgccgcggttcaggatgaccacgctctacgccgttgctgcgagtgagaacaggctcgtggcgggaaccggcaaccgcagcgaagggtacatgggctatttcaccaagtggggcgacggcgctttcgacttncaccccatagccgatctcacggtcaccgaaatttacgaattcctgaagtttctgaaagctcccgattttatcatcagcaaggcgccctccgccggattattcgacggtcagaccgacgagaacgagatgggcgttagctacagcagcattgacagttttcctgctcacaggtaa

SEQ ID NO: 10114 - protein, 213 aa, Unknown
  Obtained from environmental sample
  DOMAIN (7)...(210): NAD synthase
  misc_feature (1)..(213): Xaa is any amino acid
MRDYKQETEKRIEFIRDMIKSSGADGIVYGNSGGKDSALVGILCKMACDNTLGIIMPCGSKRNYEIDKTDAETIAKQFNITVRVIDLTPVKNELIRVIGESARLTDLALANMSPRFRMTTLYAVAASENRLVAGTGNRSEGYMGYFTKWGDGAFDXHPIADLTVTEIYEFLKFLKAPDFIISKAPSAGLFDGQTDENEMGVSYSSIDSFPAHR

SEQ ID NO: 10115 - DNA, 498 bp, Unknown
  Obtained from environmental sample
  misc_feature (1)..(498): n is a, c, g, or t
atgaacggattagcgatacttattatttccgcagtagttttgtctcttgcttatttaatttatggacgctaccttgcaaagaaatggggaattgagcccaataaaaaaactcctgcctatgagctggaagacggcatggattatgtgcctaccgaacccagtgtggtttttggtcaccagtttgcctcaattgccggagctggtcccatcaatggtccaattctggcggcgatgttcgggtggctaccggtattgctttggattctcattggaggaatattcttcggtgcggttcaggattttgcttctctttacgcctcggttaagaataagggaaaaacaatcggatttattatagagacttatataggcagaacaggcaaacggctgtttctcatttttgtatggcttttttcaattttggtaattgcggctttcgccgacattgtatcgngaactttcggcggttttcccaagcagcaaatggcgaagctgtag

SEQ ID NO: 10116 - protein, 165 aa, Unknown
  Obtained from environmental sample
  SIGNAL (1)...(17)
  DOMAIN (1)...(164): Carbon starvation protein CstA
  misc_feature (1)..(165): Xaa is any amino acid
MNGLAILIISAVVLSLAYLIYGRYLAKKWGIEPNKKTPAYELEDGMDYVPTEPSVVFGHQFASIAGAGPINGPILAAMFGWLPVLLWILIGGIFFGAVQDFASLYASVKNKGKTIGFIIETYIGRTGKRLFLIFVWLFSILVIAAFADIVSXTFGGFPKQQMAKL

SEQ ID NO: 10117 - DNA, 375 bp, Unknown
  Obtained from environmental sample
  misc_feature (1)..(375): n is a, c, g, or t
gtgcgcccaacggcgtccaactcatcgataaaaataatgcagggggcgctgcgcctgccctgttcaaagaggtcccttacgcggctcgcgcccacgccgacaaacatctctacaaaatcggagccggacatgtggaagaaggcaacccccgcttcccccgcgaccgagcgtgccatcagcgtcttgccggttccgggcatccccacaagcaggacgcctttggggatccttgctcccatctttgtaaacttctgcgggttcttcaggaaagccactacttcctcaagctcgaacttggcatctttctgtcccgcgacatcggcgaagctcaccttttttccttcatcatggtctcgtgccgctcggccaatctga

SEQ ID NO: 10118 - protein, 124 aa, Unknown
  Obtained from environmental sample
  misc_feature (1)..(124): Xaa is any amino acid
MRPTASNSSIKIMQGALRLPCSKRSLTRLAPTPTNISTKSEPDMWKKATPASPATERAISVLPVPGIPTSRTPLGILAPIFVNFCGFFRKATTSSSSNLASFCPATSAKLTFFPSSWSRAARPI

SEQ ID NO: 10119 - DNA, 399 bp, Unknown
  Obtained from environmental sample
  misc_feature (1)..(399): n is a, c, g, or t
gtgctgcgggccacgcccatcagcactttgtcccgggcatcttcaaagtcatgcatttccacatccggcttgtccttgcgggccgcgtgcagagccgcctcgtttacaaggttggcaatatcggccccgctcatccccggagtcgcccttgcgacacgggtaagatcaacatcctttcccaggggtatctttgccgagtgtatctgcaagatcgcctcgcgctccttgatgtccggcattgcgactactacctgcctgtcgaagcgtccgggccgcagcagggccggatccagaacgtcggggcggtttgtcgccgcaagaattattaccccgtcttttgaatcaaagccgtccatttcaactaacagttggttcaaggtctgctcgcgctcgtcatga

SEQ ID NO: 10120 - protein, 132 aa, Unknown
  Obtained from environmental sample
  misc_feature (1)..(132): Xaa is any amino acid
MLRATPISTLSRASSKSCISTSGLSLRAACRAASFTRLAISAPLIPGVALATRVRSTSFPRGIFAECICKIASRSLMSGIATTTCLSKRPGRSRAGSRTSGRFVAARIITPSFESKPSISTNSWFKVCSRSS

SEQ ID NO: 10121 - DNA, 459 bp, Unknown
  Obtained from environmental sample
  misc_feature (1)..(459): n is a, c, g, or t
gtggggaacaatggttactttatgcagggggtcggcgtttntcaggaagtaatgcagcagggcatgacccgcctcgtgtatcgcggtcatcctgcgttccttttcagacacaaccagtgtgctgcgggccacgcccatcagcactttgtcccgggcatcttcaaagtcatgcatttccacatccggcttgtccttgcgggccgcgtgcagagccgcctcgtttacaaggttggcaatatcggccccgctcatccccggagtcgcccttgcgacacgggtaagatcaacatcctttcccaggggtatctttgccgagtgtatctgcaagatcgcctcgcgctccttgatgtccggcattgcgactactacctgcctgtcgaagcgtccgggccgcagcagggccggatccagaacgtcggggcggtttgtcgccgcaagaattattaccccgtcttttga

SEQ ID NO: 10122 - protein, 152 aa, Unknown
  Obtained from environmental sample
  misc_feature (1)..(152): Xaa is any amino acid
MGNNGYFMQGVGVXQEVMQQGMTRLVYRGHPAFLFRHNQCAAGHAHQHFVPGIFKVMHFHIRLVLAGRVQSRLVYKVGNIGPAHPRSRPCDTGKINILSQGYLCRVYLQDRLALLDVRHCDYYLPVEASGPQQGRIQNVGAVCRRKNYYPVF

SEQ ID NO: 10123 - DNA, 699 bp, Unknown
  Obtained from environmental sample
  misc_feature (1)..(699): n is a, c, g, or t
atgagatccagtaaagaactgtcgctagatgccaaaatacttgaaaaaatcaggtctttaaacctttccggaaaaacagaacagcttgcggaattacttctaaaagacgatgaaatccaggctatgcaggaatatgccaatgtggttaccatagtccgtcttaaatataacgatcatggcccggttcacatgcggacagtggcgcttaattccttaatcatgatggaacttatccggcgggcggatgtaaagaccagcctggaaaaagaagaagccggcgattttgaagacagtctttccgcagtactctgcggagcctttctccatgatatggggatgagtgttggccggcaggatcatgaactacacagcatctatatggcctatccgatcctttcccgcatcctgtcagaagtatacaatcaatcaacccaaaaaaaagtaatgatccgttctttggcgatggaggcaattgccggccacatgggaacccggaccatccattccctggaagcgggtattgtccaggtagccgacggctgtgacatgaagaaaggcagggcccggattcccctcgccattgcggatggtcccaggattggagatatacaccagtattcggctcatgcgatcgaagggctcgccatagaagcaggaaaggaaaaaacccatcagcatacgggtggatatgtccagtga

SEQ ID NO: 10124 - protein, 232 aa, Unknown
  Obtained from environmental sample
  DOMAIN (67)...(184): HD domain
  misc_feature (1)..(232): Xaa is any amino acid
MRSSKELSLDAKILEKIRSLNLSGKTEQLAELLLKDDEIQAMQEYANVVTIVRLKYNDHGPVHMRTVALNSLIMMELIRRADVKTSLEKEEAGDFEDSLSAVLCGAFLHDMGMSVGRQDHELHSIYMAYPILSRILSEVYNQSTQKKVMIRSLAMEAIAGHMGTRTIHSLEAGIVQVADGCDMKKGRARIPLAIADGPRIGDIHQYSAHAIEGLAIEAGKEKTHQHTGGYVQ

SEQ ID NO: 10125 - DNA, 879 bp, Unknown
  Obtained from environmental sample
  misc_feature (1)..(879): n is a, c, g, or t
atgacggcggctgagaagacgcacaagtcttcgaccgtgcaagacgctcaaattgaaaaattggaaattaccctgcctgtcattgagtcagttgtttcaaaaatagcgcgaataccgcagagatcggtgggcgagagcgagaaagacaaacttaaagatttggaaacaaggcttaaacaaaaagtctttggtcaggatgacgcgatagcggcggtagtaaaagctgttaaacgttcaagggcgggattcagggcggacggcaaacccgtagcgaactttttatttgtcggacccacgggcgtaggcaagacagagttggcgcgtcagttggcggaaacattgggtatttccatgctccgctttgacatgagcgagtatcaagaaaagtatacaatttcgcgccttatcggctcctcgccaggctatgtcggctacgaagacggcggtcagcttaccgacgcggttcgcaaacagccgcatgccgtagtcttactcgatgaaattgaaaaagcccatagcgatatcttcaatatacttttgcagattatggattacgccacccttaccgacaatcagggacgcaaggcggatttccgcaatgtaattttgataatgacaagcaacgccggagcgagagagatcggcaaggggcttatcggttttggagatcgtattcaggacgacagcgcggtaaacgaagctgtggaaaaaatctttactcccgaattccgcaacaggctggacgccattgtccgctttggacatctttcgcgcgaaattatggtttccattgtccataaagaattggacgctttcaccgcccagcttacggaaaagaacgtaacccttaccgttacggaaacctgtgtggacaattag

SEQ ID NO: 10126 - protein, 292 aa, Unknown
  Obtained from environmental sample
  DOMAIN (46)...(285): Torsin
  misc_feature (1)..(292): Xaa is any amino acid
MTAAEKTHKSSTVQDAQIEKLEITLPVIESVVSKIARIPQRSVGESEKDKLKDLETRLKQKVFGQDDAIAAVVKAVKRSRAGFRADGKPVANFLFVGPTGVGKTELARQLAETLGISMLRFDMSEYQEKYTISRLIGSSPGYVGYEDGGQLTDAVRKQPHAVVLLDEIEKAHSDIFNILLQIMDYATLTDNQGRKADFRNVILIMTSNAGAREIGKGLIGFGDRIQDDSAVNEAVEKIFTPEFRNRLDAIVRFGHLSREIMVSIVHKELDAFTAQLTEKNVTLTVTETCVDN

SEQ ID NO: 10127 - DNA, 825 bp, Unknown
  Obtained from environmental sample
  misc_feature (1)..(825): n is a, c, g, or t
ttggaacagtacgactggcatccgcaggcgcgccctttaatccgctgtacggaaggcactgtccctgagcgcctgcccccgcgaatggatatccgcagagccgcgcctctggaactcccccacgttcttctgcttattgacgacgagacagagagtatcctgcctgccattggcgagcaagtaaaaaacacgactccctgctacagtacgccgttaatgatggattccgggaaagtaacaggctggtttttggatactgaaaacggcgaaaaaacattgtcttttattacggaaaaatttgacgatctttataaacgttccacagtgcgttacggcggggaagggaagccttttctctttgcggtaggcgacggtaaccattctctcgcggcggcaaaaggtatttgggaggagtataaagtaaaaaatactacggcagggggtgcgcttcccgttcacccatgccgttacgcgcttgtggaaatagaaaacatctacgaccccgcgattcaatttgagccgatacaccgccttgtctttgacgttggttttgatgaaaccgtaaaaattctttcagatctgcccgattattcctgccgttccgtaaacagcgtacaggagctagcgaaattgtgcgcgaaagaaccgcaaaaacccgccgctaatcatttcggcgttatctcgcaggggcgttacgcgtttatcgaaacttccgcaacaggaatcgctaccgcctgccttcaaccgctgttggataaatacgcgggggacaaccctcagttaattgattacatacacgacgaagaagagctcggccgattctga

SEQ ID NO: 10128 - protein, 274 aa, Unknown
  Obtained from environmental sample
  misc_feature (1)..(274): Xaa is any amino acid
MEQYDWHPQARPLIRCTEGTVPERLPPRMDIRRAAPLELPHVLLLIDDETESILPAIGEQVKNTTPCYSTPLMMDSGKVTGWFLDTENGEKTLSFITEKFDDLYKRSTVRYGGEGKPFLFAVGDGNHSLAAAKGIWEEYKVKNTTAGGALPVHPCRYALVEIENIYDPAIQFEPIHRLVFDVGFDETVKILSDLPDYSCRSVNSVQELAKLCAKEPQKPAANHFGVISQGRYAFIETSATGIATACLQPLLDKYAGDNPQLIDYIHDEEELGRF

SEQ ID NO: 10129 - DNA, 315 bp, Unknown
  Obtained from environmental sample
  misc_feature (1)..(315): n is a, c, g, or t
ttggccgagatagacgttcgggtggtaagtgtcatatcggagggcctatttaaggatcaaagccaagagtatagggagggattgatacctttcggcgttcccgtattggctttcacagccgggctaccgataaatttcaaggagttggtaggtccgctgggaaaagtaataggcttagagagattcggagcgtcggccccgtataaggtattggaggagaagttcggttatactacggaggcgttgacaaagcgggtgttggagtatttaaaggagtatgatgagttgaagggcaggatcttaaagatgctataa

SEQ ID NO: 10130 - protein, 104 aa, Unknown
  Obtained from environmental sample
  misc_feature (1)..(104): Xaa is any amino acid
MAEIDVRVVSVISEGLFKDQSQEYREGLIPFGVPVLAFTAGLPINFKELVGPLGKVIGLERFGASAPYKVLEEKFGYTTEALTKRVLEYLKEYDELKGRILKML

SEQ ID NO: 10131 - DNA, 540 bp, Unknown
  Obtained from environmental sample
  misc_feature (1)..(540): n is a, c, g, or t
atggaagaccaggcggaaaagctgcgtgaaataatgcggcaaaagaagaactcctcaggtaaattgtacgaacaagccgatggcgcgtcgcggagcgacacgctgtcgggcaggatggcccagatgcggagaaatgccgaaggcggtgaaggcagaaagacaagaataataacggtaacttccggaaagggcggtgttggcaaaactaacctttcggtgaacatggcgcttgcctttgccagactgggcaagaaagtgataatcatggacgccgatcttggtcttgccaacgtcaatgtaatgttcaacatgattccgaaatataacctctatcatgtaatcaaaaaacaaaagacaataagggagataatggtagaaaccgaatacggcatctctatagttgccggcgcctcgggtttttcccagattgccaatatgggcaaaaaggaaaggcatgactttatcagcgaactggaatccctttcattcgccgatattatcatcatagacaccagcgccggcgtgagcagcaatttctga

SEQ ID NO: 10132 - protein, 179 aa, Unknown
  Obtained from environmental sample
  DOMAIN (57)...(177): CobQ/CobB/MinD/ParA nucleotide binding domain
  misc_feature (1)..(179): Xaa is any amino acid
MEDQAEKLREIMRQKKNSSGKLYEQADGASRSDTLSGRMAQMRRNAEGGEGRKTRIITVTSGKGGVGKTNLSVNMALAFARLGKKVIIMDADLGLANVNVMFNMIPKYNLYHVIKKQKTIREIMVETEYGISIVAGASGFSQIANMGKKERHDFISELESLSFADIIIIDTSAGVSSNF

SEQ ID NO: 10133 - DNA, 636 bp, Unknown
  Obtained from environmental sample
  misc_feature (1)..(636): n is a, c, g, or t
ttgcgtaaagctctgggcaaaaaggaaaagcaacaggatactgacgcgttagtcgataaatatttttccgtattaaacgaagaggttgacagactgaacggcattgttattgactttttgtttgccgtgcgtcccatgtcactggaactctgcgagggggacctcaacgcgctgattgcggggcttggcgaatttatacgagccgaactggaacagtcgaatatacggctcctgcttgagctggatgacaaacttcccccggtgcttttcgatgagcgttatatgaaacaggttctgcttaatctgataaaaaacgcacaggccgccatgccgaagggagggctgctgaccattgccacagtgggaagggacagcgagatacggataagcgtatgcgacaccggcacggggattagccaggaaaaccttaaaaaaatatttgaaccttatttcacgacaaaaggcaacggcacgggtcttgggcttacccttgtatataaaattatcagggaacatcagggcgagatgtcggttgattcgcaggaaggggaaggaacggattttgagatcatccttcctgtttatcagaaaaaacagaatctgatcgattattcaggagcaaaaaatgaaatttaa

SEQ ID NO: 10134 - protein, 211 aa, Unknown
  Obtained from environmental sample
  DOMAIN (90)...(195): Histidine kinase-, DNA gyrase B-, and HSP90-like ATPase
  misc_feature (1)..(211): Xaa is any amino acid
MRKALGKKEKQQDTDALVDKYFSVLNEEVDRLNGIVIDFLFAVRPMSLELCEGDLNALIAGLGEFIRAELEQSNIRLLLELDDKLPPVLFDERYMKQVLLNLIKNAQAAMPKGGLLTIATVGRDSEIRISVCDTGTGISQENLKKIFEPYFTTKGNGTGLGLTLVYKIIREHQGEMSVDSQEGEGTDFEIILPVYQKKQNLIDYSGAKNEI

SEQ ID NO: 10135 - DNA, 816 bp, Unknown
  Obtained from environmental sample
  misc_feature (1)..(816): n is a, c, g, or t
gtggacaccgggctcgcccgtatatcgcggtacgcgccgagactgcgcaccaaccgcctgccgatagaacctataagccgcgccagcgccgaccagcgcaagggacgctgcggtcgcgttcaggacggggtctgcatacgcttgtattcggaggacgactacaactcgcgcgaagcttttacgctgccggagataaagcgttccaatctcgccggcgttatacttactatgacggcgcataaactcggggcgatcgaggattttccgttcatcgcccccccgtcgaaacaggcgatatcggagggatacgcgcagttaaaagagttgggggcgattgacaacggcaagaagctgacgcgaatgggcgcggagatggcgcaactgccgtttgacccgcatatatcgaggatgattatagccgccagacgtgaaaacgctttgcgtgaggtgaaaatcatcgcggcggcgctttctatagttgacccgcgcgaaaggcctcttgagaaacaggccgaagcggacgcggcgcacgtcaaattcgttgacaagggttctgattttttgacgtatgtaaatctgtgggacgcatacagaaacgagtgggacacgttaaaaacacagggcgctttgaggcgtttttgcaaagggcatttcttgtcattcacacggatgcgggagtggcatgatgtttattggcagcttgacgaaacgctctcgcggatgaaaggatatgagcagaatcccgccccggcctcctacgacgcggtgcatcggtcgctgttgacaggtctgctggccaattgcgcctatctttga

SEQ ID NO: 10136 - protein, 271 aa, Unknown
  Obtained from environmental sample
  DOMAIN (101)...(191): Helicase associated domain (HA2)
  misc_feature (1)..(271): Xaa is any amino acid
MDTGLARISRYAPRLRTNRLPIEPISRASADQRKGRCGRVQDGVCIRLYSEDDYNSREAFTLPEIKRSNLAGVILTMTAHKLGAIEDFPFIAPPSKQAISEGYAQLKELGAIDNGKKLTRMGAEMAQLPFDPHISRMIIAARRENALREVKIIAAALSIVDPRERPLEKQAEADAAHVKFVDKGSDFLTYVNLWDAYRNEWDTLKTQGALRRFCKGHFLSFTRMREWHDVYWQLDETLSRMKGYEQNPAPASYDAVHRSLLTGLLANCAYL

SEQ ID NO: 10137 - DNA, 774 bp, Unknown
  Obtained from environmental sample
  misc_feature (1)..(774): n is a, c, g, or t
atggacgcctacctgaaggcgaaactccgcgtctttgaaaggcaggggccaagcgatctctgcatcgccccagcaggcgcggacttcatgcaggttttttcgcccttgggccaaaaggcgctgttcggctggggagacatcgggggcatgggcgcgtggtgcgacgatggtggcgacatacacgtccgcgaccacaaaggggctgcgacaaggctgttgaacagatcggaactgataatccctggcgaccacaacgtggagaacgcgcttgccgcgatgctgctggccatgcacgggggggcatcccttgaagcaatggcggatggactaaagacctaccccggcctagcccaccgcctggcgctagccggcgaaaagaacgctgtcagggcatacaacgattccaagggaaccaacgtcgacgcgacgcttgtggccatacgcgcccttcccggccccctggtgctgatactcggcggcgaggacaaaggcagcagctacgccccgctgcggagcgcgttggaaggcaagttgcgacagttggtctttttgggcgatgccatacccatgctggagagggacctcggggacctgccccacgcaacccacaaagccttcgacgaagccgtgaacgtggcactgaacgccgccctcccaggcgaccaggtgctgttgagcccggcctgcgccagcttcgaccagttcaagaatttcgaggagaggggcaccaggttcgaggggctggtgaccaaatgggtgtcaagcggggcatag

SEQ ID NO: 10138 - protein, 257 aa, Unknown
  Obtained from environmental sample
  DOMAIN (116)...(191): Mur ligase family, glutamate ligase domain
  misc_feature (1)..(257): Xaa is any amino acid
MDAYLKAKLRVFERQGPSDLCIAPAGADFMQVFSPLGQKALFGWGDIGGMGAWCDDGGDIHVRDHKGAATRLLNRSELIIPGDHNVENALAAMLLAMHGGASLEAMADGLKTYPGLAHRLALAGEKNAVRAYNDSKGTNVDATLVAIRALPGPLVLILGGEDKGSSYAPLRSALEGKLRQLVFLGDAIPMLERDLGDLPHATHKAFDEAVNVALNAALPGDQVLLSPACASFDQFKNFEERGTRFEGLVTKWVSSGA

SEQ ID NO: 10139 - DNA, 738 bp, Unknown
  Obtained from environmental sample
  misc_feature (1)..(738): n is a, c, g, or t
atgctggaaaaagacgttgaaaaggttaaggcaaagaatcttgaacgatcggtaaggagagcgctctttataggcggagtgctatttgcggcaattacggtgttcgtggctgtcaaagagatgacattcacagggaacgcggtgaagtataaggcgacggtcagtcggattgatgtcgagaatagtgataatatcgaagacgccgaccgtgtcagagtatatgtgaaatataccgtggacggcatagagtacgagaggaatctcggatatagagacggtcgtatgtatgtcgggcgagtcgtgaagatttactataatccgaatgatcccggcaatatatatcccgccgattctgaggttatgtattattgtatgttggggacttttttattcattgccgtcacactaagcgtggcgatgaatatttcagtacggaaaaggcgattgatgaagcaggagttgttacggagcggcaacaaggtaatcgccgagtttgtgagtgtggatatcaacaagcggctcaaggatgatgataggtatttgtatatcattcgatgcaagtggacggatagatacggtgtttcgcacacattgaaaagcgaaaacctgtggttcgatcccgcgccgatcatcgagaagaaacatataaaaacgttcccggtgtacatggatttgcgaaattctaagcgttattacgtctcgcttgaggaattggaggacggtccgggagaggggtaa

SEQ ID NO: 10140 - protein, 245 aa, Unknown
  Obtained from environmental sample
  misc_feature (1)..(245): Xaa is any amino acid
MLEKDVEKVKAKNLERSVRRALFIGGVLFAAITVFVAVKEMTFTGNAVKYKATVSRIDVENSDNIEDADRVRVYVKYTVDGIEYERNLGYRDGRMYVGRVVKIYYNPNDPGNIYPADSEVMYYCMLGTFLFIAVTLSVAMNISVRKRRLMKQELLRSGNKVIAEFVSVDINKRLKDDDRYLYIIRCKWTDRYGVSHTLKSENLWFDPAPIIEKKHIKTFPVYMDLRNSKRYYVSLEELEDGPGEG

SEQ ID NO: 10141 - DNA, 495 bp, Unknown
  Obtained from environmental sample
  misc_feature (1)..(495): n is a, c, g, or t
atgaggcttggcatgaagacaaaatttatttttattaccggcggcgtattgtcctcgctgggcaagggcctgaccgccgcctccatcggcgcgctcttgcaggccaggggactcaaggtgaccatccagaaactggatccgtacatcaatgtcgatcccggcaccatgaacccttacgagcacggtgaaatctacgtcacggacgatggggcggagacggatcttgatctcggccattatgagcgctttctcggttcggccatgtcgcgcaagaacagcacgacctccggcgccatctaccaccgggtgatcagcaaggagcggcagggggattaccttggcggcacggtgcaggtcattccgcacatcacggatgaaatcaagtccgtgatcctgtctctgggcgaagacatgcccgaagatccggcgccggatgtggctctggtggaaatcggcggcacggtcggcgacatcgaggtctctcggccaatctga

SEQ ID NO: 10142 - protein, 164 aa, Unknown
  Obtained from environmental sample
  SIGNAL (1)...(26)
  DOMAIN (7)...(164): CTP synthase N-terminus
  misc_feature (1)..(164): Xaa is any amino acid
MRLGMKTKFIFITGGVLSSLGKGLTAASIGALLQARGLKVTIQKLDPYINVDPGTMNPYEHGEIYVTDDGAETDLDLGHYERFLGSAMSRKNSTTSGAIYHRVISKERQGDYLGGTVQVIPHITDEIKSVILSLGEDMPEDPAPDVALVEIGGTVGDIEVSRPI

SEQ ID NO: 10143 - DNA, 450 bp, Unknown
  Obtained from environmental sample
  misc_feature (1)..(450): n is a, c, g, or t
gtgcggaatgacctgcaccgtgccgccaaggtaatccccctgccgctccttgctgatcacccggtggtagatggcgccggaggtcgtgctgttcttgcgcgacatggccgaaccgagaaagcgctcataatggccgagatcaagatccgtctccgccccatcgtccgtgacgtagatttcaccgtgctcgtaagggttcatggtgccgggatcgacattgatgtacggatccagtttctggatggtcaccttgagtcccctggcctgcaagagcgcgccgatggaggcggcggtcaggcccttgcccagcgaggacaatacgccgccggtaataaaaataaattttgtcttcatgccaagcctcatacgcctttatcggatcatggcggacgcctgcacaggcgttcaactgcgcagtatgccgttttttcaccgaaaagacagcattga

SEQ ID NO: 10144 - protein, 149 aa, Unknown
  Obtained from environmental sample
  misc_feature (1)..(149): Xaa is any amino acid
MRNDLHRAAKVIPLPLLADHPVVDGAGGRAVLARHGRTEKALIMAEIKIRLRPIVRDVDFTVLVRVHGAGIDIDVRIQFLDGHLESPGLQERADGGGGQALAQRGQYAAGNKNKFCLHAKPHTPLSDHGGRLHRRSTAQYAVFSPKRQH

SEQ ID NO: 10145 - DNA, 333 bp, Unknown
  Obtained from environmental sample
  misc_feature (1)..(333): n is a, c, g, or t
gtggaatttcattccgccgaagaatggaacgaagcaattgcctcggcgacaaaatcaataaatattcttgcggctcttgaggcgggaagaagcgtagtcaggggattgccaaagcaatacactgtccgcacatggcaaaaagaaagggactgcctttggaatatttccggttattcatgggtttacggagatccctcaaagtggcggcttctctacaacgcaaacaagaccaaaatgcccgacccgaacaatccggacttgattgaacccggtatggttattgatattcccagcataaaaggcgaaacccgcgaaggtatgtggcgtccgtaa

SEQ ID NO: 10146 - protein, 110 aa, Unknown
  Obtained from environmental sample
  misc_feature (1)..(110): Xaa is any amino acid
MEFHSAEEWNEAIASATKSINILAALEAGRSVVRGLPKQYTVRTWQKERDCLWNISGYSWVYGDPSKWRLLYNANKTKMPDPNNPDLIEPGMVIDIPSIKGETREGMWRP

SEQ ID NO: 10147 - DNA, 414 bp, Unknown
  Obtained from environmental sample
  misc_feature (1)..(414): n is a, c, g, or t
atggttatacctgtcattgaaagcccggaagggaaaaaatttgtcatggtgtggcagtggcggcatggctctaaaagcttaagcctggaatttccgggcggcgtctttgaaccgggggaaaatcctgaagaagccgctctccgggaattgcgggaagagacaggttacaagcctgaaaaaatgattaagctgggctcgcttagcccaaaccccgcaattatgtcaaacacaatgcacttcttccttgccgaaggtatttccggcgacggaaggcagtctttggatgaagatgaatatgttgacgttgccctgattgacgcgaatgaggtaataaaaggtataggaaaagccccttacattcacgcgctgattggaaccgctttggctttatatcaatcgaaagaaaaaaaataa

SEQ ID NO: 10148 - protein, 137 aa, Unknown
  Obtained from environmental sample
  DOMAIN (1)...(130): NUDIX domain
  misc_feature (1)..(137): Xaa is any amino acid
MVIPVIESPEGKKFVMVWQWRHGSKSLSLEFPGGVFEPGENPEEAALRELREETGYKPEKMIKLGSLSPNPAIMSNTMHFFLAEGISGDGRQSLDEDEYVDVALIDANEVIKGIGKAPYIHALIGTALALYQSKEKK

SEQ ID NO: 10149 - DNA, 801 bp, Unknown
  Obtained from environmental sample
  misc_feature (1)..(801): n is a, c, g, or t
atgcctgttcttcacggaaaaaacggcgaagacgggacggttcagggactgttggaacttgcgggaatccccattgtcggctgcgacacgctttcatccgcgctttgtatggacaaggacagggcgcacaaaatcgccaatgcggccggcgtacagataccttgttctgtcgttcttgaaaacaaaacggaggcggaaacagtttgggagcaaacagcaaatatgggatatcctttatttgtcaagcctttaagggctggctcatcccatgggatcaccaaggttaaaagcaaagatgagttacctgcggccatcaagctggcttatgggtatgatgacagagttatcatagaggaaaatattcccggttttgaagtcggctgtgcaattttaggcaatgacaagctgataacaggagaattaggcgagattgagcttaaaggcggctttttcgattacagggagaaatacacgccagaaacatacacctaccatgttccggcgcgagtatcgttacaaaaaaccgaagaaatcaaaaataccgcaaagaagatatacagggctttaggctgtaccggttttgcacgggtagatatgtttttaactccgtcaggcgaagttgtctttaacgaagtgaacactatccccggatttacagaccacagccacttcccgcatatgctcaaagctgttggcatgacatttgagcaaattatagatactgctatcggacaggcggtgagaaatgaaaacagtatcgctttcaagaatatggtacatattggccgcttaatcctgtga

SEQ ID NO: 10150 - protein, 266 aa, Unknown
  Obtained from environmental sample
  DOMAIN (36)...(219): ATP-grasp domain
  misc_feature (1)..(266): Xaa is any amino acid
MPVLHGKNGEDGTVQGLLELAGIPIVGCDTLSSALCMDKDRAHKIANAAGVQIPCSVVLENKTEAETVWEQTANMGYPLFVKPLRAGSSHGITKVKSKDELPAAIKLAYGYDDRVIIEENIPGFEVGCAILGNDKLITGELGEIELKGGFFDYREKYTPETYTYHVPARVSLQKTEEIKNTAKKIYRALGCTGFARVDMFLTPSGEVVFNEVNTIPGFTDHSHFPHMLKAVGMTFEQIIDTAIGQAVRNENSIAFKNMVHIGRLIL

SEQ ID NO: 10151 - DNA, 801 bp, Unknown
  Obtained from environmental sample
  misc_feature (1)..(801): n is a, c, g, or t
gtgttgggcaaatcaatggtggacaaccttaagcagttccgtctgggcaaaatgtcgcagatgaaaaaagccccgcaaattgtgcgcgaatatatgccttacggcaaggtgttggttgttgacgatgtggaaacgaatttgtatgtcgccaaagggcttatgtcgccctacggtttgtcgatagagacagccagtaacgggtttgacgcgatagaaaagatcaagaaaggcgtggtttacgacatcatattcatggatcatttcatgcccaagatggacggggtagaaacgacaaaaatcatacgcgaatcggggtataaacagaccataatcgccctgacagctaacgccatcgcggggcaggcggaaatgtttatggcaaacggcttcgacgggtttatttccaaaccgatagacatacgccaactgaatgttttactgaataagtatgtgcgcgacaaatacccgcacgaagtagttgaggcggcgcagcaacaggcgctgaaaaacaatatggttagaaagacacaacagccatccgacccggaactggcggcaattttcgcgcgggacgccgaaaaggccatctcaaggctgaacgcgatttttataaattcattccgcagaaccgaggacatcaggcaatatgttattgacgttcacgcgatgaaaagcgcccttgccaatattggcgagatagggctttccgaaaaggcgtttaaactggaacaagcgggaaaagcggaagataaaacggtaatgttgtccgataccccggtttttctggaagagcntgcgtga

SEQ ID NO: 10152 - protein, 266 aa, Unknown
  Obtained from environmental sample
  DOMAIN (35)...(148): Response regulator receiver domain
  misc_feature (1)..(266): Xaa is any amino acid
MLGKSMVDNLKQFRLGKMSQMKKAPQIVREYMPYGKVLVVDDVETNLYVAKGLMSPYGLSIETASNGFDAIEKIKKGVVYDIIFMDHFMPKMDGVETTKIIRESGYKQTIIALTANAIAGQAEMFMANGFDGFISKPIDIRQLNVLLNKYVRDKYPHEVVEAAQQQALKNNMVRKTQQPSDPELAAIFARDAEKAISRLNAIFINSFRRTEDIRQYVIDVHAMKSALANIGEIGLSEKAFKLEQAGKAEDKTVMLSDTPVFLEEXA

SEQ ID NO: 10153 - DNA, 423 bp, Unknown
  Obtained from environmental sample
  misc_feature (1)..(423): n is a, c, g, or t
ttgaatacttttcttctgcatcagtctatacgcaacgcctctgaaatcagcttctcccgatccggcggccccggcgggcagaatgtcaacaagcttaatacaaaagtgactctgcggctgcgcctgtctttaattgacggcctctcaggagccgaactggagagggcgaaaacactgctggcaaaccgcatcagctcggatgacgagattgttatcagctctgacgaggaacgctcgcagcgtaccaatctggaaagagcttactttcgcgttgaggcgcttatagctcaggcggcaaggctgcccaaacaccgccgacctacaaagccgtcaaaggcggcacgcgagcaaaggctccatgtaaagcaattacagagccgcaaaaaaacgctgcggaggacgcagcccgcttcggaagattaa

SEQ ID NO: 10154 - protein, 140 aa, Unknown
  Obtained from environmental sample
  DOMAIN (1)...(132): Peptidyl-tRNA hydrolase domain
  misc_feature (1)..(140): Xaa is any amino acid
MNTFLLHQSIRNASEISFSRSGGPGGQNVNKLNTKVTLRLRLSLIDGLSGAELERAKTLLANRISSDDEIVISSDEERSQRTNLERAYFRVEALIAQAARLPKHRRPTKPSKAAREQRLHVKQLQSRKKTLRRTQPASED

SEQ ID NO: 10155 - DNA, 876 bp, Unknown
  Obtained from environmental sample
  misc_feature (1)..(876): n is a, c, g, or t
atgtatcaggattacaacaaggttttttccgagtattacaagggaaaagcgggaattgaggtaaccgtgaaccagtctcacggcggttccggtgggcaggctagaagcgttattgaagggaatcaagccgatgttgtgactctggctatggcttatgatatagacgaaattggcgcgaaacgaaagggtattatagccgagaattggataacacgttttccacaaaatagctcaccctatacatctaccattgtttttcttgttcgcaagggcaaccccaaaggcataaaggactgggatgacctcgtgaaatcaggtattaacgtgataaccccagatccaaaaacctccggcggggcacgttggaattacttggcggcttgggcttatgctcgtgccaaatacggtggcgaggataaggcacgtgattttgtaaaaaaactatacggcaatgtgtctgttttggatcctggggcacgtggtgccactaatacctttgctcagcgcggtttgggcgatgtgttgctagcttgggagaacgaggcttttttgatgaacagggaggttggcgagggcaagtttgaaatagttacccctagcctcagcatactcgcagaaccatccgttacctacgttgacggcgtggtgaacaaacgtggcacaaaagacgttgccattgcctatttggaatatctgtattcagatgccgcgcagaggattatcggtaagcattattaccgcccttccaatccggcaatcgccaaagaattttcacactttgtaaacctcaaattggtgacaattgacaaggatttcgggggatggcaggcggcgcataaattgcattttgccgataacgggctatttgccaaataa

SEQ ID NO: 10156 - protein, 291 aa, Unknown
  Obtained from environmental sample
  misc_feature (1)..(291): Xaa is any amino acid
MYQDYNKVFSEYYKGKAGIEVTVNQSHGGSGGQARSVIEGNQADVVTLAMAYDIDEIGAKRKGIIAENWITRFPQNSSPYTSTIVFLVRKGNPKGIKDWDDLVKSGINVITPDPKTSGGARWNYLAAWAYARAKYGGEDKARDFVKKLYGNVSVLDPGARGATNTFAQRGLGDVLLAWENEAFLMNREVGEGKFEIVTPSLSILAEPSVTYVDGVVNKRGTKDVAIAYLEYLYSDAAQRIIGKHYYRPSNPAIAKEFSHFVNLKLVTIDKDFGGWQAAHKLHFADNGLFAK

SEQ ID NO: 10157 - DNA, 396 bp, Unknown
  Obtained from environmental sample
  misc_feature (1)..(396): n is a, c, g, or t
gtgactccggatcggaccgtggtggataaaccggtggacatggtcggcgcggtgggcaccgaaggcgccttcacggtcctcccggggcataccgatttcttgaccgctcttcgcacggacgccttgtggtatcgccaggacggccggaccaaggaactggccgtctccggcgggtttattgaagtcaagccggaccatgtccgcgttctggccgacagtgccgagtatgctgaacgcattgatgcggagaagctcaaactgtctttcaagcgcaacaaggaacttatggccaaggccaaggcggccggccagagcggaaaacacaaacaccataaacaccccaaacacgggcatgggcacggcggccacgatcaatccactcacggccagtcttaa

SEQ ID NO: 10158 - protein, 131 aa, Unknown
  Obtained from environmental sample
  DOMAIN (1)...(76): ATP synthase, Delta/Epsilon chain, beta-sandwich domain
  misc_feature (1)..(131): Xaa is any amino acid
MTPDRTVVDKPVDMVGAVGTEGAFTVLPGHTDFLTALRTDALWYRQDGRTKELAVSGGFIEVKPDHVRVLADSAEYAERIDAEKLKLSFKRNKELMAKAKAAGQSGKHKHHKHPKHGHGHGGHDQSTHGQS

SEQ ID NO: 10159 - DNA, 441 bp, Unknown
  Obtained from environmental sample
  misc_feature (1)..(441): n is a, c, g, or t
gtgggggaaaaagtctttgggaaaaaagatgagattaccgcgctggaagcgattatccacccgcaggttgaccgcatgacgcttgagtggattagttcgcaaagcggtaaaacctgcgtaatcaacgcggcagtgctccacagattggcgatctttggaaagtttgacagcattttattggttcacgccccgttccttgtccggctgttacgggcaaaacgcagggacagacattcctggatctcaattgtaaggataatgatgagccagaagcgttttacccttcaatatttagcaggaaatgccgatatttacatagtagagaacccggggacaggggggttcttgccggattctacaggtaaggaaacaaaactggagcggcggatcggcgagattctgtcagaacttacaaacaaaaaaactcagggaggattttaa

SEQ ID NO: 10160 - protein, 146 aa, Unknown
  Obtained from environmental sample
  misc_feature (1)..(146): Xaa is any amino acid
MGEKVFGKKDEITALEAIIHPQVDRMTLEWISSQSGKTCVINAAVLHRLAIFGKFDSILLVHAPFLVRLLRAKRRDRHSWISIVRIMMSQKRFTLQYLAGNADIYIVENPGTGGFLPDSTGKETKLERRIGEILSELTNKKTQGGF

SEQ ID NO: 10161 - DNA, 495 bp, Unknown
  Obtained from environmental sample
  misc_feature (1)..(495): n is a, c, g, or t
ttgatcgaagaagacgccgcccttttgaactgcctttcgattgaccctgatccggaaggcaaaattgttccgtcttatgcggagcttacgccttccacaggctgcgattttatcgacagctggcgcgaatgggaacgctctttaaggcttaaccttgccagaaaccgcgcgtccaaacttaaaagagacaacctttccgcgtcagagccgcctttttatcctgttgaagcggtcgccgccgcgcttaaagcggttaatgcggaagtttctccgctggaaggggagttccttatagacaaggcgcgctggaacgccatagatatgctggcgggcaccaactattttgaccgtaacagcgtttacgcatatttcttaaaacttatgttgattgagcggcgtatgtcgttcaatacagaaagaggatttgcagaatataaatcattgtacgcttctattattgaaagcgagcataattccctgggggttcctaaatga

SEQ ID NO: 10162 - protein, 164 aa, Unknown
  Obtained from environmental sample
  misc_feature (1)..(164): Xaa is any amino acid
MIEEDAALLNCLSIDPDPEGKIVPSYAELTPSTGCDFIDSWREWERSLRLNLARNRASKLKRDNLSASEPPFYPVEAVAAALKAVNAEVSPLEGEFLIDKARWNAIDMLAGTNYFDRNSVYAYFLKLMLIERRMSFNTERGFAEYKSLYASIIESEHNSLGVPK

SEQ ID NO: 10163 - DNA, 582 bp, Unknown
  Obtained from environmental sample
  misc_feature (1)..(582): n is a, c, g, or t
atggcggaattggtggaatgccgcgatgacattaccgggggccatatagagcggacgcagcggggaataaaaattctgctggaagaaatcagaaagcacggcgtttaccaggaagaaacaaaagactgggacgtggatctgctgctccagtccagccagcttcacgacgtgggtaaaatatccattgatgacagtatccttaagaagcccggaaagctcactgaaaatgaatttaatgaaatgaagaaacacgcgagttttggcgagcaaataattgaaaagattgagactctggcaaaggaaagcgattttttaaattacgcgaaaattttcgccgccagccatcacgaaagatgggatggggcgggttatccccgggggcttaaaggaaatgaaatccccctccttggccgcatcatggcgattgccgatgtttacgacgcgctcacctcggtacgcccctacaaaatagctttttcccacgaagaagccgtgcgcattattaccaaagccaacggaacccagtttgatcccctgttgattgaagtattcgcccgcgccgcagaacaattcagaaggtga

SEQ ID NO: 10164 - protein, 193 aa, Unknown
  Obtained from environmental sample
  DOMAIN (12)...(149): HD domain
  misc_feature (1)..(193): Xaa is any amino acid
MAELVECRDDITGGHIERTQRGIKILLEEIRKHGVYQEETKDWDVDLLLQSSQLHDVGKISIDDSILKKPGKLTENEFNEMKKHASFGEQIIEKIETLAKESDFLNYAKIFAASHHERWDGAGYPRGLKGNEIPLLGRIMAIADVYDALTSVRPYKIAFSHEEAVRIITKANGTQFDPLLIEVFARAAEQFRR

SEQ ID NO: 10165 - DNA, 624 bp, Unknown
  Obtained from environmental sample
  misc_feature (1)..(624): n is a, c, g, or t
ttgatggccgagnagcggntgcctttcgcccgaatggcggggatggtaaccgccctggacatatcaggtgtcatgcttgaacggctgcgaagctcggcggcggcgctgggtattaccaacattaactatgttgaatgtgattgggcggaatacgaagtaagggaaaaattcgatattattttctgttcccgctctcccgccatgaaagatccgccggctttacggaaggcctgtaacgccctgtccaggtggggaatactcttccattttgccggggaaacccgcgcttccgacacccatacactgggaggaccgctgctggatctgcacggcgtggagaggggcggcaaaaaaaaatacaacgttttacaggactggctccgcaatgaaggcatttccttcaccgtctacccgcttaaaggggagcgccgctcgtaccatacccttgatgaaatgacaactaacgcttgtgaactgataatggccgccggggcggcgccggatacgcgaatcatcaggaaatatcttgagcaattcagggacgaaacatcggggaagtacctttcaataacacgctacgatatggaactggtgatctggcgcggacaagcgccatcagcttaa

SEQ ID NO: 10166 - protein, 207 aa, Unknown
  Obtained from environmental sample
  misc_feature (1)..(207): Xaa is any amino acid
MMAEXRXPFARMAGMVTALDISGVMLERLRSSAAALGITNINYVECDWAEYEVREKFDIIFCSRSPAMKDPPALRKACNALSRWGILFHFAGETRASDTHTLGGPLLDLHGVERGGKKKYNVLQDWLRNEGISFTVYPLKGERRSYHTLDEMTTNACELIMAAGAAPDTRIIRKYLEQFRDETSGKYLSITRYDMELVIWRGQAPSA

SEQ ID NO: 10167 - DNA, 672 bp, Unknown
  Obtained from environmental sample
  misc_feature (1)..(672): n is a, c, g, or t
atgctgccggtcttacttatttgcccgcattacgtttccggccaaaacttctcaagggtgctggaactaaccgcaaggagaatgaacgggcccgatgtcgaggcattgcaaaaacggctgctgtccttcggttttgcaggagtgggcgaagcggacggttattacgggcccaaaacagaagaagtcataaaaaccattcagaaatttgccggttttgaggaaaacggaaaagttgaccgcgcgttatggaattttatctttggcaatgacgaatttaacatacaatatctgaggttaatacagattgccgcccaatacaaaccgaatgaactgcgtaaaattgaaggccgtttgagttatgagtattggaatttttacggttacgactataaaatttatttcgcgaatgacggaaaaataaggatgttggacatatccggcggtaacggagataacggttacggaaaaacatattatttctttgattcagataagtatatcgttctgtattattcagcaagcgttaataatccccagggcagaacgaatgtctttatcagaatggaagattcagccagcaatattaaattggggaaaccggataatgaatcatcatatagccatgatgacagcgaactggttgggatattgtttaatttgaagtttatgtaa

SEQ ID NO: 10168 - protein, 223 aa, Unknown
  Obtained from environmental sample
  DOMAIN (29)...(90): Putative peptidoglycan binding domain
  misc_feature (1)..(223): Xaa is any amino acid
MLPVLLICPHYVSGQNFSRVLELTARRMNGPDVEALQKRLLSFGFAGVGEADGYYGPKTEEVIKTIQKFAGFEENGKVDRALWNFIFGNDEFNIQYLRLIQIAAQYKPNELRKIEGRLSYEYWNFYGYDYKIYFANDGKIRMLDISGGNGDNGYGKTYYFFDSDKYIVLYYSASVNNPQGRTNVFIRMEDSASNIKLGKPDNESSYSHDDSELVGILFNLKFM

SEQ ID NO: 10169 - DNA, 909 bp, Unknown
  Obtained from environmental sample
  misc_feature (1)..(909): n is a, c, g, or t
gtgtatagctgggcggaatttcgcaaaaatgtgaatagcatagatgcagatgtgaaggtagccatacttgatgcntgcggttcaggagccataacccgaacaaagggtggggtttctagaccggctnttatgcaggatgctagcagcgaaatgaagggatacgcatttttaacaagctcaaacgaaaatgaagccagtcaggaaagcgaccgcataaagggcagcttttttacccacgctcttgtcggtggcttgcgcggtgcggcagatatgactgggaacgggaaggttactcttagcgaggcttatcaatatgcgtttgacgaaacgcttagaaacacgcaaaacacaagcgcaggcagccagcatcccaaccgcgatatgaatttggcgggtaccggggatattattatgactgatttgcgcgaaacaagtgccgtgctaacactggattcaaatttggaagggaggctttttataagggatgaacagggcaatttgtttgccgaacttaacaaaattcgtgggcggcaaatagagcttggaatgcctgcgggcaagtattccgtgcagatggaggctccttctaaaagttggatggcaaaggaggtgcaaatatctgagggcaaaaaaaacgtgctttctatgggtgatatgcaaagcatagagcgggaaaaggcggttgcccgcggtaatgcggattccaccacgatgacaggcttggactcggcacgggcaaagccattcaaattcaatttcaacgcttatgcctacaacaaggaacctgcaaacgagttgcaattaggcgttttttttgcaggtgctcatagggcactctctggaacgcagatttcaattattggaaacacggcaacggatgatatggcaggcactcaagcctcggcatga

SEQ ID NO: 10170 - protein, 302 aa, Unknown
  Obtained from environmental sample
  misc_feature (1)..(302): Xaa is any amino acid
MYSWAEFRKNVNSIDADVKVAILDACGSGAITRTKGGVSRPAXMQDASSEMKGYAFLTSSNENEASQESDRIKGSFFTHALVGGLRGAADMTGNGKVTLSEAYQYAFDETLRNTQNTSAGSQHPNRDMNLAGTGDIIMTDLRETSAVLTLDSNLEGRLFIRDEQGNLFAELNKIRGRQIELGMPAGKYSVQMEAPSKSWMAKEVQISEGKKNVLSMGDMQSIEREKAVARGNADSTTMTGLDSARAKPFKFNFNAYAYNKEPANELQLGVFFAGAHRALSGTQISIIGNTATDDMAGTQASA

SEQ ID NO: 10171 - DNA, 684 bp, Unknown
  Obtained from environmental sample
  misc_feature (1)..(684): n is a, c, g, or t
gtgccgcacggcgcatggagttactcaggtatgttaatagcggatgcgtttgcctccgctatgggcagagcaggcggcataaacagagtggttattttggggcctatacatgacaagcgggaaaaggggatttttctttctaattcatattcttttcatactccgcttggggatattttagtagaccgggaaaaaaatgaagaacttgaatttgcggggcagcacattgaaattgatgatattccgcatcttggagaacattctatagaaattctccttccttttgtaaaatactgctttccttcagcttctattgttcctatcttaatgggacagcatggtgcgcagtatattcacgatcttgctcagtccttaaaaactgttattacgccggtgctgaatgagactttgattgtggtttccagtaatctttcttccggcagtgacgatgttacggcgcgttatttggcggatgagtgtctgcgccttttttcagaaaaagacgcgcctgctcttgcatcagctattcaggacggacggcttaatgcctgcggcggcgctcttgttgtaagtcttattgaaagcggattattggaaaaaacccgcagttatgtgaatgatatgatctgcgctgtcgggactgaaaacaatatagtctattataatgaggtgtcttttgtatag

SEQ ID NO: 10172 - protein, 227 aa, Unknown
  Obtained from environmental sample
  DOMAIN (1)...(218): Protein of unknown function DUF52
  misc_feature (1)..(227): Xaa is any amino acid
MPHGAWSYSGMLIADAFASAMGRAGGINRVVILGPIHDKREKGIFLSNSYSFHTPLGDILVDREKNEELEFAGQHIEIDDIPHLGEHSIEILLPFVKYCFPSASIVPILMGQHGAQYIHDLAQSLKTVITPVLNETLIVVSSNLSSGSDDVTARYLADECLRLFSEKDAPALASAIQDGRLNACGGALVVSLIESGLLEKTRSYVNDMICAVGTENNIVYYNEVSFV

SEQ ID NO: 10173 - DNA, 465 bp, Unknown
  Obtained from environmental sample
  misc_feature (1)..(465): n is a, c, g, or t
ttgaagaaaaacgttttagaagtagaccccttcaactctgttgacgaagacggagtcggcacattggtaaaatttgccattaaagaaggcagatccgtaaaaccggacatgaagatgggagtctgcggagagcacggcggagatcccgcgtcaatagatttcttctacagggcgggattaagttatgtttcgtgttcaccattccgggttccgttagctcgtcttgccggagcgcaagcggttataaagaactcgggtgtgaatataaagggaggggtatcagcaaagtctggtaaaccaaccactgccaaggttaagggcagtaaaaaatctctaaagggggacaaaaagatggcagcagcagcaggaaaaaagcccgctaagaaagcggcaaagaaaccggcagcgaagaaggctgtaaagaagacagcgaagaaaccggctaagaaaacagcgaaaaagtaa

SEQ ID NO: 10174 - protein, 154 aa, Unknown
  Obtained from environmental sample
  misc_feature (1)..(154): Xaa is any amino acid
MKKNVLEVDPFNSVDEDGVGTLVKFAIKEGRSVKPDMKMGVCGEHGGDPASIDFFYRAGLSYVSCSPFRVPLARLAGAQAVIKNSGVNIKGGVSAKSGKPTTAKVKGSKKSLKGDKKMAAAAGKKPAKKAAKKPAAKKAVKKTAKKPAKKTAKK

SEQ ID NO: 10175 - DNA, 333 bp, Unknown
  Obtained from environmental sample
  misc_feature (1)..(333): n is a, c, g, or t
ttggaagatttcggcaagaaatggaatgacaaatatccgatgatatataaatcatgggagcagcactggggggacttaaacgaattttttaagtacccgcctgaaattcgccgggctatttatacaactaacgccattgagtcaatgaattaccagcttcgtaaagttactaaaaaccgctcgtcattttcaacagacgatgctataattaagctactgtatttggcgattaggaatgcttcagaaaagtggactatgccgataagggcatgggggcaggctcttaaccagtttgccattgaattcgggaaagaacgagtttcgttcttatga

SEQ ID NO: 10176 - protein, 110 aa, Unknown
  Obtained from environmental sample
  misc_feature (1)..(110): Xaa is any amino acid
MEDFGKKWNDKYPMIYKSWEQHWGDLNEFFKYPPEIRRAIYTTNAIESMNYQLRKVTKNRSSFSTDDAIIKLLYLAIRNASEKWTMPIRAWGQALNQFAIEFGKERVSFL

SEQ ID NO: 10177 - DNA, 309 bp, Unknown
  Obtained from environmental sample
  misc_feature (1)..(309): n is a, c, g, or t
ttgaaagaggtttcttatatgtatccggtcaaaggaaagctgatattggagaatggtcatgtgtacgaaggtgaatatatcaacggcatacccaatggcaaaggaaaactgacatataccgatggctcggtgtatgaaggagattttgtaaatggaaaatttcacggcaaaggtaaattagtatattttgacggcagcgtgtacgaaggcgattgggatgacggcgagcaaaacggcttgggaaaaatgacctataccgacggcactgttcatgaaggaacatttgtttacagtgaatttgcaaaatag

SEQ ID NO: 10178 - protein, 102 aa, Unknown
  Obtained from environmental sample
  DOMAIN (68)...(90): MORN repeat
  misc_feature (1)..(102): Xaa is any amino acid
MKEVSYMYPVKGKLILENGHVYEGEYINGIPNGKGKLTYTDGSVYEGDFVNGKFHGKGKLVYFDGSVYEGDWDDGEQNGLGKMTYTDGTVHEGTFVYSEFAK

SEQ ID NO: 10179 - DNA, 519 bp, Unknown
  Obtained from environmental sample
  misc_feature (1)..(519): n is a, c, g, or t
atgaggttaagcgaaattatagggctgcagatcaaccatatacatgacgatcacattcatgtttgctcccaatactcgcagaaatacggtagtcgccccctaaaaaccaaagattcaagaaacatccccatcgccgccgctctgcgcgaagagcttttgaatatcatcaaagacaatactaatgggtttttatttacggaaaaatcaggcgagccgatctcgcaccgcaggatatacagggagacaagcgccgcttttgacagaatcggcataggtaaggaagaacggagagaacggggactggcccttcatcactggcggcacttcttgaataccgcgcttctcatggcaaacgtgagcaccctgaaagtccagaaagttacgggtcataaatccatgtccatgacccggcactatgcccattttgacagccgcgagtttagcgaagttttggacgttcaaaacagcctgctccggccaggaagaacaaaagaagcgggtgaagaagaaaaaacttga

SEQ ID NO: 10180 - protein, 172 aa, Unknown
  Obtained from environmental sample
  DOMAIN (1)...(149): Phage integrase family
  misc_feature (1)..(172): Xaa is any amino acid
MRLSEIIGLQINHIHDDHIHVCSQYSQKYGSRPLKTKDSRNIPIAAALREELLNIIKDNTNGFLFTEKSGEPISHRRIYRETSAAFDRIGIGKEERRERGLALHHWRHFLNTALLMANVSTLKVQKVTGHKSMSMTRHYAHFDSREFSEVLDVQNSLLRPGRTKEAGEEEKT

SEQ ID NO: 10181 - DNA, 759 bp, Unknown
  Obtained from environmental sample
  misc_feature (1)..(759): n is a, c, g, or t
atgaaattccaagatataaaatctctttcgcaagaagaattgcgccagttccttttggataatgggcacaaaccttatagggcagagcagattcgcacttgggttttcaagcaaaaaatgcagacctatgaaggtttgaatgttccagcggagctttgtgggttgttggaaagcagttttcgcgtaaaatcgcttagggaagaattaaaaatgcagtctttggacggcacaataaaatggctttacaaaacagcagatgatttaccagttgaaacggttatgattccaacagagacaagagcctctgtttgcgtatcaacgcaatcgggttgcgctatgggttgcgctttttgccgcaccggaagcatgaaactgaaccgctcgcttgaagcaggcgaaattttggaacagataataaatgcgatgaaggtgaaaacagttacaaatgtgatttttatgggcatgggcgagcctcttatgaatttagaggctgttcatagagcttgcgtttgcctgcacgaccaaaaaactttttcaatgggcaagggacgcttaacggttagcaccagcggcattgttccaaaaatagcggaacttttagagagaggcacaccttgtcaactggctgtgagccttgttgcggcagacaatgaaaccaggggaagccttatgcccgtgaacaaaacttgggatttaaccgagcttttgaaagccatagataattatatggaaaaaagncggcgaatgggttacccttga

SEQ ID NO: 10182 - protein, 252 aa, Unknown
  Obtained from environmental sample
  misc_feature (1)..(252): Xaa is any amino acid
MKFQDIKSLSQEELRQFLLDNGHKPYRAEQIRTWVFKQKMQTYEGLNVPAELCGLLESSFRVKSLREELKMQSLDGTIKWLYKTADDLPVETVMIPTETRASVCVSTQSGCAMGCAFCRTGSMKLNRSLEAGEILEQIINAMKVKTVTNVIFMGMGEPLMNLEAVHRACVCLHDQKTFSMGKGRLTVSTSGIVPKIAELLERGTPCQLAVSLVAADNETRGSLMPVNKTWDLTELLKAIDNYMEKXRRMGYP

SEQ ID NO: 10183 - DNA, 648 bp, Unknown
  Obtained from environmental sample
  misc_feature (1)..(648): n is a, c, g, or t
ttgcaagtggtggaaatacgggggaaaagagttataacccngtgttttgaaaattcttttgtaagcaaagccatatccggctcaatgcggattaagttagccgcggcggcggccttctgcgccgaggctacgtctttaaggccgttacctgtaacaatcgacaccacaagcgcgtcttttggaataaggcccttagccgccgcctttgccagccccgcggtcccggtaacaccggcaggctcgccaaaaaccccggcgttttttcccaaaaactgcattgccgcgagtatttcatcatcgcttacattaacggtgatgcctttggattcacggattgccgccatggctttgtccccgttgcgcggcactcccacggcgatactgtccgcaagggtgttttcttccattttttcaatagcggtattattttcaatagcgcggttaattgggcagcagccttcggcctgtacgctgatcaaccggggcagcttgtcaataaggccggtagcgtataagtctttgaagcccttccagactccggcaatggtacagccgtcgccgacggaaaccgcgacaaaatccggggcagcaaaacctaattgttcggcgatttccattgacactgtttttttaccttcggataaatag

SEQ ID NO: 10184 - protein, 215 aa, Unknown
  Obtained from environmental sample
  misc_feature (1)..(215): Xaa is any amino acid
MQVVEIRGKRVITXCFENSFVSKAISGSMRIKLAAAAAFCAEATSLRPLPVTIDTTSASFGIRPLAAAFASPAVPVTPAGSPKTPAFFPKNCIAASISSSLTLTVMPLDSRIAAMALSPLRGTPTAILSARVFSSIFSIAVLFSIARLIGQQPSACTLINRGSLSIRPVAYKSLKPFQTPAMVQPSPTETATKSGAAKPNCSAISIDTVFLPSDK

SEQ ID NO: 10185 - DNA, 753 bp, Unknown
  Obtained from environmental sample
  misc_feature (1)..(753): n is a, c, g, or t
ttgatggccgaggcgggnttttccagcagaacctccgatttatccggggtcacgcgcaaaaacgggtttctcgcaaaattgaagggagtgaccgatcccgaaaaaaaacggaagctcataggcggggagtttatccgtgtatttgaggaagaatccgcaaagttgggggacatcccctttctggcgcagggaacgatttatccggatgtcgtcgaatccggggatacatacagcgcgactatcaaaagccatcacaacgttggggggcttcccgaaaaccttaaatttaccgaaattattgagccgttgtcggggctttttaaggatgaagtccgcgtccttggcataaagctgggattaccgccctttatcgtgaaacggcagccgtttccggggccggggcttgcaatccgtgtcatgggcgaagttacggaggagaagctggaaattgtgcgccgaaccgacgccatcctccgcgaagaactggataaaacaaagcgcaggccggatcaatactttaccgttttgacaagcacccgctctgtgggcgttaaaggtgatggcagaacgtatgattttgtaatcgcagtccgggctgtaacgacggatgattttatgacatgcgaatacgctccgctgtcgcataaggcgcttagcagaatatcgtcgcggatcacaagcgagctgccgtcagtcagccgtgtcgtctacgacatcacgtcaaagccaccggctacggtggaatgggagtga

SEQ ID NO: 10186 - protein, 250 aa, Unknown
  Obtained from environmental sample
  DOMAIN (159)...(249): GMP synthase C terminal domain
  misc_feature (1)..(250): Xaa is any amino acid
MMAEAGFSSRTSDLSGVTRKNGFLAKLKGVTDPEKKRKLIGGEFIRVFEEESAKLGDIPFLAQGTIYPDVVESGDTYSATIKSHHNVGGLPENLKFTEIIEPLSGLFKDEVRVLGIKLGLPPFIVKRQPFPGPGLAIRVMGEVTEEKLEIVRRTDAILREELDKTKRRPDQYFTVLTSTRSVGVKGDGRTYDFVIAVRAVTTDDFMTCEYAPLSHKALSRISSRITSELPSVSRVVYDITSKPPATVEWE

SEQ ID NO: 10187 - DNA, 882 bp, Unknown
  Obtained from environmental sample
  misc_feature (1)..(882): n is a, c, g, or t
atgttcaaggaaaccatgcaaaacagcggtcagcctgtaattccttcggtaattgccaccgacgtgcagaccgccgttaagttcgccgatgaaatcggctatcccgtgattgtgcgccccgctttcacgctgggcggttcaggcggcggcatcgcggatcacgaggctcagcttaaagaaatcgcctctaacggaatttccttgtcgccgataaatcagattttagtggaaaaatccatcgccggctggaaagaaattgaatttgaagtaatgcgcgaccgcatgggaaacgtaattaccgtttgttcaatggaaaactttgatcctgtcggcatacacacgggcgacagtatcgttatcgctccctgcgttacgttagctgacaaagagtaccaaatgctccgctccgccgcgttgaatatcatctgcgcgctcggcgttgagggcggctgtaacgtccaattcgcccttcaccccgacagctttgagtacgcggttatcgaagtaaacccgcgcgtttcgcgttcatcggctctagccagcaaggcgacaggctaccctatcgcaaaagtcgcgacaaaaatcgccattggctacactctggacgaaattgtaaacgccgttacgggcaacaccttcgccgcctttgagccgactcttgactacgttgcggtaaaattccccaaatggccctttgacaaatttgtatacgcgcaaaaggagcttggcacgcagatgaaagcgacaggcgaagtgatggcgattgccgacacttttgaggaagctcttgtaaaagcggtgcgcggcgcggaaatcgggcttaacagtcttaacctgccccgtctgtccgcaaaatcagacgaagaaatccgcgccctttga

SEQ ID NO: 10188 - protein, 293 aa, Unknown
  Obtained from environmental sample
  DOMAIN (2)...(232): Carbamoyl-phosphate synthase L chain, ATP binding domain
  misc_feature (1)..(293): Xaa is any amino acid
MFKETMQNSGQPVIPSVIATDVQTAVKFADEIGYPVIVRPAFTLGGSGGGIADHEAQLKEIASNGISLSPINQILVEKSIAGWKEIEFEVMRDRMGNVITVCSMENFDPVGIHTGDSIVIAPCVTLADKEYQMLRSAALNIICALGVEGGCNVQFALHPDSFEYAVIEVNPRVSRSSALASKATGYPIAKVATKIAIGYTLDEIVNAVTGNTFAAFEPTLDYVAVKFPKWPFDKFVYAQKELGTQMKATGEVMAIADTFEEALVKAVRGAEIGLNSLNLPRLSAKSDEEIRAL

SEQ ID NO: 10189 - DNA, 360 bp, Unknown
  Obtained from environmental sample
  misc_feature (1)..(360): n is a, c, g, or t
ttgaggatatccccgggctttaaccacaatattttgctttccatcgacaccgacagctccgccgtttataatcttgttcttgaagttacgcgcaaacaaggagagacaaaaccggattttcttatgcgcatatgtgaaacaggttcttttgacgctaaaactttaaaagtcgcggatcgtatttccaacatgatttcccttggatttgtaaacaaccttgcctttgtggatcgttatttaaacgaaacagaaaaatatcttctcccccttgccgctcaggttaacaattatatgctgatagaacttacagaccttgtaaaaacaaaacgtaaatatttggaagatattaattacaaatga

SEQ ID NO: 10190 - protein, 119 aa, Unknown
  Obtained from environmental sample
  misc_feature (1)..(119): Xaa is any amino acid
MRISPGFNHNILLSIDTDSSAVYNLVLEVTRKQGETKPDFLMRICETGSFDAKTLKVADRISNMISLGFVNNLAFVDRYLNETEKYLLPLAAQVNNYMLIELTDLVKTKRKYLEDINYK

SEQ ID NO: 10191 - DNA, 621 bp, Unknown
  Obtained from environmental sample
  misc_feature (1)..(621): n is a, c, g, or t
gtgatggggccgcatcccttcccgacgatggtgcgtgattttcagagcgtaatcggcagggaggcgcgggaacagatacttgccgcggaaactaaacttccggccgcagtgcttgcctgcgtaggcggcggcagcaacgcgatgggcattttttataattttctacccgataccaatgtgcggcttatcggctgcgaagcggcgggccggggaatcgatacggaacagcacgccgccaccatcgccaaaggctccgtggggattttccacggaatgaaatcctacttctgccagaacgatgaaggccagattgccccggtatattcaatttcagcgggccttgattatccgggcataggccccgaacacgcatggctcaatgactcggggcgcgcggaatatgtgcctgtcaccgacgaggaagcggtctgcgcctttgagtacctttcccgtaccgagggaatcataagcgcgattgagagcgcccacgccctcgcccacgcgcaaaaaatagcgcgtaacttcggcaaagagcaaaatattattatctgtctttccggccgcggcgacaaggatgtggcttcaattgcccgttacagggggagggcaatcaatgagtaa

SEQ ID NO: 10192 - protein, 206 aa, Unknown
  Obtained from environmental sample
  DOMAIN (1)...(188): Pyridoxal-phosphate dependent enzyme
  misc_feature (1)..(206): Xaa is any amino acid
MMGPHPFPTMVRDFQSVIGREAREQILAAETKLPAAVLACVGGGSNAMGIFYNFLPDTNVRLIGCEAAGRGIDTEQHAATIAKGSVGIFHGMKSYFCQNDEGQIAPVYSISAGLDYPGIGPEHAWLNDSGRAEYVPVTDEEAVCAFEYLSRTEGIISAIESAHALAHAQKIARNFGKEQNIIICLSGRGDKDVASIARYRGRAINE

SEQ ID NO: 10193 - DNA, 768 bp, Unknown
  Obtained from environmental sample
  misc_feature (1)..(768): n is a, c, g, or t
atggataaactcatcatcaagggcgcgcgggagcataaccttaaaaatatcgatctggaactgcccagggataaattaattgtcgtttccgggctttcaggctcgggcaagagttccctggcttttgacacgattttcgccgaagggcagcggcgttatgtggaaagcctttccgcgtacgcgcggcagttcctcggacgcatggataagcccgatctggattatatagaggggctttccccggcgatttcaatagaacagaagaccacccaccgcaacccccgttccacagtgggaaccgtcaccgagatttacgattactaccgccttctctacgccaggataggaatcccccattgcccgatctgcggcagggagatacgggagcagcccgtcgatttaatcatagaaagtattttgcggatggacgaaggcacaagggtgcaattgctcgcgcccgtcatcaagggaaaaaagggagaacaccagaaaataatcgatgacgcccgcaaggcgggattcgccagggcgagaattgacggggtgttcgtggagcttgacgaaagcataaggctggacaagcagaaaaagcacagcgttgacattatcgttgaccgccttgtgattgggcccgacatacgctcaaggctggccgaatccgtggaaaccgcgctgcaaacctcagacggccttttgctggtactgagccagagccggggaaaattccgcgaaaaggcgaaagcgacaaaagttccgccaggggcgtaa

SEQ ID NO: 10194 - protein, 255 aa, Unknown
  Obtained from environmental sample
  misc_feature (1)..(255): Xaa is any amino acid
MDKLIIKGAREHNLKNIDLELPRDKLIVVSGLSGSGKSSLAFDTIFAEGQRRYVESLSAYARQFLGRMDKPDLDYIEGLSPAISIEQKTTHRNPRSTVGTVTEIYDYYRLLYARIGIPHCPICGREIREQPVDLIIESILRMDEGTRVQLLAPVIKGKKGEHQKIIDDARKAGFARARIDGVFVELDESIRLDKQKKHSVDIIVDRLVIGPDIRSRLAESVETALQTSDGLLLVLSQSRGKFREKAKATKVPPGA

SEQ ID NO: 10195 - DNA, 678 bp, Unknown
  Obtained from environmental sample
  misc_feature (1)..(678): n is a, c, g, or t
atggcgagggatcttggcgtcgctcttgagcgactggcttaccgcccgctacgtcattcgtcaaagaattcgataatggccggtgccgtcggtgcgtcttttttaatgcaaaacctggcgattgttttttttggcggaaggcagaaaggttttccaattcctgaaatgttcaacaagattgtacaaatacacaccgtttctgtgatttatataaacataattattcctgtcataaccgcggtattgttgaccgcgcttttaataatagtacacaaaacaaaaattggtattgctatgcgggctgtagcggcggatctttctgcggccagggttaagggaatagacataaataaaactgtttcgttcactttcggaaccgcgtcggttttggccgcgcttgggggagtgctgtgggtgttgaaatacccccagcttaacccatcaatgggagtgattccggggctgaaatgttttattgccgcggtcatgggcggcataggaaatatctccggcgcggtgctgggcggcttgcttttagggtttatagagatcatagtggtagccgcatttcccgcgctgacagcttaccgcgatgccttcgtttttgtattgctgataattgtgctgctcttaaaaccatccgggcttttgggtaaaaaccaaacagaaaaggcgtga

SEQ ID NO: 10196 - protein, 225 aa, Unknown
  Obtained from environmental sample
  DOMAIN (4)...(209): Branched-chain amino acid transport system / permease component
  misc_feature (1)..(225): Xaa is any amino acid
MARDLGVALERLAYRPLRHSSKNSIMAGAVGASFLMQNLAIVFFGGRQKGFPIPEMFNKIVQIHTVSVIYINIIIPVITAVLLTALLIIVHKTKIGIAMRAVAADLSAARVKGIDINKTVSFTFGTASVLAALGGVLWVLKYPQLNPSMGVIPGLKCFIAAVMGGIGNISGAVLGGLLLGFIEIIVVAAFPALTAYRDAFVFVLLIIVLLLKPSGLLGKNQTEKA

SEQ ID NO: 10197 - DNA, 339 bp, Unknown
  Obtained from environmental sample
  misc_feature (1)..(339): n is a, c, g, or t
atggccgagcttgttccggntcttggaatgttaggtacggttatggggcttgtaggtatgttgcgtaaccttgatgacaagtcgtccatcgggcctaacatggctcttgctcttattacaacattctacggttctttgttttcaaacgtattctttattccatgggcgaataaactcggagtatttgacaatgatgaagccggtatgaaagaaatgatcatcgaaggtgttctttccatacagtcaggcgacaatacgcgtattttggctcttaaactccttgcataccttgatcctgtcgccagaagaacgctggaaaaagaaataattaaggattaa

SEQ ID NO: 10198 - protein, 112 aa, Unknown
  Obtained from environmental sample
  misc_feature (1)..(112): Xaa is any amino acid
MAELVPXLGMLGTVMGLVGMLRNLDDKSSIGPNMALALITTFYGSLFSNVFFIPWANKLGVFDNDEAGMKEMIIEGVLSIQSGDNTRILALKLLAYLDPVARRTLEKEIIKD

SEQ ID NO: 10199 - DNA, 522 bp, Unknown
  Obtained from environmental sample
  misc_feature (1)..(522): n is a, c, g, or t
atgacagatcggccgagtacgggcactgagtacattatctgtccttattcgacaattaaaacaaaagacgatactcttgaattggcgaaaactctcagtcccgtcgtcacaaaagtcagtgatgccggatttaaattcgcctatcacaaccacgctcatgaatttgttcaaaatggcagcgccataaatggcggcgaatatcttcttgacattctgtttgaaaatctcccgcagcaagccgttatggaactggatattttctgggccgctcatgcgggagttgaaccgcttgcttacatggaaaaacacagaaacagattaaaacttcttcatgtaaaacaaatcgacaaagataaacactgtgtcgatcttgatcaagggattttggattttaaagaaattattacaagagcaaaatcacagggtgtacaacattttattcttgaacaggaagcgtttgccgtatcgtctatggtaagcgttaaaaacgacattgactatattatgagtttggagggataa

SEQ ID NO: 10200 - protein, 173 aa, Unknown
  Obtained from environmental sample
  misc_feature (1)..(173): Xaa is any amino acid
MTDRPSTGTEYIICPYSTIKTKDDTLELAKTLSPVVTKVSDAGFKFAYHNHAHEFVQNGSAINGGEYLLDILFENLPQQAVMELDIFWAAHAGVEPLAYMEKHRNRLKLLHVKQIDKDKHCVDLDQGILDFKEIITRAKSQGVQHFILEQEAFAVSSMVSVKNDIDYIMSLEG

SEQ ID NO: 10201 - DNA, 465 bp, Unknown
  Obtained from environmental sample
  misc_feature (1)..(465): n is a, c, g, or t
atggccctcggcgccgttcccgccggccttggggctagggacatccttaggctggagatgggctaccccctctacggccacgaactctccgccgacagaaacgccgccctatccggcttcgcgcacgccatctcaaaaaacaagatgttcatcggatccgacaaagtatcggacccctcccttcacaatctcgcattgtcggggataagcctagacggccggcggacggcgcacggcggcgataccgtaacagcaggcggcaaggccataggtacggtaacaagcggctgcttctccccaacccaaggccgcgcgatagcgctggcgtatattaataaggaatcggccgttattgacacggcagtatcaataatcagcggtaagaacgaattaaccggcaagataaccgcgacgccgttctataaaaacggaacggtgaggggcgacattaatctatatttgtaa

SEQ ID NO: 10202 - protein, 154 aa, Unknown
  Obtained from environmental sample
  misc_feature (1)..(154): Xaa is any amino acid
MALGAVPAGLGARDILRLEMGYPLYGHELSADRNAALSGFAHAISKNKMFIGSDKVSDPSLHNLALSGISLDGRRTAHGGDTVTAGGKAIGTVTSGCFSPTQGRAIALAYINKESAVIDTAVSIISGKNELTGKITATPFYKNGTVRGDINLYL

SEQ ID NO: 10203 - DNA, 381 bp, Unknown
  Obtained from environmental sample
  misc_feature (1)..(381): n is a, c, g, or t
atggtctcaccggatctcaagtactctaaaacccacgagtgggtaaggccggaaggcggcaccgccacggtaggcataaccgaccacgcccaagacacattgggcgacataaccttcgttgaactgcccaaggtcggcgcgcagcttaagcaaggttgcgagtccggcgtgatcgaatcggtaaaggcggcaagcgacctgatgtcgccggtatcgggcgtcgtcgcgtctgtaaacggcgccttagactccgcgccggagacaataaacagcgacccttacggcaccggctggctctacacggttacgctcgcggacgcttcggagctaagcggtctgatggacgcggcggcgtatgagaagtttttggaaagcgagtaa

SEQ ID NO: 10204 - protein, 126 aa, Unknown
  Obtained from environmental sample
  DOMAIN (6)...(126): Glycine cleavage H-protein
  misc_feature (1)..(126): Xaa is any amino acid
MVSPDLKYSKTHEWVRPEGGTATVGITDHAQDTLGDITFVELPKVGAQLKQGCESGVIESVKAASDLMSPVSGVVASVNGALDSAPETINSDPYGTGWLYTVTLADASELSGLMDAAAYEKFLESE

SEQ ID NO: 10205 - DNA, 567 bp, Unknown
  Obtained from environmental sample
  misc_feature (1)..(567): n is a, c, g, or t
ttgataaggcgggcgaaagctgatatgttcatgagcaaacaatgggctgcggcttttgtcaattacattgaaaaagagggcggcgatatcgaagacggagtaaacacgctcaaagcccttgtcagtttctcggactcgctgcccggcgcggttttcggcagggccgcagctataaggctggaaccgcttgtaagaagcgcaatggccgaagccaagcaaggccaggaaacagccgtcagattttttctcctgatggtaaaaaaaaatgtaatccgccatgccgtttcgattattaacgaaataaataaaatactggataaaaaaggcggcgtaattaaggttattgcggaatacgcatttgaaccggaaaaagattttgtttccggaataaaagaatttattaaaaaacagagcggggcaaaaagcgtggaattaacagggcaaataaatacggaacttatcgggggatacaggcttaaggtgggggatgaaataatcgacgcaagtgtccgccgccaattgcaaaaaatgaaagcctgtcttgctgccgcggatggaggaagctaa

SEQ ID NO: 10206 - protein, 188 aa, Unknown
  Obtained from environmental sample
  DOMAIN (18)...(181): ATP synthase delta (OSCP) subunit
  misc_feature (1)..(188): Xaa is any amino acid
MIRRAKADMFMSKQWAAAFVNYIEKEGGDIEDGVNTLKALVSFSDSLPGAVFGRAAAIRLEPLVRSAMAEAKQGQETAVRFFLLMVKKNVIRHAVSIINEINKILDKKGGVIKVIAEYAFEPEKDFVSGIKEFIKKQSGAKSVELTGQINTELIGGYRLKVGDEIIDASVRRQLQKMKACLAAADGGS

SEQ ID NO: 10207 - DNA, 657 bp, Unknown
  Obtained from environmental sample
  misc_feature (1)..(657): n is a, c, g, or t
atggccctgccggtgattgtggtacaggagagcatcgcggataaactggttgctactattgcggaaaaagccaggcagatcaaagtcggtccggcttatgagaaaaccaccattatgggtccagtagtaaatgcggggcacaaaaaatttgtagaggactggatacagaagggcatagacgaaggcgctaaagttgtacttgacggcaggaattacaaggtaccagggtatgaaaacggcttttacataggcccgacgattctggatcatgtaaatccggagatgaccataggcgacagcgaagtctttgggccagtactttgcgtaaagcgggtaaaaaattttcaggaagggctcgcgcttatgaacgccaacccctttgccaacggttcggttatctttacacaaaatggctactatgcccgtgaattcgcccgaaacaccgacggtggtatggtaggaatcaacgtaggtattccggttcctgtcggtatgttccccttcaccggtcataagaaatcatttttcggcgatctgcattgccttggtaaagatggctatcggttctacactgagaccaaggcggttacttaccgctggtttgacgaagaagaaatgaaaaaagaaaaagttagtacctgggacggtatgatgtag

SEQ ID NO: 10208 - protein, 218 aa, Unknown
  Obtained from environmental sample
  DOMAIN (2)...(196): Aldehyde dehydrogenase family
  misc_feature (1)..(218): Xaa is any amino acid
MALPVIVVQESIADKLVATIAEKARQIKVGPAYEKTTIMGPVVNAGHKKFVEDWIQKGIDEGAKVVLDGRNYKVPGYENGFYIGPTILDHVNPEMTIGDSEVFGPVLCVKRVKNFQEGLALMNANPFANGSVIFTQNGYYAREFARNTDGGMVGINVGIPVPVGMFPFTGHKKSFFGDLHCLGKDGYRFYTETKAVTYRWFDEEEMKKEKVSTWDGMM

SEQ ID NO: 10209 - DNA, 453 bp, Unknown
  Obtained from environmental sample
  misc_feature (1)..(453): n is a, c, g, or t
gtgttatgtgtcgggtttctgggcggttttttcgggataggcgcgggatgggcaattacgcctatacaaaacttcatccttggcgttccgattaaagtggcggcggccaacagcggcataattctgggaatggtgaattgcatcgccgtgtggccgtatatgctggcaggcagtattattcccctgtttgtactgccctggctttcaggcaaggtggccggcggttatctgggagcgttggcgtttgtcaagatcaaggttaccgtgatacgttttatcctgagcgggatcatgatttatacaagttttgaacttataaccgacgggctcgcgaaattcaatttaatccccaaaataccgggccgtatttctctggccatatttctgattattatggtgattgacgcccttttattgttcagagcgcaaagaaaaaaagcgtggaggaaataa

SEQ ID NO: 10210 - protein, 150 aa, Unknown
  Obtained from environmental sample
  misc_feature (1)..(150): Xaa is any amino acid
MLCVGFLGGFFGIGAGWAITPIQNFILGVPIKVAAANSGIILGMVNCIAVWPYMLAGSIIPLFVLPWLSGKVAGGYLGALAFVKIKVTVIRFILSGIMIYTSFELITDGLAKFNLIPKIPGRISLAIFLIIMVIDALLLFRAQRKKAWRK

SEQ ID NO: 10211 - DNA, 702 bp, Unknown
  Obtained from environmental sample
  misc_feature (1)..(702): n is a, c, g, or t
ttgagcttaagaccaaaagcattagatatcaaaaggggatattacgtacttttgccagaatggttgcgcattggaattcctgcggctattgagccggtgagttttcagctgtttcaagtttttatggtagctctgtttgtaaggcttggcgatgtttctatggaatccagggtttttgcgggcgtatttgctatgttcgccgtggttttgagcgttgggtttgggagtggcagccaaatattggtagctcatctagttggcaacaaggaatttgacaaggctaataagagaatgcatcaaagccttgtgtggagttgcaccagtgcttttttgattgcggtggcagtagcattttttgcgcaacatttactcctgtttttttacccgaaaataagccaagaaactctgcatttagccattttgctcctttggtgcgacgtggtattgcagccgtttaaagctgcgaacatcgttataacaaatgctctaagggcttcgggggattctgcgttccccgctgtgttcggaacaatatccatgtggactttggggcttggcacagcgttgtttttgtgctatggaatagaattgggcgcaatcggtttatggcttggaatggcatccgatgaattttatcgctccatcgcaaactacacccgttggcacagaggtaagtggaaaagcaaaggggtgatcagataa

SEQ ID NO: 10212 - protein, 233 aa, Unknown
  Obtained from environmental sample
  DOMAIN (27)...(190): MatE
  misc_feature (1)..(233): Xaa is any amino acid
MSLRPKALDIKRGYYVLLPEWLRIGIPAAIEPVSFQLFQVFMVALFVRLGDVSMESRVFAGVFAMFAVVLSVGFGSGSQILVAHLVGNKEFDKANKRMHQSLVWSCTSAFLIAVAVAFFAQHLLLFFYPKISQETLHLAILLLWCDVVLQPFKAANIVITNALRASGDSAFPAVFGTISMWTLGLGTALFLCYGIELGAIGLWLGMASDEFYRSIANYTRWHRGKWKSKGVIR

SEQ ID NO: 10213 - DNA, 810 bp, Unknown
  Obtained from environmental sample
  misc_feature (1)..(810): n is a, c, g, or t
ttgcgaattgacgatcttaaagcgggcgcaagaacggagcaggatgaaaacaagcgaaacccgcatgattttgtgctttggtttaccaaaagcaaatatgagaaccaggctctggtatgggacagcccctggggacgaggttatccgggctggcatatcgaatgttcggcaatgagcatgaaatacttgggggagcagtttgacatccacgccggaggcatagaccacattcccattcaccacaccaacgagattgcccagagcgaagccgccaccggtaaaagcccctgggtgtcctgctggctgcacaatgaattcctggttttagacaagggcaaaatgtccaagtcggcggggggatttcttactctacagagccttattgacgagggttacgatcccctggattaccgctattttctgctgggcggccactaccgcagccagcttcagttttcctgggaaagcatgcaaggcgcgaaaaatgcgcgcaaatcgcttgtggataaagttcgcgctttggcggacaaggcgggggataccggagccgatcccatgcggacagaagcggggaaatacctggaagcttttaacaaggctattgaggacgatctcgcgaccccgcgggctttggcggaattatggggcctgctgagggagggcccggcaacgccggaagcgctggcggctgtttttgacatggacaaagttctcggtcttggcttggaatctgcctgtaaaaaagaggaaaaaaccgtcgaaaatgaggattttttgcgggaaattgaggatctatctcggccaatctga

SEQ ID NO: 10214 - protein, 269 aa, Unknown
  Obtained from environmental sample
  DOMAIN (1)...(162): tRNA synthetases class I (C) catalytic domain
  misc_feature (1)..(269): Xaa is any amino acid
MRIDDLKAGARTEQDENKRNPHDFVLWFTKSKYENQALVWDSPWGRGYPGWHIECSAMSMKYLGEQFDIHAGGIDHIPIHHTNEIAQSEAATGKSPWVSCWLHNEFLVLDKGKMSKSAGGFLTLQSLIDEGYDPLDYRYFLLGGHYRSQLQFSWESMQGAKNARKSLVDKVRALADKAGDTGADPMRTEAGKYLEAFNKAIEDDLATPRALAELWGLLREGPATPEALAAVFDMDKVLGLGLESACKKEEKTVENEDFLREIEDLSRPI

SEQ ID NO: 10215 - DNA, 633 bp, Unknown
  Obtained from environmental sample
  misc_feature (1)..(633): n is a, c, g, or t
atgggcggaattaaaaaagaataccaaaagttaaactcaaatactacggttcttggttccgcggttttggcgtttgcttctgttccggctgtagagttaatagtaatcgcagtttgcgctgactcgcaggatgcggcgcgggaagcggcgcgggaagctctttcccctgagattttatccgcgcaaaggccgaaattgttatttgtaaacgggggggagagcaggcgcgcctccgtgtttaacgcgcttgcgcttctttcgcaatacagcccttgttatgtgctaattcatgacggggcaaggccgtgggtaaccgcaagccttattcgcaatacgctggaaagcgcaaaaaaacacggcgccgttattcccctgcttccgcttacggaaacaccaaaggaatatgattccggttttattacaagacaccttaaacgggcgaatacgggaaccgcgcagacgccgcagggcttcaagtttcctgaaattttttacgcccatcaaaaagccgccgaagttaaagatgaggaatttaccgacgatgccgaaatatggggaagattttacgggcctgtggcggtaatctcaggcgatcctgaaaaccgtaaaattacttttcgggaggatatatga

SEQ ID NO: 10216 - protein, 210 aa, Unknown
  Obtained from environmental sample
  SIGNAL (1)...(30)
  DOMAIN (1)...(210): Uncharacterized protein family UPF0007
  misc_feature (1)..(210): Xaa is any amino acid
MGGIKKEYQKLNSNTTVLGSAVLAFASVPAVELIVIAVCADSQDAAREAAREALSPEILSAQRPKLLFVNGGESRRASVFNALALLSQYSPCYVLIHDGARPWVTASLIRNTLESAKKHGAVIPLLPLTETPKEYDSGFITRHLKRANTGTAQTPQGFKFPEIFYAHQKAAEVKDEEFTDDAEIWGRFYGPVAVISGDPENRKITFREDI

SEQ ID NO: 10217 - DNA, 369 bp, Unknown
  Obtained from environmental sample
  misc_feature (1)..(369): n is a, c, g, or t
atgctggaaaaaataatggggaatattcccattatggagcctcgcagggaaaatatttccggcggcatgggcgatataataaaccgggtcgccgtttataaaaatttctcaaacgcgataggctattcatttttatttttttcaacggaaatggtaaaaaatgatcaaatcaaattattgtctgttgagggcatttatccttcaaaggaaacaatacaagatggaagctatccgttttctgacagtttttacgcaatatttattgatactgatgacacgaatgaaaatattgaatcatttattgaatggatcctatcaagccaggggcaaacgctaatttcaaggacgggatatataccaattaaatag

SEQ ID NO: 10218 - protein, 122 aa, Unknown
  Obtained from environmental sample
  misc_feature (1)..(122): Xaa is any amino acid
MLEKIMGNIPIMEPRRENISGGMGDIINRVAVYKNFSNAIGYSFLFFSTEMVKNDQIKLLSVEGIYPSKETIQDGSYPFSDSFYAIFIDTDDTNENIESFIEWILSSQGQTLISRTGYIPIK

SEQ ID NO: 10219 - DNA, 576 bp, Unknown
  Obtained from environmental sample
  misc_feature (1)..(576): n is a, c, g, or t
atgtcgaataacacaattattctgtgcggaatggttttttcgctttttttaagcgcgatgcttacaatgttaagcgcagtcttttccgatgacctgcggcggatagccctgtggcaaatgggcagctttgccatgcgcggctggtcgtcggtatggttactgcttccgtttctggtcatcggaataaccgggattttcctcttcactaaagaaatggacattttaagcttcggcgacgaacaggcaaaatcatcgggagtggaaacagacgcggtgcgcaaaaaactcctcgctctctgtgccgtgctgacaggcgccgctgtcgctctctcaggcgttatcggctttgtagacctgatagcccctcacgcggcgcgccgtatctgcggttctaatcataaacatttgattccaatgtcatttatattaggcggctccttgcttgttttaaccgatctgttggcaagaactctagtctctccatcggaacttcccgtaggcgcgattaccgcgctaatcggcgcgccgtttttcgcgtgggtttatttcaggcggcggcgtaaggcgcaggtgtaa

SEQ ID NO: 10220 - protein, 191 aa, Unknown
  Obtained from environmental sample
  SIGNAL (1)...(29)
  DOMAIN (1)...(184): FecCD transport family
  misc_feature (1)..(191): Xaa is any amino acid
MSNNTIILCGMVFSLFLSAMLTMLSAVFSDDLRRIALWQMGSFAMRGWSSVWLLLPFLVIGITGIFLFTKEMDILSFGDEQAKSSGVETDAVRKKLLALCAVLTGAAVALSGVIGFVDLIAPHAARRICGSNHKHLIPMSFILGGSLLVLTDLLARTLVSPSELPVGAITALIGAPFFAWVYFRRRRKAQV

SEQ ID NO: 10221 - DNA, 837 bp, Unknown
  Obtained from environmental sample
  misc_feature (1)..(837): n is a, c, g, or t
gtggaccattacatgaacgacaacaaaacactgacggccaactttcaacaacaacctattaattataccctcacgacaaacgtatccccaacgggcggagggagtgtgtcgcgtagcccgaaccaaacagcctatgtgtccggtacgagtgtaaccgtaaccgccactgcggcaagcggttatacgtttacggagtggtcgggagcgtcaacgtctacaagttcttctgtgactattacgatgaatgaggacaaagcgttgactgctagttttcgcgataataataactgcgggaaagatggaacggccggttcgtgcaagatggtgttgataggcagtcagatgtggatggcggaaaatttgaacatagagacggctgattcgtggtgttatgaaaacagttcggagaattgtgataagtatggacggctgtataattggagtgcggcgaagacggcgtgtccaagcggatggcatttgcctacccgcaatgagtggggagtgttggctatagctgtcgggggtatcggtacttatggtagtctcggcccggccggtaaggcgctgaaatcaactagtggttggaaagatggcggcaatggtacggatgattttggattttcggccctaccgggtggctaccgcaactacttctactccgtgggctttttcggcaatgccggcgactacggatactggtggacggctgaggagtacggtaatagtggcgatgcctacgcccggtacatctactacaacaatggcaacgcggacgaaaaccactttgataagcgcagtggtaaatcggtgcgctgtgttgaagacgtgcgccagtaa

SEQ ID NO: 10222 - protein, 278 aa, Unknown
  Obtained from environmental sample
  misc_feature (1)..(278): Xaa is any amino acid
MDHYMNDNKTLTANFQQQPINYTLTTNVSPTGGGSVSRSPNQTAYVSGTSVTVTATAASGYTFTEWSGASTSTSSSVTITMNEDKALTASFRDNNNCGKDGTAGSCKMVLIGSQMWMAENLNIETADSWCYENSSENCDKYGRLYNWSAAKTACPSGWHLPTRNEWGVLAIAVGGIGTYGSLGPAGKALKSTSGWKDGGNGTDDFGFSALPGGYRNYFYSVGFFGNAGDYGYWWTAEEYGNSGDAYARYIYYNNGNADENHFDKRSGKSVRCVEDVRQ

SEQ ID NO: 10223 - DNA, 534 bp, Unknown
  Obtained from environmental sample
  misc_feature (1)..(534): n is a, c, g, or t
atgcgcgagcgatatattggagttcacaaaatcgaaatcggcggaaatggggtttgtatgaagaaaaaaaactgcggtttatccaaatcttttcctcggcaactttactccgatgtaaagcaacttattgacgaagcgcgaaagtttaccgctctttctgtgaattctgtactttcaatgctgtattggaatattggaaataggattaactcggaaatactgaaaaatggtcgggcagaatacgggaaaggtgtaataacaacattaggcaagaaactagaaacagattacggaagttctttttccgaaaagaacattcgccgaatggcacaatttgcgcaagtgtttccacaaaagaagattgtcgtatcactgatacgacaattgagttggactcacattattgcgctcattccgatagaagacccattaaaacgtaacttttatattcaaatgtgcataanagaacactggagcgtaaggactttcangaatcgtatncattctatgttatacgaacgcactgccatttag

SEQ ID NO: 10224 - protein, 177 aa, Unknown
  Obtained from environmental sample
  DOMAIN (35)...(177): Protein of unknown function (DUF1016)
  misc_feature (1)..(177): Xaa is any amino acid
MRERYIGVHKIEIGGNGVCMKKKNCGLSKSFPRQLYSDVKQLIDEARKFTALSVNSVLSMLYWNIGNRINSEILKNGRAEYGKGVITTLGKKLETDYGSSFSEKNIRRMAQFAQVFPQKKIVVSLIRQLSWTHIIALIPIEDPLKRNFYIQMCIXEHWSVRTFXNRXHSMLYERTAI

SEQ ID NO: 10225 - DNA, 858 bp, Unknown
  Obtained from environmental sample
  misc_feature (1)..(858): n is a, c, g, or t
gtgaagaatttcgaacctttgctgctcattcccataggctttgggacgatttttgtcaatatccccttcgcaggcatgggaggccagggggtatggaacgaatcgcttaaactttttgaacaccagggctttctcaatattatttacaacgcgggcgttgggaacgagttcttcccattgataattttcatcggcatcggggcgcttaccgacttcggcccccttatcgccaaccccaaaacggccattttgggcgccgccgcccaattcggcgtattcggcacaatgttctttgtcagcctcgccaactacattcccggcgtggtatttaaccttaaagaagcctgcggcgtggctattatcggcggcgcggacggtcccaccacaatatacatcgccgcgaaactcgcgccccacctgctcgccacggtcgcggtcgcggcctattcgtacatggccctggttccaatcatacagccgcccattatgaaggcccttaccacaaaagaggaacggcttatcaagatgaaacagctgaggcccgtttcgcaaaaagaaaagattattttcccccttgtggtatttacactctccgtgcttctcatcccggccgcggcgccccttatcggatgtttgatgttcggaaacttcctgcgtgaatgcggtgttgtggaacggctttccaaaaccgcccagaacgatctgctgaacattgtctcgctgttcctttccctcggcgtgngcagccagatgacccctgaaaaattccttaaccgctcttcccttataatcgtgtttatgggtctgattgccttctgcatcgcaaccggagccggcgtccttgtggccagttcatga

SEQ ID NO: 10226 - protein, 285 aa, Unknown
  Obtained from environmental sample
  DOMAIN (2)...(284): Na+-transporting methylmalonyl-CoA/oxaloacetate decarboxylase, beta subunit
  misc_feature (1)..(285): Xaa is any amino acid
MKNFEPLLLIPIGFGTIFVNIPFAGMGGQGVWNESLKLFEHQGFLNIIYNAGVGNEFFPLIIFIGIGALTDFGPLIANPKTAILGAAAQFGVFGTMFFVSLANYIPGVVFNLKEACGVAIIGGADGPTTIYIAAKLAPHLLATVAVAAYSYMALVPIIQPPIMKALTTKEERLIKMKQLRPVSQKEKIIFPLVVFTLSVLLIPAAAPLIGCLMFGNFLRECGVVERLSKTAQNDLLNIVSLFLSLGVXSQMTPEKFLNRSSLIIVFMGLIAFCIATGAGVLVASS

SEQ ID NO: 10227 - DNA, 381 bp, Unknown
  Obtained from environmental sample
  misc_feature (1)..(381): n is a, c, g, or t
atgatcctatcgcgctgcccccaccngctgttctcccgcatggttcaagcggtccgccatgcccaaaaagcgggaccggaagagaccctgtccgcttttattcgggaacggggggaaaaaaccattgaagacattctgggtacgggaattaagaccctggctccctcggaaaaggcaaattacaaccggacaaaccgttccctgcatgccctgcgggacattaaagagggtgaaacaataaatgcaggcgatattggagtgctgcggacggaaaaaattctcagaccggggctaaaaccctcctgggaaccccttgttataggcagaaaagcccggaatttcattccctgcggagagggtattcgtttccaggatatttaa

SEQ ID NO: 10228 - protein, 126 aa, Unknown
  Obtained from environmental sample
  misc_feature (1)..(126): Xaa is any amino acid
MILSRCPHXLFSRMVQAVRHAQKAGPEETLSAFIRERGEKTIEDILGTGIKTLAPSEKANYNRTNRSLHALRDIKEGETINAGDIGVLRTEKILRPGLKPSWEPLVIGRKARNFIPCGEGIRFQDI

SEQ ID NO: 10229 - DNA, 813 bp, Unknown
  Obtained from environmental sample
  misc_feature (1)..(813): n is a, c, g, or t
atgggagcgggtgaaaaaatggctgaaattcttcgcacggtggacaagatcggcaaagttggcccggaagaaaccgaaaagaccctggtcgatctgacagacgataaaagcgcccgcagaatacttgattttatcgctgcgggcgatggtgaggcggacggcggccctgccggaggtaattacgaacagacgcttgagcgcataacggagcttgcaggcgggccatctgatgaatccgaacgcctgaacgttctgcggcagttcatgcgggatacggcgacttccgattcttttacccttgatccgagtatcacgagggggcttgattactatacaggcctggtatttgaaaccttcctgaccgatttgcccggcatcggttcaatctgctccggcggacgttacgacaacctctgcggcctttactcaaaaacgcctgtcagcggagtcggatcgtccatcggccttgaccgcatgattgccgccatggaaagcctcgacaggcttcccgcggctttcggatacgcctctgccgccatagcctgtaccggcgaacaggcgggcttgaaccaggctctggcggcgcaattccgtgaacgaaacatcccctgcgaagtatttttggagggctccgccgcgaatcttgtcaagcagtacgtggcggctgaaaaaaagggaatccgctggctcattatccccggcgaaaaccccctctccgatccgctgaccctgcgggacattgcccggcggcaggacatcaagggcatttccatccaggaaattattgacattatacgaaatacaacgttttag

SEQ ID NO: 10230 - protein, 270 aa, Unknown
  Obtained from environmental sample
  DOMAIN (177)...(268): Anticodon binding domain
  misc_feature (1)..(270): Xaa is any amino acid
MGAGEKMAEILRTVDKIGKVGPEETEKTLVDLTDDKSARRILDFIAAGDGEADGGPAGGNYEQTLERITELAGGPSDESERLNVLRQFMRDTATSDSFTLDPSITRGLDYYTGLVFETFLTDLPGIGSICSGGRYDNLCGLYSKTPVSGVGSSIGLDRMIAAMESLDRLPAAFGYASAAIACTGEQAGLNQALAAQFRERNIPCEVFLEGSAANLVKQYVAAEKKGIRWLIIPGENPLSDPLTLRDIARRQDIKGISIQEIIDIIRNTTF

SEQ ID NO: 10231 - DNA, 591 bp, Unknown
  Obtained from environmental sample
  misc_feature (1)..(591): n is a, c, g, or t
atgataccggcagagatgatcatcgcaaagattatcaccgcaaagacgacacaggcaggagcggttatcgtaaagatcgctacggtaaagacgatgccggcagtggtgattatcgccggaaagaacattatcgtaaagatgataccggcagagatgatcatcgcaaagataattaccgcaaagacgacacaggcaggagcgattatcgcaaagataattaccgtaaagataattaccgcaaagacgattccggtagggatgatcatcgtaaagattatcctcgcaaagataactaccgtaaggacgatatcggcaatgaagaccgtcgcaaagaacattaccgcaaagatagtgccggtaggggtgattatcgtaaggataggtacggtaaagatgatgccggtagtgcgggtggctatcgcaaagatcaatcccgcaaaggcgatacccgtcgtaaagaccatcgtaaagatcagtaccgtaaagatgataccccgcgcggcaaagaagagccggcggttggagtgcgtcagcttgttcagcgtattctcgccgatttcgactcgtctcccggcgaccctgagcgtatag

SEQ ID NO: 10232 - protein, 196 aa, Unknown
  Obtained from environmental sample
  misc_feature (1)..(196): Xaa is any amino acid
MIPAEMIIAKIITAKTTQAGAVIVKIATVKTMPAVVIIAGKNIIVKMIPAEMIIAKIITAKTTQAGAIIAKIITVKIITAKTIPVGMIIVKIILAKITTVRTISAMKTVAKNITAKIVPVGVIIVRIGTVKMMPVVRVAIAKINPAKAIPVVKTIVKISTVKMIPRAAKKSRRLECVSLFSVFSPISTRLPATLSV

SEQ ID NO: 10233 - DNA, 657 bp, Unknown
  Obtained from environmental sample
  misc_feature (1)..(657): n is a, c, g, or t
ttgtacatgaaagattacctcggcattaaggcgaaagtcggcacggtgtaccgacgcatctccgacgagtaccttgatccgatgacgtttatggcggactcactaatcggtgtgccgcatatcatggatgcctaccgttcgggaaatgtagcgataatcaatgcgccgggcaacggcgtcgcggacgacaagggcatatattattttgtgcctaaaatgataaaatactatctggacgaagagccgatcctgcaaaatgcgccgacatacctgccttactacgaggacgacctgaagttcacgcttgagaacataaagcgccttgtcataaaagacgtgtcggaggcgggcggctacggcgtagtgttcggcagcgaattgtcagaagaaaagttagctgaaatcaaggctcttatcataaaagagccgcggcggttcatatcgcaggaagtcatcgactttatcgaccttgatataatggacgaaaacggcaatgctgtcccgcgaaaagccgatttaagggcgttcgtgcttacgggtaaaactacgcgcgtgtgggcaagcgggctgacccgcttctcgcgcgttgtcggctcgtttatcgtcaattcttcgcaaggaggaggttttaaagacacatgggtactatctcggtag

SEQ ID NO: 10234 - protein, 218 aa, Unknown
  Obtained from environmental sample
  DOMAIN (73)...(217): Domain of unknown function (DUF407)
  misc_feature (1)..(218): Xaa is any amino acid
MYMKDYLGIKAKVGTVYRRISDEYLDPMTFMADSLIGVPHIMDAYRSGNVAIINAPGNGVADDKGIYYFVPKMIKYYLDEEPILQNAPTYLPYYEDDLKFTLENIKRLVIKDVSEAGGYGVVFGSELSEEKLAEIKALIIKEPRRFISQEVIDFIDLDIMDENGNAVPRKADLRAFVLTGKTTRVWASGLTRFSRVVGSFIVNSSQGGGFKDTWVLSR

SEQ ID NO: 10235 - DNA, 324 bp, Unknown
  Obtained from environmental sample
  misc_feature (1)..(324): n is a, c, g, or t
atgttattagtcagagcgatcatccgccccgaaaaaacaggagcggtaatgagtgaggtagcggctgccggattccccgcggtcaccaaaatgtcggttttcgggcgcggcaaacagaagggcatcaaagtcggcgaagttgtatatgatgaaatccccaaagaaatgctgttgtatgttatcaacgatgaagataaggaagatttggtgaaaatcatcatgcgtattgccagaacgggcgaaggcaacttcggcgatgggcgtatattcatttcgccggtggaatcggcgtataccatcagttctggtaaaccgggtctgtag

SEQ ID NO: 10236 - protein, 107 aa, Unknown
  Obtained from environmental sample
  DOMAIN (4)...(103): Nitrogen regulatory protein P-II
  misc_feature (1)..(107): Xaa is any amino acid
MLLVRAIIRPEKTGAVMSEVAAAGFPAVTKMSVFGRGKQKGIKVGEVVYDEIPKEMLLYVINDEDKEDLVKIIMRIARTGEGNFGDGRIFISPVESAYTISSGKPGL

SEQ ID NO: 10237 - DNA, 471 bp, Unknown
  Obtained from environmental sample
  misc_feature (1)..(471): n is a, c, g, or t
atgaacctcaaccgagcctggagggcgtcgaaccggaggttcgcggttcccctcttgaaatacctgccggataaagcctggtggcggcggatgggaaaaacattgcgttattcgctgtataccgccgttcatccccttgacggtttctgggatttatcccacgagaaacgcggatccctggcggcggcaaatatcattgtcgccttcgccgtactggttgatatattgcgccagacgctgaccaatttccagtttgttatggttaacatggagtattttaacgcggctattgtaatgatgcggataatcctgccgattttcctgtgggttgtggcgaactggagccttaccaccctgatggacggcaaggggcggatgatcgatatctatatggcggtcgcctacgctctggtcccctcggtgattatcaacngcgatcatgatcgcgctcagccaggttatcacttatga

SEQ ID NO: 10238 - protein, 156 aa, Unknown
  Obtained from environmental sample
  misc_feature (1)..(156): Xaa is any amino acid
MNLNRAWRASNRRFAVPLLKYLPDKAWWRRMGKTLRYSLYTAVHPLDGFWDLSHEKRGSLAAANIIVAFAVLVDILRQTLTNFQFVMVNMEYFNAAIVMMRIILPIFLWVVANWSLTTLMDGKGRMIDIYMAVAYALVPSVIINXDHDRAQPGYHL

SEQ ID NO: 10239 - DNA, 351 bp, Unknown
  Obtained from environmental sample
  misc_feature (1)..(351): n is a, c, g, or t
atgacagcttacggtgtgatgataaacagcgcgctggacgaataccatgcaggccgctacgaagcgtccgcggcggtttgggaagaagtgcttaaaatgaacggcaattatgaccttgcctatatcggcataggccgggcggcgctgcggcagggcgaataccaaaaggcgatgaaatactacaaactcaagcattaccgcgaaggctacggcaaggcttttcagttataccgcaagcaatatatggaagaaaacctctggaaaatgctgctggttctggcggtcattttactggccccgccgatcatcagaaccgttgtaaaaatcgtcagggaggtcagggaagcatga

SEQ ID NO: 10240 - protein, 116 aa, Unknown
  Obtained from environmental sample
  misc_feature (1)..(116): Xaa is any amino acid
MTAYGVMINSALDEYHAGRYEASAAVWEEVLKMNGNYDLAYIGIGRAALRQGEYQKAMKYYKLKHYREGYGKAFQLYRKQYMEENLWKMLLVLAVILLAPPIIRTVVKIVREVREA

SEQ ID NO: 10241 - DNA, 324 bp, Unknown
  Obtained from environmental sample
  misc_feature (1)..(324): n is a, c, g, or t
atggcagcgaaaaaatttacgaaggttgatatcgtagacgctctctacgaaaaaaccggaatgacccgcacggaaattcgcaatgttgtcgatctcttcattgatgaaatgaaagacgctcttttgcgccgtcaggttatagagctgcgcggtttcggcacttttgaagtaaaggtgcgaaaagctcgtccaaaggcaagaaaccccagaacgggcgagactatcgctattcgttcgcacggcgcggtcgctttccgttcaggacgcgaattaaaacaagccgtatggacaattaacgacgataaaaaatcggcaaaaaaataa

SEQ ID NO: 10242 - protein, 107 aa, Unknown
  Obtained from environmental sample
  DOMAIN (6)...(96): Bacterial DNA-binding protein
  misc_feature (1)..(107): Xaa is any amino acid
MAAKKFTKVDIVDALYEKTGMTRTEIRNVVDLFIDEMKDALLRRQVIELRGFGTFEVKVRKARPKARNPRTGETIAIRSHGAVAFRSGRELKQAVWTINDDKKSAKK

SEQ ID NO: 10243 - DNA, 693 bp, Unknown
  Obtained from environmental sample
  misc_feature (1)..(693): n is a, c, g, or t
gtgcttgtgtttccccagtatcaccatcttgcattaaacgtgctggtggtcattttaagcgcactgggcgctgtggaattttcggtattgctggcgcagaaaaaattaagcgtatcaaaaacagaagcggcaattttgggagcactgctgccatcagtcatgattctgatcttaaatctgaacttgagcgatatactgttccccgcggtgattaccgccgttgtttcatggctgctggtatcgcgaatatttacccgcggtaatacgctggacaatcttcttggccagtttgccgcgaatcttgccgtactgctctatcccggcctgctcattgtatggttagtacggatgagccgctgggaagaaaacgcaagcattatcattattacctttttgctcgtggtcttttgcactgacggactggcatgggtgatgggtatgttgttcggaaagggaaatcagggaatcataccgataagcccccataaaagtgtcgccggttttatcggcggcgctattgcctcgattattgtcggcgcgggagccgccctgttgtgtcctgatgtttttgtcccccgttttgattttgcggggataccttcggttgccggcgctctgttgggcctgttaaccggcatcgcctcagttctgggcgatctgggagagtcggcgattaacgcagttccggcctga

SEQ ID NO: 10244 - protein, 230 aa, Unknown
  Obtained from environmental sample
  DOMAIN (40)...(227): Cytidylyltransferase family
  misc_feature (1)..(230): Xaa is any amino acid
MLVFPQYHHLALNVLVVILSALGAVEFSVLLAQKKLSVSKTEAAILGALLPSVMILILNLNLSDILFPAVITAVVSWLLVSRIFTRGNTLDNLLGQFAANLAVLLYPGLLIVWLVRMSRWEENASIIIITFLLVVFCTDGLAWVMGMLFGKGNQGIIPISPHKSVAGFIGGAIASIIVGAGAALLCPDVFVPRFDFAGIPSVAGALLGLLTGIASVLGDLGESAINAVPA

SEQ ID NO: 10245 - DNA, 465 bp, Unknown
  Obtained from environmental sample
  misc_feature (1)..(465): n is a, c, g, or t
atgatcaggatgaaagacggcgcggtatacgcccaactttcccgccccgatatgcgcctgcccattcacaaggctctgtattggtcggaaacatcgccttctaaagaaggcgcgtcttctaaagaaggcgcgtcttccgacttcggacgactcgattttgattcgctgacgcttaccttttaccaacccgatacggaaaaatttcccctgctggcgctggcgtatgaggccgtaaaaaggggggcgctgtacccctgcgcgtataatggggcaaacgaggcggcggtgggcgctttccttgcggggcgcattggctttcttgatataagccgcattacacggtatgttttagataaggattggagcgcggagccatgcagcattgccgctgttctggaagcggacaggcaggcgcggataacggcggaaaaggaaattgagggaattgagggattaaaatgttaa

SEQ ID NO: 10246 - protein, 154 aa, Unknown
  Obtained from environmental sample
  misc_feature (1)..(154): Xaa is any amino acid
MIRMKDGAVYAQLSRPDMRLPIHKALYWSETSPSKEGASSKEGASSDFGRLDFDSLTLTFYQPDTEKFPLLALAYEAVKRGALYPCAYNGANEAAVGAFLAGRIGFLDISRITRYVLDKDWSAEPCSIAAVLEADRQARITAEKEIEGIEGLKC

SEQ ID NO: 10247 - DNA, 426 bp, Unknown
  Obtained from environmental sample
  misc_feature (1)..(426): n is a, c, g, or t
atgggatcagattcggcacgaggccatactctgcttacggataagatgtcgctacactacttcgagttgccgaaattgccgaaaatagagaatattaatgcaaacgacgaggtagaattgtggcttgccgcgattaacgcgaaaaccgaagaacagctatcaacaatcaaaactataggaggcgaacctatggaacagttagtagaagcgtatcacaatgtggcggcgtcgcccgaatttcgggagatggtacgtcaaagagaacgcgcacggcacaacgaggcatcggcgctagctaatgcggcgcaaaaagcaacgttagaggcgaatatgagggttgcgaaacgccttaaagccaaaggtatgagcgtaaatgaaattatcgaattaaccgatctttcagtagacgaagtcttaaaagcgtga

SEQ ID NO: 10248 - protein, 141 aa, Unknown
  Obtained from environmental sample
  misc_feature (1)..(141): Xaa is any amino acid
MGSDSARGHTLLTDKMSLHYFELPKLPKIENINANDEVELWLAAINAKTEEQLSTIKTIGGEPMEQLVEAYHNVAASPEFREMVRQRERARHNEASALANAAQKATLEANMRVAKRLKAKGMSVNEIIELTDLSVDEVLKA

SEQ ID NO: 10249 - DNA, 594 bp, Unknown
  Obtained from environmental sample
  misc_feature (1)..(594): n is a, c, g, or t
atgtgtcctgaaccacaacttctatcaatttatgttgacggcgagcttccgtcgccctggaaagaaaaaatggacgctcatttaaaggaatgttcttcttgcagggaaaaatttgaaaactttaaaaaacttcgcgaaatgtttaacaaagacgcgtccgcaaaaagaatcagtgaatcggagatacaatcgtcaaaagaaaaaatttggcgtaatttagaagcaaaacggcgctttacaccgtatccaagaatatggcggcgcaggatttccatttcaattccggcggcggcggcggcggcggttattatcgcgcttattacaatgtttttctcaggcggcggaaatattttaaataacggattagccggcaaaaaggcaaaccttaatgataaatcaaacgtcattctcgcggcggaagaagaaatacccggaattatacccgcggctacagatttaaacggtgtccttcaatatttaggcgcggacagttccgatataattattttacggcttcctgaaagcagaaacttttcccgcgccggagaaccggcaataatcagagccgccgattattcaaggagacatccgtaa

SEQ ID NO: 10250 - protein, 197 aa, Unknown
  Obtained from environmental sample
  misc_feature (1)..(197): Xaa is any amino acid
MCPEPQLLSIYVDGELPSPWKEKMDAHLKECSSCREKFENFKKLREMFNKDASAKRISESEIQSSKEKIWRNLEAKRRFTPYPRIWRRRISISIPAAAAAAVIIALITMFFSGGGNILNNGLAGKKANLNDKSNVILAAEEEIPGIIPAATDLNGVLQYLGADSSDIIILRLPESRNFSRAGEPAIIRAADYSRRHP

SEQ ID NO: 10251 - DNA, 729 bp, Unknown
  Obtained from environmental sample
  misc_feature (1)..(729): n is a, c, g, or t
atggtgataggcataccgtcctgtattaccgaagtcgaaaaaagggcggtagaggaaagcgcctataaggcgggggcaagggacgtgatcgtgattgaggaaagccttgccgcggcgattggcgccgacattcccatacatgagcctgccggccacatggtatgcgacattggcggcggaaccacggaaatatcggttatctcgctggggggaatggtagtcaccaacgccatccggctgggcggcgatgaatttgacgaagccattatcaaatatgtcagaatggttaacaatttaataatcgggcagcagatggcggagcatctgaaaatcgagataggcaacgctgttcccgacaagagcattatggaagttgaagtgaagggtacgaatgccgccaatggccttccccagcgttttaagatcggctccgaccagatcagggaagccctgcgggatcccatcaaccaaatcgttgataatataaaatcaaccctgggacaaacgccgccggagcttgccgcagacattgtcgagcggggcataataatgacaggcggcggttctttgctgaaggggcttgataagctgatcgcgacggaaaccggcgttccggtaattatcgccgatcggcctttggattgcgtggcgctgggggcgggcaagtattttgattatattaaaggcgttgacagttccaagaacatctatgacagcctgaacggataa

SEQ ID NO: 10252 - protein, 242 aa, Unknown
  Obtained from environmental sample
  DOMAIN (1)...(232): MreB/Mbl protein
  misc_feature (1)..(242): Xaa is any amino acid
MVIGIPSCITEVEKRAVEESAYKAGARDVIVIEESLAAAIGADIPIHEPAGHMVCDIGGGTTEISVISLGGMVVTNAIRLGGDEFDEAIIKYVRMVNNLIIGQQMAEHLKIEIGNAVPDKSIMEVEVKGTNAANGLPQRFKIGSDQIREALRDPINQIVDNIKSTLGQTPPELAADIVERGIIMTGGGSLLKGLDKLIATETGVPVIIADRPLDCVALGAGKYFDYIKGVDSSKNIYDSLNG

SEQ ID NO: 10253 - DNA, 603 bp, Unknown
  Obtained from environmental sample
  misc_feature (1)..(603): n is a, c, g, or t
ttgcccgcccccagcgccacgcaatccaaaggccgatcggcgataattaccggaacgccggtttccgtcgcgatcagcttatcaagccccttcagcaaagaaccgccgcctgtcattattatgccccgctcgacaatgtctgcggcaagctccggcggcgtttgtcccagggttgattttatattatcaacgatttggttgatgggatcccgcagggcttccctgatctggtcggagccgatcttaaaacgctggggaaggccattggcggcattcgtacccttcacttcaacttccataatgctcttgtcgggaacagcgttgcctatctcgattttcagatgctccgccatctgctgcccgattattaaattgttaaccattctgacatatttgataatggcttcgtcaaattcatcgccgcccagccggatggcgttggtgactaccattccccccagcgagataaccgatatttccgtggttccgccgccaatgtcgcataccatgtggccggcaggctcatgtatgggaatgtcggcgccaatcgccgcggcaaggctttcctcaatcacgatcacgtcccttgcccccgccttatag

SEQ ID NO: 10254 - protein, 200 aa, Unknown
  Obtained from environmental sample
  misc_feature (1)..(200): Xaa is any amino acid
MPAPSATQSKGRSAIITGTPVSVAISLSSPFSKEPPPVIIMPRSTMSAASSGGVCPRVDFILSTIWLMGSRRASLIWSEPILKRWGRPLAAFVPFTSTSIMLLSGTALPISIFRCSAICCPIIKLLTILTYLIMASSNSSPPSRMALVTTIPPSEITDISVVPPPMSHTMWPAGSCMGMSAPIAAARLSSITITSLAPAL

SEQ ID NO: 10255 - DNA, 330 bp, Unknown
  Obtained from environmental sample
  misc_feature (1)..(330): n is a, c, g, or t
gtgtcacagcaggaagaaaacatccgtcactctatggaagaacaagacgaaggaagcaagcaggttctgcagagcgttggcggtgtaagcgagattacacagcaggtaaaactcagttccgaagaaatgcttaacggcagtaaggaagtaatgactgaaagccagaaccttgaaagagtaacgcaggaaatcacgggcggtatgaatgaaatggcgtccggagcggatcagattaactcggcggtaaataatgtaaatgaaatgaccaccaggaatcgtgaagccattgacgccttgatagaggaagtttcaaagttcaaggtagagtaa

SEQ ID NO: 10256 - protein, 109 aa, Unknown
  Obtained from environmental sample
  misc_feature (1)..(109): Xaa is any amino acid
MSQQEENIRHSMEEQDEGSKQVLQSVGGVSEITQQVKLSSEEMLNGSKEVMTESQNLERVTQEITGGMNEMASGADQINSAVNNVNEMTTRNREAIDALIEEVSKFKVE

SEQ ID NO: 10257 - DNA, 411 bp, Unknown
  Obtained from environmental sample
  misc_feature (1)..(411): n is a, c, g, or t
atgctgatatttctggtcgttggcggttttcgggaattgtttttgggcggtttctggcgttccgtgcaaagcatcagtattaccgcgttaatcgcgggcagggaaccggtgatcagtctgctggcagcggggcttccccggctgtttttagacgccatcgtcatttccctgccgatactgggaaccctgtttctggtttccctgaccacgggtcttatctccaaagcggcgccccagattaacatactgtctgaaggttttcccatttcaattacggtggcttttttgttgatttttacgtcccttccctttatgaccgaggctttcgcgcgggtaatcgattccggttttgacagcctgcaaagtctgtatacgcagatcggccagcagattgagggaggaaggttatga

SEQ ID NO: 10258 - protein, 136 aa, Unknown
  Obtained from environmental sample
  misc_feature (1)..(136): Xaa is any amino acid
MLIFLVVGGFRELFLGGFWRSVQSISITALIAGREPVISLLAAGLPRLFLDAIVISLPILGTLFLVSLTTGLISKAAPQINILSEGFPISITVAFLLIFTSLPFMTEAFARVIDSGFDSLQSLYTQIGQQIEGGRL

SEQ ID NO: 10259 - DNA, 354 bp, Unknown
  Obtained from environmental sample
  misc_feature (1)..(354): n is a, c, g, or t
atgagtcgaagcgttctttttaaaatagcgctgtttgtttttttatcggttcccgctttttcccaaaatacgctttacaaaccgtttgcgtcttttcgtttttttcaaaccgaacattttgacattatctttccgaaagaatcagagccgtccgcccgccttttggcctctttcgcggacagcgtttatgatcaagtaagctccctgctgggcattgaagtaagcggcagaattcccgtaacattttcacctcacacagattcattcaacggttattacagtcagttttttaaccatattgtgctttacgatacgccgcttgatgtgaaaagatgggttataaaaataatctaa

SEQ ID NO: 10260 - protein, 117 aa, Unknown
  Obtained from environmental sample
  SIGNAL (1)...(21)
  misc_feature (1)..(117): Xaa is any amino acid
MSRSVLFKIALFVFLSVPAFSQNTLYKPFASFRFFQTEHFDIIFPKESEPSARLLASFADSVYDQVSSLLGIEVSGRIPVTFSPHTDSFNGYYSQFFNHIVLYDTPLDVKRWVIKII

SEQ ID NO: 10261 - DNA, 546 bp, Unknown
  Obtained from environmental sample
  misc_feature (1)..(546): n is a, c, g, or t
gtgggctgcgccatgcttattcagcagtttaaaccctcctgcgttatcaatacaggttccgccggcggcattgatccgtctctgaaagtgggagacgcggttatttccaccggccttatctaccacgatgttgacgttacggcgtttaactatctccccggccagcttccgcgccagccgcaaatttttccggtggacgaaaaattaataaaactggctgaaaaatccgtagacgaattaaagaaggaaaaagcgcttccggcaacttttaattattgcggaggcataataggatcaggcgacgcttttatgcacaagcctgaacacatagcggaaatacgccgtgtttttccgaatatcgccgcggttgaaatggaaggcgccgctatcgcccacagctgccatttgttttcagttccggttcttgttatccgcgcgctttcagatgtcgcaggtacggaatcgccggtaactcatgacgaatttctgcctatagcgtccaaacattccgccgagatagtgataaggatagtccgcgggctgtaa

SEQ ID NO: 10262 - protein, 181 aa, Unknown
  Obtained from environmental sample
  DOMAIN (1)...(178): Phosphorylase family
  misc_feature (1)..(181): Xaa is any amino acid
MGCAMLIQQFKPSCVINTGSAGGIDPSLKVGDAVISTGLIYHDVDVTAFNYLPGQLPRQPQIFPVDEKLIKLAEKSVDELKKEKALPATFNYCGGIIGSGDAFMHKPEHIAEIRRVFPNIAAVEMEGAAIAHSCHLFSVPVLVIRALSDVAGTESPVTHDEFLPIASKHSAEIVIRIVRGL

SEQ ID NO: 10263 - DNA, 498 bp, Unknown
  Obtained from environmental sample
  misc_feature (1)..(498): n is a, c, g, or t
atgagcaacagcggaaaaggcggaaataaccgcagatcccggcatcgttattccggccggaaagacgaaccggcaaaacacgataaaaaaagaaataccgaaaacttccttgcaaacgataaatccgaaaaaaaccagtcaagcatgtacgagcgtcttcaatggacggcgcctatattgcccgccaattatcaaagcattacccccgaatgtccctggtgcggaaaacagataaaggacgttaactgcgccatcgcggataaagagacaggccgccccgttcatttcgattgcgtgctggcgcggattacggacatggtatctctggaaacaaacgacgccgtctgttatataggcggcgggcgcttcggtgtaatccattacaataatccgccggatataaaggactttttcataaagagaattattgagtgggaagtgaaggataacagcaccgattggcgaatgccgataagcgaacatttttcgattacctga

SEQ ID NO: 10264 - protein, 165 aa, Unknown
  Obtained from environmental sample
  misc_feature (1)..(165): Xaa is any amino acid
MSNSGKGGNNRRSRHRYSGRKDEPAKHDKKRNTENFLANDKSEKNQSSMYERLQWTAPILPANYQSITPECPWCGKQIKDVNCAIADKETGRPVHFDCVLARITDMVSLETNDAVCYIGGGRFGVIHYNNPPDIKDFFIKRIIEWEVKDNSTDWRMPISEHFSIT

SEQ ID NO: 10265 - DNA, 435 bp, Unknown
  Obtained from environmental sample
  misc_feature (1)..(435): n is a, c, g, or t
atggttatcagcgtagacaaggaaaaccgtaacatacgccttggaatcaagcagctttcggaagatccctggaagagtttcgctgccgcctacaaacccggaagccaggtggaaggagaagtttcatctgttacggactttggaatatttgtccgcgtcccgggaggcattgagggtcttatccacaaatcaaatcttaccgagaccagggacgagactcccgaagacgccttgaagaaatacaaagagggcgacaagataaaagcggtagttctggaaattcaaacggacaaacaaaaggtggctttttccatcaaggattacaagaagaaagtacagcaggaagaattgtctcgctatattgccgaagatgaatcagatgattcaacctatactctgggagacttcctgaagtcaaaaggtactggggaataa

SEQ ID NO: 10266 - protein, 144 aa, Unknown
  Obtained from environmental sample
  DOMAIN (30)...(106): S1 RNA binding domain
  misc_feature (1)..(144): Xaa is any amino acid
MVISVDKENRNIRLGIKQLSEDPWKSFAAAYKPGSQVEGEVSSVTDFGIFVRVPGGIEGLIHKSNLTETRDETPEDALKKYKEGDKIKAVVLEIQTDKQKVAFSIKDYKKKVQQEELSRYIAEDESDDSTYTLGDFLKSKGTGE

SEQ ID NO: 10267 - DNA, 402 bp, Unknown
  Obtained from environmental sample
  misc_feature (1)..(402): n is a, c, g, or t
atgttatgggactgggttatctctttcattattttttttaggcgttcctcaaactccccgcggtactttgttcccgccacaattgagcccatgtcaagggaaaggatgcgcctgcctgccaaagctgtaggaacggcgtcgccggcaaagagctgggcaaggccttccacgatggcggtcttcccgacacccggctctcctaccaaaaccggattgttctttgtgcgccgggcaagtatgcgaagtgcgcgctcaatttctttttttctgcccactaccgggtccagttttcccgcccttgccagcgccgtcagatccctggagaattcattcaaagccggggtcaataccggatacgaagccggtttgattctgggaccaaggtttattccaaagctctga

SEQ ID NO: 10268 - protein, 133 aa, Unknown
  Obtained from environmental sample
  misc_feature (1)..(133): Xaa is any amino acid
MLWDWVISFIIFFRRSSNSPRYFVPATIEPMSRERMRLPAKAVGTASPAKSWARPSTMAVFPTPGSPTKTGLFFVRRASMRSARSISFFLPTTGSSFPALASAVRSLENSFKAGVNTGYEAGLILGPRFIPKL

SEQ ID NO: 10269 - DNA, 762 bp, Unknown
  Obtained from environmental sample
  misc_feature (1)..(762): n is a, c, g, or t
atggtggcttccaacgagctttctattccctaccatgtcgaaacggcccgtatgctgtttgagcttgcggcggaggtgctggataagaccggaatcaggatcgaatttataaaccttggcggcggcgtgggtatcccctacagtccggatcagaaagcggttgattacaatgttctggcctcaagtatacaaaaggtatacaacgatgcgatcaagcctgccggtctggattgccgtatccacaccgagtggggcaggacgattaccgggccttacggctggctggtggcgcgggctattcataaaaaagaaatctaccgcaattacatcgggcttgacgcctgtatggcggatcttatgcgccccgcgttgtacggcgcctaccatcatgtcagcgtccccggcaaggaagacgagccgataagcaaaatttatgacattgtcggcagcctgtgcgaaaacaacgataaattcgcggtacagcgcaagctgcccagaattgatactgcggcgcaagccccggacgacaagggcgactttgtggtgatccatgacgcgggagcgcacggcagggcaatgggctttaattacaacggcaaacttcgctgcggagaactgcttctcaggaaggacggttcaaccgtcatgatacgccggcctgaaaccgtgaacgattatttcgcgactcttgacattgcgggcctgaaaaattttcataaaaaaattttcatagtagaagaggaaacagatgatacagcgtaa

SEQ ID NO: 10270 - protein, 253 aa, Unknown
  Obtained from environmental sample
  DOMAIN (94)...(208): Pyridoxal-dependent decarboxylase, C-terminal sheet domain
  misc_feature (1)..(253): Xaa is any amino acid
MVASNELSIPYHVETARMLFELAAEVLDKTGIRIEFINLGGGVGIPYSPDQKAVDYNVLASSIQKVYNDAIKPAGLDCRIHTEWGRTITGPYGWLVARAIHKKEIYRNYIGLDACMADLMRPALYGAYHHVSVPGKEDEPISKIYDIVGSLCENNDKFAVQRKLPRIDTAAQAPDDKGDFVVIHDAGAHGRAMGFNYNGKLRCGELLLRKDGSTVMIRRPETVNDYFATLDIAGLKNFHKKIFIVEEETDDTA

SEQ ID NO: 10271 - DNA, 729 bp, Unknown
  Obtained from environmental sample
  misc_feature (1)..(729): n is a, c, g, or t
ttgcttgctctcggctgtaacatcttcaacatgggcgttatcccctgcctgatagtgtatcctctgcttctcaagccgctaataaaaaaaggaataacagttaagggaataacagccgcctcaacaataattgcggttgtcgttgcgttgcagatcggagcgtttagcgtagtgcttgaaacattattttccggcattacagaattaccgttttcaagttttgtacttttaatgttacccatacactttgcgataggtattatagaaggcattataaccgccgccgttctttgcttcgtgtataaaatgcgccctgaaatcatggaaagcagtcttgaaagaacagccattaaaaatgaaacgccaataaaaactgttctcattacgcttgccgcaattacgctgattaccggaggcttgttgtccctgtttgtttcagaacaccctgacgggcttgaatggtcaatagaaaatataaccggttcaacagagattgaaacagaaaataagtttttagaaggggcggctgccatacaggaaaaaaccgcttttctccctgattacaatttttccgacgcaggcgaagaaggtacggcggcaggaacaaccctttcgggaattttaggcagtatttttacattcctgcttgccggaatatccgtgttaatcatttcagttgttaaaaagaaacaaagtgaaaaacaaaatatacgaactgtatgcacttga

SEQ ID NO: 10272 - protein, 242 aa, Unknown
  Obtained from environmental sample
  misc_feature (1)..(242): Xaa is any amino acid
MLALGCNIFNMGVIPCLIVYPLLLKPLIKKGITVKGITAASTIIAVVVALQIGAFSVVLETLFSGITELPFSSFVLLMLPIHFAIGIIEGIITAAVLCFVYKMRPEIMESSLERTAIKNETPIKTVLITLAAITLITGGLLSLFVSEHPDGLEWSIENITGSTEIETENKFLEGAAAIQEKTAFLPDYNFSDAGEEGTAAGTTLSGILGSIFTFLLAGISVLIISVVKKKQSEKQNIRTVCT

SEQ ID NO: 10273 - DNA, 693 bp, Unknown
  Obtained from environmental sample
  misc_feature (1)..(693): n is a, c, g, or t
atggggacggcgcggggcgttgtgaaaaaggccagaacctccgaatttgtcaatgcgaaaactaggggcgttatcgcgattaacctcgacgacggggacaggcttgtaagcgccctgctgaccaacggctccgacgaggtggtgctgatttcccgcaggggacaggccctgcgcacccacgaggatcatataagggcgatggggcgctcgtcgcgcggcgttaccggcatgaggctgtcaaacggcgacgagcttgccggcatgctgcgtgtcgataccggcagcgcctccaaaggaggcgagatcaaaccgcctgaaaaaaccgaaaaaatgctgatccttaccgaattcggctatggcaaaagggttgacttcagcgaattctcatcgcacgggcgcgggacgggcggccagaaaatctacacggtcaacgaaaaaaccggcgagattataggctgcgtttccctgcttgacgacgacgagataatgtgcatcaccagccagggaaaatcaatcaagttaaaggtagacgagatccgcgttatgggacgagccgcccagggcgtgaggatactcagcatagacaagccggattttgtcatcggccttgatcgcgttgtgaaagaagacgaacaagttataaaagaagacgaacaagctgcaaaagaggacgaacctcttgaaggagaataa

SEQ ID NO: 10274 - protein, 230 aa, Unknown
  Obtained from environmental sample
  DOMAIN (1)...(43): DNA gyrase C-terminal domain, beta-propeller
  misc_feature (1)..(230): Xaa is any amino acid
MGTARGVVKKARTSEFVNAKTRGVIAINLDDGDRLVSALLTNGSDEVVLISRRGQALRTHEDHIRAMGRSSRGVTGMRLSNGDELAGMLRVDTGSASKGGEIKPPEKTEKMLILTEFGYGKRVDFSEFSSHGRGTGGQKIYTVNEKTGEIIGCVSLLDDDEIMCITSQGKSIKLKVDEIRVMGRAAQGVRILSIDKPDFVIGLDRVVKEDEQVIKEDEQAAKEDEPLEGE

SEQ ID NO: 10275 - DNA, 678 bp, Unknown
  Obtained from environmental sample
  misc_feature (1)..(678): n is a, c, g, or t
atggcagcagttgtaaaagatcttgtccaattaaacactgatattcaggaacagaaggaaaggatagataccgttgattttaagatggttaccttttctcttgcgggcaaggaatacggcgtagatatcatgaacgtcaaggaaatcgccaaggcggataagtttacctacgtccccaatgcggcttcttttgttcagggtgtttacaatctccggggcgatattatcccgattatagatcttcgtcaattttttcatttaccaagtgaaaagagaagggacggccttgagaatatgctaattctccgcatagaagatcgggtttacggtacgattgtcgacaaaatcgacaaggtggtggggataaattcagaaaatatccagccgccgcatcctatttttggggatattaacattaagtttataagcggagtggtggagaaaaacgaaaccctctacattattcttgatgtgctgcggatattctccattagtgaaggcgacaaacaaaaacccaggggggccgttgaagctgccggtacgggttcttattatgccgcttctgatgcaggagacgctccagccactcttgaagaccgccaggcagtttctgataatgctttaagttttatcagggaaagtctgccggctctcaagcagttctatcccagcgagtaa

SEQ ID NO: 10276 - protein, 225 aa, Unknown
  Obtained from environmental sample
  DOMAIN (28)...(166): CheW-like domain
  misc_feature (1)..(225): Xaa is any amino acid
MAAVVKDLVQLNTDIQEQKERIDTVDFKMVTFSLAGKEYGVDIMNVKEIAKADKFTYVPNAASFVQGVYNLRGDIIPIIDLRQFFHLPSEKRRDGLENMLILRIEDRVYGTIVDKIDKVVGINSENIQPPHPIFGDINIKFISGVVEKNETLYIILDVLRIFSISEGDKQKPRGAVEAAGTGSYYAASDAGDAPATLEDRQAVSDNALSFIRESLPALKQFYPSE

SEQ ID NO: 10277 - DNA, 399 bp, Unknown
  Obtained from environmental sample
  misc_feature (1)..(399): n is a, c, g, or t
atgagcaatgagaagagtgaaaagagaaaaagggaaatgtttatgaagagggtttttaagatttattggatttgcgttactacggcaatagcgagggctttaacttacaggttaaattttttactttctatgactataacgcttttttttaatttgcttttgcctttgactaccatactcatttataattcgggagccagttttccggggtggaatttttatgaggtgttgttaatacagtctatttttactttgtcgcttgggttcgcgcttgttttgttcagtaatgttttatgggccaacgatgcagcacatacgccgaggggagttttggaggttgttctttctgccgtccccgtaaaccccgctctttttatcctcggaacttactatatttga

SEQ ID NO: 10278 - protein, 132 aa, Unknown
  Obtained from environmental sample
  misc_feature (1)..(132): Xaa is any amino acid
MSNEKSEKRKREMFMKRVFKIYWICVTTAIARALTYRLNFLLSMTITLFFNLLLPLTTILIYNSGASFPGWNFYEVLLIQSIFTLSLGFALVLFSNVLWANDAAHTPRGVLEVVLSAVPVNPALFILGTYYI

SEQ ID NO: 10279 - DNA, 759 bp, Unknown
  Obtained from environmental sample
  misc_feature (1)..(759): n is a, c, g, or t
atgggaagaataggctgtaagataaaagaagccaaggagcttgcaatccatgttaaaaaatcatcatgtttaaatttgacgggaaccgccacgcatttggcggtctctgattcaataaacaggagcgacatcgaatataccaagaaacaaatatccggttttaaaagagccgttaacgctattcgcgcggcaaaaattaatccgggcattgttcacgcggcaaattcaggcgcggtaattttacacccaagcgcgtggttcgatatggtaagaccgggcatacttctttacggttataaatccgtggaagaatatacggctccgcttgaccaattaaaaaaattgtccaaatttaaaaaattgtcaattgcgcctgtaatggaattgcaagcttccgttgttttaataaaaaaaataaaaaaggacgaatccgtctcttacggcagaacatggatagcggataaagacacgctaatcggcgtcctttccgttggttacgccgacgggcttccgcgtcttgcaagcaacagatggcgggttcttatcggcggcgagtattatccgctgattgggcggatcagcatggatcaatgctgtgtgaatctcggcaaaaaaacgaaagttaatcgatgggacactgccgtcattttcggcagtcccgatcatgacgcttccgcgctggcaaaaattacaggcactattccttatgaaattacctgtaacgtaaataaacgagttccgagagtttataagcattaa

SEQ ID NO: 10280 - protein, 252 aa, Unknown
  Obtained from environmental sample
  DOMAIN (126)...(251): Alanine racemase, C-terminal domain
  misc_feature (1)..(252): Xaa is any amino acid
MGRIGCKIKEAKELAIHVKKSSCLNLTGTATHLAVSDSINRSDIEYTKKQISGFKRAVNAIRAAKINPGIVHAANSGAVILHPSAWFDMVRPGILLYGYKSVEEYTAPLDQLKKLSKFKKLSIAPVMELQASVVLIKKIKKDESVSYGRTWIADKDTLIGVLSVGYADGLPRLASNRWRVLIGGEYYPLIGRISMDQCCVNLGKKTKVNRWDTAVIFGSPDHDASALAKITGTIPYEITCNVNKRVPRVYKH

SEQ ID NO: 10281 - DNA, 504 bp, Unknown
  Obtained from environmental sample
  misc_feature (1)..(504): n is a, c, g, or t
atgtttccgctgattagctggtttcatctttggaaggaaaaactcggactttttgaaactccgttccgattgctgcaaaactatccgggaattatttttgcgtatctcggttttggctcctcgctttcaatattcctatttcacggatttatcaaatctgttccgcttgagcttgaggaagccgctaccattgacggatgtacaaaaccggaaacatttttcaagattgttttcccgatactcaccccaatcgccgttacagtagtcatcttaaacggcatgtggatttggaacgattatcttctgcccttgctggtgctcggttccggtaacgcggtacggacgctgccgctggctgtcgcgggttttgtcggctcgtttgtcaaaaagtgggacttaattcttaccgcgacattaatgacaatgttgccgattgttatcgtgttcctggtactgcaaaagcacatcattaaaggaatggtggacggatcggttaaaggataa

SEQ ID NO: 10282 - protein, 167 aa, Unknown
  Obtained from environmental sample
  misc_feature (1)..(167): Xaa is any amino acid
MFPLISWFHLWKEKLGLFETPFRLLQNYPGIIFAYLGFGSSLSIFLFHGFIKSVPLELEEAATIDGCTKPETFFKIVFPILTPIAVTVVILNGMWIWNDYLLPLLVLGSGNAVRTLPLAVAGFVGSFVKKWDLILTATLMTMLPIVIVFLVLQKHIIKGMVDGSVKG

SEQ ID NO: 10283 - DNA, 750 bp, Unknown
  Obtained from environmental sample
  misc_feature (1)..(750): n is a, c, g, or t
atgatggataaacttcaatacttaaaagattataagttttattttcaatttagccttaatccntatgaaccggatatgaaacnaagattaccgcctaaacctgtaataattgaaacctttaagaaattagcagatattatcggcccgcagaaagttatttggcgctatgatcccattttaataaatagcaaatataatatggcatatcatattgagaaatttgaaaaattagccggtgtccttaaaggatatacagaaaaagtaacatttagttttattgatttctataaaaagattgcagaaaatagtaaatcattggggattattgaaatatctatagaagataagaatctcattgcccaaaaattttcagaaatagctaaaaataaaaatttttcaattgatacctgcgctgaagatattgatctttcagaatacggtatttcgcatgcccgttgtatagacgacaggttaatctcaaaattaacaggacataatttatctgttgaaaaagacaaaaatcaacgtccggaatgcggctgtgtaaaaagtattgatataggcgaatataactcttgctctaacggctgtgtttattgttacgcgaattatagcaataatattgtcgaaaaaaatattcaaaaacatattccgttatcaccattattgacaggtgatatttgccctgatgatattgtaaaggaacgtaaagtaacaagtgaaaaagtatttcagaatgagcttttctaa

SEQ ID NO: 10284 - protein, 249 aa, Unknown
  Obtained from environmental sample
  misc_feature (1)..(249): Xaa is any amino acid
MMDKLQYLKDYKFYFQFSLNPYEPDMKXRLPPKPVIIETFKKLADIIGPQKVIWRYDPILINSKYNMAYHIEKFEKLAGVLKGYTEKVTFSFIDFYKKIAENSKSLGIIEISIEDKNLIAQKFSEIAKNKNFSIDTCAEDIDLSEYGISHARCIDDRLISKLTGHNLSVEKDKNQRPECGCVKSIDIGEYNSCSNGCVYCYANYSNNIVEKNIQKHIPLSPLLTGDICPDDIVKERKVTSEKVFQNELF

SEQ ID NO: 10285 - DNA, 684 bp, Unknown
  Obtained from environmental sample
  misc_feature (1)..(684): n is a, c, g, or t
ttgaaaaagcaaacttcattttatatagccataagatatgtatggggcagagccaaagagggagtgcgttatctgcgcggcgcggctgcgggaatagccgtcagtcttgtccctatcattgtaacattaattgtcgcggacggaatgataagaggtattacggacaggtatctggaacttggaacgggtcatctgcaggttttagattttgataattacgagggttatgaaaaaacaagtaaagaaatatcggaaatcgacggcgtaaggggagtatgggcggaacagcgcggaatgggcgttttagccggcaagaaagggaaaacaggcgtatcggtacgggcgattgaaacctcattttgggatgatccctctactgccgcgctgataaaaataattgacggcggcagcaaacctcagtcggacagggatattgtgttaggtgaaacgcttgcgaataaaataaacgtaaaaaaaggggatacagtgcgtcttatgacaattacgcctacggaaaacggcagggcgtccccaaaaacggcttcgtttacggttgcgggagtaatatcatgcggatataacgagcttgacgcgttatggtgcataataagtctagagggcgcaaagcgcgttttttcacaggagccgtctacaaattatgttatcaaaatgacgatccgataa

SEQ ID NO: 10286 - protein, 227 aa, Unknown
  Obtained from environmental sample
  misc_feature (1)..(227): Xaa is any amino acid
MKKQTSFYIAIRYVWGRAKEGVRYLRGAAAGIAVSLVPIIVTLIVADGMIRGITDRYLELGTGHLQVLDFDNYEGYEKTSKEISEIDGVRGVWAEQRGMGVLAGKKGKTGVSVRAIETSFWDDPSTAALIKIIDGGSKPQSDRDIVLGETLANKINVKKGDTVRLMTITPTENGRASPKTASFTVAGVISCGYNELDALWCIISLEGAKRVFSQEPSTNYVIKMTIR

SEQ ID NO: 10287 - DNA, 717 bp, Unknown
  Obtained from environmental sample
  misc_feature (1)..(717): n is a, c, g, or t
gtgcgcccctatgcaggctggtactactccgggcggcttgcttcccttgctgtctcgtcgttggacaggtctgcgcagacgattatcgtcattggcggccacttaccgcccggttctcccgttctattcgcccatgaagacgcggcaatgacgccttttggccccatgccgattgattccgaaatacgttccgttttacagaaagaactggccggcgaagaggattgtttccgcgacaacaccgtcgaagtgcttctgccgatggttcgtttcttttttccgcaggctcagcttgtatggatgcgcctccctgcggaaacatcgtcatttgacgccggaattaccatcgctaaaacagcggcaaaattgaagcgcaaaataaatgttcttgcttctaccgatttaacccattacggcataaattacggcttttctccgcaaggttcgggcagcgccgccttgtgctgggtgcgcgaagtaaatgacgccaactttatcaaggcggttgaatcaggaaactcaggcgaggtacttcttcgtgccgccggtgattattccgcctgttccgcgggcgcggttttaggggcaatgggtttcgcgaaagaagcgggtctgggcggcgcaaagcttttggagtacgcgacaagcgcggatatggatgaaagcggagtgccggattcctttgtgggctacgctgctatggcgtttggcggataa

SEQ ID NO: 10288 - protein, 238 aa, Unknown
  Obtained from environmental sample
  DOMAIN (1)...(235): Protein of unknown function DUF52
  misc_feature (1)..(238): Xaa is any amino acid
MRPYAGWYYSGRLASLAVSSLDRSAQTIIVIGGHLPPGSPVLFAHEDAAMTPFGPMPIDSEIRSVLQKELAGEEDCFRDNTVEVLLPMVRFFFPQAQLVWMRLPAETSSFDAGITIAKTAAKLKRKINVLASTDLTHYGINYGFSPQGSGSAALCWVREVNDANFIKAVESGNSGEVLLRAAGDYSACSAGAVLGAMGFAKEAGLGGAKLLEYATSADMDESGVPDSFVGYAAMAFGG

SEQ ID NO: 10289 - DNA, 852 bp, Unknown
  Obtained from environmental sample
  misc_feature (1)..(852): n is a, c, g, or t
ttgtgcccgaatccgcgcgctggggctgccgaaaaagaaaatataggagccgcaaaaggagacatcaaatttaccgtaaacggccccatgatcggggaaatagccgcccgtctttccggcggttacatgtcaggctggacatatccgtattcgtccggcgctttgccaataaagggagcgatccttgccgcaatggggcgtaaacctgaagggcttgttccggtaaagaactggacatgtgcggaacgtgcttttatttcaattcctggaacgattaaagaaatttccggtatagaacaggcgcgggaacaaaatcatgtaaacgatgttttcctgcgtattaaagaaggggacaaagtttcatttccggaaaataacgtaactaaatgcggcaatataattgcagctgctcaggacagagtaacgacggccggtgcggcggaaactgcggcgcgttcaatccttatcaggcttgatccatcagattcaaaaacaggtgaatttttatccacaactaccgctttcccgcctgacgcctttcaattaactgatgaaataaaaacttctctttcgcgtatccccaactttcccgatccaatttcccaactctccaatccccatatttacccgtttcctgcgcttacttcttccgatttaaaagattacatgggcagatctgtcgaggagtgccttgaagcagtcaggaaattgacaggtttttctcttccgatgtctgaaaaaaatgccgaaaatgaaataatactgggacgctcattctggactgccttcattcgcggttcatatcagggagcagtttatcacattgataatttgggagccatgcgtaattga

SEQ ID NO: 10290 - protein, 283 aa, Unknown
  Obtained from environmental sample
  misc_feature (1)..(283): Xaa is any amino acid
MCPNPRAGAAEKENIGAAKGDIKFTVNGPMIGEIAARLSGGYMSGWTYPYSSGALPIKGAILAAMGRKPEGLVPVKNWTCAERAFISIPGTIKEISGIEQAREQNHVNDVFLRIKEGDKVSFPENNVTKCGNIIAAAQDRVTTAGAAETAARSILIRLDPSDSKTGEFLSTTTAFPPDAFQLTDEIKTSLSRIPNFPDPISQLSNPHIYPFPALTSSDLKDYMGRSVEECLEAVRKLTGFSLPMSEKNAENEIILGRSFWTAFIRGSYQGAVYHIDNLGAMRN

SEQ ID NO: 10291 - DNA, 645 bp, Unknown
  Obtained from environmental sample
  misc_feature (1)..(645): n is a, c, g, or t
atgaaacaatacacccagacaggcacggaagatgtcatttttaataccgttaataccattttcctgattctgcttgcctttattaccctgtaccccttctggaataccctggccgtgtcgtttaacgacgcgatggacacccttcagggcggcgttaatttcttcccccggaaaatttccttttttaattacgaggttattttccagagcggggcaatcccccgcgctttccttgtttccgcagccagaacggtcattaacctggttaccagcgtattctttaccgccatgatcgcctatgtgctttcaagaaacgaatttgctttacgaaaaacctttacaatgattttggttctttccatgtatgtaaacgccggccttatccccaccttctttttgatccggagtttgggcatggtcaattcgttctgggtatacgttattccgggaattgtcaacgcgtttaactttatcgttatgcgcacttatatccgcaccattccggaaagcattctggaatcggcccgcattgacggttacggggattttaccatctttatccggatcgtattccccctgtgccttccggtgctggcgaccgtcgggctttttgtagcggtcggctcatggaacgcctgngtttga

SEQ ID NO: 10292 - protein, 214 aa, Unknown
  Obtained from environmental sample
  misc_feature (1)..(214): Xaa is any amino acid
MKQYTQTGTEDVIFNTVNTIFLILLAFITLYPFWNTLAVSFNDAMDTLQGGVNFFPRKISFFNYEVIFQSGAIPRAFLVSAARTVINLVTSVFFTAMIAYVLSRNEFALRKTFTMILVLSMYVNAGLIPTFFLIRSLGMVNSFWVYVIPGIVNAFNFIVMRTYIRTIPESILESARIDGYGDFTIFIRIVFPLCLPVLATVGLFVAVGSWNAXV

SEQ ID NO: 10293 - DNA, 435 bp, Unknown
  Obtained from environmental sample
  misc_feature (1)..(435): n is a, c, g, or t
gtgcgagataacaacgactttggtctactggtttcaggcgatggcgcaatatgtactattgacggcggcgaaatacgaaataataactccacaggtgtctttgtaaataacgctcttttaatttttaaaaacggaacaattgttgataataaagctgaaatgggagccggcgtatttgtagctgcaaacgccaaatttgaaatgcagggaggaacaattacaaataacacagctgacaacgcagccggtgtactagtaaggaataaagcaatatttgaaatgtcaggcggcacaattactaaaaacagagcaaccaacagcgttggaggagtattagtacaaagcggcggcaagtttgtccaaggtcgtaaagcaaaagtctcaggaaataacgcaaccaaaaataatccgaatcccaatgtatatagacaataa

SEQ ID NO: 10294 - protein, 144 aa, Unknown
  Obtained from environmental sample
  misc_feature (1)..(144): Xaa is any amino acid
MRDNNDFGLLVSGDGAICTIDGGEIRNNNSTGVFVNNALLIFKNGTIVDNKAEMGAGVFVAANAKFEMQGGTITNNTADNAAGVLVRNKAIFEMSGGTITKNRATNSVGGVLVQSGGKFVQGRKAKVSGNNATKNNPNPNVYRQ

SEQ ID NO: 10295 - DNA, 912 bp, Unknown
  Obtained from environmental sample
  misc_feature (1)..(912): n is a, c, g, or t
atgatcagatcggcacgaggaaacgtggacggagtcaacatgcaagaggcgctggaggcgcgcgggcgcttcccggacgcggtatgctgcgccgccgccctctgcgtggcaagcgccctagactacgcccacacgctgaagttcaccctgggcggcaactcctacaacgggataatccaccgcgacctcaaaccggcaaacgtcctgatctccaagcgcagtgagataaaactcaccgacttcggcatagcgcggcccgcccaagccagcctccacacaatggacggaaatattgtagggacgctgcactacctctctcccgaacaactgagatgcggcaatatcgatttgcgaagcgacatatactccctgggcgcaatactctacgaaatggccacaggcgtaaaagtcttcccgcaaaaagacataacggaactcacaatgcagcgcgccgcaaataatttcaaaccgccgaacgaatacgacactcccgtagcgcctgccgtatcaaacataatactaaagtgcctgaaaacatcaccgcaagaacgctacagacacgccgcggaactgatacgcgacctgcaaaaagcttacgccgagatcgccccgaaatgcgcgccgcanaaaacgttgcacgattttttctcagaagatactgcggaagcaggagttacccctaccgtgttgataagcgttgataccgataccgattatgccgttgacacaacatccgttattgataaggattctgtcgttgatactgattttatccttaatgccgatcctattgttgataatgatccatttatcgttaatactgattctgtcattgatgatgaccatgttatcattaataccgattctatcattaatatcaattctattnatgataatgatcctattttctga

SEQ ID NO: 10296 - protein, 303 aa, Unknown
  Obtained from environmental sample
  DOMAIN (1)...(195): Protein tyrosine kinase
  misc_feature (1)..(303): Xaa is any amino acid
MIRSARGNVDGVNMQEALEARGRFPDAVCCAAALCVASALDYAHTLKFTLGGNSYNGIIHRDLKPANVLISKRSEIKLTDFGIARPAQASLHTMDGNIVGTLHYLSPEQLRCGNIDLRSDIYSLGAILYEMATGVKVFPQKDITELTMQRAANNFKPPNEYDTPVAPAVSNIILKCLKTSPQERYRHAAELIRDLQKAYAEIAPKCAPXKTLHDFFSEDTAEAGVTPTVLISVDTDTDYAVDTTSVIDKDSVVDTDFILNADPIVDNDPFIVNTDSVIDDDHVIINTDSIININSIXDNDPIF

SEQ ID NO: 10297 - DNA, 771 bp, Unknown
  Obtained from environmental sample
  misc_feature (1)..(771): n is a, c, g, or t
atgattaaaaccaaaacaagcaatgccgctaatgaacggattttgatgaattcaatattcattaaattcgcggaccttgccacagctcttttttcggagctgctgcgaacgccggttaaggtgcgggtcaattccgtaaaaacaatagcttacaaacaatacagccgctcaattaccgccccgtcaacattcgccgtgattaacttggaacccttgcaatgcaacgcggttcttgaaactgatctgttcgtttctttttccattataagccgtctttacggccatataaaagaaacttgtatggatatgcatgaactcactgaaatcgaaacctcgctgttgaaagggatcatcgtccggcttttgaacgcaatgcgcgaagcgtggagccggattgcagacctcaacctggcactgcgccatttcgaaaccaatgtcttgtttgcccaaatcgcccgcccgaaggataaggtaataaaaggcagcatggaaatcgaaattgacggcgttacaggcaaaatgaatttttgcgttccgtattgtgccgttgaggcgcttctggacaggctttccggaaaatacataattgaaaacaataccgatgttcttgccgggttatcaggcgagattcagaacctgaaaaataattttgcggagcttaaaaaagatataagctcggatatttcgcgccaatttaaggaaataaagaaagcgaatcttatccggaggattttgaaccctgatatgtccgtggtttttctgaatatataa

SEQ ID NO: 10298 - protein, 256 aa, Unknown
  Obtained from environmental sample
  DOMAIN (5)...(190): Flagellar motor switch protein FliM
  misc_feature (1)..(256): Xaa is any amino acid
MIKTKTSNAANERILMNSIFIKFADLATALFSELLRTPVKVRVNSVKTIAYKQYSRSITAPSTFAVINLEPLQCNAVLETDLFVSFSIISRLYGHIKETCMDMHELTEIETSLLKGIIVRLLNAMREAWSRIADLNLALRHFETNVLFAQIARPKDKVIKGSMEIEIDGVTGKMNFCVPYCAVEALLDRLSGKYIIENNTDVLAGLSGEIQNLKNNFAELKKDISSDISRQFKEIKKANLIRRILNPDMSVVFLNI

SEQ ID NO: 10299 - DNA, 690 bp, Unknown
  Obtained from environmental sample
  misc_feature (1)..(690): n is a, c, g, or t
atgattgccgaattggaaagaagcgccgttttttacgcgttgggcggacaactgtgttacgaagaacaatccgagaaattcggggaagaattcgtgttggacggtataagcgtgcttgtaaacgcggttggcggaggtttttggtttgaaccttattcattcaaaccggataaattacgcgccggattttacgcgttttttgataagacggcaaataaagcgagaatcgacaatattttttttatggatgaatatgattatcataacagaaattggtatcgtgaaatactgcgaggcgttacccgtccgtttcaggttgtgtggacgaaaccttatgttgacgataccggcacatttagtttaatgacgaccgcgggagcgggaatatttaaaaatggaaaattaatcgccataactacggttgactgggaaatagaggaagtaattaaaaatttaattataattaatcctactaaaaacagttttgtactgttgtgcgtacccgataaagactatattatttcaagcgtatttacggataattttacgggggactcgttaaaaagcataccctgggatatttcgtccgatcattttacgtataaaaacaaaaaatatttacgcttcggacgttatatgaaaaacggatnggcttttgtcaatccagataccggaaaaggaaatatttga

SEQ ID NO: 10300 - protein, 229 aa, Unknown
  Obtained from environmental sample
  misc_feature (1)..(229): Xaa is any amino acid
MIAELERSAVFYALGGQLCYEEQSEKFGEEFVLDGISVLVNAVGGGFWFEPYSFKPDKLRAGFYAFFDKTANKARIDNIFFMDEYDYHNRNWYREILRGVTRPFQVVWTKPYVDDTGTFSLMTTAGAGIFKNGKLIAITTVDWEIEEVIKNLIIINPTKNSFVLLCVPDKDYIISSVFTDNFTGDSLKSIPWDISSDHFTYKNKKYLRFGRYMKNGXAFVNPDTGKGNI

SEQ ID NO: 10301 - DNA, 591 bp, Unknown
  Obtained from environmental sample
  misc_feature (1)..(591): n is a, c, g, or t
atggtgcgggcttgcggggagctcggggtctcctacctgaccgtctacgtcttctccgccgagaactgggggcgcccggccgtagaggtctccatgctcatggacctgctggtggagatgacgcggcgcgagatcaggagtttgtgcgagaacaacgtgcggctcatggccatcggcgcgttggacaagctgccgcccaagacgcggtcggcgctgctggcgggcatcgaggagacaagcggcaacaccggcctcacgctgatactggccataagctacggcgggcgctcggagatagtgaacgcggcgcgcaccttcgccaaagcggcggcggagaatcccgggcttatcgatacgctcgacgagaacgcgttcggcggatacatgtacacccgcggcatacccgacccggagctaatcatccgcaccggaggcgacaggcgcataagcaacttcctgctgtggcaggccgcctacgcggaactgtacataaccgacacgctgtggccggacttcgacaaggcggcgctgatcgcggcgatagaggacttcagcaagcgcgacaggcgcttcggaaaggtaaaggaatga

SEQ ID NO: 10302 - protein, 196 aa, Unknown
  Obtained from environmental sample
  DOMAIN (1)...(193): Putative undecaprenyl diphosphate synthase
  misc_feature (1)..(196): Xaa is any amino acid
MVRACGELGVSYLTVYVFSAENWGRPAVEVSMLMDLLVEMTRREIRSLCENNVRLMAIGALDKLPPKTRSALLAGIEETSGNTGLTLILAISYGGRSEIVNAARTFAKAAAENPGLIDTLDENAFGGYMYTRGIPDPELIIRTGGDRRISNFLLWQAAYAELYITDTLWPDFDKAALIAAIEDFSKRDRRFGKVKE

SEQ ID NO: 10303 - DNA, 429 bp, Unknown
  Obtained from environmental sample
  misc_feature (1)..(429): n is a, c, g, or t
atgctttcagaacagggaatgatgtgggataccgtaaacccttacccttcaactcttgcgttgggaaaagattactntgcgcagtccaggccgggcggggagaggactgtcctgagcgccgcaggaaacgaaacgtttatacgcatggcggaagttatcaacgcgattttttcaggcaatatcagcggacttacggataacttcaaggttttctattccggcgatccatcttcatgggagctgggcctattgcctctggacagggctattaataatttcgcgctaaggatcaccatgaaaggggactcggttataaaatccatcacggtatacgagcaaaacggcgatacaattatttacggtttatcaaatcacagctattcatctaacctgagcgttcatgaaaaagcctttttttcatttccctga

SEQ ID NO: 10304 - protein, 142 aa, Unknown
  Obtained from environmental sample
  misc_feature (1)..(142): Xaa is any amino acid
MLSEQGMMWDTVNPYPSTLALGKDYXAQSRPGGERTVLSAAGNETFIRMAEVINAIFSGNISGLTDNFKVFYSGDPSSWELGLLPLDRAINNFALRITMKGDSVIKSITVYEQNGDTIIYGLSNHSYSSNLSVHEKAFFSFP

SEQ ID NO: 10305 - DNA, 315 bp, Unknown
  Obtained from environmental sample
  misc_feature (1)..(315): n is a, c, g, or t
atggcagatgcgtcttttaaaatttatactgatggcggatgttcgggtaacccgggaccgggagggtgggcttatgtcatggttcagcaaacttttcagggcgtacaggtaatcgccaaagagaaaggctctgaaaaagacacgaccaacaacaggatggaattaaccgcggtcatcatggcattacgcgcacttaaaacgaggacggatgtcccgcgtcagactgcggtattaacggaatcacagtacgtgcagaaaggcattacggagtggatacgcaactgggaacgcaacgcgtggagaaccgcccgataa

SEQ ID NO: 10306 - protein, 104 aa, Unknown
  Obtained from environmental sample
  DOMAIN (3)...(104): RNase H
  misc_feature (1)..(104): Xaa is any amino acid
MADASFKIYTDGGCSGNPGPGGWAYVMVQQTFQGVQVIAKEKGSEKDTTNNRMELTAVIMALRALKTRTDVPRQTAVLTESQYVQKGITEWIRNWERNAWRTAR

SEQ ID NO: 10307 - DNA, 732 bp, Unknown
  Obtained from environmental sample
  misc_feature (1)..(732): n is a, c, g, or t
ttgaggagcctcttcggccggcgtcaacgttttgttttcataagcaccgtggaggccgccggtttcggggacggggtatcgccgagaatcgagggcgatccgccgaatcccgtcaacaactacggcaaaagcaaacttttggcggagcgggaggtattatccgggacgtggccgatggagcgcgccgtgttgcggctgccgatgatttacgggccgggcacttttcttatagtcccgaagctgttcggcatggtccgccgcgggttttacccgatgataggcggcggttcggctaagatggagttttgttacgtggacaacgccgtggacgggatcattttggcggggaaaaagaaagaggccgccggggagctcttttatgtgtccgacgagcgatcgtactcaataaaggaagtggtgtcaaccattgccgaaagttccgggaagagggttttattcatccgtatccctgttttcgcggctatgtttctaggattgtgctgggaaatcgcggcgaaggttctgccgtttccgccgattatctcaaaatactcaaggaaaccgtttttttccagagagaccgtgttttggacgacaaaagacgtgaataccgtgtccacggaaaagataaagaatatgctaggatactcgccatgcgtcaatattaaggacggtactcgaaagacggccgagtggctaaatcgcgaactgtttcggcgaaacgcgaggtga

SEQ ID NO: 10308 - protein, 243 aa, Unknown
  Obtained from environmental sample
  DOMAIN (2)...(158): 3-beta hydroxysteroid dehydrogenase/isomerase family
  misc_feature (1)..(243): Xaa is any amino acid
MRSLFGRRQRFVFISTVEAAGFGDGVSPRIEGDPPNPVNNYGKSKLLAEREVLSGTWPMERAVLRLPMIYGPGTFLIVPKLFGMVRRGFYPMIGGGSAKMEFCYVDNAVDGIILAGKKKEAAGELFYVSDERSYSIKEVVSTIAESSGKRVLFIRIPVFAAMFLGLCWEIAAKVLPFPPIISKYSRKPFFSRETVFWTTKDVNTVSTEKIKNMLGYSPCVNIKDGTRKTAEWLNRELFRRNAR

SEQ ID NO: 10309 - DNA, 795 bp, Unknown
  Obtained from environmental sample
  misc_feature (1)..(795): n is a, c, g, or t
atgagcaaaacaaaantaccgaagaccgtccattattgctggctaagcggcgataagatgccggacgacgttgtaaaatgccttgaaagctggaaagaacatctgccggaatatacgcttgttttatgggatacgaataaattcgatgtgaattcccatcccttcgtaaaagaggcctatcagttaaaaaaatgggctttcgcgtccgattacatcaggctccacgcgctgtatacggagggcgggatatatcttgataccgatgttttcgtaaagaagagttttgacgattttttggagaacgatttcttttcgggagtagaatatcacgaaaacagcgctaaaaaaggcaaacatctgctaaacgaggacggaacgttaaaaaacaaaaaagacgacgacatattcgcccacggcatacagatacaggccgccattatgggaagcgttaaggggcacccgttcataaaatcgtgcctcgattggtacgacggcaagcgctttgacgcgaatgtttggacacgctccgagaaattcatatcaccgtgcgtttacgcgcacatcgcgacggaatacggatttcgctacaagaatgaattgcaaagattaagccacggcatgaccgtatacccaaacacaatattcgccggaaaccaaacgcagtcgggtaaagagacctacgcggtgcatcgttgcgacggcgcgtggcgtagcgtacggtataggctattattgaagctgaggaaaaaccgttttttaagagtgatattaggaaagaaaaagcttgaacggtag

SEQ ID NO: 10310 - protein, 264 aa, Unknown
  Obtained from environmental sample
  DOMAIN (29)...(117): Glycosyltransferase sugar-binding region containing DXD motif
  misc_feature (1)..(264): Xaa is any amino acid
MSKTKXPKTVHYCWLSGDKMPDDVVKCLESWKEHLPEYTLVLWDTNKFDVNSHPFVKEAYQLKKWAFASDYIRLHALYTEGGIYLDTDVFVKKSFDDFLENDFFSGVEYHENSAKKGKHLLNEDGTLKNKKDDDIFAHGIQIQAAIMGSVKGHPFIKSCLDWYDGKRFDANVWTRSEKFISPCVYAHIATEYGFRYKNELQRLSHGMTVYPNTIFAGNQTQSGKETYAVHRCDGAWRSVRYRLLLKLRKNRFLRVILGKKKLER

SEQ ID NO: 10311 - DNA, 753 bp, Unknown
  Obtained from environmental sample
  misc_feature (1)..(753): n is a, c, g, or t
ttgacactgacagaatcggcacgagtacctattgcgccgggtactttccttatggttggttcctattcggtgacgatctccaggggatttttgataggtaagtatgaggtgacgcaggagttgtaccaggcggtgatggggagcaatccaagtgaattcacaagttctccggaggatggggaagtacaggcaaggcgtccggtggagcgcgtaagttggtatgacgcgcttgtgttctgtaatacactgagcatgatggaaaagctggttcctgtatacaccataagcaagagcacaaaccctacaaactggggggcggtgaatccagcatggaatgatgctactataaataacggagcaaatgggtatcgcttgccgacggaggcggagtgggaatatgcctgccgcgcgcaatcgacgaccgcgtacaatcttggagatacttggagcggtgcttggggatggtatagtggtaatagcggcgataaaacgcatgaggttgggaagaaaacgcccaacctctggggtttgcatgatatgcacggaaacgtctgggagtggttttgggattggtatggaacatcattaggcgaggggacagatcccacaggccccgcttcgggcacgcaccgggtcgagcgtggggggagttggagtaacccggagacgttgctgcgtttgggttttcggggtggttacgaccctgggaccaagtacaacaatctcggtttccggcttgcgcggaatcaatag

SEQ ID NO: 10312 - protein, 250 aa, Unknown
  Obtained from environmental sample
  DOMAIN (4)...(248): Domain of unknown function (DUF323)
  misc_feature (1)..(250): Xaa is any amino acid
MTLTESARVPIAPGTFLMVGSYSVTISRGFLIGKYEVTQELYQAVMGSNPSEFTSSPEDGEVQARRPVERVSWYDALVFCNTLSMMEKLVPVYTISKSTNPTNWGAVNPAWNDATINNGANGYRLPTEAEWEYACRAQSTTAYNLGDTWSGAWGWYSGNSGDKTHEVGKKTPNLWGLHDMHGNVWEWFWDWYGTSLGEGTDPTGPASGTHRVERGGSWSNPETLLRLGFRGGYDPGTKYNNLGFRLARNQ

SEQ ID NO: 10313 - DNA, 369 bp, Unknown
  Obtained from environmental sample
  misc_feature (1)..(369): n is a, c, g, or t
ttgcttgtaccagaccgtaatgcaagcgagtttgcaaatgaaattaaagcgttgtgtcatatagaagtaccagaaggcgaaaaattgataatcaataatccaacctgtccaaaatgtaaaactggtcgattagtaattcgccaagcaaatgctgaaaactttgtaggttgtacaaattatccagtttgtgactatacgaataaaaatacatcaataattaaaaatccgataaaatgcccaatatgcgacggctttcttgttgttcgtaaaagcaagcgtggacaatttttaggttgtacgaattatcccaattattgtaaatatacggcacaaatcaataattccaaatttgaaaaaaataaatcctaa

SEQ ID NO: 10314 - protein, 122 aa, Unknown
  Obtained from environmental sample
  DOMAIN (33)...(72): Topoisomerase DNA binding C4 zinc finger
  misc_feature (1)..(122): Xaa is any amino acid
MLVPDRNASEFANEIKALCHIEVPEGEKLIINNPTCPKCKTGRLVIRQANAENFVGCTNYPVCDYTNKNTSIIKNPIKCPICDGFLVVRKSKRGQFLGCTNYPNYCKYTAQINNSKFEKNKS

SEQ ID NO: 10315 - DNA, 765 bp, Unknown
  Obtained from environmental sample
  misc_feature (1)..(765): n is a, c, g, or t
ttgatactaaaagaacagtatgacctgttggtatacaagcggtttgcgcgtagcgccgagcaattgcttgaagatgaaaagcagcaactgttatttgccgaggaggatgaacagcctgaaacaaatgaagaaaagccagaagagcttcaaacggttaaatcatttacacgcaagaagaatggcgggcgcaagccgattagcgcaaaccttgagagaaggccgagggttatagacataccagaaagtgaaaaaacatgcgcttgcggggcgaatttgactcggattggcgaagaaaccagtgaaaagctggttataataccaccacagatttatgtggaccagatagtcaggccaaaatacgcctgcaggcaatgcgaggggacggaagaggaagaggagcctgcggtgcgcatcgcgcctgtagagccatctataattcctcggagcatagcgagccccagcttgctggcgactatcttcacgcaaaagtttgagatgcaccttccctattacaggcaggagaaacaatttgagcagataggggtagcaataagccgccaggatatgagcaactggcagcagcaggcgtatgaaaaacttaagccgttattggacatgctggaagaaacggtaaaatgtggccctgtaatgcagatggatgagactgangtacaggtaataggggaagaggagcgaagcgatcttcagaaaagtatatgtggcttgcccgtggcgntcctttangcaaaaaagtattttgtataa

SEQ ID NO: 10316 - protein, 254 aa, Unknown
  Obtained from environmental sample
  DOMAIN (92)...(252): Transposase IS66 family
  misc_feature (1)..(254): Xaa is any amino acid
MILKEQYDLLVYKRFARSAEQLLEDEKQQLLFAEEDEQPETNEEKPEELQTVKSFTRKKNGGRKPISANLERRPRVIDIPESEKTCACGANLTRIGEETSEKLVIIPPQIYVDQIVRPKYACRQCEGTEEEEEPAVRIAPVEPSIIPRSIASPSLLATIFTQKFEMHLPYYRQEKQFEQIGVAISRQDMSNWQQQAYEKLKPLLDMLEETVKCGPVMQMDETXVQVIGEEERSDLQKSICGLPVAXLXAKKYFV

SEQ ID NO: 10317 - DNA, 330 bp, Unknown
  Obtained from environmental sample
  misc_feature (1)..(330): n is a, c, g, or t
atgagtgaaagatttgtaaatatagacagagaaacgccgatgctgtttccggtagatatgagggattggctgccggaggatcatttagtctattttgtaatagaggcgatagagcaaataggggtggtcgggtttaaagtaaaccaacacggccgcgggagcgaacagtatccgccggagatgatgcgggcgttagtggtatacagttatgtcacaggacggttcggatcgaggacgatagaagcagcgacatatacagacgtcgcgctcagatatatatggggaggagacgcgcatccggatcactcggccgaatctgatcaatggtaa

SEQ ID NO: 10318 - protein, 109 aa, Unknown
  Obtained from environmental sample
  misc_feature (1)..(109): Xaa is any amino acid
MSERFVNIDRETPMLFPVDMRDWLPEDHLVYFVIEAIEQIGVVGFKVNQHGRGSEQYPPEMMRALVVYSYVTGRFGSRTIEAATYTDVALRYIWGGDAHPDHSAESDQW

SEQ ID NO: 10319 - DNA, 573 bp, Unknown
  Obtained from environmental sample
  misc_feature (1)..(573): n is a, c, g, or t
gtgggacagtactactatcttgtaccgcagcttccctacctgatttttggacagactccgcctatgtcgccggaagcgttcagggaactggcaatgcctttaatggacgaacaggacgccgcgctgctggatttgctaggggtgggactgaacccgcctcccggagacgcgccttcctgcggttcggattttatcgacaaatggcgggaatgggagcggattctcaggctcaacctggtaaaacaccgcgccgcgaagttaaaacgcgaagcccccgccgcagagccgcccgtgcttccgtccggagcggtttctgcggctgcaaaagccgtgcaggaatcgccgcttgaaggggaaatcacaatcgacaaggcgcgttggagcgccattgacactttgctggaaggcagcggcagctttgacagaaacgccgttttcgcctatatgctcaaactgataatcctcaaccggcaggctctgtttcaaaccgaaaggggattttctgaatataaatcgctctacgcttccatcctggaaaaatcgggtaaattatctgcgggagaatctaaatga

SEQ ID NO: 10320 - protein, 190 aa, Unknown
  Obtained from environmental sample
  misc_feature (1)..(190): Xaa is any amino acid
MGQYYYLVPQLPYLIFGQTPPMSPEAFRELAMPLMDEQDAALLDLLGVGLNPPPGDAPSCGSDFIDKWREWERILRLNLVKHRAAKLKREAPAAEPPVLPSGAVSAAAKAVQESPLEGEITIDKARWSAIDTLLEGSGSFDRNAVFAYMLKLIILNRQALFQTERGFSEYKSLYASILEKSGKLSAGESK

SEQ ID NO: 10321 - DNA, 681 bp, Unknown
  Obtained from environmental sample
  misc_feature (1)..(681): n is a, c, g, or t
atgatgggtcttcccgatgccacttacaatgcgtacccggtatatgacagcttcggcggggcgattttcggcaagaagagtgacggcagcctggacgggaaaaatgtgcttttggcggatcccggttttgtagcgggcctggagttccttacggcacaggtaaaaaagaaattgatccccgaaaacatagactgggacgcggctcatgtgctctttgaaagcggcaaagcgccgtattgtatgaccgggccctgggcgttaaatcgtttcaaagaatccaaagttccttatgcaatcgccaaattcccgtcagcaaaaaaaggcggacccgcgggtaatcccttcctgggtgtccagggtctgattgtcagttccgccagcccgcgcaaattgctggcacagtcctttgcggtggattttatggccagggaagaaaattacagggccattttccaggctgaacaaaggccttccgcgtggaagtccatatttgaaggcagcggggacagcgataccaaagggtttaacgccgcaggcgtaagcgcggttcccatgccgtcaattcccgaaatgggtaatgtctgggacgcgtgggtcgccgccgcggcgttggccttctccggtgaaagaacgccgaaagccgcgttagaaaacgccaaaacccagatcttgaataaatga

SEQ ID NO: 10322 - protein, 226 aa, Unknown
  Obtained from environmental sample
  misc_feature (1)..(226): Xaa is any amino acid
MMGLPDATYNAYPVYDSFGGAIFGKKSDGSLDGKNVLLADPGFVAGLEFLTAQVKKKLIPENIDWDAAHVLFESGKAPYCMTGPWALNRFKESKVPYAIAKFPSAKKGGPAGNPFLGVQGLIVSSASPRKLLAQSFAVDFMAREENYRAIFQAEQRPSAWKSIFEGSGDSDTKGFNAAGVSAVPMPSIPEMGNVWDAWVAAAALAFSGERTPKAALENAKTQILNK

SEQ ID NO: 10323 - DNA, 423 bp, Unknown
  Obtained from environmental sample
  misc_feature (1)..(423): n is a, c, g, or t
ttgctagaaatgggactagaacccttccttgttgcaactgcaataaaaggcgttttggctcaaagacttgtacgcagaatttgccccaactgcaaagaagaagaccctaacatagatccagaggttagaaaagatttgcacattcctccgcatattaaattctacagaggcaaaggctgcaacaggtgcgaaaactcaggctataaaggtcgtaccggaatttatgaatttttggttccaagcgaagaagtccgcaacttggttttaaggagagcgagcggtgacgaaataaaaagaatatgcatgacgcaaggtatgaacacgctacgtatggacggtatggaaaaagccttaacaggcgtaactaccttggaacaggtactcagtgcatctgaaaaagacgaattcaagaagtcggtataa

SEQ ID NO: 10324 - protein, 140 aa, Unknown
  Obtained from environmental sample
  misc_feature (1)..(140): Xaa is any amino acid
MLEMGLEPFLVATAIKGVLAQRLVRRICPNCKEEDPNIDPEVRKDLHIPPHIKFYRGKGCNRCENSGYKGRTGIYEFLVPSEEVRNLVLRRASGDEIKRICMTQGMNTLRMDGMEKALTGVTTLEQVLSASEKDEFKKSV

SEQ ID NO: 10325 - DNA, 948 bp, Unknown
  Obtained from environmental sample
  misc_feature (1)..(948): n is a, c, g, or t
atggaaacaagcgtaaaagacaggatagatatgctgccgcnntcagtcgtcgacgacagcagattcgccgttgataactgcgaaataagacgggaaggaatatcgtacacaatagacactctggaagacataatcggaagatacttgccaacgggtaaaccctcgctgattatcggagacgaccttgccgccgatttcccgaactggcgcgacagcgagaggattttacaattagctgatattgtcatcgcaagaaggattaacgccaagacggttaattgcccattcccccatattgccattgaaaacgaaattgtcgatatttcgtctcatgaaataagacgcatgataggcgaaaacggcgactggcaatcgctgttaccctcaggagcggccgatattatcaaaaaggagaaattatacggctataacggagacaagccctctgcgccccctcctgacggcattattgagcgaatagaaacggaggcgagggaaaccctgaatactgagcgttttcttcattcaaggcacaccgccctccatgcctttgatttatgcagtcgtttcggtattgagccgatggacggctattttgccggaatcgcccacgatttggcgaaacaaatggacggcaaacagatgataaaaatcgtgaaaaccgccggaatggaaatttcagaccttgagatggaaagacctaacctattgcacggaaaagcggcggcggtcttgctaagagagcgtttctccattcataatgaagatgtgcttgaggctgtggcggttcatacgtcgggcagtgaaaatatggggcagttggcaaagataatttacattgccgataaaaccgacttctcaagaaatatagaccctgctttaagaaaaatgtgcagggaagaatctttagataacatacttattgccgtaatgaaaaaacaatattaa

SEQ ID NO: 10326 - protein, 315 aa, Unknown
  Obtained from environmental sample
  DOMAIN (1)...(116): Cytidylyltransferase
  misc_feature (1)..(315): Xaa is any amino acid
METSVKDRIDMLPXSVVDDSRFAVDNCEIRREGISYTIDTLEDIIGRYLPTGKPSLIIGDDLAADFPNWRDSERILQLADIVIARRINAKTVNCPFPHIAIENEIVDISSHEIRRMIGENGDWQSLLPSGAADIIKKEKLYGYNGDKPSAPPPDGIIERIETEARETLNTERFLHSRHTALHAFDLCSRFGIEPMDGYFAGIAHDLAKQMDGKQMIKIVKTAGMEISDLEMERPNLLHGKAAAVLLRERFSIHNEDVLEAVAVHTSGSENMGQLAKIIYIADKTDFSRNIDPALRKMCREESLDNILIAVMKKQY

SEQ ID NO: 10327 - DNA, 762 bp, Unknown
  Obtained from environmental sample
  misc_feature (1)..(762): n is a, c, g, or t
gtgcgtgtcggcgttgtcggaaaatatatggagttacacgacacttatacgtcgttatacgaagcgttattccacgcaagccttgaatgcggcgtagaaatggaattggtaaaaattgattcgtccaaacttgaggaaacggaaaacacaaactcaattttgggaaaaggcgaagacgcaaaaaactgtatgtttcaggttgacggtattctggttcccggcggtttcggcgagagaggaatcggcggtatggtaagagcggcggcatgggcaagaacgaataaagttccgtacttgggaatttgtcttggtatgcacataatgataatcgattggggacgcaatgtgctgaattggacggacgccgattcaaccgaattcaaccgcgactcgaaacaccctgtcgtgagtcttcttgaagaacaggtcaatgtaacaaattacggcggaacaatgcgtcttggcgcgatggaaacagtaaacgaaaacggcactcatattttagcggcgtacggcgaaaagcgaataatggaacgccaccgtcaccgctatgaatttaccaaccagtaccgcgaggaaatgacaaagacaggactaaaacttgcggcttttaattccgacggctctttggttgaatgtgttgaatggaccgatcacccgtggggtgtcgccgttcaattccaccccgaatttaaatccaaaccgacagcggcgtctcccctgtttagggattttatcgcagcggttaagaagaatanatga

SEQ ID NO: 10328 - protein, 253 aa, Unknown
  Obtained from environmental sample
  DOMAIN (31)...(230): Peptidase C26
  misc_feature (1)..(253): Xaa is any amino acid
MRVGVVGKYMELHDTYTSLYEALFHASLECGVEMELVKIDSSKLEETENTNSILGKGEDAKNCMFQVDGILVPGGFGERGIGGMVRAAAWARTNKVPYLGICLGMHIMIIDWGRNVLNWTDADSTEFNRDSKHPVVSLLEEQVNVTNYGGTMRLGAMETVNENGTHILAAYGEKRIMERHRHRYEFTNQYREEMTKTGLKLAAFNSDGSLVECVEWTDHPWGVAVQFHPEFKSKPTAASPLFRDFIAAVKKNX

SEQ ID NO: 10329 - DNA, 822 bp, Unknown
  Obtained from environmental sample
  misc_feature (1)..(822): n is a, c, g, or t
ttggatttttttcatgttttcaggacggacaataattggtcggatcgaattcccgatatttttattgattatcctgtgctgataaatgatttgggcaaaacttttcagtatactcaatcgggcggagaagggcttactctttacacgcaatggctgaaagacaagagtctgcctttcggcgtacagtacaatcttaatttttatgcgggacgggttgcgcgcagaatgggcggcgggcagaacgcgaaaggtatcgctctttttgaacaagcgttaactcttgcgccggacgccggtcagcttgacgcctgtatttggtatattcttgatttaacagtaacaggttcgactaacacttttatggaaaagctgacgcagtattttcctgaatggcatcacgcaagttattataatgatgttttagaaaggtttttgcataaacttgtatcggagcaggattggaacaaagtaataagaacttatgacctgataaaaaactcaagcgcgtttacttcaaaaatagcttacgcaagagtgatagcccgtgcgatagaaaataaatatctaacggctgcggatttgcgtcttgccgcgaaagtgattgatattgaatcggcgaacgctcttgccttttaccgcatcgcttatgatgtcggcgttgttccttccattccgtcctttatttaccgctcgcaatgcgccgacgctttgaacgagccttttcttgttttaaatgaaaaaacggaacccaagctgaataaaaaagaatattctcatcttatgcagtttattatgggtttctttgaaaacaaacgcggttga

SEQ ID NO: 10330 - protein, 273 aa, Unknown
  Obtained from environmental sample
  misc_feature (1)..(273): Xaa is any amino acid
MDFFHVFRTDNNWSDRIPDIFIDYPVLINDLGKTFQYTQSGGEGLTLYTQWLKDKSLPFGVQYNLNFYAGRVARRMGGGQNAKGIALFEQALTLAPDAGQLDACIWYILDLTVTGSTNTFMEKLTQYFPEWHHASYYNDVLERFLHKLVSEQDWNKVIRTYDLIKNSSAFTSKIAYARVIARAIENKYLTAADLRLAAKVIDIESANALAFYRIAYDVGVVPSIPSFIYRSQCADALNEPFLVLNEKTEPKLNKKEYSHLMQFIMGFFENKRG

SEQ ID NO: 10331 - DNA, 879 bp, Unknown
  Obtained from environmental sample
  misc_feature (1)..(879): n is a, c, g, or t
atgccggacgcccaatatataggcagtttagttgttgaaaatatcaagccaaaacccaaaggagaaccgtctatcgagatggtaatttcctccgactccaacggagaaatcgtagccgaggcggtcgatcttgataccggcgcaggcggagagcattgcatattgactgtttctttaaagtctctcgatgagtcctcccgcggcattaatattcccgactttgctctggagtcaaatgaagagccgccctcaagtctgtatcagcgcactgaaaggacgcgccgggaaggttctttcggatggattttagccgttcttattatattactcgtattaggacttcttgccggatggcttttctacttcggcggtaaagatactgtcgctgaattctatgaagataagattattccaaccaaaaatgcgattgtcgaaaaattcgctaaaaaggaagttaaaaaacaacctgttaaacaaagtgaaccggcaaaaaaacctgatccggagcctgttaaagagcctgaacctgtcaaacaaacagagcctgttcagcaaaaagtagaacctgcgcctgttattcaagctccggttgccgcacctgagcaaagacagcagcaaaccggtaaaaaacgtaatcccgcgcctgtcgcatcgtataatgttccgactactattcccagagaaggcgtaaattataagattcgttggggcgatacattgtgggatattgccgaaacgttctaccgtaatccttggctttacccgagaatcgcaaagcataataacattagaaatccgaatctgattatttcaggacggacgatacggattccacctagaattaattttggttcgattattaagaatacaaggatttaa

SEQ ID NO: 10332 - protein, 292 aa, Unknown
  Obtained from environmental sample
  DOMAIN (232)...(278): LysM domain
  misc_feature (1)..(292): Xaa is any amino acid
MPDAQYIGSLVVENIKPKPKGEPSIEMVISSDSNGEIVAEAVDLDTGAGGEHCILTVSLKSLDESSRGINIPDFALESNEEPPSSLYQRTERTRREGSFGWILAVLIILLVLGLLAGWLFYFGGKDTVAEFYEDKIIPTKNAIVEKFAKKEVKKQPVKQSEPAKKPDPEPVKEPEPVKQTEPVQQKVEPAPVIQAPVAAPEQRQQQTGKKRNPAPVASYNVPTTIPREGVNYKIRWGDTLWDIAETFYRNPWLYPRIAKHNNIRNPNLIISGRTIRIPPRINFGSIIKNTRI

SEQ ID NO: 10333 - DNA, 906 bp, Unknown
  Obtained from environmental sample
  misc_feature (1)..(906): n is a, c, g, or t
ttgcccttaacgcgngttttgatacagattccgatagggcttgaggacaagcttgaaggggtagtcgatctgatttccatgaaggcaatctactttgacggcgatcagggaacggaaatccgctacgccgagattccagcccacctgaaacaggacgctgaaaagtaccgcgaagagctgatcgatgaagtttcgattttttccgacgaattggcggaaaaatttatctctggcgaggcgatctccgaagacctgctccgtgctgccatccgcaagggaacgctggctgaggctttcgttcctgtcatgctgggttcagcttacaaattcaagggcattcagctccttctggacgccgtaaataattttttaccggatccgacagaggtaaagaactacgcatacgacattgacaataacgaagaacaaaaggagctttctccggatgaaagaagccccactgtagcgctgggcttcaagctcgaagacggccagtacggccagctcacctacgtcagggtttatcagggagcgcttaaaaagggcgaagagctgatgaacacccgttccagaaaaaggttcaaagtgggacggcttgtacgaatgcacgcagacagcatggaagacataaacgaggcagcggctggggacattgtcgcccttttcggcattgagtgcgcctcaggagacactttctgcggcggcggtcttaactacgccatgagttcaatgtttgtgccggaaccggtaatttccctcgccgttactccaaaggataaaaaaagcgcggatcagctcgcaaaggccctcggacgctttacaaaagaagacccgacttttcgcagctatgtggatcaggaatccaaccagtgtattatacaggggcatgggggaagtgcaccttga

SEQ ID NO: 10334 - protein, 301 aa, Unknown
  Obtained from environmental sample
  DOMAIN (167)...(233): Elongation factor Tu domain 2
  misc_feature (1)..(301): Xaa is any amino acid
MPLTRVLIQIPIGLEDKLEGVVDLISMKAIYFDGDQGTEIRYAEIPAHLKQDAEKYREELIDEVSIFSDELAEKFISGEAISEDLLRAAIRKGTLAEAFVPVMLGSAYKFKGIQLLLDAVNNFLPDPTEVKNYAYDIDNNEEQKELSPDERSPTVALGFKLEDGQYGQLTYVRVYQGALKKGEELMNTRSRKRFKVGRLVRMHADSMEDINEAAAGDIVALFGIECASGDTFCGGGLNYAMSSMFVPEPVISLAVTPKDKKSADQLAKALGRFTKEDPTFRSYVDQESNQCIIQGHGGSAP

SEQ ID NO: 10335 - DNA, 558 bp, Unknown
  Obtained from environmental sample
  misc_feature (1)..(558): n is a, c, g, or t
atggggtcaagcggttcaacggacggcgggacgaccacaagggtgctggggacgttcttgacttggatgcaggaaaagacaaaaccggtctttgttatggcgacggccaacaacgtgggagcgttaccgcctgaacttctgcgtaaaggcagggtggacgagatgttcttcgtggacttgcctacgcaaaaagagcgggaagcgataatatccatccacttgaaacgcagaaagagggaccccggccgcttcaacattgtaaaactcgcggaagagagcgtgggattttccggagcggaacttgaagaggtcgtaaaagaggcgttgttctgcgcgttcaacgacaacggcagagagataaccgacgccgatatcagcgatgccataaaaaagacctatccgttgtctaaaacaatgcgccaaaacatagacgatatgcggaaatgggcaaagagcaaagcagtctacgcctctaatgaaatgccggaaccgctgcccgaagcagacgccggcgttcccaaattgaaacaagaggaatacagtaacgcgttcgtataa

SEQ ID NO: 10336 - protein, 185 aa, Unknown
  Obtained from environmental sample
  DOMAIN (1)...(114): ATPase family associated with various cellular activities (AAA)
  misc_feature (1)..(185): Xaa is any amino acid
MGSSGSTDGGTTTRVLGTFLTWMQEKTKPVFVMATANNVGALPPELLRKGRVDEMFFVDLPTQKEREAIISIHLKRRKRDPGRFNIVKLAEESVGFSGAELEEVVKEALFCAFNDNGREITDADISDAIKKTYPLSKTMRQNIDDMRKWAKSKAVYASNEMPEPLPEADAGVPKLKQEEYSNAFV

SEQ ID NO: 10337 - DNA, 429 bp, Unknown
  Obtained from environmental sample
  misc_feature (1)..(429): n is a, c, g, or t
atggcacgagtcatgggcgactacttagagaagaagcttctgcccgaagacccgttcctcagcatcgaccagtccggcatcggccagctggtgcaatacggcgtcgaacgcggccgctcggtcagagagaagcttaaagtcggcgtctgcggcgaacacggcggcgaccccgcctccgtggagttcttctacggcttaggcttgaactacgtgagctgctcgcccttccgcgttcccatcgcccgcctcgcctccgctcacgcggagataaaggcgaagagggccgcgaagtcgcccgccaaaaagtcggcttccgccaagaaggccggcaagaaagcggagaagaagaccgagaagaaagcggctaaaccggcggccaaaaaagccccggcgaagaaatccgccaagaagggcgcgaagagaaagtaa

SEQ ID NO: 10338 - protein, 142 aa, Unknown
  Obtained from environmental sample
  misc_feature (1)..(142): Xaa is any amino acid
MARVMGDYLEKKLLPEDPFLSIDQSGIGQLVQYGVERGRSVREKLKVGVCGEHGGDPASVEFFYGLGLNYVSCSPFRVPIARLASAHAEIKAKRAAKSPAKKSASAKKAGKKAEKKTEKKAAKPAAKKAPAKKSAKKGAKRK

SEQ ID NO: 10339 - DNA, 363 bp, Unknown
  Obtained from environmental sample
  misc_feature (1)..(363): n is a, c, g, or t
gtgacgatattgggcggcgaaccgcttgaccaagcggatgagtgcgtcgagctattgcgcaagtgtcgggcgaatgggctgaccacaatgttattcaccggatacgagtttgaagagataacgaatgacaacctcttggggctgtgcgatattcttattaccggacgctatgacgaatcaaagagaacgctctaccgtcaatggataggatcaacgaatcaggagatacgctttctgaccgacgtctaccgcgactacgagatcaaagacgcgaattacatggagatcgggattgataacgacgggagtgttacgacgctcgggtttccgccggatcattggggagatatatataataaataa

SEQ ID NO: 10340 - protein, 120 aa, Unknown
  Obtained from environmental sample
  misc_feature (1)..(120): Xaa is any amino acid
MTILGGEPLDQADECVELLRKCRANGLTTMLFTGYEFEEITNDNLLGLCDILITGRYDESKRTLYRQWIGSTNQEIRFLTDVYRDYEIKDANYMEIGIDNDGSVTTLGFPPDHWGDIYNK

SEQ ID NO: 10341 - DNA, 501 bp, Unknown
  Obtained from environmental sample
  misc_feature (1)..(501): n is a, c, g, or t
atggcggtaaaccatattataaaactatatcacggaagtaatcaagcggttgagctgccacagttactgaaacctacgcatccaatggattttggggcgggattttatacaactaccaattatcaacaagcacttgattttgcgaaaaaagttgcgattaggcaaaaaacaggaaagccaacaataacagcttatgaagcgcaagaaaatatattgcgttccaaatataaaatattagaatttcattcggcagacaaagcctggctggattttgtaacctcaaatagacaaattcttaatccagaaattgatgcagaaatagttattggagcggttgcaaatgatgatataattgaagttgttaggctttacgaaaatggagtatatactgttgaagaagcattgagacgacttaaaataaaaacgctttataatcaatatgtgtttagaacacaagaggcgattaacgaacttataacaaaagaggtaataaatgtctaa

SEQ ID NO: 10342 - protein, 166 aa, Unknown
  Obtained from environmental sample
  misc_feature (1)..(166): Xaa is any amino acid
MAVNHIIKLYHGSNQAVELPQLLKPTHPMDFGAGFYTTTNYQQALDFAKKVAIRQKTGKPTITAYEAQENILRSKYKILEFHSADKAWLDFVTSNRQILNPEIDAEIVIGAVANDDIIEVVRLYENGVYTVEEALRRLKIKTLYNQYVFRTQEAINELITKEVINV

SEQ ID NO: 10343 - DNA, 498 bp, Unknown
  Obtained from environmental sample
  misc_feature (1)..(498): n is a, c, g, or t
ttgatcgcgagatcatataaaatagtattttggggaggctttatgaagattaaaaaacaggttatttttactgtttttttatgtttatttgtttttgtttcaattccttacgcatattctcagcaggaatataattactatgcccttgaacatttcaaacgcagtgtagaatatatgatacacggcgattataaaaacgcaataataagcagcagtaatgttattaaaatagatccaaattccgccgtcgcgtttgtgataagagcgcgggcatattttgaaataaatgaaattgacagggcgcttgccgattgtaatcaggctataaaacttgacagaaaaaacgcggccgcctttaacatacgcggtaacatatatgttagaaagggcgattataaaagggcgatatcagactggcaatcggcaataagaattgacccggatttggaagaagcaaaatacaatattgaacttgccaagaaagagcaggataaatag

SEQ ID NO: 10344 - protein, 165 aa, Unknown
  Obtained from environmental sample
  DOMAIN (82)...(115): Tetratricopeptide repeat
  misc_feature (1)..(165): Xaa is any amino acid
MIARSYKIVFWGGFMKIKKQVIFTVFLCLFVFVSIPYAYSQQEYNYYALEHFKRSVEYMIHGDYKNAIISSSNVIKIDPNSAVAFVIRARAYFEINEIDRALADCNQAIKLDRKNAAAFNIRGNIYVRKGDYKRAISDWQSAIRIDPDLEEAKYNIELAKKEQDK

SEQ ID NO: 10345 - DNA, 360 bp, Unknown
  Obtained from environmental sample
  misc_feature (1)..(360): n is a, c, g, or t
atggaaaaagagctattttacgctgacggtcttagattttcatgtaaacgatgttcttcatgctgccggtatgattcgggatatgtgtttctttcacaaaaagacatcaataaattgagttctgcgttaaaaatcgacacaaacggcgtaataagcgcatattgcaggtgggttacggacataaatggggatgaagtcctttcattaaaagaaaaatcaaataatgactgcattttatggaattgcggctgtaccgtttaccagtcgcggccgattcaatgcgtttcttttccgttttggaagtcgataatagcttccgaaaatgctgggaaacagcgtctgttagctgtccggggatga

SEQ ID NO: 10346 - protein, 119 aa, Unknown
  Obtained from environmental sample
  DOMAIN (13)...(114): Uncharacterised protein family (UPF0153)
  misc_feature (1)..(119): Xaa is any amino acid
MEKELFYADGLRFSCKRCSSCCRYDSGYVFLSQKDINKLSSALKIDTNGVISAYCRWVTDINGDEVLSLKEKSNNDCILWNCGCTVYQSRPIQCVSFPFWKSIIASENAGKQRLLAVRG

SEQ ID NO: 10347 - DNA, 720 bp, Unknown
  Obtained from environmental sample
  misc_feature (1)..(720): n is a, c, g, or t
ttggaaaagagaaaaaagaagaaaataaatatagtttctttgataataaatttattttccacgataatagcgctgattcttattctggttccggttttaatcggcgttattatgtactataacgctccggttccgccgcataaaagaagttctgttctttcacagagtgacgcaattaaacaggcggaagacggcagctatctgattgacattcgaaaaggcgaaagttcccagtcggtaggattacggcttgaaagaaccggacttataagcaacaggtatttttggaatattatttgccgtcttgataaatctttcgttaagacaggggaatacaaaattacaatgccggcaagccagatagccatttacaggatattaatttcagggcaggaagttttacgtaaagtgactattccggaaggggtaacgctcagtaaaaccgcaagattaattgaagaagcgggtatttgttccgctgcggattttctttccgccgcgacagacaagtcgataataggcagatatctgataccgaatgaatcaatggaagggtatcttttccccgatacatatttattcgcggctgactatccggcggaaaaggtcattacaaaaatggcggataatttttttgataatcttcaaaaaattaatccttctattcttgagatggacccgaaagaactaaatgaaaaaattttctcgcttccattatga

SEQ ID NO: 10348 - protein, 239 aa, Unknown
  Obtained from environmental sample
  SIGNAL (1)...(24)
  DOMAIN (67)...(237): Aminodeoxychorismate lyase
  misc_feature (1)..(239): Xaa is any amino acid
MEKRKKKKINIVSLIINLFSTIIALILILVPVLIGVIMYYNAPVPPHKRSSVLSQSDAIKQAEDGSYLIDIRKGESSQSVGLRLERTGLISNRYFWNIICRLDKSFVKTGEYKITMPASQIAIYRILISGQEVLRKVTIPEGVTLSKTARLIEEAGICSAADFLSAATDKSIIGRYLIPNESMEGYLFPDTYLFAADYPAEKVITKMADNFFDNLQKINPSILEMDPKELNEKIFSLPL

SEQ ID NO: 10349 - DNA, 579 bp, Unknown
  Obtained from environmental sample
  misc_feature (1)..(579): n is a, c, g, or t
gtggcggaacagtaccggcaccgcccctgggcggtactggtttccactattctaagcctgcgtaccaaagacgaagtaaccgtggcggccacaaaacggctgcttgaacaagcgccgagcccgacggaactggctgccatgaaagtggataatgccgccgccctagcctaccctgccggtttttaccggaccaaggcggcgaacctgaaaaaaatcgccgcaattcttcttgagcgctacaatggggaagtaccctcggatatggacaccctccttggcctgccgggcgtaggcagaaaaaccgccaatctggtacttattgaagcctttgacctgcccggcatctgcgtggacattcacgtacaccgcataacgaaccgctgcggctgggtcagcaccaaaaaaccggaagaaaccgaaatgacattgcgcaaaatccttcccccaaaatactggaaaagcatcaacgccctgctggtcctttacggccagaatctctgccgccctgtcagccctttctgttcccgctgcattattaaaagctactgcgttcgcacgggcatacagcggtcaaggtga

SEQ ID NO: 10350 - protein, 192 aa, Unknown
  Obtained from environmental sample
  DOMAIN (79)...(108): Helix-hairpin-helix motif
  misc_feature (1)..(192): Xaa is any amino acid
MAEQYRHRPWAVLVSTILSLRTKDEVTVAATKRLLEQAPSPTELAAMKVDNAAALAYPAGFYRTKAANLKKIAAILLERYNGEVPSDMDTLLGLPGVGRKTANLVLIEAFDLPGICVDIHVHRITNRCGWVSTKKPEETEMTLRKILPPKYWKSINALLVLYGQNLCRPVSPFCSRCIIKSYCVRTGIQRSR

SEQ ID NO: 10351 - DNA, 618 bp, Unknown
  Obtained from environmental sample
  misc_feature (1)..(618): n is a, c, g, or t
gtggaattcaccgattatgtgcagcccaatgtggcggtgcttagcggggatctggacgccaattttttccagcatattccctatctggattccaatgatgaatggaagacgaaaatggtttccgcttttggggtgcatgtggaaccattcgggttgtactccgcgaagtacaagaatattaaagatctgcccaatggcgccactatagccatacccaatgacccgtcaaacgggggccgggccctgctcctgctccaggccaaagggcttattaccctcaaggaaggggtcggcctgaacgctaccccccgcgatgtcgccggcaatccgcacaatttcaagttcgaaccgcttgaggccgcccagcttccccgctccctgcgggacgttgacgccgccaccattaacggaaactacgccctggaagccggccttaaccccctcaaggactcccttatcattgagggcgcggattccccctatgttaacatcgtggtagtgctgaaaggaaaagagaacgatccccgtatcgtcgctttaaaaaaagcccttctcagccagaaggtaaaggattacatcaacagccattacaacggcggcgtagcgcctatcttttaa

SEQ ID NO: 10352 - protein, 205 aa, Unknown
  Obtained from environmental sample
  DOMAIN (1)...(205): NLPA lipoprotein
  misc_feature (1)..(205): Xaa is any amino acid
MEFTDYVQPNVAVLSGDLDANFFQHIPYLDSNDEWKTKMVSAFGVHVEPFGLYSAKYKNIKDLPNGATIAIPNDPSNGGRALLLLQAKGLITLKEGVGLNATPRDVAGNPHNFKFEPLEAAQLPRSLRDVDAATINGNYALEAGLNPLKDSLIIEGADSPYVNIVVVLKGKENDPRIVALKKALLSQKVKDYINSHYNGGVAPIF

SEQ ID NO: 10353 - DNA, 522 bp, Unknown
  Obtained from environmental sample
  misc_feature (1)..(522): n is a, c, g, or t
ttgtcaagatttttttcacttttacccggtaattttcccgcgccgataataatagtccagcataattcttcgggctttgacaaaagtttcgcccaatggcttgacgcttacacggctttgagagtgaaacttgccgaggaaggggaaaccccgaaacccggcatcgtgtatatcgcccaaaccgacaaacatcttgagcttcgtataacagacgggcggatgatcctgcgctataacgacgacgaaccggagaacaaccagaaacccgcggcggacgttcttttcaggacggcggcggaagctcttaaagaggcgctggtttccgtggtgcttacaggcatgggcagcgacggcggggcgggcacgcggagggttaaggaaatgggcggcattaccctggcccaggatgaaggatcttcccttatctacggcatgcccaaagccgcggcggaaaccgggtgcctggacatggcattgcccctggacatgatacccgcggaactggccaggctggcaacatga

SEQ ID NO: 10354 - protein, 173 aa, Unknown
  Obtained from environmental sample
  DOMAIN (8)...(171): CheB methylesterase
  misc_feature (1)..(173): Xaa is any amino acid
MSRFFSLLPGNFPAPIIIVQHNSSGFDKSFAQWLDAYTALRVKLAEEGETPKPGIVYIAQTDKHLELRITDGRMILRYNDDEPENNQKPAADVLFRTAAEALKEALVSVVLTGMGSDGGAGTRRVKEMGGITLAQDEGSSLIYGMPKAAAETGCLDMALPLDMIPAELARLAT

SEQ ID NO: 10355 - DNA, 912 bp, Unknown
  Obtained from environmental sample
  misc_feature (1)..(912): n is a, c, g, or t
ttgcgcggggcgttctctctcatcatagccagcagcaaaaacaaactnatcgccgtccgcgaccccaacggcttcaggccgctgtgcttcggcaaaaacgacatcggctacgccgtcgcttcggagagctgcgctttggagatatgcggatttgaattcgtcagggacgtaaaaccgggcgagatcatcaccataaagaacggcgtgataacatacgagagcataagcctgcacaacaaggaagaggggcgcgggttttgcatattcgagtacgtttacttcgcccgacccgactccgtgctggacgggctttcgatctacgaggcgcgctacaacatgggcgcgatcttggcggaggagtatcctgtcgacgccgacgtggtctgcggcgtgccggacagcggcttggtcgcggcaagcggctacagcgcggtaagcggcataccgctggcgtcgggctttgtcaaaaacaggtacatcgggcgcagtttcatctaccccacgcaaactcagcgcgacagcgcggtgcggcaaaaactcaacccgctctcggcaaacgtaaaagggaaaaaagtcgttctggtagacgactccatagtgcgcggcacaacgtgcgagaagatcatccgcagcctgagaagcgccggagcggctgaggttcacatgagagtgtcgtcgccgccgttccgccacacctgccactacggaacagacataggcagcgaggagaatctcatcgcgaacaaattgggtttagaggaaatccgcaaaaagttcggcgcggacagtttggggtatataagcatagaggggctgaaaaaagcgtgtgaaaagtgcgttctgccgttttgcacggcctgctttaccggcagcgacgaaaccgatatcacgagaaaagatattttcgaataa

SEQ ID NO: 10356 - protein, 303 aa, Unknown
  Obtained from environmental sample
  DOMAIN (98)...(246): Phosphoribosyl transferase domain
  misc_feature (1)..(303): Xaa is any amino acid
MRGAFSLIIASSKNKLIAVRDPNGFRPLCFGKNDIGYAVASESCALEICGFEFVRDVKPGEIITIKNGVITYESISLHNKEEGRGFCIFEYVYFARPDSVLDGLSIYEARYNMGAILAEEYPVDADVVCGVPDSGLVAASGYSAVSGIPLASGFVKNRYIGRSFIYPTQTQRDSAVRQKLNPLSANVKGKKVVLVDDSIVRGTTCEKIIRSLRSAGAAEVHMRVSSPPFRHTCHYGTDIGSEENLIANKLGLEEIRKKFGADSLGYISIEGLKKACEKCVLPFCTACFTGSDETDITRKDIFE

SEQ ID NO: 10357 - DNA, 831 bp, Unknown
  Obtained from environmental sample
  misc_feature (1)..(831): n is a, c, g, or t
ttggtcaaagcggcggcggttccggcggagccggcggcggcaacgccgttgcctgtaatggtttattacgagggggaattactcaatattttttttcatccgcttgtcgcccatccggaaatcgcgtttaaggggaacatgaaagaacattttctggaatggttcgttaccgccgatgaatataaaaaaatactgtatgaattatatatgcgggattatgtactggttgacatcaatgaattttatacggtgacatatacaaacaacgtaaaaattgttgaagcgaaaaaattcctgatccccgaagggaaaaagcccgttattttatccgttgacgatttgtcttactatgaacattgcaggaaaaacggaattgtacataaacttatactcgatcaagacggcaatatcgcggcctggaccgacacctcgtccggcggtgaaatttcctatgatctggatattattaccatcacggaagactttattaaaaactatcccgatttttctatccggggcgcgaagggcattatcgcgcttacgggatacgaagggttattggggtatcaaacccaggccgaaaagtcaaacgcccccggatataaaaaagaaatagaaaacgctattataatagtaaacaaattaaaagaactgggttggcgttttgcttcacacagctggggacatttgaatatgcctaaagtgcctatgtcatggtttacttatgacaataaattatgggataaggaagtaaaacctattctgggcgaaacagatctttatatttacccctttggcgcggcattggaaaagatagaggaaaaacantaa

SEQ ID NO: 10358 - protein, 276 aa, Unknown
  Obtained from environmental sample
  misc_feature (1)..(276): Xaa is any amino acid
MVKAAAVPAEPAAATPLPVMVYYEGELLNIFFHPLVAHPEIAFKGNMKEHFLEWFVTADEYKKILYELYMRDYVLVDINEFYTVTYTNNVKIVEAKKFLIPEGKKPVILSVDDLSYYEHCRKNGIVHKLILDQDGNIAAWTDTSSGGEISYDLDIITITEDFIKNYPDFSIRGAKGIIALTGYEGLLGYQTQAEKSNAPGYKKEIENAIIIVNKLKELGWRFASHSWGHLNMPKVPMSWFTYDNKLWDKEVKPILGETDLYIYPFGAALEKIEEKX

SEQ ID NO: 10359 - DNA, 786 bp, Unknown
  Obtained from environmental sample
  misc_feature (1)..(786): n is a, c, g, or t
atgaccgcaatgtttaccgacattcagggcttctccacgatttctgaaaaactcgatcctgctcacctgtccgggctgttgaaccgctacctgaccgcgatgagcaacatcatcatggaaaacctggggacgattgacaaatacgaaggggacgcgattatcgcgttnttcggcgctccggtattccgcgagaaccacccggcccttgcctgccgcagcgcccttgcgatgaaggcggcggagcgggaactgaacaaggcggtactggaagaaaagttaagcccgtcgccgatttttacccgaatcggcatcaataccggggaaatggtcgtagggaacatgggcgcggaaaacaagatggactacacgataatgggcaacgcggtaaacctcgccgcccgtcttgaaggggtgaacaagcaataccataccggcggcatattgataagcgaatacacaagggaaaagttaggcgatgaatttttgttgcggcggcttgaccgggtcagggttgtggggattaacacgccactgcggttgtacgaactgataacaattaataatgaacaattaacaacgaacagggaggagatagagaagtgggagaaggcaatcgatctgtatgaacagaggaatttcagagaggcgttggaactgttcaaatcccttatggagaacaaccctgatgataaagtggctgaattgtatgctaaccgctgtatgaaatacgaagctaatccgccgcctgaacagtgggatgcggtaaataacttaacggagaagtga

SEQ ID NO: 10360 - protein, 261 aa, Unknown
  Obtained from environmental sample
  DOMAIN (1)...(185): Adenylate and Guanylate cyclase catalytic domain
  misc_feature (1)..(261): Xaa is any amino acid
MTAMFTDIQGFSTISEKLDPAHLSGLLNRYLTAMSNIIMENLGTIDKYEGDAIIAXFGAPVFRENHPALACRSALAMKAAERELNKAVLEEKLSPSPIFTRIGINTGEMVVGNMGAENKMDYTIMGNAVNLAARLEGVNKQYHTGGILISEYTREKLGDEFLLRRLDRVRVVGINTPLRLYELITINNEQLTTNREEIEKWEKAIDLYEQRNFREALELFKSLMENNPDDKVAELYANRCMKYEANPPPEQWDAVNNLTEK

SEQ ID NO: 10361 - DNA, 807 bp, Unknown
  Obtained from environmental sample
  misc_feature (1)..(807): n is a, c, g, or t
ttggctttttcgggctgctcatggctaaccctgaccatgttccggcccgaagacatattcgaaggcggtgaagttgcagctaacacagaggttgaccaataccttgccgaatatatcgcccttgaaaatgtgcttgatgcgggagacagcaaaatgcccgacatggccgctgtaatgccggcgatacacaaactgttaagccgcgcgaaaggcgccggttttgtaaacgcctcgccggatgctgacgggctcaggcggcggataaaccttttggtaaagtacaaaggcgcgtattacggccatttggcgttaaccgcgctacaggaaaaattggggtacacgtcaatagaaatttccgacagaaccgtaacgttgatgaaaccggacggcggaaaactgcgtatcccccgcgcgcaggacggtacaatgctcttaaagtggccaaaaaaatcgttttacgattaccggatgatgtcgcttgtacagctcatccagcatacaatgatagagccggtatttgcgcgtaacatcgccctgatggacgattcgggctttttcttttattgggatgacggaaaaacaccccaggaatattaccttgaagcggaagaaatcaaaagcgcggcatttgccaaaaacagcgctgcggaaatacaatggttggcggcgcgggagaattttttccgttcctgtgaagcgttccttaacggcccctacgaggaagccatacttgccgatgtgggcggcgatacggagacggcggattatgtgcggggattgtttgattcatgccggggccagttttag

SEQ ID NO: 10362 - protein, 268 aa, Unknown
  Obtained from environmental sample
  misc_feature (1)..(268): Xaa is any amino acid
MAFSGCSWLTLTMFRPEDIFEGGEVAANTEVDQYLAEYIALENVLDAGDSKMPDMAAVMPAIHKLLSRAKGAGFVNASPDADGLRRRINLLVKYKGAYYGHLALTALQEKLGYTSIEISDRTVTLMKPDGGKLRIPRAQDGTMLLKWPKKSFYDYRMMSLVQLIQHTMIEPVFARNIALMDDSGFFFYWDDGKTPQEYYLEAEEIKSAAFAKNSAAEIQWLAARENFFRSCEAFLNGPYEEAILADVGGDTETADYVRGLFDSCRGQF

SEQ ID NO: 10363 - DNA, 408 bp, Unknown
  Obtained from environmental sample
  misc_feature (1)..(408): n is a, c, g, or t
atggccattcagcggaaaaaattgattatgctcgctgccataggcgtgggcggtggaatgttccttggttttgccagaatattgttcagcaatatgctgccttccggcggcatccatctttcatggatattgactccctgttattgcctggctttgatcctgacgattttcgcgccggatgatttctcctcaatagcgtgggacacggcgggcattgccaccggccccatttcggttcccataatgattaccgcgggtcttggcctgggcaacgattccctgcgggctgacggcgcgtttggcattgtggcgatatccagcgttttccccattatcgcgattcttgtgtcggggatcatcgacaaggcaaaatcggaaagggcaatacggagcggccatgaaaactga

SEQ ID NO: 10364 - protein, 135 aa, Unknown
  Obtained from environmental sample
  SIGNAL (1)...(30)
  DOMAIN (1)...(122): Protein of unknown function (DUF1538)
  misc_feature (1)..(135): Xaa is any amino acid
MAIQRKKLIMLAAIGVGGGMFLGFARILFSNMLPSGGIHLSWILTPCYCLALILTIFAPDDFSSIAWDTAGIATGPISVPIMITAGLGLGNDSLRADGAFGIVAISSVFPIIAILVSGIIDKAKSERAIRSGHEN

SEQ ID NO: 10365 - DNA, 552 bp, Unknown
  Obtained from environmental sample
  misc_feature (1)..(552): n is a, c, g, or t
atggttaaggctgagggcgttatctatgaccgctttgacgaaacgatgatcgttaaggcttctgacttgcctgaacattttgacagatacgctgccggacaggatttcggtttgaacattactttcgtaaaaatcggctgggttggcgatgtggtttatgtactgggcgactatggggcgttcaacatgactacccaaagttttaacgaggaagtaaccgcaagaggcttacaagactgccctgatgggtgctttcctggggaaagcttagggcttcctgtttactgcgatccagccggaggggagaggatacaggaaataacaggcgggactaaggctaacaattcggttgaaagcggaattgattatataaacgcaaaaatcgaaaggcatcagttttacgtttcggagagatgtaccggagtgctttcggagatttgggattactgccggaacgaagccggggaaatagtaaaagtaaacgatcattatatggatgccctgcgctatgcggtgttctcggatgttcagcatggggtaattttggcatga

SEQ ID NO: 10366 - protein, 183 aa, Unknown
  Obtained from environmental sample
  misc_feature (1)..(183): Xaa is any amino acid
MVKAEGVIYDRFDETMIVKASDLPEHFDRYAAGQDFGLNITFVKIGWVGDVVYVLGDYGAFNMTTQSFNEEVTARGLQDCPDGCFPGESLGLPVYCDPAGGERIQEITGGTKANNSVESGIDYINAKIERHQFYVSERCTGVLSEIWDYCRNEAGEIVKVNDHYMDALRYAVFSDVQHGVILA

SEQ ID NO: 10367 - DNA, 597 bp, Unknown
  Obtained from environmental sample
  misc_feature (1)..(597): n is a, c, g, or t
gtgtgtattcttatagttaaaatttcttaccaaaaggtgtataatacccgcatgaagtcgaaagaacagcgggtttccgagttggaagaatcaatacaaaaacatcaggctctttactacaacggggaagcggaaatctctgacggcgaatttgacttgctttgggatgaattaaagaccctgtcccccgacagcgctatcttgaaaaaggtaggcacaggtcccgatgttgacggcttcccaaaggcccggcatttaattccaatgggaagccaggaaaaggcttccgacccgcaggaattccttgtttgggcaaagaaaatggggatggaagactcagaattacaaaatgacggtgaaaacaaggatttgttaaccaataaaaaaaataggttaacaaagaaatttatcgtacaatacaaactggacggcgncagccttgagttacagtatgaaaagggaaaactgctccgcgccgtaacccgcggggacggaattacaggcgacgaaataaccgacaacgcgcggcgcatgggcggcgttgttcaaaaaatggacgttccatttacaggcnngcgtaggggcgaggttatatga

SEQ ID NO: 10368 - protein, 198 aa, Unknown
  Obtained from environmental sample
  DOMAIN (19)...(196): NAD-dependent DNA ligase adenylation domain
  misc_feature (1)..(198): Xaa is any amino acid
MCILIVKISYQKVYNTRMKSKEQRVSELEESIQKHQALYYNGEAEISDGEFDLLWDELKTLSPDSAILKKVGTGPDVDGFPKARHLIPMGSQEKASDPQEFLVWAKKMGMEDSELQNDGENKDLLTNKKNRLTKKFIVQYKLDGXSLELQYEKGKLLRAVTRGDGITGDEITDNARRMGGVVQKMDVPFTGXRRGEVI

SEQ ID NO: 10369 - DNA, 441 bp, Unknown
  Obtained from environmental sample
  misc_feature (1)..(441): n is a, c, g, or t
atgttttgtgataatgaatcggatatgcggctgtgtttctcccgctcggctatgctctccgccgatgttaacgctgcgtttgatccgacttatgccggagtatttgataaaaagaacgcttcatttatgggcaaaggtcttgtgcttaccaaatacacaggttcaggcggcaagtacggcgcaagcgacgctaacgctgaattctgcgcaaaggtgcaggcgataatgagccgtaataaagttcaatggcagttcggcgaattgggaaaagtagacaagggcggcggcggaacaatcgctctttatgccgccaatctgggaatcgatgttcttgactgcggtattcccgtactgtccatgcactcgccgtttgaggtaatcagcaagattgatctttacacgacatacagaggatatgttgcgtttttaaaagacgcgtaa

SEQ ID NO: 10370 - protein, 146 aa, Unknown
  Obtained from environmental sample
  misc_feature (1)..(146): Xaa is any amino acid
MFCDNESDMRLCFSRSAMLSADVNAAFDPTYAGVFDKKNASFMGKGLVLTKYTGSGGKYGASDANAEFCAKVQAIMSRNKVQWQFGELGKVDKGGGGTIALYAANLGIDVLDCGIPVLSMHSPFEVISKIDLYTTYRGYVAFLKDA

SEQ ID NO: 10371 - DNA, 426 bp, Unknown
  Obtained from environmental sample
  misc_feature (1)..(426): n is a, c, g, or t
ttgatcggtcgccatattgtcacgcagataatcaaaagcaaactcgttattcgtgccgtaagtaatgtccgaattataagcggcctggcgtgcagcaaaatccaaattagccacaatcaccccgaccgtcaaacccaaaaaagtataaacctgccccatccaggccgcgtcgcgctgcgccagataatcattgaccgttacgacgtgcacgccatgcccggtcaaggcattgagatacaccggcagcgtcgcgaccagggttttaccttcgccggttttcatttcggcgatccgcccttcatgcaggacgatcccgcccaaaagctgcacatcaaaatggcgcatattcagcgcacgcttggccgcctcgcgcactacggcaaaggcttcgaccaaaatatcgtcaatggtcttcccggtctttaa

SEQ ID NO: 10372 - protein, 141 aa, Unknown
  Obtained from environmental sample
  misc_feature (1)..(141): Xaa is any amino acid
MIGRHIVTQIIKSKLVIRAVSNVRIISGLACSKIQISHNHPDRQTQKSINLPHPGRVALRQIIIDRYDVHAMPGQGIEIHRQRRDQGFTFAGFHFGDPPFMQDDPAQKLHIKMAHIQRTLGRLAHYGKGFDQNIVNGLPGL

SEQ ID NO: 10373 - DNA, 609 bp, Unknown
  Obtained from environmental sample
  misc_feature (1)..(609): n is a, c, g, or t
ttgcagtatgacgatgtgttcaaccgccagcgtgaaacgatttacaccntgcgccataaactgctgatcgacgccgatgtcacggaaaaaatccaggaattcttagtcaagactaatgccttggctaagtatcaggacaaagccgcgcaaatcccgccggatgttctgcggaatatcgagcggctagtcttgctgcgcgagattgaccgcaaatggattgatcatctgcacaatctcgatgtgctgcgcgaaggcataggcttgcgcgcttacgggcagcttgacccgttgaccgagtataagattgaagggtttaaactttttcaaactatgctggaccagattgccgaggataccgtggagacgctgctgcgcgtacaggtggttcacgatctgccgcagaatatcgccgcggaaaattaccgtaatatgcattattccggcggcgaattaacggccggtctgcagtcgccgatgcaaggacaggcgcgcgcgtcagacgatatgcccaggcaagagccgatccgcgttgcggaaaagaccggccgcaatgatccctgtccctgcggctcgggcaagaagtacaaaaattgctgcggcaaaatataa

SEQ ID NO: 10374 - protein, 202 aa, Unknown
  Obtained from environmental sample
  DOMAIN (183)...(202): SEC-C motif
  misc_feature (1)..(202): Xaa is any amino acid
MQYDDVFNRQRETIYTXRHKLLIDADVTEKIQEFLVKTNALAKYQDKAAQIPPDVLRNIERLVLLREIDRKWIDHLHNLDVLREGIGLRAYGQLDPLTEYKIEGFKLFQTMLDQIAEDTVETLLRVQVVHDLPQNIAAENYRNMHYSGGELTAGLQSPMQGQARASDDMPRQEPIRVAEKTGRNDPCPCGSGKKYKNCCGKI

SEQ ID NO: 10375 - DNA, 762 bp, Unknown
  Obtained from environmental sample
  misc_feature (1)..(762): n is a, c, g, or t
ttgcatatagtttgtaccttgattgtctttgtaataacaattagcagaacacatcatttagataacgccgcttatgcaattaaaagccttgccttgcatatatcactattatgggcttttgtcccaaaactgggatttcatcttaatcagccttcttgggcattatctgtattttttctgtgctatgccttaacaccgagcttttcaaaatttttgaataagcgaggcaaaaaatctctttggctgttgtttttagtttcttgggcactttcgctttttgctgttctttatttcaaaaatatgccaaatgtttttaggggcatcaattttttctctggaatgctgcttggaaaattattcttttgcaatgcaattccgttgcctagaaaagccttgctaaacgacttatttttgcttttgattgcaattttgctatgcgtgaatgtttatattttcaagcaggtacatattgcgttgtcttaccatattgcatctccaattttgtattccacattactgctttttttggcaaacaacaaaggcatagcagttaaaattctttcggtatcttggtttagaagtttgggcaaggtatctttttatgcatatcttttgcacggcgttcttatagaatttttgcatttgtatttagacaaagttgcccactggaaatacaatccttttgacaaacccattgcaacgctattgattgttattttattctatggcggatgcgtggcgtatagcaggtggaagcgatga

SEQ ID NO: 10376 - protein, 253 aa, Unknown
  Obtained from environmental sample
  misc_feature (1)..(253): Xaa is any amino acid
MHIVCTLIVFVITISRTHHLDNAAYAIKSLALHISLLWAFVPKLGFHLNQPSWALSVFFLCYALTPSFSKFLNKRGKKSLWLLFLVSWALSLFAVLYFKNMPNVFRGINFFSGMLLGKLFFCNAIPLPRKALLNDLFLLLIAILLCVNVYIFKQVHIALSYHIASPILYSTLLLFLANNKGIAVKILSVSWFRSLGKVSFYAYLLHGVLIEFLHLYLDKVAHWKYNPFDKPIATLLIVILFYGGCVAYSRWKR

SEQ ID NO: 10377 - DNA, 555 bp, Unknown
  Obtained from environmental sample
  misc_feature (1)..(555): n is a, c, g, or t
atgtttanaagcgtatattttccatcacncttcatgttaatgaacgggatatttcgatatattaatctggtttctgggactattgtcatatttctcggattaaatatcatcttcaattttctttcnttatgnaattatgaaaaacgattccatctgaaaaacaagccaaaaggcgttatcggggcttttttggcgggcggagcttttggcgcgggatggaccccctgtgtcgggccggtgctggcgggcatactgcttctggcgactaactcgggcggcgtctggcgctcagttatgtatcttattttttattcagccggtttggggcttccgtttttatttgcgtcatttttctttgacgcgtttgtcaggatttccgcaaaactgcgaacccatctcccattgatacggcgtatcagcggactattgctcattgtaatcggcgttttgattatcaggggagattataaagcgattaacaatctgacggcaaaatggcaggcaaaactctccggcggaactaccgccgcggaatctgttaattatgatgaataa

SEQ ID NO: 10378 - protein, 184 aa, Unknown
  Obtained from environmental sample
  DOMAIN (2)...(153): Cytochrome C biogenesis protein transmembrane region
  misc_feature (1)..(184): Xaa is any amino acid
MFXSVYFPSXFMLMNGIFRYINLVSGTIVIFLGLNIIFNFLSLXNYEKRFHLKNKPKGVIGAFLAGGAFGAGWTPCVGPVLAGILLLATNSGGVWRSVMYLIFYSAGLGLPFLFASFFFDAFVRISAKLRTHLPLIRRISGLLLIVIGVLIIRGDYKAINNLTAKWQAKLSGGTTAAESVNYDE

SEQ ID NO: 10379 - DNA, 738 bp, Unknown
  Obtained from environmental sample
  misc_feature (1)..(738): n is a, c, g, or t
ttgtcgattcacctccgttacggacacaggggaagggcggctatggaaaagctcctgggcaaaattgaaaaacttgcgggtttttcgggcaagggccggaaggagcttccgtttgtggaacggctgcggcagtgcagggagcgtatccttgccgcgaatgaggcacggtatcacattaaagctgatccgtctcttccctttgaggggcggcttgatagggttattgccgccgcgctggaaaccgccgagcgtatgcttggcctgcaaagcgaaggtgaattgttttcgcggatgtaccggctgcgtcagatatgctgggatcggattgtcctgccggagataggcagcctgaaagatatgccgctcattgatcgcagagtagcggatcttaacgcgggggaagcctggtatatagggcggcatcaggaactggtggatttctgctggtactttcgcgttccgctccccgccgaagatgccgtcctgcatgacagggttgagtatgtgcagaatctttgggattttgccaaccgtactatgggcggcgcgtttgccgacaggatagtcatagctccccggagaattattatccatgccgggccggttatcaatttaaccgagcgccttccttcctataagaaggataaaaaggccgccgtctcgcagtcgctggccgatttggaaaaggcataccttaatagcattgatgaaatcaacgctcttgcgttaggaggataa

SEQ ID NO: 10380 - protein, 245 aa, Unknown
  Obtained from environmental sample
  misc_feature (1)..(245): Xaa is any amino acid
MSIHLRYGHRGRAAMEKLLGKIEKLAGFSGKGRKELPFVERLRQCRERILAANEARYHIKADPSLPFEGRLDRVIAAALETAERMLGLQSEGELFSRMYRLRQICWDRIVLPEIGSLKDMPLIDRRVADLNAGEAWYIGRHQELVDFCWYFRVPLPAEDAVLHDRVEYVQNLWDFANRTMGGAFADRIVIAPRRIIIHAGPVINLTERLPSYKKDKKAAVSQSLADLEKAYLNSIDEINALALGG

SEQ ID NO: 10381 - DNA, 618 bp, Unknown
  Obtained from environmental sample
  misc_feature (1)..(618): n is a, c, g, or t
gtgattcggaactatgtcaagcgaagcgcggcggctcacggcggaaatttacgttataaagaaacgcaaaccgaaaaagaactgcgtatgcaggcttttctttggatgaaagaaaatacagccgcgctcattgaaaacggaaaagctgataaagtgttagctgaacatttccttaaggtaattaatacgcgcgcgcagaaacacagaagcatggcgggcttttttaagggattgttaatgtttttcaaacacgcaattaattttcgcaaaagaaccggcataatggacaggcgcgtcgattttgagaatattcttgtttcaaacacgcagtgcgcgcttaagaaactgaatgagattaaaaataaagaaaacgcggaagctgtggagaaactaacagccgagtttgagcttatgcttgcggtgggaagaaatcatataatatctgattcgcgcctcagtatggaagattcctcagttaatgccattgtagaacgcggtttttccattgagcgtgaattaatacaagaaatgtttgaggcaaaccgcatttcaagggaaactgcaaaagaaatgcgtacggcgattataacgctggaaacacagttgcaaaatgattaa

SEQ ID NO: 10382 - protein, 205 aa, Unknown
  Obtained from environmental sample
  misc_feature (1)..(205): Xaa is any amino acid
MIRNYVKRSAAAHGGNLRYKETQTEKELRMQAFLWMKENTAALIENGKADKVLAEHFLKVINTRAQKHRSMAGFFKGLLMFFKHAINFRKRTGIMDRRVDFENILVSNTQCALKKLNEIKNKENAEAVEKLTAEFELMLAVGRNHIISDSRLSMEDSSVNAIVERGFSIERELIQEMFEANRISRETAKEMRTAIITLETQLQND

SEQ ID NO: 10383 - DNA, 702 bp, Unknown
  Obtained from environmental sample
  misc_feature (1)..(702): n is a, c, g, or t
gtgttgaagcaaagacagattacggaaatagcgcgcagcgtcaagaaaagcggcagcaaaatcctgcgcggaggggcgttcaagcccagaacttcgccatacgcgtttcagggcaagcaggctgaagggcttaatctgctgcgtatggcgaaacaggaaacagggcttcccattgtctctgaaataatgaaccaaacgcagatcgatttgtttgacgatgtcgatattatgcaaatcggcgcaaggaatatgcagaactttgatttactgaaagaagtcggcaggttgaaaaagcctgtgctattgaagcgcggacttgccaacacaatcgaagaattgctgatgagcgcggaatatatcgtatctgcaggaaacacgcaggttatactctgcgagcgcggcattcgcacctttgaaacaatgacgcgcaacacgctggatttatcagcggtcgcgcttctcaaacaaaaatcgcacctgcccgttatcgtagacccaagtcacgcttcgggcatcagaagccttgtgccgccccttgccaaagcggccatggctgtgggagcggacggcttaatgatagaagcgcacaacaacccggcaacagcgttatgcgatggcgcgcagtcgcttgatttggagcagttccgcctgcttatggacgagttgagaaagcgcgcggtaatagaaaacaaaattttttaa

SEQ ID NO: 10384 - protein, 233 aa, Unknown
  Obtained from environmental sample
  DOMAIN (1)...(228): DAHP synthetase I family
  misc_feature (1)..(233): Xaa is any amino acid
MLKQRQITEIARSVKKSGSKILRGGAFKPRTSPYAFQGKQAEGLNLLRMAKQETGLPIVSEIMNQTQIDLFDDVDIMQIGARNMQNFDLLKEVGRLKKPVLLKRGLANTIEELLMSAEYIVSAGNTQVILCERGIRTFETMTRNTLDLSAVALLKQKSHLPVIVDPSHASGIRSLVPPLAKAAMAVGADGLMIEAHNNPATALCDGAQSLDLEQFRLLMDELRKRAVIENKIF

SEQ ID NO: 10385 - DNA, 357 bp, Unknown
  Obtained from environmental sample
  misc_feature (1)..(357): n is a, c, g, or t
ttgagaagcgcgaccgctgataaatccagcgtgttgcgcgtcattgtttcaaaggtgcgaatgccgcgctcgcagagtataacctgcgtgtttcctgcagatacgatatattccgcgctcatcagcaattcttcgattgtgttggcaagtccgcgcttcaatagcacaggctttttcaacctgccgacttctttcagtaaatcaaagttctgcatattccttgcgccgatttgcataatatcgacatcgtcaaacaaatcgatctgcgtttggttcattatttcagagacaatgggaagccctgtttcctgtttcgccatacgcagcagattaagcccttcagcctgcttgccctga

SEQ ID NO: 10386 - protein, 118 aa, Unknown
  Obtained from environmental sample
  misc_feature (1)..(118): Xaa is any amino acid
MRSATADKSSVLRVIVSKVRMPRSQSITCVFPADTIYSALISNSSIVLASPRFNSTGFFNLPTSFSKSKFCIFLAPICIISTSSNKSICVWFIISETMGSPVSCFAIRSRLSPSACLP

SEQ ID NO: 10387 - DNA, 507 bp, Unknown
  Obtained from environmental sample
  misc_feature (1)..(507): n is a, c, g, or t
ttgccaaataacagatttgccgcttttgcacgcatggcagataacggcatcctcgcgtttatgcagccaatctttcttagcaacgatctatatgtgcttgaaagccgcgttggcaaagagcttgcgtctacctcctacgccttcgctaccatgaacaaactgggcgttaaagcggcttacggaacggacagcccggtagaatccatgaacccgctagactgtatcgactgcgcggtaaaccgccatgacgtaacaaacggctatcccgaaggtggttataacccggacgagtgtgtagatgtctataccgcagtagacgcttacacctcaggcagcgcatacgccgaatttgccgaagattacaagggcagaatcaagccaggctatcttgcagacctgacgctgttggatcgcgatatttttgccatcccgcaaaaagaaattcgcaaggcgcaggtacagtggactatggtaggcggtgttatggcctaccggaagaaaaactaa

SEQ ID NO: 10388 - protein, 168 aa, Unknown
  Obtained from environmental sample
  misc_feature (1)..(168): Xaa is any amino acid
MPNNRFAAFARMADNGILAFMQPIFLSNDLYVLESRVGKELASTSYAFATMNKLGVKAAYGTDSPVESMNPLDCIDCAVNRHDVTNGYPEGGYNPDECVDVYTAVDAYTSGSAYAEFAEDYKGRIKPGYLADLTLLDRDIFAIPQKEIRKAQVQWTMVGGVMAYRKKN

SEQ ID NO: 10389 - DNA, 306 bp, Unknown
  Obtained from environmental sample
  misc_feature (1)..(306): n is a, c, g, or t
gtgtcatatgcaagcaggctgatgcacgggaaatcatcgcaggtaaatctcgatctagagaatgttcttttcaaggggcttccgcctgtcataagcgcggcgcgatatcattctttggcaggcattgagtcaaccctgcctgacgtgctgaaaatcaccgcaaggacagatgtcggtgaaattatggcggtgtgccacaaagagtaccctgtctacggtttgcagtttcatccggaatcaatacttacgccggacggggggattatcataaagaatttttttagtttttcttccggtaggccataa

SEQ ID NO: 10390 - protein, 101 aa, Unknown
  Obtained from environmental sample
  misc_feature (1)..(101): Xaa is any amino acid
MSYASRLMHGKSSQVNLDLENVLFKGLPPVISAARYHSLAGIESTLPDVLKITARTDVGEIMAVCHKEYPVYGLQFHPESILTPDGGIIIKNFFSFSSGRP

SEQ ID NO: 10391 - DNA, 528 bp, Unknown
  Obtained from environmental sample
  misc_feature (1)..(528): n is a, c, g, or t
atgatcaggctgttcgcccgatttccgcgccgcggacggcttttaccagcgcttcttcaaagtgtcggcaatcgccataacttcgccggttgctttcatctgcgtacccagttctctttgcgcgtaaacaaatttgtcgaaaggccatttgggaaatttcaccgccacatagtcaagcgtcggctcaaacgcggcgaaagtgctgcccgtaacggcgtttataatttcatcgagggtatacccgatggcgattttggtcgccactttggcgatggggtagccggttgccttgctggcaagcgccgaggagcgcgaaacgcgggggtttacctcaataaccgcgtactcaaaactgtcggtatgcagggcgaactggacgttgcagccgccctcaacgcggagggcctggataatattcagggcggctgtacgcagcatctgatattctttatcagccagcgtaacggcgggcgcgataacgatgctgtcgccggtatgtatgccgaccggatcaaaattttccattga

SEQ ID NO: 10392 - protein, 175 aa, Unknown
  Obtained from environmental sample
  misc_feature (1)..(175): Xaa is any amino acid
MIRLFARFPRRGRLLPALLQSVGNRHNFAGCFHLRTQFSLRVNKFVERPFGKFHRHIVKRRLKRGESAARNGVYNFIEGIPDGDFGRHFGDGVAGCLAGKRRGARNAGVYLNNRVLKTVGMQGELDVAAALNAEGLDNIQGGCTQHLIFFISQRNGGRDNDAVAGMYADRIKIFH

SEQ ID NO: 10393 - DNA, 885 bp, Unknown
  Obtained from environmental sample
  misc_feature (1)..(885): n is a, c, g, or t
atgcagctgcnccgcgacggcttccttgataaaatgaacgtgcgcctgctcggttcctcgcctgaaacgattgataaagccgaagacagaaagatgttcaaggaaaccatgcaaagcatcggtcagccggtaatcccttcggtaatagcgaccgacgtgcaaacggcggtaaagtttgccgacgaattgggataccccgttattgtgcgccccgccttcacgctgggcggctcgggcggcggcattgcggctaacgaggcgcagctgcgggaaattgccgctaacgggctgtccctgtcgccgatacaccagattttgacggaaaaatccatcgccggctggaaagaaattgagtttgaagtgatgcgcgaccgcgccggaaatgtcattaccgtttgttcaatggaaaattttgatccggtcggcatacataccggcgacagcatcgttatcgcgcccgccgttacgctggctgataaagaatatcagatgctgcgtacagccgccctgaatattatccaggccctccgcgttgagggcggctgcaacgtccagttcgccctgcataccgacagttttgagtacgcggttattgaggtaaacccccgcgtttcgcgctcctcggcgcttgccagcaaggcaaccggctaccccatcgccaaagtggcgaccaaaatcgccatcgggtataccctcgatgaaattataaacgccgttacgggcagcactttcgccgcgtttgagccgacgcttgactatgtggcggtgaaatttcccaaatggcctttcgacaaatttgtttacgcgcaaagagaactgggtacgcagatgaaagcaaccggcgaagttatggcgattgccgacactttgaagaagcgctggtaa

SEQ ID NO: 10394 - protein, 294 aa, Unknown
  Obtained from environmental sample
  DOMAIN (29)...(228): D-ala D-ala ligase C-terminus
  misc_feature (1)..(294): Xaa is any amino acid
MQLXRDGFLDKMNVRLLGSSPETIDKAEDRKMFKETMQSIGQPVIPSVIATDVQTAVKFADELGYPVIVRPAFTLGGSGGGIAANEAQLREIAANGLSLSPIHQILTEKSIAGWKEIEFEVMRDRAGNVITVCSMENFDPVGIHTGDSIVIAPAVTLADKEYQMLRTAALNIIQALRVEGGCNVQFALHTDSFEYAVIEVNPRVSRSSALASKATGYPIAKVATKIAIGYTLDEIINAVTGSTFAAFEPTLDYVAVKFPKWPFDKFVYAQRELGTQMKATGEVMAIADTLKKRW

SEQ ID NO: 10395 - DNA, 324 bp, Unknown
  Obtained from environmental sample
  misc_feature (1)..(324): n is a, c, g, or t
atgctgtcgccggtatgtatgccgaccggatcaaaattttccattgaacaaacggtaatgacatttccggcgcggtcgcgcatcacttcaaactcaatttctttccagccggcgatggatttttccgtcaaaatctggtgtatcggcgacagggacagcccgttagcggcaatttcccgcagctgcgcctcgttagccgcaatgccgccgcccgagccgcccagcgtgaaggcggggcgcacaataacggggtatcccaattcgtcggcaaactttaccgccgtttgcacgtcggtcgctattaccgaagggattaccggctga

SEQ ID NO: 10396 - protein, 107 aa, Unknown
  Obtained from environmental sample
  misc_feature (1)..(107): Xaa is any amino acid
MLSPVCMPTGSKFSIEQTVMTFPARSRITSNSISFQPAMDFSVKIWCIGDRDSPLAAISRSCASLAAMPPPEPPSVKAGRTITGYPNSSANFTAVCTSVAITEGITG

SEQ ID NO: 10397 - DNA, 831 bp, Unknown
  Obtained from environmental sample
  misc_feature (1)..(831): n is a, c, g, or t
atgccccagtttaaccggctgccgcccgataacatggaaaaattcagcacctttacctgcccggttttgaaaagctaccccttgtccgtcaaatactcggataaccccgaagacaagcacggcatcgcctttgacacgccgatttttcactggttttctgaccgggaccaggattatcagctgtgccggtttatgcgcgatacctttaatataccacagaatatgtgccgggccgccattagccagggcgaaaaggcgctccaggaattcaacaaggctttggtagaaaacggcaaaaaaataattgaagaaaccgaaaagaaaggcggttttgccgtggttatttccggccgccattaccagtacgatgagttggtcaaccataatttgtccaggtactttaccaatatcggcgtaccggttttgacggtggattcccttcccgatttgggaaaaatctctctggaaaaatcgcggcttgatataacaaacaacaaccacgcccggttgttgtcaggcgccattttcaccgccgggcatccggtgctggaatacgtagacattttcagtttcgggtgcgggcatgacgccctctataccgacgaaattgtccgcatcatgaaagagatttccggcaaatccccgctaatattaaaaatggacgaaagcgacatagcgggcccgctgcgcatacggatacgctcatttattgaaacggtgatgatacgccggaaaaaagaaactcttaacgcaaaccccttaggcgatccctattcggtcaagtttaccaaggaagaccggcatgtaaaaaccctgctgttcccaatgtaa

SEQ ID NO: 10398 - protein, 276 aa, Unknown
  Obtained from environmental sample
  misc_feature (1)..(276): Xaa is any amino acid
MPQFNRLPPDNMEKFSTFTCPVLKSYPLSVKYSDNPEDKHGIAFDTPIFHWFSDRDQDYQLCRFMRDTFNIPQNMCRAAISQGEKALQEFNKALVENGKKIIEETEKKGGFAVVISGRHYQYDELVNHNLSRYFTNIGVPVLTVDSLPDLGKISLEKSRLDITNNNHARLLSGAIFTAGHPVLEYVDIFSFGCGHDALYTDEIVRIMKEISGKSPLILKMDESDIAGPLRIRIRSFIETVMIRRKKETLNANPLGDPYSVKFTKEDRHVKTLLFPM

SEQ ID NO: 10399 - DNA, 339 bp, Unknown
  Obtained from environmental sample
  misc_feature (1)..(339): n is a, c, g, or t
atgagggcgaaccccttttccggcaatgtggtaatgcatcagggagtggaccttgccgcgccggaaggaacggaagtttacgccgccgcggacggagttgtaacttatacgggattcgaccctatatacggaaattatataattatctcgcacagcgacagatggacaagtttgtacggtcatctgcaaataattgaagcggtcttgcggacaaacgtgaaatcaggtagtctgataggaagagtaggatctacaggccagtcaacagggcctcatcttcattttgaattacgacaggacggaagagcgttaaatccggcggggaagctccgtcgttaa

SEQ ID NO: 10400 - protein, 112 aa, Unknown
  Obtained from environmental sample
  DOMAIN (11)...(106): Peptidase family M23
  misc_feature (1)..(112): Xaa is any amino acid
MRANPFSGNVVMHQGVDLAAPEGTEVYAAADGVVTYTGFDPIYGNYIIISHSDRWTSLYGHLQIIEAVLRTNVKSGSLIGRVGSTGQSTGPHLHFELRQDGRALNPAGKLRR

SEQ ID NO: 10401 - DNA, 876 bp, Unknown
  Obtained from environmental sample
  misc_feature (1)..(876): n is a, c, g, or t
atgcgcggagaaaacgattctttattgttaggtgaaaacgcttcaatacaggataatattgatgtgttgaaaaaggcgattgtaacgcaaaataaactaataaaagaaaatgtcaattccaatttaaaagaagttcccagaatgctcgcgatctacaaagaagttgaaaatttttattttggcgttgacggctgcgaaggattgcgcggatggaatgaacttgacgatgttatccttcttttcagcgacgataatcacgggaatttacgcgctattcctcagccaaatgacaaaccgcagggcggcggttacggcatttattatcattttgactatcatggagctccttatagttacgaatggatgaatcacactaatttgacaaaagtatgggaacagttaacaacggcgtatgaatacggaatacgcgaaatgtggattgtcaacgtaggcgatataaagggtaatgaataccctttaagttactttatggatttggcttatgattataccaaatgggggattgataatttaaatagcgcggaagaatattcaaaacaatggatagaaaaacaatttggaagcaatatatccgatgaacaaaaaacaactattcatgagattttagtatcatatacaaaatggagcgcggcaagaattcccgaatcgttaaaccctgatgtatataaaaacaattttcatgaaattgaaaacacaaaagaagctgtaacaaacaccttgcaaaaaacaaaatcattgcgcgaagaaatgcctcagcaatcaatagacgcttatgagagcatgatctattaccctgtttgcgctttttttaattctatgctgattaatctgaagcggcaatctcggccgatctga

SEQ ID NO: 10402 - protein, 291 aa, Unknown
  Obtained from environmental sample
  misc_feature (1)..(291): Xaa is any amino acid
MRGENDSLLLGENASIQDNIDVLKKAIVTQNKLIKENVNSNLKEVPRMLAIYKEVENFYFGVDGCEGLRGWNELDDVILLFSDDNHGNLRAIPQPNDKPQGGGYGIYYHFDYHGAPYSYEWMNHTNLTKVWEQLTTAYEYGIREMWIVNVGDIKGNEYPLSYFMDLAYDYTKWGIDNLNSAEEYSKQWIEKQFGSNISDEQKTTIHEILVSYTKWSAARIPESLNPDVYKNNFHEIENTKEAVTNTLQKTKSLREEMPQQSIDAYESMIYYPVCAFFNSMLINLKRQSRPI

SEQ ID NO: 10403 - DNA, 843 bp, Unknown
  Obtained from environmental sample
  misc_feature (1)..(843): n is a, c, g, or t
gtggctgtggagcttaaacgggtcacatgggcctcttacttgacagattcggatttctcttccggcaagcccaaatatatgaccaacgagtcggtggatttggttgaggagagagaggtggttacgggaacgaatccgacggcgatagagttcaagaatcagaaaccgggcgtgtacatactggcgctgtcgtcgcgtgataggctggggcggttgcagacggtcaagatcgacctgtacctcgccggaggcgaacagcagcaggcgtggaagaaggcagagcaaagcgtctttgagacggtgatggacaggaactcctacgagcccggccagcaggcgaaaatcttgctcaaaagtccgtacaagaaggcgcttgcgttggccgtgacggagatgcccaacggcgagctttcatacaaatgggtgagcgttgacaacgggcagggaacgtttacgctcgacattaagcaggagatggcgccgcgcgttcccgtgagcttcttgcttatgcgcccgcgcgcctccgcgccgcgccgctcttcggacggttcgtcggtcgacgccggaaggccggagacggtgggaaatacgacatggctcacggtcaaccccgtcgccaacatgcttgacgttaaattgtcgcacgtgcccacggtcacgccgggctcaacgctcgaggtaaccataaacctccgcgacatacagggcaaagcgcgtccaggcgaggttgcgctgtggctggtcgacgaggcggtgctgtcgctgcgcaaggagtatagtttagatccgctcgaggcgtttcgaaagaggtcgagacgcacggagcataatgactcgcgataa

SEQ ID NO: 10404 - protein, 280 aa, Unknown
  Obtained from environmental sample
  DOMAIN (94)...(258): Alpha-2-macroglobulin family N-terminal region
  misc_feature (1)..(280): Xaa is any amino acid
MAVELKRVTWASYLTDSDFSSGKPKYMTNESVDLVEEREVVTGTNPTAIEFKNQKPGVYILALSSRDRLGRLQTVKIDLYLAGGEQQQAWKKAEQSVFETVMDRNSYEPGQQAKILLKSPYKKALALAVTEMPNGELSYKWVSVDNGQGTFTLDIKQEMAPRVPVSFLLMRPRASAPRRSSDGSSVDAGRPETVGNTTWLTVNPVANMLDVKLSHVPTVTPGSTLEVTINLRDIQGKARPGEVALWLVDEAVLSLRKEYSLDPLEAFRKRSRRTEHNDSR

SEQ ID NO: 10405 - DNA, 936 bp, Unknown
  Obtained from environmental sample
  misc_feature (1)..(936): n is a, c, g, or t
atggcagtttcgctggagttctcggcggagccgtccgatccggggatttcggttatgcggagcatggtgagcgtatcgccatcgccgccgacgttcttgtactccataagcggcaacaaaatattcgtcaacctcgggatggagcaggagaagctctacaaagttgtgttgaacccgtcgaccatcacggatatcgcggggcgcgcgcttacgaacaagaagccgaattcgttttacgtgtatttgccgaagatcaaaccgaatgccaattgggaccgcgggtccgggatagcggagcggtttggcccgcagcaatttcctataacggcgtccggcgtttcgagtttagacttcagggtgtacaagatagacccgttgcacacggcgttcggcgacttcccgtccgcgcaagttgaggtgagcgaaacatccatgcccccggggcccggcgaggagccttcctccatggattcggattacggcaaaacgcgctacggatactcgtatgagaatgtgaatatcgtgaagcatataaggatgctcggcagcccgcactattccggaattgttgatgtcggcggggagggcgggcgcaagatcagcagcgtggaccttaagccgatgttcgccgccgtcagcggcaaggacaagccggggacgtatttggtcggcttcaggctgcttgacggagcgcagaatcgctactacgcgaaggtgagcgtgacggatttgtgcctaagcgcggttgagtctaatttgaagggcaacaaggtgatgtttgcggtcacgagctattcgagcgacaagcctgtggccgacgcgtctataaagatagaccgcctgatcggcggcgagatggtgacgcttgcgcagggcaagaccggatcggacggatttctcccgtttgacacacgaaagcgactatggaggagctga

SEQ ID NO: 10406 - protein, 311 aa, Unknown
  Obtained from environmental sample
  misc_feature (1)..(311): Xaa is any amino acid
MAVSLEFSAEPSDPGISVMRSMVSVSPSPPTFLYSISGNKIFVNLGMEQEKLYKVVLNPSTITDIAGRALTNKKPNSFYVYLPKIKPNANWDRGSGIAERFGPQQFPITASGVSSLDFRVYKIDPLHTAFGDFPSAQVEVSETSMPPGPGEEPSSMDSDYGKTRYGYSYENVNIVKHIRMLGSPHYSGIVDVGGEGGRKISSVDLKPMFAAVSGKDKPGTYLVGFRLLDGAQNRYYAKVSVTDLCLSAVESNLKGNKVMFAVTSYSSDKPVADASIKIDRLIGGEMVTLAQGKTGSDGFLPFDTRKRLWRS

SEQ ID NO: 10407 - DNA, 576 bp, Unknown
  Obtained from environmental sample
  misc_feature (1)..(576): n is a, c, g, or t
atgaaagtcatcggatttatcggaagttcacggaaagaaggcaataccgcctgggcggtaaataaaatactggaaggcgcaaagggacaaggcgccgagactcaatcctggtgtttcagtgacatcgaaattaagccctgccgcggttgttcgagctgtaaaaaaggcggcaagggatgcgttataaaagatgatatgcaggacatttatgccgcctttgcagacgctgacgctattgttctcggatcgccggtttacatgggacagatgagcgcccaggcaaaaatttttaccgacaggttatatgcctgtatttccccgcgattttccccgttttacaaagaaaacatcaagaaaaagaagatggttcttgtatttacccaaggcaatcctgaccccaatctattccaaccatattttgattatacgaaaaatatgtttcagatgcttgaatttgacgttaaaagcgtacaggtcattgaaggtatgcggaaggaacaggcgcatgaaaaaagcgatttgcacgcttcattgaatgatgtgggagcatcgttggtttcggaacaggaattatag

SEQ ID NO: 10408 - protein, 191 aa, Unknown
  Obtained from environmental sample
  DOMAIN (1)...(169): NADPH-dependent FMN reductase
  misc_feature (1)..(191): Xaa is any amino acid
MKVIGFIGSSRKEGNTAWAVNKILEGAKGQGAETQSWCFSDIEIKPCRGCSSCKKGGKGCVIKDDMQDIYAAFADADAIVLGSPVYMGQMSAQAKIFTDRLYACISPRFSPFYKENIKKKKMVLVFTQGNPDPNLFQPYFDYTKNMFQMLEFDVKSVQVIEGMRKEQAHEKSDLHASLNDVGASLVSEQEL

SEQ ID NO: 10409 - DNA, 909 bp, Unknown
  Obtained from environmental sample
  misc_feature (1)..(909): n is a, c, g, or t
atgcagaccctggaaggccagggcagttttgttcacgccgggcctttcgcgaatattgcccatggcaattcctcgattatggcagacctcctggcaattcgtttttctgattatttggttaccgaagccggcttcggttctgacatgggtatggaaaaatttttcgacattaaatgccgcgcctcgggtcttgttcccgacgcggtggtgcttgtcgccacggtgcgtgccctcaaatcccacggaggcggacccgcagtggttccgggcaaaccgctcccggcatgttatagggaagaaaacgttgaactcctcaaagcggggatttccaatctcgctgctcacctcggcatagtttcgcgcttcggcgtccccgcagtggtggcaattaacgcgtttcccacagacacccaggccgagtgggaactcctccgggaagcggcgctcaaggccggggccgcagacgcggtcattacccaacactgggaaaagggcggcgaaggggcggcggatcttgcccgggccgtggaaaaggctgtccaggggcccggaaacttcaagcgaaagcaagctttcgcactcctctaccccgacaacatgggcctttcggaaaagatcgaaaccattgcccgggatatttacggcgccgatggcgtggattattcaccgaacgtccgggaagaacttggccggctcgaagacgctggttttggcgcgctgccgatttgcatggncaanacccagtactccctttcccatgatcccgcgcttaagggcgctccccggaattggcgcctcccggtgcgggaagtccgtcttgcggcgggcgcgggttttgtgtgtcccctttgcggcgatatttccaccatgcccgggcctcccctcccggnctgctttcatggacattga

SEQ ID NO: 10410 - protein, 302 aa, Unknown
  Obtained from environmental sample
  DOMAIN (1)...(302): Formate--tetrahydrofolate ligase
  misc_feature (1)..(302): Xaa is any amino acid
MQTLEGQGSFVHAGPFANIAHGNSSIMADLLAIRFSDYLVTEAGFGSDMGMEKFFDIKCRASGLVPDAVVLVATVRALKSHGGGPAVVPGKPLPACYREENVELLKAGISNLAAHLGIVSRFGVPAVVAINAFPTDTQAEWELLREAALKAGAADAVITQHWEKGGEGAADLARAVEKAVQGPGNFKRKQAFALLYPDNMGLSEKIETIARDIYGADGVDYSPNVREELGRLEDAGFGALPICMXXTQYSLSHDPALKGAPRNWRLPVREVRLAAGAGFVCPLCGDISTMPGPPLPXCFHGH

SEQ ID NO: 10411 - DNA, 993 bp, Unknown
  Obtained from environmental sample
  misc_feature (1)..(993): n is a, c, g, or t
atggcgagaaacaggcatgttgttatactcgacagcgttaccgccattgatgaaaacgcttttgagaactgcgccgatctttcaggcgtaatcataccggacggtgttatcagcataggaggttatgctttttggaaatgtaccggtcttacaaacataaccataccggacagtgttaaaaacatttacaggtcggcgttttatggatgtaccggtctaacggatgtaattataggaaacggcgtcaccgtcattgagataaatactttttttgaatgtacaggtcttacaagagtaaccataggaaacagcgttaccgccattagagagaaagcttttcatagttgtatcggccttacaagcgtaaacatacctgacactgttactgtcattgaaaggtacgctttttacagatgtaccagtcttacaagtataaatatacctgaaagcgttacccgcattgaagaaagcgctttttgcggttgtaaaagccttacaagcataacaataccgaaaagcattaccgaaatcagtaaagagcttttttacaactgtatcagcctgacaaacgtaaacttgtcaaacagcgttactgttattgaggacagcgcttttgaaaactgcgccggccttaccgcaataaccataccggacagcgttatcagcattaagcaggaggcatttcgagactgcaaaagccttaaaagcataacattgccgaaaaacattactgttatagaaagttatgtttttgagaattgtaccaatcttaccggaataaccataccggacagagttaacataatcagaactagggcgtttaacggaagcggacttaaaagcttaactatatcgggcaacattaccggaattgaaagcggtgcttttgcaaatgtgaaaaccttacagcgtaacataactgacaatcttgatattgttttgcaaggtatttttgaggattgcggcaacattaccaatgtaattctagattaa

SEQ ID NO: 10412 - protein, 330 aa, Unknown
  Obtained from environmental sample
  misc_feature (1)..(330): Xaa is any amino acid
MARNRHVVILDSVTAIDENAFENCADLSGVIIPDGVISIGGYAFWKCTGLTNITIPDSVKNIYRSAFYGCTGLTDVIIGNGVTVIEINTFFECTGLTRVTIGNSVTAIREKAFHSCIGLTSVNIPDTVTVIERYAFYRCTSLTSINIPESVTRIEESAFCGCKSLTSITIPKSITEISKELFYNCISLTNVNLSNSVTVIEDSAFENCAGLTAITIPDSVISIKQEAFRDCKSLKSITLPKNITVIESYVFENCTNLTGITIPDRVNIIRTRAFNGSGLKSLTISGNITGIESGAFANVKTLQRNITDNLDIVLQGIFEDCGNITNVILD

SEQ ID NO: 10413 - DNA, 315 bp, Unknown
  Obtained from environmental sample
  misc_feature (1)..(315): n is a, c, g, or t
ttggtagaggcaacggggcatatccccgatgaggcggtactggcctttcagcggggaatcaccattgaaggggtgcgttataaggcgcggcttgcggaaagaaccgccagccggtgcctgcggatagtgctgattgaaggcaaaaacagggaaatcaggcgggtgttttcccattttcacctgcatccctcccgccttcgccgcgtccgcataggcccggtaaaactgggaaatttagaggaaggggtatgcaggccgctgacggagtccgaagtagaagcattacaaggagcgcgacatggtaatcgccattga

SEQ ID NO: 10414 - protein, 104 aa, Unknown
  Obtained from environmental sample
  misc_feature (1)..(104): Xaa is any amino acid
MVEATGHIPDEAVLAFQRGITIEGVRYKARLAERTASRCLRIVLIEGKNREIRRVFSHFHLHPSRLRRVRIGPVKLGNLEEGVCRPLTESEVEALQGARHGNRH

SEQ ID NO: 10415 - DNA, 414 bp, Unknown
  Obtained from environmental sample
  misc_feature (1)..(414): n is a, c, g, or t
atgctgggcatgatgtgttccgggtctaggccgcgaacctgctgggccttcgccaagctgtgggcggcggcgattgccatgccgtcggtcacccggctggcntgcgccagcaggcagcctttcagcaggccggggaagcacatgctgttgttcacctggttggggaagtcgctcctgccggtggcgactatgaacgcgccggcgtccttggcgtcgtgcgggtatatttcgggcaccgggttggcgcacacaaagactatgggctttttgcccatcacctgtatccactcctttttcaccacgtcggggccgggcgtcgagagggcgcacaggatgtccgcgcccttgcacgcctccaggatgctgtccacgcgctgggggttggtggtctcgcagatctgccacttgcggtag

SEQ ID NO: 10416 - protein, 137 aa, Unknown
  Obtained from environmental sample
  misc_feature (1)..(137): Xaa is any amino acid
MLGMMCSGSRPRTCWAFAKLWAAAIAMPSVTRLACASRQPFSRPGKHMLLFTWLGKSLLPVATMNAPASLASCGYISGTGLAHTKTMGFLPITCIHSFFTTSGPGVERAHRMSAPLHASRMLSTRWGLVVSQICHLR

SEQ ID NO: 10417 - DNA, 783 bp, Unknown
  Obtained from environmental sample
  misc_feature (1)..(783): n is a, c, g, or t
atggatacggacgaacaaatccccgatacgggaacgcatgagataaaagatgaagtacggggccatattgaatttgacaatgttagatttagttataaaaaaggagaagacgtattaaaagggcttacctttgccgttaagccgggtgagatgacggcgattgtcggctatacgggggccggaaaaacaaccattgttaatgtacttgcccgtctttgggatatagattcaggcgtcatccgtcttgacggaattcccataatagatattccgttaaaagatctgcgccgttcgataatgcccgttatgcaggacgttacgctattctcaggcacgatagaagaaaacataacgcttggccttgatttttcccccgaacaaattattgaggcggcaaaaacagtttatgcccatgattttatttccgccctccccgacggctacaaaacggttctttccgagggggccgcgaatatttcaaccggccagcgccagcttataagctacgctcgcgttattgcgcataacccccgcgtcgtagtccttgacgaggcgacaagctccgtagacaccgaaacggagcggctgattcaactgggaataaaaaaagtaatgtcaggaagaacttcgttcgtaatcgcccaccgtctatccacaataaaaaacgccgaccgcatcctggttttatccgccggccgcctggtggaagaaggcgctcacgaagaacttatcgcaagagatggtttgtacgcgggcttatatcggttacagtacgaggaatga

SEQ ID NO: 10418 - protein, 260 aa, Unknown
  Obtained from environmental sample
  DOMAIN (49)...(232): ABC transporter
  misc_feature (1)..(260): Xaa is any amino acid
MDTDEQIPDTGTHEIKDEVRGHIEFDNVRFSYKKGEDVLKGLTFAVKPGEMTAIVGYTGAGKTTIVNVLARLWDIDSGVIRLDGIPIIDIPLKDLRRSIMPVMQDVTLFSGTIEENITLGLDFSPEQIIEAAKTVYAHDFISALPDGYKTVLSEGAANISTGQRQLISYARVIAHNPRVVVLDEATSSVDTETERLIQLGIKKVMSGRTSFVIAHRLSTIKNADRILVLSAGRLVEEGAHEELIARDGLYAGLYRLQYEE

SEQ ID NO: 10419 - DNA, 882 bp, Unknown
  Obtained from environmental sample
  misc_feature (1)..(882): n is a, c, g, or t
ttgatgattccgatttgcagtttgtctggtgccatagtcggttttggcggacgagatttgggtgggaacagccctgccaaatatatgaactcgccggaaactcttatctacaacaaaagcgaaattctctttgggttaaaccaaagccgcaaggcaatatcaaaagaaaattccgttattttggttgaaggttattttgacgttatttcaatgttccagagcggagtggaaaatgtggtggcaatttctggcacagccctttccgaaacacaggcaaaattgttagctaggtacacaaaatccgcattcataagcctagatggagatgctgccggacaaaccgccacggaacgctgcatagaggttttgctctcgcagagctttgccattaagattgtgaatttaacaaccgagagcggagaaaaagcagaccctgattcccttgttaggcaaggctcggcagcggcttttaaaaaattgcaggagaaagcaaaaaactggctcaactatttggcagacaaaagccaaccttcaaaccctgaggaaaaggcaaattttgctttaagaacaaaaaagctcatagcttcaatgaacaaccccgaactcaaaaagcagtatttgaatttattaaacgaaagatttggtgcagataaaagcttgcctgctttacaaacaaaaaagacccttgcaactcanattaaagaaactacagaaactgctcccgaaattccttggaaatcactgccaaatgatgaaatttggcttgtgaacgtgattttcaaaaatcccgagcttcaggcaatagccattaaaatttgcgacccctgcccttttagctcgcgctggctgccgagctttggattatggatatgctctttttga

SEQ ID NO: 10420 - protein, 293 aa, Unknown
  Obtained from environmental sample
  DOMAIN (1)...(50): DNA primase catalytic core, N-terminal domain
  misc_feature (1)..(293): Xaa is any amino acid
MMIPICSLSGAIVGFGGRDLGGNSPAKYMNSPETLIYNKSEILFGLNQSRKAISKENSVILVEGYFDVISMFQSGVENVVAISGTALSETQAKLLARYTKSAFISLDGDAAGQTATERCIEVLLSQSFAIKIVNLTTESGEKADPDSLVRQGSAAAFKKLQEKAKNWLNYLADKSQPSNPEEKANFALRTKKLIASMNNPELKKQYLNLLNERFGADKSLPALQTKKTLATXIKETTETAPEIPWKSLPNDEIWLVNVIFKNPELQAIAIKICDPCPFSSRWLPSFGLWICSF

SEQ ID NO: 10421 - DNA, 336 bp, Unknown
  Obtained from environmental sample
  misc_feature (1)..(336): n is a, c, g, or t
gtggatttgcacatcgcgcggggggacggctcttgggagaagctcctgagcgatcttaaaaagcccgacctgcttatccttgacgatttcggccttgccccccttgaaccgctgcaatgccgggactttctggaagtggtggaagaccgttatgcgtcagcttcgacgatagtggcctcccagcttccggtatcctgctggcacggggtctttgccgacgcgaccattgccgacgcggtgttggacaggctgcttcaaggggcgtaccgctttgagcttaaaggcccttccctgcggcagcggaatgtgccggatgaagacaagacggcggaataa

SEQ ID NO: 10422 - protein, 111 aa, Unknown
  Obtained from environmental sample
  DOMAIN (1)...(91): IstB-like ATP binding protein
  misc_feature (1)..(111): Xaa is any amino acid
MDLHIARGDGSWEKLLSDLKKPDLLILDDFGLAPLEPLQCRDFLEVVEDRYASASTIVASQLPVSCWHGVFADATIADAVLDRLLQGAYRFELKGPSLRQRNVPDEDKTAE

SEQ ID NO: 10423 - DNA, 750 bp, Unknown
  Obtained from environmental sample
  misc_feature (1)..(750): n is a, c, g, or t
atgcgcggccatattaaaccgggcggcttgtctaaacacgcgactattttcttttcggatatccgcggctttaccgaaaaatcggagaactttgtaaaggtattcggggatgaagcttccgaccgcattgttttttggcttaacgaatatttgacccgcatggtcgaatgtgttgaaaagaccggcggcactattgataaattcatcggggacgcggtaatggcccattggggaacggccagcacatcgggaagcgcgcggggagacgccctcaactgcgtcaagaccgcgctgttgatgagggtagcgctgcatagcataaacaaaaaccggaaacaggaaaattggggaaacccgcctatcagcatcggctgcggcattaacaccggtatcgttaccgccgggcagatcggctccgatttgcgcatggagtacacggttatcggcgacccggttaatcttgcctcccgcgtcgaagcgctgaacaaacctctgggtacggatatcctgattaccgaggatacgtgggacctgataaaagatcagattattgtcgaagaaatgcccgcggtaacggtaaagggaaaagaaaaaccggtgcggctttttgccgtggtaaatcttgtttcagttaattcaggcccccggactttggcgcaggtacgaaaagcattaggcattaatccgccggatatttcaaaagcggatgtcaacgccgaagaacacaagtacaaaattggcggcaagtaa

SEQ ID NO: 10424 - protein, 249 aa, Unknown
  Obtained from environmental sample
  DOMAIN (6)...(207): Adenylate and Guanylate cyclase catalytic domain
  misc_feature (1)..(249): Xaa is any amino acid
MRGHIKPGGLSKHATIFFSDIRGFTEKSENFVKVFGDEASDRIVFWLNEYLTRMVECVEKTGGTIDKFIGDAVMAHWGTASTSGSARGDALNCVKTALLMRVALHSINKNRKQENWGNPPISIGCGINTGIVTAGQIGSDLRMEYTVIGDPVNLASRVEALNKPLGTDILITEDTWDLIKDQIIVEEMPAVTVKGKEKPVRLFAVVNLVSVNSGPRTLAQVRKALGINPPDISKADVNAEEHKYKIGGK

SEQ ID NO: 10425 - DNA, 501 bp, Unknown
  Obtained from environmental sample
  misc_feature (1)..(501): n is a, c, g, or t
ttgncatgggcggaacccggttcatttacggggcttcgcataggctattcaatcgcaaaagggcttgccctttcactttccattccctttgcgcccgtcccgactctggaatgtattgtctatggcgttaaacaaggactcacccttgcggcagttgaggcaagaaaaaacgcatactttaacgcgttttttaaagacggaaacaggcttacagaggacaaagattcggagctttcgcaaataactgatgaaattgcctgttattcaaaagacggagaaaaaataatccttacgggctatggttcaaagagtctctatgacgccctgcctgagaatttaagaacaaatattactcttgcaaacgaaaacaaaggatacgcaaaggagcttattgccattgcggaaaataaacaattattttccaatgactgtaccgccaatctttattcgggacccgaatatatcagaaagacagacgcggagatagctctagctaagtaa

SEQ ID NO: 10426 - protein, 166 aa, Unknown
  Obtained from environmental sample
  DOMAIN (4)...(164): Glycoprotease family
  misc_feature (1)..(166): Xaa is any amino acid
MXWAEPGSFTGLRIGYSIAKGLALSLSIPFAPVPTLECIVYGVKQGLTLAAVEARKNAYFNAFFKDGNRLTEDKDSELSQITDEIACYSKDGEKIILTGYGSKSLYDALPENLRTNITLANENKGYAKELIAIAENKQLFSNDCTANLYSGPEYIRKTDAEIALAK

SEQ ID NO: 10427 - DNA, 873 bp, Unknown
  Obtained from environmental sample
  misc_feature (1)..(873): n is a, c, g, or t
gtggacaagccttcttacagggaaaaggtggaagtggcggaaggcataaaacccattaacggaaaagacgcgtatattcaatatttctttagaacggatcaaacgcaaataaaattaaaagaaggggctaacggacgggttaattttaaggaacttgatattattcagaatgtcgttcaaaatcaacctctcgcgaaaaagatacctcccgaagacggaatagacgggaaaacagttacggggaaacttcttccagcaagggccggaagcgatataccgatgcctgttggaacaaacgtgcatgtaaacgacgacggcgatactattctttcagatataaacggtcaggtaatagtcgcgaatggaaaaatcaacgtagagccgattttaactatagaaggcgatgtaaacctgaaaaccggaaatattattttccttggaacggttatcattacaggtaacgttgaagacacgttctccgtaaaagccgccggtaatatcgaagtaaagggaaccgtggcgaaagcggaacttgacgcggaaggcgatataattatttatcagggtatcaatggaaagagcggggagaaaaaaattcgcgccggccgttcaatttggtcgcgctttatcgagaacgcgaatgtggaagcggggaatatggttgtcgttaccgacggtataattaattcaaatgttgacgcgataaagagcattgtttgcatgggtaaacgcgcaagtataatgngcggtcgtctgcgcgcgggagaggaaataaacgccaaaggtcttggcaactcgacaagcggtaccgagacaatctgcgaagtcggttttgacccgcacagcaagctggaactggaacgcctttcttga

SEQ ID NO: 10428 - protein, 290 aa, Unknown
  Obtained from environmental sample
  DOMAIN (1)...(290): Protein of unknown function (DUF342)
  misc_feature (1)..(290): Xaa is any amino acid
MDKPSYREKVEVAEGIKPINGKDAYIQYFFRTDQTQIKLKEGANGRVNFKELDIIQNVVQNQPLAKKIPPEDGIDGKTVTGKLLPARAGSDIPMPVGTNVHVNDDGDTILSDINGQVIVANGKINVEPILTIEGDVNLKTGNIIFLGTVIITGNVEDTFSVKAAGNIEVKGTVAKAELDAEGDIIIYQGINGKSGEKKIRAGRSIWSRFIENANVEAGNMVVVTDGIINSNVDAIKSIVCMGKRASIMXGRLRAGEEINAKGLGNSTSGTETICEVGFDPHSKLELERLS

SEQ ID NO: 10429 - DNA, 696 bp, Unknown
  Obtained from environmental sample
  misc_feature (1)..(696): n is a, c, g, or t
ttgccgagggagtggcgcgggngaaaactcttcacctatcaatcctccgactcggagataaaaccgcaggcggtgatagagaaactatacgaggttacgaaaggcggcgcgatagtctgcacggaggtcggtcagcaccagatgtggaccgcccactattacattttcgacagaccgcgcactctcatctcctccggcggccttggcacgatgggcttcggtctgcccgcggcgatgggcgtggctctgggacgtcccgacaagacggtggtcaacatcgccggcgacgggtctatacagatgaacatacaggagctggccaccatcgcgatcaacaagatcccggtcaagctggtgatactgaacaacagttatctggggatggtgcgtcagtggcaagacttgttctacagcaagcgctacagttcgacctgcctgcgcaagggccgcgactgtcccggttgccacgatcccaaaggatgcgacaagcgatacgtgcccgatttcgtcgcgttggcgcagagctacggcatagccggattccgcgccgtgaagcccggcgaggtggagggcgtgctgcgtagcggtttggagacggacggcccggcggtgatggagttcgtggtctcgccggaagaaaacgtcttcccgatggtgccggccgggaagtcattagacgagatattggagggttga

SEQ ID NO: 10430 - protein, 231 aa, Unknown
  Obtained from environmental sample
  DOMAIN (42)...(207): Thiamine pyrophosphate enzyme, C-terminal TPP binding domain
  misc_feature (1)..(231): Xaa is any amino acid
MPREWRGXKLFTYQSSDSEIKPQAVIEKLYEVTKGGAIVCTEVGQHQMWTAHYYIFDRPRTLISSGGLGTMGFGLPAAMGVALGRPDKTVVNIAGDGSIQMNIQELATIAINKIPVKLVILNNSYLGMVRQWQDLFYSKRYSSTCLRKGRDCPGCHDPKGCDKRYVPDFVALAQSYGIAGFRAVKPGEVEGVLRSGLETDGPAVMEFVVSPEENVFPMVPAGKSLDEILEG

SEQ ID NO: 10431 - DNA, 405 bp, Unknown
  Obtained from environmental sample
  misc_feature (1)..(405): n is a, c, g, or t
atgaaccgctacgcgcagaagatgaaacgcttcgcggaaaagaaccgccaggctaaggagatcgcagacgcgtatatcgacaaatacggcagcgaaaacaggcagaccctcggcaaggttatcaatgagcagatgcgcgtcgctatattcgaccttatgggggagtttgacgaaatccgcagcgaccccgaaatgaaaagcgcggaagcggcggatatgctctataaaatatcgcggggattaaaagaacttgagcaggcggaaaaactgaacgccgagcgcacggaaagcatccggaaagccgcgcttgccgacgccgccgagatagcggggaaagaagcgaagtcagccgggcttgacgaagcagccgcggaagttatcaggcgcagaattctggggatataa

SEQ ID NO: 10432 - protein, 134 aa, Unknown
  Obtained from environmental sample
  misc_feature (1)..(134): Xaa is any amino acid
MNRYAQKMKRFAEKNRQAKEIADAYIDKYGSENRQTLGKVINEQMRVAIFDLMGEFDEIRSDPEMKSAEAADMLYKISRGLKELEQAEKLNAERTESIRKAALADAAEIAGKEAKSAGLDEAAAEVIRRRILGI

SEQ ID NO: 10433 - DNA, 384 bp, Unknown
  Obtained from environmental sample
  misc_feature (1)..(384): n is a, c, g, or t
ttgccgcatggaataagaggactgaaaacaaatcccatgactgaagacgtgctccttccctatcagaaaaaatggatcgaggacgaatccaaagtcaaagtctgggaaaaatcccggcgcatcggcgcgtcttatgtggaggcgcttgcgtccgtgctggaagccgcgaagtcaaaagaagcgggagggcagtcttcctactacctttcatattccaaagagatgacccagncatttgcgcgggactgcgcgttctgggcaaacacattcacgcagcggcgtctgaacttgaagaagtcgtgctncaggacgaggacaaggacatcaccgtgtaccgcatccattttgcttcaggctatgaaatttggtgcctgccatcggtag

SEQ ID NO: 10434 - protein, 127 aa, Unknown
  Obtained from environmental sample
  misc_feature (1)..(127): Xaa is any amino acid
MPHGIRGLKTNPMTEDVLLPYQKKWIEDESKVKVWEKSRRIGASYVEALASVLEAAKSKEAGGQSSYYLSYSKEMTQXFARDCAFWANTFTQRRLNLKKSCXRTRTRTSPCTASILLQAMKFGACHR

SEQ ID NO: 10435 - DNA, 492 bp, Unknown
  Obtained from environmental sample
  misc_feature (1)..(492): n is a, c, g, or t
atggacgaagttgtagtgggagacatggtttacctcgccgcaggagacatggtccccgctgatatgcgcataattaaggcaaaagacctttttataagccaggcgtcgcttacgggcgaaagcgaaccggtggaaaaattcgcaagccctgcgataagcgcaagccgtaatccgctggactacaaaaacctcgcctttatgggaaccaacgtaatctcaggttccgcgactgccgtcgccatcacagtcggcgatgacacatatcttggttctatcgcaaaacagcttcaaacaaaagctccgcctacaagttttgaaaagggagtaagctcggtatcatgggtgcttatccgcttcatgcttgtaatggttcctattgccttcctcggaaacggttttacaaagggcgactggctggaggcgttcctgttcactctttctgtcgcggtaggccctaccccgcatatgctgccgatgattgtctcggcttaa

SEQ ID NO: 10436 - protein, 163 aa, Unknown
  Obtained from environmental sample
  DOMAIN (1)...(163): E1-E2 ATPase
  misc_feature (1)..(163): Xaa is any amino acid
MDEVVVGDMVYLAAGDMVPADMRIIKAKDLFISQASLTGESEPVEKFASPAISASRNPLDYKNLAFMGTNVISGSATAVAITVGDDTYLGSIAKQLQTKAPPTSFEKGVSSVSWVLIRFMLVMVPIAFLGNGFTKGDWLEAFLFTLSVAVGPTPHMLPMIVSA

SEQ ID NO: 10437 - DNA, 309 bp, Unknown
  Obtained from environmental sample
  misc_feature (1)..(309): n is a, c, g, or t
atgattaccgattacggaatgagcgaccgtttccgcaatgtcgcgcttacttcgcgcggcatgagcatgaccgggcaggagcggcatgagccgtcttttcagcgcgaatacgcggaaagcacccagcagtatattgatgaggaaattgcgcggattattgatattgaatactcaaaggcaaggaagatactgcaggaaaggcgcgatgttttggacagtgtttcttccgcgcttctggaaaaagaaaccctcgacgaaaaagaatttaagagtttgatcggttttacttccgccaatatattcgcgtaa

SEQ ID NO: 10438 - protein, 102 aa, Unknown
  Obtained from environmental sample
  DOMAIN (1)...(92): Peptidase family M41
  misc_feature (1)..(102): Xaa is any amino acid
MITDYGMSDRFRNVALTSRGMSMTGQERHEPSFQREYAESTQQYIDEEIARIIDIEYSKARKILQERRDVLDSVSSALLEKETLDEKEFKSLIGFTSANIFA

SEQ ID NO: 10439 - DNA, 618 bp, Unknown
  Obtained from environmental sample
  misc_feature (1)..(618): n is a, c, g, or t
ttgcatttttgtaatagccgcgataattatcactttttcgcttgcgcctgttacggttccataccaaacgcgttccgtcacgcgtcatttcagagcgcttctgtcctatccaccgcgggcaatacaaccgtaaattatgaacaatggccttcccttgctaaaatggttctttttattctgatgttcataggcggctgttcgggttccacggcggggggcataaaagttatacgccatgttattctttggaaacagataaaaaatgaaacgcagcggatgctttacccccagggaattttcagaatacagataaacaaccgcgtcgggcgcaacgacgtagtatacggggtatcgggctttattttcatgtatctttttgtgatcatggctgttacgctcattacagctgcatcgggaattgaccttttctcttcgttaagcgcagctctttcaattaccggaaatataggagtaggtttcggagcaatcggccccggacataattacagtatatttgccgatcatatcaagtggcttttttcatttgtaatgctcgcgggccgccttgagatgtggaccgtgtttattttgtttacgcgaatatattggcggaagtaa

SEQ ID NO: 10440 - protein, 205 aa, Unknown
  Obtained from environmental sample
  DOMAIN (1)...(203): Cation transport protein
  misc_feature (1)..(205): Xaa is any amino acid
MHFCNSRDNYHFFACACYGSIPNAFRHASFQSASVLSTAGNTTVNYEQWPSLAKMVLFILMFIGGCSGSTAGGIKVIRHVILWKQIKNETQRMLYPQGIFRIQINNRVGRNDVVYGVSGFIFMYLFVIMAVTLITAASGIDLFSSLSAALSITGNIGVGFGAIGPGHNYSIFADHIKWLFSFVMLAGRLEMWTVFILFTRIYWRK

SEQ ID NO: 10441 - DNA, 612 bp, Unknown
  Obtained from environmental sample
  misc_feature (1)..(612): n is a, c, g, or t
atgaggggacagtgcgcttcaactcccttcagcagcaggtattcaatcagcaggggcgttatccaaaaaatgatggctttttccgagaaagcccgccgtgaaggacttttggccctggaagacgaactggaagaccttgacgatgaatttatgaaaaaaggcctgcgcctgatggttgacggtaccgacgcggcggtcatccgcgacctgatggaactggaattatcccagatgcaaaaccggcactccttcaagattaaactgttaaacatgtggacatcgcttactcccggtctgggaatgttaggtacggttatgggactggtaggtatgttgcggaaccttgatgataaagcgtctatcggccccaacatggccctcgcacttattaccacattctacggttcattgttttcaaacgtattctttgccgcatggtccagtaagttgagtgtttttgacgctgaggaaaccaacgtcagggaaatgattgttgaaggggtgctttccattcaagcgggtgaaaatacccgtattcttgcgctgaaacttatggcataccttgatcctgtcgcgcgaaggtcgctggaaagcgaaatgttaaaggattag

SEQ ID NO: 10442 - protein, 203 aa, Unknown
  Obtained from environmental sample
  DOMAIN (33)...(158): MotA/TolQ/ExbB proton channel family
  misc_feature (1)..(203): Xaa is any amino acid
MRGQCASTPFSSRYSISRGVIQKMMAFSEKARREGLLALEDELEDLDDEFMKKGLRLMVDGTDAAVIRDLMELELSQMQNRHSFKIKLLNMWTSLTPGLGMLGTVMGLVGMLRNLDDKASIGPNMALALITTFYGSLFSNVFFAAWSSKLSVFDAEETNVREMIVEGVLSIQAGENTRILALKLMAYLDPVARRSLESEMLKD

SEQ ID NO: 10443 - DNA, 321 bp, Unknown
  Obtained from environmental sample
  misc_feature (1)..(321): n is a, c, g, or t
atggcaaagaaaaagaaagaaacagaggcgccgcccagtacatggttaaacacgtattcagacatgattacgctgtgtctctgcttcttcgtcatattgttcaatcccgatgacactacccaggctcaactggacgcgatatccacctcgatgcagacgggaggcctgggcgctctggccggcggccttaccctgtcatcgggccgtaacgccgatctgggcaacactattatgtcgctgccgtcaatggaacggggccgttccctgggaaccgccctgcgcaggcgatcagcgtcttttcaccggagattcgtccnataa

SEQ ID NO: 10444 - protein, 106 aa, Unknown
  Obtained from environmental sample
  misc_feature (1)..(106): Xaa is any amino acid
MAKKKKETEAPPSTWLNTYSDMITLCLCFFVILFNPDDTTQAQLDAISTSMQTGGLGALAGGLTLSSGRNADLGNTIMSLPSMERGRSLGTALRRRSASFHRRFVX

SEQ ID NO: 10445 - DNA, 630 bp, Unknown
  Obtained from environmental sample
  misc_feature (1)..(630): n is a, c, g, or t
atgatgatgatgagtgacggcgccctttctcaggccgaaatagacgcattactggcaggagtagactccggcggcggcggcgccgcgacagcggtagcaagcagcagttttccggaaacgggacggaaagcgctggaagcatttttcggcgaaaccacagacacgcagacaggcatcctggctacgatgaccggagcggaagccagcctgaaagacccgcaagttacgattaacggacgggacacctttcttgacgggcttgccgaaaaggttactgtagtaaaagttgactttaattccggcttccccggcgaacatttatttattttccccgaagacgcggccagagccatcgtcagcatgctgaacaaagaagaaaatgtcgaacttgacgaaatggcaatgtcggtaataggcgaagtcgtttcccagatgattggacatcagataaccgctttgtccggcaagaccggtaacaagtccatttcttctgttccgcctgaggcaaccaatattcccaaggcggttgtcgcattgccatcaggggattttgccggaataacctatcaattaagtctgggagaaggaaaaaatttccccatgtgggaagtactggctcggccgatctga

SEQ ID NO: 10446 - protein, 209 aa, Unknown
  Obtained from environmental sample
  misc_feature (1)..(209): Xaa is any amino acid
MMMMSDGALSQAEIDALLAGVDSGGGGAATAVASSSFPETGRKALEAFFGETTDTQTGILATMTGAEASLKDPQVTINGRDTFLDGLAEKVTVVKVDFNSGFPGEHLFIFPEDAARAIVSMLNKEENVELDEMAMSVIGEVVSQMIGHQITALSGKTGNKSISSVPPEATNIPKAVVALPSGDFAGITYQLSLGEGKNFPMWEVLARPI

SEQ ID NO: 10447 - DNA, 837 bp, Unknown
  Obtained from environmental sample
  misc_feature (1)..(837): n is a, c, g, or t
gtgccggggagcctcatttcccttacgctctctttggtgtcgggcttagagggcgacatgtttcttatcatgacagaaaaggtcgccggatttctggtggatctgatgatgatgggcgacgggtcggcgccctacacggaagaatcgaaagacgcgatatcggagctgttcaaccaagtgatgggcgcgtacagcacggcgctcggcggcgatctgggcgaatccgtctccgccggaaacgtctccgtctccgagttcaatttcgccagcccgcctttcgacgcggcctcggcggacatgggactcgcgaagttttccgtagccggtttggtcaactcctatatagcggtgctgataccgaacgccttcggcgacaatatagtagccacaaaggtgtcgaaatcctccccggccatggccgacctgaacgtagggataagccaaagcgagatggacgcgctgacgaacatgtcgatgtcgagcatcaacgacgtcggcggcggcggcggctcgttcggcatgcagcagttcgccccgcctccgcctccgccgaggaagggcacgtacgacgggccgaaagagaatatagacctgctgttagacgtggagttagacataaacatagaattaggccagtcggagttgtcaatcaagagaatattggaacttgcgccggggtctattgtggaactcgacaagatggcgggagagccggtggacttgatagtcaacaacaaggttgtggctaagggagaagttgtggtcgtcgacgagaatttcggtattaggatcgtgtcgttggtgtctgcggaagatagggtcaagagcttgaagtga

SEQ ID NO: 10448 - protein, 278 aa, Unknown
  Obtained from environmental sample
  DOMAIN (195)...(271): Surface presentation of antigens (SPOA) protein
  misc_feature (1)..(278): Xaa is any amino acid
MPGSLISLTLSLVSGLEGDMFLIMTEKVAGFLVDLMMMGDGSAPYTEESKDAISELFNQVMGAYSTALGGDLGESVSAGNVSVSEFNFASPPFDAASADMGLAKFSVAGLVNSYIAVLIPNAFGDNIVATKVSKSSPAMADLNVGISQSEMDALTNMSMSSINDVGGGGGSFGMQQFAPPPPPPRKGTYDGPKENIDLLLDVELDINIELGQSELSIKRILELAPGSIVELDKMAGEPVDLIVNNKVVAKGEVVVVDENFGIRIVSLVSAEDRVKSLK

SEQ ID NO: 10449 - DNA, 381 bp, Unknown
  Obtained from environmental sample
  misc_feature (1)..(381): n is a, c, g, or t
ttggagcgcgattatttattcgccgcgctttgggcatcgatatttccctgtttgaggccgccgttgtggaagggggcctccgccatgcagagggtgtggaatataacccttccggccatcaggccggtgatagtcatagtggtattgctcaggattggaaccattcttgacgcgggatttaaccagatgttcatgctgtacaccgttcccgtttacagtgtggcggatattatcgacacatgggtgtaccgtcagggcctgttgaattttcagttcgggttggcgaccgcggtcggcattttcaaaggcgctatagggcttctcctgcttatcgtgagcaataatctggtgaagaaattcggcgagtcgtctttattttaa

SEQ ID NO: 10450 - protein, 126 aa, Unknown
  Obtained from environmental sample
  misc_feature (1)..(126): Xaa is any amino acid
MERDYLFAALWASIFPCLRPPLWKGASAMQRVWNITLPAIRPVIVIVVLLRIGTILDAGFNQMFMLYTVPVYSVADIIDTWVYRQGLLNFQFGLATAVGIFKGAIGLLLLIVSNNLVKKFGESSLF

SEQ ID NO: 10451 - DNA, 534 bp, Unknown
  Obtained from environmental sample
  misc_feature (1)..(534): n is a, c, g, or t
atgatgcagggcgatattcgcattgaatcggaattgggcaaaggagccacatttatcgttacagtcaaagcagatataaaaaagcaggatactgcatcggcccaatcggattcggctgagacatccacggcatccgcagaggacttcgaggggaaacaaatactattggtagaggatgtggaaattaaccgggaaattgtcattgccttgcttgaagattttaaaattgtaattaccgaagcggaagacggacaggaggcggttgacaaatttgccgcaaatcctgaaaaatttgatttaatctttatggatatccatatgcccggcgtggacggctatgaatcaaccaaattaattcgcgctcttgatcatcccaaggctaaaaacattccgataatcgccatgacagccaacgtgttcaaagaggacgttgaacgctgcctggcggcaggaatgaacggccacctgggaaagccactggattttaacgatgtggtaaaagttttaaacaaatatttaaggaaaaaccaatga

SEQ ID NO: 10452 - protein, 177 aa, Unknown
  Obtained from environmental sample
  DOMAIN (52)...(170): Response regulator receiver domain
  misc_feature (1)..(177): Xaa is any amino acid
MMQGDIRIESELGKGATFIVTVKADIKKQDTASAQSDSAETSTASAEDFEGKQILLVEDVEINREIVIALLEDFKIVITEAEDGQEAVDKFAANPEKFDLIFMDIHMPGVDGYESTKLIRALDHPKAKNIPIIAMTANVFKEDVERCLAAGMNGHLGKPLDFNDVVKVLNKYLRKNQ

SEQ ID NO: 10453 - DNA, 570 bp, Unknown
  Obtained from environmental sample
  misc_feature (1)..(570): n is a, c, g, or t
atgtcgatcaccgtccccgccggttggtccgactgggaggccatggttcaaatcgcggttaaaggtttgcgcgccgccggcatggacgtgcgcgagggccccgtcgacgccggcctctactggcccgcgttgccgtccggcagcttcgacctgatcatgcacaaacccgccgcgtcggtcacgccgtcgctcccgtggaaccgcttcgaggcggtcatgtcctcgcgtaactgggtgcccgtgggcggcgacaacaagatgaacgagaaccagggccgctacaacagccccaagagcgaaacgtacaatccgagggtcgacgaactgcttaggaagatacccacgcttgaaaaggaagaggagttgacggccgcgtaccgcgagttgaacaaaatattcatgaaagaccagccgtcgctcccgctttgctacctgccggaacagttttacgagttcagcagcaaggtgtggaagaattggccgacgagcgcgaatccgtacgcgccgccgctattgccgtgggtcggggcgagcacgaagattctgtggaatcttcagccggccaagtag

SEQ ID NO: 10454 - protein, 189 aa, Unknown
  Obtained from environmental sample
  misc_feature (1)..(189): Xaa is any amino acid
MSITVPAGWSDWEAMVQIAVKGLRAAGMDVREGPVDAGLYWPALPSGSFDLIMHKPAASVTPSLPWNRFEAVMSSRNWVPVGGDNKMNENQGRYNSPKSETYNPRVDELLRKIPTLEKEEELTAAYRELNKIFMKDQPSLPLCYLPEQFYEFSSKVWKNWPTSANPYAPPLLPWVGASTKILWNLQPAK

SEQ ID NO: 10455 - DNA, 582 bp, Unknown
  Obtained from environmental sample
  misc_feature (1)..(582): n is a, c, g, or t
atgaccccggacaaactgagaatgcacacccccgacctggccgatgagaacttcgccaagctggccgaactgttcccaaacgccgtcacagaggcggtcgacgaaaacggcagggtagtccgcgccatagacaaggacgtgctgcagcaggagataaacgcccacgtcgtggagggccgcgaggagcggtaccaattcacctggcccgacaagaaaaaggccatgctgcggaccaacgcgcccatagccgcttcactgagaccctgccgcgaagaaagcgtgaacttcgacgaaaccgagaacatctacgtcgagggcgacaacctggacgtgctgaagctcctgcgcgagacctacctgagccgcgtcaagatgatctacatagaccccccgtacaacacggggaacgactttgtgtacgacgacgacttcgccggggacacagacgagtttctgctgcgagacaggcagtatgacgaacagggcgaccgcctagttgtcaaccgcgacaccaacggccgcttccacaccgactggctgaacatgatgtaccctaggctgaggatagctagggatttgtga

SEQ ID NO: 10456 - protein, 193 aa, Unknown
  Obtained from environmental sample
  misc_feature (1)..(193): Xaa is any amino acid
MTPDKLRMHTPDLADENFAKLAELFPNAVTEAVDENGRVVRAIDKDVLQQEINAHVVEGREERYQFTWPDKKKAMLRTNAPIAASLRPCREESVNFDETENIYVEGDNLDVLKLLRETYLSRVKMIYIDPPYNTGNDFVYDDDFAGDTDEFLLRDRQYDEQGDRLVVNRDTNGRFHTDWLNMMYPRLRIARDL

SEQ ID NO: 10457 - DNA, 909 bp, Unknown
  Obtained from environmental sample
  misc_feature (1)..(909): n is a, c, g, or t
atgatggatgtgagggatatttacgggcgttattatctggagaaaaaaggagttgatgttccgccaactatgcgctgggacggtgttttaaccacaggcgagatcggaccggacggaaaatattatttctccatcagcgccgcggacgaaaacggcaatgtcggaaccagccgcgactatgaagtaatattaaagaacacgccgccgcaggtcgctatagacaacataaaccttaatgatcggatttttgatccttcaagcgggaacagaacatccattaacatcgtttcccgcggcactgtggaagataaatgggaaagcggcatttacaattccgaaggcaagctgatacggacattcgcgcccaaaaacgggagtccccagccgcaggtttgggacggcaaaaccgactcaggcgctcttgccccggacggcgcctatactttcagaatagcggccaccgacagggcgcagaacactggatttgccgttatgagtaatatcgttgtggatacaaaaacagtcggcgcaatactaaccgcgtcggtaaacgcgattgccccaaaaacaggtcaaaccgcggagttggtgcgctttaatgaccgtcttaaccggacggacggtataggttcatggaagctggaaataaaaaatgacaagggcgatattgtaaaaatttttgagggaagcggtgcctcccagggaggcattggaaggcctccggaaaactttaactggaacggcttgtccgacaatggctcgatccgcgagggaatggtttatcctgagcttaccgtanactaccttgacggccatgtcgcanatactannatcacgccgatattgattgactcaacccggcccgttttgggtttatcatccacgccccgatctgttcagtcccgataa

SEQ ID NO: 10458 - protein, 302 aa, Unknown
  Obtained from environmental sample
  misc_feature (1)..(302): Xaa is any amino acid
MMDVRDIYGRYYLEKKGVDVPPTMRWDGVLTTGEIGPDGKYYFSISAADENGNVGTSRDYEVILKNTPPQVAIDNINLNDRIFDPSSGNRTSINIVSRGTVEDKWESGIYNSEGKLIRTFAPKNGSPQPQVWDGKTDSGALAPDGAYTFRIAATDRAQNTGFAVMSNIVVDTKTVGAILTASVNAIAPKTGQTAELVRFNDRLNRTDGIGSWKLEIKNDKGDIVKIFEGSGASQGGIGRPPENFNWNGLSDNGSIREGMVYPELTVXYLDGHVAXTXITPILIDSTRPVLGLSSTPRSVQSR

SEQ ID NO: 10459 - DNA, 849 bp, Unknown
  Obtained from environmental sample
  misc_feature (1)..(849): n is a, c, g, or t
atggagcttcgcgtcggaaccggccttatggggcgtatttttaacgggcttggggagcctattgacggatacggaagcatcttttcgtcaaaaacttacgacattaacggccttccgataaacccttacgcccgcacctacccgcgcgattttattcaaacaggaatttcttcgatagacggaatgaacactctaatacgaggacagaaacttccgatattttcaggtaacggccttcctcataaccgccttgccgcgcagattgtgcgtcaggcgaaaattctttctttcgacggcagcgaaaaggcgaaagcctccgaacaatttgtaattgtcttctgcgcgatggggataaaaaacgacgtagccagattctttcttgatgattttgagcaatcgggagttctttcaagggttgtcgtgtttctttctcttgcggactccccctcgcttgaaaggcttatcgcccctcgctgcgcgcttaccgccgccgaatacttagcttatgaaaaaaatatgcacgtccttgtcgtcatgacagacatgacaaattactgcgaagcgttacgcgaagtttcctcgattcgcggggaagtgcccagccgcaaagggtaccccggctatctttactccgaccttgcctcgctttacgaaagggcgggaaaaataaaaggggcgaccggctcaataacacagatacccattctatccatgcccaacgacgatatcagccacccgataccggacttatcgggttacataacggaggggcagattgtccttgatcgggagcttttccagcgcggcatatacccgccggtcgccgggcttccagcctttcacgtttga

SEQ ID NO: 10460 - protein, 282 aa, Unknown
  Obtained from environmental sample
  DOMAIN (54)...(281): ATP synthase alpha/beta family, nucleotide-binding domain
  misc_feature (1)..(282): Xaa is any amino acid
MELRVGTGLMGRIFNGLGEPIDGYGSIFSSKTYDINGLPINPYARTYPRDFIQTGISSIDGMNTLIRGQKLPIFSGNGLPHNRLAAQIVRQAKILSFDGSEKAKASEQFVIVFCAMGIKNDVARFFLDDFEQSGVLSRVVVFLSLADSPSLERLIAPRCALTAAEYLAYEKNMHVLVVMTDMTNYCEALREVSSIRGEVPSRKGYPGYLYSDLASLYERAGKIKGATGSITQIPILSMPNDDISHPIPDLSGYITEGQIVLDRELFQRGIYPPVAGLPAFHV

SEQ ID NO: 10461 - DNA, 396 bp, Unknown
  Obtained from environmental sample
  misc_feature (1)..(396): n is a, c, g, or t
atgaagacgaccacgacaccaggggaaaactgtaacgttttaatattacggtattttcttttaggatatcaaatgcccattttccttaatatggcggcgcttcttgcggaagcggatctttatttatacgatacgcctaaccgctctatatggggagacaatntgatacgctggacttttggcttattattaaatttttccataactaaaaatattgatattgccttactaacccagttctggacgcggaggaactttctggaatcagacaggaatagcttatattaccgcgaagactggaaggacttatattaccgcgaaaggacattagacacttcaaaaccgcttcatctggaattcttccgcgtagccgccgctttaactctgaagttatag

SEQ ID NO: 10462 - protein, 131 aa, Unknown
  Obtained from environmental sample
  misc_feature (1)..(131): Xaa is any amino acid
MKTTTTPGENCNVLILRYFLLGYQMPIFLNMAALLAEADLYLYDTPNRSIWGDNXIRWTFGLLLNFSITKNIDIALLTQFWTRRNFLESDRNSLYYREDWKDLYYRERTLDTSKPLHLEFFRVAAALTLKL

SEQ ID NO: 10463 - DNA, 849 bp, Unknown
  Obtained from environmental sample
  misc_feature (1)..(849): n is a, c, g, or t
ttgcttgatagtgctaatgacacaaggggaacgncggtgggcagaccccctacccttgcgggtaagcgggtcatggtagagttctcaagtcccaacacaaacaagccgcttcaccttgggcacctccgcaacgacgtgctgggcgaaagcatctcccgaatcctctccgcntgcggtgcggaagtccgcagggtctgcatcatcaacgacaggggcattcacatctgcaagtccatgctggcctacaaagagcagggcgagggcaaaaccccggaatccgagggaataaaaagcgatcgcttcgtgggggactggtatgtaaggttcagccagggcctgaaagaggagaccgaagctcttgagaaggaaaaagggctgagcaaaaaagaggccgaagcccaggctcccctgttgctcagggcacaggaactgctccgcaaatgggaagccggggaaagcgaaactgtggaactctggaaaaagatgaacgcatgggccattgacggctggaaggagacttacaaacgcaccggcgtcttcttcgacaagtattattacgaaagccagacctacctgcttggcaaagacgaaattttaaagggccttgagaaaggtttcttttaccgccaggaagacggcgctgtcgcggtggaccttacggcggaaaagctggacaaaaaaatccttctgcgcagcgacggcacttcgatttacataacccaggactttggaaccgccgtcaaccgccacaaagactggccctttgacaagctggtctatgtggtcggctccgaacagcagtaccatttcaaggtactcttcgttcttttggaaaagcntgggctatga

SEQ ID NO: 10464 - protein, 282 aa, Unknown
  Obtained from environmental sample
  DOMAIN (4)...(282): tRNA synthetases class I (R)
  misc_feature (1)..(282): Xaa is any amino acid
MLDSANDTRGTXVGRPPTLAGKRVMVEFSSPNTNKPLHLGHLRNDVLGESISRILSACGAEVRRVCIINDRGIHICKSMLAYKEQGEGKTPESEGIKSDRFVGDWYVRFSQGLKEETEALEKEKGLSKKEAEAQAPLLLRAQELLRKWEAGESETVELWKKMNAWAIDGWKETYKRTGVFFDKYYYESQTYLLGKDEILKGLEKGFFYRQEDGAVAVDLTAEKLDKKILLRSDGTSIYITQDFGTAVNRHKDWPFDKLVYVVGSEQQYHFKVLFVLLEKXGL

SEQ ID NO: 10465 - DNA, 759 bp, Unknown
  Obtained from environmental sample
  misc_feature (1)..(759): n is a, c, g, or t
atgatcagatcggccgagggcgagccttttgaaatgccgcttgtggtgcgggtttcggtcggcaataaatacggcgcgcagcacagccaggactggacggcgatgacagcccacattcccgggcttaagtcctattttcccgctacaccctacgacgcgaaagggatgttaaatctggccctgcgcggcaccgatccggtgatcttctttgaaagccagctcctgtacgacatgagcgaacattttgagaagaacggcgtccccgaaggctattacgaagttcaggaaggtgaacccgccgtccgcaaacagggtacggacctcaccatcgctaccatcggggcgaccctctacacggccatgaaggcggcggacaaactggaaagccaattcggcctttcggtggaagtgatcgacctgcgttttatcaacccgctgaattacgaaaaaataattgagtcggtaaagaagaccggaaagctcctgttggccagtgacgctgccgagcggggttcattcctccatacggttgccagcaacgttcaaaccctggcctttgattatctggacgctcctgtggcggtaacgggaagccgcaactggatcaccccggcggctgaaatggaacatctgtacttcccccaggttgactggatcattgacgcgattcacgagcgcatcctgcccctgtccggttacagccccgttacggtgcaaactaccggtgatgtgctgcggaagaaccgtctggnggtatag

SEQ ID NO: 10466 - protein, 252 aa, Unknown
  Obtained from environmental sample
  DOMAIN (97)...(219): Transketolase, C-terminal domain
  misc_feature (1)..(252): Xaa is any amino acid
MIRSAEGEPFEMPLVVRVSVGNKYGAQHSQDWTAMTAHIPGLKSYFPATPYDAKGMLNLALRGTDPVIFFESQLLYDMSEHFEKNGVPEGYYEVQEGEPAVRKQGTDLTIATIGATLYTAMKAADKLESQFGLSVEVIDLRFINPLNYEKIIESVKKTGKLLLASDAAERGSFLHTVASNVQTLAFDYLDAPVAVTGSRNWITPAAEMEHLYFPQVDWIIDAIHERILPLSGYSPVTVQTTGDVLRKNRLXV

SEQ ID NO: 10467 - DNA, 528 bp, Unknown
  Obtained from environmental sample
  misc_feature (1)..(528): n is a, c, g, or t
ttgagcaaaaaagctcaagacacacttatatcggctgcaaatatgctcaaggatatagcagaaaattccgcttatggaatacccgtaaataaatggaattttgtttggggttcaaattccgctgttgcaaataacggcattttgcttttgcacgcatattatttaacaaaaaacaaaagctatttagatgccgctcaaagagccttggattatcttttgggagcaaaccccatagatataagttttgtgaccggatacggcaacagaactccaatgtctccgcaccacagaccatccgaaggagatggaattacagaacctgtgccgggtatgctggttggcgggccgcacgagggtgggcaagatgttaaaccaaatgggcgttgcgaaaactatgtgcaaaaaggcaaacccgccctctcctatttagaccacgactgcagctatgcaaccaatgaagttgccataaactggaacagccccttagtttacctctccggtgctttgcactttttgaacacaaaatga

SEQ ID NO: 10468 - protein, 175 aa, Unknown
  Obtained from environmental sample
  misc_feature (1)..(175): Xaa is any amino acid
MSKKAQDTLISAANMLKDIAENSAYGIPVNKWNFVWGSNSAVANNGILLLHAYYLTKNKSYLDAAQRALDYLLGANPIDISFVTGYGNRTPMSPHHRPSEGDGITEPVPGMLVGGPHEGGQDVKPNGRCENYVQKGKPALSYLDHDCSYATNEVAINWNSPLVYLSGALHFLNTK

SEQ ID NO: 10469 - DNA, 771 bp, Unknown
  Obtained from environmental sample
  misc_feature (1)..(771): n is a, c, g, or t
gtgtatgacccttcaaagaaattctgcagctcaaacgaggcttacagcaaatgcggtggaaaggagtatgatccagcggaacaattctgtattcgtgacgaagttcagaaaaaatgcggcggaaatggatacgaccctttggagaaattctgcactgcgaaaggcgagcttcgcgataaatgcggcaatgatggatatgactctgagaagcaattctgttctgccgatagcgtagtttatgataaatgcaatggcagcgaatacgacactggaaaactgttctgtgattccagagacaataaaacttacaaacatattaaaataggtgagtcggtttggatggcggagaatttgaattatgaagcaaaaaattcttcgtgttatgataacaaaccagcaaactgcaccaaatatggcaggctttacgattggaatacggctgcaaaagcttgtccgcgaggttggcatttgccaagcggcaaggaatgggatgctttagctagtgccgatgtagcaggcaagaaattgaaagctaagaaaggctggaacagttttccaaaaatatctggaacagatgcttttggttttgcagccttaccgggcggctatctccagaaaaataaattcctagatgccggcaaagagggcaaatggtgggaagcgagcaaaaaaggcgatttgcggtctctaaaatacaacagtgataaaggaacccaagactcanatcgcaataaattcggtagccactctgttcgttgcgtgaggaattag

SEQ ID NO: 10470 - protein, 256 aa, Unknown
  Obtained from environmental sample
  misc_feature (1)..(256): Xaa is any amino acid
MYDPSKKFCSSNEAYSKCGGKEYDPAEQFCIRDEVQKKCGGNGYDPLEKFCTAKGELRDKCGNDGYDSEKQFCSADSVVYDKCNGSEYDTGKLFCDSRDNKTYKHIKIGESVWMAENLNYEAKNSSCYDNKPANCTKYGRLYDWNTAAKACPRGWHLPSGKEWDALASADVAGKKLKAKKGWNSFPKISGTDAFGFAALPGGYLQKNKFLDAGKEGKWWEASKKGDLRSLKYNSDKGTQDSXRNKFGSHSVRCVRN

SEQ ID NO: 10471 - DNA, 534 bp, Unknown
  Obtained from environmental sample
  misc_feature (1)..(534): n is a, c, g, or t
gtgcgcatcgncttttttgccaataggcatgaagaagcagtgtggctctccaagacgaaaaaatattattttgatctggactctgttagggtgccgtttgatgaggcgacaaaagagatgtacaaaaaggataagcgtctcaatcccgaaaatattgatagaggaaaaaatcctaccaatgtttgggaaatagggaggctaaatggcaatgcaagggagagggttggtcatctaacacaaaagcctatcgaacttatccggcgttttgttaaagctctatcctttgaaggggcgatagttttagatttttttgctggctcaggaacaactgggcgtgtttgtattgaagaacgacggcattcactcttagtagattcagacagtaaattgtacaattatttagacaaacatattgctcagattgaattgaatctgcttctgccagaatataaattaattaaaggctcaagcattgacgctgtacttgaaaaaattgcttttgtgaatcgacaaactcaaaaaaatcaattgtga

SEQ ID NO: 10472 - protein, 177 aa, Unknown
  Obtained from environmental sample
  DOMAIN (3)...(136): DNA methylase
  misc_feature (1)..(177): Xaa is any amino acid
MRIXFFANRHEEAVWLSKTKKYYFDLDSVRVPFDEATKEMYKKDKRLNPENIDRGKNPTNVWEIGRLNGNARERVGHLTQKPIELIRRFVKALSFEGAIVLDFFAGSGTTGRVCIEERRHSLLVDSDSKLYNYLDKHIAQIELNLLLPEYKLIKGSSIDAVLEKIAFVNRQTQKNQL

SEQ ID NO: 10473 - DNA, 711 bp, Unknown
  Obtained from environmental sample
  misc_feature (1)..(711): n is a, c, g, or t
ttgttgcctccgactccaaccgactccaaccgacccccaaagacccctaaaataccccttttcttatgtgaaattttatgtgaaaaaaaagacccaaagcgacccacaggaagcccaaaggccctgaaaagtgttgaatcgcatagctttttgcaaatacggcctgtcgtccgcgaaaaaagaagcaagaaggagatttttcacatgaaagccgagccgaccaagtaccccggagtcagttaccgcgtaaagaaaaatggcgataaggtcttttatatccgctactggcttagtgataatgagaatgtgacgcagacgctctttgaggaatccgtaggacttgcttctagaggtatgacagcggcaatcgccaactccattaaaggcgagaaggtcagaggcagggttctccctaaaaaagaggtgcgtaaacaggcgaaagaggccaagctacgcgaggaaaagccggtaatgcgctggacgattgcacgtatctatgacgagttaagagaaaaattgaacaacgccaaacgctatgaggacgtatatttacggcatttttctgaattccatgatcgagagccgcatgaaatcactcagcttgaaatagacgcgctacgcgctcgacttatccagaaatcaaatcaaacagcagacacgccctctccgttctttcttcgattatcaattatggagttcaagcccgactaa

SEQ ID NO: 10474 - protein, 236 aa, Unknown
  Obtained from environmental sample
  misc_feature (1)..(236): Xaa is any amino acid
MLPPTPTDSNRPPKTPKIPLFLCEILCEKKDPKRPTGSPKALKSVESHSFLQIRPVVREKRSKKEIFHMKAEPTKYPGVSYRVKKNGDKVFYIRYWLSDNENVTQTLFEESVGLASRGMTAAIANSIKGEKVRGRVLPKKEVRKQAKEAKLREEKPVMRWTIARIYDELREKLNNAKRYEDVYLRHFSEFHDREPHEITQLEIDALRARLIQKSNQTADTPSPFFLRLSIMEFKPD

SEQ ID NO: 10475 - DNA, 411 bp, Unknown
  Obtained from environmental sample
  misc_feature (1)..(411): n is a, c, g, or t
gtgacggttaaaaaaacgtttaagaaaaagacggtcgataaagttgacaaagctgacaaacctgacgagcccggcgagcccggcggcgttttggccggtaaggagctggtagacgcggtcgtctccgttctggaggagaagctggccgaaaagatcgctgtgattgatttgaggaaagtgtctgcggcggcggactggttcgtagtatgctcaggggacaacacatcacacacaacggcggtggcaaacgaggtaataggcacgctgaaacaacggcacaagaccgcgccttggcactacgaaggggtggaggaggggcggtgggcgctgattgactatacggacgtggtggtgcacgttatgctggaagacgttagggagtattataatttggaggggctatggaaatag

SEQ ID NO: 10476 - protein, 136 aa, Unknown
  Obtained from environmental sample
  DOMAIN (34)...(136): Domain of unknown function DUF143
  misc_feature (1)..(136): Xaa is any amino acid
MTVKKTFKKKTVDKVDKADKPDEPGEPGGVLAGKELVDAVVSVLEEKLAEKIAVIDLRKVSAAADWFVVCSGDNTSHTTAVANEVIGTLKQRHKTAPWHYEGVEEGRWALIDYTDVVVHVMLEDVREYYNLEGLWK

SEQ ID NO: 10477 - DNA, 819 bp, Unknown
  Obtained from environmental sample
  misc_feature (1)..(819): n is a, c, g, or t
atgatagaaacagcgccttatttatcctcggatgccgttccccagatcgcaaaaatcgccctgcnnggtttcgcggcctttgccgtactgcccaacgcgggcgtttntgcggtggagcttacggcggcgggggcggcgggcatcagcggagtgggggcggtaacctttcccggcgccggcgtgttaagcgatctgcgctacgaaccgttcagcttccggttcctgcttctgcttgttggcgagggcataatcggtataataatcggcttttatctgacgttgattttcgctactttttccacggccggccagtttttctccctgcagatgggccttggcgcgtcggaaactttcgaccccctggcgcagattgaaaacccgctgatgggccaatactttaacctggtttccatgctggttttcctggtcataggcggtttcaggcagttgtttctgggcggtttctggcgttccgtacagagcattaatatcgcaatgcttattgaaggcaagggcccggttattaccatgatggcgtcggggcttgccagactgttcctcgacgctatggtcatatccctgccaattcttgggacccttttccttacctcgctttcaaccgggcttatttccaaagccgcgccccagatcaacatactttcggaaggtttccccattgcgatcattaccgcgtatcttttgctgttagcgacccttcccttcatgttagaaaccttttcacatgttatagacgcgggttttgccgacatacggcgcctctacaccatgattggtcagcagatcggaggcagcttatga

SEQ ID NO: 10478 - protein, 272 aa, Unknown
  Obtained from environmental sample
  DOMAIN (11)...(258): Bacterial export proteins, family 1
  misc_feature (1)..(272): Xaa is any amino acid
MIETAPYLSSDAVPQIAKIALXGFAAFAVLPNAGVXAVELTAAGAAGISGVGAVTFPGAGVLSDLRYEPFSFRFLLLLVGEGIIGIIIGFYLTLIFATFSTAGQFFSLQMGLGASETFDPLAQIENPLMGQYFNLVSMLVFLVIGGFRQLFLGGFWRSVQSINIAMLIEGKGPVITMMASGLARLFLDAMVISLPILGTLFLTSLSTGLISKAAPQINILSEGFPIAIITAYLLLLATLPFMLETFSHVIDAGFADIRRLYTMIGQQIGGSL

SEQ ID NO: 10479 - DNA, 402 bp, Unknown
  Obtained from environmental sample
  misc_feature (1)..(402): n is a, c, g, or t
ttgactctcgcggtggttgcggcggcaatttacgggttggtctatttcctcaaattcagacgggcttcacgcgataaaagggaattggatcccttccttaaaatactcgcaagcatcccgcttggggcaagccggggcgtacatgtgatctctgtcgggccgcaggcatggcttgtgggttccgccgaaaccggggtaaatctgataagcgaaatcggggacaaggacacaattaatgcgatgctccttgaggattcaaagagaattgccgcaccaccaacaggtggtgcgcctctgcttgattttaaagctatccttggaaagcttggaatttccacaaagaacgaaggttccggcccggagcaaatacgcaagcgcagcgaaaggctcaaagggctataa

SEQ ID NO: 10480 - protein, 133 aa, Unknown
  Obtained from environmental sample
  misc_feature (1)..(133): Xaa is any amino acid
MTLAVVAAAIYGLVYFLKFRRASRDKRELDPFLKILASIPLGASRGVHVISVGPQAWLVGSAETGVNLISEIGDKDTINAMLLEDSKRIAAPPTGGAPLLDFKAILGKLGISTKNEGSGPEQIRKRSERLKGL

SEQ ID NO: 10481 - DNA, 774 bp, Unknown
  Obtained from environmental sample
  misc_feature (1)..(774): n is a, c, g, or t
ttgatcgagagttacacaaaaaaatttcacacttttaggattgtcgcttccgctgagaatattcctgcggcgattgatgaaaaggcaagagcggatgcggaaagttttatttccaggttttccggtttgaaagttaacagaagcttgcctgatactgaattttggtatttgtatagaaatgaaaaagtgcaaaataatttctcggtttttatgaaacgtcttacactgcgccattcatgggaaaaaacacttcacaagggagaactgccgccgcctctcgcttggatattatgccgtcttgcacggcttatccacagcgatattgttctggatccgttttgcggttacggctcaattcccgacgcggcgttaaagcattttcatataaataaattcatcgcctgcgacaataacagggaagccgctttgtacacaaaggcaagatttaacaaacgcaagaaagacgactttgttttttacgaaagcgatttttccgcgctaccttctcttatcgccgaaaaaagcatagacgcgattgttacagaccctccgtggggagagtacaaggaaattaataaaacttcattttatagagaaatgtttgatatttttcataaattgcttaaagacgacggaaggattgtgttgttatacgcaaataattttgattttgcgaatgaagtaccaaatacttttaaacttgaagccagaactccaatactgctttcaggtaaaaaggcggctatttttcagtatacctacaagctttcatga

SEQ ID NO: 10482 - protein, 257 aa, Unknown
  Obtained from environmental sample
  DOMAIN (77)...(248): Putative RNA methylase family UPF0020
  misc_feature (1)..(257): Xaa is any amino acid
MIESYTKKFHTFRIVASAENIPAAIDEKARADAESFISRFSGLKVNRSLPDTEFWYLYRNEKVQNNFSVFMKRLTLRHSWEKTLHKGELPPPLAWILCRLARLIHSDIVLDPFCGYGSIPDAALKHFHINKFIACDNNREAALYTKARFNKRKKDDFVFYESDFSALPSLIAEKSIDAIVTDPPWGEYKEINKTSFYREMFDIFHKLLKDDGRIVLLYANNFDFANEVPNTFKLEARTPILLSGKKAAIFQYTYKLS

SEQ ID NO: 10483 - DNA, 777 bp, Unknown
  Obtained from environmental sample
  misc_feature (1)..(777): n is a, c, g, or t
atgacagatcggccgagagatgccctcgcgtcccctcacgtccggcacgtccaccaccacctggcggtcgaagcgccccgggcgcagaagcgccgggtcgagcacgtcgggcctgttggtcgcggctatcagtatcacgccggagttcggctcaaaaccgtccatctccacgagcatctggttgagcgtctgctcgcgctcgtcgtgcccgccgcccagacccgcgccgcgctgcctcccgacggcgtctatttcgtctatgaagactatgcagggcgagttcttcttcgcgttctcgaagaggtcgcgcaccctcgaggcgcccacgcccacgaacatctccacgaagtccgacccgctcatggagagaaacggcacccccgcctcgccggccacgcagcgcgccaaaagcgtctttccggtccccggcggccccaaaagcagcacgcccttgggtatctttccgcccagcttcttgaacttcttggggtctttcaggaagtctatgatctcggccagctccgccttggcctcctcaacccccgcggcgtcgttgaacgtcacctgcggcctgtcgatgttgtgcagcttggcgcggctcttgccgaaagagaacatcccgcgctgcgccgactgcatgttgcgtatgaagaggaaatagaagaatatcgataccgcgacgataatggctatctggacaagcacgttcccccagatcttctcttgctcgaaggtgtacgggaaccccgccccgtcccaagcccgcagcattcctga

SEQ ID NO: 10484 - protein, 258 aa, Unknown
  Obtained from environmental sample
  misc_feature (1)..(258): Xaa is any amino acid
MTDRPRDALASPHVRHVHHHLAVEAPRAQKRRVEHVGPVGRGYQYHAGVRLKTVHLHEHLVERLLALVVPAAQTRAALPPDGVYFVYEDYAGRVLLRVLEEVAHPRGAHAHEHLHEVRPAHGEKRHPRLAGHAARQKRLSGPRRPQKQHALGYLSAQLLELLGVFQEVYDLGQLRLGLLNPRGVVERHLRPVDVVQLGAALAEREHPALRRLHVAYEEEIEEYRYRDDNGYLDKHVPPDLLLLEGVREPRPVPSPQHS

SEQ ID NO: 10485 - DNA, 642 bp, Unknown
  Obtained from environmental sample
  misc_feature (1)..(642): n is a, c, g, or t
atgccctcgcgtcccctcacgtccggcacgtccaccaccacctggcggtcgaagcgccccgggcgcagaagcgccgggtcgagcacgtcgggcctgttggtcgcggctatcagtatcacgccggagttcggctcaaaaccgtccatctccacgagcatctggttgagcgtctgctcgcgctcgtcgtgcccgccgcccagacccgcgccgcgctgcctcccgacggcgtctatttcgtctatgaagactatgcagggcgagttcttcttcgcgttctcgaagaggtcgcgcaccctcgaggcgcccacgcccacgaacatctccacgaagtccgacccgctcatggagagaaacggcacccccgcctcgccggccacgcagcgcgccaaaagcgtctttccggtccccggcggccccaaaagcagcacgcccttgggtatctttccgcccagcttcttgaacttcttggggtctttcaggaagtctatgatctcggccagctccgccttggcctcctcaacccccgcggcgtcgttgaacgtcacctgcggcctgtcgatgttgtgcagcttggcgcggctcttgccgaaagagaacatcccgcgctgcgccgactgcatgttgcgtatgaagaggaaatag

SEQ ID NO: 10486 - protein, 213 aa, Unknown
  Obtained from environmental sample
  misc_feature (1)..(213): Xaa is any amino acid
MPSRPLTSGTSTTTWRSKRPGRRSAGSSTSGLLVAAISITPEFGSKPSISTSIWLSVCSRSSCPPPRPAPRCLPTASISSMKTMQGEFFFAFSKRSRTLEAPTPTNISTKSDPLMERNGTPASPATQRAKSVFPVPGGPKSSTPLGIFPPSFLNFLGSFRKSMISASSALASSTPAASLNVTCGLSMLCSLARLLPKENIPRCADCMLRMKRK

SEQ ID NO: 10487 - DNA, 363 bp, Unknown
  Obtained from environmental sample
  misc_feature (1)..(363): n is a, c, g, or t
atggccgagcggcacgagattacgttttctcgaagatggcttgggtatacaggggtatcgcgttctcgacaagactgggttggcgcagttacacgcaagggcgggaaaaaacaacccaacgagcttggcctgtacgacatgagcgggaacgtagcggaatggtgctgggactgggagggcgattatccatcaactgctcagaacaatcctgccgagccgtccaggggcatagacaaccggattataaggggcggcagttgggcatttaggcatacttactgcatggtcttatcccgctcatcagtctcttccagaagtaccaattctttatacggtttccgggtagtgcgcaatgctcagtga

SEQ ID NO: 10488 - protein, 120 aa, Unknown
  Obtained from environmental sample
  misc_feature (1)..(120): Xaa is any amino acid
MAERHEITFSRRWLGYTGVSRSRQDWVGAVTRKGGKKQPNELGLYDMSGNVAEWCWDWEGDYPSTAQNNPAEPSRGIDNRIIRGGSWAFRHTYCMVLSRSSVSSRSTNSLYGFRVVRNAQ

SEQ ID NO: 10489 - DNA, 876 bp, Unknown
  Obtained from environmental sample
  misc_feature (1)..(876): n is a, c, g, or t
gtggcgtatttctctatggaatacggcatggacgtgtccttgccgatttattcgggcggtttgggaatcctttccggcgaccacatgaagacttcttcggacatgggactgccgcttgttggtatagggcttttgtacaggcagggatattttacccagatgctgaacgccgacggctaccagcaggaaagctaccccgagaacgactggtacaatatgcccgtcgaaaggaaaaacggcaaagacggacaacccttaaaaatttccgtggatttggcgggaaggcaggctatcgcccaaatttgggaagcaaaggtcggccgttcttcgctttacctgttagacacgaatatcgaggaaaacgccccggactttagaaatattaccgcttctctttacggcggcgacaaagaaaccagaatgcagcaggaaatccttttaggcataggcggcatacgcgccttacgcgcattgggaatcaatcccgccgctacccacatgaacgaaggccatgcggcgtttttgggccttgagcgtatccgcgaaataatggaagagaagggatttacttttgaggaagcgcgcgaggctgtttggccgtcaaatatttttacgacccacactcctgttccggcggggaacgagcgttttgaaattccgatgatggaaaaatatttccgctcatggccgcaggttttgggaatttcatggaaagacttccttggtttgggcaggatttatccgggcgacgagcgcgaaactttctgtatgaccgttctcgctcttaagatggcggcttacgccaacggcgtagcgaaaatgcacggagtggttcccgcgacatgtggaagggaatatggccgggactgccgttaa

SEQ ID NO: 10490 - protein, 291 aa, Unknown
  Obtained from environmental sample
  misc_feature (1)..(291): Xaa is any amino acid
MAYFSMEYGMDVSLPIYSGGLGILSGDHMKTSSDMGLPLVGIGLLYRQGYFTQMLNADGYQQESYPENDWYNMPVERKNGKDGQPLKISVDLAGRQAIAQIWEAKVGRSSLYLLDTNIEENAPDFRNITASLYGGDKETRMQQEILLGIGGIRALRALGINPAATHMNEGHAAFLGLERIREIMEEKGFTFEEAREAVWPSNIFTTHTPVPAGNERFEIPMMEKYFRSWPQVLGISWKDFLGLGRIYPGDERETFCMTVLALKMAAYANGVAKMHGVVPATCGREYGRDCR

SEQ ID NO: 10491 - DNA, 873 bp, Unknown
  Obtained from environmental sample
  misc_feature (1)..(873): n is a, c, g, or t
gtgtcagatcggccgagtgatgaggcaggttatataaactgtatgccggtacaagaacaggttctgtcccatgcctttggcgcggacggtcatgcttcgcaagacggtcatgcttcgcaagacggtcatgccgcgcaagatttgtacgtacagtcccaaacaggaacgggtaaaacagccgcttttttaattattatttttcaaaggatgcttacagaggaagccttatacaaacgcaaggcgcttatcatggctcctacaagggagttggcggtacagacagaggaagaagcgaaaaaactaggcaggtatctgccttttaaaaccggatgtttttacggcggcgtaggatacgggcaacaggaaaaattattaaaggaaaacgcgcaaatcttggtcggaactcccggcagggtgcttgatcttaacaaatccggcaaaatgaatttgatggaaatatcgtttcttgttcttgacgaggccgaccgtatgtttgacatgggcttttatcccgatttacggaaacttatcaaagtagtgccttcatccgatcgcaggcagacgatgctttttagcgcgacattaaacgcctgggtaaaaaatctcgcgtgggaatacacgaagtcgccttttgaaattgagataaaaccggaaatcgtcaccgtcgaagaaattacgcaggttctctaccatgttccgtcgggtgaaaaaatgccgctccttctcgggattttaaaacgcgaaaaacccgaaagcgcattgattttttgcaacacaaaaaaacacaccgagattgtcgcgaagcgcttaaaaataaacggattcacttgccgaatttatcatcggcgatctgccgcaagtaaaacggcttaa

SEQ ID NO: 10492 - protein, 290 aa, Unknown
  Obtained from environmental sample
  DOMAIN (15)...(202): DEAD/DEAH box helicase
  misc_feature (1)..(290): Xaa is any amino acid
MSDRPSDEAGYINCMPVQEQVLSHAFGADGHASQDGHASQDGHAAQDLYVQSQTGTGKTAAFLIIIFQRMLTEEALYKRKALIMAPTRELAVQTEEEAKKLGRYLPFKTGCFYGGVGYGQQEKLLKENAQILVGTPGRVLDLNKSGKMNLMEISFLVLDEADRMFDMGFYPDLRKLIKVVPSSDRRQTMLFSATLNAWVKNLAWEYTKSPFEIEIKPEIVTVEEITQVLYHVPSGEKMPLLLGILKREKPESALIFCNTKKHTEIVAKRLKINGFTCRIYHRRSAASKTA

SEQ ID NO: 10493 - DNA, 375 bp, Unknown
  Obtained from environmental sample
  misc_feature (1)..(375): n is a, c, g, or t
gtggcgaaagggcttctttctccttatgaaacacagataaccctctgtaaaagcggcatgatggcgttaaatgcgataaaaagcaaccactttgatgtgatatttatggaccacagaatgccggatatggacggtattgaaacaacgcagcgtatcagggcagcaggggatgaaaatccctattataaaaatgtgccgataatagcgttaaccgcagatgctgtttccggcattgaacaaatgtttttggaaaacggttttaatgacttcatatcaaaaccgattgatacgatcaaactgaactctgtcctggaaaaatggatacccaaagaaaaacagcatggttcagtaattatcaacaggaaagggagctaa

SEQ ID NO: 10494 - protein, 124 aa, Unknown
  Obtained from environmental sample
  DOMAIN (2)...(105): Response regulator receiver domain
  misc_feature (1)..(124): Xaa is any amino acid
MAKGLLSPYETQITLCKSGMMALNAIKSNHFDVIFMDHRMPDMDGIETTQRIRAAGDENPYYKNVPIIALTADAVSGIEQMFLENGFNDFISKPIDTIKLNSVLEKWIPKEKQHGSVIINRKGS

SEQ ID NO: 10495 - DNA, 723 bp, Unknown
  Obtained from environmental sample
  misc_feature (1)..(723): n is a, c, g, or t
ttggataaggagaataatatgagcgaaaaagtcactcaaactgccgatgttaaaacgctgataacaagtaatctcagaaagtattcaatgttcatcatgcttgctttaatcatgataatattcataccgttaacaaacaattctaacttgagcgagcgtaatattaccaacctatttttccaatacagttatgttcttattctggctgtcggtatggtaatggtcattatcgtacagggcatcgatctttctgtcggttctgtttgcgcctttgtcggagctttaagcgcaatggtttacaattcaggcgcgggaacatttgttacattaattgcggcgcttttgatgggcggcgctatcggagcgtatcagggagcgtggatagcttacggaagaataccctcatttattgttacactttccggtatgcagttgttccgaggtcttacatatctggttacaaaagttacccctatcggttttcatgacgacggttactcgcttcttgccaccggcacgcttgatgaaatattaaaatttcaaaaaataggaccctattatcccgcatcgttaatagtagcggttattttacttgtaattttctttatttccgaattttttgcgcgaaacaaaaaaattaaaaatgaatttgaagtttcaggattaccggttttcataaccaaactttttaatcagtctttctcggccaatctgtcatggtaa

SEQ ID NO: 10496 - protein, 240 aa, Unknown
  Obtained from environmental sample
  misc_feature (1)..(240): Xaa is any amino acid
MDKENNMSEKVTQTADVKTLITSNLRKYSMFIMLALIMIIFIPLTNNSNLSERNITNLFFQYSYVLILAVGMVMVIIVQGIDLSVGSVCAFVGALSAMVYNSGAGTFVTLIAALLMGGAIGAYQGAWIAYGRIPSFIVTLSGMQLFRGLTYLVTKVTPIGFHDDGYSLLATGTLDEILKFQKIGPYYPASLIVAVILLVIFFISEFFARNKKIKNEFEVSGLPVFITKLFNQSFSANLSW

SEQ ID NO: 10497 - DNA, 870 bp, Unknown
  Obtained from environmental sample
  misc_feature (1)..(870): n is a, c, g, or t
gtgatcatgaccggatgcacttccggaatcgtgggcgacgacgtggacgctctggcggacgaattccgcggcgaaggcaagccggtagtctcggtggagacggctggcttcaagtgcaacaattacgaggcccacagcctcgtggtgaacgccgtaatcgaccagtatgtcgatagattctccaatgagaatgagagccgcggcgagccgaataccgtcaatctcttcgcgtcgctgccgtaccaagaccctttttggaaggggaatctaggcgaatacaagcgtctgcttgaagggctgggcctcaaagctcaagtcctcttcggccccatgtcggaaggggtggaggagtggaagcgtattccccgcgccaacttcaatatccttgtttcgccttggtacgggaaaccgatagtcgaccatttgaagacgaattacggccagccgtacacatggtttccgcatatccccataggggccaacgcggcggaaaagtttttgcgccaggtgttggacttcgcgctagagcaaaacgcggacattgagcgggagagggcggagacgtttatcaggcgcgagcgcgaggcatattatgaagagatcgacaatctggcgacatttctcatggaattccgctacgggcttccgacccacgtgcatatattgcacgacgcgggctacgtggtggggctttccaaattcttgctgcacgaggtgggcattgtgcctaaagagcagttcgtcaccgacaacacgccggataagtttaaagaacaaatctgcgcggaattggcctcgacatccgacaaacgcgaaattcccgtcacgtttgagcctgacgccgggctggttcangaggccgtcccgtaa

SEQ ID NO: 10498 - protein, 289 aa, Unknown
  Obtained from environmental sample
  misc_feature (1)..(289): Xaa is any amino acid
MIMTGCTSGIVGDDVDALADEFRGEGKPVVSVETAGFKCNNYEAHSLVVNAVIDQYVDRFSNENESRGEPNTVNLFASLPYQDPFWKGNLGEYKRLLEGLGLKAQVLFGPMSEGVEEWKRIPRANFNILVSPWYGKPIVDHLKTNYGQPYTWFPHIPIGANAAEKFLRQVLDFALEQNADIERERAETFIRREREAYYEEIDNLATFLMEFRYGLPTHVHILHDAGYVVGLSKFLLHEVGIVPKEQFVTDNTPDKFKEQICAELASTSDKREIPVTFEPDAGLVXEAVP

SEQ ID NO: 10499 - DNA, 810 bp, Unknown
  Obtained from environmental sample
  misc_feature (1)..(810): n is a, c, g, or t
ttgcgtttaaagtatttgggcaaaaaaggtttgctaacagacctgctaaaggcaatgggctccctaagcgcggaagaaaagccgttgtttggaaaattggtgaatgagttgaaagcggaagtcacagatgcaatagaaaacgcaaaagaaaaggcgagcgaagctgctatgggcaaaaaactgattgcaagcagattagatatttccttgcctggtgaaggctataaacacggcagcacacaccctctctacgatattcgcgaggaggttatagacttttttgcgaatatgggttttcacgtggatttaggtcgcgacatagaaacggactggtataattttgaagcgttgaacactccaaaagaccacccgagccgcgatatgcaagacactttttacctatcacaaaacgcaatgctccgcacgcacaccagcggtacccaaatacattatatggaagcccacaaaccccctataagaatggtagccctggggcacgtgttcagggttgatgccgatgcaacccacgcccctatgttccagcagtgcgaaggtttggttgtggacgaaacaataacatttgcacaattaaaaggaatgatggctctgtttgccaaaaagttttttggcgagaacgcaaagaccagattccgcccaagttttttccctttcaccgagccgagtgcggaactggatgtgagttgcgttttttgcgatggcaaaggatgccgcangtgcaaaggcacaggctggatggagataggcggttgcggttcggtggatccggcggtttttgaaatgttagcatag

SEQ ID NO: 10500 - protein, 269 aa, Unknown
  Obtained from environmental sample
  SIGNAL (1)...(24)
  DOMAIN (2)...(62): Aminoacyl tRNA synthetase class II, N-terminal domain
  misc_feature (1)..(269): Xaa is any amino acid
MRLKYLGKKGLLTDLLKAMGSLSAEEKPLFGKLVNELKAEVTDAIENAKEKASEAAMGKKLIASRLDISLPGEGYKHGSTHPLYDIREEVIDFFANMGFHVDLGRDIETDWYNFEALNTPKDHPSRDMQDTFYLSQNAMLRTHTSGTQIHYMEAHKPPIRMVALGHVFRVDADATHAPMFQQCEGLVVDETITFAQLKGMMALFAKKFFGENAKTRFRPSFFPFTEPSAELDVSCVFCDGKGCRXCKGTGWMEIGGCGSVDPAVFEMLA

SEQ ID NO: 10501 - DNA, 645 bp, Unknown
  Obtained from environmental sample
  misc_feature (1)..(645): n is a, c, g, or t
atgaataaaatgaaattaactcctaacattccgcagtattgggaaatgatgtatgaacagggaaaagacgattgggatttaggaagagcaactcccgctttgctcgatttttttaagcacccgaactgcccaaaagacggcgatgttcttgttccgggcgcaggcagaggctgggatgcagaggcatgggcaaaacgcggacataacgtaatagctattgatttctgttcatctgcatttgattttttggaaaaactatccgataaaatgaataatttaaaagcactgaatacggatatgtttttgttaaacccgtccgataaaaatatacctggaaaaaaattcgacatcatttacgattatttcagctttaattccattcaccccggcagacgtgatgagtatatagagatgttgctcagaatgataaaaaacaatgggcttgtaattggattcttttgcccgctcaacgatgaacgctacggcgataatccgccctatagcatatctaaagaagaacttgaagttaggtttaatgggatttttaacattgaaaataaaattgtgcctgaaaacagtgccacagacagggtaggcgacagaacgggcatagaggaaatttggcttttgaggaaaatagtatga

SEQ ID NO: 10502 - protein, 214 aa, Unknown
  Obtained from environmental sample
  DOMAIN (50)...(151): Methyltransferase domain
  misc_feature (1)..(214): Xaa is any amino acid
MNKMKLTPNIPQYWEMMYEQGKDDWDLGRATPALLDFFKHPNCPKDGDVLVPGAGRGWDAEAWAKRGHNVIAIDFCSSAFDFLEKLSDKMNNLKALNTDMFLLNPSDKNIPGKKFDIIYDYFSFNSIHPGRRDEYIEMLLRMIKNNGLVIGFFCPLNDERYGDNPPYSISKEELEVRFNGIFNIENKIVPENSATDRVGDRTGIEEIWLLRKIV

SEQ ID NO: 10503 - DNA, 627 bp, Unknown
  Obtained from environmental sample
  misc_feature (1)..(627): n is a, c, g, or t
atgatcgaatcgatcagggacacttcggcggtttccatgaaacaacaggaatcagtaaaggggttgatagaaaacaccgataaaagccaggaatcaatgcgggcaaccattcaatcagtcgatgatatctcccaatcggttgacggtatagcgcaggcaatcaaaataatcagcgcaatagcggccaacaccaatttgttatccatgaacgcggcgattgaagccgcccatgccggagaagccggcaggggtttcgcggtagttgccgacgagatacgccgcctttcggaaagcacgagagaaaattcacagaatatttcccggactctgaaaaacatcattaacgggatatccgtttcctcaaaacaatccggcgataccaatggccggattaccgaaatggccaaagagatcaacggttttgccgaaacaatgaccggcttgatcgaaactttcagcaaactatcgacgggaagcagtgaaattacttctgagctggacagccttagggatcaaagcaaaacagttaaaacaggctatgccgaaatactgtctatgacggacaaactgcaaacatggctggttgatttggctaaattgtcggaaaaaacggcagcggctaaataa

SEQ ID NO: 10504 - protein, 208 aa, Unknown
  Obtained from environmental sample
  DOMAIN (3)...(192): Methyl-accepting chemotaxis protein (MCP) signaling domain
  misc_feature (1)..(208): Xaa is any amino acid
MIESIRDTSAVSMKQQESVKGLIENTDKSQESMRATIQSVDDISQSVDGIAQAIKIISAIAANTNLLSMNAAIEAAHAGEAGRGFAVVADEIRRLSESTRENSQNISRTLKNIINGISVSSKQSGDTNGRITEMAKEINGFAETMTGLIETFSKLSTGSSEITSELDSLRDQSKTVKTGYAEILSMTDKLQTWLVDLAKLSEKTAAAK

SEQ ID NO: 10505 - DNA, 708 bp, Unknown
  Obtained from environmental sample
  misc_feature (1)..(708): n is a, c, g, or t
atgaacacagccgacctcacccgcagccaacaaaaagtcctccagttcgtcgaacactttgccaagacagaacaaaggagcccaaccctcaaagaaatagccgatggcattggaagcgccgccgttagcacgatccacaagcacgtgctgcacctcattgaaaaagggtttttggaaaggaggcacgggcgcggcaacaacatagtcacgcgaacgcgcaccgaaaatggcctgcgccacagcggctccaactctagccctgctccgcaaggcgacccttctgttggcgggttcggccccgacgctcccagcggcgttgacggctcagccaaagtctttcccttttatggggacgttgcggccggtgcgccgttggtgcctgaatcgtacgccacccccatagagcttccgcactcaatccatcgcaacaagcaagacctgtttgtcctccgggtcaggggcgactccatgatggacgactccatcttggatggcgacctcgtagtgctgcagcgcaggggcgaataccgcaacggcgaccgcgtggttgccctcattgaccgcgaagaagccactcttaaggaactcaggcgcgatggagatggcgtgtggctcatcccgcacaaccccagcttggccccgcgccactacgacattgatcgagtggaagtgcagggcgttctcgtgggcgtgatgagaagctgctga

SEQ ID NO: 10506 - protein, 235 aa, Unknown
  Obtained from environmental sample
  DOMAIN (3)...(65): LexA DNA binding domain
  misc_feature (1)..(235): Xaa is any amino acid
MNTADLTRSQQKVLQFVEHFAKTEQRSPTLKEIADGIGSAAVSTIHKHVLHLIEKGFLERRHGRGNNIVTRTRTENGLRHSGSNSSPAPQGDPSVGGFGPDAPSGVDGSAKVFPFYGDVAAGAPLVPESYATPIELPHSIHRNKQDLFVLRVRGDSMMDDSILDGDLVVLQRRGEYRNGDRVVALIDREEATLKELRRDGDGVWLIPHNPSLAPRHYDIDRVEVQGVLVGVMRSC

SEQ ID NO: 10507 - DNA, 915 bp, Unknown
  Obtained from environmental sample
  misc_feature (1)..(915): n is a, c, g, or t
gtgcaaaaggctatcctgcgcgtgtgcagggacaacctgagcaatgaaggcgtcgcctttgtcagctacaacgtgttgccagggtggaggttgaagcaggccgctagagatatcttcatggccctcacgccccccaacgtccccgctgccacccgctgtgaatatggcatcaattggatgaaggagatgatggaaataagcaagacggaagagaaaaggccgcttctgcaccaaacaatcgcgaatgagctagaaaacattttggtcaaaaaggatttgcgctacctagcacacgagtacctcgaagttcacaacgagccgctgctgttccgtgattttttgaatcatttaagtgaggctgagctgacctacttgggcgacgcagagcctagctccatggtccgccacctgacgaatccgaaattgcaggaatttttcaagaagcaccccccagggggcttggctgagacagagcagaccatagacataattatggggcgcaccttccggcagtccttgctggtgaaaggcagccgcaaggcccagatgaacagggccctcacgccagaatttttcaaaaacctgcacatccagacccgcatggcaaaggccacggatcaagacggcaaagtaagctattcgcaccaaaggcacggccccctgaacgcccagccgccctacggaacttgtgccttggacttgttggtcgagtacgcgggcatgtcagtcccttacaaagatctatgcgaaaaatttgtggaaacaaccaaaggatcagagcctatatttgcggaactgcttttctcgctgctgggcgtggggggcatanaaatttttgcagaaccgtacttgcccaaactcccaaaggcgccacggccgctgccgccctcgatgcagagagcggcagaaatgtga

SEQ ID NO: 10508 - protein, 304 aa, Unknown
  Obtained from environmental sample
  misc_feature (1)..(304): Xaa is any amino acid
MQKAILRVCRDNLSNEGVAFVSYNVLPGWRLKQAARDIFMALTPPNVPAATRCEYGINWMKEMMEISKTEEKRPLLHQTIANELENILVKKDLRYLAHEYLEVHNEPLLFRDFLNHLSEAELTYLGDAEPSSMVRHLTNPKLQEFFKKHPPGGLAETEQTIDIIMGRTFRQSLLVKGSRKAQMNRALTPEFFKNLHIQTRMAKATDQDGKVSYSHQRHGPLNAQPPYGTCALDLLVEYAGMSVPYKDLCEKFVETTKGSEPIFAELLFSLLGVGGIXIFAEPYLPKLPKAPRPLPPSMQRAAEM

SEQ ID NO: 10509 - DNA, 831 bp, Unknown
  Obtained from environmental sample
  misc_feature (1)..(831): n is a, c, g, or t
gtggatatcgaagttcgttccacggcgattcccgtaacaaagtctgtgcaaagccttctcacagcaggtgagacatggaagggtacccttgattttcctggcagagacggaacaaattctcttgttgcaagtttctcaaggctgccgccgcttaatcttgaatcgcgtctgaattatttaattaagtatcctcacggctgcgctgaacaaacaacaagcggctcgttccctcaactttatcttgataaggttcttttgcttgacgacaaacaaaaagcggaaatcagaacgaatgtaaacggcggaatagatcgcgttttgggaatgcagttgatgtcgggaggtttttcatactggccgggggaatcttatgtaaatgactggtgttcttcttatatcggacatttccttcttgaagcgcggcgatccggttatgaggtgcgtacaagcgctcttaaaagctgggttagttatcagaagaacgccgcggcgcaatggcaggtcagcagcaataaatttaccgaacaggcgtaccggctctacactttggcgttggcgggagaagccgatcttggctcaatgaaccgtctgcgaagccacaaactgccgtttcaggcaagctggcgtcttgccgcggcgtattggcttgcaggacagcgcgatacggcgcgtaacatgataaagggactggctttaccggaaagagattatcgcgaactatccgcgacattcggctcgaccctcagagataaggcgatgattcttgaaaccctcattttgttgaattctcaggaagagatgggaagaaccaaacagctcttgaagaaataa

SEQ ID NO: 10510 - protein, 276 aa, Unknown
  Obtained from environmental sample
  misc_feature (1)..(276): Xaa is any amino acid
MDIEVRSTAIPVTKSVQSLLTAGETWKGTLDFPGRDGTNSLVASFSRLPPLNLESRLNYLIKYPHGCAEQTTSGSFPQLYLDKVLLLDDKQKAEIRTNVNGGIDRVLGMQLMSGGFSYWPGESYVNDWCSSYIGHFLLEARRSGYEVRTSALKSWVSYQKNAAAQWQVSSNKFTEQAYRLYTLALAGEADLGSMNRLRSHKLPFQASWRLAAAYWLAGQRDTARNMIKGLALPERDYRELSATFGSTLRDKAMILETLILLNSQEEMGRTKQLLKK

SEQ ID NO: 10511 - DNA, 459 bp, Unknown
  Obtained from environmental sample
  misc_feature (1)..(459): n is a, c, g, or t
atggcgagctggatgggagttttcacgagtcggttagcctggcagaatggttttcaaaacacgcttgaaaaacaaaaggttggcggcgggagtgaaatccgcatgagcaaggggaacggcccagaggccccagtactgagtggctgcctgcggtatctggaaatccgaggcatctaccactggaggaattctacgggtgcagtacagatacgtccggggtattttacgcggttcggcaaagtaggatcgtccgacatcctgggaatactccccggcggccggtttcttgccgtagaggcgaaagccccggaaggacggctctccccggagcaaaaggaattccttgaaaaaatccggggccttggaggcttggccctggtagtccggggctggcaggaacttgacgcggcattgagggaagcggggtacgtttccagcgggccgttatttgaagggtaa

SEQ ID NO: 10512 - protein, 152 aa, Unknown
  Obtained from environmental sample
  DOMAIN (59)...(140): Protein of unknown function (DUF994)
  misc_feature (1)..(152): Xaa is any amino acid
MASWMGVFTSRLAWQNGFQNTLEKQKVGGGSEIRMSKGNGPEAPVLSGCLRYLEIRGIYHWRNSTGAVQIRPGYFTRFGKVGSSDILGILPGGRFLAVEAKAPEGRLSPEQKEFLEKIRGLGGLALVVRGWQELDAALREAGYVSSGPLFEG

SEQ ID NO: 10513 - DNA, 513 bp, Unknown
  Obtained from environmental sample
  misc_feature (1)..(513): n is a, c, g, or t
gtgccgctagaagacggaagcacggcgtcggaccacgttgtcaacctgccgggcgaaatacagatctccgcctttataggaagcgcggagttcgtcgtttttgacggcccgcagcaggccggtgaccagaggcagaggatacgggccgcttactacgagctgctcaggctgaaaacggaaggcaagccccttactgtcgttaccgggcttgcgtcttttccgaacatggtcattactgatttctccatagacaggaacgtcgagaccggggcggaccttccgtttgacatgacctttaaggaaatcagggtcatcaagagcgaaactgtaggaatacacgtgaagcccaatttgtcgtcctccgatcaggttgcgcggactcttgatatgggactggcaggcacgagcaaggattacgggggaaaagagcaatggcggacaatgtaccggaacagcggcggcgccaatcccacgcgggaggaattttttgaaaaatggggggagaatccatga

SEQ ID NO: 10514 - protein, 170 aa, Unknown
  Obtained from environmental sample
  misc_feature (1)..(170): Xaa is any amino acid
MPLEDGSTASDHVVNLPGEIQISAFIGSAEFVVFDGPQQAGDQRQRIRAAYYELLRLKTEGKPLTVVTGLASFPNMVITDFSIDRNVETGADLPFDMTFKEIRVIKSETVGIHVKPNLSSSDQVARTLDMGLAGTSKDYGGKEQWRTMYRNSGGANPTREEFFEKWGENP

SEQ ID NO: 10515 - DNA, 636 bp, Unknown
  Obtained from environmental sample
  misc_feature (1)..(636): n is a, c, g, or t
ttgatggccgaggtattttctttgaagagcgacaattatcaaaagcctgtaattgtaaaaatagcagcagtccataatgttaccgcaatcgcaagcggcatagcgagaagcggcgctgatataatagccatcgacggcttccgcggcggaacgggagcggcgccgacacgcatacgcgaccatgtcggcattcccattgagcttgcgttagccggtgttgacaaacgtttgcgtgacgaggggattcgagacaatgtttccattgttgtaggcggtagtattcgttccagcgccgatattgtgaaagctgtcgcgcttggcgctgactgtgtgtacattgccacatccgctctgattgcgctcggctgtcatctttgcagaagctgccacgccggaaaatgcaactggggtatagcgacgcaggttcccgaactggtaaagcgcctcaacccggacatcggacataagcgccttatcaaccttttaactgcatggcagcatgaaattaaagagatgatgggcggtatgggaattaactcgattgacggtttgaaaggtaacaggcttatgctgcgaggcgttgggcttaacgagaaagagcttgagattttaggcattaaacacgcaggagagtga

SEQ ID NO: 10516 - protein, 211 aa, Unknown
  Obtained from environmental sample
  DOMAIN (1)...(179): Conserved region in glutamate synthase
  misc_feature (1)..(211): Xaa is any amino acid
MMAEVFSLKSDNYQKPVIVKIAAVHNVTAIASGIARSGADIIAIDGFRGGTGAAPTRIRDHVGIPIELALAGVDKRLRDEGIRDNVSIVVGGSIRSSADIVKAVALGADCVYIATSALIALGCHLCRSCHAGKCNWGIATQVPELVKRLNPDIGHKRLINLLTAWQHEIKEMMGGMGINSIDGLKGNRLMLRGVGLNEKELEILGIKHAGE

SEQ ID NO: 10517 - DNA, 861 bp, Unknown
  Obtained from environmental sample
  misc_feature (1)..(861): n is a, c, g, or t
atggcaactgcgatttataacaaactcaataaaccggaaaattgcgctcactttattcttgctctgctaaaagaagaaaaggatgtagaggaacttaaccggcagctccatgaaaatatcggcgaagcatcaggcattattgaaaagataaacaagctggtggatgagttgaatactgttataggttcgcaggctcaggcagttgagcaatcttcggcatcaaccgaaaaaatgatcaactctatcaaagatacatcaaatatttcccgcgccaaacaggaagatataaaagagctgctgggaaacgcctcgcaggggcaggaatcaatgcgggctactattcaatcggttcaggatatttcccagtcggtggacggtatagcgcaggctattaaaataatcagcgcaatagcagctaacaccaatctgctgtccatgaacgcggcgattgaagccgcccacgccggagaagcgggcagaggttttgcggtggttgcaggtgaaatacgccggctttctgaaagcacaagagaaaattcacggaatatttcgcaaaccctgaaaaacatcattaacggaatatccgttacctcaaaacaatccggtgaaactgacagcaggataaccgaaatgtcaaaagaaatcagcagctttgctgaaacaatgacaggacttatcaacaccttaagcgaactatcggcggaaagcgatgaaataactgccacgctcggcagtttgcgcagccaaagcgcgctggttaaagacagttatgccgaaatactgtctatgacaggcaaactgcgtaccatgatgctcaatctgagtacgttatcagaaaacagaatagaaaataaaatataa

SEQ ID NO: 10518 - protein, 286 aa, Unknown
  Obtained from environmental sample
  DOMAIN (62)...(276): Methyl-accepting chemotaxis protein (MCP) signaling domain
  misc_feature (1)..(286): Xaa is any amino acid
MATAIYNKLNKPENCAHFILALLKEEKDVEELNRQLHENIGEASGIIEKINKLVDELNTVIGSQAQAVEQSSASTEKMINSIKDTSNISRAKQEDIKELLGNASQGQESMRATIQSVQDISQSVDGIAQAIKIISAIAANTNLLSMNAAIEAAHAGEAGRGFAVVAGEIRRLSESTRENSRNISQTLKNIINGISVTSKQSGETDSRITEMSKEISSFAETMTGLINTLSELSAESDEITATLGSLRSQSALVKDSYAEILSMTGKLRTMMLNLSTLSENRIENKI

SEQ ID NO: 10519 - DNA, 504 bp, Unknown
  Obtained from environmental sample
  misc_feature (1)..(504): n is a, c, g, or t
atgtctgatattgacaatccttatcaaagcccggaaagtccgatcattcccgaaataccgcaaaataccggagttatgttatctgaaaacatgctgcgttatctgaacggcgcatctccctggctgcagtttataggcattctgggctatatcggaagcggtctgttggtagtcggaggattattcggcacaataggtttttccgtagcgtcgtcatttctggctttagaaatgagtgattttccgttttggatagtaatgcttatttatatacctctgggagtgctggtctttttccccgctcattttatctataacttcgggagaaaaatccgcaattaccgtttcagtaattcaaccgaagacctggaattggcttttaaaaataacaaatctctgtggaaatttaacggcattatttgcataattaatctggcttttattcctttccttttaataattgcaatcatcggcggtatagcggctgcaataagcggattttaa

SEQ ID NO: 10520 - protein, 167 aa, Unknown
  Obtained from environmental sample
  misc_feature (1)..(167): Xaa is any amino acid
MSDIDNPYQSPESPIIPEIPQNTGVMLSENMLRYLNGASPWLQFIGILGYIGSGLLVVGGLFGTIGFSVASSFLALEMSDFPFWIVMLIYIPLGVLVFFPAHFIYNFGRKIRNYRFSNSTEDLELAFKNNKSLWKFNGIICIINLAFIPFLLIIAIIGGIAAAISGF

SEQ ID NO: 10521 - DNA, 615 bp, Unknown
  Obtained from environmental sample
  misc_feature (1)..(615): n is a, c, g, or t
gtggaaggggcaaagccccaccatcacgcgcccgcgctgcttcaagttgacgtagcggcccacgacgtcggctatgttggcgcgccggcgcaccagttccttggcgtcgtcattgtattggaagttcatattttacaaaaatataacattgacagacgcgcaagttattattttaggtatattgacattggcgcggcgagccgccgcccatacaaccccggacacacggagcgaagcatgaacaacatctcaggcctcttagatccctcttgcatccaactcgagctcgccgcccgcagcaaagacgttgcgatcaaggagttagtgcgcctcctcgcggacgcggggaaattgaacgactcgccggagagctacgtaggcgaggtgatggcgcgggagaagatctcgtcgaccggcataggcaacggcatcgccatcccgcacgtgcttgtggcggaggtggacgagataatgatggcagtgggccgcagcgccaagggggtgacgttcgaggccgtggacggcaagccggtccatctcctattcctcataataggcccgcaggggcagaacaacgagtacctgaaaaatctgagcaagctttctaaatactga

SEQ ID NO: 10522 - protein, 204 aa, Unknown
  Obtained from environmental sample
  DOMAIN (85)...(204): Phosphoenolpyruvate-dependent sugar phosphotransferase system, EIIA 2
  misc_feature (1)..(204): Xaa is any amino acid
MEGAKPHHHAPALLQVDVAAHDVGYVGAPAHQFLGVVIVLEVHILQKYNIDRRASYYFRYIDIGAASRRPYNPGHTERSMNNISGLLDPSCIQLELAARSKDVAIKELVRLLADAGKLNDSPESYVGEVMAREKISSTGIGNGIAIPHVLVAEVDEIMMAVGRSAKGVTFEAVDGKPVHLLFLIIGPQGQNNEYLKNLSKLSKY

SEQ ID NO: 10523 - DNA, 819 bp, Unknown
  Obtained from environmental sample
  misc_feature (1)..(819): n is a, c, g, or t
atggcgactgaaaacgattttgacaaactgcggacgctgcaggacattctttcacaaaaaatcaagctggaacatgagattcaggaaattcccaaacagctcgggaatcttgaagaagcgcataacagaaccaagaaggcgtttatagacaagaacctggaatacggggaaatcaaggaagccgaagaaaaagccagggcaaacctgagggaagccgaagcggcgagggaaaaagcggagcgtacgatttccgagatcaacacccagcgggaatacgaggcgcttgacaaggaacgcaacgccgccgagaagaacgagcagcaatacggcaaagaagtccagatgaaagaaaaggcgctcatggatcttgacgagcagataaagcagtacgccgcccttattgagcagcaggaaaaggaactggcggaaaaacgggcggggatagacgcggaaatcgccataaagaaaaaacaggcggaaaccctgttaaagaaagaaaaaaccgtcgcgggcgatctggatcaggaagttgtgtacaagtttgagcgcatcctgaggaataaaatgggcctggggattgtcgcgataaaaggcaatgtctgccagggctgccacatgattcttccggcgcagttctccaataatgtccgtctcggcgaagaatttattttctgcccttattgctcgcgcatactctactacgaagagtcggccgaaggcgaggacattttctttgataacgatgacgccggctccttggaagaaactgacgaaacagaagaggatgaattgaggaggcgaaaagctcggccgatctga

SEQ ID NO: 10524 - protein, 272 aa, Unknown
  Obtained from environmental sample
  DOMAIN (3)...(236): Uncharacterized ACR, COG1579
  misc_feature (1)..(272): Xaa is any amino acid
MATENDFDKLRTLQDILSQKIKLEHEIQEIPKQLGNLEEAHNRTKKAFIDKNLEYGEIKEAEEKARANLREAEAAREKAERTISEINTQREYEALDKERNAAEKNEQQYGKEVQMKEKALMDLDEQIKQYAALIEQQEKELAEKRAGIDAEIAIKKKQAETLLKKEKTVAGDLDQEVVYKFERILRNKMGLGIVAIKGNVCQGCHMILPAQFSNNVRLGEEFIFCPYCSRILYYEESAEGEDIFFDNDDAGSLEETDETEEDELRRRKARPI

SEQ ID NO: 10525 - DNA, 774 bp, Unknown
  Obtained from environmental sample
  misc_feature (1)..(774): n is a, c, g, or t
atgtttgagcttatgacgggcgaaatggacaaaaacgcctgcttcctttccgtacattcgggtgcgggcggaacggaagcctgcgactggacgcaaatgctataccgtatgtacctgcgctgggcggagcaaaagggctttaccgttgaggaagttgatcagcaggaagccgaaggcgggttaaagtccgccacttgccgtatagagggcgattatgcctacggttttttgaagggcgaatcgggcattcacaggcttgtcaggatcagcccgtttgacgccaatgcccgcaggcatacctctttcgcctccgtttacctatttcccgttattgatgatacaatcgaagtagagataaaacccgaagatttacgcgtggacacttaccgttccggaggtgcgggagggcagcatgtaaacaagacggacagcgcggttcgttttactcacctgcctacgggaatagtcgtcgcctgccagaatgagcgcagtcagataaaaaaccgcgctattgccatgagtatgcttaaagcgcggctttatgagtattacagagaggagaaggaaaaggaaaacgaaaaatattctcaggagaaaaaggatatttcatggggacaccagataagatcatatgtgtttcagccgtatacaatggtaaaagattaccgtacaaaagttgaaaagggaaatattcaggctgtaatggacggcgatattgacccgtttattgaggagtatttaaagttttcatggcgtaatggggagatgaattga

SEQ ID NO: 10526 - protein, 257 aa, Unknown
  Obtained from environmental sample
  DOMAIN (1)...(80): PCRF domain
  misc_feature (1)..(257): Xaa is any amino acid
MFELMTGEMDKNACFLSVHSGAGGTEACDWTQMLYRMYLRWAEQKGFTVEEVDQQEAEGGLKSATCRIEGDYAYGFLKGESGIHRLVRISPFDANARRHTSFASVYLFPVIDDTIEVEIKPEDLRVDTYRSGGAGGQHVNKTDSAVRFTHLPTGIVVACQNERSQIKNRAIAMSMLKARLYEYYREEKEKENEKYSQEKKDISWGHQIRSYVFQPYTMVKDYRTKVEKGNIQAVMDGDIDPFIEEYLKFSWRNGEMN

SEQ ID NO: 10527 - DNA, 768 bp, Unknown
  Obtained from environmental sample
  misc_feature (1)..(768): n is a, c, g, or t
gtggaaaccgccttacaaacagcggacggtcttatgctggttctggttaacgaggacggaaaaaatacggaacattttttctcacaaaagaattcatgtcccgattgcggcgtatctatcccggaattacagccgaggcttttttcatttaacaacccattcggcgcgtgtcccggttgtacaggtctcggcgcaaaactggagtttgatcccgatcttgtaattcccgaccgctccctttccttcaacgagggcggcgttattccctacaatccggacagcgcgtggaatcgcagccgttttcaaagccttgccaaacattacaacttcagccttgatacgccgtttaacaaactgcctaaaaaaataacaaacgcgattctttacggcagcgaagacgatataaaagtccgttatgtgaaccgcgaaggaacaggtcgttttgaataccagtcgaaatttcccggtattctggaagagcttaaacggcgttatcttgaaacccaatcgcagggcataaaggactggcttgaaaaatttatgagccaaaaaccatgcgaagactgcggcggcaaaaggttaaaaccggaatcgttagctgtaactgtagcgggaaaaaacatttgggaactgtcacagctttccgtaacggattcgcttaaattttttgaaaacatcaaattgagcaaaaacgaaagcaaaatagcccatcaaataatgaaagaaatatacgcccgcttgggctttatgcaaaacgtaggttcttga

SEQ ID NO: 10528 - protein, 255 aa, Unknown
  Obtained from environmental sample
  misc_feature (1)..(255): Xaa is any amino acid
METALQTADGLMLVLVNEDGKNTEHFFSQKNSCPDCGVSIPELQPRLFSFNNPFGACPGCTGLGAKLEFDPDLVIPDRSLSFNEGGVIPYNPDSAWNRSRFQSLAKHYNFSLDTPFNKLPKKITNAILYGSEDDIKVRYVNREGTGRFEYQSKFPGILEELKRRYLETQSQGIKDWLEKFMSQKPCEDCGGKRLKPESLAVTVAGKNIWELSQLSVTDSLKFFENIKLSKNESKIAHQIMKEIYARLGFMQNVGS

SEQ ID NO: 10529 - DNA, 396 bp, Unknown
  Obtained from environmental sample
  misc_feature (1)..(396): n is a, c, g, or t
atgggggaattatcgtggagagtggaagcgtcgcctctgtgtttgagtcgccgcaagccaccgcgacaaaggagatggttcatgcctaaagaaaaaattttggaagtgttgtccatgttgccaacggcgacattggaaacggtgtacatgactttagtatcaactgttttagcctgtattcttggcttccctttaggcgtgtacctttttgttacttctcccgccggtcttgctccgcgcagaatactttacaatgtgctttcccgaatcgtcaatatattccgctcccttccgtttatcatactgatgatcctgttgataccactgacacggctaatcgtaagaaccagcataggtcccactgcggaatcatccccttcatcccgctcgccataa

SEQ ID NO: 10530 - protein, 131 aa, Unknown
  Obtained from environmental sample
  misc_feature (1)..(131): Xaa is any amino acid
MGELSWRVEASPLCLSRRKPPRQRRWFMPKEKILEVLSMLPTATLETVYMTLVSTVLACILGFPLGVYLFVTSPAGLAPRRILYNVLSRIVNIFRSLPFIILMILLIPLTRLIVRTSIGPTAESSPSSRSP

SEQ ID NO: 10531 - DNA, 582 bp, Unknown
  Obtained from environmental sample
  misc_feature (1)..(582): n is a, c, g, or t
atgagcttattggaaacaccggatacgggagaagtgtactacaacggacagcgtgtcgatatcntgcgcggtttttctttatttgaacagcgcagaaaaatgggaatgatatttcaaaattttaatttgtntggatcgcgtaacgtgtcgggaaatatagcctatcctttggaaattgccggtttttcccgcaaacaaatagacacgcgcatcggtgaactacttgaaatggtcgatatttccgataaacgcaaggcgcgtttgcgggaactttccggcggacagaagcaaagggtggctattgcccgcgctcttgcagtaaaccccgaagtgctgttctgcgatgaagcgaccagctctcttgatccgcagacgacaagatcgatacttgcgttaatccgcgacctgcaacagcggttgcaaattaccgtggtaatgataacgcaccaaatggaagttatacgcgaaatatgccaggaagtggcagtaatggatgggggaattatcgtggagagtggaagcgtcgcctctgtgtttgagtcgccgcaagccaccgcgacaaaggagatggttcatgcctaa

SEQ ID NO: 10532 - protein, 193 aa, Unknown
  Obtained from environmental sample
  DOMAIN (1)...(167): ABC transporter
  misc_feature (1)..(193): Xaa is any amino acid
MSLLETPDTGEVYYNGQRVDIXRGFSLFEQRRKMGMIFQNFNLXGSRNVSGNIAYPLEIAGFSRKQIDTRIGELLEMVDISDKRKARLRELSGGQKQRVAIARALAVNPEVLFCDEATSSLDPQTTRSILALIRDLQQRLQITVVMITHQMEVIREICQEVAVMDGGIIVESGSVASVFESPQATATKEMVHA

SEQ ID NO: 10533 - DNA, 393 bp, Unknown
  Obtained from environmental sample
  misc_feature (1)..(393): n is a, c, g, or t
gtggcttgcggcgactcaaacacagaggcgacgcttccactctccacgataattcccccatccattactgccacttcctggcatatttcgcgtataacttccatttggtgcgttatcattaccacggtaatttgcaaccgctgttgcaggtcgcggattaacgcaagtatcgatcttgtcgtctgcggatcaagagagctggtcgcttcatcgcagaacagcacttcggggtttactgcaagagcgcgggcaatagccaccctttgcttctgtccgccggaaagttcccgcaaacgcgccttgcgtttatcggaaatatcgaccatttcaagtagttcaccgatgcgcgtgtctatttgtttgcgggaaaaaccggcaatttccaaaggatag

SEQ ID NO: 10534 - protein, 130 aa, Unknown
  Obtained from environmental sample
  DOMAIN (69)...(107): Protein of unknown function (DUF1602)
  misc_feature (1)..(130): Xaa is any amino acid
MACGDSNTEATLPLSTIIPPSITATSWHISRITSIWCVIITTVICNRCCRSRINASIDLVVCGSRELVASSQNSTSGFTARARAIATLCFCPPESSRKRALRLSEISTISSSSPMRVSICLREKPAISKG

SEQ ID NO: 10535 - DNA, 306 bp, Unknown
  Obtained from environmental sample
  misc_feature (1)..(306): n is a, c, g, or t
atggcttacggaacagcggcgtggacatttgtcagtatttcgcagtatatacttggtgtacgtcctgtattcgacggccttatgatagacccgtgtattccttcaacaatgaagggtttttccgttacacgccattttagaggcgcggattatcacatctcggtggacaacagcgcatgtgtggaaaagggaataagatccataatgattgacggtaatttactggacgatgaatctttaaaaaaattaacattgccagcgttcggagacggaaaagtccataaaattgacgttgttatgggatga

SEQ ID NO: 10536 - protein, 101 aa, Unknown
  Obtained from environmental sample
  misc_feature (1)..(101): Xaa is any amino acid
MAYGTAAWTFVSISQYILGVRPVFDGLMIDPCIPSTMKGFSVTRHFRGADYHISVDNSACVEKGIRSIMIDGNLLDDESLKKLTLPAFGDGKVHKIDVVMG

SEQ ID NO: 10537 - DNA, 477 bp, Unknown
  Obtained from environmental sample
  misc_feature (1)..(477): n is a, c, g, or t
atgacaaaaaaaatacccaccaggatatatcttgcggaagatgaaatgccaaagttctggtacaacctgagagcagacatgaaagaaaagccggctcctatcctgcatccaggaactttgcagccgataaccgcctcggacatggagcagatattctgcaaggagcctgttaaacaggaattggatgaaactaccaaacttataccaattcctgacggtattcggaatttttatcttgcataccgtccttcgccgttaatccgcgcatattacctggaaaaagatctggaaacaccggcggagatttattacaagtttgaaggaaccaacacttccggttcgcataagcttaattcggccggagcgcangcgtattacgccaaagaagaaggacttacatcccttacaacacaaacaggcgcgagacaatggggtagtgcaatggcaatggcctgcgctcttataacctatagctaa

SEQ ID NO: 10538 - protein, 158 aa, Unknown
  Obtained from environmental sample
  misc_feature (1)..(158): Xaa is any amino acid
MTKKIPTRIYLAEDEMPKFWYNLRADMKEKPAPILHPGTLQPITASDMEQIFCKEPVKQELDETTKLIPIPDGIRNFYLAYRPSPLIRAYYLEKDLETPAEIYYKFEGTNTSGSHKLNSAGAXAYYAKEEGLTSLTTQTGARQWGSAMAMACALITYS

SEQ ID NO: 10539 - DNA, 306 bp, Unknown
  Obtained from environmental sample
  misc_feature (1)..(306): n is a, c, g, or t
ttgtttgccgtatttttcataagcggtgtaattgccaacatagcgtttcaggtttccctgaaaaatttcatacacttcgtttacggtaacgtcaagaaaataacggtcatgggaaaccagcaggcagccgccggggaatttttccagccagctttccagccaggcgcgggcttctatatcaagataattggtcggctcatccagcaaaagaatgtcgggctgttccagcaatactttcgccagggcaatccgcatctgccagccgccggaaaactcgccggtgtcccgatcaaggtcgttagctga

SEQ ID NO: 10540 - protein, 101 aa, Unknown
  Obtained from environmental sample
  misc_feature (1)..(101): Xaa is any amino acid
MFAVFFISGVIANIAFQVSLKNFIHFVYGNVKKITVMGNQQAAAGEFFQPAFQPGAGFYIKIIGRLIQQKNVGLFQQYFRQGNPHLPAAGKLAGVPIKVVS

SEQ ID NO: 10541 - DNA, 810 bp, Unknown
  Obtained from environmental sample
  misc_feature (1)..(810): n is a, c, g, or t
atggtggaaaaggccaagtggcacataaaggagggcgatatctttcaggtggtgctctcaaaccgctttgaggccgattttgacggcagcctcttcgacgcctaccgcgtgctgcgcacgataaacccgtcgccgtacatgttctacttcaacgggagcgatctggagattgccggcgcgtcgccggaaacgctggtgaagctgaaagacggcaaactctacacattcccgcttgccggtacgcgcccgcgcggcgctacggaggaggaggacgccgcgctcgaaaagagcctgctcgcggacgaaaaggaactcgcggagcacaatatgctggtagacctgggccgtaacgaccttggcaagatcagcaaattcggcagcgtggcggtggaaaagtatatgtctatactgcgtttctcccacgtcatgcacataggctccactgtgagcggcgacatcatagacggcaagaccggcctagacgcgataaacgccgtactgcctgccggcacgctctccggcgcccctaagatccgcgccatgcaaatcatcaacgagcttgaacaatgcaaacgcggcgtctacggcggcgcggtcggctacttagacttcaccggcaacatggacacctgcatagcaataagaatcgtctacaaaagaggcggcaaagtcttcatccgctccggcgcaggaatagtggccgacagcaatccggaaaccgaatatcaagaatgcataaacaaatcaacggcggtgaaaaacgcgctcacgcagtctgcgggagggctcggccgatctgatcattggtaa

SEQ ID NO: 10542 - protein, 269 aa, Unknown
  Obtained from environmental sample
  DOMAIN (1)...(256): chorismate binding enzyme
  misc_feature (1)..(269): Xaa is any amino acid
MVEKAKWHIKEGDIFQVVLSNRFEADFDGSLFDAYRVLRTINPSPYMFYFNGSDLEIAGASPETLVKLKDGKLYTFPLAGTRPRGATEEEDAALEKSLLADEKELAEHNMLVDLGRNDLGKISKFGSVAVEKYMSILRFSHVMHIGSTVSGDIIDGKTGLDAINAVLPAGTLSGAPKIRAMQIINELEQCKRGVYGGAVGYLDFTGNMDTCIAIRIVYKRGGKVFIRSGAGIVADSNPETEYQECINKSTAVKNALTQSAGGLGRSDHW

SEQ ID NO: 10543 - DNA, 354 bp, Unknown
  Obtained from environmental sample
  misc_feature (1)..(354): n is a, c, g, or t
ttgcattgttcaagctcgttgatgatttgcatggcgcggatcttaggggcgccggagagcgtgccggcaggcagtacggcgtttatcgcgtctaggccggtcttgccgtctatgatgtcgccgctcacagtggagcctatgtgcatgacgtgggagaaacgcagtatagacatatacttttccaccgccacgctgccgaatttgctgatcttgccaaggtcgttacggcccaggtctaccagcatattgtgctccgcgagttccttttcgtccgcgagcaggctcttttcgagcgcggcgtcctcctcctccgtagcgccgcgcgggcgcgtaccggcaagcgggaatgtgtag

SEQ ID NO: 10544 - protein, 117 aa, Unknown
  Obtained from environmental sample
  misc_feature (1)..(117): Xaa is any amino acid
MHCSSSLMICMARILGAPESVPAGSTAFIASRPVLPSMMSPLTVEPMCMTWEKRSIDIYFSTATLPNLLILPRSLRPRSTSILCSASSFSSASRLFSSAASSSSVAPRGRVPASGNV

SEQ ID NO: 10545 - DNA, 417 bp, Unknown
  Obtained from environmental sample
  misc_feature (1)..(417): n is a, c, g, or t
ttgagcctgattaccgatatgtgtcacgaaagatgtagggtttcatgcgggggacagcctgaaacagaaggcgcgttagcggcattagccatggcgctggcatcgctgagaagcggcgcgaagccggtgcatcattctgaccgaggctgccagtatgcgtcgcatctgtatgtcggcaaattgcgggaagcagggctgcaaatcagcatgactgaagaactgcattgttatgaaaatgcgatggctgaacgggtaaacgggattttgaaacaggaatattacattggttcttgttttaggaataaaaatcaggcgaaggcggcggtgaaagaggctgtgtttttatacaatacgcggcgcccgcacaagtcccttgattatgaaacaccggaaaaaatgcatgggactgcggcataa

SEQ ID NO: 10546 - protein, 138 aa, Unknown
  Obtained from environmental sample
  DOMAIN (1)...(135): Integrase core domain
  misc_feature (1)..(138): Xaa is any amino acid
MSLITDMCHERCRVSCGGQPETEGALAALAMALASLRSGAKPVHHSDRGCQYASHLYVGKLREAGLQISMTEELHCYENAMAERVNGILKQEYYIGSCFRNKNQAKAAVKEAVFLYNTRRPHKSLDYETPEKMHGTAA

SEQ ID NO: 10547 - DNA, 606 bp, Unknown
  Obtained from environmental sample
  misc_feature (1)..(606): n is a, c, g, or t
ttggcttggaactacttggccaacccgcgcagcctgaaagccgagcaaaccttggtcatataccagaacggcggcggtccctccggcggcccgtcgcaatcggaaaccgacgacaataccgcgtccgtcaatacggctccggcgcaagcggttcaaaccgcggcggttgtgccgtccaaaaacgtaaagggcaatacgacgctgcactccggcaaacgcttagtgaagcagggcgaaacgctatacggaatagcgcaggagttgggcgtgccggtaaacgaattggcgactatcaacggcctaaacgcaagacgcccgcagatattccccggcgacgtgctggtctataccccaaggccaggacaacctgccgcaagcgcgagcgaaactagcgcaagcaaaacgacggttgccgcgccgacagcgtcgaagccgcaaccgtccgcgtcaaccggtcaagtcgtgatgtacacagtaaaaaccggcgacaacctatggcgtatagcgttgaatttcggggtaaccgtagactctataagggatagcaacaacttgacgccgagttctgtaattatgccgggggatgtacttaaaattgttaggtga

SEQ ID NO: 10548 - protein, 201 aa, Unknown
  Obtained from environmental sample
  DOMAIN (73)...(117): LysM domain
  misc_feature (1)..(201): Xaa is any amino acid
MAWNYLANPRSLKAEQTLVIYQNGGGPSGGPSQSETDDNTASVNTAPAQAVQTAAVVPSKNVKGNTTLHSGKRLVKQGETLYGIAQELGVPVNELATINGLNARRPQIFPGDVLVYTPRPGQPAASASETSASKTTVAAPTASKPQPSASTGQVVMYTVKTGDNLWRIALNFGVTVDSIRDSNNLTPSSVIMPGDVLKIVR

SEQ ID NO: 10549 - DNA, 414 bp, Unknown
  Obtained from environmental sample
  misc_feature (1)..(414): n is a, c, g, or t
atgggcatacagggacacgacataatcggccctacccttgcaagcgacaaccaggccgcggttgaactgtacgcgagccttatagacgagggcctgctaagcgctatagcgtattccgagcttgatcttaaattatcagattcggctccgggcggcgcctctctggcgcccgctcctttgaaccagaaacaggccgatgcccttgggtatcagtacgccctgctattcaggatgttctccaaatacgcgcggtacatagatcatgtaataatctggggcatcgccggctggggctggcagaacagttatgtgctatttaacgaaaaacagcaagccaatcagggctactacggaataatggacccggacaggtttattaggggacatgcgtatttggatgaatattttaaatag

SEQ ID NO: 10550 - protein, 137 aa, Unknown
  Obtained from environmental sample
  misc_feature (1)..(137): Xaa is any amino acid
MGIQGHDIIGPTLASDNQAAVELYASLIDEGLLSAIAYSELDLKLSDSAPGGASLAPAPLNQKQADALGYQYALLFRMFSKYARYIDHVIIWGIAGWGWQNSYVLFNEKQQANQGYYGIMDPDRFIRGHAYLDEYFK

SEQ ID NO: 10551 - DNA, 390 bp, Unknown
  Obtained from environmental sample
  misc_feature (1)..(390): n is a, c, g, or t
gtggaacgatctgcacctgttaataaaaaaggcgttggcctaaggcttgccctggccgcggaaaaacttatattcaaaaaacaaaacacctcgccgggcccgctattgcgtgatatacgccgtgagaaagggcggctgttgttaacatttgacaactgcggcaagggacttacagctaacgaaacgccgtacctcagcgtaattgccggcggaaacattttccgggtgcctgccgctattgaaagccccaactgtatttctgttgatatttctgacatcaagaaccctgaaaaagcgttatacgcctgggcacacaacccccgcgaccgccagctttacaactcggagggattaccggttattcctttccagtccccgatccctatttaa

SEQ ID NO: 10552 - protein, 129 aa, Unknown
  Obtained from environmental sample
  misc_feature (1)..(129): Xaa is any amino acid
MERSAPVNKKGVGLRLALAAEKLIFKKQNTSPGPLLRDIRREKGRLLLTFDNCGKGLTANETPYLSVIAGGNIFRVPAAIESPNCISVDISDIKNPEKALYAWAHNPRDRQLYNSEGLPVIPFQSPIPI

SEQ ID NO: 10553 - DNA, 594 bp, Unknown
  Obtained from environmental sample
  misc_feature (1)..(594): n is a, c, g, or t
atgagggcggaactttccggcctgcatctgcgccttaacgcgaccataatctatgttacccatgatcaggtagaagccatgacaatggcaagcaagattgttgtcatgaaggatggaagaatacagcagattggtacgcctctttatctgtacaacaatcctaacaacaaatttgtcgccggattcatcggttctccgccgatgaacttcctgaccgtaaaagtgctggaagaaggcggctcaattgtggtggatgaaggatccttcaaggttaaggtggatgcgtctcacgccccccacctgaaacaatatgtgggcaaagaagtcttcttcggcattcgtcccgaggatatgctctttgttgagtccaacgcggacaacagcttccccacaaaagtaacagtaattgagccgttgggcgcggatatccatctctatcttaccactggaacacagcaactggttgcccgtaccgaacctaaccacatgttcaaaatcggcgagaccgccagatttattcccaaaatggaaaaggcccgctattttgacaaggaaacagagcttgccattctgcccggtcccccagggaagtag

SEQ ID NO: 10554 - protein, 197 aa, Unknown
  Obtained from environmental sample
  DOMAIN (111)...(182): TOBE domain
  misc_feature (1)..(197): Xaa is any amino acid
MRAELSGLHLRLNATIIYVTHDQVEAMTMASKIVVMKDGRIQQIGTPLYLYNNPNNKFVAGFIGSPPMNFLTVKVLEEGGSIVVDEGSFKVKVDASHAPHLKQYVGKEVFFGIRPEDMLFVESNADNSFPTKVTVIEPLGADIHLYLTTGTQQLVARTEPNHMFKIGETARFIPKMEKARYFDKETELAILPGPPGK

SEQ ID NO: 10555 - DNA, 711 bp, Unknown
  Obtained from environmental sample
  misc_feature (1)..(711): n is a, c, g, or t
atgatggaaaagaccctgggctgcggaattttgtggcttaaagtcccatcggtaaaggcggttatgaaggctcttcgccgccggatcagttccgcggtggttgccgccctgcctgagcaggaactcgctgtcgaaaacggcgagccattggctgacgcaacggagctttctgaaaaaacgataactgctgaagccaaagaaacgccgggagcttcgcctttccttgccaaagtttgccgcagcctgatagagcggctgggcgcggaaaaggctgttgaagccctggtatccctgagttatggcgagtttcttgatcccggccgttatgggcctatcaccgaatttcaggaagaagattttcctgagcctgttaaggctgccggcaaaagcgccggcaggagaagggacgatcggacgcgcaggacttcagggccgcatgcgcctgcgggcaaacgaggcagggaattccgggaagagacaggggattttacgcgggtatatattggccagggacggcagcacggcctgggcgccagagacatagcaaatttgttaatgcgcgcgggcggggttcccgggcgtctcgtggatgagatagaaatgaaagattactgctcgtttgcaactctccccgcagacgccgccaaacgggcctgcgccttttcccgcaaagaccagcagtcgcctgtaatacggccggcaaaaccctga

SEQ ID NO: 10556 - protein, 236 aa, Unknown
  Obtained from environmental sample
  DOMAIN (153)...(235): DbpA RNA binding domain
  misc_feature (1)..(236): Xaa is any amino acid
MMEKTLGCGILWLKVPSVKAVMKALRRRISSAVVAALPEQELAVENGEPLADATELSEKTITAEAKETPGASPFLAKVCRSLIERLGAEKAVEALVSLSYGEFLDPGRYGPITEFQEEDFPEPVKAAGKSAGRRRDDRTRRTSGPHAPAGKRGREFREETGDFTRVYIGQGRQHGLGARDIANLLMRAGGVPGRLVDEIEMKDYCSFATLPADAAKRACAFSRKDQQSPVIRPAKP

SEQ ID NO: 10557 - DNA, 465 bp, Unknown
  Obtained from environmental sample
  misc_feature (1)..(465): n is a, c, g, or t
ttggattatccgcttgcggtatgtcttgcggcgcttgaacaccatgaacgcaataacggaacaggctatccgcgccagcttgccggagaaaagatcagcttgtactctaaaataatcgcggtagcctgctcgtacgaagcgctcagttccaaacgtccgcacaaggaagcaaaagacggttatacgggaatgctggaactgctgaagaacgaaggcaaacaatacgatgacacgatagtcagggcgcttgttctttcgctttcaatataccctataggcttgtatgtacttctgtcaaacggaaagaaaggccaggttattgacgtaaatcccgaaaatccgaaatttccgattgtggagattttcggagaggttacccccgacggaagaaataaaaccgtgcaaaccgctcctaacgaactgagcatcgtaagaccgttaagccgttcggaaattgagaattaa

SEQ ID NO: 10558 - protein, 154 aa, Unknown
  Obtained from environmental sample
  misc_feature (1)..(154): Xaa is any amino acid
MDYPLAVCLAALEHHERNNGTGYPRQLAGEKISLYSKIIAVACSYEALSSKRPHKEAKDGYTGMLELLKNEGKQYDDTIVRALVLSLSIYPIGLYVLLSNGKKGQVIDVNPENPKFPIVEIFGEVTPDGRNKTVQTAPNELSIVRPLSRSEIEN

SEQ ID NO: 10559 - DNA, 840 bp, Unknown
  Obtained from environmental sample
  misc_feature (1)..(840): n is a, c, g, or t
ttgactttttacgccgggcctgcccgccgcctgcagaacacggctctgcttatcggctctgttaaaatcgaaaaacaaattgaaaatttaagaagaacaagaccggttgttatagtgggaaatcccggcagactgcttgttctggcgaagatgagaaagctgaagttaaacaatatacgctttttagttttagatgaagccgaccgtcttaccgcgcctgaatgtattgaggagacagaagaatttctggctattatagaaaaagaaacaaaacgttcatcccctcttgtttcggcggactcagagcggaaaggtttgtgcgtcgcggcgtgttccgctacagtcgggaagaaaacaagcgggcagttgggctctctttttgagtccgccgaaattatcgagtgcgccgatcatgaaattcttcgcgaacggattgaacactgggcgctgttcagtgaaaaacggcgcaaggcccaaacactgcgttccctgctggcagcgcttcagggaaaatccaaaaaagcgcgggttaaggcgcttgtttttacaagccgcggcgacgaagctgacttggtcctctcgcgcctcctgtaccaccatgtttccgccgccggacttttcggcaaggtaaacaagaagccgcagacaggaacagaacgcaaagaggcgctcgactctttccgggagggcagaacggcggtgctggtctccacagaccttgccgcccgcggccttgatatccccgacattacccatgttatcgctcttgatgtcccggcggacggcgaagtgtacattcaccgctgcggccgcaccggcccgcgcggaaagaaagcgtaa

SEQ ID NO: 10560 - protein, 279 aa, Unknown
  Obtained from environmental sample
  DOMAIN (195)...(276): Helicase conserved C-terminal domain
  misc_feature (1)..(279): Xaa is any amino acid
MTFYAGPARRLQNTALLIGSVKIEKQIENLRRTRPVVIVGNPGRLLVLAKMRKLKLNNIRFLVLDEADRLTAPECIEETEEFLAIIEKETKRSSPLVSADSERKGLCVAACSATVGKKTSGQLGSLFESAEIIECADHEILRERIEHWALFSEKRRKAQTLRSLLAALQGKSKKARVKALVFTSRGDEADLVLSRLLYHHVSAAGLFGKVNKKPQTGTERKEALDSFREGRTAVLVSTDLAARGLDIPDITHVIALDVPADGEVYIHRCGRTGPRGKKA

SEQ ID NO: 10561 - DNA, 873 bp, Unknown
  Obtained from environmental sample
  misc_feature (1)..(873): n is a, c, g, or t
gtgaatacggcaacgggtgatttgtattactattgtgtggcaagtaatgactacggcaaggatacgtctactgtcagcggtaagcataccgtgggaacaaaaccttccattaccacgcaaccggtcaataccgcacgaagcaccgcccaaaacggtgcggcctttccggctcttacggtagcggcctccggtacacccacgccgacgtaccagtggtataaaaatacgagtaacagcaagaccggcggcacgtctctatccggtgctaccggtacgagctatacaccggtgaatactgcaacgggcgatttgtactattattgcgtggtaagcaatgattgcggcaaagatacatctactgtcagcggcaagcacaccgtaacggcctgtacggcaatttcatttagcgaccttggcctcacagacatattcgaccaaactgtatatcaatctcctgcttcgggcttcagtggaattgcggtagatgttatttccggcagggcgacctcgccatggacctttcaatggtattccaataagacaaacagtacaagcggcggtacatccatttccggcgcgacacttaatttttttacaccgtccaatgcaatcgccgacacgacatattacttttgcgtagtgtccaatgcttgcggcagtgttgcgtccaccatcagcaagtgtatcgtaattccctgcactcagcttcacattgccactcagctaagcacagcagcacggagtactacccaaaacggcgtggcatttccgactcttacagttgcggcttccggcacgccaacacctacctatcggtggtattccaataattcaacagcaacaaggcggcacatccatttccggcgcaactag

SEQ ID NO: 10562 - protein, 290 aa, Unknown
  Obtained from environmental sample
  misc_feature (1)..(290): Xaa is any amino acid
MNTATGDLYYYCVASNDYGKDTSTVSGKHTVGTKPSITTQPVNTARSTAQNGAAFPALTVAASGTPTPTYQWYKNTSNSKTGGTSLSGATGTSYTPVNTATGDLYYYCVVSNDCGKDTSTVSGKHTVTACTAISFSDLGLTDIFDQTVYQSPASGFSGIAVDVISGRATSPWTFQWYSNKTNSTSGGTSISGATLNFFTPSNAIADTTYYFCVVSNACGSVASTISKCIVIPCTQLHIATQLSTAARSTTQNGVAFPTLTVAASGTPTPTYRWYSNNSTATRRHIHFRRN

SEQ ID NO: 10563 - DNA, 363 bp, Unknown
  Obtained from environmental sample
  misc_feature (1)..(363): n is a, c, g, or t
atggcaatgaataaacctgtcattgccgtccagaacctgaccaagcggtacaggggcgcgggaaagcccgcggtggacagcatcagtttttccgtgggcgaaggggagttcttcgcgtttctcggtcccaacggggccgggaaaaccacgactatttcaattctgaccacaacgctttccaaaagctccggggaactgcacatcgccggattcgatgtggatacccaggcgcgtaaggtacgcgaagagatcgggatcatttttcagcagccgagtcttgacgagaacctcagcgccgaagaaaacatccgcttccacgcctgcctctacggcatgtgcggctaccgcccctctttaagatga

SEQ ID NO: 10564 - protein, 120 aa, Unknown
  Obtained from environmental sample
  misc_feature (1)..(120): Xaa is any amino acid
MAMNKPVIAVQNLTKRYRGAGKPAVDSISFSVGEGEFFAFLGPNGAGKTTTISILTTTLSKSSGELHIAGFDVDTQARKVREEIGIIFQQPSLDENLSAEENIRFHACLYGMCGYRPSLR

SEQ ID NO: 10565 - DNA, 336 bp, Unknown
  Obtained from environmental sample
  misc_feature (1)..(336): n is a, c, g, or t
atgaaaaacacaattaaattccggtttatgggcattcttaccatgcttgtaatatgcgccgtgttcgctgtggctgttatgctgctgtggaacgcactcttgccgcaaattttcgcgtttccgcagatcagttacctgcaagcggcagggctgctcattctggcgcggctattattcggcggtatgggcggcgatttacatgccggaggccggggggcagggagaggcagacatccgtttcaccacggcaataaacttcgcgaaaaatggatgaacatgagcgaagaagaacgcagagaattcatggaaagagaaaaggacgatggcaatgaataa

SEQ ID NO: 10566 - protein, 111 aa, Unknown
  Obtained from environmental sample
  SIGNAL (1)...(25)
  misc_feature (1)..(111): Xaa is any amino acid
MKNTIKFRFMGILTMLVICAVFAVAVMLLWNALLPQIFAFPQISYLQAAGLLILARLLFGGMGGDLHAGGRGAGRGRHPFHHGNKLREKWMNMSEEERREFMEREKDDGNE

SEQ ID NO: 10567 - DNA, 708 bp, Unknown
  Obtained from environmental sample
  misc_feature (1)..(708): n is a, c, g, or t
atggcttccggcgtacaggaaagtntacgtatttttccaatgatactgggcagtatcctggtctgctntggggcgcttcttattggggttccgatagccctgctatgcgcgcttttcatggcggaattccttccgccaaagtttgcgaacattttccgaagcggtgtggagcttttggcaggtattccatcggtggtctacggtttcttcggcctaatggtaatcgtgccgctggtcaagcaaactttcaaaactccgtctggaaacagcctgctttccgcggtaattgtccttgcgataatgatcctgccgacgatcataaccgtgtcagaaaaatgcctgcaggcggtcccgctgtccaggcgcgaggcgtcgctggcgttaggcgcaagcaagatgcagaccgccctgtatgtggttttgccgcatgcgaagtccggggttctcgccgggattatcctgggcttttcccgcgccgtgggcgaaacgatggcggttattcttgttgctgggaactcggtgcagttaatcaaaagcccgctggaaggggtaaggactttaaccgcgaccatcgccctggaaatgggctacgccgaaggcaggcactcgcatatgctatttgccattggtatagtcctgcttgtaatgatccttcttcttaatggccttatcctattaatacgccgcaggggagaggcagacacgtga

SEQ ID NO: 10568 - protein, 235 aa, Unknown
  Obtained from environmental sample
  DOMAIN (15)...(233): Binding-protein-dependent transport system inner membrane component
  misc_feature (1)..(235): Xaa is any amino acid
MASGVQESXRIFPMILGSILVCXGALLIGVPIALLCALFMAEFLPPKFANIFRSGVELLAGIPSVVYGFFGLMVIVPLVKQTFKTPSGNSLLSAVIVLAIMILPTIITVSEKCLQAVPLSRREASLALGASKMQTALYVVLPHAKSGVLAGIILGFSRAVGETMAVILVAGNSVQLIKSPLEGVRTLTATIALEMGYAEGRHSHMLFAIGIVLLVMILLLNGLILLIRRRGEADT

SEQ ID NO: 10569 - DNA, 831 bp, Unknown
  Obtained from environmental sample
  misc_feature (1)..(831): n is a, c, g, or t
gtgacttctatcgggaccgacgcgtttgggggttgtacccgactgacgacgatacccatccccaacagtgtgacttctataggtgaaagcacgtttagtgggtgtaccggcctgacgacgataactattcctaatagtgtgacatctatcggtggaagcgcatttagtggatgtaccagtctatcatcagtcactatgcgcgatggcgtgaaaactatcaataactacgcatttaacaactgcgcaagtctgacatccataatcatcccggaaagcgtgacatctataggcgcgaacgcgttctacggttgttccgctcttaggtcgctgacatgtttagcgtccgaccctccggcggtagacgcgacaacgtttaccggcgtaaacaaggctgcatgcaaactaattgtgcatcaagaagacataggcccgtaccgcgcggccatgtattggaaggactttacgaacattgaggagtacgtatccgtagcctcatccaaccgcgtaatccccgccgtccatcccgccgagattacgtcaatagcaccggtatccccgctaaccgccgatttcacggcgggtccgaatcctgctgtcaggtcgtcgtcgggcgcggtaaaattcttccgcaacggcgcaatcataaagaacgcgacgctatcaatctacgacgcgtcgggcaacttggtaaacaccgtaaagtcgtgcgtctgggatttgcgggacgcgggcggtcgtttggtgcctgagggcacgtacttggtgcgcggcgcggtgaagacgaaaggcggcaaaggcgagaaggtatcggttctcgtgggtgttaggtag

SEQ ID NO: 10570 - protein, 276 aa, Unknown
  Obtained from environmental sample
  misc_feature (1)..(276): Xaa is any amino acid
MTSIGTDAFGGCTRLTTIPIPNSVTSIGESTFSGCTGLTTITIPNSVTSIGGSAFSGCTSLSSVTMRDGVKTINNYAFNNCASLTSIIIPESVTSIGANAFYGCSALRSLTCLASDPPAVDATTFTGVNKAACKLIVHQEDIGPYRAAMYWKDFTNIEEYVSVASSNRVIPAVHPAEITSIAPVSPLTADFTAGPNPAVRSSSGAVKFFRNGAIIKNATLSIYDASGNLVNTVKSCVWDLRDAGGRLVPEGTYLVRGAVKTKGGKGEKVSVLVGVR

SEQ ID NO: 10571 - DNA, 621 bp, Unknown
  Obtained from environmental sample
  misc_feature (1)..(621): n is a, c, g, or t
atggcgtttttaactgtttgtttaaatcccacattgcaaaaaaccctgcgtttttcttctatatatccggggaccgtgaaccgcaccggagaccaccgccttgacgcaagcggcaaggggattaacgttacccgcgttttaacccagcttggaaaaaaggccgtacacctgacgcagcttggcggcgacatgaggccgctgtttctttcgctctgcgaacaggacggctgttccgtgcaatgggcggaaagcggaagccaaatacgtttttgttacaccctgctttctgacggagacggcgcgcttccaggcggaagcacggttacggagttagtcgaagaatccgaacctgtccatgccgggactgaggaccggctgatggaaaagtttgatgaacttcttgcgcataacacagacttgaattggcttataatttccggcacgaaagcggcaggattttccgacgcgctgattcccgccatgacgcaaaaggcgaaagagaagggattgaaagttattcttgatataaagggaaaggatttatccgggagtttgaaatatgagccggacatagtgaaaccgaatctttttgaatttgccgctgacttcgcgcctgagtaa

SEQ ID NO: 10572 - protein, 206 aa, Unknown
  Obtained from environmental sample
  misc_feature (1)..(206): Xaa is any amino acid
MAFLTVCLNPTLQKTLRFSSIYPGTVNRTGDHRLDASGKGINVTRVLTQLGKKAVHLTQLGGDMRPLFLSLCEQDGCSVQWAESGSQIRFCYTLLSDGDGALPGGSTVTELVEESEPVHAGTEDRLMEKFDELLAHNTDLNWLIISGTKAAGFSDALIPAMTQKAKEKGLKVILDIKGKDLSGSLKYEPDIVKPNLFEFAADFAPE

SEQ ID NO: 10573 - DNA, 942 bp, Unknown
  Obtained from environmental sample
  misc_feature (1)..(942): n is a, c, g, or t
ttgnaagcgataaacgcaaggcccggcgagattgtccacaggatcatccccgaaggggaatcccttgagccctgccgtatcntgctgagggaaacacaccgccgcgacgcctgcttcgcgctgggctacgtgccggactgcgacggagacaggggcaatcttgtcgtatgggacgggaaactccaaaaagcccgcgcccttgaagcccaggaagttttcgccgtcgcctgtgtcgccgagcttgcccagcttgcgcgggatttatcgcctaacggaaaaacactgcaacgcgccgccatagcggtaaacgatcctacctcttttcgcatcgaccgcatcgcgcaagccttcggagctgaggttttccgcgccgagacaggcgaggccaatgtggtggcccttgcccgcaagctgcgcaaagaaggttataccgtccgcatccttggggaaggttcaaacggaggcaatatcacccatccttccgcggtacgggatccgctcaacaccgtgctggccctggcaaaactccttatggttatgccgtcggacaacaagccgggcctgtttgagctctggtgcaatctgacaggaagcctataccgccctgatttcagcatgagcgacataatcgcgagcctgcccccctttaccactacggcggcatccgcgccggaggcggcgctgaaaatcaccagcgccgatcatggcgcgttgaaaagccgttaccaaaaaattttcatgggcgaatgggagaaacgcaaagatcagttcgcggccaattacggcatatacagatgggaagcgaaagcgtacaatgggacggaggagcgcgatgtgtccgccgatttcgcgcaagccggcaaaggggggcttaaaatatgcttcctcaactcaggcggcagtccgacagcttcgatatggatgagggctcggccaatctga

SEQ ID NO: 10574 - protein, 313 aa, Unknown
  Obtained from environmental sample
  misc_feature (1)..(313): Xaa is any amino acid
MXAINARPGEIVHRIIPEGESLEPCRIXLRETHRRDACFALGYVPDCDGDRGNLVVWDGKLQKARALEAQEVFAVACVAELAQLARDLSPNGKTLQRAAIAVNDPTSFRIDRIAQAFGAEVFRAETGEANVVALARKLRKEGYTVRILGEGSNGGNITHPSAVRDPLNTVLALAKLLMVMPSDNKPGLFELWCNLTGSLYRPDFSMSDIIASLPPFTTTAASAPEAALKITSADHGALKSRYQKIFMGEWEKRKDQFAANYGIYRWEAKAYNGTEERDVSADFAQAGKGGLKICFLNSGGSPTASIWMRARPI

SEQ ID NO: 10575 - DNA, 714 bp, Unknown
  Obtained from environmental sample
  misc_feature (1)..(714): n is a, c, g, or t
ttgatggcagagtcggcggcctgggcgccactggctaatccggctgcgggaggctggctttttatcagattttcatggccggcttctttctcagacgcccttgtgggctcgcctctgtcaacagtcggcgaaagcatcaggggcagcagttacggcatcgacgctttttttgcttcctcttccccttttggagacacattaagatctttttttaataaaaccattttctccttgcttggtgtggagcttccggtcggctatatggatctttttgcttcgcgtttccccggaataatcgcggatcgcggggtatttgccctgctattgggtaccctgataattaccgcctcacaggcaaaccgcttatggatttccgccgtttttcttgcggtattcggcattctggtccgatttgcgggtgccgtgtcttttggttccggttactggaacggcgacgttatttttgcgcttttctcgggcggaaccctcgcagccgctttttttctggcggcagacccggcaaccacagccaaatccagcataggaatattaatcgcggctctggcagccggatgcattgccttcgtccttcgctggtttggaaatgaaccttatggagtggtattaaccgctgtttttatcaacgctatgcttcccatgttcagggttttggaaagccgccaactatataaaaagcagaggccgcaatcatga

SEQ ID NO: 10576 - protein, 237 aa, Unknown
  Obtained from environmental sample
  misc_feature (1)..(237): Xaa is any amino acid
MMAESAAWAPLANPAAGGWLFIRFSWPASFSDALVGSPLSTVGESIRGSSYGIDAFFASSSPFGDTLRSFFNKTIFSLLGVELPVGYMDLFASRFPGIIADRGVFALLLGTLIITASQANRLWISAVFLAVFGILVRFAGAVSFGSGYWNGDVIFALFSGGTLAAAFFLAADPATTAKSSIGILIAALAAGCIAFVLRWFGNEPYGVVLTAVFINAMLPMFRVLESRQLYKKQRPQS

SEQ ID NO: 10577 - DNA, 528 bp, Unknown
  Obtained from environmental sample
  misc_feature (1)..(528): n is a, c, g, or t
atgaaggcagccgcttctttctttgggaagcatgtgcttagggagctggacgagaaagaattttttccccgcttgccggatttgcggaacgctgtcggcgaccgggctgttctaagggccatgcacttcttcagcgaaaaccgcagggtcgacgcgatgctggctgcgcttgaggaaatggctgcgcctccggcggaaaaggctatggaagcttatcttgctcttgtcagggaatccggggattcgtcctgggaattattgcaaaacatttactcgccaaaaaatttgaatgcgcagggtttgagcattgctctgtccctgactaaaaatttctttaattcaggctcggctaaaggtgcctgccgagtgcacggcggcgggtttgccgggacaattcaggcatacatcccgacggaaaagctaaaagactaccgcaacctgatggaaggagttttcggatccggaaccgttactgttttgaggattaggccacaaggtgctgttgagttaaatttaaagcaggcttaa

SEQ ID NO: 10578 - protein, 175 aa, Unknown
  Obtained from environmental sample
  misc_feature (1)..(175): Xaa is any amino acid
MKAAASFFGKHVLRELDEKEFFPRLPDLRNAVGDRAVLRAMHFFSENRRVDAMLAALEEMAAPPAEKAMEAYLALVRESGDSSWELLQNIYSPKNLNAQGLSIALSLTKNFFNSGSAKGACRVHGGGFAGTIQAYIPTEKLKDYRNLMEGVFGSGTVTVLRIRPQGAVELNLKQA

SEQ ID NO: 10579 - DNA, 741 bp, Unknown
  Obtained from environmental sample
  misc_feature (1)..(741): n is a, c, g, or t
atgcctgtagaaaggttaactgcagtacaagatattaaaggtaatgccggattattaaaggcatttgtaaaagaaagtgtaatgggtggtttaaccggtaatgatggtatttttaaaaatgccgtaactgtgtatgttcctgatgggattcttattgaacgagatatatttaaagactgtaagcgtttaagagaagtcagactgcctgatgatcttgaaattatagagttttccttatttgaaggatgtgagcagcttgagactgttaatatgccatctgcgttaaaatcaatatacgcctgggcttttaaaaagtgtaaaaaactcaccagaattgatctgccggataatattactataggcggttatgtttttgaagaaacggggattaaaaatataagacttccgtccggtattaagactctggtcaataataattcttataatgccattgggtttggtttattcaaaaaatcagtgcttgaatctattattatccccgaaggggtagaagagataatgacaggcgcatttgaagaatgtacgaaactgaccagtgtctcattaccatcaacaataaaaacaataggatcaggtactgctctttttcagggttcaacttttaggaaatgtaaaaatctgactacattacagataccggatagtgtttctgaaattgtatttgtttatttattcaattttactgaaactaatttgccattaaaaacacaagcccgataa

SEQ ID NO: 10580 - protein, 246 aa, Unknown
  Obtained from environmental sample
  misc_feature (1)..(246): Xaa is any amino acid
MPVERLTAVQDIKGNAGLLKAFVKESVMGGLTGNDGIFKNAVTVYVPDGILIERDIFKDCKRLREVRLPDDLEIIEFSLFEGCEQLETVNMPSALKSIYAWAFKKCKKLTRIDLPDNITIGGYVFEETGIKNIRLPSGIKTLVNNNSYNAIGFGLFKKSVLESIIIPEGVEEIMTGAFEECTKLTSVSLPSTIKTIGSGTALFQGSTFRKCKNLTTLQIPDSVSEIVFVYLFNFTETNLPLKTQAR

SEQ ID NO: 10581 - DNA, 525 bp, Unknown
  Obtained from environmental sample
  misc_feature (1)..(525): n is a, c, g, or t
atgcgtatcctgnacacggaggtaagaaatcaattaggcggtcttagcgacatctgcgctccagttgaagaaatagccaatcttaatattaagccgacacatgtttttattgttgaaaatcttcaaacagggcttgcttttgaagatttatccggctccattgtaatcatggctctaggatatggtgtcaatgttttaggaaacatttcttggcttcatcacgcacaatgcatttactggggagatattgatacacatggctttgcgattctgaatcgcgccagaacatacttgccttcacttaaatcaatactaatggatgaatcaacacttttttcccatcgtgatttatgggttcgagagaaagaacaaagcgcagcaattgaattaccattactcacaaaaagtgaatatgaactttttttatcactgaaaaataattcttttgggcagcaagtccgtctggaacaagagcggatttgttgggatgtagcatgggaagttataacccatttctcaaattag

SEQ ID NO: 10582 - protein, 174 aa, Unknown
  Obtained from environmental sample
  misc_feature (1)..(174): Xaa is any amino acid
MRILXTEVRNQLGGLSDICAPVEEIANLNIKPTHVFIVENLQTGLAFEDLSGSIVIMALGYGVNVLGNISWLHHAQCIYWGDIDTHGFAILNRARTYLPSLKSILMDESTLFSHRDLWVREKEQSAAIELPLLTKSEYELFLSLKNNSFGQQVRLEQERICWDVAWEVITHFSN

SEQ ID NO: 10583 - DNA, 837 bp, Unknown
  Obtained from environmental sample
  misc_feature (1)..(837): n is a, c, g, or t
atgncatctattgaccccagtattggcaggatgggagatgttcttaccatcagaggcagcggattcggggatgaaagagacggatccttcataaccatcgcgggcacttcccccacaagctcttcttacttgttctggagtgaaaatgaaattgccgtacgctcaccggaattcggagaggcagggctggtatatgtttaccgcggtcaaaaaaaaagcaaccctgcgatgtttgccaatatccttacactgccggaatcggtttcaggcgcacagattgataaaagccccgttataaactcaatagaaccatcctccgcccccataggttctctcatcacaattcagggaagcaatttcggcgcgtccagggagacaggcggcgttttttttacatggaacgccgagtctccccaggcagttcagggtaatccctccgaatttgtcgaagtttttcaggaggaatccggttacgaatcctggagcgaaagggaaatccgcgtccgcgtaccggacggggccgtgagcggcaatctggaagtaagaacagcaaagggaaactccaggccggtcaattttgaggttacaggaaagccgggaactaaaacatataaagacaaaaagacatacactctctcctactcggcggaaattcaggtgggaagcgcttctgttccaaacgccctgtacatctggatgccccggcccgcgctttccgcctctcagcggaatgttaccgttctttcccgcagttcagcgccttttgttgaaaattaccggggggcttcccttttccagtatcatgacattcattcgggaactcgtgccgaatnctga

SEQ ID NO: 10584 - protein, 278 aa, Unknown
  Obtained from environmental sample
  DOMAIN (97)...(196): IPT/TIG domain
  misc_feature (1)..(278): Xaa is any amino acid
MXSIDPSIGRMGDVLTIRGSGFGDERDGSFITIAGTSPTSSSYLFWSENEIAVRSPEFGEAGLVYVYRGQKKSNPAMFANILTLPESVSGAQIDKSPVINSIEPSSAPIGSLITIQGSNFGASRETGGVFFTWNAESPQAVQGNPSEFVEVFQEESGYESWSEREIRVRVPDGAVSGNLEVRTAKGNSRPVNFEVTGKPGTKTYKDKKTYTLSYSAEIQVGSASVPNALYIWMPRPALSASQRNVTVLSRSSAPFVENYRGASLFQYHDIHSGTRAEX

SEQ ID NO: 10585 - DNA, 756 bp, Unknown
  Obtained from environmental sample
  misc_feature (1)..(756): n is a, c, g, or t
atgctcatcacaggtccaaatatggcgggcaaatccacatatctgcggcaaaccgccctcataaccctgctcgcccaaacaggttcttatgtgccagcggacagtgccgaaattggaattgtggatagaattttcactcgcgttggagcaagcgaccgcttggcaagaggtctttcaacgtttatggttgagatgaccgaaaccgcaaacattttgcaaaactcaaccccaaacagcttagtccttttagacgaaatagggcgaggcacaagcacatttgatggtctttccattgcgtgggcaataacggaatttttgcacgataatccgcaaaaggcggcaaaaacaatttttgcaactcactaccacgaactaacaaatttaatagaaggtttggagcacgccaaaaattttcaaatctcggttaaagagaataacggaaaactcctatttttgcgaaaggttttggaaggagcttgcgattccagttatggtattcacgtagcagaaatggcaggcgttccaagcgaggttgttcaaagagcaaagcgaattctgttaaggctggaaaaagaaaaaattgacccaagcgacagtgctcacaagcccaaagccgcccagctctctttctttgagccaccgccaataagcgagaacaccgaacttttgctgagagaattaaaggcggtaaatcccgatgatatgacacctcttcaggctttgcagtttgttgggaggattaaggagttggtatga

SEQ ID NO: 10586 - protein, 251 aa, Unknown
  Obtained from environmental sample
  DOMAIN (1)...(192): MutS domain V
  misc_feature (1)..(251): Xaa is any amino acid
MLITGPNMAGKSTYLRQTALITLLAQTGSYVPADSAEIGIVDRIFTRVGASDRLARGLSTFMVEMTETANILQNSTPNSLVLLDEIGRGTSTFDGLSIAWAITEFLHDNPQKAAKTIFATHYHELTNLIEGLEHAKNFQISVKENNGKLLFLRKVLEGACDSSYGIHVAEMAGVPSEVVQRAKRILLRLEKEKIDPSDSAHKPKAAQLSFFEPPPISENTELLLRELKAVNPDDMTPLQALQFVGRIKELV

SEQ ID NO: 10587 - DNA, 753 bp, Unknown
  Obtained from environmental sample
  misc_feature (1)..(753): n is a, c, g, or t
atgtttggctttattctgaaaaaggccagccttaatacgcttcgtatctgtatatgcggcggcggcccgcttgcgcccagcgtatttaaaaaatacaaccagcttggaattgactttgttcagggttacggccttaccgaaacctctcctataataaccattaacccgatagaacaatacaaggttactagtgtcggcaggacatgcccgcatgttgatatgaagatactaaatccggatgatcgtggaattggcgaagtgattttgaaaggccccatggtaatgaaaggttactacaatatgcctaaagaaaccgcggaaacatttaccaaagacggataccttaaaacaggcgacttaggctatatggacagtgaaaattacctgtaccttacaggcagggcaaaaaacgttatcgttaccgaaggaggcaaaaatgtctatcctgaggaaatcgaaaatgaattccagctctttgaggaaattgaacaaataatggtgcgcggttttgtacttgacaaaaaaaataagcaggagaatattgaagcccttgtttatccaaactctgaatttaaggatgataccggcgctgtgccttcctctgaacaaatgaaaagccgtatcgacaatattatcgccgaggtaaacaaaaggctgcagccttaccagcgcatacaaagaaccataattcttgacaagccgatggagatgacaacgaccaagaaaatcaagcgcggagacattttcgggtaa

SEQ ID NO: 10588 - protein, 250 aa, Unknown
  Obtained from environmental sample
  misc_feature (1)..(250): Xaa is any amino acid
MFGFILKKASLNTLRICICGGGPLAPSVFKKYNQLGIDFVQGYGLTETSPIITINPIEQYKVTSVGRTCPHVDMKILNPDDRGIGEVILKGPMVMKGYYNMPKETAETFTKDGYLKTGDLGYMDSENYLYLTGRAKNVIVTEGGKNVYPEEIENEFQLFEEIEQIMVRGFVLDKKNKQENIEALVYPNSEFKDDTGAVPSSEQMKSRIDNIIAEVNKRLQPYQRIQRTIILDKPMEMTTTKKIKRGDIFG

SEQ ID NO: 10589 - DNA, 468 bp, Unknown
  Obtained from environmental sample
  misc_feature (1)..(468): n is a, c, g, or t
ttgctcgaatgcttgattaatcaatacaacagtaacaatgaaaattactttttggataagatcgctgaatttcacttgcaatttgagacgatacaccctttttgcgacggtaacgggcgaattgggcggcttattataaacctgcaattggcagatttagggtttccgcccgtaattattcaaaacaaaggcaagaaagaggattattaccccattttcgacgaatggttagataaacaaaaatctgacagattttccgattatctataccatgctctttccgaatcgctcaacaagcgacttgcctacctacgcggcattgaaatcgtaaaattgtcggagtacgccaaaaataatagtgttggcgccgcattaattaccaacgccgcaaaacgtcaaactataccggcctttcgccaagacggagtttggaggattgctaaagattatgtacgtaataaggattaa

SEQ ID NO: 10590 - protein, 155 aa, Unknown
  Obtained from environmental sample
  DOMAIN (1)...(79): Fic protein family
  misc_feature (1)..(155): Xaa is any amino acid
MLECLINQYNSNNENYFLDKIAEFHLQFETIHPFCDGNGRIGRLIINLQLADLGFPPVIIQNKGKKEDYYPIFDEWLDKQKSDRFSDYLYHALSESLNKRLAYLRGIEIVKLSEYAKNNSVGAALITNAAKRQTIPAFRQDGVWRIAKDYVRNKD

SEQ ID NO: 10591 - DNA, 858 bp, Unknown
  Obtained from environmental sample
  misc_feature (1)..(858): n is a, c, g, or t
atgcttctgccgctcggctctttgtctgaatttgaaaccgacggcatgaaacccgcgatacctttggtctcttttatggacatgctttttttcaacattgaacttttacaggctgccggttttgaccgccctcctaaaaccacagaagatttcctcttatacgcgaaaaccataacatcagccaataacggtattttggcggacgcggcgggcgcggcaatggccctgaacccggcgaacaagcagtccctgtccagggatattttttcgtggatatgggcatcagggtggaatttttggcctgaagagggtccctctgcgccggtaattaacacaaagtcggtgattaacgagttgaatttcctcagcaagctttaccgggggggaactctatccccggaatcgggctctgtttcgagctctgtcccccaaaatcgagctctgtccctaaatagctttgaactgacggaggaacagacgctggaaggtttcgctcaagggaaaatagccatgattatagcctctacccgcgacattcctgctctcagggaaaagatgggtgatggcgtttttggcatatcgacgataccgggcggcggggcggcgggtaaatacagcgtcagccttacgggaatatttgccggaattaacaaaaattgcgcttatccggactccgcgtgggtttttcttgaatttcttgccggtaaaagcccgcttttatgcgctcagttaaaagcggttcccggttatgtgccggatttagtatcaggtgacaataaaaattacataaaagaagaccctttttactccaaagcatgggatattttgaaacttcgtggtgtncggctctcgcgataa

SEQ ID NO: 10592 - protein, 285 aa, Unknown
  Obtained from environmental sample
  misc_feature (1)..(285): Xaa is any amino acid
MLLPLGSLSEFETDGMKPAIPLVSFMDMLFFNIELLQAAGFDRPPKTTEDFLLYAKTITSANNGILADAAGAAMALNPANKQSLSRDIFSWIWASGWNFWPEEGPSAPVINTKSVINELNFLSKLYRGGTLSPESGSVSSSVPQNRALSLNSFELTEEQTLEGFAQGKIAMIIASTRDIPALREKMGDGVFGISTIPGGGAAGKYSVSLTGIFAGINKNCAYPDSAWVFLEFLAGKSPLLCAQLKAVPGYVPDLVSGDNKNYIKEDPFYSKAWDILKLRGVRLSR

SEQ ID NO: 10593 - DNA, 609 bp, Unknown
  Obtained from environmental sample
  misc_feature (1)..(609): n is a, c, g, or t
atgaacaaaaataacggggtttacgcggcaaacgcggcaaacgcgcttgagttaagcgggaaaaaagaagaagctcttttgcggtttattaaagcggggaatatatttcttaatcaggataatcaggcggaacttggcgcaataatgccgaagattttatctttcggcggcggcaactgggaagctcgcgtccttgccggaaaatgggcatatagtatagaagactacaaccgctgcataacggaatttaccgccgcaaataaaatcagatgctccataaaaccgcggccggaagccgacccggctcattattatttgtgggggcttgctttaaacatacaaggaaaaaacaacgatgccgttcgcttggttgaaagggccgtaaggctcgcgcctgactacggtcttttccgtttcaaacttgcggaaatcaaactgacgtccggaattaacaacccgggcctcgctgaggaatttaaacttgccttaagcagcatggatgatcccgacggtaagatggcggaacacgcgggaaatcttctacgtaaagccggaaacacgaaagacgcaaaattctttctcggtaaagcgggaaaagatgctgattga

SEQ ID NO: 10594 - protein, 202 aa, Unknown
  Obtained from environmental sample
  misc_feature (1)..(202): Xaa is any amino acid
MNKNNGVYAANAANALELSGKKEEALLRFIKAGNIFLNQDNQAELGAIMPKILSFGGGNWEARVLAGKWAYSIEDYNRCITEFTAANKIRCSIKPRPEADPAHYYLWGLALNIQGKNNDAVRLVERAVRLAPDYGLFRFKLAEIKLTSGINNPGLAEEFKLALSSMDDPDGKMAEHAGNLLRKAGNTKDAKFFLGKAGKDAD

SEQ ID NO: 10595 - DNA, 831 bp, Unknown
  Obtained from environmental sample
  misc_feature (1)..(831): n is a, c, g, or t
gtgttcaatatagtcaccaatcaaaagctcacggcgtttgtttggataagcgaatcggggcagtacacgctcgctccggggagcggcgtaggctaccagtggcgcgtcaggcggttttacatcacgacgccgcaaaactacaacccgcccgattggatgaccggacgcggaagcgtctcgctctcccaagggttgcacgagcttgagataatgccgggcagcagcaaagggggcgcggagttttcgttcggcggcggctcctcttggaaggtggcgtcgggacgacggaacgagggggtcagcccgaaggcgtcgcttgggccgttcgatctcaaaaaaagccgcaactaccgtttttactttaacgcgataccgcttgaagtggcgtccgtaatcatagataaatatccgccgccggtaaaagagagcgtcgctgacgtgtatttgacgggtgccgccgccgacaaagcggactcggcctccgcccgggcgtcgcagacggcggcgctttcgatgggtgctacacgctacgtgacgctcggcaagcgcggctcggcggacttccggttcaagataaaggagccgggcatctacagggtggagacgacgggccgtctgcatactaaagtcacgttgcgcgaccgcttcggggggcttagcaagtcgcagtcgggcaacggcgtggggcgcaacgcccttgtgacggagttctttctgccgggcgactacctcgcggtggtcgagacaatgggcgagtcggcgggccggacgggcgtggtgatgagcaaaaggggagctgcgcnaaggcggcgcgcttcaggacggggttga

SEQ ID NO: 10596 - protein, 276 aa, Unknown
  Obtained from environmental sample
  misc_feature (1)..(276): Xaa is any amino acid
MFNIVTNQKLTAFVWISESGQYTLAPGSGVGYQWRVRRFYITTPQNYNPPDWMTGRGSVSLSQGLHELEIMPGSSKGGAEFSFGGGSSWKVASGRRNEGVSPKASLGPFDLKKSRNYRFYFNAIPLEVASVIIDKYPPPVKESVADVYLTGAAADKADSASARASQTAALSMGATRYVTLGKRGSADFRFKIKEPGIYRVETTGRLHTKVTLRDRFGGLSKSQSGNGVGRNALVTEFFLPGDYLAVVETMGESAGRTGVVMSKRGAAXRRRASGRG

SEQ ID NO: 10597 - DNA, 309 bp, Unknown
  Obtained from environmental sample
  misc_feature (1)..(309): n is a, c, g, or t
atgaacctgtcaaaatcccgctaccgtgaaggaattcaatgcccaaagatactttggctgaacgagcataaaagcgaagtaagggatgaatccgtacttaacagaaaagttcttgataccggaaacaaagtcggcgatttagcaatgggctattacggagcttacagcgaagtcccttacaataacaataaatcagtaatgattgacgaaacaaaacggcttttggaagcgaatacgtcaattatctgcgaagcttctttttcttatgacggtaatttttgcagtgtcgatatacttcgcgtttgctag

SEQ ID NO: 10598 - protein, 102 aa, Unknown
  Obtained from environmental sample
  misc_feature (1)..(102): Xaa is any amino acid
MNLSKSRYREGIQCPKILWLNEHKSEVRDESVLNRKVLDTGNKVGDLAMGYYGAYSEVPYNNNKSVMIDETKRLLEANTSIICEASFSYDGNFCSVDILRVC

SEQ ID NO: 10599 - DNA, 543 bp, Unknown
  Obtained from environmental sample
  misc_feature (1)..(543): n is a, c, g, or t
atggctgaattaaaaggttcaaaaacagaaaaaaatttagaggctgcgtttgccggtgagtcacaggcgcatgttaagtatcaatattttgcgtcaaaagcggaaaaagaaggctatcagcagattggcgcgattttccgcgagactgcccaaaatgaaaaagaacacgcgaaaatttggtttaaatttttgcataacaatgatgttccgccgaccactgacaatcttaaagccgccgctgacggtgaaaactatgaatggaccgatatgtacgccggttttgcgaaaaccgccaaagaagaaggttttgaccaaattgcggcgttatttgaaatggttggtaagattgaaaaagagcatgaggagcggtaccgcaaactgctcgccaatgttaaagacggccttgtgttttcacgggacggcgaccaggtttggcagtgttccaactgcggacacattatcgtcggaaagaaagctccggaagcgtgcccggtgtgcaagcatcctaaggcgtatttccagattaaggcccaaaattattag

SEQ ID NO: 10600 - protein, 180 aa, Unknown
  Obtained from environmental sample
  DOMAIN (142)...(173): Rubredoxin
  misc_feature (1)..(180): Xaa is any amino acid
MAELKGSKTEKNLEAAFAGESQAHVKYQYFASKAEKEGYQQIGAIFRETAQNEKEHAKIWFKFLHNNDVPPTTDNLKAAADGENYEWTDMYAGFAKTAKEEGFDQIAALFEMVGKIEKEHEERYRKLLANVKDGLVFSRDGDQVWQCSNCGHIIVGKKAPEACPVCKHPKAYFQIKAQNY

SEQ ID NO: 10601 - DNA, 765 bp, Unknown
  Obtained from environmental sample
  misc_feature (1)..(765): n is a, c, g, or t
atggcgtacattccntgggggccggaattgcccgccgccttccccgatgatcccctgctgcgggctgccgccgcggcggaacttgcccgcgtcctgaaacccttcctcccccggacaacggcctttattcgctttgacccgccctggttcgatccagcgggaagtatgccggcgaatttgcccgcgccgtttaagcgggccgccgcggacattcagccgccggacacggttcttattgacctcactccgcctccggaagacatacttgccgccatgaaatctaaatggcgctacaatatcactctcgcagaaaaacacggtgttacggtaaataacgatgaagagcagggtaccgacattttttaccgccttcttaccgaaaccgcggaacgtgacggtcttgccattcacaacatcgaatactaccgggcgctgtttgcggaatgtcaggacaacggcgcggcaatgcccccgcggcttcatttgtataccgcccggcatgaaggcgatactctggcggctattgtggcgcttttccgcggaaagcaggcggtatacctttacggcgcgtccgctaacatcaagcgtaatttaatggccccctacgccctgcaatggaaagccatgcgggacgcgcgggaatacggctgtacgcggtacgatttattcggcataccgcctgacgaaaatcccgatcatcccatggccggtctgtaccgcttcaaaaccaggtttcggcggcgctataatccaccgccccggtag

SEQ ID NO: 10602 - protein, 254 aa, Unknown
  Obtained from environmental sample
  DOMAIN (2)...(254): FemAB family
  misc_feature (1)..(254): Xaa is any amino acid
MAYIPWGPELPAAFPDDPLLRAAAAAELARVLKPFLPRTTAFIRFDPPWFDPAGSMPANLPAPFKRAAADIQPPDTVLIDLTPPPEDILAAMKSKWRYNITLAEKHGVTVNNDEEQGTDIFYRLLTETAERDGLAIHNIEYYRALFAECQDNGAAMPPRLHLYTARHEGDTLAAIVALFRGKQAVYLYGASANIKRNLMAPYALQWKAMRDAREYGCTRYDLFGIPPDENPDHPMAGLYRFKTRFRRRYNPPPR

SEQ ID NO: 10603 - DNA, 873 bp, Unknown
  Obtained from environmental sample
  misc_feature (1)..(873): n is a, c, g, or t
atggaaaggtacattaactgcatcgcgcacaaaacaagcgaaggcaatcttcttgtcggggatgatcataccgccctgtttgactgcggtatggctcattgcgcggacggtaccatacaaaatgttaaaaacgccctgaagggcagaccgctggactatctctttattacccatacccattatgatcatatcggcgcgctgcctttcttcagaaaagaatggccgttgttgcgtctggtaacatcgcagacaggggcggcggttcttttaaaagacactccgcgcagggttatcagggagctttcaatcgtggcggccaatgaatgtaacgcaaaaattgatgccgtctacaatgacgatgcgtttcatgcggacgttatcgttaaagacggagatattattcctcttggagggatctcggttgaaacgctggagacgcccgggcacacgagggatacgctcagctttttcattcccgaacttgaaatactgatagcaagtgaaacaacgggagttttattctccgataatattgtgtatccctcttacctgacaagttttaacgatacagtcaactccatagaaaaatgccgcagtatgccttataaatttttgtcgttgccgcataaaggaattgccgccgaaaaagacgcacatggtttttttgacagatctctggcagccgccaccggctgccgtgattttattgtgagcatgaatgaaaaaaaacttgatcagganacgatgatagatatgttttttcaaaagtacggaagcgaaactcttttcagctaccagccgcgggacgcttttgccgcaaacgtccgcaccacaatcgcttgcaccctgcgtgaatttgcgcctcatgaataa

SEQ ID NO: 10604 - protein, 290 aa, Unknown
  Obtained from environmental sample
  DOMAIN (14)...(209): Metallo-beta-lactamase superfamily
  misc_feature (1)..(290): Xaa is any amino acid
MERYINCIAHKTSEGNLLVGDDHTALFDCGMAHCADGTIQNVKNALKGRPLDYLFITHTHYDHIGALPFFRKEWPLLRLVTSQTGAAVLLKDTPRRVIRELSIVAANECNAKIDAVYNDDAFHADVIVKDGDIIPLGGISVETLETPGHTRDTLSFFIPELEILIASETTGVLFSDNIVYPSYLTSFNDTVNSIEKCRSMPYKFLSLPHKGIAAEKDAHGFFDRSLAAATGCRDFIVSMNEKKLDQXTMIDMFFQKYGSETLFSYQPRDAFAANVRTTIACTLREFAPHE

SEQ ID NO: 10605 - DNA, 834 bp, Unknown
  Obtained from environmental sample
  misc_feature (1)..(834): n is a, c, g, or t
ttgaggcaggcatttgacagagtgaaaatggttgcagacgacatttttgaaagagagttccctattttgagtgatttcaactgctgggatgcccgcgataaatatgcttacgttttgcttgaacccgaaaatcccgaccgtagagaagaatttgcagaagcgatgcttcgcacacacacgaacaaagaagacagaacagaaatgttttctcttttagaaatacaaaaactctgcctttactcttatacgagctgcggctggttctttaacgatgttgaaggtttggagcccgtgcaaaatatgcgttattgtttgagagcaatagaacttttgagcaaatatttgccaaacgaaaatgttttggaaagcgaaattctaaccattttgagcaaaataacatcaaatgaacaccacaaaactggaacggaaatttggactgagtgggtgcgcccaaaaataccagtcccctgcattttaatagccgcagaagctgtgaagctgcatttgggtttgctggcggaaccatctccacacataacagtgaattctacaaagagtatggatagtcaattaattttgaatgccacctacacacacccaaatacttacgagagcaaaaatgtaaatgttttggtagctaccgattccattggaagagttaaaattgtgttgcanacagcaaattcaaatgcaaagcgcataccgatttttgtggaaaaagatgctattgaccaaacgaatttcaaaaatctttatccaaatgcttttgtgcttcgcttgcacgagcttcccgcagatattctcgtagaaattacgaaatgcattcaaggataa

SEQ ID NO: 10606 - protein, 277 aa, Unknown
  Obtained from environmental sample
  misc_feature (1)..(277): Xaa is any amino acid
MRQAFDRVKMVADDIFEREFPILSDFNCWDARDKYAYVLLEPENPDRREEFAEAMLRTHTNKEDRTEMFSLLEIQKLCLYSYTSCGWFFNDVEGLEPVQNMRYCLRAIELLSKYLPNENVLESEILTILSKITSNEHHKTGTEIWTEWVRPKIPVPCILIAAEAVKLHLGLLAEPSPHITVNSTKSMDSQLILNATYTHPNTYESKNVNVLVATDSIGRVKIVLXTANSNAKRIPIFVEKDAIDQTNFKNLYPNAFVLRLHELPADILVEITKCIQG

SEQ ID NO: 10607 - DNA, 552 bp, Unknown
  Obtained from environmental sample
  misc_feature (1)..(552): n is a, c, g, or t
atgatcagatcggccgagatttttttagcaaaggggcaggcaaaagttttttccgattccaaaaactcccgaaacagcattttgaatttgctcggcacaggggatttttttggcgaaatacagttgtttaacgaaagcggcaaaagtttcatttcggttaaagccgaggaagaatgttccattataattttcaaaggaaaagattttataaacgaaatgataaataatcaaaaattattcatagcttttttaaaagaaacatcgcaaaaattaaacaaagcctatatgcaaatagcttccctttctatgagcaccattaaggagagaataaaatcttgcataatgcaattcatagaagaaagaggcattagagtacctcacaacagcggcactgcgataagattgaaaaaccgccccacccaacagcagctggcggagatgagcggcaccacaagagaaactgtgaatagagaattatctgcacttgtaaaaaatggatatatagaattgaacggcaaagatttgcttttgttaaagaatttcccagcttaa

SEQ ID NO: 10608 - protein, 183 aa, Unknown
  Obtained from environmental sample
  DOMAIN (133)...(168): Bacterial regulatory proteins, crp family
  misc_feature (1)..(183): Xaa is any amino acid
MIRSAEIFLAKGQAKVFSDSKNSRNSILNLLGTGDFFGEIQLFNESGKSFISVKAEEECSIIIFKGKDFINEMINNQKLFIAFLKETSQKLNKAYMQIASLSMSTIKERIKSCIMQFIEERGIRVPHNSGTAIRLKNRPTQQQLAEMSGTTRETVNRELSALVKNGYIELNGKDLLLLKNFPA

SEQ ID NO: 10609 - DNA, 339 bp, Unknown
  Obtained from environmental sample
  misc_feature (1)..(339): n is a, c, g, or t
atgcctgaaagccacggggcggtctgtgactggtcgcccgggcggnttgttttcctgggcggcaaagtacggcgagcaaacaaaaagtttatcgctctgcttttagagcggaaagaacacccggaacaggcctataggacatgcgccggcatactgcgcctcgcggcgaccgtaaagccgcagcagatggaagcggcttgtatcgaagcgatggcccgtaatctctactcgtattcatgctntgcgagattgattgaaaatctcaagcttcaggaaccggtccggcatgaaaacctgcggggcagcgcctactacaaggaggacgatcatgttagataa

SEQ ID NO: 10610 - protein, 112 aa, Unknown
  Obtained from environmental sample
  misc_feature (1)..(112): Xaa is any amino acid
MPESHGAVCDWSPGRXVFLGGKVRRANKKFIALLLERKEHPEQAYRTCAGILRLAATVKPQQMEAACIEAMARNLYSYSCXARLIENLKLQEPVRHENLRGSAYYKEDDHVR

SEQ ID NO: 10611 - DNA, 699 bp, Unknown
  Obtained from environmental sample
  misc_feature (1)..(699): n is a, c, g, or t
atgatacaattccttcacgtaagcaaagagtacgaaggcggcttccgggcgctcgacgccctctcgttcttcattgataaggcggaattcgtcttcttgaccggcgcgagcggcgcaggcaagaccacgcttctaaagcacatctacatggaagagcggccgtccacggggcaggtgctggtatgcggttacgactcccgcagcgtgacccaaagcgacatcccgtacctgcgccgcaaattggggatcgtcttccaagactttaggctgctccacgaccgcaacgtcttcgaaaacgtggccttcgcgctgcgtgtgacgggcaccccggagcgcgagataaagcgcaaggtcttcaaagtgctggcgcagaccgggctcagccataagagctcaaactaccctaaccagctctccggcggcgagcagcagcgggtgtccatagctagggcgattgtcaacgagccgtgggtgcttttggcggacgaacctacaggcaacctggaccaagcggtatcaaaagatatattcgaactgttgcagaggataaacacttggggcacgacggtgataatggccacgcacgacctaaacctgatagcgccctaccattatcgagtgatagagttacatcggggaacattgataaagggggccgacgcgacgcttaggccgaagtttataagcggcggcgtttga

SEQ ID NO: 10612 - protein, 232 aa, Unknown
  Obtained from environmental sample
  DOMAIN (28)...(213): ABC transporter
  misc_feature (1)..(232): Xaa is any amino acid
MIQFLHVSKEYEGGFRALDALSFFIDKAEFVFLTGASGAGKTTLLKHIYMEERPSTGQVLVCGYDSRSVTQSDIPYLRRKLGIVFQDFRLLHDRNVFENVAFALRVTGTPEREIKRKVFKVLAQTGLSHKSSNYPNQLSGGEQQRVSIARAIVNEPWVLLADEPTGNLDQAVSKDIFELLQRINTWGTTVIMATHDLNLIAPYHYRVIELHRGTLIKGADATLRPKFISGGV

SEQ ID NO: 10613 - DNA, 816 bp, Unknown
  Obtained from environmental sample
  misc_feature (1)..(816): n is a, c, g, or t
gtgcgcctgccgcaaaaatttctggattccgacccgattggcagagtaatggcggaaaatttgatgcagttgaattttgtaaatgaacagagaatgaggaacttgcagataaaccgcgaatatatgccgtacggcagagttttaattgttgacgatgtggaaacaaatctttatgtagccagaggattaatggcgtcctatgatctttccattgatacggcaatgagcgggtttgaagctattgataaaataaaaaataagtttgattacgatgttatttttatggatcatatgatgccgaaaatggacggtatagaaacgacgaaaaaaatccgtgaattgggatatacaaaaccaatcgtcgcgttaaccgcaaacgcccttacaggacaggcggaaatgttcttaaaaaacggttttgatgaattcatttccaaaccgattgatattcgccagttaaatatggtactgaataaattagtgcgcgataaatatccgccggaagttgttgaagccgcgcgtaaacaaaaggaattaattgccggaagaacaaaaccgcacaatgttgattcgcagttgttggaattttttattcgcgacgcaagaaaggcgatcggcatattggaaagcgtttatttaaacaaatgcagaaggatagacgatctcccaatgtttataatcaatattcacgccatgaaaagcgcccttgcaaacgtgngagaaaaagaactgtcggcggaagcgcttatactggaaacagcgggacgcgaaaacgacataaaacttattttagaaagacttccgntctttnnctga

SEQ ID NO: 10614 - protein, 271 aa, Unknown
  Obtained from environmental sample
  DOMAIN (45)...(158): Response regulator receiver domain
  misc_feature (1)..(271): Xaa is any amino acid
MRLPQKFLDSDPIGRVMAENLMQLNFVNEQRMRNLQINREYMPYGRVLIVDDVETNLYVARGLMASYDLSIDTAMSGFEAIDKIKNKFDYDVIFMDHMMPKMDGIETTKKIRELGYTKPIVALTANALTGQAEMFLKNGFDEFISKPIDIRQLNMVLNKLVRDKYPPEVVEAARKQKELIAGRTKPHNVDSQLLEFFIRDARKAIGILESVYLNKCRRIDDLPMFIINIHAMKSALANVXEKELSAEALILETAGRENDIKLILERLPXFX

SEQ ID NO: 10615 - DNA, 336 bp, Unknown
  Obtained from environmental sample
  misc_feature (1)..(336): n is a, c, g, or t
ttgatggccgagtgtcgcgatgcggtgagagcatattatatgcttgtaaccgtaaatcccgtagctggagaatactacaacattggcggtacatatacttgcaaggttggcgatacgctgaatacattgctgtcattctcggtacgtaatgacattaccgtagaggttgaccctgaacgcttgcgtccaattgatgctgatttgcaggttccgaataccgcgaagtttacggcgcatacgggctggaaaccggaaataccctatgaacagaccatgaaggatttactggattactggcgaaagcgggttaagcttgtttcctttttgacaaggtaa

SEQ ID NO: 10616 - protein, 111 aa, Unknown
  Obtained from environmental sample
  misc_feature (1)..(111): Xaa is any amino acid
MMAECRDAVRAYYMLVTVNPVAGEYYNIGGTYTCKVGDTLNTLLSFSVRNDITVEVDPERLRPIDADLQVPNTAKFTAHTGWKPEIPYEQTMKDLLDYWRKRVKLVSFLTR

SEQ ID NO: 10617 - DNA, 384 bp, Unknown
  Obtained from environmental sample
  misc_feature (1)..(384): n is a, c, g, or t
atgaacatgacgctaccgcccaagcgtccggtgcgttttttcaacaccaccggtccatgttttccgtgggatcactatatgctgccgccggcggataggcttatcggcgccagacttgaccgctatatcagcgacagtctctattgggtcttgcacgcccctaggcagacagggaagacgacatttttgctggattggatgcggaagttaaattccggtggtgatattgcggcgctctatatctcgcttgaggcgtgccagacattggtagaaccggaacactgtatgcccactatttgtgaaataatcaagcaacgagcgaagatgtacgatttacctataccggaggtaaaaacaaccgctccgggcggtatgttaaactga

SEQ ID NO: 10618 - protein, 127 aa, Unknown
  Obtained from environmental sample
  misc_feature (1)..(127): Xaa is any amino acid
MNMTLPPKRPVRFFNTTGPCFPWDHYMLPPADRLIGARLDRYISDSLYWVLHAPRQTGKTTFLLDWMRKLNSGGDIAALYISLEACQTLVEPEHCMPTICEIIKQRAKMYDLPIPEVKTTAPGGMLN

SEQ ID NO: 10619 - DNA, 477 bp, Unknown
  Obtained from environmental sample
  misc_feature (1)..(477): n is a, c, g, or t
ttgatggccgaaatcggtgggaaggatcccactgaccgggggaaaaaagggacgaaacgcagccttgtagtcgagtcacacggattaccggtaggtatagttataagcggagccaacaggcatgacataaagctgctggaagcgacgctccgatccattatcaccgctcatcctgaagggagcaatatatgccttgacgcgggatatgtcggggcgcgaacgctggttgaggcaatggggtatgtggcgcatattcgggggcgtggagaagaaaagcaggaaaaggaacgggaaccggggtttaaagcgcggcggtgggtagttgaagtctgtcattcctggctgaaccgtttcaggaagctgttgatccggtacgaaaaaaaggactgcaattatctggcattgctgcaatttgcctgtgccatcatcgtctggcgacacatcattccggttcatccaggtcttattcccggataa

SEQ ID NO: 10620 - protein, 158 aa, Unknown
  Obtained from environmental sample
  DOMAIN (5)...(145): Transposase DDE domain
  misc_feature (1)..(158): Xaa is any amino acid
MMAEIGGKDPTDRGKKGTKRSLVVESHGLPVGIVISGANRHDIKLLEATLRSIITAHPEGSNICLDAGYVGARTLVEAMGYVAHIRGRGEEKQEKEREPGFKARRWVVEVCHSWLNRFRKLLIRYEKKDCNYLALLQFACAIIVWRHIIPVHPGLIPG

SEQ ID NO: 10621 - DNA, 363 bp, Unknown
  Obtained from environmental sample
  misc_feature (1)..(363): n is a, c, g, or t
gtgaaaatgaggaaggaatttataacctacagcgaggcgttcaagatgcaagttgtagaggagattagacaaggcaaatttgcctcgatactgcaagcacaaaaagcctatggcatttgcgggatgaacacgatacggacatggatcaaaaaatatggtaaggaggaattactgccaaaacgagtgagggtggaaacgatgagagagattgacgagctaaaggaagcaaaaaagaggatacgcgatttggaaaaagcgctctctgacgcgcacatggactactgccttgaaagagcgtttcttgaaatagcgtgcgaacaaatgggcaccagccgggaagacttagagcttatccgggaataa

SEQ ID NO: 10622 - protein, 120 aa, Unknown
  Obtained from environmental sample
  DOMAIN (7)...(87): Transposase
  misc_feature (1)..(120): Xaa is any amino acid
MKMRKEFITYSEAFKMQVVEEIRQGKFASILQAQKAYGICGMNTIRTWIKKYGKEELLPKRVRVETMREIDELKEAKKRIRDLEKALSDAHMDYCLERAFLEIACEQMGTSREDLELIRE

SEQ ID NO: 10623 - DNA, 699 bp, Unknown
  Obtained from environmental sample
  misc_feature (1)..(699): n is a, c, g, or t
gtgaatttactcgtgacaaaagcggccataataggggaacatcccgatacgaatagacgtgttgccgcagaagcgatttttaaaagcgcattgagaaaagacgcgtccttgccaaacgtcaattattggtatagcagatatctaatgcaaaggggcgattatcagagttccagaacttatgctgagcgggcattaaaagcaaagccaaacgaagcacgtttcataacaaggcttggtatggcggagttttaccttaaaaacgatgctagggcagaggagctatataatatatcattgagaataaatcccttcgactacaatgcctggttcagcttgggtgagctttatctgagcaaggcaaacgagagcagctatgttcaagatgttagaaagaacacccgcaaagctctggaatcttatttaaaagcaatagaatacgattcgttgcatataaaatcgcattatcgtattgggcttatattaaatggcaatggtgggcataaagaagcgattaggcatttaatggtagctttggaaaaaatgccaaacgatattcctataatgcaacaactgagcgtagcgtatctgcaattaggcgacactgcaaactccaccggttatctggataagattttgcaattagacccgtttaataaaatagcagctactcaaatgaggagaataaaaggagatatgtga

SEQ ID NO: 10624 - protein, 232 aa, Unknown
  Obtained from environmental sample
  DOMAIN (38)...(71): Tetratricopeptide repeat
  misc_feature (1)..(232): Xaa is any amino acid
MNLLVTKAAIIGEHPDTNRRVAAEAIFKSALRKDASLPNVNYWYSRYLMQRGDYQSSRTYAERALKAKPNEARFITRLGMAEFYLKNDARAEELYNISLRINPFDYNAWFSLGELYLSKANESSYVQDVRKNTRKALESYLKAIEYDSLHIKSHYRIGLILNGNGGHKEAIRHLMVALEKMPNDIPIMQQLSVAYLQLGDTANSTGYLDKILQLDPFNKIAATQMRRIKGDM

SEQ ID NO: 10625 - DNA, 918 bp, Unknown
  Obtained from environmental sample
  misc_feature (1)..(918): n is a, c, g, or t
atgcgccagatctttcttaacctcctgtccaacgcggtaaagtatacagataaagggtgtatcggtttgaccattactatggataaacaggacgataaacaggtcttgctaaggatggatgtggctgataccggaaaaggaattaaaccggagcataaggcgaatctctttgacgattttgtacgtgtagatatgaagaagaaccagggcattgaaggaacaggactgggtcttgccattaccagccggctgtgcgcggccatggacgggaaaataaccatggaaagcgaatacggctgtggcagtgtattcacggtaattatcccgcagggcattgaatccaaagaacctttcgccgtagtggaggagccggataaaaagaaggttcttgtttatgaaagcagaattaattacgctaaatcgttatgctggtcacttgaaaacatgaaggtaccttataccatggtgacaaatcaaaatgagtttgccgccgcgctgtaccgcgaggaatggttctatgtgttttcaggttacggtctttatggaagaattaaaccgcttatagaacaaaacagttcggttttttgcggagggaaaaagccggatttggctcttatggtggaatggggtacagaagcatatatcccaaatgtgcgctttgtgtccataccgatacagtcactttccattgcaaataccctgaacggcaaagctgatcgtcagaactattttgaagtttccgccgattccggcgttatacgccataccttcccccacgcgcggctattggtagtagacgacattcccaccaatcttaaagtggccgagggactcatggctccatataacgcgcagattgacacctgcctcagcggcgcggaagcgatagaactctcggccgatctgatcattggttaa

SEQ ID NO: 10626 - protein, 305 aa, Unknown
  Obtained from environmental sample
  DOMAIN (1)...(111): Histidine kinase-, DNA gyrase B-, and HSP90-like ATPase
  misc_feature (1)..(305): Xaa is any amino acid
MRQIFLNLLSNAVKYTDKGCIGLTITMDKQDDKQVLLRMDVADTGKGIKPEHKANLFDDFVRVDMKKNQGIEGTGLGLAITSRLCAAMDGKITMESEYGCGSVFTVIIPQGIESKEPFAVVEEPDKKKVLVYESRINYAKSLCWSLENMKVPYTMVTNQNEFAAALYREEWFYVFSGYGLYGRIKPLIEQNSSVFCGGKKPDLALMVEWGTEAYIPNVRFVSIPIQSLSIANTLNGKADRQNYFEVSADSGVIRHTFPHARLLVVDDIPTNLKVAEGLMAPYNAQIDTCLSGAEAIELSADLIIG

SEQ ID NO: 10627 - DNA, 402 bp, Unknown
  Obtained from environmental sample
  misc_feature (1)..(402): n is a, c, g, or t
ttgagctacgctgaagaaaacggtttccccgtgatagtccgcgaatattcggattacggcggcggtgatatttcggtggagaaaatcgcggagttcctgaaggaacatcgtcatctttcaggcctttttataaccaacagcatggcccatcgagtggtgcaggcggtacaacagcggagaaaaaaagagccctttctgctggtaggctacgatcttattccttccaaccggcttcttcttcttcagggccgtatcaatgccattatttcccagcgtcccgaggagcagggccgggaagctctgttaaccctgttccgttcagtcgttctggaacagactgtggaaaccaaacgggagataccgctggatgtgtatatacgggaaaacaccccgtccggttaa

SEQ ID NO: 10628 - protein, 133 aa, Unknown
  Obtained from environmental sample
  misc_feature (1)..(133): Xaa is any amino acid
MSYAEENGFPVIVREYSDYGGGDISVEKIAEFLKEHRHLSGLFITNSMAHRVVQAVQQRRKKEPFLLVGYDLIPSNRLLLLQGRINAIISQRPEEQGREALLTLFRSVVLEQTVETKREIPLDVYIRENTPSG

SEQ ID NO: 10629 - DNA, 573 bp, Unknown
  Obtained from environmental sample
  misc_feature (1)..(573): n is a, c, g, or t
gtggttgtcgatggccttacttttctggcttctttaaacagcgaaggactgttgacccagcaatcttttacggctgatccggccggaaaactaaatgattttatctccggaaaagcggtttttatgattgccccggctggcgaaattgggtttgtcagggaacaactgggggaagaggcctttggcgttacctcgattcctgtgccggacaattacgcgggaaagtcatttttcgctgtttccgcctggactaccggcgtttattccgcctccgcccaaaaagaaaaagcaaagctttttgcggatttccttgcagagaaggcggcatttatatcgaacaggatgaaggcaattcccggaaacggcattccccccgtttacgacattttttattccaaggtgtgggatatagcaatcgcgggcgaagccgcccaggattttgccggcctcaactggctggaactggaagagagctttaaggaagaactatccgccctttttaccggaaacgcctcggctgccgaaacagccgcctccatacaaaagcgatgggagagtattatttctccttag

SEQ ID NO: 10630 - protein, 190 aa, Unknown
  Obtained from environmental sample
  misc_feature (1)..(190): Xaa is any amino acid
MVVDGLTFLASLNSEGLLTQQSFTADPAGKLNDFISGKAVFMIAPAGEIGFVREQLGEEAFGVTSIPVPDNYAGKSFFAVSAWTTGVYSASAQKEKAKLFADFLAEKAAFISNRMKAIPGNGIPPVYDIFYSKVWDIAIAGEAAQDFAGLNWLELEESFKEELSALFTGNASAAETAASIQKRWESIISP

SEQ ID NO: 10631 - DNA, 552 bp, Unknown
  Obtained from environmental sample
  misc_feature (1)..(552): n is a, c, g, or t
ttgcgcgaaatggggatctccgtggtgtatatcactatgagcgcgagcattaacgatatttacaatgacattgcgtttatagcggatattttgcaggtacaaaaagagggagaaaggctgataaatacgatgaagacgcaaattgatgaaatctcgcaggaaacggcgcaaatgacagctaacacagaaaaaaaaacgaccgtttattttgaaatttccgccgcgccggatatgatgactttcgggaaaggcagttacattaacgatatgatttccgtaatcggggcgaaaaatatttttggagatgaaaattggcttgtaactccgggcgcggaagcggttatcagccgcaatcccgatgttattcttaccaatgtaaattatattgacgatccaatcgcggaaataaaaagccgcccgggttttaaccatatcaacgccgtaaaaaacaaccgcatttatcaaattgataccgattcctcggtgcgtccttcaagccgtattattttggctttacggcaaatgtcgcaggcggtacattttgaatattaa

SEQ ID NO: 10632 - protein, 183 aa, Unknown
  Obtained from environmental sample
  misc_feature (1)..(183): Xaa is any amino acid
MREMGISVVYITMSASINDIYNDIAFIADILQVQKEGERLINTMKTQIDEISQETAQMTANTEKKTTVYFEISAAPDMMTFGKGSYINDMISVIGAKNIFGDENWLVTPGAEAVISRNPDVILTNVNYIDDPIAEIKSRPGFNHINAVKNNRIYQIDTDSSVRPSSRIILALRQMSQAVHFEY

SEQ ID NO: 10633 - DNA, 822 bp, Unknown
  Obtained from environmental sample
  misc_feature (1)..(822): n is a, c, g, or t
atgctggcatcggcaatagtcaaaccgaccagcgctgtcgtattgccgcttgagcctgagtttatccggaacgaagacgggaaagagaaacaggattgcgagcggaatgcggcgaaacgctatcttgagaggaaaggggaacgcttagaggggctgaaaccgacgtttttaggggatgatttgtatgcgtgccattcgatatgcgccaagatactggatatggggatgagtttcatattcacgtgtaaagacgaaagccatccgtggatagcggaacaggtgaagtacgcacggatggaagggtatgtgcgcagcgaatggaacggaaggaaccacctcgaataccggtacgcatgggtaaacgggatagaaaaccgggccgagggggagaagctttcggtgaattacctgagcctccagatatggaaccaagagaaggatgaaatcacctatagcaacagttggataacgaataaaccggtgactgccgatacggcggcgtttttggcgcattgcgcccgtacccgctggaagatagaaaacgagtataacaacgtgctgaaatgccgggggtacaatctggagcacaatttcggacacgggcaagagcatgcggcggatatatattgccttttgaacatattggcattcttgtttcacagtatacaggacgcccttgatgaagattaccaagccgcgcggaaatccttcggcaggcgggatgcttttttctgggctttacgctatgaaatatgccgctatctgcataacgactggtctttgttcttcctcaccgtcgccggtcaagctccggatggttga

SEQ ID NO: 10634 - protein, 273 aa, Unknown
  Obtained from environmental sample
  misc_feature (1)..(273): Xaa is any amino acid
MLASAIVKPTSAVVLPLEPEFIRNEDGKEKQDCERNAAKRYLERKGERLEGLKPTFLGDDLYACHSICAKILDMGMSFIFTCKDESHPWIAEQVKYARMEGYVRSEWNGRNHLEYRYAWVNGIENRAEGEKLSVNYLSLQIWNQEKDEITYSNSWITNKPVTADTAAFLAHCARTRWKIENEYNNVLKCRGYNLEHNFGHGQEHAADIYCLLNILAFLFHSIQDALDEDYQAARKSFGRRDAFFWALRYEICRYLHNDWSLFFLTVAGQAPDG

SEQ ID NO: 10635 - DNA, 699 bp, Unknown
  Obtained from environmental sample
  misc_feature (1)..(699): n is a, c, g, or t
gtggatgatccctaccataactacttcttccttaccagtttcgggatgcagcttttcgggccgancatggatgatttcaagctgccgggctttgacagtccccnagcagcgcaaggggcggcatttcacacaagcctcaggcagtattacgacgtgaacacggcggacgccacatgggattccaccgttgccgcctttcagcgcggcgaggttccctttacgattaccggcccctgggctataggcgacgccaaaaagaacgatgtcaacttcggtattaccaaactgcccacaattaagggaaatcagccgcgctgcttcagcggcaatatcatcgcggccgtttccagttacgcgaaaaacgtccccgcggcgcaggcttttgtcgatttcctcgtcagcgtggaaggcgtgaccatacaattccaacagaccggcaagctggcggcgtacaaggacataagcgggattgaaggcctgcgcgacgacgtgctgctgcgcggtattatggaacagtccccttacgccgaccccatgccggtgatccccgaagtgaatcagatgtgggacgcgctgaaggccctttttacctttacctgggacaatcagctttccgttgaagacgcgcagaaaaaagcgatggacacttatgacaccgcgctgatgatggccggaaaatcaagattctggagcgactga

SEQ ID NO: 10636 - protein, 232 aa, Unknown
  Obtained from environmental sample
  misc_feature (1)..(232): Xaa is any amino acid
MDDPYHNYFFLTSFGMQLFGPXMDDFKLPGFDSPXAAQGAAFHTSLRQYYDVNTADATWDSTVAAFQRGEVPFTITGPWAIGDAKKNDVNFGITKLPTIKGNQPRCFSGNIIAAVSSYAKNVPAAQAFVDFLVSVEGVTIQFQQTGKLAAYKDISGIEGLRDDVLLRGIMEQSPYADPMPVIPEVNQMWDALKALFTFTWDNQLSVEDAQKKAMDTYDTALMMAGKSRFWSD

SEQ ID NO: 10637 - DNA, 474 bp, Unknown
  Obtained from environmental sample
  misc_feature (1)..(474): n is a, c, g, or t
ttgggcgcagcccttgccaacgtcgccatagccgcacacaacggcgatcttgccagctaccatgacatcggtggcgcgcttgatgccgtccacaagggattccctgcagccatagaggttgtcgaacttgctctttgtgacgctgtcgttgacgttgatggcggggactttcagctcgccgtttttgttcatttcataaaggcggtgtacgccagtggtggtttcttcagtgatgcccttgatgcctgcgagctggcgcgaataccaagttgggtcggacttgaggcggtttttaatggatgcgtacagcactgtggcctcttcgctgcctgggctgtccaaaacgtggatgtctttttctgcctttgcgccaaggtgcagcaggagcgtcgcatcgccgccgtcgtccaagatcatgttggcgccgccgtcgaattcaaatattttgtgggtgaagccccagtattcttctag

SEQ ID NO: 10638 - protein, 157 aa, Unknown
  Obtained from environmental sample
  misc_feature (1)..(157): Xaa is any amino acid
MGAALANVAIAAHNGDLASYHDIGGALDAVHKGFPAAIEVVELALCDAVVDVDGGDFQLAVFVHFIKAVYASGGFFSDALDACELARIPSWVGLEAVFNGCVQHCGLFAAWAVQNVDVFFCLCAKVQQERRIAAVVQDHVGAAVEFKYFVGEAPVFF

SEQ ID NO: 10639 - DNA, 960 bp, Unknown
  Obtained from environmental sample
  misc_feature (1)..(960): n is a, c, g, or t
ttggccgagacagccaaaccgggtaatgcgtcttctgacaaccttgtcaagctgaagcacgttaagatcgatcgcaccggaacgtccattaccgggcgtgaagagctcgtttgggtcgtcggcggccacgtgacgtttgagggcgagaaatcatcggtagacgccagcaagggcacgggttcgatcgcgatcttggcggcgaagcacaatacaactacgcctgggtcggtgaccacggatttgggaactgtcgttgtcgacggcggcaagatcaccggagataagaacgcggttgtggcggagaaaatttctgtcacggacggcaagacaaacaccaacgccaagacccagttggtaacaatcatctccgcgaaaacgggcgcgacgcttttggcgacgggcgagatacttgtgaacaacggcgcggctgtcatttggctgaccgacggcaaggacggcgtctccagcgcggcggtcaaaacgatggccggcgcgatcaaaatcctcaacgcggactcgatttgcgcgtccggcgcgggcgcggcggcgctgctggccattgacaatgatccggcaggttcgaacgcttctgttacggtggtaggcggcaagatcaaatccgcgggcggcaccgcgattttggcggacggggcggtaagcgtcaaccaaagggtgctctatactgccggcggaagtcttaacaccgacgacaacaataactttacgacaggttactacggatcgtccagcgggcctgcggttttgggagcccgctcgatagacgtgatttccaacggcgcctcgacatacgccgctattgatccaagctccagaccgtgtttgtggggtgggcaagagttaccacccacgcgacgggaaccccggccgtcaaggttatcacagcccgggggacatcgccgtacggtgaacgacgtccgcgcgatatcaagtccggcttaa

SEQ ID NO: 10640 - protein, 319 aa, Unknown
  Obtained from environmental sample
  misc_feature (1)..(319): Xaa is any amino acid
MAETAKPGNASSDNLVKLKHVKIDRTGTSITGREELVWVVGGHVTFEGEKSSVDASKGTGSIAILAAKHNTTTPGSVTTDLGTVVVDGGKITGDKNAVVAEKISVTDGKTNTNAKTQLVTIISAKTGATLLATGEILVNNGAAVIWLTDGKDGVSSAAVKTMAGAIKILNADSICASGAGAAALLAIDNDPAGSNASVTVVGGKIKSAGGTAILADGAVSVNQRVLYTAGGSLNTDDNNNFTTGYYGSSSGPAVLGARSIDVISNGASTYAAIDPSSRPCLWGGQELPPTRREPRPSRLSQPGGHRRTVNDVRAISSPA

SEQ ID NO: 10641 - DNA, 684 bp, Unknown
  Obtained from environmental sample
  misc_feature (1)..(684): n is a, c, g, or t
atgaaaatgacgcggaagctctgtttatgcccgccnggtttgcttatggaatctcagcgcgcggaagatcaaccgaaaggcagggaaatgcttgaacgtcttaagaagacaagcagttcttccgtagaagtgttaagtttgagcgtaaaggacgcaatacagagggaaagatggcaagaagcgcaggggtatntgaatcgtattcttgccatccgccgcacagcgcaagatttaacagacgcgtacaccgttgagcgcggacttggaaacaacgcaagggctcttacctttgcccgcgaattgtatgatcgtgataattccaatcacgaatacgcggcgatttatatttccgctctgattaattccggcagaagggacgaagcctcccgtattctggaaaaccgcattatttcggcggcaagcggtcaaattaaaagcaaatattattttctgcgcagccgtttacagacaaatcaggaagacgttctggctaacttacgctccagtctttttgaagaccccagaaatcttgacgcgcttatagccacatttgaaatctaccacaatcgccgcgaagaacgccgcgcggtttactatttaaaacaagcgctcgccattgcccctgatcatccagcattgaaacgttatgagaaagaatacgcttcgctgttaggcaagaattaa

SEQ ID NO: 10642 - protein, 227 aa, Unknown
  Obtained from environmental sample
  SIGNAL (1)...(21)
  misc_feature (1)..(227): Xaa is any amino acid
MKMTRKLCLCPPGLLMESQRAEDQPKGREMLERLKKTSSSSVEVLSLSVKDAIQRERWQEAQGYXNRILAIRRTAQDLTDAYTVERGLGNNARALTFARELYDRDNSNHEYAAIYISALINSGRRDEASRILENRIISAASGQIKSKYYFLRSRLQTNQEDVLANLRSSLFEDPRNLDALIATFEIYHNRREERRAVYYLKQALAIAPDHPALKRYEKEYASLLGKN

SEQ ID NO: 10643 - DNA, 777 bp, Unknown
  Obtained from environmental sample
  misc_feature (1)..(777): n is a, c, g, or t
atggaaagaaaaatggacgaacttgataaagaagaccttgaattcatcgcgccgtataaggaacggctccttgcgatgtcaattaatttaagtgaatacctcatgcatcacaagaattctcaggtgctttttgagggtgcacaggggacgcttcttgatctcgatcttggaacctatccctatgtgtcgagcggaatgtcgtgcgcagccggagccgcagtgggcggctgtatcgggccgcgcgcaatcaacaaggtactcggtgtttttaaagcctactccactcgtgtcggaaacgggccgcttcccagcgaattcgacccgaactccgaagacgagctttgccgctttgtccgtgacacaggtcgtgaatacggcgttactaccggaagacccagacgctgcggctacctcgatcttgtgtccctgcgttacgcctgtcttaccaattcaattgacagccttgtaatgactcaccttgacgtatacgacacctttgaggaaatcaaagcctgcatcgcgtaccgcattgacgataaaatcatagaatcctttcctgcttccattgatgaactgaacaaagccaagcctgtactgcggacattttccggctggaaaaaatcccttgcgggagctctcacctatgaagaattccccatagcggcaatggagtacatagaatttatagagcgtttctgtgaaactcctattgatattgtgtcggtcggttatgaccgcaaggcaacaataattagaaagagcccttggactcgctag

SEQ ID NO: 10644 - protein, 258 aa, Unknown
  Obtained from environmental sample
  DOMAIN (2)...(251): Adenylosuccinate synthetase
  misc_feature (1)..(258): Xaa is any amino acid
MERKMDELDKEDLEFIAPYKERLLAMSINLSEYLMHHKNSQVLFEGAQGTLLDLDLGTYPYVSSGMSCAAGAAVGGCIGPRAINKVLGVFKAYSTRVGNGPLPSEFDPNSEDELCRFVRDTGREYGVTTGRPRRCGYLDLVSLRYACLTNSIDSLVMTHLDVYDTFEEIKACIAYRIDDKIIESFPASIDELNKAKPVLRTFSGWKKSLAGALTYEEFPIAAMEYIEFIERFCETPIDIVSVGYDRKATIIRKSPWTR

SEQ ID NO: 10645 - DNA, 426 bp, Unknown
  Obtained from environmental sample
  misc_feature (1)..(426): n is a, c, g, or t
atgagcaggaccttcgggtatcccgattttatatctttgatagtggattttaccgttaaggtgaacaaaagcctcgcaccactccgaaagagcgtttactacggaaacgccgacaccgtgaagaccgccggaaaccttataagactttttatcaaacttgccgcccgcgtggagccgtgtcattacaagctcaagagcgctgacattttcggcgggatgaatatcaaccggaataccccgcccattatcctcaacacggacaatatcatttccttcaagaacaacgagaatattggtacagaagccctgcatggcctcgtcaacagagttatctacaacttcaaaaaccaaatgatgaagaccgtcaatgcctgtcgtcccgatatacattcccggacgcttgcggacagcctccaacccttttaa

SEQ ID NO: 10646 - protein, 141 aa, Unknown
  Obtained from environmental sample
  misc_feature (1)..(141): Xaa is any amino acid
MSRTFGYPDFISLIVDFTVKVNKSLAPLRKSVYYGNADTVKTAGNLIRLFIKLAARVEPCHYKLKSADIFGGMNINRNTPPIILNTDNIISFKNNENIGTEALHGLVNRVIYNFKNQMMKTVNACRPDIHSRTLADSLQPF

SEQ ID NO: 10647 - DNA, 378 bp, Unknown
  Obtained from environmental sample
  misc_feature (1)..(378): n is a, c, g, or t
atgaaagtgaaagtcttggtagtagacgattccgccgtcgtgcggcaaatactgacacgagagttctctaaggacagggacatcgaggttgtgggcacggcccccgacccctacgtcgctcgcgataagatagtgcagctcaagcccgatgtggttacgctagacgtggaaatgccgcgtatggacggcgtgaccttcctgcgcaaactgatgaagcaccacccgatcccggtcatcatcgtttcgtcgctgaccgtcgccggcagcgagctcgctatggaggccctgcagtacggcgccatagacgtgatgtgcaaacccggccaccgcttacagcgtgggcgacatgtccgagatactatacctcggccgatctga

SEQ ID NO: 10648 - protein, 125 aa, Unknown
  Obtained from environmental sample
  DOMAIN (3)...(119): Response regulator receiver domain
  misc_feature (1)..(125): Xaa is any amino acid
MKVKVLVVDDSAVVRQILTREFSKDRDIEVVGTAPDPYVARDKIVQLKPDVVTLDVEMPRMDGVTFLRKLMKHHPIPVIIVSSLTVAGSELAMEALQYGAIDVMCKPGHRLQRGRHVRDTIPRPI

SEQ ID NO: 10649 - DNA, 723 bp, Unknown
  Obtained from environmental sample
  misc_feature (1)..(723): n is a, c, g, or t
ttgatggccgagattatgacaccagcaagctggcccttcccgggcatggtttttcaaaaattatccttttgcctggaagatgggcagatttacaatattgtttttaacagcattttatatacgtcagttactgttatttcggtaattatactgagttttatggcgggtttcgcctttgccaaacttccgtcaaaactgacgcccatattgcacggcagttttataatcgggattcttttaactttacagtcaataatggttccgctttttctgatgatcaacgcggtcggcctgtacaatacgcgtctgggggtgcttatcccctatgtcggaatcgggcttcccatggcggtttatctcagcaccgaatatatcaagagcgtgcccgattcgatcattgaatcggcccgtcttgacggcgcgaaatatctgcgtatctttcagagtattataatgcctatcgccgcgcctgtagccgcgacagtcgccattcttggggttaccggaacctggaacgagtttatgctggttaatattctggtttcccaaaacgagcttaaatcgctgccggtggggatcaatatgttctccggcgcgctggcttccgattacggcaaacaattctcggcgctggttatcggcatgattccgatgatcatattttatattattttcagaaaacaaattaccaggggtgtttccgccggcgctgttaaggcttaa

SEQ ID NO: 10650 - protein, 240 aa, Unknown
  Obtained from environmental sample
  DOMAIN (34)...(235): Binding-protein-dependent transport system inner membrane component
  misc_feature (1)..(240): Xaa is any amino acid
MMAEIMTPASWPFPGMVFQKLSFCLEDGQIYNIVFNSILYTSVTVISVIILSFMAGFAFAKLPSKLTPILHGSFIIGILLTLQSIMVPLFLMINAVGLYNTRLGVLIPYVGIGLPMAVYLSTEYIKSVPDSIIESARLDGAKYLRIFQSIIMPIAAPVAATVAILGVTGTWNEFMLVNILVSQNELKSLPVGINMFSGALASDYGKQFSALVIGMIPMIIFYIIFRKQITRGVSAGAVKA

SEQ ID NO: 10651 - DNA, 678 bp, Unknown
  Obtained from environmental sample
  misc_feature (1)..(678): n is a, c, g, or t
ttggctccgtcagagagggattggagatccgaaactcgcttttcactggaagaagatagagtttttgaagggcgtattcttggcccgcgagttttcccggccggacggttccaccataagcgtgaagaatttgagggagtccaggccgatcaagagcgcgcgagttgcggcgcccgcaacggcggctggggcagttacggcggcggcgggggcggttcccggcggcgcggcggcggttctggcggcgagggcggcggctatcgcggcggccaacaaggccaaggccgaggcggccaaggcggccatgcagcagaagatcgccgagaaggccaagctcaaggcggcggcggcggtgcagctcaccgaccaagacccggtgttcacctccaccgtcaactgcccgatctgcggatacaccggcataaccaattacgagctccgcgcaaagagccagcaggtggtgcagaccgtcttccttgtgcccgtctactcggggtcgagcggctaccagaccgtagactacacgcgcctcgccgtaaccgtctgcccgatgtgccttttggcgtcgcccgacaagaaaaacttcaactacccctccatcaccggaaaaggcgaagagccatcgtccctccaagcgagcgtgatcctcgccctgaaggacaagatcgaggagcataa

SEQ ID NO: 10652 - protein, 225 aa, Unknown
  Obtained from environmental sample
  misc_feature (1)..(225): Xaa is any amino acid
MAPSERDWRSETRFSLEEDRVFEGRILGPRVFPAGRFHHKREEFEGVQADQERASCGARNGGWGSYGGGGGGSRRRGGGSGGEGGGYRGGQQGQGRGGQGGHAAEDRREGQAQGGGGGAAHRPRPGVHLHRQLPDLRIHRHNQLRAPRKEPAGGADRLPCARLLGVERLPDRRLHAPRRNRLPDVPFGVARQEKLQLPLHHRKRRRAIVPPSERDPRPEGQDRGA

SEQ ID NO: 10653 - DNA, 372 bp, Unknown
  Obtained from environmental sample
  misc_feature (1)..(372): n is a, c, g, or t
atgatacaagtggaatccttcctgaatgtggcggataattcaggagccaagcgcgcccaatgcatcaaggtgcttggcggcagcaagcggcgttacgccggcattggggatataatcgtcgtggcggtgaaggaagccctgcctacgtcggctattaaaaaaggctcggttgaaaaggcggtgatagtgcggacccacaaggagtaccggcggccggacggaacctacatccggttcagcgacaacgcctgcgtaattatagatgccgcgttgaatcccaaaggaaagcgtatcttcgggccggtggcgcgggaactgcgggaaaaaggggaatttatgaaaattgtttcccttgcaccggaggtattgtga

SEQ ID NO: 10654 - protein, 123 aa, Unknown
  Obtained from environmental sample
  DOMAIN (1)...(123): Ribosomal protein L14p/L23e
  misc_feature (1)..(123): Xaa is any amino acid
MIQVESFLNVADNSGAKRAQCIKVLGGSKRRYAGIGDIIVVAVKEALPTSAIKKGSVEKAVIVRTHKEYRRPDGTYIRFSDNACVIIDAALNPKGKRIFGPVARELREKGEFMKIVSLAPEVL

SEQ ID NO: 10655 - DNA, 708 bp, Unknown
  Obtained from environmental sample
  misc_feature (1)..(708): n is a, c, g, or t
atgggacagaaagttaacccgattgggcttcgggtcggcatcaacaggacatggggttcccgctggtacgtggatcccaaggaatacgcggatacgcttcacgaggatcttaaacttcgcaaacagattctggatatgcccgagacaaagggggctgacatagcggagcttgtgattgtccgccatccccagcgcataaccattacaatccataccgcgaggccgggcgttattatcggcgtcaaaggcgcgaacatagacaagatcaaagcggaattgcagaagaacaccgcaaagaaagttgaaataaaaataaaggaaatacgcagcgcggagggtaacgcccagatcatcgcccagaatatcgcgcggcagcttttggcccgctcgtctttcaggcggacaatgaagcaggctatttccaacgcgatgaaaaaaggcaacgcacagggcgtgaagataaggctttcaggcaggcttggcggcgcggagatgtcccgtaccgaagaagccaaggaaggcagaatcccgctgcacaccctgcgggccgatattgaatacggttttgccgaagcgcanaccaccttcggcgcgattggcgtcaaggtatgggtttacaacggtatgaaattcggcaaggaacaaaaagaagacgcgggagcgctcgtccgcaagcggcgggagcgttccccaggcggtagaggttag

SEQ ID NO: 10656 - protein, 235 aa, Unknown
  Obtained from environmental sample
  DOMAIN (65)...(119): KH domain
  misc_feature (1)..(235): Xaa is any amino acid
MGQKVNPIGLRVGINRTWGSRWYVDPKEYADTLHEDLKLRKQILDMPETKGADIAELVIVRHPQRITITIHTARPGVIIGVKGANIDKIKAELQKNTAKKVEIKIKEIRSAEGNAQIIAQNIARQLLARSSFRRTMKQAISNAMKKGNAQGVKIRLSGRLGGAEMSRTEEAKEGRIPLHTLRADIEYGFAEAXTTFGAIGVKVWVYNGMKFGKEQKEDAGALVRKRRERSPGGRG

SEQ ID NO: 10657 - DNA, 666 bp, Unknown
  Obtained from environmental sample
  misc_feature (1)..(666): n is a, c, g, or t
ttgtacgcacaagatcaaggattccggcggaaaaccgcgcattttaacgcaaggcggtcaactcatgtttctcccgatattcctattattgttttgataaacaaagcatccgcttcggcttcggaaattgtcgcaggcgcgcttaaagatcgcggcagggcgtaccttgtcggggaaaacacattcggtaaaggttctgtccagcaggtattcccgattaataatacaggtttcagaataaccacagcgcgctattttacgccgagcgatgtaaatattgataagatcggcattccgccggatcgcttggtaagttttcccgattacacggaggaagactcggtaaaattgaatgaactaatcaacgcaaacagaatccccgaatttgcagaaaaaaacccgcaggcaaatacagcgcagattgaggcttttgccgcgcttcttgaaaaagagtaccatttggatcaatctctgcttaaacggcttataaggaatgaattgcaccggacagaaattgcgccggtttacgatcttgattacgatatccaattacaggaagcgctcaaaattttacacagcggagagtttccgaaccttttgcgtaacgccaaaacattaaaggcattgcaggaagaagcggagagtgaactgtcattggcttcgtga

SEQ ID NO: 10658 - protein, 221 aa, Unknown
  Obtained from environmental sample
  DOMAIN (2)...(104): Peptidase family S41
  misc_feature (1)..(221): Xaa is any amino acid
MYAQDQGFRRKTAHFNARRSTHVSPDIPIIVLINKASASASEIVAGALKDRGRAYLVGENTFGKGSVQQVFPINNTGFRITTARYFTPSDVNIDKIGIPPDRLVSFPDYTEEDSVKLNELINANRIPEFAEKNPQANTAQIEAFAALLEKEYHLDQSLLKRLIRNELHRTEIAPVYDLDYDIQLQEALKILHSGEFPNLLRNAKTLKALQEEAESELSLAS

SEQ ID NO: 10659 - DNA, 846 bp, Unknown
  Obtained from environmental sample
  misc_feature (1)..(846): n is a, c, g, or t
atgaaaaaattctctgtccccgcagaaaatggtgttattacgtctcttgtaaaagataaaaaaacagtaccgccgccgcagttattcaatcttaccgcgttacaaaaagaagcgcataaaaaatacggttacgctccggaaagaactcttgaaatcgcccaatcactgtatgaaaaacacaaatgcttatcatatcctcgcactccttcccgcgtcatgggcgatgataatgtcgctcttgttcaaagtatttataataaattaaaatcatattatgattctgaagtaattgcgaattccgaaccttctctaatttcaaatgataacaaacgtctttttaattcggcggaattacaggaccaccacgctcttatgcctcttgccccttatcccagagaccttgatggcgatcctcacttgaatgacacggaggtagatgaagtaaatatttattcgcttgtttttaacagattttttaccgttctcatgccgccttatgtttacaattccatcgccatcgatgtcgatatatccggacacaaatttatagggaatggtatagaagttataaacacgggttggaaaactgtctgtgaaaaagattccgatgaagatgattctccggaagattattccggaattgtccaaggaaagggatataaagttgtttctttaaaaactctcagtaaaaaaacagaaccaaaaaaacattatactttcgcctctttgttacaacttatggaaaatcccaggggagacgacggcaaacacctcacggggcttggtacgccggcgacgcgcggcgcgatactgcagaaacttgttgaccgcaagtacgtcgcctga

SEQ ID NO: 10660 - protein, 281 aa, Unknown
  Obtained from environmental sample
  DOMAIN (1)...(281): DNA topoisomerase
  misc_feature (1)..(281): Xaa is any amino acid
MKKFSVPAENGVITSLVKDKKTVPPPQLFNLTALQKEAHKKYGYAPERTLEIAQSLYEKHKCLSYPRTPSRVMGDDNVALVQSIYNKLKSYYDSEVIANSEPSLISNDNKRLFNSAELQDHHALMPLAPYPRDLDGDPHLNDTEVDEVNIYSLVFNRFFTVLMPPYVYNSIAIDVDISGHKFIGNGIEVINTGWKTVCEKDSDEDDSPEDYSGIVQGKGYKVVSLKTLSKKTEPKKHYTFASLLQLMENPRGDDGKHLTGLGTPATRGAILQKLVDRKYVA

SEQ ID NO: 10661 - DNA, 675 bp, Unknown
  Obtained from environmental sample
  misc_feature (1)..(675): n is a, c, g, or t
ttgtcgcatctcaggctgccgtcaacgatgccgggcaagatttgcctcatggcgcgtgaaacttttacatggcgcttaacgagagcgtgggcggtccgtcgaacgttttccaaagcggcggcatttcgccggaggagatggtcgtgccgctgtacgtctgccgcccgctcgcggggatggcgcggtagcgggaattttataaggagcgttgcgatgacggcaaaaacggtaaaaacacagacatcgtcagcggaagagacgcggcgcttgggcgcaaaactggccgaaaccgcgtcttccggcgacgtcttctcgctgaacggcgatctcggcagcggcaagacggagttcgtacgcggatttgtcgaggcgctgtcgcaagacgcgttggtgcacagccctacattctcaattgtcaacacgtatcccgcgccggatttcccgatacaccactttgatttctataggatagaggacgttagggaattcgcggcgataggattggacgaatacttaaacggcgacggcgtatgtttggttgaatggggggagatgtatcccgaagttctgcccgacaccgcgaagcgtataaaatttacagagatcgacgaggctacgagatcgatagaaatgttttttgaaaacgatatatttaataccgcaaactccccatag

SEQ ID NO: 10662 - protein, 224 aa, Unknown
  Obtained from environmental sample
  DOMAIN (87)...(209): Uncharacterised P-loop hydrolase UPF0079
  misc_feature (1)..(224): Xaa is any amino acid
MSHLRLPSTMPGKICLMARETFTWRLTRAWAVRRTFSKAAAFRRRRWSCRCTSAARSRGWRGSGNFIRSVAMTAKTVKTQTSSAEETRRLGAKLAETASSGDVFSLNGDLGSGKTEFVRGFVEALSQDALVHSPTFSIVNTYPAPDFPIHHFDFYRIEDVREFAAIGLDEYLNGDGVCLVEWGEMYPEVLPDTAKRIKFTEIDEATRSIEMFFENDIFNTANSP

SEQ ID NO: 10663 - DNA, 336 bp, Unknown
  Obtained from environmental sample
  misc_feature (1)..(336): n is a, c, g, or t
atgcaaaaattttattttaagattgctcccgaaaaaaattttttatgttttaaaccgcaggcaatcagcgacggaaaacaaagtttgcttgcgagcggtttctggggcaagagccgccatataaactatctgggtgaaattctccaggcatgcggcattgctttaagcgccggttatcccggggttctttttgtgtggctgtaccccttgtattacgcgggtcttttaaccagccgtcagttcgacgacgataaaatatgcaaggcaaaatacggcgcgctctgggataaatacgttaaaaaagcaaagtaccgtattattccgtatatattttaa

SEQ ID NO: 10664 - protein, 111 aa, Unknown
  Obtained from environmental sample
  misc_feature (1)..(111): Xaa is any amino acid
MQKFYFKIAPEKNFLCFKPQAISDGKQSLLASGFWGKSRHINYLGEILQACGIALSAGYPGVLFVWLYPLYYAGLLTSRQFDDDKICKAKYGALWDKYVKKAKYRIIPYIF

SEQ ID NO: 10665 - DNA, 714 bp, Unknown
  Obtained from environmental sample
  misc_feature (1)..(714): n is a, c, g, or t
ttgcgagctggaggccatctggcgaggatcagcaaatcaacctcgagtttcggggcgcagcttgacagcctttgcgatgtcatcacctttggagtcgccccggcttttctgatgcttaaaatggttcaggcgcatttacaatatttccactttgtaaacaaccagcctgccgcgctgtccggaagggtcgtgtttcttatcgcgattttatatgtcatgtgcgcgattatacgcctggcgcggtttaacgtggaaaccagcgtggaggatgaccatttgagtttcgccggcctcccctcccctccggcggccggaacaattgtcagccttgtaatattccagcaggaccttttgcccaagatcacgaaatggcccgcggagtttatcaacgcttccgggtttgccgcggtttgggcgcttcccgtcatcacgctgatggcgggcattctgatggttacccgcatcccctatccccatattgtaaaccgcgtactcaggggcaaaaaacaattttccactttccttttggtagtgttcacggttctcctgataatctggaatatccagcttgctatggccctgggtttctgcgtttttgtggtttacggattaatacactggctttttacaaggcttattcgttcaataaagaaggaaggaaaaacggaaacgccccagccgcccgatcaggtcgaagggcaaagctcttcatga

SEQ ID NO: 10666 - protein, 237 aa, Unknown
  Obtained from environmental sample
  DOMAIN (3)...(154): CDP-alcohol phosphatidyltransferase
  misc_feature (1)..(237): Xaa is any amino acid
MRAGGHLARISKSTSSFGAQLDSLCDVITFGVAPAFLMLKMVQAHLQYFHFVNNQPAALSGRVVFLIAILYVMCAIIRLARFNVETSVEDDHLSFAGLPSPPAAGTIVSLVIFQQDLLPKITKWPAEFINASGFAAVWALPVITLMAGILMVTRIPYPHIVNRVLRGKKQFSTFLLVVFTVLLIIWNIQLAMALGFCVFVVYGLIHWLFTRLIRSIKKEGKTETPQPPDQVEGQSSS

SEQ ID NO: 10667 - DNA, 621 bp, Unknown
  Obtained from environmental sample
  misc_feature (1)..(621): n is a, c, g, or t
atgacagattcggcacgagccgtgtccgcgcagatcgccccgccgctgccgttcacagacgaggcatacctgtccggcgatatagacatacgccactacacccacatattcaggcgctacgtttgggctaaccgcattgttatgggcgcgagcgcaaacttaggcggcaacgaccgagcggcgagaaggtactttctgggcggcgacgaaaactggttcaactacggcgtcaacgtcgaaaactacaacaacaacatcggctacagctactactcaagcatcgtatccccgctgcgcggctggaactacttcgacctggccggcgaccgcgtactcctgatgaactcggagttccgcttcccgttcatccgagaggtgacgacggtatggccgatccccatgcagatccgatacataaacggcgcgctgttcatggacgccggatacgcgtggaccggcagcgacgaggcgcttccacccaaaatagccggcggatacggcttcgggatgcgggccaacttggggatttttgttttgcgatatgaccgcggctggccgacggacttcagggggctgtcacgcgggccgattaattacttctcgctgggagcggagttctaa

SEQ ID NO: 10668 - protein, 206 aa, Unknown
  Obtained from environmental sample
  misc_feature (1)..(206): Xaa is any amino acid
MTDSARAVSAQIAPPLPFTDEAYLSGDIDIRHYTHIFRRYVWANRIVMGASANLGGNDRAARRYFLGGDENWFNYGVNVENYNNNIGYSYYSSIVSPLRGWNYFDLAGDRVLLMNSEFRFPFIREVTTVWPIPMQIRYINGALFMDAGYAWTGSDEALPPKIAGGYGFGMRANLGIFVLRYDRGWPTDFRGLSRGPINYFSLGAEF

SEQ ID NO: 10669 - DNA, 516 bp, Unknown
  Obtained from environmental sample
  misc_feature (1)..(516): n is a, c, g, or t
gtgccgccgaactggcccggtttttccgcgtcggttgacgcgataatagccgcccccgatgcccgcaaattgtacatcaaggtagattactaccgggatgtttttgatgagtcgaccgatacgcgggcaagtaccgagccggtcagttctcttatctggatactggatgtggagaaaggctcatatgagcgttccgtggaagcgcccttttacgagtacagcttttcagaaaatggcaaaacagtttatgtgcgcctgttgtactccatgctgggaattatccggggaggcggaatactgctctattttcccacagaaaacggttacgccgttttgcgcctggattcggacgggcaccggcagcgccgcggttttatcaaagttgctcccgaagaacagcgtttcaataattttcatctttctccggaaggtatactttccgccctgttggtggatgactggaaaataaatgtagtctggtggcgtatggataaatttatgagggatacgctgtga

SEQ ID NO: 10670 - protein, 171 aa, Unknown
  Obtained from environmental sample
  misc_feature (1)..(171): Xaa is any amino acid
MPPNWPGFSASVDAIIAAPDARKLYIKVDYYRDVFDESTDTRASTEPVSSLIWILDVEKGSYERSVEAPFYEYSFSENGKTVYVRLLYSMLGIIRGGGILLYFPTENGYAVLRLDSDGHRQRRGFIKVAPEEQRFNNFHLSPEGILSALLVDDWKINVVWWRMDKFMRDTL

SEQ ID NO: 10671 - DNA, 708 bp, Unknown
  Obtained from environmental sample
  misc_feature (1)..(708): n is a, c, g, or t
gtggcaatagcgagaaagacagtcaaggatggcggcagcgcgaagggcggcggcgggagcgccggcaccacaaggaaggcggagacgcactggcccatgagatccctctttgtgcagtggacgaacgaggcaaagaaggctctcgggtttgtgaccctgaaggtggtggccgagcggatcgggatcacgaggtcaactctgcgggactatagaaagcccaaccgcgacctgccgtccgaggcggtgcttatgaggctcgggaagatactggggcgcgaccacagcgtgctgcttggtccagtgcggctcaagccaggtcagcaccacaccaaaaccaagaagaccaaggcgggaggcgtggcgcagaaagcgaaagtggccaaaaaggagaccaagggcagcggcggcaagactggcaggaagcctgcaaagaagccaacaatgaaactggcaaagaagctggcaaagaagctggcaaagaagccaacaataaagctggcaaagaaggcagcagcgaagccagtaaagaaaccgggcaagaagtatgctggcccgtggcgcaagaggcgcatctttctgaagtggacggacgaagcgcggcgggcgctcggccatgaaagtcttgccccagcgctcggcgtctccgtggggagactacgcaacttgggaacaggggcccacccccccagaccgcccgttgaatgctga

SEQ ID NO: 10672 - protein, 235 aa, Unknown
  Obtained from environmental sample
  misc_feature (1)..(235): Xaa is any amino acid
MAIARKTVKDGGSAKGGGGSAGTTRKAETHWPMRSLFVQWTNEAKKALGFVTLKVVAERIGITRSTLRDYRKPNRDLPSEAVLMRLGKILGRDHSVLLGPVRLKPGQHHTKTKKTKAGGVAQKAKVAKKETKGSGGKTGRKPAKKPTMKLAKKLAKKLAKKPTIKLAKKAAAKPVKKPGKKYAGPWRKRRIFLKWTDEARRALGHESLAPALGVSVGRLRNLGTGAHPPRPPVEC

SEQ ID NO: 10673 - DNA, 435 bp, Unknown
  Obtained from environmental sample
  misc_feature (1)..(435): n is a, c, g, or t
ttgaaaataggtcttttgagaaaccattatctaggcaaaacattnatagacccttctcaaaatgttcgcgagcaaagggtgaaacttaaattcaacacaataaacggagtgctaaaagatagaagagtgtgcttggttgacgattccattgttcgcggaacaactctgaaaattctatgcaaaatgatacgaaacgcaggagcaaaagaagttcatattcgcgttgcaagcccgcccgttgaacacccgtgcaattacggaatggatttcccaagccctgcggaattaatcgcaaccgcacttgcacctgcggaggtggcaaaaatgctgggcgtggatagcctcggttatttgagtgtaaagggaatgagagaatgtactggtcagccagacgatttttgctgtgcttgttttgacgatatttatccagaataa

SEQ ID NO: 10674 - protein, 144 aa, Unknown
  Obtained from environmental sample
  misc_feature (1)..(144): Xaa is any amino acid
MKIGLLRNHYLGKTXIDPSQNVREQRVKLKFNTINGVLKDRRVCLVDDSIVRGTTLKILCKMIRNAGAKEVHIRVASPPVEHPCNYGMDFPSPAELIATALAPAEVAKMLGVDSLGYLSVKGMRECTGQPDDFCCACFDDIYPE

SEQ ID NO: 10675 - DNA, 402 bp, Unknown
  Obtained from environmental sample
  misc_feature (1)..(402): n is a, c, g, or t
gtggctggcaaggaaattacaactattgttgcccctgctaccccaccaggtacaagcgcgattgccgccgtgcgggtgagcggttcagctgtaaaaaacgtgtgcaaagccatattgccaaattttaaaatgcaaccgagggttgcaagccttgtaaacaatttaatagccatatattttcccgcgccaaattcctataccggcgaagatgttctggaattgttcccgcatgggaatccatttatagttcgcaaattgatagaagccatttgcaaagtccaaggggttcggctagcggagcgcggtgaatttacgcaacgggcttttttgaatggcaaattggatttaactcaggcagaggctgtgggcgctctcttagccgcaaataattcaaaagcctaa

SEQ ID NO: 10676 - protein, 133 aa, Unknown
  Obtained from environmental sample
  misc_feature (1)..(133): Xaa is any amino acid
MAGKEITTIVAPATPPGTSAIAAVRVSGSAVKNVCKAILPNFKMQPRVASLVNNLIAIYFPAPNSYTGEDVLELFPHGNPFIVRKLIEAICKVQGVRLAERGEFTQRAFLNGKLDLTQAEAVGALLAANNSKA

SEQ ID NO: 10677 - DNA, 429 bp, Unknown
  Obtained from environmental sample
  misc_feature (1)..(429): n is a, c, g, or t
gtggatatctatatgttaaaacaggatactcagtcggaaaaaactaatgacaatagcgctgaaattgacgaaagctcaaccgaaaatactgctgtaagccaaactgaacaggatgtttccgagcagagcgcggaaaaagacgcgaaagctgacggcgcggcggacaaaccacttacgcctgaggagaaaatcgccgaactggaagctcagttggcggaaacccgcgaccaattactgcgaaaagcggcggattttgagaatttccgcaagcgaatgaaccaagagaaacaaaacgctatcgaattcgccaaccaaagcctgcttttggacataatccccgtaatcgacgactttgagcgggctattcaatcgggggaaaaagcgcgccgatttaacaccttatcgagggtgaaaaactcggccatctga

SEQ ID NO: 10678 - protein, 142 aa, Unknown
  Obtained from environmental sample
  DOMAIN (48)...(141): GrpE
  misc_feature (1)..(142): Xaa is any amino acid
MDIYMLKQDTQSEKTNDNSAEIDESSTENTAVSQTEQDVSEQSAEKDAKADGAADKPLTPEEKIAELEAQLAETRDQLLRKAADFENFRKRMNQEKQNAIEFANQSLLLDIIPVIDDFERAIQSGEKARRFNTLSRVKNSAI

SEQ ID NO: 10679 - DNA, 423 bp, Unknown
  Obtained from environmental sample
  misc_feature (1)..(423): n is a, c, g, or t
atggaagatattttccccaaaatcgagggcactttcacggacggttatccttccaatttgcagtacttctaccctgaaagggaagcatctcttcttcccgaagacagggaactctttaaagcttatagcgtaacaggcaccaatgaattaatggacaagaatcccccgccgaacgccccctggtaccccacatggaatatgccggatcctccggacggctcggccgcccagatcgctcttgatcgttgcaagcagaccatgaagcagaggctgccgcagatgattctcgcgccgaccgcccaatttgaaaccctgtgggccgcatatgtaaaggaaatgaacgataacggcattgccacatacgaggcgtatatgcaggatcagcttaaccagcgcttaaaggcctggggcattagaaaataa

SEQ ID NO: 10680 - protein, 140 aa, Unknown
  Obtained from environmental sample
  misc_feature (1)..(140): Xaa is any amino acid
MEDIFPKIEGTFTDGYPSNLQYFYPEREASLLPEDRELFKAYSVTGTNELMDKNPPPNAPWYPTWNMPDPPDGSAAQIALDRCKQTMKQRLPQMILAPTAQFETLWAAYVKEMNDNGIATYEAYMQDQLNQRLKAWGIRK

SEQ ID NO: 10681 - DNA, 984 bp, Unknown
  Obtained from environmental sample
  misc_feature (1)..(984): n is a, c, g, or t
atgatgcggacagcgggtaaacatcgggaatctgttgttgcgacattcaatatatacattgaagtgctgcgatacgccgaagcggtcatagatatggaaattattgtgccaaatgacatagttatgccaaaatctttgccaatccccctaccgcagactgcggggataacgctgacaatacggggcgatacggcaacgcgcaagataagccgcggtttcagtgattattcctcctcgtccagcggcctgttcactgtgccaagcggggcaaggctgacgtttgaagatatagtcatagacgggaacagaggcacttattccggcaacaccgcatcgcttgtccgggttaacggcggaacgttcacaatgggtagtggggcggttttacagaacaaccgcgcaagcaacggcggcgggctgtatgtctcaagcggcacattcagcatgaataccgacagtaagataactaacaatatggcaagcagcaacggcggcggtgtgtatattgagggtggtacaaccactatgagcggcggcgaaataaataataataccgcaagtaccagcggcgctggcgtatatatcagttcaggcacattcaacatgaataacggcgttatacgaaataacacagcaaacggaaccggggcaaccaacggcggcggcggagtatacaataattccacatttaatatatatggcggcgagataaccggaaacaagacggcaggtaacggcggcggaacgtataataacagtacgttcagggttggcggaaccgcaaaaatatacgggaacacaaaggcagacaatgttaccaaaagcaacgcgtatattacggggactacctatatcacgcttggtactggcgttaatgttcctgcggcagaaatggaaatccatgcgcaaaccgcaagggcggacggcttaatagtgtcaagcggcgctacggaagcgataaagagctgtttctctgccatctga

SEQ ID NO: 10682 - protein, 327 aa, Unknown
  Obtained from environmental sample
  misc_feature (1)..(327): Xaa is any amino acid
MMRTAGKHRESVVATFNIYIEVLRYAEAVIDMEIIVPNDIVMPKSLPIPLPQTAGITLTIRGDTATRKISRGFSDYSSSSSGLFTVPSGARLTFEDIVIDGNRGTYSGNTASLVRVNGGTFTMGSGAVLQNNRASNGGGLYVSSGTFSMNTDSKITNNMASSNGGGVYIEGGTTTMSGGEINNNTASTSGAGVYISSGTFNMNNGVIRNNTANGTGATNGGGGVYNNSTFNIYGGEITGNKTAGNGGGTYNNSTFRVGGTAKIYGNTKADNVTKSNAYITGTTYITLGTGVNVPAAEMEIHAQTARADGLIVSSGATEAIKSCFSAI

SEQ ID NO: 10683 - DNA, 513 bp, Unknown
  Obtained from environmental sample
  misc_feature (1)..(513): n is a, c, g, or t
ttgcttttggtaacattgtctgcctttgtgttcccgtatatttttgcggttccgccaaccctgaacgtactgttattatacgttccgccgccgttacctgccgtcttgtttccggttatctcgccgccatatatattaaatgtggaattattgtatactccgccgccgccgttggttgccccggttccgtttgctgtgttatttcgtataacgccgttattcatgttgaatgtgcctgaactgatatatacgccagcgccgctggtacttgcggtattattatttatttcgccgccgctcatagtggttgtaccaccctcaatatacacaccgccgccgttgctgcttgccatattgttagttatcttactgtcggtattcatgctgaatgtgccgcttgagacatacagcccgccgccgttgcttgcgcggttgttctgtaaaaccgccccactacccattgtgaacgttccgccgttaacccggacaagcgatgcggtgttgccggaataa

SEQ ID NO: 10684 - protein, 170 aa, Unknown
  Obtained from environmental sample
  SIGNAL (1)...(16)
  misc_feature (1)..(170): Xaa is any amino acid
MLLVTLSAFVFPYIFAVPPTLNVLLLYVPPPLPAVLFPVISPPYILNVELLYTPPPPLVAPVPFAVLFRITPLFMLNVPELIYTPAPLVLAVLLFISPPLIVVVPPSIYTPPPLLLAILLVILLSVFMLNVPLETYSPPPLLARLFCKTAPLPIVNVPPLTRTSDAVLPE

SEQ ID NO: 10685 - DNA, 525 bp, Unknown
  Obtained from environmental sample
  misc_feature (1)..(525): n is a, c, g, or t
gtgctttctttggcgcttaagccgggagatgacaagatagaatccaaaggcataaagtctgtgcaaagccgggttaccaatatcaggccttacatgaaaaaagacatgaaaatcgacgagttttggtcttctttaaaggactttatgggcagcgcttttaacttgcaagactataggcttacggacgagcataacgccgctgtggaagaactgcgggaaaaagtttactcccaatggagctggaactacggttattcccctccggccaccgtgcgcaaagtccgccggattgaaggctgcggtaaaatcgagatttttctggatcttgccgaggaaggcgtaataaggaacattgctttttacggtgattttttcggcagtcgggatcccgatgcccttgtggaaaaattgaccggctgtcgcctggaatacgaagaaataaaggccgccttaagcggcgtggaaatagcccagtattttcatgccctggacagcgcgaatttcctttccttgcttttggaataa

SEQ ID NO: 10686 - protein, 174 aa, Unknown
  Obtained from environmental sample
  misc_feature (1)..(174): Xaa is any amino acid
MLSLALKPGDDKIESKGIKSVQSRVTNIRPYMKKDMKIDEFWSSLKDFMGSAFNLQDYRLTDEHNAAVEELREKVYSQWSWNYGYSPPATVRKVRRIEGCGKIEIFLDLAEEGVIRNIAFYGDFFGSRDPDALVEKLTGCRLEYEEIKAALSGVEIAQYFHALDSANFLSLLLE

SEQ ID NO: 10687 - DNA, 918 bp, Unknown
  Obtained from environmental sample
  misc_feature (1)..(918): n is a, c, g, or t
atgttggaatccgcctgcatggccgccactgccgggggatttgctactgtagtctgtatggcaaatacaaagcctgccatagacacaattgaaaaagcggcggcgctaaaaaagcgttccgacgctctcggcctaatcgatctttttcctgtattgtccctctcaaaaaacatggaaggcaaagaactatccgaaatcacagcaattaccaaaagtagtagttcctacatacccttaattctttccgaagacggaaaagatccggacaatgacgatcttttctttactgcgatgaaagaggcaaagcgcatcggcatccccgtttcctgccactgtgatttagggggcgatgaaaataacgctgttcgtagagttattgagctgggtaaaaaagtcggctgccagattcacgttgcacatgtgtctacaaaaaacgcactccaatccatccgcgaggcaaagcctgaattcaaagcaggtggtattgcactcacctgcgaggctatgccgcatcatctttgccttacggaagaagacgccaacaaactgggggcaaaaacttggggcaaggtaaatccgccgcttcgttccgaagaagacaggcaggccctcatccaggcgcttaaagacggaaccgtggacgcgatagcaactgatcacgcaccccactcggcggcggacaaagaagcgggagcgcctggcttttccggctttgagaccgctttcgccgccttgtacacggagcttgtttgcggcaatgccggtatcgaccttaagcacctttcgtccctgttaagcgcaagtccggccccggcttttgggttttggaaattctccaaaacgcggcctccttcttcctggctgcgcggcagacctggtgatactggacacgnaaaccgtctggattgtagactctga

SEQ ID NO: 10688 - protein, 305 aa, Unknown
  Obtained from environmental sample
  SIGNAL (1)...(21)
  misc_feature (1)..(305): Xaa is any amino acid
MLESACMAATAGGFATVVCMANTKPAIDTIEKAAALKKRSDALGLIDLFPVLSLSKNMEGKELSEITAITKSSSSYIPLILSEDGKDPDNDDLFFTAMKEAKRIGIPVSCHCDLGGDENNAVRRVIELGKKVGCQIHVAHVSTKNALQSIREAKPEFKAGGIALTCEAMPHHLCLTEEDANKLGAKTWGKVNPPLRSEEDRQALIQALKDGTVDAIATDHAPHSAADKEAGAPGFSGFETAFAALYTELVCGNAGIDLKHLSSLLSASPAPAFGFWKFSKTRPPSSWLRGRPGDTGHXNRLDCRL

SEQ ID NO: 10689 - DNA, 525 bp, Unknown
  Obtained from environmental sample
  misc_feature (1)..(525): n is a, c, g, or t
atgtcaggcacaagggcgcttggcagggaaacaaccatattaacgggaaatgccgaagtaagatcagacaatattcttctgcacgccgacagaatagaaatacaggggaatgataatcagtttatcatctgttccggcaatgtctggggtattgaagaagaaaaagaaattctgttttatacagacagactgcgttatgatcgtcagttaaaaattgctcgcttggaaggcaattccacccttgaagacagaaaaaacgaaattgtcgcaagaggccgttttatagaatatgacgatgaaaatgaaatcactgtttttcaaatagccgtccgccttttcaaaaatgatttagcctgccgttccgaacacgcagtttataaccgtaaagaaaaattactcgaccttacaggatttccggttgtgtacaaaaaagatgatgaattccgcgcaaacaaaatacgggtagatttggacacagatgatgttacaatggaaggctcggtaacaggaacaattacaaactaa

SEQ ID NO: 10690 - protein, 174 aa, Unknown
  Obtained from environmental sample
  misc_feature (1)..(174): Xaa is any amino acid
MSGTRALGRETTILTGNAEVRSDNILLHADRIEIQGNDNQFIICSGNVWGIEEEKEILFYTDRLRYDRQLKIARLEGNSTLEDRKNEIVARGRFIEYDDENEITVFQIAVRLFKNDLACRSEHAVYNRKEKLLDLTGFPVVYKKDDEFRANKIRVDLDTDDVTMEGSVTGTITN

SEQ ID NO: 10691 - DNA, 630 bp, Unknown
  Obtained from environmental sample
  misc_feature (1)..(630): n is a, c, g, or t
gtgcagcaggcgctgcttaaaataatcgaggggacaatagcctcggtgccgccgcagggcgggcgtaaacacccgaaccaggaattgatccgtatagacaccacgaacatactttttatctgcggcggggcctttgtcggacttgataaaatgatcgcgcgaagggtggttcaacatcctctgggttttggcgcggagggcggcaaagctgaaaaaagcatgaaagagttgtatgacgcgcttcatcccgacgatcttatccactacggcatgattcctgagttcataggcaggcttccgattaccgtaagccttgatgagcttaagcgcgaggatctcaggcggatcatcaccgagccgaacaacgccatagtaaaacaataccaggcttcccttgagtatgaccacgttaaactggaatttactgaagaggctatagacgccatagccgataccgcaatcaaacagaagacaggagcccgcggcctgcgcgccattgtcgaaaaactcatgatcgatataatgttcgagataccgtcgctcaagggtaataaacaggttattatcaccgaagatgtggtcaaaaacatgcaattgcccataatccagcagcttcaaaaaagcgcctaa

SEQ ID NO: 10692 - protein, 209 aa, Unknown
  Obtained from environmental sample
  DOMAIN (1)...(102): ATPase family associated with various cellular activities (AAA)
  misc_feature (1)..(209): Xaa is any amino acid
MQQALLKIIEGTIASVPPQGGRKHPNQELIRIDTTNILFICGGAFVGLDKMIARRVVQHPLGFGAEGGKAEKSMKELYDALHPDDLIHYGMIPEFIGRLPITVSLDELKREDLRRIITEPNNAIVKQYQASLEYDHVKLEFTEEAIDAIADTAIKQKTGARGLRAIVEKLMIDIMFEIPSLKGNKQVIITEDVVKNMQLPIIQQLQKSA

SEQ ID NO: 10693 - DNA, 339 bp, Unknown
  Obtained from environmental sample
  misc_feature (1)..(339): n is a, c, g, or t
atgggcaattgcatgtttttgaccacatcttcggtgataataacctgtttattacccttgagcgacggtatctcgaacattatatcgatcatgagtttttcgacaatggcgcgcaggccgcgggctcctgtcttctgtttgattgcggtatcggctatggcgtctatagcctcttcagtaaattccagtttaacgtggtcatactcaagggaagcctggtattgttttactatggcgttgttcggctcggtgatgatccgcctgagatcctcgcgcttaagctcatcaaggcttacggtaatcggaagcctgcctatgaactcaggaatcatgccgtag

SEQ ID NO: 10694 - protein, 112 aa, Unknown
  Obtained from environmental sample
  misc_feature (1)..(112): Xaa is any amino acid
MGNCMFLTTSSVIITCLLPLSDGISNIISIMSFSTMARRPRAPVFCLIAVSAMASIASSVNSSLTWSYSREAWYCFTMALFGSVMIRLRSSRLSSSRLTVIGSLPMNSGIMP

SEQ ID NO: 10695 - DNA, 597 bp, Unknown
  Obtained from environmental sample
  misc_feature (1)..(597): n is a, c, g, or t
atgaaatgtgatgtaattcttgccggggttggcgggcagggagtgctctctgttgccgctattattgcccaggcggcggtaagtgaagggtttgcggtgcgccagtccgaagtacatggtatggcgcagcggggcggggcggttctggcccatttgcgtatttccgacagagtaattgcctcagacctcgttccccgcggcggggcggatataattatttcaatggaacctttggaaagcctccgctatgcggcctggcttgctccttcaggagtattggtaagcgccgcggaaccactggttaatataagcggttatcctgaaatggagggtcttatcgcggcgattaagggttttccgctgtggcggatcatccaggcggcggcgttggcaaaagaggcgggtcttgcccgcgcggtaaataccgttatggttggagcggcatctccgtttctgccgctcaaggcggaaacgctggaaaatactatagccgccctgtttgccatgaaagaaccggcaatagccgccgccaacacacaagcgttcagactgggaaggcaggctgccgcaattttccctgacgggggtggcgtatga

SEQ ID NO: 10696 - protein, 198 aa, Unknown
  Obtained from environmental sample
  SIGNAL (1)...(25)
  DOMAIN (11)...(187): Pyruvate ferredoxin/flavodoxin oxidoreductase
  misc_feature (1)..(198): Xaa is any amino acid
MKCDVILAGVGGQGVLSVAAIIAQAAVSEGFAVRQSEVHGMAQRGGAVLAHLRISDRVIASDLVPRGGADIIISMEPLESLRYAAWLAPSGVLVSAAEPLVNISGYPEMEGLIAAIKGFPLWRIIQAAALAKEAGLARAVNTVMVGAASPFLPLKAETLENTIAALFAMKEPAIAAANTQAFRLGRQAAAIFPDGGGV

SEQ ID NO: 10697 - DNA, 915 bp, Unknown
  Obtained from environmental sample
  misc_feature (1)..(915): n is a, c, g, or t
gtgttaaaaccccgctctggcgcgctttttgcgcctggtagctatatacgcgatttntcaatgaatttctggctgtatccccaaagcctggaaaccggggaacaggttttgtcntggtattcttccaaacccgatggaaaaggcggctacattaatcaacgtatactaggtgctgtaaccagaaacaggctccagtggacattttctaacttttttttctctcccgggccttcacctaagggaacgcaagatcaaaaaacagtcacccttttgagtccactcctgcttaaccggtcgtggagccatcaccttatccgatttgacgccgatcttgggtttttagaataccttgtggatggaaggcttgaagccctggtttacgtcacttcttccggaagagaaggcggcgacgtttatactcccataatcggcgaagactgtattcttgcgctgggcagccgcttttccggcctgatggatgaatttcgcattcacgggaattaccttgaaaaagccgagatgacccgttattcgggcagtggcgggcggattgaaacgcggacactggatttgggctatgccgacagccaggttcttaaagtcgaagcttttggcggccgcacttccaattattccgggaaggtacgtaatgagtatgccggaaacagtcctttaagtttttcagatcactctgagatgaaattttttatccgttttagcaatagtccatacaggtggaatgaagtcccctggattccgatcaattctgggacggaattgcatcaattccggggcaggtatgtccagcttgcggcggatttttatccgggcgctgacagggaaacttctccctacctgtcggagttaaggttgatttanaaggcgtgcggaaccccctccgcctcccgcttatga

SEQ ID NO: 10698 - protein, 304 aa, Unknown
  Obtained from environmental sample
  misc_feature (1)..(304): Xaa is any amino acid
MLKPRSGALFAPGSYIRDXSMNFWLYPQSLETGEQVLSWYSSKPDGKGGYINQRILGAVTRNRLQWTFSNFFFSPGPSPKGTQDQKTVTLLSPLLLNRSWSHHLIRFDADLGFLEYLVDGRLEALVYVTSSGREGGDVYTPIIGEDCILALGSRFSGLMDEFRIHGNYLEKAEMTRYSGSGGRIETRTLDLGYADSQVLKVEAFGGRTSNYSGKVRNEYAGNSPLSFSDHSEMKFFIRFSNSPYRWNEVPWIPINSGTELHQFRGRYVQLAADFYPGADRETSPYLSELRLIXKACGTPSASRL

SEQ ID NO: 10699 - DNA, 720 bp, Unknown
  Obtained from environmental sample
  misc_feature (1)..(720): n is a, c, g, or t
gtgagcggtaatgtctggaagacggtaatacccaattccctttttggctcatataacccctacaaggatataatttacggcgattggctttttacccaggataaagtttttcataccggcgaagtctacctgaacggaaaatccatgtacgaaaccgtactccttgacggcgtgatgaatcctgcggaatgtgaaacctccatggataaagcatggtcaacacatacttggttctgcgcgacggacgataaggaaacgatcatctgggcaaatttccacggagaggatccccggaatggcaatgtggaaataaatgtccggccctttgttttctggcccgagaaaaatttgatcaattatataaccgtaaaggggttcaccctgaagcaggcggcgacaaactgggcgccccccaccgctttgcagacagggcttatcggcccccattgggcgaagaggtggataatcgaagacaatgtcatcagcgactcaaaatgctgcggcataagtctggggaaggaaataagcaccggccaaaatgaatggtcgaggcttcagttcaaacaaggcgcccagcgggaacgagaagttatttttcgcgcggccaggggaaactggaacaaggaaaccattggtgaccacatagtccgtaataatactatttttgattgtgaacaggcccggggtagtaggccattttgggagcggtcttcagcctga

SEQ ID NO: 10700 - protein, 239 aa, Unknown
  Obtained from environmental sample
  misc_feature (1)..(239): Xaa is any amino acid
MSGNVWKTVIPNSLFGSYNPYKDIIYGDWLFTQDKVFHTGEVYLNGKSMYETVLLDGVMNPAECETSMDKAWSTHTWFCATDDKETIIWANFHGEDPRNGNVEINVRPFVFWPEKNLINYITVKGFTLKQAATNWAPPTALQTGLIGPHWAKRWIIEDNVISDSKCCGISLGKEISTGQNEWSRLQFKQGAQREREVIFRAARGNWNKETIGDHIVRNNTIFDCEQARGSRPFWERSSA

SEQ ID NO: 10701 - DNA, 651 bp, Unknown
  Obtained from environmental sample
  misc_feature (1)..(651): n is a, c, g, or t
atggcgagatggggcagttattcggacgcaatcgtaatgagaagcccaaaggaaggagccgctcttttagcgtcccgctattcgtcagtaccggttatcaacgcgggagacggcggacatcaccatcccactcaaacactcaccgatcttcttacaataaggcagcttctcggaaaaattgacactctcacagttggtttttgcggtgatttaaagttcggaagaaccgttcattccctggctaaagccctttcgcgttacaataaaataaaaatggtttttatttctcctatcgagcttgtcctccccgattatataaaaagtattttaaataaacagaatgtcgaattctcggaaagggaaaaccttgaaaaatcaatgcccgatctcgacgtgctttacatgacaagggtgcaaagagaaagatttttcaacgaggatgattatatcaggctgaaagatacctatgttcttaaccatgaaaaaatgtcgataggtaaagaaaatttgatagttcttcatcctctgccgagggttaatgaaatttctgttgaagttgatcaggacaaaagagccgcttactttgcgcaggcaaaatacggaatgtatgtccgtatggccctgctgtcgtctgtattgggagttgtctga

SEQ ID NO: 10702 - protein, 216 aa, Unknown
  Obtained from environmental sample
  DOMAIN (1)...(56): Aspartate/ornithine carbamoyltransferase, carbamoyl-P binding domain
  misc_feature (1)..(216): Xaa is any amino acid
MARWGSYSDAIVMRSPKEGAALLASRYSSVPVINAGDGGHHHPTQTLTDLLTIRQLLGKIDTLTVGFCGDLKFGRTVHSLAKALSRYNKIKMVFISPIELVLPDYIKSILNKQNVEFSERENLEKSMPDLDVLYMTRVQRERFFNEDDYIRLKDTYVLNHEKMSIGKENLIVLHPLPRVNEISVEVDQDKRAAYFAQAKYGMYVRMALLSSVLGVV

SEQ ID NO: 10703 - DNA, 303 bp, Unknown
  Obtained from environmental sample
  misc_feature (1)..(303): n is a, c, g, or t
ttgcagggctttagcccgaaaaaatgcaggacttgtaagacaaccaaccgggttgtcgcacaagtccagacgaggaagtctatggcaaagaaaggtaaaattactatcgaccgcgagaagtgcaagggttgtttgctttgtattcgcgcgtgtccggttaaagttttggaagcggataacgatttaaattcatccggttcgcaccccgcaaaggcggtaaatatcgataaatgtatcgcctgcggtaactgttacgaagtttgtcccgatgtctgcatcgaagtttacgaagaggaagtttaa

SEQ ID NO: 10704 - protein, 100 aa, Unknown
  Obtained from environmental sample
  DOMAIN (71)...(94): 4Fe-4S binding domain
  misc_feature (1)..(100): Xaa is any amino acid
MQGFSPKKCRTCKTTNRVVAQVQTRKSMAKKGKITIDREKCKGCLLCIRACPVKVLEADNDLNSSGSHPAKAVNIDKCIACGNCYEVCPDVCIEVYEEEV

SEQ ID NO: 10705 - DNA, 828 bp, Unknown
  Obtained from environmental sample
  misc_feature (1)..(828): n is a, c, g, or t
gtgatccttgtgttcggcgggcctgagttgttcaggatggacaggcggcagcagtacgtgtttgccaatcacaggaggattcaggattacgcgcttcttcaggccctggaatacggaacccggggatggtttcccaatggcgcccatcctgtaggtgcgttgtttgtgcacatagacccggccctggcggatttcaacattcatccggccaaacgggaagcacgtttcgcggaccccgcttcccttcatcacgcggtaaccgttaccctggagaatttccgtcgacggatatttactgcccagcgcgcttcggggtcattggtatcaaccgaggagcctcattctccttacgtttcggttttccaggaagcgatggagaccgcggaaaatccaccgccgtatatcgcgggttcttcgcccacagcgttagctgcgccccctgcgttagctgggtccgttgcgttagccgaccagccggcgcagtcgcagctcacggggcgtgtgcccggcacatcaaaggacgtatactatctgggccgcctctttgatctctttattcttgttgaatgtgatggccgtcttttcatcatcgatcagcacgcggcccatgagcgcatcctctacaatcgttttatagaaaagcccataccgcggcaggaactcctggttgccattccctttacaaccganagcgcggaagacgatacgtttcttaaaacccataaaaagagcctcgcggatctgggcatccttattgaagaagacgccggccaatggcgcattgaagcccttccctcggactggcgcctttctgatacggaaccctga

SEQ ID NO: 10706 - protein, 275 aa, Unknown
  Obtained from environmental sample
  DOMAIN (1)...(95): DNA mismatch repair protein, C-terminal domain
  misc_feature (1)..(275): Xaa is any amino acid
MILVFGGPELFRMDRRQQYVFANHRRIQDYALLQALEYGTRGWFPNGAHPVGALFVHIDPALADFNIHPAKREARFADPASLHHAVTVTLENFRRRIFTAQRASGSLVSTEEPHSPYVSVFQEAMETAENPPPYIAGSSPTALAAPPALAGSVALADQPAQSQLTGRVPGTSKDVYYLGRLFDLFILVECDGRLFIIDQHAAHERILYNRFIEKPIPRQELLVAIPFTTXSAEDDTFLKTHKKSLADLGILIEEDAGQWRIEALPSDWRLSDTEP

SEQ ID NO: 10707 - DNA, 549 bp, Unknown
  Obtained from environmental sample
  misc_feature (1)..(549): n is a, c, g, or t
ttgcgtaaagaaataaaggaagggaaaacgccggaaggatgggagaaaaaagaaaaccggcataagaaggctcaaaaagacgtggacgcgcgctgggcaactaaaaacaaggaagtgcattacgggtacaaaaaccatgtcaaaatagacaagaagtcaaaaataataacgaaatacagagcgacgagcgcggaagtgcatgacagccaggaattgaaaaatctgatagaagaaagaaaggacaggaggatatacggggacagcgcatatactgggaaagatgtacagagctgcataccggaaatggtattgaaccggatacatgaaaaggggtatcgcaacaaaccgttgacgaaaacgcaggaacggaacaataaagggaaatcgcatatactggcaagggtagaacacgtatttgcccggatgaatcattttgggggaatatacataaggacaataggaaaaacgagggcagagtttcaaatagggctaattaacctggcatacaatataagccgatatgcctaccttgccggagcgacagcataa

SEQ ID NO: 10708 - protein, 182 aa, Unknown
  Obtained from environmental sample
  DOMAIN (25)...(171): Transposase DDE domain
  misc_feature (1)..(182): Xaa is any amino acid
MRKEIKEGKTPEGWEKKENRHKKAQKDVDARWATKNKEVHYGYKNHVKIDKKSKIITKYRATSAEVHDSQELKNLIEERKDRRIYGDSAYTGKDVQSCIPEMVLNRIHEKGYRNKPLTKTQERNNKGKSHILARVEHVFARMNHFGGIYIRTIGKTRAEFQIGLINLAYNISRYAYLAGATA

SEQ ID NO: 10709 - DNA, 354 bp, Unknown
  Obtained from environmental sample
  misc_feature (1)..(354): n is a, c, g, or t
atggccggcatagaccccgcgctgtacgaggcatcggaaattgacggctgtaaccgttaccaaaaaatgtggcatataacattgccgggaatcaaggctaccatcatgattctgctcattatgagcataggccggctccttgacgcggggttcgagctccaatacctgctgagaaacggcatgattcaggatgtggcggaaacaatcgacatctatgttgttacttacggccttgaaaattttaactattcgctggcgactgccgcagggatgtttaagaatgtgatcaacatatgcctgattttctttgccaactggcttgccaaacgcatgggcgaggagcgcctggtatga

SEQ ID NO: 10710 - protein, 117 aa, Unknown
  Obtained from environmental sample
  misc_feature (1)..(117): Xaa is any amino acid
MAGIDPALYEASEIDGCNRYQKMWHITLPGIKATIMILLIMSIGRLLDAGFELQYLLRNGMIQDVAETIDIYVVTYGLENFNYSLATAAGMFKNVINICLIFFANWLAKRMGEERLV

SEQ ID NO: 10711 - DNA, 858 bp, Unknown
  Obtained from environmental sample
  misc_feature (1)..(858): n is a, c, g, or t
atgcccaccatcgccggccttcgccgccggggttacacgcccgaagcgatacgcagctttgtctcgcagataggcattgccaaaaccgacagcatggtagacattgcctttcttgagcactgcctgagggaagaccttaacaggcgggcgttgcgggtaatggcggtcttaaaacccctaaagctgataattgataactgggacgctgataaaaccgaggagcttgaagccgtaaacaaccccgaagacgaaaccgccggtaaacgcggcgttaccttttcccgtgaactgtggattgagcgggatgattttgaggaaacgcccccgccgaaatatttcaggctgttccccggcaattccgtgcggctacgttatgcgtatattgtcacctgtaccggttttgaaaaagatcccgccggaaatataaccgccgtgcgctgtacttacgatcctgaaacaaaaggcggcagcgcgggttccagcagcgcctttgacaaccgcagggtaaagggtactatccactgggtttccgccgctaaagccgtacccatagaggtccgtgtgtacgattacctgtttaatacggagcggcctatggataccgcgcccaggccggacggcagccccggaaaatttaccgacaacatcaaccccaattcgctggaagtaatttcagaggcctgggccgaaccctgccttgcccggattgcgccgggggaacaggttcactatcagtttgaacggctcggttattttgtccgcgacaccgactcgggcgcagacgggcggccggtttttaacaagaccatcggcctgcgcgatacctgggcaaaaatcgcgaaaaaaggaggtgcttga

SEQ ID NO: 10712 - protein, 285 aa, Unknown
  Obtained from environmental sample
  DOMAIN (50)...(255): tRNA synthetases class I (E and Q), anti-codon binding domain
  misc_feature (1)..(285): Xaa is any amino acid
MPTIAGLRRRGYTPEAIRSFVSQIGIAKTDSMVDIAFLEHCLREDLNRRALRVMAVLKPLKLIIDNWDADKTEELEAVNNPEDETAGKRGVTFSRELWIERDDFEETPPPKYFRLFPGNSVRLRYAYIVTCTGFEKDPAGNITAVRCTYDPETKGGSAGSSSAFDNRRVKGTIHWVSAAKAVPIEVRVYDYLFNTERPMDTAPRPDGSPGKFTDNINPNSLEVISEAWAEPCLARIAPGEQVHYQFERLGYFVRDTDSGADGRPVFNKTIGLRDTWAKIAKKGGA

SEQ ID NO: 10713 - DNA, 345 bp, Unknown
  Obtained from environmental sample
  misc_feature (1)..(345): n is a, c, g, or t
atggaaccaactcgttttcagcttgctctttctggcacggtgctggggagaacgtttaacaagaggttccttaaaggagaatccattatgagtaacacgttcactgatccaagagatggcaaaacctataaaacagttactataggcaaacaaacttggatggcagaaaatctggcttatgatgcccctagcagcaaatgttatgaaaacaatccttcctacggttcaaaatatggacggctttacgactgggaaacggcaaaaaaaggcgtgtccgccaggttggcatttgccaagccaagaggaatggctggaacttgtgaatttgcaggcggaaggaaatag

SEQ ID NO: 10714 - protein, 114 aa, Unknown
  Obtained from environmental sample
  misc_feature (1)..(114): Xaa is any amino acid
MEPTRFQLALSGTVLGRTFNKRFLKGESIMSNTFTDPRDGKTYKTVTIGKQTWMAENLAYDAPSSKCYENNPSYGSKYGRLYDWETAKKGVSARLAFAKPRGMAGTCEFAGGRK

SEQ ID NO: 10715 - DNA, 834 bp, Unknown
  Obtained from environmental sample
  misc_feature (1)..(834): n is a, c, g, or t
gtgaatgccgcagggctctatgcggacgatgtttcacgggcgtttggggccgaagattttgccattcacgcgaggaagggcgaatattttcttatggacaagatgaccagggccagaccgagccgggtagtgtttccggtgcctactgcgatttccaaaggcatgctggtgatccccacggtggaagggaccgtgttggtgggacccactgccgatgccatggaggacaaggcggatttttcgaccaccacagaaaaactggaacggatattggattccggaaaaaggatgattccatctttaagccagaatgacgtaatcgccagttttgcggggattcgtccctgtctggaagaagatttctatattgatgtttcaaaaaaagcgcctgcctttgtacaggtcgcgggcattcagtcccccgggctcaccgcttcaccggccatcggggaatacgtaaagaacctccttaaagaggcgggtcttgaactggtggagaagcccggttgggatccctttgtgcaggatcggccccgttccagggagctttcgccttacaagctggatgaacttattgccaaaaatcctgcctggggaaacctggtctgccgctgcgaaaacgtaagcgaggcggaaatagtccaggcggtaaggcttggccactataccctggacggggttaagtactttaccagggcccaaatgggccgctgccagggcggtttttgtacctacaagatcatcaagatcatcatgagggaaaccggcctttcctggaatgaaattaccaaacacggcggccccagcaggcttcttgaatcggagttgcaataa

SEQ ID NO: 10716 - protein, 277 aa, Unknown
  Obtained from environmental sample
  DOMAIN (200)...(255): BFD-like [2Fe-2S] binding domain
  misc_feature (1)..(277): Xaa is any amino acid
MNAAGLYADDVSRAFGAEDFAIHARKGEYFLMDKMTRARPSRVVFPVPTAISKGMLVIPTVEGTVLVGPTADAMEDKADFSTTTEKLERILDSGKRMIPSLSQNDVIASFAGIRPCLEEDFYIDVSKKAPAFVQVAGIQSPGLTASPAIGEYVKNLLKEAGLELVEKPGWDPFVQDRPRSRELSPYKLDELIAKNPAWGNLVCRCENVSEAEIVQAVRLGHYTLDGVKYFTRAQMGRCQGGFCTYKIIKIIMRETGLSWNEITKHGGPSRLLESELQ

SEQ ID NO: 10717 - DNA, 687 bp, Unknown
  Obtained from environmental sample
  misc_feature (1)..(687): n is a, c, g, or t
gtgccaatacgaggtattgcctttgaaaacagtacagccggttcggtcaacatgatatacgacctaatgatgcgctacagtttcaagatcgtgcggagcgtgcggctgaagattgaccacaacctgctcgcgagggcaggcgttaaaaaggaaggtatccgcgaaattttttcacatgagcaggcgatacaacagtgcgcggggtacttgaagggctttggcaagggcgtgaaaattaccactgttgccaacaccgccgaagccgcgaaaatggtggctgaatcggagcggaacgatattgcggcgctttcatcacgcgcctgctgcgatttgtacaacctgaaatgcgtggaaagttccgtgcaggacaggggcaataactatacgcggtttatctgcatctccaaaaacctcgaaatatatccgggcgcggatcgtaccagcatcatgctgaccaccgcgcacaaacccggctcgctttacaaagtactgggacagatattcacgctaggtgtgaatgtcgtaaagctcgaaagccgcccgatacccgacagggattttgagtttatgttttatttcgatcttgaaacatcggtttattcaaaagaattcagccagctcatgtgcgagctggaaaatatatgcgaggaattccactatctcggcagttacaccgagatagtataa

SEQ ID NO: 10718 - protein, 228 aa, Unknown
  Obtained from environmental sample
  DOMAIN (6)...(139): Prephenate dehydratase
  misc_feature (1)..(228): Xaa is any amino acid
MPIRGIAFENSTAGSVNMIYDLMMRYSFKIVRSVRLKIDHNLLARAGVKKEGIREIFSHEQAIQQCAGYLKGFGKGVKITTVANTAEAAKMVAESERNDIAALSSRACCDLYNLKCVESSVQDRGNNYTRFICISKNLEIYPGADRTSIMLTTAHKPGSLYKVLGQIFTLGVNVVKLESRPIPDRDFEFMFYFDLETSVYSKEFSQLMCELENICEEFHYLGSYTEIV

SEQ ID NO: 10719 - DNA, 369 bp, Unknown
  Obtained from environmental sample
  misc_feature (1)..(369): n is a, c, g, or t
atggcatatagtattgattttattgaaagggcagtggcatacaagcaagagggacatacctttgcacaactgcgtgaggcatttgacatcccatcagcgacatattacgactgggaagtcaagttaaataatggacattttgatatcattgtcaaacgcgaacgccatcggaaaatagacaaagaagcgcttaaaaaggcggttgcggaaaaaccagacgcttttcttaaggaatatgcggaacaattcaactgtacgccaacagccgtcttctacgcccttgaaaaactcaacataacacgaaaaaaaagacttttacctattctgaaaaatccgagcaggaacgggcggagtttgtatcaaggctaa

SEQ ID NO: 10720 - protein, 122 aa, Unknown
  Obtained from environmental sample
  DOMAIN (1)...(122): Transposase
  misc_feature (1)..(122): Xaa is any amino acid
MAYSIDFIERAVAYKQEGHTFAQLREAFDIPSATYYDWEVKLNNGHFDIIVKRERHRKIDKEALKKAVAEKPDAFLKEYAEQFNCTPTAVFYALEKLNITRKKRLLPILKNPSRNGRSLYQG

SEQ ID NO: 10721 - DNA, 750 bp, Unknown
  Obtained from environmental sample
  misc_feature (1)..(750): n is a, c, g, or t
gtggcgtttgcgccaaaaccgtcagtagcgtcaagtgagttgcccagattccagccgatttttatatcagcgactaattgttcggctgttatgtcgttgaaagtctgcgaaccgccgccgccggagcttactgtcactgttgccgtgccggatttggtagtgtctactgtagaagtcgccttaactgtaaggcttgtcgcggtttccccggcggctatggttaaggttccgttagttgcaatgctggttccagatattccgccagttaccgtccatgtaacagtctgcgccggactattggttccggctaccgtcgcggtaaacgcctgtgtcgcgcctttggttacgctcgcggttgcggggcttactgtaacgctcgtgaccgtgggggcgggcgcggtaaccgtaactgttgccgtgccggatttggtagtgtctactgtagaaatcgccttaactgtaaggcttgtcgcggtttccccggcggctacggttaaggttccgttagttgcaatgctggttccagttattccgccagttactgaccatgtaacggtctgcgccgggttgttggttccggctaccgtcgcggtaaacgcctgtgtcgcgcctttggttacgctcacagtcgcggggcttacagttacacctgtgaccgtagtcgcagccgcaaccgccgcagtcgcgtcgctggttatgctgtccctgtatccggccctggtaacggttacctttatatatttgccctga

SEQ ID NO: 10722 - protein, 249 aa, Unknown
  Obtained from environmental sample
  misc_feature (1)..(249): Xaa is any amino acid
MAFAPKPSVASSELPRFQPIFISATNCSAVMSLKVCEPPPPELTVTVAVPDLVVSTVEVALTVRLVAVSPAAMVKVPLVAMLVPDIPPVTVHVTVCAGLLVPATVAVNACVAPLVTLAVAGLTVTLVTVGAGAVTVTVAVPDLVVSTVEIALTVRLVAVSPAATVKVPLVAMLVPVIPPVTDHVTVCAGLLVPATVAVNACVAPLVTLTVAGLTVTPVTVVAAATAAVASLVMLSLYPALVTVTFIYLP

SEQ ID NO: 10723 - DNA, 408 bp, Unknown
  Obtained from environmental sample
  misc_feature (1)..(408): n is a, c, g, or t
gtgggccgggcaggccaactcctcgacaagatgctcgcttcgatagggttgtcacgggacagcaactgctttatcgccaatgtcatcaagtgccgcccgccggcaaaccgcgacccacagccggatgaaaccgccgcctgcgcctcgtttctggaacggcagatacacattatcaaaccacgttttattctgtgcgcagggagaattgccgcgcataccctgctcaatactaccgaaccaatcggaaaactgcggggaaagtttgttgactttcagatgggagatctcaccctccccttcctcgccacctaccaccccagcgccctattgcgcaatgaagacttaaagcgccccgcctgggaagaccttaaacttctgcgtaccgccattgaggaagcggaaaagtaa

SEQ ID NO: 10724 - protein, 135 aa, Unknown
  Obtained from environmental sample
  DOMAIN (1)...(128): Uracil DNA glycosylase superfamily
  misc_feature (1)..(135): Xaa is any amino acid
MGRAGQLLDKMLASIGLSRDSNCFIANVIKCRPPANRDPQPDETAACASFLERQIHIIKPRFILCAGRIAAHTLLNTTEPIGKLRGKFVDFQMGDLTLPFLATYHPSALLRNEDLKRPAWEDLKLLRTAIEEAEK

SEQ ID NO: 10725 - DNA, 444 bp, Unknown
  Obtained from environmental sample
  misc_feature (1)..(444): n is a, c, g, or t
ttgaggaagcggaaaagtaacatggctgcgcagtggttcgatctggtttttgacattcccgccaatcaggcttttagctaccgcgccgatgaaaaaggcgaagccgccgtcggcaaacgggcgatggcccccttcggcaacaggggccgggacagcctgggctacatcatcgcggaacgagacgcgccgcccgccggattaagcgagtcggcgatcaaacccatccgccgcgtggtagatgcggaactgttattcgatgagcgcgacattgaccttgcccgctggcttgccgcctactacctctgcggtatcgggcaggcggttgcggcgatgataccgtcggggcggcgcgtggtttcatttggctcatttttcggcgaagaggatattgcccgcgccgcgctggaactttccgccgaacaaaagcagcgtagaggtaaataa

SEQ ID NO: 10726 - protein, 147 aa, Unknown
  Obtained from environmental sample
  misc_feature (1)..(147): Xaa is any amino acid
MRKRKSNMAAQWFDLVFDIPANQAFSYRADEKGEAAVGKRAMAPFGNRGRDSLGYIIAERDAPPAGLSESAIKPIRRVVDAELLFDERDIDLARWLAAYYLCGIGQAVAAMIPSGRRVVSFGSFFGEEDIARAALELSAEQKQRRGK

SEQ ID NO: 10727 - DNA, 450 bp, Unknown
  Obtained from environmental sample
  misc_feature (1)..(450): n is a, c, g, or t
atgcacaaagagggcgcggctttccggagccttctcaacagcttcgccattgccgtctcccttggcctgcaatacggggtacccctggaagaatacgttgacgcttttaccttcagccgctttgaacccaacggcatagtcaaaggccacgactatgtaaagatggcgaccagcgtcatcgacttcatattcagggatctcgcgataagctacttaaagcgcgtcgagcttggccaagtaaagccggaagacctcctggccaccgggacaaaaaccgacaaccgcacggaaaacagcacgggtctctggaacagcggggacggctcttaccaggccagaattaaaggctatgaaggagatgcctgcccttcatgcggcagttttaccctgatacggaacggtacctgcatgaagtgcgacacttgcggagaaacaacgggctgcagttag

SEQ ID NO: 10728 - protein, 149 aa, Unknown
  Obtained from environmental sample
  misc_feature (1)..(149): Xaa is any amino acid
MHKEGAAFRSLLNSFAIAVSLGLQYGVPLEEYVDAFTFSRFEPNGIVKGHDYVKMATSVIDFIFRDLAISYLKRVELGQVKPEDLLATGTKTDNRTENSTGLWNSGDGSYQARIKGYEGDACPSCGSFTLIRNGTCMKCDTCGETTGCS

SEQ ID NO: 10729 - DNA, 399 bp, Unknown
  Obtained from environmental sample
  misc_feature (1)..(399): n is a, c, g, or t
ttgcgggtgggaatagtcgtgtgcgcgggtatgagttttgtcataacgccgcccagggtttctatgccgagcgaaaggggtgtgacgtctaacagcagcacgtctttgacgtcgccgccaaggatgccgccctggattgccgcgccgacagcgaccgcctcgtccgggtttacgcctttgttgggttctttcttgaaaagatccttgacaagctgctgtaccgcggggatacgggtggaaccgccgacgaggatcacttcgtcgatctgctcggcggttaagtttgcgtccctcagcgccttgatgcagggttctttggaccgctcaagcaggtcggataccatttgttcgaatttcgctcttgtaagggatttttgcaaatgcttggggccgctctga

SEQ ID NO: 10730 - protein, 132 aa, Unknown
  Obtained from environmental sample
  SIGNAL (1)...(21)
  misc_feature (1)..(132): Xaa is any amino acid
MRVGIVVCAGMSFVITPPRVSMPSERGVTSNSSTSLTSPPRMPPWIAAPTATASSGFTPLLGSFLKRSLTSCCTAGIRVEPPTRITSSICSAVKFASLSALMQGSLDRSSRSDTICSNFALVRDFCKCLGPL

SEQ ID NO: 10731 - DNA, 750 bp, Unknown
  Obtained from environmental sample
  misc_feature (1)..(750): n is a, c, g, or t
gtggctccgggtgaatgtgtcgcacttgtgggcagaaacggatcgggcaagtccactatggcaaaatgcatttgcggctttgtaaagccggactccgggagcataagctataacggaaaagatatagcggatctttccatcatggagcgggctgaaaaaatcggctatgttatgcagaatccaaaccaaatgatctcattcccgatgatttacgatgagactgctttcgctcttaggaccagggggtggtcggaaaccgatgttaaggcaagcgttcacgaggcgcttaaggtctgcggcctttaccctttcagaaactggcctgtaaacgcccttagttacggtcaaaaaaaacggcttaccatcgcgtcgattctggcgttgcggccctctttcatgatccttgacgagcccacggcgggacaggattaccgtcattacacggagttcatggaatttcttctgggcctcaacagtgatcttaaaatctccttgcttttaattacacatgatatgcacctcatgcttgagtacacttccagggcggtggttctttcagacggcgtttgcgttgccgaccaggagccgttccagatactcaccgacgacgccatcatcgaaaaagcaagccttaagcggacgagcctttacgaccttgcacttaaagcgaacattcccgatcccaggggctttgtagggcggtatattgccggcgacagaaaaaacaggagaacaaagcacgaaacatga

SEQ ID NO: 10732 - protein, 249 aa, Unknown
  Obtained from environmental sample
  DOMAIN (4)...(188): ABC transporter
  misc_feature (1)..(249): Xaa is any amino acid
MAPGECVALVGRNGSGKSTMAKCICGFVKPDSGSISYNGKDIADLSIMERAEKIGYVMQNPNQMISFPMIYDETAFALRTRGWSETDVKASVHEALKVCGLYPFRNWPVNALSYGQKKRLTIASILALRPSFMILDEPTAGQDYRHYTEFMEFLLGLNSDLKISLLLITHDMHLMLEYTSRAVVLSDGVCVADQEPFQILTDDAIIEKASLKRTSLYDLALKANIPDPRGFVGRYIAGDRKNRRTKHET

SEQ ID NO: 10733 - DNA, 456 bp, Unknown
  Obtained from environmental sample
  misc_feature (1)..(456): n is a, c, g, or t
atggataatttgcttgaccttatgatctgccgcattcccgggcttaaagccaatgagcgcgtggaattgattaagaaatttgacaaggaagatgatttcaccgcgctcacaattaatgatatcgaaagcctgattggaagggttcttaaagaaaagcaatggaaaatgtcttccatccggttaattgcggagaaggatgcggaaagggccggaaagcatggcatccgtatagtgtcctggcgtgaagagagctatccgcctttgctgcgcgagatatacgatccgcctgcgcttctgttttaccgaggcgttcttccgaatccggttaagccaatggcggcggtggtgggaaccagaaagccttcttcattgggggcaaagcgtgcttttgatataggccgggaactgggaaaagccgggtatccctgttgtgtcggggctggcgttgggcattga

SEQ ID NO: 10734 - protein, 151 aa, Unknown
  Obtained from environmental sample
  misc_feature (1)..(151): Xaa is any amino acid
MDNLLDLMICRIPGLKANERVELIKKFDKEDDFTALTINDIESLIGRVLKEKQWKMSSIRLIAEKDAERAGKHGIRIVSWREESYPPLLREIYDPPALLFYRGVLPNPVKPMAAVVGTRKPSSLGAKRAFDIGRELGKAGYPCCVGAGVGH

SEQ ID NO: 10735 - DNA, 429 bp, Unknown
  Obtained from environmental sample
  misc_feature (1)..(429): n is a, c, g, or t
ttgcctcaggatgcggccgtccagtacaacacnggcgtttcggcgggcataatggccaaagccacccacgcttttcccggagtgggaaacaccgaaaaagaagagtattattaccttgcggaagaagcgtttntgcgggccattgagcttgacggccgttaccttaatccaaaatacggccttgcggtactttacgtgtttgagcttgacaggagcgaagacgcgattcctcatctcttaaagtaccttgaaatttccaggaacgatatagacaccatgtttgtacttgcgcgggcttattatgtggtgaaggactataaggccgccattaatctttacgacaggataatcacgcttacaatggatgaacagaagagaaaagacgcgcaaaataacaggcagactatactggagcagatgaatggataa

SEQ ID NO: 10736 - protein, 142 aa, Unknown
  Obtained from environmental sample
  misc_feature (1)..(142): Xaa is any amino acid
MPQDAAVQYNTGVSAGIMAKATHAFPGVGNTEKEEYYYLAEEAFXRAIELDGRYLNPKYGLAVLYVFELDRSEDAIPHLLKYLEISRNDIDTMFVLARAYYVVKDYKAAINLYDRIITLTMDEQKRKDAQNNRQTILEQMNG

SEQ ID NO: 10737 - DNA, 378 bp, Unknown
  Obtained from environmental sample
  misc_feature (1)..(378): n is a, c, g, or t
atggaggaggagtggctgcctcctttaagaaaacgctacagcgagccttttccggcatcccgttccgaaaaagaaaacgcgataattgggcttattcacaaacggcgttttcctgttgatatggctgcccagtcgtatcttgcggattatccggcgcatcttcatattgatatgcttccctgcatacagcaaaaaggagttgggcgtaaattgatggacagcctttttgcggaactggcacatcaaaaggtacccgggctgcatcttggggttggctcgtcaaataccggcgcggttgctttctaccagaaagttggttttaccgtgctggaagagcataaatggggctttacattggggagactctgtaatgcttaa

SEQ ID NO: 10738 - protein, 125 aa, Unknown
  Obtained from environmental sample
  DOMAIN (20)...(108): Acetyltransferase (GNAT) family
  misc_feature (1)..(125): Xaa is any amino acid
MEEEWLPPLRKRYSEPFPASRSEKENAIIGLIHKRRFPVDMAAQSYLADYPAHLHIDMLPCIQQKGVGRKLMDSLFAELAHQKVPGLHLGVGSSNTGAVAFYQKVGFTVLEEHKWGFTLGRLCNA

SEQ ID NO: 10739 - DNA, 435 bp, Unknown
  Obtained from environmental sample
  misc_feature (1)..(435): n is a, c, g, or t
atgctttttgtgccgggccttttaatccacttcagcagggggatccgctgggattcggatcacgtcgcgattttttcggacgagctccgggaagtttgccgcgagataaccaggcacaactaccttggcagggtaaacattgccctggattatttcgacgcgtcgattaaccgtatcgcggcttggacgatagggagccgcagtttgcggaaggggcttttggaagccctgcttgagccggtggagcttttaaagaaagccgaagacgcgggtaataaaaaccacgagcgccttgcgttgatggaagagttcaagaccctgccgttttctgcggtctgggacaagctgtgcattaacgccggaattcccgtcggcattgactggattaacaaaataaatcaatatgaaaaatcagtgctggaaaaacggaaatga

SEQ ID NO: 10740 - protein, 144 aa, Unknown
  Obtained from environmental sample
  DOMAIN (1)...(143): L-rhamnose isomerase (RhaA)
  misc_feature (1)..(144): Xaa is any amino acid
MLFVPGLLIHFSRGIRWDSDHVAIFSDELREVCREITRHNYLGRVNIALDYFDASINRIAAWTIGSRSLRKGLLEALLEPVELLKKAEDAGNKNHERLALMEEFKTLPFSAVWDKLCINAGIPVGIDWINKINQYEKSVLEKRK

SEQ ID NO: 10741 - DNA, 489 bp, Unknown
  Obtained from environmental sample
  misc_feature (1)..(489): n is a, c, g, or t
atggaagatggaataaaactgtaccacggctcaaacgccctctttgaatcgccgtcgctcgaaaaatcccgggacaaacgggacttcggcagagggttctacacgactacggtcaaggaacaagccgaggactgggcaaaattgcttcaggctcgcttcaaaggcggcgcgtttgtgtatgcgtttgaacttaataatatcgcggcgttaaatgtaaagacgtttaacggacttaatttggaatggctcgaatttgttaaagaaaataggacgaaaggtgggcttcagcataaatttgacgctgtagtgggcgccgtggccaacgacaaaactatgcaaaccataacaatgtacgtggaaggtacctacaccgccgaagaagcgctgaataggttacgatatatgtccccaaacgatcaggtgtcgtttcatacggagaaagcgcttgcaagtttaactctacgcgaggttacggaatggaaaccataa

SEQ ID NO: 10742 - protein, 162 aa, Unknown
  Obtained from environmental sample
  misc_feature (1)..(162): Xaa is any amino acid
MEDGIKLYHGSNALFESPSLEKSRDKRDFGRGFYTTTVKEQAEDWAKLLQARFKGGAFVYAFELNNIAALNVKTFNGLNLEWLEFVKENRTKGGLQHKFDAVVGAVANDKTMQTITMYVEGTYTAEEALNRLRYMSPNDQVSFHTEKALASLTLREVTEWKP

SEQ ID NO: 10743 - DNA, 342 bp, Unknown
  Obtained from environmental sample
  misc_feature (1)..(342): n is a, c, g, or t
atgaaacgtttatttgctttttttgtggttattgtcatttgtagttgtgcggcttttaccgtaaggcgcggattggatgaaggagacggagaagtccttgagggagtagggcaggggtttcgggggcctatagccgtgcaagtgcgcctgaacgagggtagtattacggagatcgaaatcgttgattctgtggaagatcgctttgtagggggagccgctattgaagaattgatcgatcttgtgataacgtacaattccacggatattgacgcggtttccggcgcaacggagtcaagcgagggctttttggaagcggtgcgaaatgctatacttaaaagatga

SEQ ID NO: 10744 - protein, 113 aa, Unknown
  Obtained from environmental sample
  SIGNAL (1)...(20)
  DOMAIN (39)...(113): FMN-binding domain
  misc_feature (1)..(113): Xaa is any amino acid
MKRLFAFFVVIVICSCAAFTVRRGLDEGDGEVLEGVGQGFRGPIAVQVRLNEGSITEIEIVDSVEDRFVGGAAIEELIDLVITYNSTDIDAVSGATESSEGFLEAVRNAILKR

SEQ ID NO: 10745 - DNA, 312 bp, Unknown
  Obtained from environmental sample
  misc_feature (1)..(312): n is a, c, g, or t
atgaaaaagaaggtgcaaatcgtcattagcctgataggggaaattgatacaattatttgggatgagccaaatgacggtcttgatatagtttcaaatatgaaaataaaaaatcttcttaaatcttataaaagcaaaaatgtcacgatacttttttccagccatgttcttgagtttttaaatgatttcgtggatcattgcattttattgaatgaagggaatattattgaaaataaagatataaaggatattgcttcattggaaacattatttttaaataatttaccacaaaatatattatcaataaatttatag

SEQ ID NO: 10746 - protein, 103 aa, Unknown
  Obtained from environmental sample
  misc_feature (1)..(103): Xaa is any amino acid
MKKKVQIVISLIGEIDTIIWDEPNDGLDIVSNMKIKNLLKSYKSKNVTILFSSHVLEFLNDFVDHCILLNEGNIIENKDIKDIASLETLFLNNLPQNILSINL

SEQ ID NO: 10747 - DNA, 468 bp, Unknown
  Obtained from environmental sample
  misc_feature (1)..(468): n is a, c, g, or t
ttggtcacaatcttttggccaaggggcaccatttcggtcgtcaatgttacactgtgcgtgggttttggtctggggggcgagatgctggcgagggcacttgtaacgacgctcctgacattcgcgcgggcggtcgttctcgtcgcggggctgggcccctttgcctccgcgcagcagaagcaggggccaaccaacaaggtcaacatcaacacggccaccaggacggagctgatgcagatacccaaaatcggtgaaaaaacggcggagaggatagtggagttcagaaaggccaacggcccatttgcgagggtggaggaaataatgaacgtgaaggggatgggcgaaaagacgttcctctccatcaggcaccatctgaccgtgggtgccaggcagccccaggggcctgcgtctccgcgcagtcagcaaagcggggtcaaaaaggctccgtgcccgcgccatacccggcgataa

SEQ ID NO: 10748 - protein, 155 aa, Unknown
  Obtained from environmental sample
  DOMAIN (64)...(93): Helix-hairpin-helix motif
  misc_feature (1)..(155): Xaa is any amino acid
MVTIFWPRGTISVVNVTLCVGFGLGGEMLARALVTTLLTFARAVVLVAGLGPFASAQQKQGPTNKVNINTATRTELMQIPKIGEKTAERIVEFRKANGPFARVEEIMNVKGMGEKTFLSIRHHLTVGARQPQGPASPRSQQSGVKKAPCPRHTRR

SEQ ID NO: 10749 - DNA, 414 bp, Unknown
  Obtained from environmental sample
  misc_feature (1)..(414): n is a, c, g, or t
atgatcaaaaaggtgaagagcagcgagctcaagctggggatgtacgtttacgacctgaacgtgccgtggctggagcacggcttcgtccgcaaccgattcatgatccatgacgaaaagcagatagagaaaatactcaacgccaacatccccgaagtcctgatagacacgctgaagggtatagacgccgtccacgcccccacggcgaaggaggccgaatcggccctgatggacaagatgatcaacgccgccacgggcctccagggcgggcccgcttcccaggagatggagtcgcggtgggccgaatccaagcagatacacgacgatgccgtgaaagtggtcggcaacgtgctgaaggacatccgctttggcangcaggtggacgtgaggcaggcgtcccccgtcgtctcaacataa

SEQ ID NO: 10750 - protein, 137 aa, Unknown
  Obtained from environmental sample
  misc_feature (1)..(137): Xaa is any amino acid
MIKKVKSSELKLGMYVYDLNVPWLEHGFVRNRFMIHDEKQIEKILNANIPEVLIDTLKGIDAVHAPTAKEAESALMDKMINAATGLQGGPASQEMESRWAESKQIHDDAVKVVGNVLKDIRFGXQVDVRQASPVVST

SEQ ID NO: 10751 - DNA, 507 bp, Unknown
  Obtained from environmental sample
  misc_feature (1)..(507): n is a, c, g, or t
gtgcttaaaataggcgatgcaattaaggtgccgaaaaaggggccgtcttttgggacgcaaggtatttcgcctgcggcaaatactgcggtaatcaaaccgtctacggcaaataagacggcagccccagcggggatttatgctttgcgttggcctgtaacgcctaaggatatttcctacatgaccggacagatgggcgttgttgtagaaggtgaaaaacttgaatcggtgcggagtttgacccaggggaatgtggtctccgccggcccgtggcgcaagtttggcagggttgtaattgtagaaacaagcggcggttattattacatgtacggcggctgtgagactataaccgtaaatgtcggcgacaggataacgccgggaatggaattgggaaaattgggtattaacgcggtttcggttaaaccacagctcttttttatggttttccgaaatgataatcctatggatccggcattagctcccagagccggaaataatcaaagaacgtaa

SEQ ID NO: 10752 - protein, 168 aa, Unknown
  Obtained from environmental sample
  DOMAIN (61)...(156): Peptidase family M23
  misc_feature (1)..(168): Xaa is any amino acid
MLKIGDAIKVPKKGPSFGTQGISPAANTAVIKPSTANKTAAPAGIYALRWPVTPKDISYMTGQMGVVVEGEKLESVRSLTQGNVVSAGPWRKFGRVVIVETSGGYYYMYGGCETITVNVGDRITPGMELGKLGINAVSVKPQLFFMVFRNDNPMDPALAPRAGNNQRT

SEQ ID NO: 10753 - DNA, 879 bp, Unknown
  Obtained from environmental sample
  misc_feature (1)..(879): n is a, c, g, or t
atggccgagatcttgtcaccactgcgatccgtcctacgtgagatagtgttctccttgggcggccacgggataatttccgacaagatcacctttaagattgaggacgacgacaacgccgaagagctgatcttgtgggaggccagccagcgtagcccgtttgacgtggacgatatcacgcttgactacaagatattgcgccgctttcccggttcccgcgagaccgaggtgcttcttgtggcggcaaagaaccaggtgttgcagagctatctagatttgatttacgacgcggcgcttgtccccatcattgtagacgtggacgcctttgccatcacaaacagctacgcgcttgagtgcgccggtctgccggatatgggtacggtggctttgctcaatatcggtcacaacacaacgagcattacattcataaaggacggcatttaccactcttcccgcgatattgcgcgtgcgaacggcgagcttttcaaccgtaccatccaacatagcaccggtatgtcaagcgaggaggcggggttggctatgaaaggcaaatcctccggaaccgtggatatgaaccaacttaaacagagcgtaagtattgtcgccgaagaactttcgtcgggcattgaccttgccttttcgtactacaagggttccgagaacacagactccatggacaagatagtgctttccggcggcggcgcgtacatacccaccttggcgcagtttttggagtcgcgccatcaaacaaaggtgcagatatcgaacccgcttgcccatatccagtacaacaaaaatctatttggaaacaccaacgtggagagcttaggcgcgctcctcaccgtggcagtggggcttgcgctcaggaagacgggtgagtga

SEQ ID NO: 10754 - protein, 292 aa, Unknown
  Obtained from environmental sample
  misc_feature (1)..(292): Xaa is any amino acid
MAEILSPLRSVLREIVFSLGGHGIISDKITFKIEDDDNAEELILWEASQRSPFDVDDITLDYKILRRFPGSRETEVLLVAAKNQVLQSYLDLIYDAALVPIIVDVDAFAITNSYALECAGLPDMGTVALLNIGHNTTSITFIKDGIYHSSRDIARANGELFNRTIQHSTGMSSEEAGLAMKGKSSGTVDMNQLKQSVSIVAEELSSGIDLAFSYYKGSENTDSMDKIVLSGGGAYIPTLAQFLESRHQTKVQISNPLAHIQYNKNLFGNTNVESLGALLTVAVGLALRKTGE

SEQ ID NO: 10755 - DNA, 807 bp, Unknown
  Obtained from environmental sample
  misc_feature (1)..(807): n is a, c, g, or t
ttggacgataatgaaaccgaagatgccgttttaaagctatctttagaaaattcaccgctccgcataaagagcaaaaggggtgaattgttcgtaggttttgtgccaattcaagagatttacgactaccatttggaattaggccgccgtcacaaggcaaaacacaatatgatgatagtcagttcaaatatccgtacatatttgggtagccaaacttatacaaacgcaagccttttagatgcctttttgggcatgaaaaagaacgggacaatagaggaattcccgtttttgcacaatggcatgactttaactggcgataatttgcgccctgaacatacaggcggcaaatggttcttgttcatagaccatcctaagataataaacggagcgcagagccttttcacctacgagcagtatgcgagcagggaagagcatccagttaatccccttgttttggtgaaagttgttattccatatccatcggagaccgaagaacacgactccgggaattttgtccgccttgttactatggcaaacaaccgtcaaaatccggtgttcagctatcatttgcgtgctgctgacgatttgcagttttttatatggcaaaagatgcaggcagaaggtttctattatatatataaagaaggggttcgcccaaaaactcgcaccagaaaattagaagttagaatgcgcccagagctatcaaaaaccatgcttctcttagatgccagaatctctgaaagccgcgcaagcgaccaggtttttgaccaggagagtttttatcaggcggtgctttggagcgttttatag

SEQ ID NO: 10756 - protein, 268 aa, Unknown
  Obtained from environmental sample
  misc_feature (1)..(268): Xaa is any amino acid
MDDNETEDAVLKLSLENSPLRIKSKRGELFVGFVPIQEIYDYHLELGRRHKAKHNMMIVSSNIRTYLGSQTYTNASLLDAFLGMKKNGTIEEFPFLHNGMTLTGDNLRPEHTGGKWFLFIDHPKIINGAQSLFTYEQYASREEHPVNPLVLVKVVIPYPSETEEHDSGNFVRLVTMANNRQNPVFSYHLRAADDLQFFIWQKMQAEGFYYIYKEGVRPKTRTRKLEVRMRPELSKTMLLLDARISESRASDQVFDQESFYQAVLWSVL

SEQ ID NO: 10757 - DNA, 510 bp, Unknown
  Obtained from environmental sample
  misc_feature (1)..(510): n is a, c, g, or t
gtgcaaccggcttctgtagggtctgctcccgctaccgagcgggtaataaatgataattcaaccgtaaatactccgagtgaagcggttcaacagcagcgggctgtcgaagaagaaaagaaactggaagaagttttcacggcattacttgtagagacaagacagatttggcaggaacaacaaccgcagagggaacagcaatcgcagagggaacaacaagagcagttggcgcagctaacgcagcagacgcagttagagcagatggagcaattacaacagacaactcaaatctccgccgcttcgcaaccacggcaggaaagccaaccgcagaaacaaacactgcaacagccgcttcgcattagattgatctctcccgagaataacgtggttatcgccgggcttacggctcttaggcaaccgactgttttccgttgggctacggatgaagatgtggagttttcaagatttgtctttcacgccgttccaatcctacatcaggcagacccgagatag

SEQ ID NO: 10758 - protein, 169 aa, Unknown
  Obtained from environmental sample
  misc_feature (1)..(169): Xaa is any amino acid
MQPASVGSAPATERVINDNSTVNTPSEAVQQQRAVEEEKKLEEVFTALLVETRQIWQEQQPQREQQSQREQQEQLAQLTQQTQLEQMEQLQQTTQISAASQPRQESQPQKQTLQQPLRIRLISPENNVVIAGLTALRQPTVFRWATDEDVEFSRFVFHAVPILHQADPR

SEQ ID NO: 10759 - DNA, 882 bp, Unknown
  Obtained from environmental sample
  misc_feature (1)..(882): n is a, c, g, or t
gtgtcgatccacacgctggatatgaccaacatcttccgcgaggccgcgtttgtccccggagaccgttttatagttcgcaccagggactggaaagaagcgcatttcgaccttgaaaaagtcgggaaggacgcctggccgcagatcgaactggacgcatggttcgaggctgccgagagcggttttgcggacagtttttccaaactggggcccggctcctccaccgaggagcagatcgcgttcgcctactggtacggaggggagaggatgaggaatgtccccgcgtattcgctggaggaatttctctttgaaaaaaccgacagcatagaaaacgcggtttacggcatcgcctcccgtttctggtttgccggaaaagacattcccgacagcaaaaggcttctgggtatagcggttcctcctgacaggacttattttgaggacattcttgtcagggcgggcgtgccggtttccgaatatgttctttcctcttatgcgcgggatgccctgttcagaaatgaaaaagatattaaccttgtgatggatcggataatccccccggtaattgccatgaaagaccaggaatggaatgatatcgccgattatgttgaagatacaatagaagagcttcgggaacgttatacgttattcctcgatcaggggatggggccgataaggcaaagggtaggggagttgcacgccgctgtggtggaacttgccgcccgcctgcaaaaaggcgaaattgatatatcatggctgcccaagcatacttttataatgctctcacaaatccaggggcacgcggcgcacctgctggaagaccttgacacaaacgagtcgccgcctgaatcggagctggaggcaatggacagttccctgacggcatga

SEQ ID NO: 10760 - protein, 293 aa, Unknown
  Obtained from environmental sample
  misc_feature (1)..(293): Xaa is any amino acid
MSIHTLDMTNIFREAAFVPGDRFIVRTRDWKEAHFDLEKVGKDAWPQIELDAWFEAAESGFADSFSKLGPGSSTEEQIAFAYWYGGERMRNVPAYSLEEFLFEKTDSIENAVYGIASRFWFAGKDIPDSKRLLGIAVPPDRTYFEDILVRAGVPVSEYVLSSYARDALFRNEKDINLVMDRIIPPVIAMKDQEWNDIADYVEDTIEELRERYTLFLDQGMGPIRQRVGELHAAVVELAARLQKGEIDISWLPKHTFIMLSQIQGHAAHLLEDLDTNESPPESELEAMDSSLTA

SEQ ID NO: 10761 - DNA, 879 bp, Unknown
  Obtained from environmental sample
  misc_feature (1)..(879): n is a, c, g, or t
gtggtcaagatcggccgagatccgggtgttcccggcatccggggggcctggcgggaaaagcagggcctggggattattctgggaaaagaaggccggataggggccacaatcagggcggtggaaagaggcttttgggaggatccgggaagcgccgaatatctggaagtgcttgacggcagcgcggaactggaatcggagaacgatctgctcctgggccgggggttggcggaaacgctgggggccgaaccgggctccaccgtccggcttatgacgatccgggtaaacgaagaaggacagcatctgcccaaagtaacgatctttaccgtcaaggggatcatttcttccggctaccgggaactggattcactgtggtgtatcatcaaccatgaagcggggcttacccttctttccccggaactgtaccggtcttttttgatagcaaaggtaaacgatccctataccggtcttgacgacataacggaagatctgatgatacgcgccgggccgggttacggggtatacacctggcaagaactccagcagtctctttacaagtcttttgaaaccacccggcaaatgctgctttttatcatggcccttctggtactggtcgcggcggttaatgtttcgtccgccacatccatgctggttattgaacggcagcgggacatcgctgtgcttaaaaccggcggggccggcccgcgttccatacaaaacatcttcctctgcggggcctttctgacgggccttgccggggccgtcgggggaataaccctgggtcttcttatcggcagggggatcaataccatcatcccggggctggaaaaagcgctttcgtttattgcaagcccctggggnaggagaagtaaaaatccttga

SEQ ID NO: 10762 - protein, 292 aa, Unknown
  Obtained from environmental sample
  DOMAIN (149)...(292): Predicted permease
  misc_feature (1)..(292): Xaa is any amino acid
MVKIGRDPGVPGIRGAWREKQGLGIILGKEGRIGATIRAVERGFWEDPGSAEYLEVLDGSAELESENDLLLGRGLAETLGAEPGSTVRLMTIRVNEEGQHLPKVTIFTVKGIISSGYRELDSLWCIINHEAGLTLLSPELYRSFLIAKVNDPYTGLDDITEDLMIRAGPGYGVYTWQELQQSLYKSFETTRQMLLFIMALLVLVAAVNVSSATSMLVIERQRDIAVLKTGGAGPRSIQNIFLCGAFLTGLAGAVGGITLGLLIGRGINTIIPGLEKALSFIASPWGRRSKNP

SEQ ID NO: 10763 - DNA, 891 bp, Unknown
  Obtained from environmental sample
  misc_feature (1)..(891): n is a, c, g, or t
atgctggtcttcgccgccggtcagcacataacgagccgcgaagggggcggcatggcgtatcagagggccgacggcggcgcctacgtacgggagatgaggcgcatnggcggcgcgggtataaataggtacaacacgcggcagtacatagttgagccgggcgcgaaattgggcggcaacaccaatttcatgatgatgatgagaaaccaaggatacataagtgctgtggagattatagaaggctacaaccaattccgcctcaagtacgcggtgccgccgctcgacggggcgaagttcaacacgatgctcgatctcatgaacgtcacgtactacgtagaccccaaagccacgccggaatcccaagaacccgtaaagcgcaacgcgacttgcttgccgcgcgccaagttgttttataaggctaaggttttggggctggacggcatcaagagtatgaataatggcaataacggcggcggcggttatgattcgttagtaatcaattatatgaatagcccggattacgaccacaaaaatgaagttgtggttacagatccgaattttgagagattttccggcgttgggacggggaaggcgcggatcactaagtataattttaaccggattgaacttgatattgataccgacaaagaagcgatactatggctaagcgagatttggtaccccgcttggaaggcgacggtcaacgggaataagacggatgtgcatagggcaaactacagtttcagggcgataaccgttcccgccggatactcaaaggtcgtattcaagtttgagtcgactctctttaatatcggggcgataattagtttattgacattgttatcgtcgttgacatattgggagcggtgttggaagaggagctcggccatctga

SEQ ID NO: 10764 - protein, 296 aa, Unknown
  Obtained from environmental sample
  misc_feature (1)..(296): Xaa is any amino acid
MLVFAAGQHITSREGGGMAYQRADGGAYVREMRRXGGAGINRYNTRQYIVEPGAKLGGNTNFMMMMRNQGYISAVEIIEGYNQFRLKYAVPPLDGAKFNTMLDLMNVTYYVDPKATPESQEPVKRNATCLPRAKLFYKAKVLGLDGIKSMNNGNNGGGGYDSLVINYMNSPDYDHKNEVVVTDPNFERFSGVGTGKARITKYNFNRIELDIDTDKEAILWLSEIWYPAWKATVNGNKTDVHRANYSFRAITVPAGYSKVVFKFESTLFNIGAIISLLTLLSSLTYWERCWKRSSAI

SEQ ID NO: 10765 - DNA, 822 bp, Unknown
  Obtained from environmental sample
  misc_feature (1)..(822): n is a, c, g, or t
atgatgggcagcgcccccatgggcaaaggcgaggccctgaagcagtataccctggacatgaccgccgaagccgaggcgggaaagattgaccagatagtgggcagggacgcggaaatccgccaggtcattgatatccttctgcgccggcggcagaacaacccgatccttaccggggacgctggagtgggaaagaccgccgtggtggaaggttttgcccggcgcctggcgtccggcgacgtgccgccgtcctttaaaggtacaaaattgctttccctggatatgggtctgctgcaggccggagccagcatgaagggcgaattcgaaaaccgtttgaagcaggttattgaggaggtgcagagttctgataccccaatcatcctcttcatcgacgaggcccatacgatgatcggcgccggcggccaggccggacagaacgacgccgccaacctccttaaacccgcccttgcgcggggcaagctgcgctgtattgccgccaccacgtatcaggagtacatcaagtattttgagaaagaccctgccctggcgcggcgcttccagaacatccttatcgaagagccggatgacgataaggggacgcagatgatgcggggcatagtaaagtccctggaaaagcaccacggcgttgttgtactggatgaggctcttggcgcggctgtaaaactttcacgccgctaccttccctcccgccagcttcccgacaaatccgtgagcatccttgacacggcctgcgccaaggtgaacctgagccaaaacgcgcagcccgccgaactggaatattcccgccggcgcatgaggccctga

SEQ ID NO: 10766 - protein, 273 aa, Unknown
  Obtained from environmental sample
  DOMAIN (53)...(239): ATPase family associated with various cellular activities (AAA)
  misc_feature (1)..(273): Xaa is any amino acid
MMGSAPMGKGEALKQYTLDMTAEAEAGKIDQIVGRDAEIRQVIDILLRRRQNNPILTGDAGVGKTAVVEGFARRLASGDVPPSFKGTKLLSLDMGLLQAGASMKGEFENRLKQVIEEVQSSDTPIILFIDEAHTMIGAGGQAGQNDAANLLKPALARGKLRCIAATTYQEYIKYFEKDPALARRFQNILIEEPDDDKGTQMMRGIVKSLEKHHGVVVLDEALGAAVKLSRRYLPSRQLPDKSVSILDTACAKVNLSQNAQPAELEYSRRRMRP

SEQ ID NO: 10767 - DNA, 573 bp, Unknown
  Obtained from environmental sample
  misc_feature (1)..(573): n is a, c, g, or t
gtggtggcggcaatacagcgcagcttgccccgcgcaagggcgggtttaaggaggttggcggcgtcgttctgtccggcctggccgccggcgccgatcatcgtatgggcctcgtcgatgaagaggatgattggggtatcagaactctgcacctcctcaataacctgcttcaaacggttttcgaattcgcccttcatgctggctccggcctgcagcagacccatatccagggaaagcaattttgtacctttaaaggacggcggcacgtcgccggacgccaggcgccgggcaaaaccttccaccacggcggtctttcccactccagcgtccccggtaaggatcgggttgttctgccgccggcgcagaaggatatcaatgacctggcggatttccgcgtccctgcccactatctggtcaatctttcccgcctcggcttcggcggtcatgtccagggtatactgcttcagggcctcgcctttgcccatgggggcgctgcccatcatggcgccggcctggcctgtagccgagcttttccatcccccgcgggaacggagctttcggcggagttggcggtga

SEQ ID NO: 10768 - protein, 190 aa, Unknown
  Obtained from environmental sample
  misc_feature (1)..(190): Xaa is any amino acid
MVAAIQRSLPRARAGLRRLAASFCPAWPPAPIIVWASSMKRMIGVSELCTSSITCFKRFSNSPFMLAPACSRPISRESNFVPLKDGGTSPDARRRAKPSTTAVFPTPASPVRIGLFCRRRRRISMTWRISASLPTIWSIFPASASAVMSRVYCFRASPLPMGALPIMAPAWPVAELFHPPRERSFRRSWR

SEQ ID NO: 10769 - DNA, 348 bp, Unknown
  Obtained from environmental sample
  misc_feature (1)..(348): n is a, c, g, or t
atgtatcagatcggccgagttcttattaacgcggttttacttgtattactggtcttgcttcagactgaggaaggggacgggcttggcggcatttttgccggcggttcaaataccgcttttggttcccgttcgggtaatttccttacccgtgctaccactgttttgggggctttgttcctcgtcatcagtctggggttggcgttactcagccgcactcccgccggctcaagcattgagaaagaaataagtgagcttagtactcaggaatcggtaaccaactggtgggaaaaaacagtagatccgtctcaattagatgaaccttcaaatgaacctccaaatgaaccttaa

SEQ ID NO: 10770 - protein, 115 aa, Unknown
  Obtained from environmental sample
  DOMAIN (2)...(71): Preprotein translocase SecG subunit
  misc_feature (1)..(115): Xaa is any amino acid
MYQIGRVLINAVLLVLLVLLQTEEGDGLGGIFAGGSNTAFGSRSGNFLTRATTVLGALFLVISLGLALLSRTPAGSSIEKEISELSTQESVTNWWEKTVDPSQLDEPSNEPPNEP

SEQ ID NO: 10771 - DNA, 495 bp, Unknown
  Obtained from environmental sample
  misc_feature (1)..(495): n is a, c, g, or t
atgaaccttcaaatgaacctccaaatgaaccttaaagattttttattaccggaatttatcaaggtaaatttaaaagcggaagataaagacgaagcttttaaggaactgacagcccattattgcaaaacggttaatttgacttcttatagtaaaattcttgacgcaatagtaaaacgcgaagaaaaaatgtctacgggaattcataagggtattgcggttcctcattgtcagaccgacgccgtaaaaaaactttgcggcgcgcttggtatttccgaaaaaggcgtacagtacgattctttggacggagagcctgtacatcttctttttatgtttatttttccccttaatgatacgcaagaacatcttttacttttaaaacatttagccggacttatagaaatccctaagtttcaaacggaacttcaggctcaaaaagacccgcaaagcgcgtttaacgttctttgcaaatttgaagatatgctctccggcaaataa

SEQ ID NO: 10772 - protein, 164 aa, Unknown
  Obtained from environmental sample
  DOMAIN (14)...(157): Phosphoenolpyruvate-dependent sugar phosphotransferase system, EIIA 2
  misc_feature (1)..(164): Xaa is any amino acid
MNLQMNLQMNLKDFLLPEFIKVNLKAEDKDEAFKELTAHYCKTVNLTSYSKILDAIVKREEKMSTGIHKGIAVPHCQTDAVKKLCGALGISEKGVQYDSLDGEPVHLLFMFIFPLNDTQEHLLLLKHLAGLIEIPKFQTELQAQKDPQSAFNVLCKFEDMLSGK

SEQ ID NO: 10773 - DNA, 504 bp, Unknown
  Obtained from environmental sample
  misc_feature (1)..(504): n is a, c, g, or t
gtgcttaagtattgtccgcgttgttccggccctgcggtcttggcggactcccgcaagatcgtctgcgccgggtgcgggttccaaatgtacctaaacaatgccgccgcggtcgccgcgttgctttttgacggcgagggccggctcatgaccgtccgcaggaacgaagaaccgcagacggggttgctggacctgcccggcggctttgtcgaattcggcgaaacggccgaggaggcgctgtcgcgtgagttgagcgaggagttgggcatagctgtctgcggcatcgagtactaccggtcgatccccaataattacctatacggcggcgttctgtaccacacgctggacatctttttgaagtgccgtcttgacgaaagctccgataataaaatccgcaccaatgacgaaataaaagaaattgtttataagtttccgaaagatattacagaagaagagattgcttttgactctatgaagaagttgattaagtctttaaaaataagttga

SEQ ID NO: 10774 - protein, 167 aa, Unknown
  Obtained from environmental sample
  DOMAIN (33)...(163): NUDIX domain
  misc_feature (1)..(167): Xaa is any amino acid
MLKYCPRCSGPAVLADSRKIVCAGCGFQMYLNNAAAVAALLFDGEGRLMTVRRNEEPQTGLLDLPGGFVEFGETAEEALSRELSEELGIAVCGIEYYRSIPNNYLYGGVLYHTLDIFLKCRLDESSDNKIRTNDEIKEIVYKFPKDITEEEIAFDSMKKLIKSLKIS

SEQ ID NO: 10775 - DNA, 558 bp, Unknown
  Obtained from environmental sample
  misc_feature (1)..(558): n is a, c, g, or t
ttgaagcgggaactcaatgaaaaaatactggaagagaagctttctcccgcgccgcttcttaccaggatcggcattaacaccggaagcatggtagccggcaacatgggcacggaaaacaagatgaactacactattatgggaaacgcggtaaacctggcctcccgccttgaaggggtaaacaaacaatacagaacatggatcctcgtttccgaagacacgctccgtgagactgacggccgttaccttacccgcaaactcgacagggtccgggtagttggcatccaggagcctatacggatctacgagcttctggataccctggaaaccgcggatccgcaaaagaaaaaactggcggcaattttccaggaagccctggactgctatgaaaaatgggactggaaagccgccggccagggcttccgggaatctcttgcccttgaaacaggcggtcaaaaaggccacaacccttcggctctataccttgaacgctgtatgcgtttcctgaccagacctcccagagaagactgggacggggtgaacaaccttacggaaaaatag

SEQ ID NO: 10776 - protein, 185 aa, Unknown
  Obtained from environmental sample
  misc_feature (1)..(185): Xaa is any amino acid
MKRELNEKILEEKLSPAPLLTRIGINTGSMVAGNMGTENKMNYTIMGNAVNLASRLEGVNKQYRTWILVSEDTLRETDGRYLTRKLDRVRVVGIQEPIRIYELLDTLETADPQKKKLAAIFQEALDCYEKWDWKAAGQGFRESLALETGGQKGHNPSALYLERCMRFLTRPPREDWDGVNNLTEK

SEQ ID NO: 10777 - DNA, 333 bp, Unknown
  Obtained from environmental sample
  misc_feature (1)..(333): n is a, c, g, or t
gtgaaacagacgcaaaaaagtaaaagcgtaaaacagaacggaatgacagataacttccatgtatatgccgtggaatggctgccggataaaataaaatttttctacgacggggaattgcaatatacatataaccccgtcatgtttaaagacagtccaacatataaagaatggccttttgaccggcgttttcacctgttgataaacctcgcattcggcggaaactggggcggcgcccgcggcgtgaattacgacgtactgcctgtaaaatatgagattgattatgtgcgggtataccaaagcccggaaattaacgcgttaataaataaaccttaa

SEQ ID NO: 10778 - protein, 110 aa, Unknown
  Obtained from environmental sample
  misc_feature (1)..(110): Xaa is any amino acid
MKQTQKSKSVKQNGMTDNFHVYAVEWLPDKIKFFYDGELQYTYNPVMFKDSPTYKEWPFDRRFHLLINLAFGGNWGGARGVNYDVLPVKYEIDYVRVYQSPEINALINKP

SEQ ID NO: 10779 - DNA, 582 bp, Unknown
  Obtained from environmental sample
  misc_feature (1)..(582): n is a, c, g, or t
atggtaaacaaaccgatttattcaattaacaacgatgagtttattattgaaaattacaataacgcgaaagcgttcgccagctttctgcccgctattgccggtctttggggcaagcccatttgggtttattacgtcaatcgcgggcaggcaatagccaatttcggcatcaaagacaaggatggcgctattgttgagtttaacgccgcaaacaaagcctggcggcagaccgctttacagggtttcaggactttttacaaagtaaacggaactttttatgagccttttcgcaattcacagtatttaaagacaaaaaaaataactcagaaaatgtatataaaaacccatgaagtgcgtcttcttgaaaggaacgaaacatccggtatagaaaccgaagctgctttttgtactctgcccggagaanatttccccgctcttttaaggcggctttctataaaaaatatttctggcgaaacgaaggaaattgaatgtatcgacggtctgcctatgctgcttccctggggaacacgtaactggatgttaaaaacctgtcccgtcttgccgaaagctggtttgcggggttaa

SEQ ID NO: 10780 - protein, 193 aa, Unknown
  Obtained from environmental sample
  misc_feature (1)..(193): Xaa is any amino acid
MVNKPIYSINNDEFIIENYNNAKAFASFLPAIAGLWGKPIWVYYVNRGQAIANFGIKDKDGAIVEFNAANKAWRQTALQGFRTFYKVNGTFYEPFRNSQYLKTKKITQKMYIKTHEVRLLERNETSGIETEAAFCTLPGEXFPALLRRLSIKNISGETKEIECIDGLPMLLPWGTRNWMLKTCPVLPKAGLRG

SEQ ID NO: 10781 - DNA, 966 bp, Unknown
  Obtained from environmental sample
  misc_feature (1)..(966): n is a, c, g, or t
ttgataactgtagcagcattttgtgcagcgtgcttgggctgcatagcctcggcgcagcaagccattgaaactttttcatccttcaacgactggctgcgggcagacgtcaaaggtgtcaaatcnagcgcggacggcagcttgcgcttggcccccaacgccaggagggccgcgcagattcccgagggcgttgtgtggtcaacggtctcggacggccaagggggggcctacctctcagctgggaccgaaggcaagatattccgctactcaaacggccaagtgaggcccttcatccagctaaagggcgggatgatattcgccatgacccgcttgggcaatgacctgattgcggccactagcgcagacggcaagctgcaccggataaaccccagcggtgaatccaagccctttggggaaattgacgcaagggtgatatgggccttggcctcgaatggcactgacgtattcatcgcaggaggcggagagaggggcgcaacgctgtacttggcaagggaaaattccgttgccagacggctggtgtccatacccgaagaaaccgcattcactgccatcgtccaagaaagcccaggcgtttggatattgggtacgcacggcaagggccttgtcgctaggttcacgcagataggcgaacaaatcgaagtgcttgccgcaacaggctttgaggaggtcagggcgttggcgctccacgatgggcaaatatacatcggggccaaccaggggctggccgaaaaaatgaactcggggcagctagagaaccgcgaaagctaccttgtagcaagcgcgggggctgttcgctcaacggtattcaaattggacaaggaacgcataccccaagtgctttggactagcggccaaagccaagtgttctcgatggccacatggaaagaccaactgctgcttggcactggcaaccgcagccgtattttctgtccgctccgaccgcgataa

SEQ ID NO: 10782 - protein, 321 aa, Unknown
  Obtained from environmental sample
  SIGNAL (1)...(20)
  misc_feature (1)..(321): Xaa is any amino acid
MITVAAFCAACLGCIASAQQAIETFSSFNDWLRADVKGVKSSADGSLRLAPNARRAAQIPEGVVWSTVSDGQGGAYLSAGTEGKIFRYSNGQVRPFIQLKGGMIFAMTRLGNDLIAATSADGKLHRINPSGESKPFGEIDARVIWALASNGTDVFIAGGGERGATLYLARENSVARRLVSIPEETAFTAIVQESPGVWILGTHGKGLVARFTQIGEQIEVLAATGFEEVRALALHDGQIYIGANQGLAEKMNSGQLENRESYLVASAGAVRSTVFKLDKERIPQVLWTSGQSQVFSMATWKDQLLLGTGNRSRIFCPLRPR

SEQ ID NO: 10783 - DNA, 834 bp, Unknown
  Obtained from environmental sample
  misc_feature (1)..(834): n is a, c, g, or t
atgcattatgttccggaaggcaaagtaaaagtacgtttgggaatattttgcaatttgctttcggcttttaccgccgtcgtaatcgcgtggagttcggtatcttttattaaaatcgcgcttggacaaaataaaataggctttatttccgacagtgttctctcttcgattatccccatcgctttcgccgtaatcgccttccgttttgcgcgcatgacaaaacttacaggatggaaaatagtcctgcctgtcttaagtatcttgttgggaacagccgcttctttccccgttatcgcaaagataatatggggttttgacatgtcggattccatttttaatatttgcgataaatttttcatttttacccattacgccaaaacgccgtttgtaattataattatttttgcggctttaagcgggacgccgctttttattatcatgggcgcccttgccctgcttcttaatcaggccgcgggcctggaaatggattctgtcgcggttaatattcattccgcgcttacaaatcaaaacattatcgcgattccgctttttaccatcgtggggtttttcctctcggagagcaaggcgggagagcggcttgtccatactttccgcagttttttcagctggcttcccggcggaataattattgtcaccgtagttatatgcgcttttttcacttcttttacgggagcgtcgggcgttacaattcttgcccttggcggtattttatatacgatattgaaagaacatttgaaatacccggaagaattttcaatcgggcttttaacatccgtgggcagcatagggcttcttttccgccaagccttccgttga

SEQ ID NO: 10784 - protein, 277 aa, Unknown
  Obtained from environmental sample
  misc_feature (1)..(277): Xaa is any amino acid
MHYVPEGKVKVRLGIFCNLLSAFTAVVIAWSSVSFIKIALGQNKIGFISDSVLSSIIPIAFAVIAFRFARMTKLTGWKIVLPVLSILLGTAASFPVIAKIIWGFDMSDSIFNICDKFFIFTHYAKTPFVIIIIFAALSGTPLFIIMGALALLLNQAAGLEMDSVAVNIHSALTNQNIIAIPLFTIVGFFLSESKAGERLVHTFRSFFSWLPGGIIIVTVVICAFFTSFTGASGVTILALGGILYTILKEHLKYPEEFSIGLLTSVGSIGLLFRQAFR

SEQ ID NO: 10785 - DNA, 522 bp, Unknown
  Obtained from environmental sample
  misc_feature (1)..(522): n is a, c, g, or t
ttgnacagactggacagcgacggtattcttaatccggcagaaagacaaatctttgaaggcatgtttgtttacttggaagacattcgctctccttttaatgtgggcgcaatgttccgcacggcggaaagtttcggcgtagaaaaaataattctttctcctttctgcgcggaccctcatcaccgccgcgctcaaaggactgcaatgggctgcacagacattgtatcgtgggagcggcaaaatttattttctacggaggaaattctaccgctgccatatcccgtttttgcgctggaaacgggaggtattccattgggcgaatttccatttccgcaaaaggggtttttaatagccggttccgaagaattgggagttagtccccgcgctttagcggcggcagacgcttctctgggcagagtatcaattccatgttacggcgcaaaagcttctcttaacgtttcagtagcttttgggattgcagttaattcttgggcgcagactattacgtccggaaaacacggataa

SEQ ID NO: 10786 - protein, 173 aa, Unknown
  Obtained from environmental sample
  DOMAIN (20)...(161): SpoU rRNA Methylase family
  misc_feature (1)..(173): Xaa is any amino acid
MXRLDSDGILNPAERQIFEGMFVYLEDIRSPFNVGAMFRTAESFGVEKIILSPFCADPHHRRAQRTAMGCTDIVSWERQNLFSTEEILPLPYPVFALETGGIPLGEFPFPQKGFLIAGSEELGVSPRALAAADASLGRVSIPCYGAKASLNVSVAFGIAVNSWAQTITSGKHG

SEQ ID NO: 10787 - DNA, 576 bp, Unknown
  Obtained from environmental sample
  misc_feature (1)..(576): n is a, c, g, or t
atgctgctttcagcttatgagcagggtattttcccatggtataatccggaagaccccataatctggcagtctcctgaccctcgctgtgtgattttctccggtaaactccatgtttccgcttctatgcgtaaaattttcaatacaggcgtatttgaaataacaattgaccgggattttgccggagttattaaaagctgtgcggaaacaaaaaggcggggacaaagcgggggtacatggattaccgccgacattattgaagcatacattgaattgcaccgtctgggctgggttcactctgcggaagcctggcaggacggtcagcttgcaggaggctgttacggcgtacttatgggaaaagcttttttcggagaatcgatgttttcaagaaaaagcaacgcttcaaaagccgctttcctgagccttgcggaaaaactctttaaaaacggacttgccttcattgattgtcaggtccccacaccgcatttggcaagtctcggcggtgaggaaatatcccgaaaagatttcctggaactgttaaagatatataatatttcaagaaaatgtgcgataatataa

SEQ ID NO: 10788 - protein, 191 aa, Unknown
  Obtained from environmental sample
  DOMAIN (1)...(172): Leucyl/phenylalanyl-tRNA protein transferase
  misc_feature (1)..(191): Xaa is any amino acid
MLLSAYEQGIFPWYNPEDPIIWQSPDPRCVIFSGKLHVSASMRKIFNTGVFEITIDRDFAGVIKSCAETKRRGQSGGTWITADIIEAYIELHRLGWVHSAEAWQDGQLAGGCYGVLMGKAFFGESMFSRKSNASKAAFLSLAEKLFKNGLAFIDCQVPTPHLASLGGEEISRKDFLELLKIYNISRKCAII

SEQ ID NO: 10789 - DNA, 837 bp, Unknown
  Obtained from environmental sample
  misc_feature (1)..(837): n is a, c, g, or t
gtggatttggatcatgtcgttaatacaaacgatattgtggactacggaaaacgtatcacagagcaatacaaagcggttaaccgcacagttcatgaagataatacgattgtccacgtcggcgacgtatcaatcggcgaaggatacttcaccgttatttcagggccatgttctgttgagagcaaagaacagatcacggaaatagcgcacagcgtcaaaaggagcggcagtaaaatcctgcgcggtggggcgtttaaaccaagaacttcaccgtacgcttttcagggaaaacaggccgaagggcttgatttgctgcgtatagcgaaacaggaaacaggccttcccattatctctgaaattatgaatcaaacgcagatcgatttgttcaatgatgttgatattatgcaaatcggcgccaggaatatgcagaactttgatttactgaaagaggtcggcaggctgaaaaagcctgtgctattgaagcgcggactggccaacacaatcgaggaattgctgatgagcgcggaatatatcgtatccgcgggaaacacgcaggttatactttgtgagcgcggtatccgcacctttgaaacaatgacgcgtaacacgctggatttatcggcggtagcgcttctcanacaaaaatcgcacctgcccgttattgtagaccccagccacgcttcgggcatcagaagccttgtaccgcctcttgccaaagcggccatggcagtgggtgcggacggccttatgatagaagcgcataataatccggctgccgcgttatgcgacggcgcgcagtcgcttgatttggaacaggtccgcctgcttatggaccattga

SEQ ID NO: 10790 - protein, 278 aa, Unknown
  Obtained from environmental sample
  DOMAIN (34)...(278): DAHP synthetase I family
  misc_feature (1)..(278): Xaa is any amino acid
MDLDHVVNTNDIVDYGKRITEQYKAVNRTVHEDNTIVHVGDVSIGEGYFTVISGPCSVESKEQITEIAHSVKRSGSKILRGGAFKPRTSPYAFQGKQAEGLDLLRIAKQETGLPIISEIMNQTQIDLFNDVDIMQIGARNMQNFDLLKEVGRLKKPVLLKRGLANTIEELLMSAEYIVSAGNTQVILCERGIRTFETMTRNTLDLSAVALLXQKSHLPVIVDPSHASGIRSLVPPLAKAAMAVGADGLMIEAHNNPAAALCDGAQSLDLEQVRLLMDH

SEQ ID NO: 10791 - DNA, 360 bp, Unknown
  Obtained from environmental sample
  misc_feature (1)..(360): n is a, c, g, or t
atggccgctttggcaagaggcggtacaaggcttctgatgcccgaagcgtggctggggtctacaataacgggcaggtgcgatttttgtntgagaagcgctaccgccgataaatccagcgtgttacgcgtcattgtttcaaaggtgcggataccgcgctcacaaagtataacctgcgtgtttcccgcggatacgatatattccgcgctcatcagcaattcctcgattgtgttggccagtccgcgcttcaatagcacaggctttttcagcctgccgacctctttcagtaaatcaaagttctgcatattcctggcgccgatttgcataatatcaacatcattgaacaaatcgatctgcgtttga

SEQ ID NO: 10792 - protein, 119 aa, Unknown
  Obtained from environmental sample
  misc_feature (1)..(119): Xaa is any amino acid
MAALARGGTRLLMPEAWLGSTITGRCDFCXRSATADKSSVLRVIVSKVRIPRSQSITCVFPADTIYSALISNSSIVLASPRFNSTGFFSLPTSFSKSKFCIFLAPICIISTSLNKSICV

SEQ ID NO: 10793 - DNA, 462 bp, Unknown
  Obtained from environmental sample
  misc_feature (1)..(462): n is a, c, g, or t
atgaatggtatggattccaaagcgctggaggcaatggtccgcaaggtcttgggtgaaatcattgccgaaaagggcggatgttgctgtgccgatgagttccgccatgttgacaagagcgggataatgtccattaaactcccccggataaaaccggagccttttgacacgggaaaaccgggggacaaggtatttctaaaagaccttgtcagtttagaggaaagcccccgccttggctgcggggttatggagatggataaatcgtccttcgactggaccctgaattatgacgaagtagactatgttattgatggaagactggaagttattattaacggcaacaaagtagccgcggacaaaggggaggtgatttttatccccaaggggtcttctataacattttcggttccggattttgcccgttttctttacgtggtctatccggctgactgggccaaccaataa

SEQ ID NO: 10794 - protein, 153 aa, Unknown
  Obtained from environmental sample
  DOMAIN (71)...(143): Protein of unknown function (DUF861)
  misc_feature (1)..(153): Xaa is any amino acid
MNGMDSKALEAMVRKVLGEIIAEKGGCCCADEFRHVDKSGIMSIKLPRIKPEPFDTGKPGDKVFLKDLVSLEESPRLGCGVMEMDKSSFDWTLNYDEVDYVIDGRLEVIINGNKVAADKGEVIFIPKGSSITFSVPDFARFLYVVYPADWANQ

SEQ ID NO: 10795 - DNA, 882 bp, Unknown
  Obtained from environmental sample
  misc_feature (1)..(882): n is a, c, g, or t
gtgccgagccgcatggggcttcttttggatattcccatgactgcccttcgttccgtgctttactacgaaaaatacatcgtaattgagccgggggagaccgatctcagaaggatgcagctccttacggaagaagagtactacgaggcccaggaacgccacagcgggagctttaccgccggtatgggagccgaagcgattaggacgcttctggaaaataccgacttggataagcttgccgccgaactcagggcaaaaatgatagaaaaggggccaaagagcgataagcgccttttaaaacggatagatatagttgagaatttcagaaactcaaagaacaagccccaatggatgatcctggatgtgattcccgttataccgcctgaattgcgccccatggttcagcttgacggcggccgtttcgcgaccagcgacctgaacgatctttaccgccgggtgataaaccggaacaaccgccttaagcggctccaggttctaaacgcgccggacataattatccgcaacgaaaagcgaatgttgcaggaggcggttgacgccctgtttgacaattccaagaaaaagcgggttgtaaagggagcctcaaaccggcccctgaaatccataagcgatatgctaaaaggcaagcagggacgtttcaggcagaatctgcttggaaagcgggtggattattcgggccgcagcgtaatcaccgtcggccccgatcttaaaatgtggcagtgtgggcttccaactaaaatggctttggagcttttcaagcctttcattatgaagaaacttgtcgataaggacgtggtttataacatcaaaaaggcaaagatccttgtggagcaggagaccccgggaagttttcgccattctggatga

SEQ ID NO: 10796 - protein, 293 aa, Unknown
  Obtained from environmental sample
  DOMAIN (224)...(292): RNA polymerase Rpb1, domain 2
  misc_feature (1)..(293): Xaa is any amino acid
MPSRMGLLLDIPMTALRSVLYYEKYIVIEPGETDLRRMQLLTEEEYYEAQERHSGSFTAGMGAEAIRTLLENTDLDKLAAELRAKMIEKGPKSDKRLLKRIDIVENFRNSKNKPQWMILDVIPVIPPELRPMVQLDGGRFATSDLNDLYRRVINRNNRLKRLQVLNAPDIIIRNEKRMLQEAVDALFDNSKKKRVVKGASNRPLKSISDMLKGKQGRFRQNLLGKRVDYSGRSVITVGPDLKMWQCGLPTKMALELFKPFIMKKLVDKDVVYNIKKAKILVEQETPGSFRHSG

SEQ ID NO: 10797 - DNA, 879 bp, Unknown
  Obtained from environmental sample
  misc_feature (1)..(879): n is a, c, g, or t
atgaaacccgatcagcttacaaccggaaaaggttcttacaatttcacaaacgcggatcgcatggtaaatgccgccatagcatccggctttaaagttgtaggacacacccttctttggcacaaccagattccgcaatggcagcggtttattgacccggtaaccgcactggaagatatgaagcaatatatcactgacgtagtaggtcattttagcggaagaatctattcatgggacgtattaaacgaagcgtttccggacggaggttattctacggactggaaaacatccatgcgtgataataacccctggtataaaaccataggctctgattttgtatacgaagggtttcttgcggcccgtttggcggatcctgacgcaattttatactacaacgactacaataccgatcaggcgggaaaagccaaaatgatttacgatatggtaaaagaagtgaatgagcgctataaagcggcatttccgtctgaaacacggctccttatcgaaggcataggaatgcaggagcaccataacgcgggcgtatcggcaagcgcgataagagacagtttgaacctgtttaagccgctgggagtaaaaatatctgtcagtgagcttgacgttctgatagtaacttatcaggagtttgcgccttatggtcaggggcctaacaaacaaaatttaataccggaagatagaaggatcgagggactaaaaaaacaggcggaattatacggccaatactttaaagtatatctggaattcagcgacatcattgagcgcgtttcgttttggggcgtcactgacgatcgaagctggcgatctgccgccttgccgcttttgtttgatgccgccggaaacccanagatgcttactacagcgtga

SEQ ID NO: 10798 - protein, 292 aa, Unknown
  Obtained from environmental sample
  DOMAIN (1)...(289): Glycosyl hydrolase family 10
  misc_feature (1)..(292): Xaa is any amino acid
MKPDQLTTGKGSYNFTNADRMVNAAIASGFKVVGHTLLWHNQIPQWQRFIDPVTALEDMKQYITDVVGHFSGRIYSWDVLNEAFPDGGYSTDWKTSMRDNNPWYKTIGSDFVYEGFLAARLADPDAILYYNDYNTDQAGKAKMIYDMVKEVNERYKAAFPSETRLLIEGIGMQEHHNAGVSASAIRDSLNLFKPLGVKISVSELDVLIVTYQEFAPYGQGPNKQNLIPEDRRIEGLKKQAELYGQYFKVYLEFSDIIERVSFWGVTDDRSWRSAALPLLFDAAGNPXMLTTA

SEQ ID NO: 10799 - DNA, 768 bp, Unknown
  Obtained from environmental sample
  misc_feature (1)..(768): n is a, c, g, or t
gtgctgaaccccatggcacccattggctggagccacgctcatcccataaatattattgattttcccgatgaaagtgatgattactttctgctgaaagacgttccgcacggcacagtagcacgggattattattattcaaaaacctgcggctgttataaaagctgccttgtatacacgcctcctgactatacctctggcaaatgggataatttgcccgtgttttaccttcagcatggatacggagaaaacgaaacgagctgggttcatcttggcaaagtcaactggattatggataatcttctggcggaaggcaaagcggagccttgtgtaattgtcatgaacaacggaatggtacagacggaacagagcgacggaagccgcgactgggatccgatgaccattgagaaattgctgttggacgactgcattccgtatattgaaaaacactatcgcgtggcttccgacaaatggcgcagggctatggcaggtttatcaatgggttccatgcaaaccagcgttacgacgctcaaacaccctgaattgtttggatatgccgggattttcagcggctttcttggaaagattggcgacccaggcaaagccgataacagccactttgccgcgtttgaagacaaagcanaactgctggattcatacaaactgttcttccgctgcataggcgaggccgaccagtttatcgggcagttcaaatccgaaaccgccatgcttcangaaaagggcttgccccagaacaatggaagcgcataa

SEQ ID NO: 10800 - protein, 255 aa, Unknown
  Obtained from environmental sample
  DOMAIN (38)...(243): Putative esterase
  misc_feature (1)..(255): Xaa is any amino acid
MLNPMAPIGWSHAHPINIIDFPDESDDYFLLKDVPHGTVARDYYYSKTCGCYKSCLVYTPPDYTSGKWDNLPVFYLQHGYGENETSWVHLGKVNWIMDNLLAEGKAEPCVIVMNNGMVQTEQSDGSRDWDPMTIEKLLLDDCIPYIEKHYRVASDKWRRAMAGLSMGSMQTSVTTLKHPELFGYAGIFSGFLGKIGDPGKADNSHFAAFEDKAXLLDSYKLFFRCIGEADQFIGQFKSETAMLXEKGLPQNNGSA

SEQ ID NO: 10801 - DNA, 738 bp, Unknown
  Obtained from environmental sample
  misc_feature (1)..(738): n is a, c, g, or t
ttgacagacctgcgccgctgccgtaataaagccatagacatcctcacggggcttaattataaaaatgacgagctatcgggccgtaacgcatacacggtgctgaggcttaaaaccctgaacctctacgaacagcgcataacaagcctgacagagtcgggaagcataagcccctatcatctttatctggaactctgctccctcttgtccgagttgatggcctatgaccccgtcaacagcatccaggggataaagccttacaatcacgacgactgcgccccggtctttctggaaatcatcaaggatataagatcctttattctccgggagggaagcgtcgactttgtccgcctggatttcaagcccattgaagaaggcaaatatttgtattgtccgattaaaccccaggaggtcttcaggaccgagagcgcctatcttgcgctccaatgctcaggtcaaagggacgcggtagttaaggccgtggaggaaggcgacacctttaaactgatcaacccccaatcgaagcatctgcgcatccgggggatcaaactcaacgaggagcattatccgccccgcttcctgccggttatacccaacacccgctggttcaaacttgatttggaggaatcttcgagtgtctggagggagataaccgaagagaagggcatggtggtcgattatgtggcgggcattttcccaagcctggcgctttccctgtacctggcattgggggataaataa

SEQ ID NO: 10802 - protein, 245 aa, Unknown
  Obtained from environmental sample
  misc_feature (1)..(245): Xaa is any amino acid
MTDLRRCRNKAIDILTGLNYKNDELSGRNAYTVLRLKTLNLYEQRITSLTESGSISPYHLYLELCSLLSELMAYDPVNSIQGIKPYNHDDCAPVFLEIIKDIRSFILREGSVDFVRLDFKPIEEGKYLYCPIKPQEVFRTESAYLALQCSGQRDAVVKAVEEGDTFKLINPQSKHLRIRGIKLNEEHYPPRFLPVIPNTRWFKLDLEESSSVWREITEEKGMVVDYVAGIFPSLALSLYLALGDK

SEQ ID NO: 10803 - DNA, 648 bp, Unknown
  Obtained from environmental sample
  misc_feature (1)..(648): n is a, c, g, or t
atgcgcaaatacgacgcgtattcggaacaaacctggtccgatgaaaattccgcccgttataccatcagggtaccccaagtccattatgaggcgttgattacagaaaccggcgcgttgggcaaggttcgttcccggagtgaaaccgccgaagatgtaacccttaagtattacgatctggaaggccggcttactaccaaaagaaccctgttggccacatttcagggctacttgggccgtgccaaagacatcgacgatgtgatgaaagtagaaacccgcatagccgatttgcagaatgaaattgacgggttgggaagtcagtttaagatgctggcaaaccagattgattacgccaccgttgaacttcaggtgtacagctatcgccacacttccggctattccacaggtgacaggatagggaagatatttacctcctttggcagctttgcttccggtgcgctggtggtgctgacaagcattattatctacggcgttccgatcatcctcttctgtcttttacttttctggcttctcttcggcagggtcgggatacttaaaagggcattccgccttgttatgtacggtaaaaataccactgtaagaataatcgaaaaaaccggaccggttgatacgggagatgaaaaagaatga

SEQ ID NO: 10804 - protein, 215 aa, Unknown
  Obtained from environmental sample
  misc_feature (1)..(215): Xaa is any amino acid
MRKYDAYSEQTWSDENSARYTIRVPQVHYEALITETGALGKVRSRSETAEDVTLKYYDLEGRLTTKRTLLATFQGYLGRAKDIDDVMKVETRIADLQNEIDGLGSQFKMLANQIDYATVELQVYSYRHTSGYSTGDRIGKIFTSFGSFASGALVVLTSIIIYGVPIILFCLLLFWLLFGRVGILKRAFRLVMYGKNTTVRIIEKTGPVDTGDEKE

SEQ ID NO: 10805 - DNA, 771 bp, Unknown
  Obtained from environmental sample
  misc_feature (1)..(771): n is a, c, g, or t
atgaatattcttgtcataggcggtgccggctatataggtagccacgtgtgtcgtatgctcctcgacgcggagtatgcggttaccgtgtatgacaacctttccagcggctgcgaggagaacctcttccccgaagccgctttcatccgcggcgacatcctcgaccccgccgcgctctcatccgctatggccacccgcaacttcgacgccttggtgcatctcgccgcactcaaggccgccggcgaatccatgatactgcccgaaaaatactccgtcaacaacatcgccggtacgatcaacatcctgaactgcgccgccgcggcgggcatcgggatcttcgtcttctcatcgtcggcggccgtctacggcgcgccgaactacctgcctatggacgaaaagcatccgctcaatccggaaaactactacggcttcacaaaattggagatcgagcgccttctgggctggtacgacaatctgaagggcatccgctacgcggcgttgcgctacttcaacgccgccggatacgacgcgcaggggcgtgtgcgcggcttggagcgcaatccggcgaacctattgcccatcatcatggaagtagcggcggggaaaagggaaaaattggagattttcggggacgactgggccacgccggacggtacatgcatccgcgactacgtccacgtgaccgacttggcgtgggcgcacacgctctccatagagcgtcttatgggcggcggcaaaagcctcacgctcaacttaggcagctcggccatctga

SEQ ID NO: 10806 - protein, 256 aa, Unknown
  Obtained from environmental sample
  DOMAIN (2)...(225): RmlD substrate binding domain
  misc_feature (1)..(256): Xaa is any amino acid
MNILVIGGAGYIGSHVCRMLLDAEYAVTVYDNLSSGCEENLFPEAAFIRGDILDPAALSSAMATRNFDALVHLAALKAAGESMILPEKYSVNNIAGTINILNCAAAAGIGIFVFSSSAAVYGAPNYLPMDEKHPLNPENYYGFTKLEIERLLGWYDNLKGIRYAALRYFNAAGYDAQGRVRGLERNPANLLPIIMEVAAGKREKLEIFGDDWATPDGTCIRDYVHVTDLAWAHTLSIERLMGGGKSLTLNLGSSAI

SEQ ID NO: 10807 - DNA, 408 bp, Unknown
  Obtained from environmental sample
  misc_feature (1)..(408): n is a, c, g, or t
ttggcgcacaaatcgaacggacgggaaaaaaacaacaataaccgaagctggaaccgggttattcttgaagcgccggtttcaataaaatggtttatgtttattcccaaaatatggtggtcatttaagggcataggcaatgatttttccgagaaagatattcccaaatatatgggcatatgtgatttgaccgttataagccattggagaagccatgtcttaagaatttacggaaggtccaattttaattttaaaaacttaaattacgctttacaggttgattacagttatcccataggggaatcgggggtttatatttatttaaaatattttttgggttacggtgaaagccttatggattataaacagaaagtaaataaaataggaacgggaatatcgttaagcaggtga

SEQ ID NO: 10808 - protein, 135 aa, Unknown
  Obtained from environmental sample
  misc_feature (1)..(135): Xaa is any amino acid
MAHKSNGREKNNNNRSWNRVILEAPVSIKWFMFIPKIWWSFKGIGNDFSEKDIPKYMGICDLTVISHWRSHVLRIYGRSNFNFKNLNYALQVDYSYPIGESGVYIYLKYFLGYGESLMDYKQKVNKIGTGISLSR

SEQ ID NO: 10809 - DNA, 795 bp, Unknown
  Obtained from environmental sample
  misc_feature (1)..(795): n is a, c, g, or t
atgatatgcgacgacgcaaaatgcgtaaactgccaccgctgtatctctctttgtcctacccgcgcccttaaaatcgtaaaaagcggaaatacctacaaacagaatgtaaactggaacggcaaaaccataaacgagatttacaagcaggcggattcaagcggggtgctgctgtccagcatgggcaatcctgaggattatcccgtgtactttgacaagatactcctgaacgcttcacaggttacaaacccgtccatagacccattgcgcgaaccgatggagacaaggatatctctgggcgcaaagccggaaagcatacaacgcgataaaagcggccggataataaacaatatgccgccccaactgcacctgtccctgcccgtaatgttttccgcgatgagctacggttccataagttacaacgcgcacgaaagccttgcgcgcgccgccgaagaacttggcattctttataacaccggggaaggcggcttgcacgaggatttttataaatacggcaggaacacgattgtacaggttgcctccggacgtttcggcgttcatcacgattatttaaattcgggcgcggcggttgaaattaaaatggggcagggcgcgaagcccggcatcggggggcatctgcctggtacgaaaatagtaggcgacatatcccgtaccagaatgattcccgagggcagcgacgctatttctcccgcgccgcaccacgacatatactctatagaagatttgcgccagcttgtcttctccttaaagaagccacaaattatcaaaaacccgtaa

SEQ ID NO: 10810 - protein, 264 aa, Unknown
  Obtained from environmental sample
  DOMAIN (1)...(24): 4Fe-4S binding domain
  misc_feature (1)..(264): Xaa is any amino acid
MICDDAKCVNCHRCISLCPTRALKIVKSGNTYKQNVNWNGKTINEIYKQADSSGVLLSSMGNPEDYPVYFDKILLNASQVTNPSIDPLREPMETRISLGAKPESIQRDKSGRIINNMPPQLHLSLPVMFSAMSYGSISYNAHESLARAAEELGILYNTGEGGLHEDFYKYGRNTIVQVASGRFGVHHDYLNSGAAVEIKMGQGAKPGIGGHLPGTKIVGDISRTRMIPEGSDAISPAPHHDIYSIEDLRQLVFSLKKPQIIKNP

SEQ ID NO: 10811 - DNA, 807 bp, Unknown
  Obtained from environmental sample
  misc_feature (1)..(807): n is a, c, g, or t
atgtggcgcagggtggaggagccaaaggacgcgaaggacgaggccgacaaagacctggtggtgttccagatgggcttcgcgccggacgaggaatacatccagaagaaatacggggacggctggaagagacgagcgatggctccgcaggaaggcggatggggcatggaaggcgacacgccaaacctgccggaacaggaacaggccggcgccgatcagacgggcgagggcggggccgagggcgccaccgacacgccaaacctgccggaacaggccgcgctgcctgacggcgcagccaagcgtgaacccctgaacgggacgcagttgtctagcatggtcggggtcgtcaaagaggtggtagccgggaacatacccaaggaggcggcggtctttatgctccgcgccgccttccccgacatggacccagaggaagtcaagggaatgcttgacccgattgtggtcaaggaacccgcgcctgtgccgacaacggagccagagccaaaagagggcgcggagttcgcggagcatcacgtccacaagaagaagccagacgccatagacctcttggcagaccaggcggagggcgcggccgccggggcgatggataggctgctggagccggtcaagaggctcgtccgcagcgccaagagccttgaggagattagggaggggattctggagtgctaccccgacatggacacggagagcatgagcagcgtcctagccgacgcgttcacggtggcgttcttagcgggtgccgatgcggccacgccagcgctcaagggggcggacggtgtcctcaagccttga

SEQ ID NO: 10812 - protein, 268 aa, Unknown
  Obtained from environmental sample
  misc_feature (1)..(268): Xaa is any amino acid
MWRRVEEPKDAKDEADKDLVVFQMGFAPDEEYIQKKYGDGWKRRAMAPQEGGWGMEGDTPNLPEQEQAGADQTGEGGAEGATDTPNLPEQAALPDGAAKREPLNGTQLSSMVGVVKEVVAGNIPKEAAVFMLRAAFPDMDPEEVKGMLDPIVVKEPAPVPTTEPEPKEGAEFAEHHVHKKKPDAIDLLADQAEGAAAGAMDRLLEPVKRLVRSAKSLEEIREGILECYPDMDTESMSSVLADAFTVAFLAGADAATPALKGADGVLKP

SEQ ID NO: 10813 - DNA, 906 bp, Unknown
  Obtained from environmental sample
  misc_feature (1)..(906): n is a, c, g, or t
gtgccgatagctctgacggggagcatcgcgtaccgcttcctgccggtggcgcccatacngcaggtggagttcccgaccatacaggtcttcgcggggctgccaggggccagccctgaaacgatggcgtcgtccgtggcgacgccgctggagcgccagttcgggcgcatagccgggataaccgagatgaccagcagcagctcgctgggcttcaccaacgtcacgctccagttcgatctggaccgcaacatagacgccgcagggcgcgaggtccaggccgccatcaacgccgccagcagccagctgccgagcgacctgcccagcaacccgggctacaggaagataaacccagcggacgcgcccatcatgtccatcatgctgtcgtccaacctggtctccaggacggagatgtacgacatcgggagcaacatcctccagcaaaagctctcgcaggtgccaggagtcggccaggtcttcgtgcagggcggggccgtgcccgccgtcagggtggaggtgaaccccacgctgctgaacagtatgggcctgtcgctggaggacgtccgcacggccattgccgcggccaacgtgaaccgccccacaggcgacatttccgatggctcgcgcacttggtccatcaaagtgacggaccagattttcaccgcggaggactacaaaaagataatcgtgaggtacaaagacggcgccgcgctccgcctggaccaggtggcgtccgtgacggactccgtgcaggattccagggtcataggcctgaccgaccttggccctgcgataacgataatgattttcaggcagccaggggccaacatcatcgagaccgttgaccgcatcagggcgctcctgcccgagttcagggccgtgctgccgcccacggtgacgccacggtgctga

SEQ ID NO: 10814 - protein, 301 aa, Unknown
  Obtained from environmental sample
  misc_feature (1)..(301): Xaa is any amino acid
MPIALTGSIAYRFLPVAPIXQVEFPTIQVFAGLPGASPETMASSVATPLERQFGRIAGITEMTSSSSLGFTNVTLQFDLDRNIDAAGREVQAAINAASSQLPSDLPSNPGYRKINPADAPIMSIMLSSNLVSRTEMYDIGSNILQQKLSQVPGVGQVFVQGGAVPAVRVEVNPTLLNSMGLSLEDVRTAIAAANVNRPTGDISDGSRTWSIKVTDQIFTAEDYKKIIVRYKDGAALRLDQVASVTDSVQDSRVIGLTDLGPAITIMIFRQPGANIIETVDRIRALLPEFRAVLPPTVTPRC

SEQ ID NO: 10815 - DNA, 504 bp, Unknown
  Obtained from environmental sample
  misc_feature (1)..(504): n is a, c, g, or t
atgatttcgcgtgaattgtacgagttacgcgataagacaggcgcaggccatgcgcgggattttcttaccgtaggctcaatgggtcatgcgtcttccatcgccctgtcaatcgctttgcaaaaaccgcaattgcaggtaacctgtcttgacggagacggcgcggctcttatgcacatgggggcattagccgcaattgggacgcaaaaaccgcgcaattattgtcacattgttcttaataacggcgctcatgattctgtaggcggacagcctacgatagccccctttattgatattccggctatagcgcgcgcctgcggttatacagaagtgtatcaggcgaaagcaaaagaagaattaaaaaaaattttagcggaaaaacacgaaggacttatgtttatagaagtaatagtaaagaaaggagcgcgtaaggatttaggccgcccaaaatcaacgccgcaggaaaacaaggcggcttttatgaagtttatcggagattataaatga

SEQ ID NO: 10816 - protein, 167 aa, Unknown
  Obtained from environmental sample
  DOMAIN (14)...(135): Thiamine pyrophosphate enzyme, C-terminal TPP binding domain
  misc_feature (1)..(167): Xaa is any amino acid
MISRELYELRDKTGAGHARDFLTVGSMGHASSIALSIALQKPQLQVTCLDGDGAALMHMGALAAIGTQKPRNYCHIVLNNGAHDSVGGQPTIAPFIDIPAIARACGYTEVYQAKAKEELKKILAEKHEGLMFIEVIVKKGARKDLGRPKSTPQENKAAFMKFIGDYK

SEQ ID NO: 10817 - DNA, 429 bp, Unknown
  Obtained from environmental sample
  misc_feature (1)..(429): n is a, c, g, or t
atgaaatctataaaacggactggttatctcttattgacggttgtcgcaatagcggcattttccgcctgcgcaagtgcgcccaaaactgcttccaaaaacagcgtatggtcgctattggcaaaaggcgaccagcgggcgaagaattattttctcggcgaggtcgatgttaacgcgcgggattccaacggcagaacgccgctgcactatgcggcggaactaaacgatccggcgctggcgacattttttatagctatgggagccgatgttaacgcggtagacaaggccggtgaaacgccgctggctgtttgcgttgaaaaagacagtatcaaagcggcgaaagttcttgcctcatccggcgcggatatacataaacccaccaaaaataaaatcagcattgcccagacagcccttcagaatattcccttttag

SEQ ID NO: 10818 - protein, 142 aa, Unknown
  Obtained from environmental sample
  SIGNAL (1)...(24)
  DOMAIN (62)...(94): Ankyrin repeat
  misc_feature (1)..(142): Xaa is any amino acid
MKSIKRTGYLLLTVVAIAAFSACASAPKTASKNSVWSLLAKGDQRAKNYFLGEVDVNARDSNGRTPLHYAAELNDPALATFFIAMGADVNAVDKAGETPLAVCVEKDSIKAAKVLASSGADIHKPTKNKISIAQTALQNIPF

SEQ ID NO: 10819 - DNA, 687 bp, Unknown
  Obtained from environmental sample
  misc_feature (1)..(687): n is a, c, g, or t
gtgctggatacgggcggctgggcaggagaaacgggacggcagcgggaaggaatactggagttttactgcgggacaagccttgacgatgcggctgaaatcgccgcaaatgccggtctttccggtctggaatttcttgccggtacgcccggcagtatcggcggagcggtctggatgaatgcccgctgttacggacgggaaattgccgatgtaataatcgaaacggacattattgacttttccggttcaccgcctgaacggacgtgcctgcccgccgataaaagtacatttagttataaaaaaagcccttttcagaaccgcgactggttaattctttccgcgtcatttcagctcacacccggagaaacggcgcagatccgcgccgtaatggattctcaccgcgccgaccgtgaaaccaaagggcattaccgctacccttccgccggttctgtttttaagaataatccgcaatatggcaaaccgaccgggcaaataattgacgaattgggtttatgcggcctgcgtaaaggcggtgcgcaggttgccccctggcatggtaatattatcgttaataccggcggtgcttccgccgcagatatccgcgcccttgttgatgaagttgccgctcgcgttaaaacggcgaccggatttgaccttgagccggagatactttttataggtaacaaataa

SEQ ID NO: 10820 - protein, 228 aa, Unknown
  Obtained from environmental sample
  DOMAIN (122)...(226): UDP-N-acetylenolpyruvoylglucosamine reductase, C-terminal domain
  misc_feature (1)..(228): Xaa is any amino acid
MLDTGGWAGETGRQREGILEFYCGTSLDDAAEIAANAGLSGLEFLAGTPGSIGGAVWMNARCYGREIADVIIETDIIDFSGSPPERTCLPADKSTFSYKKSPFQNRDWLILSASFQLTPGETAQIRAVMDSHRADRETKGHYRYPSAGSVFKNNPQYGKPTGQIIDELGLCGLRKGGAQVAPWHGNIIVNTGGASAADIRALVDEVAARVKTATGFDLEPEILFIGNK

SEQ ID NO: 10821 - DNA, 378 bp, Unknown
  Obtained from environmental sample
  misc_feature (1)..(378): n is a, c, g, or t
ttggccgagaaacgctccgccccggagaagacgcttcagaaccagcaacaaacacaagacgctgagaaaaaatttattcctgttattcaggacggcgtgcagattgtcaactcgacactgcggccaaaccgctatccggcgataaccgtacagcagggcattccggtacgctggaccatcaaggccccgccgggcagtataacaggctgtaattactgcgtcattctttacgaatacggcattgaacatatctttcagcagggtgacaatgttattgaatttactcccgcaaaagcgggcaagttccgctattcctgctggatgggcatgatcaaaagcaccattaccgtacttgccgaatccggaaaagaaggttaa

SEQ ID NO: 10822 - protein, 125 aa, Unknown
  Obtained from environmental sample
  misc_feature (1)..(125): Xaa is any amino acid
MAEKRSAPEKTLQNQQQTQDAEKKFIPVIQDGVQIVNSTLRPNRYPAITVQQGIPVRWTIKAPPGSITGCNYCVILYEYGIEHIFQQGDNVIEFTPAKAGKFRYSCWMGMIKSTITVLAESGKEG

SEQ ID NO: 10823 - DNA, 501 bp, Unknown
  Obtained from environmental sample
  misc_feature (1)..(501): n is a, c, g, or t
atgagttataaatgcacatattgcaataaaaaaaacaagcctgaattccctattaccattgtatggaattcaaaaaatttaaaaatgagagtgctccccgaactggagcgcggcgagttctaccgtaataaaaaagaaaattatcaatttgaaaccattataagctaccctgaaatggctgaccgtcttgccgtaataaacgacggtcttgagcctgtcattatagaaactttaaaatcattccttttggataaagccgcggaaaactatcctgataaggatataaacgcgtggtaccactcaaacagcgccggtggtattgaatttcatcttgacggaataaggcggggagaagtcgccgtaatgaggatcccgcaggaaatgtacaatagattccttacagattataaaaagaatccgaaaagcgggatttttccgcagcttcgcgtccgttcctatatgtccgtccaaaacttactgcggcctgatacgttaaaataa

SEQ ID NO: 10824 - protein, 166 aa, Unknown
  Obtained from environmental sample
  misc_feature (1)..(166): Xaa is any amino acid
MSYKCTYCNKKNKPEFPITIVWNSKNLKMRVLPELERGEFYRNKKENYQFETIISYPEMADRLAVINDGLEPVIIETLKSFLLDKAAENYPDKDINAWYHSNSAGGIEFHLDGIRRGEVAVMRIPQEMYNRFLTDYKKNPKSGIFPQLRVRSYMSVQNLLRPDTLK

SEQ ID NO: 10825 - DNA, 543 bp, Unknown
  Obtained from environmental sample
  misc_feature (1)..(543): n is a, c, g, or t
ttggccgagctttccactattcctattcatcctattgtgaacatacctaaaaagactggcgatgagcaaaaaaagaaacagagtttgaaagatgcagaaaaaataaaaaatgtgataaaggacaaaaaattagatgaagcggtaaaggttgaggtaacggaaaaaggcattgctataatgcttcgcgaccccgttggttttgcaagcggctcggcagaccttaaggaccaaggcaaggaaattttgaaggatatcagtgatgttataaagaataactcagatttgaaagttcgcgttgaaggacataccgatgatgttcccatacattccaatcgctataacagcaactgggaactttccagcgcaaggtctctttccgttgttcagctacttgctgggaacacaggcattcagccgcaaaatatgagtgcggttggctatggtgaatatcgtcccattgttccaaacacaagtccagaaaatcgtagcaaaaatcgccgcatccaaatttttgtggactacataaacgaagataaaaaataa

SEQ ID NO: 10826 - protein, 180 aa, Unknown
  Obtained from environmental sample
  DOMAIN (66)...(166): OmpA family
  misc_feature (1)..(180): Xaa is any amino acid
MAELSTIPIHPIVNIPKKTGDEQKKKQSLKDAEKIKNVIKDKKLDEAVKVEVTEKGIAIMLRDPVGFASGSADLKDQGKEILKDISDVIKNNSDLKVRVEGHTDDVPIHSNRYNSNWELSSARSLSVVQLLAGNTGIQPQNMSAVGYGEYRPIVPNTSPENRSKNRRIQIFVDYINEDKK

SEQ ID NO: 10827 - DNA, 447 bp, Unknown
  Obtained from environmental sample
  misc_feature (1)..(447): n is a, c, g, or t
atgatcaaaatgaagaatcatcaatgggcggaagcaagggatgcttttcttgaagcctacaaacaggcgccaaaagaatatccctatgccctgctcgccgctgttaactggatgcgggcaggaagacagacagaccctaaacaatttttggcccaggtgctgcgaaccgctccacgggattctctggaatatgcaatgctcaggcttttccatgatctttcgggcgattctgacgtagcgacaaaagtggacaaagaggtgaatcttaacacaaaggcaaggatgcttttttatcttgcctgttattacgatgtaaggggaagtaaaaacctggcggacagatattacttacaggtgcaggagctgaaccgtatggatactccggagtggcggataaacgaatggatacttgaggaacgaggcataggcttgagggggaaaaagtga

SEQ ID NO: 10828 - protein, 148 aa, Unknown
  Obtained from environmental sample
  misc_feature (1)..(148): Xaa is any amino acid
MIKMKNHQWAEARDAFLEAYKQAPKEYPYALLAAVNWMRAGRQTDPKQFLAQVLRTAPRDSLEYAMLRLFHDLSGDSDVATKVDKEVNLNTKARMLFYLACYYDVRGSKNLADRYYLQVQELNRMDTPEWRINEWILEERGIGLRGKK

SEQ ID NO: 10829 - DNA, 636 bp, Unknown
  Obtained from environmental sample
  misc_feature (1)..(636): n is a, c, g, or t
atggaggtaactatggcgcagaaaaaaccccaagtgggaaagcaagaatttatgaccgacgctcaaggtcggcaagttccggtgagcatgatcaaagagattgacattctgcgggatcagacagttcgtaatatcgccaaagaagcggtagaaatgaaaagcgaattaatggattttaagaatcgaattcgcgaagccattatgtcttttgtagaaaagtctgctaaagagtatgacgttaaatggggaggcaagaaaggcaatctctcgcttctttctttcgatggcaaatacaaattagtcattgccatgaatgacaatctcgtttttgatgaacgcttacaagtagcgcagaaaattatcggcgactgtctgaacaaatggagcaagggagcgcgagacgaaatccgcatcttggtcaatgacgcatttcaggttgataaaaccggaaagatatcaacggctcgcgttctcggactgcgccgattagacattcaagacccggactggaaaaaggcaatgaccgccatcaccgacagcgttcagatcacaggaacaaaacagtatctgcgagtttatgagcgcgatgaaaatggcgagtaccaaatgatcccgcttgatgtagcggcgttataa

SEQ ID NO: 10830 - protein, 211 aa, Unknown
  Obtained from environmental sample
  misc_feature (1)..(211): Xaa is any amino acid
MEVTMAQKKPQVGKQEFMTDAQGRQVPVSMIKEIDILRDQTVRNIAKEAVEMKSELMDFKNRIREAIMSFVEKSAKEYDVKWGGKKGNLSLLSFDGKYKLVIAMNDNLVFDERLQVAQKIIGDCLNKWSKGARDEIRILVNDAFQVDKTGKISTARVLGLRRLDIQDPDWKKAMTAITDSVQITGTKQYLRVYERDENGEYQMIPLDVAAL

SEQ ID NO: 10831 - DNA, 567 bp, Unknown
  Obtained from environmental sample
  misc_feature (1)..(567): n is a, c, g, or t
ttgggcgggcagcttgtagccgatgaagcgtatcaaagcggcgacgttgactttaacgcccaggttacccgcatcaaggccgccggccccgacgtggtgtaccttcccaattactacaacgacgtgtcgcttcaggcaaaacagctccgcgatcagggggttacttgcgcccttgtcgggggcgacggctgggacagccttattgacaatgccggcgacgaagtgctgaacggtttctggtcttcgggctttgcttcggacaccaccgatcccaaaggcgtcgcgtttgtgcaggcttatgagcaaaggtttaaccggcccgcttcacagtttgccgcgcttggctacgacacgatgatgctgctgttggacgggataaaggcagcgggaacctttgattcaagcgctgtaaaagacgcgatagcgaagatcaacggcccctacgtgacgggaaatatccgttttgacgccgaccgcaatcccattaaaggcgcggccattctcgagattgtcaggaaagacggcaagctcgtaaacgcatataagaccaccgttaatccgaaatag

SEQ ID NO: 10832 - protein, 188 aa, Unknown
  Obtained from environmental sample
  misc_feature (1)..(188): Xaa is any amino acid
MGGQLVADEAYQSGDVDFNAQVTRIKAAGPDVVYLPNYYNDVSLQAKQLRDQGVTCALVGGDGWDSLIDNAGDEVLNGFWSSGFASDTTDPKGVAFVQAYEQRFNRPASQFAALGYDTMMLLLDGIKAAGTFDSSAVKDAIAKINGPYVTGNIRFDADRNPIKGAAILEIVRKDGKLVNAYKTTVNPK

SEQ ID NO: 10833 - DNA, 756 bp, Unknown
  Obtained from environmental sample
  misc_feature (1)..(756): n is a, c, g, or t
atgacggttaagtttccgtaccgctcaaccatcattctctccgttaccggaatcctggccgtcgccctcccccttattctgatgaaggccaaaattatcgacgcgtatacaacccggattattactatgggcggggtaaacgccattatggcaatttcggttaacatgattgtcggcgttaccggccagctttccctgggccaggccggtttcctcgctatcggcgcctattcctgcattttttttgcttttgatctggggctgcccctgcccctcgccgcgctgtgcgccgttatggttaccgcccttgccggttttctcatcggttttccggtgctcaaactttccggcgattacctggcgattgtcaccctgggcttcggcgaaatcatccgcgtcgtgttcatcaaccttaaaggccttaccggcggccccaacggaaggcagttcgcctatatccagaaagccggaaggcttatttataacccgatgatctaccttcccgacgaccactggttaaaggcgctggtaagcgaaggggaatttgccttcacggtaactaccgcgacgctgataatcattctggcgcttttgcagaactttctccgctccagttacggcagggcgataaaggcgtgcagggaggatgaaatcgccgccaacgcaaacgggatacacgttttccgttataaaatgcttggtttcgttaccgccgcattcattgccggcatcggcggctgtgctcggccgatctga

SEQ ID NO: 10834 - protein, 251 aa, Unknown
  Obtained from environmental sample
  SIGNAL (1)...(22)
  DOMAIN (36)...(251): Branched-chain amino acid transport system / permease component
  misc_feature (1)..(251): Xaa is any amino acid
MTVKFPYRSTIILSVTGILAVALPLILMKAKIIDAYTTRIITMGGVNAIMAISVNMIVGVTGQLSLGQAGFLAIGAYSCIFFAFDLGLPLPLAALCAVMVTALAGFLIGFPVLKLSGDYLAIVTLGFGEIIRVVFINLKGLTGGPNGRQFAYIQKAGRLIYNPMIYLPDDHWLKALVSEGEFAFTVTTATLIIILALLQNFLRSSYGRAIKACREDEIAANANGIHVFRYKMLGFVTAAFIAGIGGCARPI

SEQ ID NO: 10835 - DNA, 309 bp, Unknown
  Obtained from environmental sample
  misc_feature (1)..(309): n is a, c, g, or t
atgtttctttcccgcagactcgacaaagttcgcgtagtaggcattaacgaaccggtacaactctacgagctgcttgaaactatgaatgaagctgaagattggcaaaaggaaaccgttcaccattatgaaaaagcaatcagcttatttgagattcgtgactggacagcagccgctagagcttttcaggatacactcataagcaatcccaacgacaacccttcccggatttacctggaacgctgcgaggcgtacaggaaaaaccctcccccaaaagactgggacgggatttataaccttgatacaaaataa

SEQ ID NO: 10836 - protein, 102 aa, Unknown
  Obtained from environmental sample
  misc_feature (1)..(102): Xaa is any amino acid
MFLSRRLDKVRVVGINEPVQLYELLETMNEAEDWQKETVHHYEKAISLFEIRDWTAAARAFQDTLISNPNDNPSRIYLERCEAYRKNPPPKDWDGIYNLDTK

SEQ ID NO: 10837 - DNA, 867 bp, Unknown
  Obtained from environmental sample
  misc_feature (1)..(867): n is a, c, g, or t
atgcatagattggccgagggcttctccttcttttgtaacgcgccgtattttatggtggaaggggttacggtcagctttgaaagccttgacggcacaggcagggcaaatgatccgcgcgtaaaacaatatctaagtcaggctgttcatgaaaataaattcctgactccgcttcaggcttcaggcgtttatgaccgtccaatccgtcccaacggatactggtatgaatacggcggccttttctcggcatggcttcagcaaacttacggcatggaaaaatattcacagctttggaaagaaatgggaaaggattcttctttttctttttttgtttaccgatctgatttttaccggattttcaaaaaagtttacggcgttgattttacggacgagtggacaaaattcagcgcgagttttgctttggacgggatagaaaacaatgaggacgagttatcttcaagaaagtaccgttattttgctgaaagagaatattttatcgccggtttaacggcaagaggaaacaacctctactatattgaaagctcggaatcgaaaataggcgtttataacactttgaccggaaaaacgaaaacaattaacgcggcttcaggcgtttatgatattgatatttccgcggacggaaagactatgcttttgtccggatataaatatgttgaggatagggcttttgctgttgttacagaacacagaacggataacgggcgaaaaacaggcagggattacaaaggactttacaaggcgcgttattttcgcggcggtgttatagggcttcgttcagaactacacaacaattgtattgtatacgaaatgttaaacggagaaagcgaaattctttttaagggaaaatga

SEQ ID NO: 10838 - protein, 288 aa, Unknown
  Obtained from environmental sample
  misc_feature (1)..(288): Xaa is any amino acid
MHRLAEGFSFFCNAPYFMVEGVTVSFESLDGTGRANDPRVKQYLSQAVHENKFLTPLQASGVYDRPIRPNGYWYEYGGLFSAWLQQTYGMEKYSQLWKEMGKDSSFSFFVYRSDFYRIFKKVYGVDFTDEWTKFSASFALDGIENNEDELSSRKYRYFAEREYFIAGLTARGNNLYYIESSESKIGVYNTLTGKTKTINAASGVYDIDISADGKTMLLSGYKYVEDRAFAVVTEHRTDNGRKTGRDYKGLYKARYFRGGVIGLRSELHNNCIVYEMLNGESEILFKGK

SEQ ID NO: 10839 - DNA, 513 bp, Unknown
  Obtained from environmental sample
  misc_feature (1)..(513): n is a, c, g, or t
ttgncggattttaaatttgtcacggatattaactacacaggtttttttgtcgtcagcaaattcgcgggccggctactacgcatgcagcacctgaccgcgccggcctggaaaaccgatattatccaggtcaattccaaatccggcctggaggggtcaaacaaaaacggcgcgtatgcgggcggaaaattcggcgggttgggccttgtggcaagtttcgcgatggaactggtggaatacaatattaaagtgaatgccgtctgcccgggaaattttctggacggccccctttggtcccaccctgaaaagggtctgttcgcccaatacctgaacacaggcaaagttccgggagctaaaacagtggcggatgtccgcgctttttacgaatccaaagtcccaatgaagcggggctgtaccggtaaagatttgatacgggcaatcttttacattgtggagcaggaatatgaaacagggcaggccgttccggttaccggcggccaggtgatgctgcattga

SEQ ID NO: 10840 - protein, 170 aa, Unknown
  Obtained from environmental sample
  misc_feature (1)..(170): Xaa is any amino acid
MXDFKFVTDINYTGFFVVSKFAGRLLRMQHLTAPAWKTDIIQVNSKSGLEGSNKNGAYAGGKFGGLGLVASFAMELVEYNIKVNAVCPGNFLDGPLWSHPEKGLFAQYLNTGKVPGAKTVADVRAFYESKVPMKRGCTGKDLIRAIFYIVEQEYETGQAVPVTGGQVMLH

SEQ ID NO: 10841 - DNA, 447 bp, Unknown
  Obtained from environmental sample
  misc_feature (1)..(447): n is a, c, g, or t
gtgtccttaagttatggcgagtatcttgatcccggccgttatgggcctatcaccgaatttcaggaagaagatttccgtgagcctgccaaagccgctggtaaaagtgccggcggcagaactgccggcaggagaagggatgatagggtacgcagaccttcgagcccgcatacacctacaggcaagcgaggtttcggcagggaatttcgggaagagaccggtgattttacgcgggtatatataggccagggacggcagcacggctttggcgcaagagacatagcaaatttgttaatgcgcgcaggcggcgttcccggccgtcttgtggatgaaatagaaatgaaagactactgttcgtttgcgactctccccgcggatgccgctaaacgtgcctgtgctttttcacgtaaggatcagcaatcgccggtaatacgccccgcaaaaccctga

SEQ ID NO: 10842 - protein, 148 aa, Unknown
  Obtained from environmental sample
  DOMAIN (65)...(147): DbpA RNA binding domain
  misc_feature (1)..(148): Xaa is any amino acid
MSLSYGEYLDPGRYGPITEFQEEDFREPAKAAGKSAGGRTAGRRRDDRVRRPSSPHTPTGKRGFGREFREETGDFTRVYIGQGRQHGFGARDIANLLMRAGGVPGRLVDEIEMKDYCSFATLPADAAKRACAFSRKDQQSPVIRPAKP

SEQ ID NO: 10843 - DNA, 675 bp, Unknown
  Obtained from environmental sample
  misc_feature (1)..(675): n is a, c, g, or t
atggcaaaaaccgtaagcgcaaaagtattaatagttgacgaatatccgttgttttgcatggggctgtcttcctttttaaaactcacccccggatacaaggttgtaggggaagccgccacaattgccgacgctttagaaattgccgaaaaagaaaaaccccatcttgttataatggaaattcaacttggaaatgaaaacggcatggaacttatcccccaactaaagtccagatatcctgaaatatttgttttggtcatgtcaatgtacgatgaacgctactattcggaaagaaccctccgtttaggcgcacagggatatataatgaaaaacgcacctatcaataatgtaaaagaagcaataaacacagttatggcgggaaaagtatatttaagtgaaaacgaaagggaaagaatttttgagtcaataacagatgaaaatacgcgcagtatgaaagactgggcaaattcacttaggaaactttcagacagggaacttcaggttttttcgttaataggcaatgggtacggtattacctatattgcctcaaaactcaagttaagtaccaagaccattgaaactcacaaggaacatataaagataaaacttcactgtaatacatcacgggaactaaaacagtttgccaaagaatggacaaattatttctcttccttgtag

SEQ ID NO: 10844 - protein, 224 aa, Unknown
  Obtained from environmental sample
  DOMAIN (157)...(214): Bacterial regulatory proteins, luxR family
  misc_feature (1)..(224): Xaa is any amino acid
MAKTVSAKVLIVDEYPLFCMGLSSFLKLTPGYKVVGEAATIADALEIAEKEKPHLVIMEIQLGNENGMELIPQLKSRYPEIFVLVMSMYDERYYSERTLRLGAQGYIMKNAPINNVKEAINTVMAGKVYLSENERERIFESITDENTRSMKDWANSLRKLSDRELQVFSLIGNGYGITYIASKLKLSTKTIETHKEHIKIKLHCNTSRELKQFAKEWTNYFSSL

SEQ ID NO: 10845 - DNA, 519 bp, Unknown
  Obtained from environmental sample
  misc_feature (1)..(519): n is a, c, g, or t
atgatgggtattaacaaactatataaatcatttataatgacagcggtactttgtctgctcccgctgttattggcatcctgcaaaatctacacgttcagcggctccacgctgccaagccacatcaagacggtgatgataccggtattcaccaacaagactttggaaccgggcatagacgacgacatcaccaccgagctttctaaggaggtgctgaaaagccagctgcgtccggctaacagcgacgccgacgctacgatcagcggcgccgtgacacgctacgtcaaccgcccgcacacattcggcgcgggtggcgcggaagtaaacgtcgaacagtacatagtgcaggtgtcggcggaggtcgagttcttcgacaacaggaaaaacgagtctatctacaagggagccgtgtccggggaggggatttatctattcgagagcgaggacgaggctatcgggcgggataaggctgtgaagaatttggtggaaaagattatgcagaactctgtgcaaatgtggtaa

SEQ ID NO: 10846 - protein, 172 aa, Unknown
  Obtained from environmental sample
  SIGNAL (1)...(26)
  misc_feature (1)..(172): Xaa is any amino acid
MMGINKLYKSFIMTAVLCLLPLLLASCKIYTFSGSTLPSHIKTVMIPVFTNKTLEPGIDDDITTELSKEVLKSQLRPANSDADATISGAVTRYVNRPHTFGAGGAEVNVEQYIVQVSAEVEFFDNRKNESIYKGAVSGEGIYLFESEDEAIGRDKAVKNLVEKIMQNSVQMW

SEQ ID NO: 10847 - DNA, 339 bp, Unknown
  Obtained from environmental sample
  misc_feature (1)..(339): n is a, c, g, or t
ttgggcttttcctttaaccatatagtctcttataaatattcggaaggcgtctacgcccaaattgacggtatgcttgaaaacggggaacaggcgcttgctgtggaagtaaaaacgacattgcgggaagaggacatagacaaacaccttttacgcatggaaaagatacggaaacatgccgacgagcacagcgacaaaaggcggttcatgggagcgatggcagccatgataattgaagataaaacaagaaactatgccctgaatcatgggctttttgtcatagaactgtccggcgatgatctcaaagttacaaaaccggaaggggaagtgaaggtttggtag

SEQ ID NO: 10848 - protein, 112 aa, Unknown
  Obtained from environmental sample
  misc_feature (1)..(112): Xaa is any amino acid
MGFSFNHIVSYKYSEGVYAQIDGMLENGEQALAVEVKTTLREEDIDKHLLRMEKIRKHADEHSDKRRFMGAMAAMIIEDKTRNYALNHGLFVIELSGDDLKVTKPEGEVKVW

SEQ ID NO: 10849 - DNA, 759 bp, Unknown
  Obtained from environmental sample
  misc_feature (1)..(759): n is a, c, g, or t
atggccgcttctcttgaagaatgcgacgcgatgatcagcgccgcggaaaaaagcggcaaatctctttccgtaatcgcgcaaaaccgtttccgcgaccccatctacaacttaaaaaaagttctcgactcggaattaatcggaaaagtggtgcacgcgcaggttgaatccctgtggtggaggggacactcctactacgatttatggtggcgcggcacatgggaaaaagaaggcggcggctgtacgcttaatcacgcggttcaccacattgacatgctgtgctggatgctgggccttccgaaaaaggtgagcgccgttataagcaacgcgtcacatgacaacgcggaggtggaggatatttccgccgcggtgcttcagtacgaaggcgggctttgcgcgaagggcgcgcttgcgcaggtgacaagttcagttatacatcacggggaggaacagcagattgtttttcagggagaaaaagcccgcgtctccgcgccgtggaaagttacagctaacaaagcccagcccaacggttttcccgctcaggaacaaaatgaagaactgataaaacagcttaatgatttttacgaatccctgccgaaacttgcacattcaacgcacgaggggcagattgataatgtgttaagcgccatcgagacgggaacaaagccgctgattcgcggcgaggacggaagacagacgattgagctaatctcggcgatttacaaagcgggtacggaacagagagccgtcgatcttccctaa

SEQ ID NO: 10850 - protein, 252 aa, Unknown
  Obtained from environmental sample
  DOMAIN (38)...(153): Oxidoreductase family, C-terminal alpha/beta domain
  misc_feature (1)..(252): Xaa is any amino acid
MAASLEECDAMISAAEKSGKSLSVIAQNRFRDPIYNLKKVLDSELIGKVVHAQVESLWWRGHSYYDLWWRGTWEKEGGGCTLNHAVHHIDMLCWMLGLPKKVSAVISNASHDNAEVEDISAAVLQYEGGLCAKGALAQVTSSVIHHGEEQQIVFQGEKARVSAPWKVTANKAQPNGFPAQEQNEELIKQLNDFYESLPKLAHSTHEGQIDNVLSAIETGTKPLIRGEDGRQTIELISAIYKAGTEQRAVDLP

SEQ ID NO: 10851 - DNA, 420 bp, Unknown
  Obtained from environmental sample
  misc_feature (1)..(420): n is a, c, g, or t
atgcgtgatattttcccgaaaatcgaaggtactttctcggacggttatccttccgatctgtcaaattactatcctgagagagaagctacggttctccccgaagacaaggaactctgggcggcttacggcgtaacaaactacaatgagttaatggacaaaaatcctccgccgaataccccttggttcccggcatggagcgcgaatactgccgcaggtgactcacctgcccagctctccaaggtacgcgctgagcaaatcatgaagcagaggctgccgcagataatcctggctccaaccgccgattttgaaaggctgtgggctgactatgtaaaagaaatgaccgcagcacaaggtccgtacgagcaatatatgcaggaagcggttaaccaacgcttaaaagcttggggcatcaagaagtaa

SEQ ID NO: 10852 - protein, 139 aa, Unknown
  Obtained from environmental sample
  misc_feature (1)..(139): Xaa is any amino acid
MRDIFPKIEGTFSDGYPSDLSNYYPEREATVLPEDKELWAAYGVTNYNELMDKNPPPNTPWFPAWSANTAAGDSPAQLSKVRAEQIMKQRLPQIILAPTADFERLWADYVKEMTAAQGPYEQYMQEAVNQRLKAWGIKK

SEQ ID NO: 10853 - DNA, 759 bp, Unknown
  Obtained from environmental sample
  misc_feature (1)..(759): n is a, c, g, or t
ttgcctaggaagttctccctctataattacgagataattttccagacaggggctattccttatgctttcatgattactgtcttcagaaccgttattaaccttgttacaagcgtgttctttaccgcaatgatcgcttttgccctttcgcggcgtgaatttgtactgcaaaagccctttacccttgtcctggtgctttccatgtatataaacgccggtcttattccgacatttttcttatacagagggcttggtatggtcaattcattctgggtatatattgttcccgggattgtaaacgcgtttaactttgtcgtaatgaggacgtatatgcgcagtatccccgaaagtataattgagtcggcgcgtattgacggctacggggacttttttatatttacccgcattattcttcctttgtgtcttcccgttcttgccacaatcgggctttttgtcgccgtaggggcatggaacgcatggtttgacacgatgatttataattcgggcaatgtgaagcttcatacgcttcagtacaagctgatggaatatctgcaatcaagccagtctcacggtaagtcagcttcagatgcgggagcaatggggatttccgccgccgccggcggcggcggctcgagcatggtaacccctatgagtatacgcgcggcaattaccgtagtcgccgccgctcctattctgtttgtttatccgtttatgcagcgctactttgtagtcggtctcaatgtcggcggcgttaaggagtga

SEQ ID NO: 10854 - protein, 252 aa, Unknown
  Obtained from environmental sample
  DOMAIN (19)...(247): Binding-protein-dependent transport system inner membrane component
  misc_feature (1)..(252): Xaa is any amino acid
MPRKFSLYNYEIIFQTGAIPYAFMITVFRTVINLVTSVFFTAMIAFALSRREFVLQKPFTLVLVLSMYINAGLIPTFFLYRGLGMVNSFWVYIVPGIVNAFNFVVMRTYMRSIPESIIESARIDGYGDFFIFTRIILPLCLPVLATIGLFVAVGAWNAWFDTMIYNSGNVKLHTLQYKLMEYLQSSQSHGKSASDAGAMGISAAAGGGGSSMVTPMSIRAAITVVAAAPILFVYPFMQRYFVVGLNVGGVKE

SEQ ID NO: 10855 - DNA, 558 bp, Unknown
  Obtained from environmental sample
  misc_feature (1)..(558): n is a, c, g, or t
ttggaattattacgacgcattctccccggcgtaaaagctatgcttgaaaaccttgagcttcaattcaccgaacaggaagcgatggaaattgtcgaggcagccattcaaaaatccatggaaaaaacatctgctgagaaccaaaaacgcgaaatggattttcttgcaaaaaacagccagcgccccgaaattaaagttaccccgtccggccttcaatatgaagtcattaaagctacaaccggagaaaagccgaataaaaattccattgtaagggtatattacaccggaacttttatagacggaacatctttcgacagttccaacgaagacgacggcgcctatataccgcttgagatggtaataaacggctggacagaaggattaatgcttatgagcgtcggaagcaaataccgtttctatattccgtcaaaccttgcttacgggaaagaaggaatccagtcgattattcctccgtattcaacattgatctttacggttgagttgcttgaaattacggaaggcgatgattctgacgaagacgatagatatagagacagatag

SEQ ID NO: 10856 - protein, 185 aa, Unknown
  Obtained from environmental sample
  DOMAIN (78)...(168): FKBP-type peptidyl-prolyl cis-trans isomerase
  misc_feature (1)..(185): Xaa is any amino acid
MELLRRILPGVKAMLENLELQFTEQEAMEIVEAAIQKSMEKTSAENQKREMDFLAKNSQRPEIKVTPSGLQYEVIKATTGEKPNKNSIVRVYYTGTFIDGTSFDSSNEDDGAYIPLEMVINGWTEGLMLMSVGSKYRFYIPSNLAYGKEGIQSIIPPYSTLIFTVELLEITEGDDSDEDDRYRDR

SEQ ID NO: 10857 - DNA, 345 bp, Unknown
  Obtained from environmental sample
  misc_feature (1)..(345): n is a, c, g, or t
atgcccgatcaggtcggcatggttggctcaggcggaaccatgcggctgggcgcgtatccatgtaaaatcaaccaaggcacgcttctgcacaagctgtacaacgcggatgaaataagcgaaaggcaccgccaccgttttgagttcaacaatgactaccgcgaggcgttgacgcgtaaaggaatggttatctgcggcgtgtcgcctaacggcaatcttgtcgaagcgattgaactgccggatcgccgttttttcaccggcgtacaattccatcccgagttcaagagccgccctaataagccgcatcctctgtttttgggtctggtaaaagcggggattaaatggtag

SEQ ID NO: 10858 - protein, 114 aa, Unknown
  Obtained from environmental sample
  misc_feature (1)..(114): Xaa is any amino acid
MPDQVGMVGSGGTMRLGAYPCKINQGTLLHKLYNADEISERHRHRFEFNNDYREALTRKGMVICGVSPNGNLVEAIELPDRRFFTGVQFHPEFKSRPNKPHPLFLGLVKAGIKW

SEQ ID NO: 10859 - DNA, 696 bp, Unknown
  Obtained from environmental sample
  misc_feature (1)..(696): n is a, c, g, or t
atgctgtcaaaaacaagaaatttctgcattattgcgcatattgatcacggcaagtcgacactggctgacagactgatacaaaaggctcaccttgttgatgaccgtaattttaaaaaccaaatcctcgataatatggatattgaacgtgaacgcggcattacaataaaaagccaggcggtaacaattccttatacggcggcggacggcaatgaatataaacttaaccttgttgatacgccgggtcatgttgatttcagctacgaggtaagccgcgcaatcaattcctgtgaaggggctctccttctggtagatgccacgcagggggtacaggcgcagactctttctaatatgtatcttgcgcttgaacataacttggaaatagtgcccgtgatcaacaagatcgatatgcaggcagccgacatacctgcggtgaaaaggcagattgacaaggatttggggcttgatgcggaaagcgctcttttggtttccgcgcggcagggtaagggaattgacgaacttctggaagcgattgtaagccaaattccccctccgtcaggcgaccccgatttgccgctacgtgccttaattttcgactgtcattatgatttataccgcggcgttgtagttcatctccgtctttttgacggaaagataaaaaaaggaatgaaaatttcctttatgtcaaagcggctctga

SEQ ID NO: 10860 - protein, 231 aa, Unknown
  Obtained from environmental sample
  DOMAIN (6)...(135): GTPase of unknown function
  misc_feature (1)..(231): Xaa is any amino acid
MLSKTRNFCIIAHIDHGKSTLADRLIQKAHLVDDRNFKNQILDNMDIERERGITIKSQAVTIPYTAADGNEYKLNLVDTPGHVDFSYEVSRAINSCEGALLLVDATQGVQAQTLSNMYLALEHNLEIVPVINKIDMQAADIPAVKRQIDKDLGLDAESALLVSARQGKGIDELLEAIVSQIPPPSGDPDLPLRALIFDCHYDLYRGVVVHLRLFDGKIKKGMKISFMSKRL

SEQ ID NO: 10861 - DNA, 438 bp, Unknown
  Obtained from environmental sample
  misc_feature (1)..(438): n is a, c, g, or t
atgtgttccgggcttaagcctaagaacaaccgtacttctggggttcccgggcgaaacgcacagcgacttgaagagcttatgaacttggcagaggaaattcgctttgagcatttgggtggctttatatggtctcccgaagagggaaccgcagcgcttaggttaaaagaagagcttgtagctgtggaaacggcaaggttaaggctggacgccctaactgaactgcaagaagaaatttccgaagagaaaaacaagacccttgtaggcaaaaccctaaatgtgattttagacagcccctcagaaggacgtacacagggaaatgccttggaaacagacgatataataaggattttgaagggaaatggcaaaccaggcacaataagaaaggcaaaaatagtgggtgccacgtctcatgagctagatgcaattttactaaattaa

SEQ ID NO: 10862 - protein, 145 aa, Unknown
  Obtained from environmental sample
  misc_feature (1)..(145): Xaa is any amino acid
MCSGLKPKNNRTSGVPGRNAQRLEELMNLAEEIRFEHLGGFIWSPEEGTAALRLKEELVAVETARLRLDALTELQEEISEEKNKTLVGKTLNVILDSPSEGRTQGNALETDDIIRILKGNGKPGTIRKAKIVGATSHELDAILLN

SEQ ID NO: 10863 - DNA, 702 bp, Unknown
  Obtained from environmental sample
  misc_feature (1)..(702): n is a, c, g, or t
atggataacccaaaaaacggcgcgctctttgaactgcggggaatacggaaagagtttcccggcgggaacgtcgttctggacggaatagacattgatattgtcgagggcgagtgccttctgataacgggctccaacggggcgggaaaaaccattctgatgaggctcctcgctggccttctggaggcgagcgaagggacgattcgtttccggggggaggtgctggaaacggccttaaaaaacaacgccttattccgccgtcaggtgggcattgttttccaggacgcggattcccagtttgtgggggaaaccgtggaagaggacgccgccttcgggccttccaatctgggttttggcaaagcggaaatcgcggagcgggtctcctcggcgctggaaaaaatggggatgggggaaaagcgggcgcttcccccccgccgcctttccggtggggaaaagcgccgccttgccgtggcggggattctggccatgggctgcggcatcgtcattatggacgagccctttgccaatctggatcagaacggcgttattcaggtgcttgaaatcatccaaaccctgaaacaggaaggaaagacccttatcatccttacccacgaactggaaaaggttctggccttcgctaaccggctccttgtcctccnacggggccgcgttcaggaagacggcaaccccggaggatgttcttaa

SEQ ID NO: 10864 - protein, 233 aa, Unknown
  Obtained from environmental sample
  DOMAIN (36)...(221): ABC transporter
  misc_feature (1)..(233): Xaa is any amino acid
MDNPKNGALFELRGIRKEFPGGNVVLDGIDIDIVEGECLLITGSNGAGKTILMRLLAGLLEASEGTIRFRGEVLETALKNNALFRRQVGIVFQDADSQFVGETVEEDAAFGPSNLGFGKAEIAERVSSALEKMGMGEKRALPPRRLSGGEKRRLAVAGILAMGCGIVIMDEPFANLDQNGVIQVLEIIQTLKQEGKTLIILTHELEKVLAFANRLLVLXRGRVQEDGNPGGCS

SEQ ID NO: 10865 - DNA, 327 bp, Unknown
  Obtained from environmental sample
  misc_feature (1)..(327): n is a, c, g, or t
atggccgaggtgcctggcgcaaaatcccggggctgcgtccttggttcccgccttgccatctggatgctgaaagacgcggatttaaaggtgtacctaaaagcgagccccgaaatcagggcggagcggattgtccggcgggaaggcggggcgcttgaggaagtcgccgcctacaccaaggaacgcgaccggcaggacacgggcagataccggagaatataccagatcgataacgatgattatacgtttgccgacttgattattgacaccgaacacatgggaatcgaagaaatagccggagtaatcgttgacgcggcaaaccgtatctga

SEQ ID NO: 10866 - protein, 108 aa, Unknown
  Obtained from environmental sample
  misc_feature (1)..(108): Xaa is any amino acid
MAEVPGAKSRGCVLGSRLAIWMLKDADLKVYLKASPEIRAERIVRREGGALEEVAAYTKERDRQDTGRYRRIYQIDNDDYTFADLIIDTEHMGIEEIAGVIVDAANRI

SEQ ID NO: 10867 - DNA, 780 bp, Unknown
  Obtained from environmental sample
  misc_feature (1)..(780): n is a, c, g, or t
atgtcgttcaaaaacccaaacaaaaaccgcaaaggaacaattttttttatggcaaacgtcaaattctacgccggcgagtctttccccctcgaaatgcacaaggtgcgcatcatccaaaagttgaacttgattcccgtggaggagcgcggcaaggccatagccggggccggcaacaacacttttttgctgaacaaccgcgacgtcttcatggatatgctgaccgacagcggggtgaacgccatgagcgaccggcagttggcctccatgatgaaggccgacgacagctacgccggcagcgagactttcacgcggctcgacaagtcggtgaagcatttcttcggctgcaagtacttccttccggcgcaccaagggcgcgcttgcgagaatatcctctcgcagaccttcgtcaagccgggctttgtggtgcccatgaactaccacttcaccacggccaaggcgctcatcacggtgaacggcgggacggtggaggagctcatcatagacgagggtctgaagatcaggagcgagtgtccgtttaagggggacatcgacatcggcaggttaaaagaggttataaagaggtacggcgcggacaaggtggcctacgtgcggatggaggctgggacgaacttggtgggcgggcagccgttttcgctcgcgaattacgaggaggtgagcaaactctgccgagccgagaagatcccgctggtgttggacgcgagccttttggcggacaacctgtatttcaacaagcgccgcgaggagcgtgcaagaagatga

SEQ ID NO: 10868 - protein, 259 aa, Unknown
  Obtained from environmental sample
  DOMAIN (71)...(259): Beta-eliminating lyase
  misc_feature (1)..(259): Xaa is any amino acid
MSFKNPNKNRKGTIFFMANVKFYAGESFPLEMHKVRIIQKLNLIPVEERGKAIAGAGNNTFLLNNRDVFMDMLTDSGVNAMSDRQLASMMKADDSYAGSETFTRLDKSVKHFFGCKYFLPAHQGRACENILSQTFVKPGFVVPMNYHFTTAKALITVNGGTVEELIIDEGLKIRSECPFKGDIDIGRLKEVIKRYGADKVAYVRMEAGTNLVGGQPFSLANYEEVSKLCRAEKIPLVLDASLLADNLYFNKRREERARR

SEQ ID NO: 10869 - DNA, 453 bp, Unknown
  Obtained from environmental sample
  misc_feature (1)..(453): n is a, c, g, or t
gtggtagttcatgggcaccacaaagcccggcttgacgaaggtctgcgagaggatattctcgcaagcgcgcccttggtgcgccggaaggaagtacttgcagccgaagaaatgcttcaccgacttgtcgagccgcgtgaaagtctcgctgccggcgtagctgtcgtcggccttcatcatggaggccaactgccggtcgctcatggcgttcaccccgctgtcggtcagcatatccatgaagacgtcgcggttgttcagcaaaaaagtgttgttgccggccccggctatggccttgccgcgctcctccacgggaatcaagttcaacttttggatgatgcgcaccttgtgcatttcgagggggaaagactcgccggcgtagaatttgacgtttgccataaaaaaaattgttcctttgcggtttttgtttgggtttttgaacgacattatgtaatataa

SEQ ID NO: 10870 - protein, 150 aa, Unknown
  Obtained from environmental sample
  misc_feature (1)..(150): Xaa is any amino acid
MVVHGHHKARLDEGLREDILASAPLVRRKEVLAAEEMLHRLVEPRESLAAGVAVVGLHHGGQLPVAHGVHPAVGQHIHEDVAVVQQKSVVAGPGYGLAALLHGNQVQLLDDAHLVHFEGERLAGVEFDVCHKKNCSFAVFVWVFERHYVI

SEQ ID NO: 10871 - DNA, 747 bp, Unknown
  Obtained from environmental sample
  misc_feature (1)..(747): n is a, c, g, or t
atggaacttagtaaacaaaaccgaccggatataatagtcgcaagctggattaaaaacgcgtctacaaattcgcactttaaatctctggacggtttattcggaacaaaaaaactttcaagaagtattttttatcctaaaattttatcagtcggaagaatagatcgaaatcaatatcttctgcctgtatctttcaatattccggcgttgatttttgccaaaaacaaagggcagtctttatcaaatcaatttaccattgattttgacgagataaaaaaattaagcaaggaatacaataccatgaaccgcggagtgtatacgcgcataggattttcccctctgtggaacgaagattttcttctttctacggcggggcttttcggcgcgtcttttagagaagcaaacccgttaacatgggacgcggaagcgttggaaaaatcaatggcttttgtcaacaactggacaaatgagataaactcaggcgcccagactgaagatgattttactttcagatacttttttgaaccgcaggaaaaattgattcaaaacggacgtattcttttttcttacattgagagcaacgacctttttttattaagcgaggaaagcaagaaccagcttgattttagatgggtaatggaacaaaacaaaataacggttgctgaagaccttgtatatttaggtatgcccaaaagggttaaaaccaaaaaagctgctaaagagtttattatctggtttttcagcggttga

SEQ ID NO: 10872 - protein, 248 aa, Unknown
  Obtained from environmental sample
  misc_feature (1)..(248): Xaa is any amino acid
MELSKQNRPDIIVASWIKNASTNSHFKSLDGLFGTKKLSRSIFYPKILSVGRIDRNQYLLPVSFNIPALIFAKNKGQSLSNQFTIDFDEIKKLSKEYNTMNRGVYTRIGFSPLWNEDFLLSTAGLFGASFREANPLTWDAEALEKSMAFVNNWTNEINSGAQTEDDFTFRYFFEPQEKLIQNGRILFSYIESNDLFLLSEESKNQLDFRWVMEQNKITVAEDLVYLGMPKRVKTKKAAKEFIIWFFSG

SEQ ID NO: 10873 - DNA, 501 bp, Unknown
  Obtained from environmental sample
  misc_feature (1)..(501): n is a, c, g, or t
atgattagaagtattatttggactgtaattatatgcgttgccttcgcgattttacaatctaccctactggcgaaaatcgctatttttaacgttgttcccgatttggcgctttgcgtactgattttttcctcttatgtaaacggagccatgaccggacaaatttcaggattcctgtcgggattatttatagatttcttgtccgccgcccctgttggcatgagttcacttatccgcacgtttgttggggcgctaacgggactttttaaagattcgttatttcttggctatgttattatgccgattattctttgcgctatagcgactataataaaggcattgatgatgttcgtgcttcatttaattatgggatccgcgattccagcctattcatttatcaatacggatttttggatagagttgggactcaactcgctttgcgcgccattgctgttcttaatattgaggaattttaagtttatgttgataggcggccggggttag

SEQ ID NO: 10874 - protein, 166 aa, Unknown
  Obtained from environmental sample
  SIGNAL (1)...(24)
  DOMAIN (1)...(157): rod shape-determining protein MreD
  misc_feature (1)..(166): Xaa is any amino acid
MIRSIIWTVIICVAFAILQSTLLAKIAIFNVVPDLALCVLIFSSYVNGAMTGQISGFLSGLFIDFLSAAPVGMSSLIRTFVGALTGLFKDSLFLGYVIMPIILCAIATIIKALMMFVLHLIMGSAIPAYSFINTDFWIELGLNSLCAPLLFLILRNFKFMLIGGRG

SEQ ID NO: 10875 - DNA, 348 bp, Unknown
  Obtained from environmental sample
  misc_feature (1)..(348): n is a, c, g, or t
atgcccgtattgacgttaattcactgtgtcgtgcgtttttcagtctcgcgttttgaaggaattgttgaagggcagggcagttccgagaattctttaacgatgagatttgtcccccgcagggcgagagatgaaataaatatcggagatatagtcgttacaagcggtatgggcggaatatatccgccaggcattaatttaggacgcgtcagcagtattaatattcttgaatatgaaactactttggaagtggacgttatcccaatgatagatttttcaaggcttgagtatgtttttgtaattgaagccgaaagtcaagattttgaatatataggaacttccgatgattag

SEQ ID NO: 10876 - protein, 115 aa, Unknown
  Obtained from environmental sample
  DOMAIN (1)...(104): rod shape-determining protein MreC
  misc_feature (1)..(115): Xaa is any amino acid
MPVLTLIHCVVRFSVSRFEGIVEGQGSSENSLTMRFVPRRARDEINIGDIVVTSGMGGIYPPGINLGRVSSINILEYETTLEVDVIPMIDFSRLEYVFVIEAESQDFEYIGTSDD

SEQ ID NO: 10877 - DNA, 873 bp, Unknown
  Obtained from environmental sample
  misc_feature (1)..(873): n is a, c, g, or t
atgaaagatctgcttggcggcaagggagcgaacctcgcggagatgactaatcttggaattccggttcctccgggtttcaccatttctacagccgtctgcgcggcttattatcaaaataaaaacaagtaccctgccggtgtcaaagaagaagtcgagtccgtacttaagagactggagaaggtgatgaagaaaaagctgggcgatccaaacgatcccctgcttgtttcggtgcgctcgggcgccgcggcttccatgcccggcatgatggatactattcttaacctcgggattaacgacctggcggtacaggggctcgccgaaaaaacaaagaacccgcgtttcgcgtgggacgcctacaggcgctttatacagatgtacggcgacgttgtaatgggcgttgatcatgatcacttcgaggaagtcttaagcgctgaaaagaaaaagcacggcttcgaacaggatacacagcttaccgcgaaagaccttgaacacattgtaggcgaatataaaaatgtcgtgcgcaagtacagcggcaaggattttccgcaggctccgcttgagcagctctggggcgcgataaacgccgtctttggttcatggatgaacgagcgcgcgatcaaataccgcgagattaacaatatcaaggacctgaagggaaccgcggttaacgtgcagtcgatggtattcggcaacttcggcgaggactccggcacaggcgtgtgcttcagccgcgatccctcaacgggcgttaatcttttctacggcgacttccttatgaacgcgcagggcgaggacgtagtagccggcatcaggacgcctgaaagaattccgatcttgagaagcacaatcccgtcatttatgatcagctggtaa

SEQ ID NO: 10878 - protein, 290 aa, Unknown
  Obtained from environmental sample
  DOMAIN (1)...(289): Pyruvate phosphate dikinase, PEP/pyruvate binding domain
  misc_feature (1)..(290): Xaa is any amino acid
MKDLLGGKGANLAEMTNLGIPVPPGFTISTAVCAAYYQNKNKYPAGVKEEVESVLKRLEKVMKKKLGDPNDPLLVSVRSGAAASMPGMMDTILNLGINDLAVQGLAEKTKNPRFAWDAYRRFIQMYGDVVMGVDHDHFEEVLSAEKKKHGFEQDTQLTAKDLEHIVGEYKNVVRKYSGKDFPQAPLEQLWGAINAVFGSWMNERAIKYREINNIKDLKGTAVNVQSMVFGNFGEDSGTGVCFSRDPSTGVNLFYGDFLMNAQGEDVVAGIRTPERIPILRSTIPSFMISW

SEQ ID NO: 10879 - DNA, 678 bp, Unknown
  Obtained from environmental sample
  misc_feature (1)..(678): n is a, c, g, or t
atgctggagagatttggcatacaaacagaatttaagaacaatattttttatataccgggcgggcaaacatattgttcacctggcaaggctcaggttgagggcgattggtcaaacgccgcgttctggctgagcgcgggggcgattggttcgggcagtataacctgtaccgatttgaatcttaaatcaaagcagggagaccgcgcgatcctggacattctggcgaaattcggcgcgcgcatagagattaaggaaagcgactctagggtaacagtatccggtggaaaactgcggggcattgaaatcgacgcgcgggacattcccgatctcgtaccgatattggcggtggtcggggctgttgccgagggaaaaaccgttattcgcaatgccgggcgattgcgtaccaaagaaagcgacaggctcgccgctgtaagcgacgtattacacgctctgggcgcggacgctgatgagaccaatgacggacttgtcatatatggcggaaaggcttttaaaggcggagaagtatcgtcacgaggggatcaccggatcgctagtccgcggcaattgcagcgccaatatgcgcggacccggttgttattcatggagcgcaggcggtcaataaatcatatcccggtttttttgacgatctgcgcttacttgacggctctgttcaggagttaa

SEQ ID NO: 10880 - protein, 225 aa, Unknown
  Obtained from environmental sample
  DOMAIN (1)...(203): EPSP synthase (3-phosphoshikimate 1-carboxyvinyltransferase)
  misc_feature (1)..(225): Xaa is any amino acid
MLERFGIQTEFKNNIFYIPGGQTYCSPGKAQVEGDWSNAAFWLSAGAIGSGSITCTDLNLKSKQGDRAILDILAKFGARIEIKESDSRVTVSGGKLRGIEIDARDIPDLVPILAVVGAVAEGKTVIRNAGRLRTKESDRLAAVSDVLHALGADADETNDGLVIYGGKAFKGGEVSSRGDHRIASPRQLQRQYARTRLLFMERRRSINHIPVFLTICAYLTALFRS

SEQ ID NO: 10881 - DNA, 663 bp, Unknown
  Obtained from environmental sample
  misc_feature (1)..(663): n is a, c, g, or t
ttgatggccgagatatcgaccgtcttttcggagggcacgggcgaaggcacgaagtcccagcatgaattgacagatattgagcagtccgtaatggaaggaattatcgtccgtattctgggaaatatgcgcgaagcgtggacgacggttatcgacctgcgcccgcgtctggggcagattgacaccaatccgcagttcgcgcagattgttccgcctacggaaatggtcgtccttgtaacattggaaaccaaagtaggagatgtggaaggcatgatgaacttctgtattccctaccttacgatagagcccattatcagcaaactgtccgcccagttctggtattcatcggtgcggcgcaacgctacgacggagaacctcaatgtgctaaaggagaagcttacaacggtcgatgttaatataacggccgaaatcggaaagattaatgttcctgtaagggacgttctttccttacagataggggatgtaatacggctctacaatacacgcatcggcgatccctattcattaaatatcggctcaaggaaaaagtttctatgccgccccggcgtacttggaaagaaaatggcggtgcagataacgcagaagattgccgagcttggacaggaagaatttgaagagctcgtatctgaaggagatgaattatga

SEQ ID NO: 10882 - protein, 220 aa, Unknown
  Obtained from environmental sample
  DOMAIN (128)...(205): Surface presentation of antigens (SPOA) protein
  misc_feature (1)..(220): Xaa is any amino acid
MMAEISTVFSEGTGEGTKSQHELTDIEQSVMEGIIVRILGNMREAWTTVIDLRPRLGQIDTNPQFAQIVPPTEMVVLVTLETKVGDVEGMMNFCIPYLTIEPIISKLSAQFWYSSVRRNATTENLNVLKEKLTTVDVNITAEIGKINVPVRDVLSLQIGDVIRLYNTRIGDPYSLNIGSRKKFLCRPGVLGKKMAVQITQKIAELGQEEFEELVSEGDEL

SEQ ID NO: 10883 - DNA, 540 bp, Unknown
  Obtained from environmental sample
  misc_feature (1)..(540): n is a, c, g, or t
ttgcccaaggaacccaaagtgaagcctaagaacaaaatctacataaaacttaacaagccttatggctatgagtgcagccacgcacctacaagccacgagtccgtgttttccctgtttccgcaggagtttataaaagatggtttgcagtgtgtgggcaggcttgatgctgacacaaccggtttgattttgctctcaaatgacggagagtttatacataaaattgagcatccaaaaaaaggctttgcaaaaacttatatagctgaactcgctgacccactaacggaagaaatgcaaaaaaaacttttggcaggggttcagcttcacggcgaaaaacgaccttgcacagcgttggaattaaaacccttggcgaacaatacagcggagataaccataaaaggcggggtttatcaccaagtaaaaaggatgtttgcagcggttgggaacaaggttgtcgctttgcataggagcaaaataggcgattatggattagatgaattgaaagaaggggaatgggtaataataccatccccctgtttttaa

SEQ ID NO: 10884 - protein, 179 aa, Unknown
  Obtained from environmental sample
  DOMAIN (13)...(145): RNA pseudouridylate synthase
  misc_feature (1)..(179): Xaa is any amino acid
MPKEPKVKPKNKIYIKLNKPYGYECSHAPTSHESVFSLFPQEFIKDGLQCVGRLDADTTGLILLSNDGEFIHKIEHPKKGFAKTYIAELADPLTEEMQKKLLAGVQLHGEKRPCTALELKPLANNTAEITIKGGVYHQVKRMFAAVGNKVVALHRSKIGDYGLDELKEGEWVIIPSPCF

SEQ ID NO: 10885 - DNA, 555 bp, Unknown
  Obtained from environmental sample
  misc_feature (1)..(555): n is a, c, g, or t
gtgtccgccggttcgtcaatgataaacgacgacctcagccatgaacttgtctcggtggatattgaagacgctatccgcatgaacgctgattgtcttgcggttcaaacttttatcggcgcggacggtcagcttgaaagcatagataatctttccaaagttattaacgccggcgcccgttacagcattcccactttgggcgttattgccgttgggaaaaatatggaacgcaccgaccagtactttaaactggcgacacgcattgtggcggagcttggggcgaatatcgttaaaacttattactgcgataagtttgaggaaattgccgccgcatgtcccgttcccatcgtggtagcgggcggcaagaaactgcctgagaaggaagcgcttacaatggcataccagtcaatgcagggcggcgcgcgcggtcttgatatgggaagaaatatttttcaaagttaccaccccgcggaaatggctgactctatcggaaagattgtgcataacaaatacactgataaagaggcgtgggagtattactgcgagaaaactaaataa

SEQ ID NO: 10886 - protein, 184 aa, Unknown
  Obtained from environmental sample
  DOMAIN (1)...(152): DeoC/LacD family aldolase
  misc_feature (1)..(184): Xaa is any amino acid
MSAGSSMINDDLSHELVSVDIEDAIRMNADCLAVQTFIGADGQLESIDNLSKVINAGARYSIPTLGVIAVGKNMERTDQYFKLATRIVAELGANIVKTYYCDKFEEIAAACPVPIVVAGGKKLPEKEALTMAYQSMQGGARGLDMGRNIFQSYHPAEMADSIGKIVHNKYTDKEAWEYYCEKTK

SEQ ID NO: 10887 - DNA, 444 bp, Unknown
  Obtained from environmental sample
  misc_feature (1)..(444): n is a, c, g, or t
atggctacggaagcggctgggacggtaaaaacgcaatcctcgtcggtggaggagactaggcgtttgggcgctaaattggctaaggcggcgtgttcgggcgatgttttctcgctaaacggcgatctcggttgcggcaagactgagtttgtgcgcgggtttgtggaggcgctgtccagcggcgcggacgtacgcagcccaacattctctattgtcaacacttatccctcgccgaattttcctatacatcattttgatttctataggatagaggatattagggagttcgcgtcgatagggcttgacgaatacataaacggcgacggagtatgcttgatagagtggggggagatgtactctgaagtcctgccggatacgacgaagcgtatcaattttaccgaggctgacgagactacgaggattatagaaacgctttttgatttttaa

SEQ ID NO: 10888 - protein, 147 aa, Unknown
  Obtained from environmental sample
  DOMAIN (19)...(141): Uncharacterised P-loop hydrolase UPF0079
  misc_feature (1)..(147): Xaa is any amino acid
MATEAAGTVKTQSSSVEETRRLGAKLAKAACSGDVFSLNGDLGCGKTEFVRGFVEALSSGADVRSPTFSIVNTYPSPNFPIHHFDFYRIEDIREFASIGLDEYINGDGVCLIEWGEMYSEVLPDTTKRINFTEADETTRIIETLFDF

SEQ ID NO: 10889 - DNA, 717 bp, Unknown
  Obtained from environmental sample
  misc_feature (1)..(717): n is a, c, g, or t
gtgtcggtattggatattcgggaattgggagaaaaactgcttcgccaattatttgaaaaaaacagggttacgcatatacatgaattttacacattgacaacagaggagcttgcagaattcgacagaatgggagaactttcagcggcgaaagtaatccgccacatacagacaaaacgggaactttccctcgctgtttttacagcgggatttgacttggaaggagtcgccgaaaccacaatggaaaaaatcgccgccgccggctttgacacattggaaaaactccgcgcggcatccgtggcagaccttgccgccgtttacggtcttggagaaataaccgcctctgtaatcgtagacggtcttaaagagtgcgccgccgaaatggacacagtcttaaagactaaaatcataacgatagcgccgccgccttcggaagaatcacagcccatgcgcggtttgtctttttgtttcacgggagaactaaagtccatgaaaaggggagaggcggaggagaaaataaaagcccttggcgcgcaggcaaagtcttcggtagtgaaaggactttcctaccttgttacaaacgacccatcttcaggttcttcaaagaacaagaaagctcgtgaacttgggataaaaataattgatgaagatgagtttttggcgctgttgaattcagagcctaaaaaacagcctgcttcagaacagggcgaattgttttaa

SEQ ID NO: 10890 - protein, 238 aa, Unknown
  Obtained from environmental sample
  DOMAIN (144)...(222): BRCA1 C Terminus (BRCT) domain
  misc_feature (1)..(238): Xaa is any amino acid
MSVLDIRELGEKLLRQLFEKNRVTHIHEFYTLTTEELAEFDRMGELSAAKVIRHIQTKRELSLAVFTAGFDLEGVAETTMEKIAAAGFDTLEKLRAASVADLAAVYGLGEITASVIVDGLKECAAEMDTVLKTKIITIAPPPSEESQPMRGLSFCFTGELKSMKRGEAEEKIKALGAQAKSSVVKGLSYLVTNDPSSGSSKNKKARELGIKIIDEDEFLALLNSEPKKQPASEQGELF

SEQ ID NO: 10891 - DNA, 807 bp, Unknown
  Obtained from environmental sample
  misc_feature (1)..(807): n is a, c, g, or t
atggagagacggaggttcgttatcatgctggagaacacacgtttcaacaaggaagaaaccgccaaagaagccgccgatttggacaagctggcaaaagagctggcaacttacggcgatgtatttgtcaacgatgcctttggcactgcccaccgcgaccatgcttccacagcgtcaatcgcaaaatttgtaccggtgtcagtggcaggctttttaatggaaaaagaggttaattaccttgaaccaattgtcaccagtcccaaaaaaccgcttgtagcgataattggcggggcaaaggtttcctcaaaaattgccgtgctggagagccttttgaaaaacgcggcggctctggttatcggcggcggcatggcctacaccttcctcaaggcgcagggacacaaggtgggaaaatcccttgttgaagacgaccagcttgacactgcgaaaaaaatcctggacgccgccaaaagcgcgggtgtggaaatcatactgccggcggatcatgtcggcgcaaccagttttgacgcaacggctgtccctattccggtagacggccttgacctgccggataaccttatgggtctggatgtggggccaaagacgctggctgtttacaaagaaacgcttgccaaagccaaaaccattgtgtggaacggcccggttggtgtttttgaatttgacgcattcgccaaaggaaccgaagaagttgccaaaatggtagcggcggcgaccggctcaggatgcattaccgtagtcggcggcggcgactccgttgcggcggtaaacaagttcggccttgctgaaaaatga

SEQ ID NO: 10892 - protein, 268 aa, Unknown
  Obtained from environmental sample
  DOMAIN (1)...(268): Phosphoglycerate kinase
  misc_feature (1)..(268): Xaa is any amino acid
MERRRFVIMLENTRFNKEETAKEAADLDKLAKELATYGDVFVNDAFGTAHRDHASTASIAKFVPVSVAGFLMEKEVNYLEPIVTSPKKPLVAIIGGAKVSSKIAVLESLLKNAAALVIGGGMAYTFLKAQGHKVGKSLVEDDQLDTAKKILDAAKSAGVEIILPADHVGATSFDATAVPIPVDGLDLPDNLMGLDVGPKTLAVYKETLAKAKTIVWNGPVGVFEFDAFAKGTEEVAKMVAAATGSGCITVVGGGDSVAAVNKFGLAEK

SEQ ID NO: 10893 - DNA, 771 bp, Unknown
  Obtained from environmental sample
  misc_feature (1)..(771): n is a, c, g, or t
gtggcggtaaaaataagtacgggagagccgggcaatccgcactttcttgccgcttcgctgataaaaaatcttgtgcagaaagtgaacggcactattgttgaatgtaacaccgcttacggcggaagacgcgcaagcgccgccgctcattatcaggtggcgaaggatcacggttttgcggcaattgcgcctgttgtgattatggacgaaaaatcggaaatcaatattcccgttataggcggcaagcatctaaaagaagatattgtaggcgcgcgttttaacgaatttaattttcacattgtgctgtctcattttaaaggacatggaatgggcggcttcggcggagcgcttaaaaatatgtctatcggctacgcatcagcggcgggcaagtcatggattcattcggcagggaaaagcaggagcggttttaacggagtgcaaaacaatttccttgaatcaatggcggaagccgcaaaagcggtcgccgacgcaaacaagggaagaatgctctatatcaatgtaatgaaccatctttccgttgactgcgattgcaacggcagacctgccgccccgacaatggcggacatcggcatactcgcctcgcttgaccctgtcgctcttgatcaagcttgcgtcgatcttgtgtacaaggcaaaagacggcaaagaccttatcgcccgcatagaatcaagaaacggtcttttgacgattactcacgcggaagaaattggattgggaaccaagacgtacaggttagttcgtattgatggttga

SEQ ID NO: 10894 - protein, 256 aa, Unknown
  Obtained from environmental sample
  misc_feature (1)..(256): Xaa is any amino acid
MAVKISTGEPGNPHFLAASLIKNLVQKVNGTIVECNTAYGGRRASAAAHYQVAKDHGFAAIAPVVIMDEKSEINIPVIGGKHLKEDIVGARFNEFNFHIVLSHFKGHGMGGFGGALKNMSIGYASAAGKSWIHSAGKSRSGFNGVQNNFLESMAEAAKAVADANKGRMLYINVMNHLSVDCDCNGRPAAPTMADIGILASLDPVALDQACVDLVYKAKDGKDLIARIESRNGLLTITHAEEIGLGTKTYRLVRIDG

SEQ ID NO: 10895 - DNA, 537 bp, Unknown
  Obtained from environmental sample
  misc_feature (1)..(537): n is a, c, g, or t
atgcagcgggtctcaggagcaggttatcccggtgttccctctctcgacatagttgataacatcgttccgtacatcggcggcgaagaggagaagtccgaaaaagaaccgctgaagatnttcggtaaaatagaaaacggcgtatttataaacgccgagttccccaaaatttccgctcattgtaacagagtgcctgtaagagacggacatacggcttgcgtttcgcttgaattcgccgccaagaaaccctctctggaagaaataaaatctatttgggcggcttataagggattgccgcaagaggcggatctgccctttgcgccaaagcagccgattatttaccgagaagaagaaaatcgccctcagcccagcaaagaccgtgacgccgacaaggcgatggcggttgttgtcggccggcttcgtccatgcaatgtgtttgatatccgctttgcggcggtatcacataacacagtgcgcggcgcggcgggcggcggcattttgaatgcggaactattaaagtacaagggatacataaactaa

SEQ ID NO: 10896 - protein, 178 aa, Unknown
  Obtained from environmental sample
  DOMAIN (1)...(158): Semialdehyde dehydrogenase, dimerisation domain
  misc_feature (1)..(178): Xaa is any amino acid
MQRVSGAGYPGVPSLDIVDNIVPYIGGEEEKSEKEPLKXFGKIENGVFINAEFPKISAHCNRVPVRDGHTACVSLEFAAKKPSLEEIKSIWAAYKGLPQEADLPFAPKQPIIYREEENRPQPSKDRDADKAMAVVVGRLRPCNVFDIRFAAVSHNTVRGAAGGGILNAELLKYKGYIN

SEQ ID NO: 10897 - DNA, 312 bp, Unknown
  Obtained from environmental sample
  misc_feature (1)..(312): n is a, c, g, or t
ttgtgtcctgtcatctatcaggaaatattgcaggggataagggaagataagacatttgaacggataaaatttattttacagcaatacagaatgatagatatagatttaatgtatgcaacaaattatgcggttgatttatacagacatttacgcaaaaagggaataacgataagaaaatccatagattgtttgattgcggcgtatgcgattatagctgatatgtatctgttacacaatgacagtgattttatacaaatagcccgtgaaagtaagttaaaaatatacccttataaatataaaactaaattttag

SEQ ID NO: 10898 - protein, 103 aa, Unknown
  Obtained from environmental sample
  misc_feature (1)..(103): Xaa is any amino acid
MCPVIYQEILQGIREDKTFERIKFILQQYRMIDIDLMYATNYAVDLYRHLRKKGITIRKSIDCLIAAYAIIADMYLLHNDSDFIQIARESKLKIYPYKYKTKF

SEQ ID NO: 10899 - DNA, 333 bp, Unknown
  Obtained from environmental sample
  misc_feature (1)..(333): n is a, c, g, or t
atgcctggcgcgacaaacattgccgcttcaaaagaagccggcgcactcataacggaaatggcatcagccggaaaactggtctgcgcgatctgcgcctccccggcggtggtgctggccccgctgggccttctgtccggcaaaaagttcacctgttaccccggcatggaagaaaaagtgcagggcggcaaatggacagacgagcgcgtcgccatagacggcgctattatcaccagccgcagcgcgggaacagccggagaattcgccgtggcgattatcgcgcggcttctcagtcaggcggaaggagacaaaatcgcgcaggcggtgctgttataa

SEQ ID NO: 10900 - protein, 110 aa, Unknown
  Obtained from environmental sample
  DOMAIN (1)...(96): DJ-1/PfpI family
  misc_feature (1)..(110): Xaa is any amino acid
MPGATNIAASKEAGALITEMASAGKLVCAICASPAVVLAPLGLLSGKKFTCYPGMEEKVQGGKWTDERVAIDGAIITSRSAGTAGEFAVAIIARLLSQAEGDKIAQAVLL

SEQ ID NO: 10901 - DNA, 474 bp, Unknown
  Obtained from environmental sample
  misc_feature (1)..(474): n is a, c, g, or t
atgtttatggctcgcgtcccgatgacaaaaaacgggtttaatcaattagtcgaagaattagaccgtttaagaaagatagaattacccgcgataatagaaagagtggcggaagcgcgttcgcacggcgacctcaaagagaacgcggaataccatgccgcccgcgaaagacaaggacaaatacaggacaaaattcattatctcgaaagccgcatatccgacgctcagattatagaaaccgaaggcaacagcgacgaaatccgtttcggctcgaaagttatttgctgcgaagcggacgacaaggacgaaaaagaagaatacgttttggtcggcgcggacgaagcaaacccgtctaaaggtatggtttcggtgacctctccgctcggacaggcgcttttgggcaaaaaaaacggcgatacggtcgaagtagccgctcccgccggaaaatacaagttaaaaatcgtttcgtttgagtaa

SEQ ID NO: 10902 - protein, 157 aa, Unknown
  Obtained from environmental sample
  DOMAIN (81)...(157): Prokaryotic transcription elongation factor, GreA/GreB, C-terminal domain
  misc_feature (1)..(157): Xaa is any amino acid
MFMARVPMTKNGFNQLVEELDRLRKIELPAIIERVAEARSHGDLKENAEYHAARERQGQIQDKIHYLESRISDAQIIETEGNSDEIRFGSKVICCEADDKDEKEEYVLVGADEANPSKGMVSVTSPLGQALLGKKNGDTVEVAAPAGKYKLKIVSFE

SEQ ID NO: 10903 - DNA, 333 bp, Unknown
  Obtained from environmental sample
  misc_feature (1)..(333): n is a, c, g, or t
atgaacgccctgatggaccgcctgagaaagtcgccccccaagatgttcgccggaaaaaaagtagtctctgtcaaggactatttaacgggtataacgatagaccccgccgccggcaagcaagataaaaacatagacctcccgtcgtcaaacgtcctgcagttcatactggaagataacagtatcgtgacagtcagaccgtcgggcacagagcccaaaataaaattctacatctcatgtcggaccgaaaaaggtatggatttaaacgaagccgaaaaggtggcggatgaaaagattaaggcgattacggaggaacttaataggactgtggtttaa

SEQ ID NO: 10904 - protein, 110 aa, Unknown
  Obtained from environmental sample
  misc_feature (1)..(110): Xaa is any amino acid
MNALMDRLRKSPPKMFAGKKVVSVKDYLTGITIDPAAGKQDKNIDLPSSNVLQFILEDNSIVTVRPSGTEPKIKFYISCRTEKGMDLNEAEKVADEKIKAITEELNRTVV

SEQ ID NO: 10905 - DNA, 852 bp, Unknown
  Obtained from environmental sample
  misc_feature (1)..(852): n is a, c, g, or t
atgacgacagcaaccaagaactccggcaaaacggacggcggcaaagagcccgccgactccgccgaacccctctccttcgacgagacggtgaaggcggcgctggctttctgcgggacgctgcccgatgacttcgcgccctgcgggcgcctgctcgcggagctgcagacgcggctctccaagggacggctgcacttcgccgtgctcggccagttcaaccgcggcaagagcaccttcataaacgccctgctgcgcataaaggccctgcccacgtccgttctgccgctgacctccgtccccacgctcatagagtacggcgcggaggcggtgtgccgggtgcgcttcctcgacgggcgcgaagacgccgtcgtgccggcctcctccggcaagatggaggccgttctgcggcagtacgtcgccgaagccagcaaccccaaaaaccgcctgggcgtgcgggacgcgacgctcacctgcgccagcgacctgctggcgaacgggacggtgctgatagacacgcccggcttcggctccacgcacctccacaacacgcagaccacgctcgaccttctggtcgagtgcgacgccgcgctcttcctgctctccgccgacccgcccatgacgcagacggagatggagttcctgcggcaggtgaaagagcgcatccccaagctctacttcatactgaacaaggtagacctcctctcggcgccggaactgcaggaggtggaggggttcatccgaggcattctgggcggcgagctaggcttccccgccgacaccgtcctctaccgcacctgcgccgtcaaagccgaacgcgccgaaaccggcaagagggcgaccaggagtgggagatga

SEQ ID NO: 10906 - protein, 283 aa, Unknown
  Obtained from environmental sample
  DOMAIN (63)...(231): GTPase of unknown function
  misc_feature (1)..(283): Xaa is any amino acid
MTTATKNSGKTDGGKEPADSAEPLSFDETVKAALAFCGTLPDDFAPCGRLLAELQTRLSKGRLHFAVLGQFNRGKSTFINALLRIKALPTSVLPLTSVPTLIEYGAEAVCRVRFLDGREDAVVPASSGKMEAVLRQYVAEASNPKNRLGVRDATLTCASDLLANGTVLIDTPGFGSTHLHNTQTTLDLLVECDAALFLLSADPPMTQTEMEFLRQVKERIPKLYFILNKVDLLSAPELQEVEGFIRGILGGELGFPADTVLYRTCAVKAERAETGKRATRSGR

SEQ ID NO: 10907 - DNA, 555 bp, Unknown
  Obtained from environmental sample
  misc_feature (1)..(555): n is a, c, g, or t
atgaccgaccaattacaggaaatcggcgcgcgactgggggcattgcgggatgttctcgacatctctgttgaaaatatggcggaaaaaatgaaagtttccgttgatgaatacaccgcgtatgaacgcggacagaaggatttttctttcagctttctgcaaaacgccgcgcaaatttttaacgtggacgtagtagacattatttcaggcgaatcgccgagacttaccaaatgcgccctggtcagaaacgggcaaggcttcgacattgagcgcagaaaggcatacgactacaagcatcttgcctttactttcagcaacaaaaaggcggaaccttttatggtcaccgtggaaccgaaaccgggcgagaaaccgacgcttcactcgcacgaggggcaggaatttgactatatgctttccggtaaaatggaacttttctttgacgatataatctacgggcttaacgaaggcgacagcgtgtattttgactccagcgtgcctcatgccatgaaggcgataggcggtcagccggcaaagtttcttgccgtggtaatcaaataa

SEQ ID NO: 10908 - protein, 184 aa, Unknown
  Obtained from environmental sample
  DOMAIN (12)...(66): Helix-turn-helix
  misc_feature (1)..(184): Xaa is any amino acid
MTDQLQEIGARLGALRDVLDISVENMAEKMKVSVDEYTAYERGQKDFSFSFLQNAAQIFNVDVVDIISGESPRLTKCALVRNGQGFDIERRKAYDYKHLAFTFSNKKAEPFMVTVEPKPGEKPTLHSHEGQEFDYMLSGKMELFFDDIIYGLNEGDSVYFDSSVPHAMKAIGGQPAKFLAVVIK

SEQ ID NO: 10909 - DNA, 609 bp, Unknown
  Obtained from environmental sample
  misc_feature (1)..(609): n is a, c, g, or t
gtgataaaagctgtagagaaatacgatgccgacagaggtttccattttatttcctatgcggtgtggtggatacgtcaaaccatactcaaggcgcttgccgatcagtcaaggattatccgcctgcctgtcagccgggcaaatgaccttatccagattgaaaaagcgaaaaaattacttgccggcagtacaagctgtgaaactgagatacgtgaattggcgcaattactcagtatggatgaaagccatattgaggatacgctgaccgtctccagagagactctctcgctggaaaaatcggttgatgccagcaggaacgcttcgccgctgggaaactttattgtggacacccgctacgatacgcctgaccagataatgttcaaaaaatcccttaagcacgacatcgaagaggtgttaagcaccctaagcagcaaggaagcggaaataatacgctgccgctttgggcttgggcagcgaaagccgatgaacttccaggaaatcggcgattattttgagctttccaaggaacgcatccgtcagattgaagaaaaagccataaggctcctgcagcagcccagccgtaaatccaagctggaagcctatgtagcttaa

SEQ ID NO: 10910 - protein, 202 aa, Unknown
  Obtained from environmental sample
  DOMAIN (42)...(125): Sigma-70 region 3
  misc_feature (1)..(202): Xaa is any amino acid
MIKAVEKYDADRGFHFISYAVWWIRQTILKALADQSRIIRLPVSRANDLIQIEKAKKLLAGSTSCETEIRELAQLLSMDESHIEDTLTVSRETLSLEKSVDASRNASPLGNFIVDTRYDTPDQIMFKKSLKHDIEEVLSTLSSKEAEIIRCRFGLGQRKPMNFQEIGDYFELSKERIRQIEEKAIRLLQQPSRKSKLEAYVA

SEQ ID NO: 10911 - DNA, 828 bp, Unknown
  Obtained from environmental sample
  misc_feature (1)..(828): n is a, c, g, or t
ttgatcaaagataataaacatgagcagaaaattcgctcaacagggcttaagaaaggcgatattgtgattgtctgcctgccgaatatcccgcaggcggtaatatcaatttatgcgcttaacaggcttggcgcaattcccgctcccattcacccgctttcggcaacgggagagatagaagaattctcaaaacttgtctcggcaaaagcggctattactctggacggattttatccccgttttgccgaagcaaattttaaattcgaaaaaattattgtttgttcgttaaaaacagagatggatttattgacaaaaacaggattttctattggaatgggacgcaagataaagcctgtccctttttccgctacggtactggactgggcgaaaatagaagcggaaaaagagcagaccgaacttgaaacgcccgacccaatcggcgctgatgaaatggcgcttatacttttttcagggggcagcaccgctctgcccaaagctatcatgctgtcaaacaaaaactgcaacgcccttgcgatgcagatgcaggcgcatggcggccctctcaccccaggcgataaaatgctctcaattcttcccgtatttcacggttttggatttgctgtcggtattcacgcgatgatgataaccggcggagcctgtattcttgttcctaaattcaaggcaagtactctggctcctctagtaaaaaaacacaagcctgagtttatggccggcgttcctactttgtatgacgctcttgcctcaaataaaaatttcagaaaggttcctcttggctccttaagggccttttttgcggcggagattctttaa

SEQ ID NO: 10912 - protein, 275 aa, Unknown
  Obtained from environmental sample
  misc_feature (1)..(275): Xaa is any amino acid
MIKDNKHEQKIRSTGLKKGDIVIVCLPNIPQAVISIYALNRLGAIPAPIHPLSATGEIEEFSKLVSAKAAITLDGFYPRFAEANFKFEKIIVCSLKTEMDLLTKTGFSIGMGRKIKPVPFSATVLDWAKIEAEKEQTELETPDPIGADEMALILFSGGSTALPKAIMLSNKNCNALAMQMQAHGGPLTPGDKMLSILPVFHGFGFAVGIHAMMITGGACILVPKFKASTLAPLVKKHKPEFMAGVPTLYDALASNKNFRKVPLGSLRAFFAAEIL

SEQ ID NO: 10913 - DNA, 369 bp, Unknown
  Obtained from environmental sample
  misc_feature (1)..(369): n is a, c, g, or t
ttgcgcctctccgccggaaagcgtaagcgccgattgccccagtttcacataaccaagaccaaccgagagcaaagtctgcatttttctggaaacctgcggaattgcggcaaaaaaatcagccgcttcctctatagtcatatccaaaacttccgcgatattttttcctttgtagtgaatttcaagggtctctctgttaaatcttttgccgtggcaaacgtcgcacgttatgtaaacatccggcaaaaaattcatctcgatttttattgttccgtctccttcgcagttttcgcaccttccgccgcgcacgttaaacgaaaaacgcccgggtttatagcctctcattttcgactcgggcatattcgcgaataa

SEQ ID NO: 10914 - protein, 122 aa, Unknown
  Obtained from environmental sample
  misc_feature (1)..(122): Xaa is any amino acid
MRLSAGKRKRRLPQFHITKTNREQSLHFSGNLRNCGKKISRFLYSHIQNFRDIFSFVVNFKGLSVKSFAVANVARYVNIRQKIHLDFYCSVSFAVFAPSAAHVKRKTPGFIASHFRLGHIRE

SEQ ID NO: 10915 - DNA, 825 bp, Unknown
  Obtained from environmental sample
  misc_feature (1)..(825): n is a, c, g, or t
ttgccgtgtaatagcccgcggcgactttatcgctttgcggaaaagatacaaaagtataacgccgaagaatgcgtccagaagctgggcatatcatattccgaagcagaagcctttatcccgggcatccttttgataaaacttttcctcgaacagaccggagccgcgcaggttgtagtcccgctggtgtcaattcgggaaggttacctgattgatctcgcgcttggagtggattcggaacagcaggaagaattttattcgcagattatcgcatccgcggtcaatcttggcagaaaattccattttgacgaggcccacgcgcgccatgtcgcgaatctctgcatgacgctttttgacgcgctggcaaaagaacacggcatggattcccgccggcgcatgatgctgaaaacagccgccattctccacgacataggcgcttttattaaaacatcgggccacaacaggcacggccagtatattgtttccaattcggaaatattcggcctgccccgcgacgagctggaaataatagccaatgttatacgctaccaccacgggcgcgaaccgacgcaggctgacatagaatatataagcctccagcgggaagagagaatcatggtgctgaaaatggccgccattctccgggtcgccgacgctcttgacagggggcattcccagcatttaaaaaacatcagcgtagagcgccgcgccgagacagtcgccctgcatgcccagggcgtatatgacatatcacaggaacttatcgcgctggaagaaaaagccgattactttcaggccgtgtttgggtacaaagtcgttttaaactag

SEQ ID NO: 10916 - protein, 274 aa, Unknown
  Obtained from environmental sample
  DOMAIN (102)...(222): HD domain
  misc_feature (1)..(274): Xaa is any amino acid
MPCNSPRRLYRFAEKIQKYNAEECVQKLGISYSEAEAFIPGILLIKLFLEQTGAAQVVVPLVSIREGYLIDLALGVDSEQQEEFYSQIIASAVNLGRKFHFDEAHARHVANLCMTLFDALAKEHGMDSRRRMMLKTAAILHDIGAFIKTSGHNRHGQYIVSNSEIFGLPRDELEIIANVIRYHHGREPTQADIEYISLQREERIMVLKMAAILRVADALDRGHSQHLKNISVERRAETVALHAQGVYDISQELIALEEKADYFQAVFGYKVVLN

SEQ ID NO: 10917 - DNA, 825 bp, Unknown
  Obtained from environmental sample
  misc_feature (1)..(825): n is a, c, g, or t
gtgtacccgactaacgccgtgtcaaacatgtttgaactcatgaagcgtttccagccggatttaatcctgttggatgtggacatgccggacataaacgggtatgaagccgcgaggatgctgaagggcagcgataacttcaaggaaatacccattatattccttacatccatggacgatcctgaaagtgaaatggaaggcctgaaccttggggctattgattatatccacaagcctcttgtagccccgcttttgctcaggcggataaaaacttacctctccgtgctggaacagcaaaaagtaatactggaacgcaataaaaaaattgaagaattgctgaaattaaaaacaaaagaggtcagcctgcgcgaggcggcggagcaggaggcgcgggatgcctcgcgggccaaaggcgaattcctgtcccacatgagccacgagatacggtcccctttgaacgccgttataggcatgatatccatggcggcggaaacggatgacattccaacgatcaaggattaccttaaaaaggcgtacaacgcgggaaggcatgtgtcgggccttataaatgatattcttgatatgtccaaaatcgaagcgaataaacttgaactcgcatacagcgattttaattttatgaaaatgctgaccggaattatcaatgaggcaaacgtccgcgccggggaaaagcaccagaacattaccgttaatgtgaatgaaaatgttccgccgtttataatcggcgacgaactgcgattgtcgcagataattacgaatctgctgaccaacgcgattaaatttacccctgacaatgggcgtatgaagtga

SEQ ID NO: 10918 - protein, 274 aa, Unknown
  Obtained from environmental sample
  DOMAIN (5)...(89): Response regulator receiver domain
  misc_feature (1)..(274): Xaa is any amino acid
MYPTNAVSNMFELMKRFQPDLILLDVDMPDINGYEAARMLKGSDNFKEIPIIFLTSMDDPESEMEGLNLGAIDYIHKPLVAPLLLRRIKTYLSVLEQQKVILERNKKIEELLKLKTKEVSLREAAEQEARDASRAKGEFLSHMSHEIRSPLNAVIGMISMAAETDDIPTIKDYLKKAYNAGRHVSGLINDILDMSKIEANKLELAYSDFNFMKMLTGIINEANVRAGEKHQNITVNVNENVPPFIIGDELRLSQIITNLLTNAIKFTPDNGRMK

SEQ ID NO: 10919 - DNA, 630 bp, Unknown
  Obtained from environmental sample
  misc_feature (1)..(630): n is a, c, g, or t
atgtaccagctgggatacaaggccgtgggaatcatcgccctcctctctttcctgataggcgtcgtactctccctgcagagcgccaaacagttgaaaactttgggaatgggcatcttcctagtccccctgataggcatcaccatgatccgccagatgggcccgctgctgacggcaatcatactggcgggccgcaccggtagcgccacgaccgccgaaatcgccacgatggtcgtaggggaggaggtagacgccctgcgcgccatgggcgtgaaccccatgcagtacataatggctcccaaattttgggctatatccctcacaatgccactgctgtccataatcgccaccgctaccggaattttgggcgggtacgtgatagcgtacctatatttggacatgacctcatccatgttcatgcgggagctggccaaggttataaagctggagcacatcctatccggttgcttcaagtccatggtcttcgcttggcttattatatggataggctgctacttcggcttcagggtgaggggcggcgccgaagccgtgggcagggagacgacgtcgagcgtggtcgccgggatcttcataataatcgtggcgaacgcgctgttttcgtttgtgatgtga

SEQ ID NO: 10920 - protein, 209 aa, Unknown
  Obtained from environmental sample
  SIGNAL (1)...(27)
  DOMAIN (1)...(209): Domain of unknown function DUF140
  misc_feature (1)..(209): Xaa is any amino acid
MYQLGYKAVGIIALLSFLIGVVLSLQSAKQLKTLGMGIFLVPLIGITMIRQMGPLLTAIILAGRTGSATTAEIATMVVGEEVDALRAMGVNPMQYIMAPKFWAISLTMPLLSIIATATGILGGYVIAYLYLDMTSSMFMRELAKVIKLEHILSGCFKSMVFAWLIIWIGCYFGFRVRGGAEAVGRETTSSVVAGIFIIIVANALFSFVM

SEQ ID NO: 10921 - DNA, 327 bp, Unknown
  Obtained from environmental sample
  misc_feature (1)..(327): n is a, c, g, or t
atggttcttttagcttcccgcccccattacggagtatgcccgctcggacgggaaacttttatggtaccggttcactgggaagacaactggccgtttatctcttcaaaatccgggcttgtagaatcggagtttaaccttcagcctttacctattacaaacgcggatcccgaatggagttatgaaccaaactgcgatcacttttacgggaaactgcctctccactggctgatgctccgtatgcccgtaaataaaaaagactgcgcggtaggctttaattcccattcgggggcgctgaggctttttacaaaagcgcgggcctgcgcatga

SEQ ID NO: 10922 - protein, 108 aa, Unknown
  Obtained from environmental sample
  misc_feature (1)..(108): Xaa is any amino acid
MVLLASRPHYGVCPLGRETFMVPVHWEDNWPFISSKSGLVESEFNLQPLPITNADPEWSYEPNCDHFYGKLPLHWLMLRMPVNKKDCAVGFNSHSGALRLFTKARACA

SEQ ID NO: 10923 - DNA, 576 bp, Unknown
  Obtained from environmental sample
  misc_feature (1)..(576): n is a, c, g, or t
atgaatgaatacccggcgatctttttagcctttctaaaaatgggatgcttcgccttcggcggaggctacgccatggttccccttgtcgagcgggaactcataaaaaagagggactggaccaacatggacgaggtaatagagtggtataccatcgcccaaatcacccccggcattatcgcggtgaacctttcaacttttataggttacaagaggaaggggatactcggcggcatcctggccacaatcggctttgtgcttcccggcgtttcgattatagtcgcggcagctctccttttaagcaattttgcggataacgctattgtaaagcacgccttcgcgggcatacgcatcgcggtaggtgcactgatcctggacacggtaataaggctgttaaaggggttcgtcaaagaaactaaaaccctggcggtttattttatcatcctcataatttcgcttaccccgtttataccgggcctggtgaagacccctgttttgcttgttttggcctcgggcattgccgggctttttatctaccggcagaaaaagcccgccgcgccggaggaaagcgaagaatga

SEQ ID NO: 10924 - protein, 191 aa, Unknown
  Obtained from environmental sample
  DOMAIN (2)...(182): Chromate transporter
  misc_feature (1)..(191): Xaa is any amino acid
MNEYPAIFLAFLKMGCFAFGGGYAMVPLVERELIKKRDWTNMDEVIEWYTIAQITPGIIAVNLSTFIGYKRKGILGGILATIGFVLPGVSIIVAAALLLSNFADNAIVKHAFAGIRIAVGALILDTVIRLLKGFVKETKTLAVYFIILIISLTPFIPGLVKTPVLLVLASGIAGLFIYRQKKPAAPEESEE

SEQ ID NO: 10925 - DNA, 477 bp, Unknown
  Obtained from environmental sample
  misc_feature (1)..(477): n is a, c, g, or t
ttggtagattggagagataactcgtcaaaacaaagtataagcgctttgccaaataacgccaccattgccatacctaatgatcctaccaacggcggccgcgccctgcttctgcttcaaacaaaagggcttattacccttaaagccggagttggtctttccgccactccccgtgacattgcaagtaacccaaaaaatttccgtttcagggaacttgaagccgcgcagcttccccgctccctgcaggatgtggatgccgccgcaataaacggtaactacgcgcttgccgccggtcttaatccggtaaaagattcccttatcattgaaggcacggattccccctatgttaacatcgtggttgtgcaaaagggaaaagagaatgatcccggtataatcgctctgaaaaacgcgctgttaagccagaaggtaaaagattttattgacagtaaatacaacggcagcgttgtggcggttttttaa

SEQ ID NO: 10926 - protein, 158 aa, Unknown
  Obtained from environmental sample
  DOMAIN (1)...(158): NLPA lipoprotein
  misc_feature (1)..(158): Xaa is any amino acid
MVDWRDNSSKQSISALPNNATIAIPNDPTNGGRALLLLQTKGLITLKAGVGLSATPRDIASNPKNFRFRELEAAQLPRSLQDVDAAAINGNYALAAGLNPVKDSLIIEGTDSPYVNIVVVQKGKENDPGIIALKNALLSQKVKDFIDSKYNGSVVAVF

SEQ ID NO: 10927 - DNA, 678 bp, Unknown
  Obtained from environmental sample
  misc_feature (1)..(678): n is a, c, g, or t
gtgatggatgaggaacgcctaaagcacggcggaacaataattaccatagattattttgaaaagcagcttgaaaaaatcagggaaatacgcctttctgaacgtcgattctatcaaaagattaccgatatttactcaaccgctcttgattatgataaaacggcaaagacaaccaaagacttctttgcaaaagtgcaaaataaactacattttgccgtccacggcaataccgctgccgaacttatctataaccgagcagatgcgcaaaaacaatatatgggcttgaccacatggaacgaagctcctgacggaaaaatccagcgcagcgatgttgtcgtagcaaaaaattatttatccgaggaagaaatacagtcgcttgaattgattgtatcggcgtaccttgacctggccgaacgtcgcgcaagggcgcatgtacccatgacaatgtcagactggtcaaaacatcttgacttgattttacaggcagacggtaatgaactgttgaccaatgccgggaaaatatcagcgcagatagcggaagatcatgcattaagcgaattcgaaaaataccgtgttattcaggataaattgtttgaaagcgattatgacagatttatcgtcagcctgaataaactggaagaaaaatcagcggttaaaaagaaaaggaaatccttcccttaa

SEQ ID NO: 10928 - protein, 225 aa, Unknown
  Obtained from environmental sample
  misc_feature (1)..(225): Xaa is any amino acid
MMDEERLKHGGTIITIDYFEKQLEKIREIRLSERRFYQKITDIYSTALDYDKTAKTTKDFFAKVQNKLHFAVHGNTAAELIYNRADAQKQYMGLTTWNEAPDGKIQRSDVVVAKNYLSEEEIQSLELIVSAYLDLAERRARAHVPMTMSDWSKHLDLILQADGNELLTNAGKISAQIAEDHALSEFEKYRVIQDKLFESDYDRFIVSLNKLEEKSAVKKKRKSFP

SEQ ID NO: 10929 - DNA, 849 bp, Unknown
  Obtained from environmental sample
  misc_feature (1)..(849): n is a, c, g, or t
gtgtcaggggcaaataagtgcgatatgatctatttagatacttatccgggaatgggaattagggatagaaatattgaaaatgtgtttcccacgcttgcccatgaaatgcagcatatgatgaactatgttaccagaaggataatatcaagcgggaataatttcacttctatggatatctggattgatgaggggctttcatccgccgcggaatatattgtctgtgacggaaaatattcaaaagacaggattgactggtataatgagaacggcgaaagtaaggctaaaattaaggggttaatagatcaaggtaataacttttttgtctggggaaaccatgaaaatgaaaatccgtatgcggtattggatgattacgctaccgtttatcttttttttcaatggcttaggctccaaaaaggaaatggggtctatcgtgatattatttcctcaaataatagtaattatcgggcaatagaagacgctacgggtgaagattgggatactttgcttaaaagctggatggcggctaattatataaatagcggtaccggggtatatggttataaaggtgatattcaggcaattactacccatactgtgcctgcgggaaaaactgaaatcagcctttaccccggagaaggcgtttacagtctgacggacgcaggcgatactataccgtctcaagacataaatattaacaaaaatattaaatatacgggattgaataaggccgctgtggaggtgagtgataacgccgtctttgcagcgggcaggttgcttacttataatatgagcaccgtattatacggcaaagcggaaaccggaataacaaccgtaaagcggcaagcgtaa

SEQ ID NO: 10930 - protein, 282 aa, Unknown
  Obtained from environmental sample
  misc_feature (1)..(282): Xaa is any amino acid
MSGANKCDMIYLDTYPGMGIRDRNIENVFPTLAHEMQHMMNYVTRRIISSGNNFTSMDIWIDEGLSSAAEYIVCDGKYSKDRIDWYNENGESKAKIKGLIDQGNNFFVWGNHENENPYAVLDDYATVYLFFQWLRLQKGNGVYRDIISSNNSNYRAIEDATGEDWDTLLKSWMAANYINSGTGVYGYKGDIQAITTHTVPAGKTEISLYPGEGVYSLTDAGDTIPSQDININKNIKYTGLNKAAVEVSDNAVFAAGRLLTYNMSTVLYGKAETGITTVKRQA

SEQ ID NO: 10931 - DNA, 309 bp, Unknown
  Obtained from environmental sample
  misc_feature (1)..(309): n is a, c, g, or t
atgtctgctttttccagaatgatagtaaccggcgctatcgaaaatatcgatgttatagacgacatgataaaaaaacatctgcaaaattgggatattacgcgccttaaccgcgtagaccttgctatcttaagaatatcggtttatacattaatgtttcaaaaagatattccgccatctatagtcatagacgaggcaatcggcatttgcgttgaatacggcgcaaatgattcttacaaatttgttaacggcgttcttgacagtatccgcataacgcttcagcaagacccgttaccccaagaaacactatga

SEQ ID NO: 10932 - protein, 102 aa, Unknown
  Obtained from environmental sample
  DOMAIN (1)...(92): NusB family
  misc_feature (1)..(102): Xaa is any amino acid
MSAFSRMIVTGAIENIDVIDDMIKKHLQNWDITRLNRVDLAILRISVYTLMFQKDIPPSIVIDEAIGICVEYGANDSYKFVNGVLDSIRITLQQDPLPQETL

SEQ ID NO: 10933 - DNA, 405 bp, Unknown
  Obtained from environmental sample
  misc_feature (1)..(405): n is a, c, g, or t
ttgtgctcggcagagaaaattttggaagcggtaaaggaacacttgccgaatttggttggtctttcggggcttataacgccaagcctcgcagagatgagctttgttgtggaaactctttcaaaagaaaatcttggaattccagttatgataggcggagccacaacttctgctttgcacaccgctgcaaaaatagccacagttggaaagcagcctgttgtttatgtgccagatgcaggcaaagcggtttttgtggcggaatccattttgaataagtccaagcagaatgtgtttttccaagagaattttgagaagcagcaaaagctgagggaggctttgagccgcaaagaagagaaggtgctaacgcctattgaggaagcgaggggcaaggggttggagttgttttag

SEQ ID NO: 10934 - protein, 134 aa, Unknown
  Obtained from environmental sample
  misc_feature (1)..(134): Xaa is any amino acid
MCSAEKILEAVKEHLPNLVGLSGLITPSLAEMSFVVETLSKENLGIPVMIGGATTSALHTAAKIATVGKQPVVYVPDAGKAVFVAESILNKSKQNVFFQENFEKQQKLREALSRKEEKVLTPIEEARGKGLELF

SEQ ID NO: 10935 - DNA, 441 bp, Unknown
  Obtained from environmental sample
  misc_feature (1)..(441): n is a, c, g, or t
ttgaggaagcgaggggcaaggggttggagttgttttaggatttattttctatcttttccacaaatgaggatttacctagacaattgttgctataaccgcccttttgatacacctagcggtgatactataatttttgagtcaagtgcaaagatgagtattcagttgcttgttataaacgaaaaaataacgcttgcttattcgcttgtgtttttggaggaaatttacaataatccatttaagtataaaaaagagcagattttaagttttttgtcaaatgcgaaagtttatgtgggcacagataaacacccacagatagatgtggaagctgcggatattatgaaaaatgggataaaatatatggatgcggcacatatttcggcggcaattatcgcacaatgcgatttttttataacaacggacaagaaattactaaattantaa

SEQ ID NO: 10936 - protein, 146 aa, Unknown
  Obtained from environmental sample
  misc_feature (1)..(146): Xaa is any amino acid
MRKRGARGWSCFRIYFLSFPQMRIYLDNCCYNRPFDTPSGDTIIFESSAKMSIQLLVINEKITLAYSLVFLEEIYNNPFKYKKEQILSFLSNAKVYVGTDKHPQIDVEAADIMKNGIKYMDAAHISAAIIAQCDFFITTDKKLLNX

SEQ ID NO: 10937 - DNA, 498 bp, Unknown
  Obtained from environmental sample
  misc_feature (1)..(498): n is a, c, g, or t
gtgctccccactgtcctgggcatccacatcggctggatcatcgcgatctgcctcgcggctctgctgtatgtgctgcttaaaagaaccaagctgggctatgaaatagacgtaatcggcgaaagcgaggcaacggcccgttacgccggaatgagtgtgtttcgcataacaattatttccattgtgctatccggcggactctgcggcgccgcgggcatgatgcaggcatccgcgattgaacactccctttccgagcagctttccggcgggctgggctttacctccgttatcactacctggctcgcgcggctggatcctccggctatactggttatttcttttctttttgcccttttgattcagggggggaattttttacagtcgagccttcggattcccgcttccatttcgtttgtgctgcaggggatcattatcttctttgtgcttggctctgaattttttatccgctatagattcgtatacagcggaaagggcaaatga

SEQ ID NO: 10938 - protein, 165 aa, Unknown
  Obtained from environmental sample
  DOMAIN (2)...(148): Branched-chain amino acid transport system / permease component
  misc_feature (1)..(165): Xaa is any amino acid
MLPTVLGIHIGWIIAICLAALLYVLLKRTKLGYEIDVIGESEATARYAGMSVFRITIISIVLSGGLCGAAGMMQASAIEHSLSEQLSGGLGFTSVITTWLARLDPPAILVISFLFALLIQGGNFLQSSLRIPASISFVLQGIIIFFVLGSEFFIRYRFVYSGKGK

SEQ ID NO: 10939 - DNA, 561 bp, Unknown
  Obtained from environmental sample
  misc_feature (1)..(561): n is a, c, g, or t
atgaagttcccccggcaattgatcggtgaaaaacggatacctgttccggcagggcgcggcaagattgcccgttatgatactgaatacaaacgcaatggtacatgtgaaatatttatgtttgtcgccccccttaataattggagaagggcggaggtaatggaacatcggacaagccttgattgggcacagcagataaaaaaactgataacggttgactttccccatgtaaaaaaaatagttcttgttatggataacctcaatactcataccataggctctttgtataaagcatttcctcctgaagaagcaagacagtatcgaaaaatacttgagattcatctcacgccgaagcatggcagttggcttaacatggcggaaatagaaatcaatgtactagtgaaccatggcttgtcaaaacgggttccttccatgcagcagatggaaaaagaagtcgccgcatggaacaaaaccagaaatgaggaagcagaaaaaatcaaatggagattttcaacagaaagtgcaaggataaaacttcagcaactttatccactatttgaatag

SEQ ID NO: 10940 - protein, 186 aa, Unknown
  Obtained from environmental sample
  misc_feature (1)..(186): Xaa is any amino acid
MKFPRQLIGEKRIPVPAGRGKIARYDTEYKRNGTCEIFMFVAPLNNWRRAEVMEHRTSLDWAQQIKKLITVDFPHVKKIVLVMDNLNTHTIGSLYKAFPPEEARQYRKILEIHLTPKHGSWLNMAEIEINVLVNHGLSKRVPSMQQMEKEVAAWNKTRNEEAEKIKWRFSTESARIKLQQLYPLFE

SEQ ID NO: 10941 - DNA, 822 bp, Unknown
  Obtained from environmental sample
  misc_feature (1)..(822): n is a, c, g, or t
atgacagatcggccgagggttttttcgcaaaagaacatagacgcgatgcttggtgaaaagcggcatatcggctttgtcatcgccctccctttcaccagcaagtttgcgaaaggtttggtaaagggcgaaaaaaaagacattgatacattgagcaacacaattgtaaacggcaaggagtcgctgcgcgcggttacgaaaacatgcggttggaacgacgggcacaatgtctatgcccacgtgtactacaacgcgcgcaaagcgatggggatacgggaggatttatacgcccatgtggccatgttaagggaacaggcggtgaagcagccggaaaagtgtttgggcagcagggattgccagaaataccttgacataaggcggtctgaaggagcggacggcggatacacggtaaagctgcgggaagaggccgtggaggcggaattagagaccgccggatggatggtggttataagcgactgtgtcaaggatgcgaaagaggctataaaggcataccgtgaaaaagacgttgtcgagaaagggtttctgcggctgaaaaacagccttgacttagggaggctacgggtgcatagcgaaaccgggatgcaaaacaaagtgtttgtagggttcatttcgctaatcctgttgtctgcgattcataaagttatggctgataagaagctgtacgacaaaatgacgatgagaaaattgatattgaccctttcaaggctcaagctgcagatagtgaaaggcgttcgcatattatttccggtaactaaggaacagcgctgtatttatgaagcctttggcattcaagaacctgtgtag

SEQ ID NO: 10942 - protein, 273 aa, Unknown
  Obtained from environmental sample
  misc_feature (1)..(273): Xaa is any amino acid
MTDRPRVFSQKNIDAMLGEKRHIGFVIALPFTSKFAKGLVKGEKKDIDTLSNTIVNGKESLRAVTKTCGWNDGHNVYAHVYYNARKAMGIREDLYAHVAMLREQAVKQPEKCLGSRDCQKYLDIRRSEGADGGYTVKLREEAVEAELETAGWMVVISDCVKDAKEAIKAYREKDVVEKGFLRLKNSLDLGRLRVHSETGMQNKVFVGFISLILLSAIHKVMADKKLYDKMTMRKLILTLSRLKLQIVKGVRILFPVTKEQRCIYEAFGIQEPV

SEQ ID NO: 10943 - DNA, 441 bp, Unknown
  Obtained from environmental sample
  misc_feature (1)..(441): n is a, c, g, or t
atgattactgatataaatagccgatacaaangagaaacagggcagaatcgtaaccttatcgaaggtttggggcttcaatctcatcacagtgtcaaatggttcgatgaaaacagggtgcgaatatctttggaaaaactttccgccttaaacattgaattatcaataagcgaattggacgtaaatttctccgattattatgaaggaaagggaaaggacattatcatgtccgaatatgattccgcgttacaagcaatgatatattcccggctttttaaaatataccgggaatacgccgattacatatcgcgggtaaccatgtggggcgttgacgatcacaacagttggctttccgcgggaactccctgtctttttgatcgctacttaaaccccaaaaaagcctataacgcggtatttgctcctgaaaaattacaaacgaaataa

SEQ ID NO: 10944 - protein, 146 aa, Unknown
  Obtained from environmental sample
  DOMAIN (1)...(141): Glycosyl hydrolase family 10
  misc_feature (1)..(146): Xaa is any amino acid
MITDINSRYKXETGQNRNLIEGLGLQSHHSVKWFDENRVRISLEKLSALNIELSISELDVNFSDYYEGKGKDIIMSEYDSALQAMIYSRLFKIYREYADYISRVTMWGVDDHNSWLSAGTPCLFDRYLNPKKAYNAVFAPEKLQTK

SEQ ID NO: 10945 - DNA, 447 bp, Unknown
  Obtained from environmental sample
  misc_feature (1)..(447): n is a, c, g, or t
ttgcatgatatgggaaaaatcgcgatacctgacagtattcttcttaaaaaaggaaaattggatgaggatgagttgggtgttatgaaaagccatagcgcaaaaggagcggaatccctggaaaaatcaatgcagtttgcaaaggataacgactttttgaaaaacgcgttcataatggctaaacatcatcatgaaaaatggaacggctccggctatcctgacggtaaaaaagaaaacgatatacctcttcttgcccgtgtaatcgccattgccgatgtttatgacgcgttgcgctccgaacgtacatataaagagccgtttagcagggaaaaagcaaaagcaatcatattggaagaaaacggacgccaattcgaccccgaactggttgatgttttccttgcggtagagccgctatttgacgaattttgtaaatctacccaagatagttaa

SEQ ID NO: 10946 - protein, 148 aa, Unknown
  Obtained from environmental sample
  DOMAIN (1)...(96): HD domain
  misc_feature (1)..(148): Xaa is any amino acid
MHDMGKIAIPDSILLKKGKLDEDELGVMKSHSAKGAESLEKSMQFAKDNDFLKNAFIMAKHHHEKWNGSGYPDGKKENDIPLLARVIAIADVYDALRSERTYKEPFSREKAKAIILEENGRQFDPELVDVFLAVEPLFDEFCKSTQDS

SEQ ID NO: 10947 - DNA, 675 bp, Unknown
  Obtained from environmental sample
  misc_feature (1)..(675): n is a, c, g, or t
atgaaaaccgaaggtttgccagtgcgtaaaaaagagtatcaaaaattgagtaacggaaatacggtgcttggaaccgttgtaagtacttttgcccgtgtcccatcggtacgggtgattgtaatttccatccccgaaaacgacgaaaatgccgcccacgccgcgttacctgaaaatttattaacaagtgaaaccccaaaaatcctttttgtcacaggcggcagtacgcgccgccattcggtctttaacgccctccgtctccttacggactttgctcccgattacgcgctaatccatgacggcgcaagaccgtgggtcagcacatcgcttatagaaaatattatcacggcggtaaaaaaacacaacgccgtcatcccccttctgccgctgaccgataccccaaaggagtgcgagtcttcttgggaaacgcaaacagataacgacgcgtccgcggtgtttattaaaaatcatctgaagcgaaaaaataccggaatcgcgcaaacgcctcaggcatttaaattcccagaaatccttgaggcgcataaaaaggcggcaaacgtagaaactgaagaatttacagatgacgctgaaatatggggcagattctgcggccaagtggccgttattcgcggagagccggagaatagaaagataacctttccggaggatttaatttga

SEQ ID NO: 10948 - protein, 224 aa, Unknown
  Obtained from environmental sample
  DOMAIN (3)...(223): Uncharacterized protein family UPF0007
  misc_feature (1)..(224): Xaa is any amino acid
MKTEGLPVRKKEYQKLSNGNTVLGTVVSTFARVPSVRVIVISIPENDENAAHAALPENLLTSETPKILFVTGGSTRRHSVFNALRLLTDFAPDYALIHDGARPWVSTSLIENIITAVKKHNAVIPLLPLTDTPKECESSWETQTDNDASAVFIKNHLKRKNTGIAQTPQAFKFPEILEAHKKAANVETEEFTDDAEIWGRFCGQVAVIRGEPENRKITFPEDLI

SEQ ID NO: 10949 - DNA, 693 bp, Unknown
  Obtained from environmental sample
  misc_feature (1)..(693): n is a, c, g, or t
atgaaacaaaataataaaaaacagttaatcaattcttcttctgaaagcgagaaactgttttttgcggatatttcaaggatattaaatgaaggtcgtcaaaaggctaatgcggctgtcaattatgctatggtggaaacatattggaatattggcaggcgaattgtagatcaggaacaacagggaaaagaacgtgcaaattatggcgatcaactaattgtaaaattatctcgttacttaagtgatacatttggcagaggcttttcagaggcaaatttgaagaattttaggcaattctatcttacatggccgaacgatgagattcgctacacactgtgtagcgaattgagttggtcgcatatcaggcttattatgcgtattgatagtgaaaaagcccgtaaatattaccttgatgaggcgcgagcgcaggggtggagtgtaagggttttggagcggaatatccatacaaattattttgagaggcttatttcttcacaaaacgctatttccacggcagataaacaggaaaataagattgtaactgagaattttattaaagacccttatgttcttgaatttcttgatttatcggaaaatcccactcctaaagaaaccagtctgaatctgccattatcaatcatttacaggattttctgcttgaaatgggcagaggttttcttctcgtgccgattctga

SEQ ID NO: 10950 - protein, 230 aa, Unknown
  Obtained from environmental sample
  DOMAIN (20)...(216): Protein of unknown function (DUF1016)
  misc_feature (1)..(230): Xaa is any amino acid
MKQNNKKQLINSSSESEKLFFADISRILNEGRQKANAAVNYAMVETYWNIGRRIVDQEQQGKERANYGDQLIVKLSRYLSDTFGRGFSEANLKNFRQFYLTWPNDEIRYTLCSELSWSHIRLIMRIDSEKARKYYLDEARAQGWSVRVLERNIHTNYFERLISSQNAISTADKQENKIVTENFIKDPYVLEFLDLSENPTPKETSLNLPLSIIYRIFCLKWAEVFFSCRF

SEQ ID NO: 10951 - DNA, 393 bp, Unknown
  Obtained from environmental sample
  misc_feature (1)..(393): n is a, c, g, or t
atggaaaaccctgcaaggtattgcccgcgccttgtgatgtcagggcttttttatgagaaagacgaaagcgacgatacggtggtccagccggatatttttgttgtctgcgataaaaacaagctcgggcccgaaagctgccgtggcgctcctgatctggttgtcgagatcctttccccttcaaataccgcaatggaaatggagcgaaaactcaaattgtaccaggaggcaggagttcgggagtactgggtcgtggatcctaaaaacaacggccttacggtccaccgtttccagaaagacatgatcgtgacccatacctacggaagcgccggtactgttcaggtggcgatttttcctgatatctccattaacctggagcaggtcttcgcggagtaa

SEQ ID NO: 10952 - protein, 130 aa, Unknown
  Obtained from environmental sample
  DOMAIN (4)...(95): Protein of unknown function (DUF820)
  misc_feature (1)..(130): Xaa is any amino acid
MENPARYCPRLVMSGLFYEKDESDDTVVQPDIFVVCDKNKLGPESCRGAPDLVVEILSPSNTAMEMERKLKLYQEAGVREYWVVDPKNNGLTVHRFQKDMIVTHTYGSAGTVQVAIFPDISINLEQVFAE

SEQ ID NO: 10953 - DNA, 501 bp, Unknown
  Obtained from environmental sample
  misc_feature (1)..(501): n is a, c, g, or t
gtggtaacgttgacgcgtgaaagcaaaagacggtcttgcgtggaagcccgacgccttgggcttgaccctccggcagacntggggattcctgaactctatgacctcatctttatccattgtgtggaaccttcgcttccccggaacaggcccgtggctttgatggattaccctgcctttgtcccctgtctggcaaaaaaattaccccaaggcagaaccgtggaacgctgggagctttacgttcggggcgtagaattggccaactgctattctgaggaaactgaccctgggcaagtacgggttttttttgaagctgaaaaagcggaaaaagaaaagagcgccctggtacgccaccgcgtggatgatgattactggaaactcttccggggggattcatttcccccttgttccggcgttgccctggggcttgaccgcctcatcatggttcttaccggccgttcttcatcctcaatagatggggtgcttcccttccctatggagtaa

SEQ ID NO: 10954 - protein, 166 aa, Unknown
  Obtained from environmental sample
  DOMAIN (1)...(166): tRNA synthetases class II (D, K and N)
  misc_feature (1)..(166): Xaa is any amino acid
MVTLTRESKRRSCVEARRLGLDPPADXGIPELYDLIFIHCVEPSLPRNRPVALMDYPAFVPCLAKKLPQGRTVERWELYVRGVELANCYSEETDPGQVRVFFEAEKAEKEKSALVRHRVDDDYWKLFRGDSFPPCSGVALGLDRLIMVLTGRSSSSIDGVLPFPME

SEQ ID NO: 10955 - DNA, 873 bp, Unknown
  Obtained from environmental sample
  misc_feature (1)..(873): n is a, c, g, or t
gtgataggcgccatcatgccggatcatctggaccgctatggaaccatggacgcttatgtggcagacaaacggatcatttatcagggccaggatgaaggagatgttacggtcacgggggatgattcctggggacagagtttccgcgatgaaagccggggccgcgccatggtctacagcgacactccagatccttcaggggactggagtggctggggttggggttggattgaggagaactcaggccgcggtcttgttcggctccggggcgccgaacttgttgaagtcgttccgaaggcgctcctcgttcccgggaggcaccagaagaagaacctccttgctgcggccctggcccttatagatcttgggcttccggcggattttatcaaaaacagccttgggagttttcccggaattgaacaccgcctggaattcttccatgagagcaggggcatccgtttttacaatgacaccgccgcgaccatccccgaggcagcggcgatggcgataagggcctttgagtttccgcctatactgatatgcgggggtactgacaaaaacttggatttttctcctttggtacgcgccgctcaggaagccaaggcgctcatcctccttgaaggcagcggaagcaagaaactaaccctgttgttggatgcggccggtatagcctatagcggcccctttgattctcttgataagggcttgcagaacggcctggaaaaagccgctcccggagacgtagtggttctctccccaggctgcaccagttttggaatgtttctcaatgaattcgacagaagtaacaaatggaaagaagcggttcgccgcctggttcccgtgattggggacacacattggacctggaactgctga

SEQ ID NO: 10956 - protein, 290 aa, Unknown
  Obtained from environmental sample
  DOMAIN (138)...(215): Mur ligase family, glutamate ligase domain
  misc_feature (1)..(290): Xaa is any amino acid
MIGAIMPDHLDRYGTMDAYVADKRIIYQGQDEGDVTVTGDDSWGQSFRDESRGRAMVYSDTPDPSGDWSGWGWGWIEENSGRGLVRLRGAELVEVVPKALLVPGRHQKKNLLAAALALIDLGLPADFIKNSLGSFPGIEHRLEFFHESRGIRFYNDTAATIPEAAAMAIRAFEFPPILICGGTDKNLDFSPLVRAAQEAKALILLEGSGSKKLTLLLDAAGIAYSGPFDSLDKGLQNGLEKAAPGDVVVLSPGCTSFGMFLNEFDRSNKWKEAVRRLVPVIGDTHWTWNC

SEQ ID NO: 10957 - DNA, 762 bp, Unknown
  Obtained from environmental sample
  misc_feature (1)..(762): n is a, c, g, or t
atgacttccgaacaggtaagcaaactttttgatgaatatacgcgttttaatatggaagctaaccgtacaaccgaaggcgccggattaggaatgaccattacgcgaaacttagtagatttaatgtatggaaaaataagtgttaaaagcgtagttgacgaaggtacatcaataacagtcagattgccccaaaaaacggacggtataggtattagcggcattatcggcagagaaatggcggataatctgcgtcaatttaagcttaataactctatacaatcaaagaaagtgcaaattacccgcgattatatgccttatggatgcatacttattgtagacgacgtagaaaccaatttatatgtcgcaaaaggccttatgaccccttatggacttaagatcgatcttgcgacaagcggatttgaagcaattgaaaaaattaaagagggcaataattacgatattgtatttatggatcacatgatgcctaagatggacggcatagaaacaacaaaacaactgcgaaaaacaggatatacaaaaccgatagtcgccttgacagctaacgctcttgcgggacatgctgaaatgttcttaagaaacggttttgatgattttatttccaaaccaatagatatacgccagttaaataccgttcttaacaagctgattcgcgataaacaacctcctgaagtactggaagcagcacataaggaaaaagcagaattggataaaaaacaggaacccggtaaaggagttcacaagtga

SEQ ID NO: 10958 - protein, 253 aa, Unknown
  Obtained from environmental sample
  DOMAIN (106)...(219): Response regulator receiver domain
  misc_feature (1)..(253): Xaa is any amino acid
MTSEQVSKLFDEYTRFNMEANRTTEGAGLGMTITRNLVDLMYGKISVKSVVDEGTSITVRLPQKTDGIGISGIIGREMADNLRQFKLNNSIQSKKVQITRDYMPYGCILIVDDVETNLYVAKGLMTPYGLKIDLATSGFEAIEKIKEGNNYDIVFMDHMMPKMDGIETTKQLRKTGYTKPIVALTANALAGHAEMFLRNGFDDFISKPIDIRQLNTVLNKLIRDKQPPEVLEAAHKEKAELDKKQEPGKGVHK

SEQ ID NO: 10959 - DNA, 558 bp, Unknown
  Obtained from environmental sample
  misc_feature (1)..(558): n is a, c, g, or t
atgagtaaagtaaaaatgataataacagatttggattttagtctgttaaatagcgagcgcctaatatctgaatatacaaaaaatgtcttaaaaaaatgcaagaagtatggcattattattgtatttgcaacaacaagaccatacagaaacacacgtactttttacaattcaataaaacctgatgcagtaatttgccattgtggaggtgttgtatatgtaaatgataaaataatttggcaaagtggtataaattctattgttgctcaaagggtacttaaagatattgttagcgattatccaaatgcaggtattggtgctgaaagtgaagatgaaatatatactaattttgacatatcaatttattgggataatgtaccttataaaagtattgattttgaaaatattcccactgaaaatatttataaaataattgttgaattgaaaacaattgataaagaaaaactaatattaaaactcccaaatgaattatgtttcgatatattggaagataatattggattnataaaaatagaaatgatacaaaatggaacggaataa

SEQ ID NO: 10960 - protein, 185 aa, Unknown
  Obtained from environmental sample
  DOMAIN (7)...(185): haloacid dehalogenase-like hydrolase
  misc_feature (1)..(185): Xaa is any amino acid
MSKVKMIITDLDFSLLNSERLISEYTKNVLKKCKKYGIIIVFATTRPYRNTRTFYNSIKPDAVICHCGGVVYVNDKIIWQSGINSIVAQRVLKDIVSDYPNAGIGAESEDEIYTNFDISIYWDNVPYKSIDFENIPTENIYKIIVELKTIDKEKLILKLPNELCFDILEDNIGXIKIEMIQNGTE

SEQ ID NO: 10961 - DNA, 630 bp, Unknown
  Obtained from environmental sample
  misc_feature (1)..(630): n is a, c, g, or t
atggattttgattattttctgcgctacttggcggctgaggtagccatcaaccattgggatggctccagaacatggtacagcgatgcaaagaaagaggagtggtttaacaaccataactattatttttacgaagaggaaaacattggcgggaaaatttggattatcccgtgggacatggatcaaacattttggccttgggattataaaattactcttgattccaaactttcaaaaaccatagatcccatctttgaaagagcggtaccgaattggaacgtgcctgtgcctgaggcagactgcaaaccgatttgggttacgcgtcttgataatgcttatatcactccgccaaactgcgacaaactgttcaaacttacggcttccgtttacggggaccgctacgcgcaactcggcaaacagtttctaaatgaccaataccaaaaccaacggttgattgccaagatagacaaatacagcgagttgattaaggaatccgtaaagaacgatctaaatatcttggacgataagggcactacttggattaaggataattggaagacgtttgtcaacgaattgaaagagtctttgcctgatcgtgccgctatgttaaaaaagaatttagaaacccagtaa

SEQ ID NO: 10962 - protein, 209 aa, Unknown
  Obtained from environmental sample
  misc_feature (1)..(209): Xaa is any amino acid
MDFDYFLRYLAAEVAINHWDGSRTWYSDAKKEEWFNNHNYYFYEEENIGGKIWIIPWDMDQTFWPWDYKITLDSKLSKTIDPIFERAVPNWNVPVPEADCKPIWVTRLDNAYITPPNCDKLFKLTASVYGDRYAQLGKQFLNDQYQNQRLIAKIDKYSELIKESVKNDLNILDDKGTTWIKDNWKTFVNELKESLPDRAAMLKKNLETQ

SEQ ID NO: 10963 - DNA, 624 bp, Unknown
  Obtained from environmental sample
  misc_feature (1)..(624): n is a, c, g, or t
atggccctattgtgtttggacagcgaatataggctggttttgtggctaaccaactccgcttggcgctttcgcaaagacggtagcccgccgccgctgaacaatagcacggaggccgtgacggtgccggagaccatgagggccatccatattgtgcttgattttaggagccaagctaggttcatgctatttcagcctccgcccaaacgcatcacggcctgcgaatttggcggccttgccgagttcccattcaatttgcagcaggcggttgtacttggccacccggtcagtcctgcacggggcaccagtctttatctggcctgcgccagtggcaacgaccaagtcggcgatgaatgtgtcttccgtttcgccgctgcggtggctgataatcgccttgtaaccagctttgtgagccatgtccacagccctaaacgtctcggtcacggtgcctatctggttcagcttgatgaggattgcgtttgccacgccttcggaaatgcccttggccagtatcttggtgttggtaacgaaaaggtcgtcccctaccagctgcgtggtcttgttcaatttttcggtcagtacagaccagttgggccagtcgctctcatcgcacccgtcttcgattga

SEQ ID NO: 10964 - protein, 207 aa, Unknown
  Obtained from environmental sample
  misc_feature (1)..(207): Xaa is any amino acid
MALLCLDSEYRLVLWLTNSAWRFRKDGSPPPLNNSTEAVTVPETMRAIHIVLDFRSQARFMLFQPPPKRITACEFGGLAEFPFNLQQAVVLGHPVSPARGTSLYLACASGNDQVGDECVFRFAAAVADNRLVTSFVSHVHSPKRLGHGAYLVQLDEDCVCHAFGNALGQYLGVGNEKVVPYQLRGLVQFFGQYRPVGPVALIAPVFD

SEQ ID NO: 10965 - DNA, 381 bp, Unknown
  Obtained from environmental sample
  misc_feature (1)..(381): n is a, c, g, or t
ttgaacaagaccacgcagctggtaggggacgaccttttcgttaccaacaccaagatactggccaagggcatttccgaaggcgtggcaaacgcaatcctcatcaagctgaaccagataggcaccgtgaccgagacgtttagggctgtggacatggctcacaaagctggttacaaggcgattatcagccaccgcagcggcgaaacggaagacacattcatcgccgacttggtcgttgccactggcgcaggccagataaagactggtgccccgtgcaggactgaccgggtggccaagtacaaccgcctgctgcaaattgaatgggaactcggcaaggccgccaaattcgcaggccgtgatgcgtttgggcggaggctgaaatag

SEQ ID NO: 10966 - protein, 126 aa, Unknown
  Obtained from environmental sample
  DOMAIN (1)...(124): Enolase, C-terminal TIM barrel domain
  misc_feature (1)..(126): Xaa is any amino acid
MNKTTQLVGDDLFVTNTKILAKGISEGVANAILIKLNQIGTVTETFRAVDMAHKAGYKAIISHRSGETEDTFIADLVVATGAGQIKTGAPCRTDRVAKYNRLLQIEWELGKAAKFAGRDAFGRRLK

SEQ ID NO: 10967 - DNA, 474 bp, Unknown
  Obtained from environmental sample
  misc_feature (1)..(474): n is a, c, g, or t
ttggcacgaggcggggtagccctgcttatagaagtgttgacggacaacaaaaaccgggccgccgctgacgtgcggaatatccttacccgctcgggggctcagcttgccacagccggatcggtgtccagactcttcaagcgccaggggatcatcactttggatggggagaagtacaccgaagatcaggtgatggaagtggccatcgagggaggagccgaggacgtggccctttcagacggcgtcattgaggtagcgacggcgcctgaggattttgaaaccgtggtgaacgctttgaccgaaaaaagttttgaaaccatgagcgcggaagtcagcatggttccggacgcctacgtggatctggacaatgacgccactgccaaagtactgaaacttatcgacaagctggaagaaaacgacgacgttcaaaacgtctactccaacatcaatatccccgacgggtttgagtctgagtga

SEQ ID NO: 10968 - protein, 157 aa, Unknown
  Obtained from environmental sample
  DOMAIN (1)...(149): Domain of unknown function DUF28
  misc_feature (1)..(157): Xaa is any amino acid
MARGGVALLIEVLTDNKNRAAADVRNILTRSGAQLATAGSVSRLFKRQGIITLDGEKYTEDQVMEVAIEGGAEDVALSDGVIEVATAPEDFETVVNALTEKSFETMSAEVSMVPDAYVDLDNDATAKVLKLIDKLEENDDVQNVYSNINIPDGFESE

SEQ ID NO: 10969 - DNA, 471 bp, Unknown
  Obtained from environmental sample
  misc_feature (1)..(471): n is a, c, g, or t
ttgagtctgagtgatagcgatagagtcagaataatcggtgttgaccccggcttggcatctacaggctggggtgtggtggaattttcaaagaaccatctgctctacattgcccacggctgtattgaaactgcagcgaacgatcctaaaggcgaacgtttacacatcattcatagttcttttatgaaagtactaaaaacctataaaccccgcgaagccgccattgaaaacctttattttggcaagaacatttccagcgccatgtctgtcgccgaagcccggggcgttctgcttttggcgctgacaagccatgggcttcccgtcagggaattgactcccaacgcgataaaaaaggcggtggttggggtaaccagagccgataaaagccagattcaggaaatggtgcgtcttattttgggattaaggaaataccaggtcggatcacgcggccgacgctttgggcgccgcgattag

SEQ ID NO: 10970 - protein, 156 aa, Unknown
  Obtained from environmental sample
  DOMAIN (11)...(144): Crossover junction endodeoxyribonuclease RuvC
  misc_feature (1)..(156): Xaa is any amino acid
MSLSDSDRVRIIGVDPGLASTGWGVVEFSKNHLLYIAHGCIETAANDPKGERLHIIHSSFMKVLKTYKPREAAIENLYFGKNISSAMSVAEARGVLLLALTSHGLPVRELTPNAIKKAVVGVTRADKSQIQEMVRLILGLRKYQVGSRGRRFGRRD

SEQ ID NO: 10971 - DNA, 591 bp, Unknown
  Obtained from environmental sample
  misc_feature (1)..(591): n is a, c, g, or t
atggccggcgcgggtgaggcgctacggcagggtgctgtacggcgcgggcctgcggatgcagggggcattggcagagtgcgtccagggcggcgggcccgaccaactgctgctgctggagcacaaccccgtctatacgctgggcagaaacgctaccagggccgacatacacgtccccgacgcatttctggcggagagcggcatagaagtccaccagatagaccggggcggccaggtcacgtaccacggcccgggtcagatagtggcctaccccatctgcaaccttcgcggccaaagcgtctcgaacttggtcaacgacttggagcaggcgatgatcgagaccgccaagggcttcggcgtccatgccgaaaggctggagggccaccccggtgtatgggtcgagacagcgcggggctgggaaaagctgggggccataggtctgcacctgaaaaaatgggtctcgacgcacgggctggccttcaacctggcgcccgagatggagcattaccggtggatcaccccctgcggcatagcggacaagggcgtgtgcagcctgcggacgctccttggggacggctgcccatcctgggttga

SEQ ID NO: 10972 - protein, 196 aa, Unknown
  Obtained from environmental sample
  misc_feature (1)..(196): Xaa is any amino acid
MAGAGEALRQGAVRRGPADAGGIGRVRPGRRARPTAAAGAQPRLYAGQKRYQGRHTRPRRISGGERHRSPPDRPGRPGHVPRPGSDSGLPHLQPSRPKRLELGQRLGAGDDRDRQGLRRPCRKAGGPPRCMGRDSAGLGKAGGHRSAPEKMGLDARAGLQPGARDGALPVDHPLRHSGQGRVQPADAPWGRLPILG

SEQ ID NO: 10973 - DNA, 765 bp, Unknown
  Obtained from environmental sample
  misc_feature (1)..(765): n is a, c, g, or t
atgaaaatagcattaatcggttatggaaaaatgggcagaataatagaacaaattgcactcgcgcaagggcataccattgccgcgattgtcgagccttttgcggaggacactcccgccggaattccggcaagcaaatctatcgctgacgcaaaccttgattcagtggacgctgcgattgaattttcagtaccgataaccgcctgcgctaatatcaccgcccttgcgcaaagaaaaattcccacggttgtcggaactaccggctggcttgataaattggacgaagtacgcaagtcggttgaatccgcaaacagctccctgatttggtcgtcaaacttttccatcggggtaaatcttttttaccgtatcgcatggcgcgcggcggaaatttttaacaactttaacgagtacgacgtgggcggctttgaagtacaccacaataaaaaactggacagcccttcaggaaccgcaaaaactttggcggaaggcgtcctctctaaaatagaaagaaaaaagaaaattgtttgggaaacactggaccgtaaaccggcggcggacgaacttcactttccaagtctgcgggtgggcgctgttcccggcactcacagcttgttttttgattcgcaagccgatacaatcgaaattacccacactgcccgcagccgcgaagggttcgcgtcaggcgcggtacttgccgcccaatggcttacggcgaaagagcggcgcgggatcttcacaattgatgatatgctaaaagaatatgtatga

SEQ ID NO: 10974 - protein, 254 aa, Unknown
  Obtained from environmental sample
  DOMAIN (1)...(112): Dihydrodipicolinate reductase, N-terminus
  misc_feature (1)..(254): Xaa is any amino acid
MKIALIGYGKMGRIIEQIALAQGHTIAAIVEPFAEDTPAGIPASKSIADANLDSVDAAIEFSVPITACANITALAQRKIPTVVGTTGWLDKLDEVRKSVESANSSLIWSSNFSIGVNLFYRIAWRAAEIFNNFNEYDVGGFEVHHNKKLDSPSGTAKTLAEGVLSKIERKKKIVWETLDRKPAADELHFPSLRVGAVPGTHSLFFDSQADTIEITHTARSREGFASGAVLAAQWLTAKERRGIFTIDDMLKEYV

SEQ ID NO: 10975 - DNA, 657 bp, Unknown
  Obtained from environmental sample
  misc_feature (1)..(657): n is a, c, g, or t
atgaaagaggattaccgtgaatggctcaagccggaatacggaaaaaagagggcttccgaaattagtgaaagagcatgtatacccgggcctttgcatcccccaaaaggaggcacggtttatctcgccaccgccgacggtgatggaaacatggtctcgtacatacaaagtaactacatgggttttggcagcggtgttgtaatccacggaacaggtatttctcttcaaaaccgtggagcggacttctctcttgatccccgcgcgcctaacgcgctggctccgggtaaaaagagctaccacactatcatccccggttttcttaccaaagacgggaaggccgttggcccctttggtgtcatgggtggatatatgcagccccagggtcatgtccaggtaataaccaatatgctggactttggccttaacccccaacaggctctggacgctccccgctggcagtggatcgatggccggaaaatcaacgtggaagcgggctttaatcccacaattgcgcgtgtccttgcaaaccgcgggcacgagataagcgtttcccttcaaacatcaagcttcggcagggggcaatgcatcgtccggctggataacggcgttctggtgggcgctactgaagggcgcacggatggcagtattgcgtgtgtgtga

SEQ ID NO: 10976 - protein, 218 aa, Unknown
  Obtained from environmental sample
  DOMAIN (3)...(213): Gamma-glutamyltranspeptidase
  misc_feature (1)..(218): Xaa is any amino acid
MKEDYREWLKPEYGKKRASEISERACIPGPLHPPKGGTVYLATADGDGNMVSYIQSNYMGFGSGVVIHGTGISLQNRGADFSLDPRAPNALAPGKKSYHTIIPGFLTKDGKAVGPFGVMGGYMQPQGHVQVITNMLDFGLNPQQALDAPRWQWIDGRKINVEAGFNPTIARVLANRGHEISVSLQTSSFGRGQCIVRLDNGVLVGATEGRTDGSIACV

SEQ ID NO: 10977 - DNA, 387 bp, Unknown
  Obtained from environmental sample
  misc_feature (1)..(387): n is a, c, g, or t
atgatcagattcggccgaggtcatgtcgtggatgagggtatttcattaagaatggaaaatattcaattttacgccgattcaaataaaatgcttcccggagaattggaaaaacttgaaagaatcgccgcaatcttgaatcgctatccggagagagacattgtaatcagcggacataccgctttggcgaggggaacaagagaggagcatcttgaactttcacaggaacgggcgaaagcggtagcggattatttgcttgaaaaaaaagtgcgtacggcggatcgcatggtaattcgcggatacggcgcggataagccgattgcggataacaaaaccgaagaaggaatgcgaaagaacagaagggtagagattactattctggaaaattaa

SEQ ID NO: 10978 - protein, 128 aa, Unknown
  Obtained from environmental sample
  DOMAIN (22)...(119): OmpA family
  misc_feature (1)..(128): Xaa is any amino acid
MIRFGRGHVVDEGISLRMENIQFYADSNKMLPGELEKLERIAAILNRYPERDIVISGHTALARGTREEHLELSQERAKAVADYLLEKKVRTADRMVIRGYGADKPIADNKTEEGMRKNRRVEITILEN

SEQ ID NO: 10979 - DNA, 519 bp, Unknown
  Obtained from environmental sample
  misc_feature (1)..(519): n is a, c, g, or t
atgttaagagaaagccttttaaggttaaatcgcgcaatggacaggtttatccctgtcattactcccttgtccgtggcgcttggtttgctttttcccggcttttttctgtccctgcgcccctatgtgatactgctgttcagtattatgactttttcaggcgcgttaaaacttaccgcagttgagttaggctccactgtaaaaagcccccttcctattttgcttttctttttttcaacccatgtattaatgccgttagccgctctttttttatcatcgcaatttattaaagacacagatataatagcggggtttgttctcctttttgccggtcctacggcggtttccggttttatttggtcggcaatttataaaggagacaaggcattagggctttctttaattttacttgatactttgcttgccccgcttgtagttccgggaacgcttttcattcttatggggacaaaagtagcgatggatatgagcgggatagcggtttccttatttttatggttgtag

SEQ ID NO: 10980 - protein, 172 aa, Unknown
  Obtained from environmental sample
  DOMAIN (43)...(172): Sodium Bile acid symporter family
  misc_feature (1)..(172): Xaa is any amino acid
MLRESLLRLNRAMDRFIPVITPLSVALGLLFPGFFLSLRPYVILLFSIMTFSGALKLTAVELGSTVKSPLPILLFFFSTHVLMPLAALFLSSQFIKDTDIIAGFVLLFAGPTAVSGFIWSAIYKGDKALGLSLILLDTLLAPLVVPGTLFILMGTKVAMDMSGIAVSLFLWL

SEQ ID NO: 10981 - DNA, 399 bp, Unknown
  Obtained from environmental sample
  misc_feature (1)..(399): n is a, c, g, or t
atggccgagaaccactctcgttccgtccaacgaaacgtgattcgcgggctgcactttcagaagccgccgttcgagcagagtaaactggtgcgcgtgattcgcggttcaatatttgacgtggcggttgacatccgtcgcgaatcaacaacctatgggcagtggcttgggtttgagttaagcgagcgcaacttcgatatgctcttcattccgcgcggcttcgcccacggcttctgtacgcttgaggaggggacggaggtcgtctacaaggtggacaacgtatattcccgcgaacacgacgccgggattatttggaacgatccgtctatcggggtcgactggccgctgaacggagctgagcctatattgtcggacaaggacaaggcgctgccgcgtctttga

SEQ ID NO: 10982 - protein, 132 aa, Unknown
  Obtained from environmental sample
  DOMAIN (1)...(128): dTDP-4-dehydrorhamnose 3,5-epimerase
  misc_feature (1)..(132): Xaa is any amino acid
MAENHSRSVQRNVIRGLHFQKPPFEQSKLVRVIRGSIFDVAVDIRRESTTYGQWLGFELSERNFDMLFIPRGFAHGFCTLEEGTEVVYKVDNVYSREHDAGIIWNDPSIGVDWPLNGAEPILSDKDKALPRL

SEQ ID NO: 10983 - DNA, 540 bp, Unknown
  Obtained from environmental sample
  misc_feature (1)..(540): n is a, c, g, or t
atgtcgccgttcaaccgcaaacagtgcctatacgatcttaaaaaattgggctatcaggtagggtgcggcttcatggtcggctcgccgggtcaaacgccgaaccatattgtagacgacctgttgttcataaaagatctgcgtccgcacatggtcggcataggccccttcatcccgcactccgacacgccgctcggcggggaaaagcaaggcgatctgcgtctgacgctgaaccttttgtcaatcctgcgactgatgcaacccagtctgttaatccccgcgacgaccgctctggggacgatcgacccaaccgggcgtgaacgcggaattctcgcaggcgcgaacgtggtcatgccgaacctgtcgcccgtggaggtgcgcggcaagtatttgctctatgataataaaatctgcaccggcgacgaggctgccgagtgcgtgaactgtatgcggatgagaattagaagcatagggtacgaacttgcggtgtcgcggggggacttcaaagacgcggcagcgccttgtccttgtccgacaatatag

SEQ ID NO: 10984 - protein, 179 aa, Unknown
  Obtained from environmental sample
  misc_feature (1)..(179): Xaa is any amino acid
MSPFNRKQCLYDLKKLGYQVGCGFMVGSPGQTPNHIVDDLLFIKDLRPHMVGIGPFIPHSDTPLGGEKQGDLRLTLNLLSILRLMQPSLLIPATTALGTIDPTGRERGILAGANVVMPNLSPVEVRGKYLLYDNKICTGDEAAECVNCMRMRIRSIGYELAVSRGDFKDAAAPCPCPTI

SEQ ID NO: 10985 - DNA, 660 bp, Unknown
  Obtained from environmental sample
  misc_feature (1)..(660): n is a, c, g, or t
ttggaaggcggggcgctgtttatcagccgtaataattcggttttctcgtggatggaaagcgtttttaatgattgcgggttctatgacgtaacccaaatatcattggaaaaaaaagctctcgcgttaaaactgaatgaaattaaaccgaaatatgtttttatacacagcgaattttattcgtgtgtaacgccttacatgataggctgtcatctcttaaaatgtcctgatttaaatatcatcgttgtaaattttggatattttcataacgacgatgcggagcattttatttttcatggggctgtttcatatctcgatataaattacggcgttgaagaatttaagagaggtttgaaaaaaattagaaatggtgatggttattattccccgggcgttgaacggaaaatcagcgttttagatgacaagccggaatataaaaaaggaataactaaacgtcaatggcaggttttattgtttatctgtaaggggtataataaaaaaaagattatcgctaatcttaatattaaaaaacggacggtagatactcatatttataatttaaaaaaattattttatgcaagtaacatggtggatctgtcaaataaagccgtctgtatgggttgggtcaggaaagaagaattaggttttaaaataccagattaa

SEQ ID NO: 10986 - protein, 219 aa, Unknown
  Obtained from environmental sample
  DOMAIN (145)...(202): Bacterial regulatory proteins, luxR family
  misc_feature (1)..(219): Xaa is any amino acid
MEGGALFISRNNSVFSWMESVFNDCGFYDVTQISLEKKALALKLNEIKPKYVFIHSEFYSCVTPYMIGCHLLKCPDLNIIVVNFGYFHNDDAEHFIFHGAVSYLDINYGVEEFKRGLKKIRNGDGYYSPGVERKISVLDDKPEYKKGITKRQWQVLLFICKGYNKKKIIANLNIKKRTVDTHIYNLKKLFYASNMVDLSNKAVCMGWVRKEELGFKIPD

SEQ ID NO: 10987 - DNA, 882 bp, Unknown
  Obtained from environmental sample
  misc_feature (1)..(882): n is a, c, g, or t
atggactccctcgaaacctccgccagatataagagcgagtttttggccatgatgagccacgagatacgcactcccatgaacgccatcctcggtatggccgagttggcaatgcgggaaaaggagttgccgcgagcccaggagcacgtgctcacgatacggaagtccggcatgaacctgctatctattataaacgacatcctagacttctccaagatagagagcggaaagatggacatagttcccgcggactatcacttcatgtcgctcatcaaggacgttacgagcatcataagcataaaggccgccgagtcgcagcttgagtttcgcgttgacatagacaacaacatcccggttgctctcgttggcgacgaggtgagaatccgccaaattatcctcaacatcttgagcaacgccgtaaaatacacgtcgaagggtttcgtcgcgctgaccgtgaagagtcagcagctcgacgacgaaacggtgaacatcacaatagaggtagccgacagcggcaggggtataaagcaggaggatatcggaaagttgttcaaggacttcgtgcagatagatttggtcaagaacaaggggatagagggaaccggcctgggccttgccatcacgcggagcctggttaaggctatgagcggcgcgataaacgtgaagtcgaagtacggcaagggcagcgtgttcacggtgattctgccgcagaagatcagtaagcaggctgaatttacagacgaaacgacgacagccgtcttcaccgcgcccaccgctaaggctttggtcgtggacgacgtccacacaaatttggttgtggcgcagggattgctctctttctacgggatggaagtgcacacctgcctgaccggcgcggagcaatag

SEQ ID NO: 10988 - protein, 293 aa, Unknown
  Obtained from environmental sample
  DOMAIN (10)...(75): His Kinase A (phosphoacceptor) domain
  misc_feature (1)..(293): Xaa is any amino acid
MDSLETSARYKSEFLAMMSHEIRTPMNAILGMAELAMREKELPRAQEHVLTIRKSGMNLLSIINDILDFSKIESGKMDIVPADYHFMSLIKDVTSIISIKAAESQLEFRVDIDNNIPVALVGDEVRIRQIILNILSNAVKYTSKGFVALTVKSQQLDDETVNITIEVADSGRGIKQEDIGKLFKDFVQIDLVKNKGIEGTGLGLAITRSLVKAMSGAINVKSKYGKGSVFTVILPQKISKQAEFTDETTTAVFTAPTAKALVVDDVHTNLVVAQGLLSFYGMEVHTCLTGAEQ

SEQ ID NO: 10989 - DNA, 465 bp, Unknown
  Obtained from environmental sample
  misc_feature (1)..(465): n is a, c, g, or t
gtggcgcttggcggcttccgcctcaaatacggcagattgtacaattggagtacggcgatggcgggtgcggcgagttccaccacgaaaccaagcggagtacgcggcgtttgcccggcgggatattatttgccgtcgaatggggaatggattgatttggctcttgccacaggcggtacaggcccaaccggcaccggcggtggggcgggtcatgcactgaaagcgacaagcgattggagaaataacaaaggtacggacgaattcggattttcggccctgcctggcggctttcggcaacttagcaatgaaactttctacggtctcggtgaacgcggagattggtggacggcctcggcgccgaatggcggtacttcctggcgacgaaatatagattacttcttggctggtttggaacaatcgaatcaaaacaatggcaacggttattcggttcgttgtctcaaagattga

SEQ ID NO: 10990 - protein, 154 aa, Unknown
  Obtained from environmental sample
  misc_feature (1)..(154): Xaa is any amino acid
MALGGFRLKYGRLYNWSTAMAGAASSTTKPSGVRGVCPAGYYLPSNGEWIDLALATGGTGPTGTGGGAGHALKATSDWRNNKGTDEFGFSALPGGFRQLSNETFYGLGERGDWWTASAPNGGTSWRRNIDYFLAGLEQSNQNNGNGYSVRCLKD

SEQ ID NO: 10991 - DNA, 861 bp, Unknown
  Obtained from environmental sample
  misc_feature (1)..(861): n is a, c, g, or t
ttgcagggagcgcttttttcgggcggcatacaggggctgcaaaaaaacagcgataaagtaaaagctcttgcgcaaatgatgctgatctgcgcagaccagatttcaggattgagtttcaatcaaaaaaatatacctatacttgtaacatggccggaaaataaaaccgccatgcctgcggatgaagcaaaaataaatcctaaattaatggacatggaacggatgctgcttgcaagccttcgcaggggggataatgtccacgcaaatcaaattctcagtgaattgttggatgtacaatataaagaattaaacgggaattttaaagtcttccaattgaaagcgctggaatgggcggtattattgtcaagagctacaataaataccaaaaatacaaaagatgatacgttactggacacaaataactgttacttgaagagaatagaagatagtacaaactttcaggaaatcaaggaaattcttttttgttttacagaccagatggcgggaaaaattttctcatttcatggagtgcgtcatttttcggcaattagaaaagccgaacgctatatctgggaaaattatacaaagaagatcgggctgcaggaaatagccgatgccgcaggcctttcggcgtcatactttagcacaattttcaaagaagaaatgggagaaaatctttccaattatcttaaccgtttacgggttgaaaaggcggcttccatgctgatttcaacaaatatacctataagcacgatagcggcggactgcggttttgaagaccaaagctggttttcaaaaatattcaaaaacaatacaggttttactcccggtaaataccgtgagcagggaaacattttaggttaa

SEQ ID NO: 10992 - protein, 286 aa, Unknown
  Obtained from environmental sample
  DOMAIN (184)...(230): Bacterial regulatory helix-turn-helix proteins, AraC family
  misc_feature (1)..(286): Xaa is any amino acid
MQGALFSGGIQGLQKNSDKVKALAQMMLICADQISGLSFNQKNIPILVTWPENKTAMPADEAKINPKLMDMERMLLASLRRGDNVHANQILSELLDVQYKELNGNFKVFQLKALEWAVLLSRATINTKNTKDDTLLDTNNCYLKRIEDSTNFQEIKEILFCFTDQMAGKIFSFHGVRHFSAIRKAERYIWENYTKKIGLQEIADAAGLSASYFSTIFKEEMGENLSNYLNRLRVEKAASMLISTNIPISTIAADCGFEDQSWFSKIFKNNTGFTPGKYREQGNILG

SEQ ID NO: 10993 - DNA, 717 bp, Unknown
  Obtained from environmental sample
  misc_feature (1)..(717): n is a, c, g, or t
ttgaagttagggggaaatatggccgaagaccttatggacaaagttttttcattcttttccggcgaagggctgacagatgaaaaacaaaatatgcttaaaggcattgcaaaagaactaagccagagcaaatacgctaaatttttcagaataagatcggaagaagtagatccttcatttttgtcatttttattttcagtatacaaaaccatttatcccatcaaattattcatgaaagatgagggtaaaatggcgcaattacgtcattttaccgtagaatcatgtatcgatccaaacataaaagaaacgataagcaggctggatccggcatttttagaaggtaagttaaaagtcgctaccggcgaagatgtaattgcctcaattcaagccgacatgaatttgctgataagccagtttgatcaaaaccacagaacgaccgtaaaccacaggtatgaactggcttccaccttgaatcggcttgtaaattacaatttccccggttttttcaagaaatttgaccctcattttgccgacgggagcttccttgtagaacccaaattccccgctgtaaaggcaatcctgataatcgaccaaatggctgattttttgaccgctacccatgcccttagacctgaagaagactggaacgggcttttaaacatactcaaaaaatgcgaggggcatgaccttgttgtggctgacaattcaataatatgttaa

SEQ ID NO: 10994 - protein, 238 aa, Unknown
  Obtained from environmental sample
  misc_feature (1)..(238): Xaa is any amino acid
MKLGGNMAEDLMDKVFSFFSGEGLTDEKQNMLKGIAKELSQSKYAKFFRIRSEEVDPSFLSFLFSVYKTIYPIKLFMKDEGKMAQLRHFTVESCIDPNIKETISRLDPAFLEGKLKVATGEDVIASIQADMNLLISQFDQNHRTTVNHRYELASTLNRLVNYNFPGFFKKFDPHFADGSFLVEPKFPAVKAILIIDQMADFLTATHALRPEEDWNGLLNILKKCEGHDLVVADNSIIC

SEQ ID NO: 10995 - DNA, 867 bp, Unknown
  Obtained from environmental sample
  misc_feature (1)..(867): n is a, c, g, or t
ttgctcggtcagaatcggccgaggaagaagaccgcagaagactaccttggcgaaaccgttaccgaagcggtaattactgtccctgcttattttaacgacgctcagcgccaggcgacaaaggacgcgggtaaaatcgcgggtcttgatgttaagcgcattatcaatgagccgaccgccgcctctctagcgtttggttttaacaaagattcaaaaaaagacaaggtaatcgccgtttacgatcttggcggcggtactttcgacgtttccattctggaattgggggatggcgttttcgaggtaaaatcaactaacggcgacacccacttgggcggcgatgattttgatcaccgcgttatggaatggcttatcgctgagtttaaaaaagacacgggcatcgatcttggcaaagaccgcatggctctccagcgtcttcgtgaagcggctgaaaaagcaaaaattgaattgtcctccatgcagactacagaagtcaacctgccatttatcaccgccgaccagagcggacctaagcatctgcaaaaatcgctgacacgggcaaagtttgaacagatggtggaagatcttcttgaacgttcaaaagaaccttgcagaaaagcgctttcggacgcgggacttaaagccgaacaaattgacgaagttattcttgtcggcggttccacgcgtattccggcagttcaacagattgtcaaagacctgtttaaaaaagagcctaacaagggcgttaaccccgatgaagccgtcgctgttggcgcggctattcaaggcgtattctcggcggcgacgttaaagacgtgctgttactcgacgttactccactttcgctcggcatcgaaacgcttggcggcgtaa

SEQ ID NO: 10996 - protein, 288 aa, Unknown
  Obtained from environmental sample
  DOMAIN (3)...(288): Hsp70 protein
  misc_feature (1)..(288): Xaa is any amino acid
MLGQNRPRKKTAEDYLGETVTEAVITVPAYFNDAQRQATKDAGKIAGLDVKRIINEPTAASLAFGFNKDSKKDKVIAVYDLGGGTFDVSILELGDGVFEVKSTNGDTHLGGDDFDHRVMEWLIAEFKKDTGIDLGKDRMALQRLREAAEKAKIELSSMQTTEVNLPFITADQSGPKHLQKSLTRAKFEQMVEDLLERSKEPCRKALSDAGLKAEQIDEVILVGGSTRIPAVQQIVKDLFKKEPNKGVNPDEAVAVGAAIQGVFSAATLKTCCYSTLLHFRSASKRLAA

SEQ ID NO: 10997 - DNA, 621 bp, Unknown
  Obtained from environmental sample
  misc_feature (1)..(621): n is a, c, g, or t
atggttaaaacaataaatcaaactttcagcgacctgggtttaaagccgcataaagatgaagaaaataaagatgaaattgtaacattgggcgagttctttcacatgacgataatcgatccgcttacaggcatttacaacaggcgctatttagacggcagcttaaagaaaataataagactccattcccgcacaggcggttacctgagtgtattaatgatagatatagattactttaagaaatacaacgacacttacgggcatgactcaggggatgactgccttggaatggtcgccaacgctctttcccaatgcgtaataagggacgatgattttatcgcaaggtacggcggagaggaatttgccgctgtgttgccgaataccgatgaaaacggcgcccggttagtcgcggaaagaatgctggaaaaagtgcgtgaatgcaggataacgcacaaaaaaagcgatatagcagcttatgttactgtttccatcggggttacgacgggtgtcattaatcatttgcagcatggaagcgattatatcaaagccgccgataaagctttatacgaatccaaaaataacggtcgtaaccggataacagcgtcgcgtttggcggaaacctga

SEQ ID NO: 10998 - protein, 206 aa, Unknown
  Obtained from environmental sample
  DOMAIN (32)...(197): GGDEF domain
  misc_feature (1)..(206): Xaa is any amino acid
MVKTINQTFSDLGLKPHKDEENKDEIVTLGEFFHMTIIDPLTGIYNRRYLDGSLKKIIRLHSRTGGYLSVLMIDIDYFKKYNDTYGHDSGDDCLGMVANALSQCVIRDDDFIARYGGEEFAAVLPNTDENGARLVAERMLEKVRECRITHKKSDIAAYVTVSIGVTTGVINHLQHGSDYIKAADKALYESKNNGRNRITASRLAET

SEQ ID NO: 10999 - DNA, 813 bp, Unknown
  Obtained from environmental sample
  misc_feature (1)..(813): n is a, c, g, or t
ttgggggtaagccgtagcgcctattaccgatgggccaggaacggggcctcgcagcggcgtaaagcagacgatgcggagctggtgcgccttattcttgaaatagtggcgaaccatcaccgccggtatggcagcccgcgggtacgccgggaacttcgcgatacctacggaaaacgggttagccttaaaaaagtagcccgcctgatgcgggaaaacggccttaatgcccgaagaagcaggaagcatatcccgacgaccgactccaaccatgcccttgcagtctttgagaacgtactgtcccgggagttttatgccgaatctggcggcataaagtgggtttcagacattacctatctgcgtacgataaatggctgggtatacctgaccatagtgcttgacctgtttgaccggaaaattattggctgggcgcttagccttggcatggagacttccgagacagtcatcgccgcttttgaaatggcagtcaaaaacaggagccctcaaggcggcctgatattccattcggacaggggcgtccagtattgtgcccaatccttccaggatgttttgaggaaaagatctcctacagttaggcagagcatgagcaggaagggcaattgctgggacaacgcgtgtgccgaatcgtttttcaaaacactgaagagggaactggaaactttggacggtaagcattccgaggctgaggtcaggcaatcagtgtttttctacatcgaggcatattacaatcgcattcgcatgcattcggcgcttgactatgtagcgcctaacgtgtttagcttaggcacccccgcttaa

SEQ ID NO: 11000 - protein, 270 aa, Unknown
  Obtained from environmental sample
  DOMAIN (103)...(266): Integrase core domain
  misc_feature (1)..(270): Xaa is any amino acid
MGVSRSAYYRWARNGASQRRKADDAELVRLILEIVANHHRRYGSPRVRRELRDTYGKRVSLKKVARLMRENGLNARRSRKHIPTTDSNHALAVFENVLSREFYAESGGIKWVSDITYLRTINGWVYLTIVLDLFDRKIIGWALSLGMETSETVIAAFEMAVKNRSPQGGLIFHSDRGVQYCAQSFQDVLRKRSPTVRQSMSRKGNCWDNACAESFFKTLKRELETLDGKHSEAEVRQSVFFYIEAYYNRIRMHSALDYVAPNVFSLGTPA

SEQ ID NO: 11001 - DNA, 501 bp, Unknown
  Obtained from environmental sample
  misc_feature (1)..(501): n is a, c, g, or t
ttgtggggccttgataaaatgatcgctagaagggttgtccagcatcccctgggttttggcactgagggcgccagctcggaaaagagcttgagggagctgtatgacgccctgcacccggacgatcttatccactatggcatgatccccgaattcataggcaggcttccgatcaccgtaagcctggacgaacttaaacgggacgatctcaagaggatcatcaccgaaccaaacaacgccatagtaaaacagtaccaggcttccctcgcttatgatgacgtgaagctggaatttaccgaagaggccatagacgccatagccgataccgcaatcaagcagaagaccggggctcgcggcctgcgcgccatcgtggaaaagctcatgatcgatatcatgttcgagttgccgtcgatgaagggcagcaaacatgtgattatcaccgaggacgtggtcaagaatttacagacgcctataatacatcagcagcttcaaaaaagcgcgtaa

SEQ ID NO: 11002 - protein, 166 aa, Unknown
  Obtained from environmental sample
  misc_feature (1)..(166): Xaa is any amino acid
MWGLDKMIARRVVQHPLGFGTEGASSEKSLRELYDALHPDDLIHYGMIPEFIGRLPITVSLDELKRDDLKRIITEPNNAIVKQYQASLAYDDVKLEFTEEAIDAIADTAIKQKTGARGLRAIVEKLMIDIMFELPSMKGSKHVIITEDVVKNLQTPIIHQQLQKSA

SEQ ID NO: 11003 - DNA, 474 bp, Unknown
  Obtained from environmental sample
  misc_feature (1)..(474): n is a, c, g, or t
ttgtcaatgatagaatcttttaatcaggatcaacggtataacctggtttgtaaaatggggcttgcgatagatatgttggagcaggcttatggcgacaattcaaaatggagatggacatttgtcgatattgaaggccgttttgcggtaacggcaaaaaatataattaacttaaaaaccgcttacgagaacatgtcccccggagccgaatattatgattccacggtgtatcatcttagattggtaaaaaaacttatcgcccaggccgcggatcgttaccgtgaaaagtacgaactgagtacggggcaaattcttgattttaaaacggggataaatttccttggcgcgttacgccgcctgcacattgtcctgtccgaaggcgaagaagccaatgaaataaaaaagaaattggcgatatggtcaacaaaacttgaaaccgatcataaaaagcaagaagaagccaaaaagagaacatga

SEQ ID NO: 11004 - protein, 157 aa, Unknown
  Obtained from environmental sample
  misc_feature (1)..(157): Xaa is any amino acid
MSMIESFNQDQRYNLVCKMGLAIDMLEQAYGDNSKWRWTFVDIEGRFAVTAKNIINLKTAYENMSPGAEYYDSTVYHLRLVKKLIAQAADRYREKYELSTGQILDFKTGINFLGALRRLHIVLSEGEEANEIKKKLAIWSTKLETDHKKQEEAKKRT

SEQ ID NO: 11005 - DNA, 387 bp, Unknown
  Obtained from environmental sample
  misc_feature (1)..(387): n is a, c, g, or t
atggcggtattaattgacatttggggcacggggggaaaaaccaccggctttgcgtctccggcgcagggctatgaacaccaaactattgacctcaacgccattatgatactgcaccccgccgctaccttcctttttaggttggaaagcggggatatggcgggtctaggtatacaacggggttcattgctggtggtagaccgttcccaagaccctaaaattggtgattatgtcctattagtacataataatcgttttttatgccgacttttggaactgcacaatgggaaaagaaccctaaccaatggtacagatgatataaaccctatagatggggaaactactattttaggcgtggtaatgtcggcaacacaggtatttagacaatga

SEQ ID NO: 11006 - protein, 128 aa, Unknown
  Obtained from environmental sample
  DOMAIN (46)...(112): Peptidase S24-like
  misc_feature (1)..(128): Xaa is any amino acid
MAVLIDIWGTGGKTTGFASPAQGYEHQTIDLNAIMILHPAATFLFRLESGDMAGLGIQRGSLLVVDRSQDPKIGDYVLLVHNNRFLCRLLELHNGKRTLTNGTDDINPIDGETTILGVVMSATQVFRQ

SEQ ID NO: 11007 - DNA, 531 bp, Unknown
  Obtained from environmental sample
  misc_feature (1)..(531): n is a, c, g, or t
gtgttngagtttcggaaagcacttgaccctttaatgtataataatcttttaatttgcgctttattgcaatttcntgaaagttttcattatgataaaaatgaacggttatatttagacgctttattacaggaagttgttgatttgcctgtggttgtcgaaatgcgaaataaaaactggcaaaaagacagcgtatatttagaattaaagcagcgtaaagttggctggtgtatcgctgataacccgcacattaacaatcttttgaatttggaaattttacggacaagcgatattggatatatgcggtttcatgggcgcaatgcggagatgtggaatataggcgataatgaaacacgttacgattattgttattctgatactgaactgaaaacttttgtatacccgattacggaattactgaaacatactaaaatagtcagtttgttttttaataatcatgcaaaaagtaacgctactataaatgcacggaaattgaagatgcttttagataataaaaaaaaattaatagactaa

SEQ ID NO: 11008 - protein, 176 aa, Unknown
  Obtained from environmental sample
  DOMAIN (1)...(169): Protein of unknown function DUF72
  misc_feature (1)..(176): Xaa is any amino acid
MXEFRKALDPLMYNNLLICALLQFXESFHYDKNERLYLDALLQEVVDLPVVVEMRNKNWQKDSVYLELKQRKVGWCIADNPHINNLLNLEILRTSDIGYMRFHGRNAEMWNIGDNETRYDYCYSDTELKTFVYPITELLKHTKIVSLFFNNHAKSNATINARKLKMLLDNKKKLID

SEQ ID NO: 11009 - DNA, 858 bp, Unknown
  Obtained from environmental sample
  misc_feature (1)..(858): n is a, c, g, or t
gtgcagaatgaccttgggattgtttatgccgatggagatggcgtaccgaaagactttgaaaaggctatttattggtttaccaaagctgccgagcagggaaatgttgatgcgcagaataaccttagagttgtcaaagaacaagccattgagtacgagagaacgaaagaacaagtactcgggtatttaacgcaaaagtggcaaaacgaagatatagctgctgaaaacgaaagaaaaagaaaactttttcgcaagcggatcaaaatactattaatccccctagccttgctaatcggaattatttggatagccaataattgcacaaattctaatgccgtggagaaaaaggctacctataaagagactcaaaattctgaaaatctagaaagaataacagcaaccgcttccgaaactctcaccgacccacgcgacagcaaaacatacaacataataaaaatcggcaaccaaacttggatagctcagaacttaaattacaatgcgcaaggcagcaaatgttacggaaatgatgaaagcaactgccaaagatatggcaggctttacaattggtcggcagccacaaaagcttgccccaacggttggcatttgccaagcaacagagaatgggatgcactataccgccttgttgacggcaccagcggcaccgaaagtccttacaagagcgaaacagcaggcaaatacctaaaggcaaaaagcggctggaactcttttgaaggaatttcaggcaacggcacagacgattacggttttgcggctctgcctggcggtctaggcaattctagcggcggtttctccaacattgggcaactacgggcaactggtgggagcggcacggaaatctga

SEQ ID NO: 11010 - protein, 285 aa, Unknown
  Obtained from environmental sample
  DOMAIN (2)...(34): Sel1 repeat
  misc_feature (1)..(285): Xaa is any amino acid
MQNDLGIVYADGDGVPKDFEKAIYWFTKAAEQGNVDAQNNLRVVKEQAIEYERTKEQVLGYLTQKWQNEDIAAENERKRKLFRKRIKILLIPLALLIGIIWIANNCTNSNAVEKKATYKETQNSENLERITATASETLTDPRDSKTYNIIKIGNQTWIAQNLNYNAQGSKCYGNDESNCQRYGRLYNWSAATKACPNGWHLPSNREWDALYRLVDGTSGTESPYKSETAGKYLKAKSGWNSFEGISGNGTDDYGFAALPGGLGNSSGGFSNIGQLRATGGSGTEI

SEQ ID NO: 11011 - DNA, 477 bp, Unknown
  Obtained from environmental sample
  misc_feature (1)..(477): n is a, c, g, or t
atgattttatatcacggctcttatgtgcaagtagttaaacctgatttgtcgttttctcgcaaagaactggattttggcacgggtttttatacaacatccattaaagaacaatccaaaaaatggtctttgaaattcaaaaaaagacgagaacaatcaatagtttcaatgtatgaatttgatgaaaaaattatagataaaattcgggttttaaaattcaattcatattccgaagaatggcttgattttgttgttttatgcagaacgggcaaaaatttagaagaaaattatgatttgataattggcggtatagcaaatgacgatgtttttaataccctgcaattattcttggataagctcattccaaagcaaganactttaaaaagattgcaatatgaaaaaccaaatattcaatattgttttaaaaatcaatccattattgattcccatttgcatttcacaggaagttatcaaatatga

SEQ ID NO: 11012 - protein, 158 aa, Unknown
  Obtained from environmental sample
  misc_feature (1)..(158): Xaa is any amino acid
MILYHGSYVQVVKPDLSFSRKELDFGTGFYTTSIKEQSKKWSLKFKKRREQSIVSMYEFDEKIIDKIRVLKFNSYSEEWLDFVVLCRTGKNLEENYDLIIGGIANDDVFNTLQLFLDKLIPKQXTLKRLQYEKPNIQYCFKNQSIIDSHLHFTGSYQI

SEQ ID NO: 11013 - DNA, 459 bp, Unknown
  Obtained from environmental sample
  misc_feature (1)..(459): n is a, c, g, or t
ttggaagcgggcaaggagcaaggccttattccctgcggtcttggcgcaagggataccctgcgtcttgaggccgcaatgccgctctacggccacgaaatggacgaaaacgttaatcctttcgaggcggccctttcttttgcggtaaaaatggacaagcccgattttataggaaaggccgctctggaacccttagcgtccggcgataatctaaaaagaattcgcacgggccttagagtaaccggcaagggcattatcagggaacaatgccccatttattgtcagggcagcagtataggcataactacttccggaacttttgctccccatcttaaacaggcaatagcaatggccatgcttaaaacggaatttgcctcccctgggacaaaagttgaagcggacgtaagaggaaaaatgctagaggccgaaacctgcgcccttccgttctataaaaaatcgtaa

SEQ ID NO: 11014 - protein, 152 aa, Unknown
  Obtained from environmental sample
  DOMAIN (1)...(151): Glycine cleavage T-protein (aminomethyl transferase)
  misc_feature (1)..(152): Xaa is any amino acid
MEAGKEQGLIPCGLGARDTLRLEAAMPLYGHEMDENVNPFEAALSFAVKMDKPDFIGKAALEPLASGDNLKRIRTGLRVTGKGIIREQCPIYCQGSSIGITTSGTFAPHLKQAIAMAMLKTEFASPGTKVEADVRGKMLEAETCALPFYKKS

SEQ ID NO: 11015 - DNA, 465 bp, Unknown
  Obtained from environmental sample
  misc_feature (1)..(465): n is a, c, g, or t
ttgtcagaagaaataataaaagaatttcataacatattaaagaggggaagttcagattcttttaaggattggtttaaaattggagattataaaacaagagaaaattttgtaggtgatataaaaacaacaccgccgtcagatgtaaatatgatgatgaaaaagttattatccgaatatttaaaagaagatgttgatttgaataaaatcattgattttcattatacttttgaaaagatacatccctttcaggacgggaatggcagagtaggcagattaataatgtttaaggaatgtcttaaacataatatagttccatttattattgaagacgaaaacaagcagttttattatatgggattaaaagaatatcccaattctaaaacacggttaattgagacttgcctttcttcacaagatgtatataaagacgctttgaaatattttaatgttgaatatgatacctag

SEQ ID NO: 11016 - protein, 154 aa, Unknown
  Obtained from environmental sample
  DOMAIN (6)...(126): Fic protein family
  misc_feature (1)..(154): Xaa is any amino acid
MSEEIIKEFHNILKRGSSDSFKDWFKIGDYKTRENFVGDIKTTPPSDVNMMMKKLLSEYLKEDVDLNKIIDFHYTFEKIHPFQDGNGRVGRLIMFKECLKHNIVPFIIEDENKQFYYMGLKEYPNSKTRLIETCLSSQDVYKDALKYFNVEYDT

SEQ ID NO: 11017 - DNA, 657 bp, Unknown
  Obtained from environmental sample
  misc_feature (1)..(657): n is a, c, g, or t
ttgttcgcgggctggctctctttagaagataaaaacctgatttccgcttttcttgaaaataaggacgttcacgcccgcaccgcggcgctggttttcggcattaacgagagcgaaataaacagcgaccagcgcagaatggcaaaagtaatcaacttcggcgtaatatacggaatgagcgcattccgtcttgcaaacgaattgagcatcagccgttcagacgcggcgaattttatcaatgcgtattttaacacatattccggcgtaagaaattttatcgagaacacaatcaggaaaaccgagaaatacggctatgttactacaatttcaggacaccggcgttatgtccccacgattaattcgcgtaataaaaccgagaaagccgccgccgagcgcattgcggtaaacacgccgattcagggttctgcggcggatatcgtaaaaaccgcaatgctctctttggacaaaaggcttacatcaataaaaagcaaagcgcgccttttattgcaggttcacgatgaacttatccttgaatgtcccgaagacgaagctgaaaaaaatacaaaaattgtaaaagaagagatggaacaagccgtaaaattgagtattcctttgcgggttaatatcgaaacaggaaaaaattggggaatatttcactaa

SEQ ID NO: 11018 - protein, 218 aa, Unknown
  Obtained from environmental sample
  DOMAIN (1)...(217): DNA polymerase family A
  misc_feature (1)..(218): Xaa is any amino acid
MFAGWLSLEDKNLISAFLENKDVHARTAALVFGINESEINSDQRRMAKVINFGVIYGMSAFRLANELSISRSDAANFINAYFNTYSGVRNFIENTIRKTEKYGYVTTISGHRRYVPTINSRNKTEKAAAERIAVNTPIQGSAADIVKTAMLSLDKRLTSIKSKARLLLQVHDELILECPEDEAEKNTKIVKEEMEQAVKLSIPLRVNIETGKNWGIFH

SEQ ID NO: 11019 - DNA, 600 bp, Unknown
  Obtained from environmental sample
  misc_feature (1)..(600): n is a, c, g, or t
atggaactggattccttaagtgaccttgtttcgttcggaatagcgcccgcgataatgatgtatatgctggtgttaaacaccatgggaaaaataggaatcgccattgccgtgctttatgtcctttgctgcgccctgcgtctcgcgcgttttaacgttcttgcgaacacaggcgaggttcacaagcacttcgttgggcttcccactccggcttccgcgggcgtattgatttcgtttgtgttgagttaccagcttttagcgccggaaggtttccatcttaactcaaaaacaatcccgaaattaatggaatttatgccgacattttttaaaataatgcccattgttatcgtcgcgctttcgttcctgatggtttccaacattccgtatctgtcgtttaaaaaattaaaattgtccaaaataaacacaatagaactattggccgtaataattgtggttataatattaattgtcattttcccgcagaacacgatatttattatcttttcaatttacgcgatatccggacttttgatttatgtgcccagccttattttcaaaaaaagaaaaccacctgagcagaaggcggaagaaaatgaagtgtaa

SEQ ID NO: 11020 - protein, 199 aa, Unknown
  Obtained from environmental sample
  misc_feature (1)..(199): Xaa is any amino acid
MELDSLSDLVSFGIAPAIMMYMLVLNTMGKIGIAIAVLYVLCCALRLARFNVLANTGEVHKHFVGLPTPASAGVLISFVLSYQLLAPEGFHLNSKTIPKLMEFMPTFFKIMPIVIVALSFLMVSNIPYLSFKKLKLSKINTIELLAVIIVVIILIVIFPQNTIFIIFSIYAISGLLIYVPSLIFKKRKPPEQKAEENEV

SEQ ID NO: 11021 - DNA, 459 bp, Unknown
  Obtained from environmental sample
  misc_feature (1)..(459): n is a, c, g, or t
atggttaccattcccgccggcaccgacaacggcaaacggctggtaattccaaggcagggggacgcgggtcccaacggaggacagccgggcgacttgtacgtgttcataagagttaagcgccatgaatactttgaacggcagggacacgatctttactgcgccgtcccaatctccgtaagccaggcggctctgggcgcggacattcatgtaacatcgcttgacaacaataatataaaagtaaaagtgccggccggtattcaaagcggtaaactgctccgtatccgcaatcatggagtcccctcaggcggaacacacggcgatttgtatatcaaagttatggtgcagatacccgaaaaacttacccgccgcggcagagaattgctggaagaactggcaaaagccgaggggcagaacgacagcccgaaaccgattccgctttcgcagttggcggagaattaa

SEQ ID NO: 11022 - protein, 152 aa, Unknown
  Obtained from environmental sample
  DOMAIN (12)...(132): DnaJ C terminal region
  misc_feature (1)..(152): Xaa is any amino acid
MVTIPAGTDNGKRLVIPRQGDAGPNGGQPGDLYVFIRVKRHEYFERQGHDLYCAVPISVSQAALGADIHVTSLDNNNIKVKVPAGIQSGKLLRIRNHGVPSGGTHGDLYIKVMVQIPEKLTRRGRELLEELAKAEGQNDSPKPIPLSQLAEN

SEQ ID NO: 11023 - DNA, 405 bp, Unknown
  Obtained from environmental sample
  misc_feature (1)..(405): n is a, c, g, or t
atgacagattcggccgagcggacgagcgagttacctcgcaggaatacaggttttgttttctgggacaaaaaaaatcattataaaatattttctgatggtgaattaatatgggtgtcatgtgaaaataaaattaaaaaatttacttttgatatgggatataacagaggatttgattataagagtagaatccacccaaatcaaaaacctatagaaatttataaatggcttttatcaacttatgcgaaacaaggttataaaattcttgatactcattttggaagcggctcaatcgccgtcgcctgtaatgaattgggttttaaccttaccgcaagcgaaatcgacaaagattatttttatgccgcctgtaaacgcattaaacaagccttatcggagaacaaacaatga

SEQ ID NO: 11024 - protein, 134 aa, Unknown
  Obtained from environmental sample
  misc_feature (1)..(134): Xaa is any amino acid
MTDSAERTSELPRRNTGFVFWDKKNHYKIFSDGELIWVSCENKIKKFTFDMGYNRGFDYKSRIHPNQKPIEIYKWLLSTYAKQGYKILDTHFGSGSIAVACNELGFNLTASEIDKDYFYAACKRIKQALSENKQ

SEQ ID NO: 11025 - DNA, 420 bp, Unknown
  Obtained from environmental sample
  misc_feature (1)..(420): n is a, c, g, or t
gtgaagcacagccgcggttacgcgtcatttgactacgacatcaccgaatacaggcccacggagctcgccaagctggacatactcctcaacggcaaagcggtggacgccctctcgcagcttgttttcaaggagaacgcctacgaccgcgcgcgcaaggtatgcgaacgcttaagggacgagatcccccgccagcagttcaagatacccatacagggggccatcggcagcagcatcatcgcccgcgaaacggtcaacgccctgcggaaggacgtgctcgcgaaatgctacggcggcgacataacccgcaagcgcaagctgcttgaaaaacagaaagaaggcaagaagcgcatgaagcaggtcggcgacgtggaactgccccaaagcgccttcctcgccgtcctaaaagccaaggatgaataa

SEQ ID NO: 11026 - protein, 139 aa, Unknown
  Obtained from environmental sample
  DOMAIN (29)...(137): GTP-binding protein LepA C-terminus
  misc_feature (1)..(139): Xaa is any amino acid
MKHSRGYASFDYDITEYRPTELAKLDILLNGKAVDALSQLVFKENAYDRARKVCERLRDEIPRQQFKIPIQGAIGSSIIARETVNALRKDVLAKCYGGDITRKRKLLEKQKEGKKRMKQVGDVELPQSAFLAVLKAKDE

SEQ ID NO: 11027 - DNA, 411 bp, Unknown
  Obtained from environmental sample
  misc_feature (1)..(411): n is a, c, g, or t
atgaaaacaagagccgaaatcagggtcgcgccctccatactttccgcggacttccgcttcttggaacgcgaggtcaaggccgcttgcgacgccggggccgacctgatccactgcgacgtcatggacggccggttcgtgcccaatatcaccttcgggccgatggttgtggccgcggtcaaaaaatgcgcctccgtgccgctcgacgtgcacctcatgatcgccgaccctatcaggtatgcggacgccttctgcgacgccggcgccgacatcctctcgttccacgccgaggcggtcggcggcatagacgatgtcagggcggttgtgtccaagataaaggctcgcggcgtacgggtcggtgtggcggtcaacccggacaagccgataagctcggccgaatctgtcaatggctaa

SEQ ID NO: 11028 - protein, 136 aa, Unknown
  Obtained from environmental sample
  DOMAIN (8)...(136): Ribulose-phosphate 3 epimerase family
  misc_feature (1)..(136): Xaa is any amino acid
MKTRAEIRVAPSILSADFRFLEREVKAACDAGADLIHCDVMDGRFVPNITFGPMVVAAVKKCASVPLDVHLMIADPIRYADAFCDAGADILSFHAEAVGGIDDVRAVVSKIKARGVRVGVAVNPDKPISSAESVNG

SEQ ID NO: 11029 - DNA, 753 bp, Unknown
  Obtained from environmental sample
  misc_feature (1)..(753): n is a, c, g, or t
ttgcgaaaagggatcagctccgtaaccattcccgacggagttacgagcatcggggcaaaggcctttgcggataaccagctttcaagtataaccattcccgacagcgtaaccgtaattggcgaagaggcgtttatacgcagccagctctcaagcgtaagtatcggcggcggcgtaatatccatcggcaaagcggcgtttgcgttaaaccagctctcagagataaaaatcccgttcagcgttacaagtattgggccggaggcgttcaggaaaaacctgctcgcgagcctgtccatcggtgacggagttacaagtatcggggagggggcatttgccggtaaccagcttgccgaaataaccatacccaacagcgttaaaaccatcgggagggacgcctttgccgacaaccagcttaaaaaagtaatcatcatgcagtccgatattgccaatgtcgccattgcgggaccatcgccgtttggaaaagccgaagtgctcacggaagaggcacataaatttgaacgcgatgaaggcgcgaactatacggacaagaaagattttgacgtaagaaaagttgacggcggcgtggaaatcgcgcggtataaaggcacggataccgaggtcaggattccccggcttataaacggaggacgcgttgttaaaatttccggggacgcatttcagaagagggggcttacaaacgttacgattccgaacaccgttacggaaataggcagcgacgcgtttccttggcaataa

SEQ ID NO: 11030 - protein, 250 aa, Unknown
  Obtained from environmental sample
  SIGNAL (1)...(23)
  misc_feature (1)..(250): Xaa is any amino acid
MRKGISSVTIPDGVTSIGAKAFADNQLSSITIPDSVTVIGEEAFIRSQLSSVSIGGGVISIGKAAFALNQLSEIKIPFSVTSIGPEAFRKNLLASLSIGDGVTSIGEGAFAGNQLAEITIPNSVKTIGRDAFADNQLKKVIIMQSDIANVAIAGPSPFGKAEVLTEEAHKFERDEGANYTDKKDFDVRKVDGGVEIARYKGTDTEVRIPRLINGGRVVKISGDAFQKRGLTNVTIPNTVTEIGSDAFPWQ

SEQ ID NO: 11031 - DNA, 426 bp, Unknown
  Obtained from environmental sample
  misc_feature (1)..(426): n is a, c, g, or t
ttggttacggttcagggagactctctggagcggacggtgtaccttgacaggataggcgtgaaattgggagaggatcgctggcgcgtaagcccggcttcctttatttcaggttgcgaatccaaaaagcaaatagaagatcggattacccgctttaaggaactaatcgatccggcaccggccccccattggcttgagctgtttgacatggcggttatccgggcgggtatgtttggccgttaccgcaacgatgtgctggtgtacaatttacccgaagatcgaaaagtgtccgaagagcttctgtcggattcgcaactgaaaggcatcgcttttcgggcagagggaggaatgcttatagtcccgtcaagaaacaaaaaaaggttttttactttattgagtgagcacgggattgcaagcttccttgattag

SEQ ID NO: 11032 - protein, 141 aa, Unknown
  Obtained from environmental sample
  misc_feature (1)..(141): Xaa is any amino acid
MVTVQGDSLERTVYLDRIGVKLGEDRWRVSPASFISGCESKKQIEDRITRFKELIDPAPAPHWLELFDMAVIRAGMFGRYRNDVLVYNLPEDRKVSEELLSDSQLKGIAFRAEGGMLIVPSRNKKRFFTLLSEHGIASFLD

SEQ ID NO: 11033 - DNA, 540 bp, Unknown
  Obtained from environmental sample
  misc_feature (1)..(540): n is a, c, g, or t
gtgtaccgtcttcgcctcggcgaagttgtaaaagttctgggagtggcaaaaggcattcctcccataagtactacaggcgatcctttacctggcgaatggtacaaagttcttacaaacgacggcgctataggctattgcttttctttcaggttaaaattattcacccagaacgaaggttccgtacaaacaatctcctctaccccaaaaagcaatcccgatccggatcttgatttgattttatcaaaaacatggtctcctgaaatttattcgcaaatgattaattctgggcggattaatattcaggaactggaaaaaaaataccgttttgatcttggacaggatacgggcgtagcaagaattattctgccggatttggaaagacaatttacataccaaagaataatttccgaaggcgagcgtacatggaattttgagggaacaaatcttataatggagttaagatccaacaattcactgtctgtgcaatttacggnaaactcaggcataagacgctctcttttgtttcttctctttcgctaa

SEQ ID NO: 11034 - protein, 179 aa, Unknown
  Obtained from environmental sample
  misc_feature (1)..(179): Xaa is any amino acid
MYRLRLGEVVKVLGVAKGIPPISTTGDPLPGEWYKVLTNDGAIGYCFSFRLKLFTQNEGSVQTISSTPKSNPDPDLDLILSKTWSPEIYSQMINSGRINIQELEKKYRFDLGQDTGVARIILPDLERQFTYQRIISEGERTWNFEGTNLIMELRSNNSLSVQFTXNSGIRRSLLFLLFR

SEQ ID NO: 11035 - DNA, 462 bp, Unknown
  Obtained from environmental sample
  misc_feature (1)..(462): n is a, c, g, or t
atgaaaaaaagaacaaaaccagcattagcggcattgattttatcggtaattatgattcttgcaggctgcaacgacggagaagggactacaaccggcggtaacaacaacaataacaacaataacaacaataataacaacaataatggcaacaatggcggtaatactccggccgctttaacaggaacggtaaccataaccggaaccgctcaggtaggagaaacccttacggcaaatacagtcgctcttggcggcagcggggttatttcctatcaatggaaaaggagcggagcaaccaacatcgggacgaacagcgttacctatgttgtacaagccgccgacgcgggttcgactataaccgtaaccgtaacacgttccgacaattccggcagtgttaccagcgcgggtttacatataacggttccggtaagcgttgacattacggtaagaagcaccgccgaatga

SEQ ID NO: 11036 - protein, 153 aa, Unknown
  Obtained from environmental sample
  SIGNAL (1)...(22)
  misc_feature (1)..(153): Xaa is any amino acid
MKKRTKPALAALILSVIMILAGCNDGEGTTTGGNNNNNNNNNNNNNNNGNNGGNTPAALTGTVTITGTAQVGETLTANTVALGGSGVISYQWKRSGATNIGTNSVTYVVQAADAGSTITVTVTRSDNSGSVTSAGLHITVPVSVDITVRSTAE

SEQ ID NO: 11037 - DNA, 393 bp, Unknown
  Obtained from environmental sample
  misc_feature (1)..(393): n is a, c, g, or t
ttggagggtgaaattatggtagatttaaaatactataataaagtaagttttttctttgttactattgcttgtataatggtagcttgtaccattgcttctgttgtagccgctagtttgattttaccattttccattggtatttttagagttagcggcggttttttattatttcctctattctatatactttcagatttaatctctganatatatggttatgacanatcaagaaaattatcatggattgttgcttgcgctggtactttttcaaagttgttttattttattatgtataccataattggatcagaatatactgcagcacttgaaaaattggcaaaaatcttcatggcttctttccgttgtaggtataatatctacacaaatgggtaa

SEQ ID NO: 11038 - protein, 130 aa, Unknown
  Obtained from environmental sample
  misc_feature (1)..(130): Xaa is any amino acid
MEGEIMVDLKYYNKVSFFFVTIACIMVACTIASVVAASLILPFSIGIFRVSGGFLLFPLFYILSDLISXIYGYDXSRKLSWIVACAGTFSKLFYFIMYTIIGSEYTAALEKLAKIFMASFRCRYNIYTNG

SEQ ID NO: 11039 - DNA, 780 bp, Unknown
  Obtained from environmental sample
  misc_feature (1)..(780): n is a, c, g, or t
atgctataccgtcagaaatttaatacttttatccgcatctatgacgatattggctacatcaccagcaaaagcgatttcagcgacagggttgttgattcttccggtgcggtattcctcaaagccctttcccgtacacccaaaacgccggaagaactgtgcgaagatatagcaaaatcatttatcgatatttcacctgccgatttactgaacgatgttaaagattttttttccattcttgaacaggatggatttatagtcagcggggaaaccgaagctgaactggataaaaaagatgtccgtttctcttattcagcgctggaacccaaaacaattaaaactgatttttctccagttatacagcgggcaaataaaactacccaagaatttcttgacgaacatttcaaagacaaacctcaattattatctctgcaaatagagctttccagccgctgtaatgagcgttgcgttcattgctatatcccccacgaaaacaaaataaacgatattgatctcgcccttttctatgatgttttagagcaatgccgtgttatgggtgttttgggattaaccctttcaggcggcgaacctatgctgcataaaaacttctgtgaattcttgcggaaggcaaaggaatacgacttttcgataaacatcctcagcaatcttaccctgttaaatgaagaaataattaaggaaatgaaagagaaccggctttccagcgttcaggtttccctttatagcatgaatcctgaaatacacgattccataacccgggcttaa

SEQ ID NO: 11040 - protein, 259 aa, Unknown
  Obtained from environmental sample
  misc_feature (1)..(259): Xaa is any amino acid
MLYRQKFNTFIRIYDDIGYITSKSDFSDRVVDSSGAVFLKALSRTPKTPEELCEDIAKSFIDISPADLLNDVKDFFSILEQDGFIVSGETEAELDKKDVRFSYSALEPKTIKTDFSPVIQRANKTTQEFLDEHFKDKPQLLSLQIELSSRCNERCVHCYIPHENKINDIDLALFYDVLEQCRVMGVLGLTLSGGEPMLHKNFCEFLRKAKEYDFSINILSNLTLLNEEIIKEMKENRLSSVQVSLYSMNPEIHDSITRA

SEQ ID NO: 11041 - DNA, 510 bp, Unknown
  Obtained from environmental sample
  misc_feature (1)..(510): n is a, c, g, or t
atggcaggactggttcatccggttactcataccgctgccaacggtattcctctcggtaccgagacaaatcggaaataccgccgaatgattccatgtgataccggtctctttttgcatacacttggtctgcattcggaaatactgcctgccgctgatttttccgctgttaatcgcggttctctggcggaaatttttgttggcttggaattgttaaaagccgcctcctgttatacgccgcaagaattattctattggcaaagatcggccaattccggttctttgcagagtaacgctcagattgattttcttgttcaaaaaggctcaaacattattcccatagaagtcaaatcgggaaatcagggcagtatgcaaagtctccgtctatttatgaaggaaaagcatattgaaagaggtgtacggacttcctttgaaaacttcgaacgctatgaggatattgatgtttatccgttatatgcgattggtaatgtgataagggggagagacaaataa

SEQ ID NO: 11042 - protein, 169 aa, Unknown
  Obtained from environmental sample
  misc_feature (1)..(169): Xaa is any amino acid
MAGLVHPVTHTAANGIPLGTETNRKYRRMIPCDTGLFLHTLGLHSEILPAADFSAVNRGSLAEIFVGLELLKAASCYTPQELFYWQRSANSGSLQSNAQIDFLVQKGSNIIPIEVKSGNQGSMQSLRLFMKEKHIERGVRTSFENFERYEDIDVYPLYAIGNVIRGRDK

SEQ ID NO: 11043 - DNA, 474 bp, Unknown
  Obtained from environmental sample
  misc_feature (1)..(474): n is a, c, g, or t
gtgcggcaggtctacgggctgaagaaggtctactcgcagggtttaggcgccgccggagacgcgggggacgccatagtgggcaagctgggcaacaccttaaacaaggcctacgacaccctgaccgccaccgccgacgaccttaaggggaagccgggagggcagggcggagccgcccccgtctcctcagccgcctcggtcaccaagtacccgcgcctgaaagccggtttccgcagcatgaagccgcagtactcaaaggagatgctgcaaaatagggtggagggggcggtcaaggcgaagttgttgatagggacggacgggcttgttaagcaggtggaggtactgagcgacatcggctacgattcgggggagatcgccaaggcctttttgatgacgctggagttcgagccggccatgaagggggatcaggcggtgtcggtgtggataccgttttccataaaatttgaattgatatag

SEQ ID NO: 11044 - protein, 157 aa, Unknown
  Obtained from environmental sample
  DOMAIN (80)...(114): Gram-negative bacterial tonB protein
  misc_feature (1)..(157): Xaa is any amino acid
MRQVYGLKKVYSQGLGAAGDAGDAIVGKLGNTLNKAYDTLTATADDLKGKPGGQGGAAPVSSAASVTKYPRLKAGFRSMKPQYSKEMLQNRVEGAVKAKLLIGTDGLVKQVEVLSDIGYDSGEIAKAFLMTLEFEPAMKGDQAVSVWIPFSIKFELI

SEQ ID NO: 11045 - DNA, 642 bp, Unknown
  Obtained from environmental sample
  misc_feature (1)..(642): n is a, c, g, or t
gtgggagcagatcatgcaggactcaagccgtcgtttctcatgctaaagatcgacgatccatacactgaagccgaatccatggccaatacgcttgataatattttggataccgacttcggcgtctacacatggaaaacccttcagcgttcccagtacagctcctatgaatcgacacggcaactcctccttttcatcatggctttgattgtgcttgtggcatcggtcaacgtatcgtctgctacttccatgctggtaattgaacgccaaagggacatcgccgtcctgaaagcgtccggggccgggccttcctttacaagcgcggtatttttgtggggcgctttcttaaccggccttgcggggtcagttgtcggcatcgcggcggggcttgccataggctgttcagtgaacaccctgataagagccctggaaaaggcgctgacttttttttcagggatttttcatggcggacctgttctaattcttgattcgggctactaccttgaaaccatccccataatcgtgaactggaaagtggtttttgtaatcgccctttttacgatccttgcttcagtcatggcttcctggcttccggcccgcagggcagggaagctaaaaccaattgagattctgcggaagtattag

SEQ ID NO: 11046 - protein, 213 aa, Unknown
  Obtained from environmental sample
  DOMAIN (10)...(206): Predicted permease
  misc_feature (1)..(213): Xaa is any amino acid
MGADHAGLKPSFLMLKIDDPYTEAESMANTLDNILDTDFGVYTWKTLQRSQYSSYESTRQLLLFIMALIVLVASVNVSSATSMLVIERQRDIAVLKASGAGPSFTSAVFLWGAFLTGLAGSVVGIAAGLAIGCSVNTLIRALEKALTFFSGIFHGGPVLILDSGYYLETIPIIVNWKVVFVIALFTILASVMASWLPARRAGKLKPIEILRKY

SEQ ID NO: 11047 - DNA, 393 bp, Unknown
  Obtained from environmental sample
  misc_feature (1)..(393): n is a, c, g, or t
atgttggaaagtttatcttcccgtgagcgggaaattttcgaattactgctgaaaggcatctcgccgaaagaaatatcatataagcttaatattaagcattctacggtagattttcaccgctctaaaatctataacaaactgggtattcataaaattcaggagcttcttgccaaatattcaaccaacggcaaagaagagtttgacgataaaatagcagaaaaatccgccgcagaagtctatgttatcggagaagaaattaacggaacgctcattgatgatattttgaatataaaaataaacatggcagaaatgggagacaaaagagaatatgcgcaaacagcctataacggcaaatatgacataattatttcgatttcaaaaaaggaacaataa

SEQ ID NO: 11048 - protein, 130 aa, Unknown
  Obtained from environmental sample
  DOMAIN (2)...(59): Bacterial regulatory proteins, luxR family
  misc_feature (1)..(130): Xaa is any amino acid
MLESLSSREREIFELLLKGISPKEISYKLNIKHSTVDFHRSKIYNKLGIHKIQELLAKYSTNGKEEFDDKIAEKSAAEVYVIGEEINGTLIDDILNIKINMAEMGDKREYAQTAYNGKYDIIISISKKEQ

SEQ ID NO: 11049 - DNA, 465 bp, Unknown
  Obtained from environmental sample
  misc_feature (1)..(465): n is a, c, g, or t
gtggtttattattccctgacggggaattgcgctcttattgcggaagagatcaaatcaaaactgaatgctgatgtaatccggctgcacacggaggatgaaaaaccccgcggcggttttgcgacttttttctggggtatcggcgttatgttggggacaaagaaagccccactcaagccttatacttttaattctgctgcttatgacttaattatcatcggcgcccctgtttgggccggagggcccgcgcgtcctatacgcgacttccttgccgaaaccgccattaaaggcaaaaaaatcgccctctttgtctgccacggcggcggcgcgggaaaagccccggaacaactaagagccctgctgcccggcaatgaaataagctccgtaacagactttatctctccggttaaaaacattgagaaagtgaaacaacaggccgcggactgggcgaagggcttgcaggggtaa

SEQ ID NO: 11050 - protein, 154 aa, Unknown
  Obtained from environmental sample
  misc_feature (1)..(154): Xaa is any amino acid
MVYYSLTGNCALIAEEIKSKLNADVIRLHTEDEKPRGGFATFFWGIGVMLGTKKAPLKPYTFNSAAYDLIIIGAPVWAGGPARPIRDFLAETAIKGKKIALFVCHGGGAGKAPEQLRALLPGNEISSVTDFISPVKNIEKVKQQAADWAKGLQG

SEQ ID NO: 11051 - DNA, 351 bp, Unknown
  Obtained from environmental sample
  misc_feature (1)..(351): n is a, c, g, or t
atgtcccctattatggatgcaataaaactgtcatttaccgagaaggaacttcatcatctcaattatcctttccgcaccatacccgctatgaaaatcgccaagttagcagttgatatctattttttagaaaaatacaaaggtataggctcttttatgattgacagcgcagagcggtttgcctgggcatgtaatacagactattgcgcctgccgttttcttacggcggatgccgacatggaacacgatgaaggtgtcatctctttttatgaaaaaaatggttttattaaaaacaatgaaatatacaataaaaaccgtaaaacactcagcatgagaaaagacctatacagataa

SEQ ID NO: 11052 - protein, 116 aa, Unknown
  Obtained from environmental sample
  misc_feature (1)..(116): Xaa is any amino acid
MSPIMDAIKLSFTEKELHHLNYPFRTIPAMKIAKLAVDIYFLEKYKGIGSFMIDSAERFAWACNTDYCACRFLTADADMEHDEGVISFYEKNGFIKNNEIYNKNRKTLSMRKDLYR

SEQ ID NO: 11053 - DNA, 501 bp, Unknown
  Obtained from environmental sample
  misc_feature (1)..(501): n is a, c, g, or t
gtgaaatataagcttctattgccgtttctgttatttatgtttttttgcgtatcagccggatttaccgcggattcggactttgagaaaggcgatttttggttttgtccaagcggagaattcgctctgtatagcccttcaggcgcctcctacggggcaggtcttgccgttggttacggcagaggtacatcatttggcataaaaacatcctggtttttcggcccgaataagctaagtgttctggaaataaatgtccttttccgtatttattttttcgggaaacaggcgtattccggtccttttatccaaattttagggggaccggctcttgtttttaacaaaggaagcggggtttccataccctctaaaataggcgcgttttcgataggcgggggagttggctggcgttttttaataaaagacaggtggtttattgaaccttttgtccgcggcgggtatccgtatttaataggcgcgggactttccgcgggaatgcgtttttaa

SEQ ID NO: 11054 - protein, 166 aa, Unknown
  Obtained from environmental sample
  SIGNAL (1)...(22)
  misc_feature (1)..(166): Xaa is any amino acid
MKYKLLLPFLLFMFFCVSAGFTADSDFEKGDFWFCPSGEFALYSPSGASYGAGLAVGYGRGTSFGIKTSWFFGPNKLSVLEINVLFRIYFFGKQAYSGPFIQILGGPALVFNKGSGVSIPSKIGAFSIGGGVGWRFLIKDRWFIEPFVRGGYPYLIGAGLSAGMRF

SEQ ID NO: 11055 - DNA, 963 bp, Unknown
  Obtained from environmental sample
  misc_feature (1)..(963): n is a, c, g, or t
gtgccgtgtatcgtcttttctacggacaaaaaaaataattccgtacatcttttggcgtttgacacgatacncaatgagcatccntacatcctgccggaaagacccctttcgctggtgaacgagcgggatatgatccgaaaagccgagatgatcaaaattgaagctgaactgacagctctctcgaccctgaaaaaccaaatcgagaaccaaaagaaatctttactttcggatattgaatacgagactgccagcgcaggcatggaacaaattgaaaatgatacggctgtgtcaggtccaagtatttcctggatctccggctacgctccggcgtctgacgtaggtctgttaaagcgggcatccagcgaaaacggctgggccttttgcgccgacgatccggccgaagacgatacggcagttcccacgaagctgaaaaataacaaacttaccgagttcatttatcctcttacgggttttctggaaatgtcgccggggtacagggaaacggatatttccggctggttcctcctgttctttaccctgttcttcggcatgatcttcggagacgccgcatacggtacgatactctgcctgattgcgatcatctgcatattgaagacttccaaaaaaggcacaccgctgatttttaaattcctgtttttgatgagcctttcaaacattacctggggtgtgcttacctgcgcatggttcggtcttgatgtttcctcggtgccgcaggtcttgcagaatatcagccttcccctcatcgtaaacacctcgaatgaatcgggatggctttccgcctacaacgcgaacaatttctggattcgttccgggctggttgccgtgtacgacaacgttgacgcgatgggcaaggggattacctccaacctcatgctcttctgtttttccgtcgctcttacccaactgagcattgcccacattaagggaactcggccaatctga

SEQ ID NO: 11056 - protein, 320 aa, Unknown
  Obtained from environmental sample
  misc_feature (1)..(320): Xaa is any amino acid
MPCIVFSTDKKNNSVHLLAFDTIXNEHPYILPERPLSLVNERDMIRKAEMIKIEAELTALSTLKNQIENQKKSLLSDIEYETASAGMEQIENDTAVSGPSISWISGYAPASDVGLLKRASSENGWAFCADDPAEDDTAVPTKLKNNKLTEFIYPLTGFLEMSPGYRETDISGWFLLFFTLFFGMIFGDAAYGTILCLIAIICILKTSKKGTPLIFKFLFLMSLSNITWGVLTCAWFGLDVSSVPQVLQNISLPLIVNTSNESGWLSAYNANNFWIRSGLVAVYDNVDAMGKGITSNLMLFCFSVALTQLSIAHIKGTRPI

SEQ ID NO: 11057 - DNA, 936 bp, Unknown
  Obtained from environmental sample
  misc_feature (1)..(936): n is a, c, g, or t
ttgtttccgaggactattccgggggggaaaagggttttttactactacgcttatgatgagaaggataagcggagagggccgtggtctacggggtgtcagaaaaggacggaggcccggaattactgtaacggccttttgaggaaaggttgtctgattcctgataggactaaggggattacttttggggagtttgcaaaggggttttgggagcgggattcggagtatgtcaaaaaccaggagagcaggacagatatgacggacaactatattgatagtgcccggagcttggtggtgagtcagatgctgccgtttttcgccgatacgcccttaaatgagattaccgagaaagacgtgaataagtggcttttgggttttagggaacggaaagtcgtaaaaaacggagaaacaaaaactattcgttaccggaacacctatgcaaatttggtgttttcaacattcagcgtgatgttgggggatgcggttcggcgggggctactggcggttaatccttgtacaaaggtgaagcggcttaagaatgaccggaaggatattaaaatactgacaggtgaggaagtacacaagctgttccagaaagatagtaaggcgacggtatggggaaataaccaaatcgtgtatacggtaaactttttggctgctatgacgggtatgaggattggagagattttggggttgagaggggaatatgtatttgacgagcatatttatgtctgtgggcaatacggagcanaggggtatgtgccgcatacgaaaaccaaagaaaaccgggaaattccgcttttaccggaaatgatagcggaattgaaaggcttaatgaaacacaacggaaatggttttctattttccttgatggcggaactaagcctgtgggtaaagcctatatccggctggctttttatagtgccttacaaaaaatag

SEQ ID NO: 11058 - protein, 311 aa, Unknown
  Obtained from environmental sample
  misc_feature (1)..(311): Xaa is any amino acid
MFPRTIPGGKRVFYYYAYDEKDKRRGPWSTGCQKRTEARNYCNGLLRKGCLIPDRTKGITFGEFAKGFWERDSEYVKNQESRTDMTDNYIDSARSLVVSQMLPFFADTPLNEITEKDVNKWLLGFRERKVVKNGETKTIRYRNTYANLVFSTFSVMLGDAVRRGLLAVNPCTKVKRLKNDRKDIKILTGEEVHKLFQKDSKATVWGNNQIVYTVNFLAAMTGMRIGEILGLRGEYVFDEHIYVCGQYGAXGYVPHTKTKENREIPLLPEMIAELKGLMKHNGNGFLFSLMAELSLWVKPISGWLFIVPYKK

SEQ ID NO: 11059 - DNA, 771 bp, Unknown
  Obtained from environmental sample
  misc_feature (1)..(771): n is a, c, g, or t
atgagcggggaaagggccgctgttgcgggcggcgccgccgtcgcggcaattatttgcgctgcgggcgcgtcttcccgaacggggggcgttaaaaaagaataccgccccctgcccggcgggaacttaaccgtgctaggctccgcagtttcggcgtttgcttccgtgccggaaatgcgcggcattgtcatcgccgtcccccccgatccccaaaacggcgaagccgccgcacgaaaagccctgcccccggaactgctcgcggaaaatgccgccgtaaagattcattttgtcgcgggcggcccgtcccgtcgcgcttctgtttttaacgcgcttgccctgctttccgaaaaagtgttttgtggcgcgtccggtttggtgcttatccatgacggtgcccgtccctgggtcagcgtttcgctcattaaccgcgtcattgaaggcgttcaaaaataccgcgccgttatccccctgcaacccctcatcgaaacccccaaagaaacggacgcgccgttaggcgcgccaacgccaagcggcggtacgggaccggtgtttatcaagcggcatctgaagcgggcttttaccggcgcggcgcagacaccgcagggctttgcgtaccctgagattcttgccgcgcaccagcaggcggcggcgcgggaagatgccgaatacaccgacgatgccgaagtctgggcggcgttttgcggccccgtcgccgcgatacccggcgagagcgaaaaccggaagatcacttttgcggaggattttgaatgttga

SEQ ID NO: 11060 - protein, 256 aa, Unknown
  Obtained from environmental sample
  SIGNAL (1)...(23)
  DOMAIN (14)...(255): Uncharacterized protein family UPF0007
  misc_feature (1)..(256): Xaa is any amino acid
MSGERAAVAGGAAVAAIICAAGASSRTGGVKKEYRPLPGGNLTVLGSAVSAFASVPEMRGIVIAVPPDPQNGEAAARKALPPELLAENAAVKIHFVAGGPSRRASVFNALALLSEKVFCGASGLVLIHDGARPWVSVSLINRVIEGVQKYRAVIPLQPLIETPKETDAPLGAPTPSGGTGPVFIKRHLKRAFTGAAQTPQGFAYPEILAAHQQAAAREDAEYTDDAEVWAAFCGPVAAIPGESENRKITFAEDFEC

SEQ ID NO: 11061 - DNA, 804 bp, Unknown
  Obtained from environmental sample
  misc_feature (1)..(804): n is a, c, g, or t
gtgtatgatctgcgcaatgttgaactggaaaaactcaaaatcggcaaagtagacgccatgagcggggaagcggcttttacttcggtaaaaaaagcgattgagctcgcgttggcgggcgacattgacgccactattacaaaccccctcaataaggaagcgcttaacctggcggggcatcactacgcggggcataccgaaatttacgccgatcttacccgcacgaaagattattccatgatgcttgccgaagaaaatctgcgggtagttcacgtttcaacgcatgtgtctttacggacagcctgtgatcgggtcaggaaagaccgcgtgttaaaggtgattgaactggcgcataacacatgcgagtgtctgggcatacgcgaacccagggtggcagtggcggggcttaatccccattccggggagaacggcttgtttggcagcgaagaaatcgaagagatcataccggcgatagaagccgccaaaggaaaaggtattaaggcggaaggccccattccgcctgacacggtttttgccaaagcgcacgggggcttatacgatattgtcgtagctatgtatcacgatcaggggcatattcccctgaaacttttggggtttcaatatgacaagtcatccggaaaatggacggcggttaaaggcgtcaatattacattggggcttcctattattagaagctctgtcgatcatgggaccgcttttgacaacgcgtggaagggagcggcaaacgaattgagccttataagcgctattgagtacggggtaatgctggcaaaacataaaaaataa

SEQ ID NO: 11062 - protein, 267 aa, Unknown
  Obtained from environmental sample
  DOMAIN (4)...(260): Pyridoxal phosphate biosynthetic protein PdxA
  misc_feature (1)..(267): Xaa is any amino acid
MYDLRNVELEKLKIGKVDAMSGEAAFTSVKKAIELALAGDIDATITNPLNKEALNLAGHHYAGHTEIYADLTRTKDYSMMLAEENLRVVHVSTHVSLRTACDRVRKDRVLKVIELAHNTCECLGIREPRVAVAGLNPHSGENGLFGSEEIEEIIPAIEAAKGKGIKAEGPIPPDTVFAKAHGGLYDIVVAMYHDQGHIPLKLLGFQYDKSSGKWTAVKGVNITLGLPIIRSSVDHGTAFDNAWKGAANELSLISAIEYGVMLAKHKK

SEQ ID NO: 11063 - DNA, 771 bp, Unknown
  Obtained from environmental sample
  misc_feature (1)..(771): n is a, c, g, or t
ttgtttctattgttcttgcaactttccgaaaaaagacctaaggcaagcattcggccttgcttaaaagaccgtgcgggtttactcttagatataatggccgttccatttcagcctgttgtcgtaaaacaaaaaaaagactcttatatttttattgagggaaagccgaatgccgacaaattttatattgtcagggaaggtaatgtacggattattcgtgaggcgattaatgacggtgccgggagtgtgctgggacacggagaaatgttcggcctggtttccgcgttggccgggcacggttacattgaatcggcggtagccaaaacagacgctactttgctggcaattgaaaggaaccagtacggcggccttatcagcaaagtcaattctttcgctgtaaacagcatcaagtctttctcccaaaaactccgtgaattggatgtcgcgctgtcacagcgcacattgaaaaccgccgcggtaagcgatccgtcgcacatctttcaaatagccgaatattacgagaagtccgccaagctcagtcaggctatgtacgcgtaccgccaatttcttgtttattgccccaatgcggaaaacgcgaataacgccaaaataaaaatcaagaaactggaaggcgccgttaccgatacctcgccgaaatatccgccagacacaatggttcaaaaatatccaaaaggccacctgctattcgccgaatgtgaaaatggagatactatgtatatcattcaggccggacaggtaaactcggccatctga

SEQ ID NO: 11064 - protein, 256 aa, Unknown
  Obtained from environmental sample
  DOMAIN (40)...(129): Cyclic nucleotide-binding domain
  misc_feature (1)..(256): Xaa is any amino acid
MFLLFLQLSEKRPKASIRPCLKDRAGLLLDIMAVPFQPVVVKQKKDSYIFIEGKPNADKFYIVREGNVRIIREAINDGAGSVLGHGEMFGLVSALAGHGYIESAVAKTDATLLAIERNQYGGLISKVNSFAVNSIKSFSQKLRELDVALSQRTLKTAAVSDPSHIFQIAEYYEKSAKLSQAMYAYRQFLVYCPNAENANNAKIKIKKLEGAVTDTSPKYPPDTMVQKYPKGHLLFAECENGDTMYIIQAGQVNSAI

SEQ ID NO: 11065 - DNA, 327 bp, Unknown
  Obtained from environmental sample
  misc_feature (1)..(327): n is a, c, g, or t
ttgatggccgagtattattcccattctatttctgaagtaaaaagtgcaccaatagaacaaataatgtatattgttattcttggaatattttctagtgcaattgcatatattacatggacatatgcttttagcaaagctaaaaatgcctcttccgtaacgaattatatgtttctaacaccatttctcactacaataatgggtataatattagcaggagaaatacctgagtataaaacaattattggaggttcaataataatagtgggtatgtttatttataattttactgaaaaattatttataaaaaaatggcgcaacttcacataa

SEQ ID NO: 11066 - protein, 108 aa, Unknown
  Obtained from environmental sample
  misc_feature (1)..(108): Xaa is any amino acid
MMAEYYSHSISEVKSAPIEQIMYIVILGIFSSAIAYITWTYAFSKAKNASSVTNYMFLTPFLTTIMGIILAGEIPEYKTIIGGSIIIVGMFIYNFTEKLFIKKWRNFT

SEQ ID NO: 11067 - DNA, 498 bp, Unknown
  Obtained from environmental sample
  misc_feature (1)..(498): n is a, c, g, or t
atgaaagatgcaaaatcaatattcaattgcggtaaaatactatcagcagtaaaagcaagaaaaaaaacaggaattgagctttcaaaagaacagagaaatgctgctaatgatccaccagatttttttgattatataatgttttcatggggtaattgtcaagcgggcgacaggcttattatggaacgattattagagagaattccaaatgaaaatgatttgagtttcgattttaagcctagcgtaagatattattttaaatataaaactattattgaacataataattttgtaaatgatggttaccatcctgcaaaaataaaaaatgaaataatactttataataatttatattgctgtataattccagaacaatataagaccatttttttgaatattgccccccaaaacataaagaataaaatccattatttagaaaataattgtaaaaatatatttgattggtctgaaaaagtctataattacattttaaaattataa

SEQ ID NO: 11068 - protein, 165 aa, Unknown
  Obtained from environmental sample
  misc_feature (1)..(165): Xaa is any amino acid
MKDAKSIFNCGKILSAVKARKKTGIELSKEQRNAANDPPDFFDYIMFSWGNCQAGDRLIMERLLERIPNENDLSFDFKPSVRYYFKYKTIIEHNNFVNDGYHPAKIKNEIILYNNLYCCIIPEQYKTIFLNIAPQNIKNKIHYLENNCKNIFDWSEKVYNYILKL

SEQ ID NO: 11069 - DNA, 360 bp, Unknown
  Obtained from environmental sample
  misc_feature (1)..(360): n is a, c, g, or t
atgtcaagagcagttgacggttccaaaagaaaggaacaccgaaaaaaaatactcaaacaggcaaaaggtttctgggggcgcaggcactcaaactacaagaccgccaaagacgcggttaccaaagccctgttctatgcgtatcgggatcggcgggatcggaaaggcgattttcgcaaaatatggataatcaggattaacgccgcctgccgcgaggaagggctttcctattcccggtttatcgccggacttaacaaggcgggaatcatcattaaccggaaggctctggcgcatcttgcggcagaagacgctccggccttcaaagcggttgttgccaaagtaaaaaccgcgctgggggcgtaa

SEQ ID NO: 11070 - protein, 119 aa, Unknown
  Obtained from environmental sample
  DOMAIN (2)...(109): Ribosomal protein L20
  misc_feature (1)..(119): Xaa is any amino acid
MSRAVDGSKRKEHRKKILKQAKGFWGRRHSNYKTAKDAVTKALFYAYRDRRDRKGDFRKIWIIRINAACREEGLSYSRFIAGLNKAGIIINRKALAHLAAEDAPAFKAVVAKVKTALGA

SEQ ID NO: 11071 - DNA, 420 bp, Unknown
  Obtained from environmental sample
  misc_feature (1)..(420): n is a, c, g, or t
atggtcaggcggctcctttcccatctggtaatagcgcgtgacgaagttgtcataatggacatggaagcgggccttgaacatctggggcgcggaaccgcatccatgatggacctttttatcgtagttgtagagccgggcgcccgcagtatacagacttttcatcgtgtaaaacagcttgccgcagacctgggggtaaaaaaagtacaggccgtggcaaacaagatacgcggccctgaagacgaggcatatttccaaagccttatccccacggatgattttctgggatttatccggttcagcgacgaggtaattaacgccgaccgccgcggggtatcaccctttgataactgcgaggcggtgagagaagacattcgaaagataaaagagcaattaacaattaacaatgagcggtatttttaa

SEQ ID NO: 11072 - protein, 139 aa, Unknown
  Obtained from environmental sample
  misc_feature (1)..(139): Xaa is any amino acid
MVRRLLSHLVIARDEVVIMDMEAGLEHLGRGTASMMDLFIVVVEPGARSIQTFHRVKQLAADLGVKKVQAVANKIRGPEDEAYFQSLIPTDDFLGFIRFSDEVINADRRGVSPFDNCEAVREDIRKIKEQLTINNERYF

SEQ ID NO: 11073 - DNA, 597 bp, Unknown
  Obtained from environmental sample
  misc_feature (1)..(597): n is a, c, g, or t
atgaaccttttcaagatattcctcgcggcattattgattgacaacgtagtgttgatgcgttttatcgcgctctgcccttttatcggcatgagtaccgacgaggacaaatccatcgggatggggctggccgttgtttttgtgacggttatagccacagccgttacctggccgatttaccggtttatccttgaaccgctggggcttgtgtttcttcaattgctggtttttattctggttatcgcctcactggtgcagcttgtagaatattttcttaaaaaatccatacccggcctgtacaagggcatgggtatctacctcgccctgattacgactaactgcggcatactcgccgttacccttgacgtgataaacaacacctgcgtttttacgggcaaaccctatacgtttattgaatccattgtctacgccattggcgtcgcccttgggtttctgctttccatgctgctgttggcgggcatacgcaaccggctcaggacaagccctgttccggattttcttaaagggacgcccgtgctttttgtcgccacggcgctgctttcaatcgcctttatgggttttaaggggctggtacaatga

SEQ ID NO: 11074 - protein, 198 aa, Unknown
  Obtained from environmental sample
  DOMAIN (2)...(198): Rnf-Nqr subunit, membrane protein
  misc_feature (1)..(198): Xaa is any amino acid
MNLFKIFLAALLIDNVVLMRFIALCPFIGMSTDEDKSIGMGLAVVFVTVIATAVTWPIYRFILEPLGLVFLQLLVFILVIASLVQLVEYFLKKSIPGLYKGMGIYLALITTNCGILAVTLDVINNTCVFTGKPYTFIESIVYAIGVALGFLLSMLLLAGIRNRLRTSPVPDFLKGTPVLFVATALLSIAFMGFKGLVQ

SEQ ID NO: 11075 - DNA, 678 bp, Unknown
  Obtained from environmental sample
  misc_feature (1)..(678): n is a, c, g, or t
atgctgacactgaaaacttttagaaaattcgggctgaaagccgatcccttttcgggcgacgtggtaaaaaccgaggacgtgtacctgacggaggacacccggtttatcgcggaatatattttgcagtcggcgaaggccgggggcatggtcgcgctgataggcgaaagcgggagcggcaaaaccacgatccgccgttacgcgctggaccgcatggcggccgaaaaccagaagatacgggtaatcacattacgctgcatcgacaaaacgcggctttcgacaaacgccatctgcgacgctattatcggcgactgctccgctgaaatgccgaggcggacaatggaagccaaggcgcggcaggtggaaaggatactgacgcattccagccgcgccggatggagccatgtgctgatgatcgaggaagcccacgatctgaacatcagcaccctcaagtacctgaagcggttttgggaaatggaggacggctacaaaaaactgctgtcaatcgtattgatcgggcagatcgaaatgaaggcgaaacttgacgagtccaaaaactgggaggcgcgggaagtgatccggcgcatggaagtcctggaactggagccgctgggaagcggcgaagaaattgcaaaatacctgacatcaaattcggtcggctcggcagctcggccaatctga

SEQ ID NO: 11076 - protein, 225 aa, Unknown
  Obtained from environmental sample
  misc_feature (1)..(225): Xaa is any amino acid
MLTLKTFRKFGLKADPFSGDVVKTEDVYLTEDTRFIAEYILQSAKAGGMVALIGESGSGKTTIRRYALDRMAAENQKIRVITLRCIDKTRLSTNAICDAIIGDCSAEMPRRTMEAKARQVERILTHSSRAGWSHVLMIEEAHDLNISTLKYLKRFWEMEDGYKKLLSIVLIGQIEMKAKLDESKNWEAREVIRRMEVLELEPLGSGEEIAKYLTSNSVGSAARPI

SEQ ID NO: 11077 - DNA, 417 bp, Unknown
  Obtained from environmental sample
  misc_feature (1)..(417): n is a, c, g, or t
atgtatcagcgccttcagtcgttcttcaaattcgccccggaattttgtccccgcgacaagctggcccaaatccagggcgaggagttttttgtctttgaggccctcgggcacgtccccggcgactatgcgccgcgcaagcccttccacaatggcggtcttgccaacgccaggctcgcctatcagtatagggttgttttttgtgcgcctggacaacacctgcatacatcggcgtatttcctcgtcccttccgatgacggggtcgattttttcctgccttgccagcgcggtaaggtcgcggcaatagcgctccagcacttggtacttgttttcggggttttgatcggttacacgctggttgccgcggacttgcctgagcgcgtccagaatcgcttttttggagacgcccgctttctttaa

SEQ ID NO: 11078 - protein, 138 aa, Unknown
  Obtained from environmental sample
  misc_feature (1)..(138): Xaa is any amino acid
MYQRLQSFFKFAPEFCPRDKLAQIQGEEFFVFEALGHVPGDYAPRKPFHNGGLANARLAYQYRVVFCAPGQHLHTSAYFLVPSDDGVDFFLPCQRGKVAAIALQHLVLVFGVLIGYTLVAADLPERVQNRFFGDARFL

SEQ ID NO: 11079 - DNA, 480 bp, Unknown
  Obtained from environmental sample
  misc_feature (1)..(480): n is a, c, g, or t
atgtgctgcgggtactcgtccagggtattcgcccctatacagcgcaattcaccgcgtgccagagccggttttagcaggttggaagcgtctgtcgcgccttccgccgcgcctgccccgaccagggtatgcagctcgtcaataaatagaattatctttccttcggctgcctgtacctcatgtatcagcgccttcagtcgttcttcaaattcgccccggaattttgtccccgcgacaagctggcccaaatccagggcgaggagttttttgtctttgaggccctcgggcacgtccccggcgactatgcgccgcgcaagcccttccacaatggcggtcttgccaacgccaggctcgcctatcagtatagggttgttttttgtgcgcctggacaacacctgcatacatcggcgtatttcctcgtcccttccgatgacggggtcgattttttcctgccttgccagcgcggtaaggtcgcggcaatag

SEQ ID NO: 11080 - protein, 159 aa, Unknown
  Obtained from environmental sample
  misc_feature (1)..(159): Xaa is any amino acid
MCCGYSSRVFAPIQRNSPRARAGFSRLEASVAPSAAPAPTRVCSSSINRIIFPSAACTSCISAFSRSSNSPRNFVPATSWPKSRARSFLSLRPSGTSPATMRRASPSTMAVLPTPGSPISIGLFFVRLDNTCIHRRISSSLPMTGSIFSCLASAVRSRQ

SEQ ID NO: 11081 - DNA, 678 bp, Unknown
  Obtained from environmental sample
  misc_feature (1)..(678): n is a, c, g, or t
atgagcgaatacgggagaaaccattctgtcagccgccttatcggcgctccgccgggttatgtgggctacgagcagggcggccagcttaccgaaatagtgcgcaggcgtccctacagcgtggttctttttgacgaaatagaaaaagcccatccggaagtgtttaatgtttttttgcagattctcgatgacgggcggctaacggacggacagggccgtatcgttgatttcaaaaatgttataatcattatgacaagcaatatcggctcggatttgattcttgaggaggaaaacacagcgtcaataagggattcccttctggaattgctcaagcggagtttcagaccggaattcctgaaccgcatcgacgagactgtaatcttcaaccggcttggtaaaaatgaaattggcagaatcgttgacattcagcttgaccgcctgtcgcggcggcttgccgaacgaaaaattacacttaacatatcaggcgcggcaaaagaattcctcgccgaacggggctatgatccaatgtacggggcgcgccccctcaaacggacgatacaggcggagctggaaaaccccttggcgaaattcgtcatctccgggaaaatccacgaaggcgatactgtcaccgcggacaaaaaaggcgaagggctggatttcaaaataataaataataagtaa

SEQ ID NO: 11082 - protein, 225 aa, Unknown
  Obtained from environmental sample
  DOMAIN (1)...(124): ATPase family associated with various cellular activities (AAA)
  misc_feature (1)..(225): Xaa is any amino acid
MSEYGRNHSVSRLIGAPPGYVGYEQGGQLTEIVRRRPYSVVLFDEIEKAHPEVFNVFLQILDDGRLTDGQGRIVDFKNVIIIMTSNIGSDLILEEENTASIRDSLLELLKRSFRPEFLNRIDETVIFNRLGKNEIGRIVDIQLDRLSRRLAERKITLNISGAAKEFLAERGYDPMYGARPLKRTIQAELENPLAKFVISGKIHEGDTVTADKKGEGLDFKIINNK

SEQ ID NO: 11083 - DNA, 342 bp, Unknown
  Obtained from environmental sample
  misc_feature (1)..(342): n is a, c, g, or t
atgaaacatttgtttgctttttttgctgttgtagttatttgcggctgtgcggcgcttaccgcaaggcgaggattgagcgagggggacggagaaatctttgagggagtggggcaggggtttcggggaccaatttctgtacaggtgcgtgtgagcgaaggcagtattacggagattgaaatcgttgattctatggaagatcgttttgtgggtggggcggctatggaagaattgatcgatcttgtcataatgtataatacagcggatattgacgctgtttcgggcgcaacggaaacaagcgaggggtttttagaggcggtaagaaatgctatacttagacaatga

SEQ ID NO: 11084 - protein, 113 aa, Unknown
  Obtained from environmental sample
  SIGNAL (1)...(20)
  DOMAIN (39)...(113): FMN-binding domain
  misc_feature (1)..(113): Xaa is any amino acid
MKHLFAFFAVVVICGCAALTARRGLSEGDGEIFEGVGQGFRGPISVQVRVSEGSITEIEIVDSMEDRFVGGAAMEELIDLVIMYNTADIDAVSGATETSEGFLEAVRNAILRQ

SEQ ID NO: 11085 - DNA, 573 bp, Unknown
  Obtained from environmental sample
  misc_feature (1)..(573): n is a, c, g, or t
ttggagaaaaacattagggaacagaacagcagaaaaatacacatcgtttttttagtcctttttttattgtttgtctgcacggggctttccgcccagcagcagtacaggataggggacaccggtcctgcgggcggcatcgtgttttatgacaagggctttgcctcggacggctggcgatatctggaggcggcgcctgccggcacggaagccgaagctgtatgggggcccaatacagatgtcgccgggacggggacagcggttgggagcggcaggcggaacacccggcttattgtcgcggcttccggagagagcgaaagcgcggcgcgcttatgcgccaatctgaatatcaacgggtacaacgactggtttttgccgagtattgaagagctggatttaatgtacgaaaacctgaagcatagggggctcggtgcttttaaagatggattttactggtcttcgtcgcaggacgccggcaactactacctggcgctgaccaggttgttcagtgacggcaaacagtacatcggctacaaagactacgttaacaacttgcgtgccatccgggctttttaa

SEQ ID NO: 11086 - protein, 190 aa, Unknown
  Obtained from environmental sample
  misc_feature (1)..(190): Xaa is any amino acid
MEKNIREQNSRKIHIVFLVLFLLFVCTGLSAQQQYRIGDTGPAGGIVFYDKGFASDGWRYLEAAPAGTEAEAVWGPNTDVAGTGTAVGSGRRNTRLIVAASGESESAARLCANLNINGYNDWFLPSIEELDLMYENLKHRGLGAFKDGFYWSSSQDAGNYYLALTRLFSDGKQYIGYKDYVNNLRAIRAF

SEQ ID NO: 11087 - DNA, 633 bp, Unknown
  Obtained from environmental sample
  misc_feature (1)..(633): n is a, c, g, or t
atgcggaggtgtaaaatgagagaagatacaaatttctacgaatccaattactggtttatggcaaaaatatttgccggagtgtggctggttatagccggcgcgccttttgtatttcaattattggcaaccttcaaaagccagggagaatttattaccaacggtcttttcggactgcctaaatccgtgtatttaagaaattatattaccgtattgcagggcgggttttacagatatttttttaacagcatgttcgtcattgtcatctctctggcattgctgttattattcagcgcttttgccgcctatccgctttcccgttttaaattcatactgaacaaacccatattcagcgccattgtcgctacaatgtccatacccatccatattacccttattcctgtgttcatgatgacaattcgttttaatatttacgatcgtttgtacgcccttatcggccctaatgtggcttttaaccttcctgtgtcaattttcatcatgacgtcttttatgcaggggatttcaaaggaaatggaagaagccgccgagattgacggttgcagcaaatttgctgtgttttttaaaatactttttcccttgtcaaagcacggggcttgcgacccttgccatttataa

SEQ ID NO: 11088 - protein, 210 aa, Unknown
  Obtained from environmental sample
  misc_feature (1)..(210): Xaa is any amino acid
MRRCKMREDTNFYESNYWFMAKIFAGVWLVIAGAPFVFQLLATFKSQGEFITNGLFGLPKSVYLRNYITVLQGGFYRYFFNSMFVIVISLALLLLFSAFAAYPLSRFKFILNKPIFSAIVATMSIPIHITLIPVFMMTIRFNIYDRLYALIGPNVAFNLPVSIFIMTSFMQGISKEMEEAAEIDGCSKFAVFFKILFPLSKHGACDPCHL

SEQ ID NO: 11089 - DNA, 486 bp, Unknown
  Obtained from environmental sample
  misc_feature (1)..(486): n is a, c, g, or t
gtgaagatggaaaacggacaagaatatactgttgatagcgactttttagtgtttggaatccctgtattggacactcagcatgcaaatttggtacgcatatgcaacaatttgcgtatggcctgccttaatggtgtggagacaagaaacaatcgttttcaaagggctattcatgaagcggcggattatgcccgttatcatttcagcaccgaagaaaaacttatgtccattttggaataccccggtttttatgaccataaaaaagaacatgacgaatttatatgggaaattttgaaccgttcaaagcaacttattgaaggagacgaacagctcgctgaaaagtttgtccactttctcaatgactggatacggaaccatatagccctttatgacaaggcgttttccgattacttcctttcaatgaagcaccacggcaaactgaagctgattcttagcgcgcaccaggttttatcgtcaaattcagcatag

SEQ ID NO: 11090 - protein, 161 aa, Unknown
  Obtained from environmental sample
  DOMAIN (19)...(77): Hemerythrin HHE cation binding domain
  misc_feature (1)..(161): Xaa is any amino acid
MKMENGQEYTVDSDFLVFGIPVLDTQHANLVRICNNLRMACLNGVETRNNRFQRAIHEAADYARYHFSTEEKLMSILEYPGFYDHKKEHDEFIWEILNRSKQLIEGDEQLAEKFVHFLNDWIRNHIALYDKAFSDYFLSMKHHGKLKLILSAHQVLSSNSA

SEQ ID NO: 11091 - DNA, 903 bp, Unknown
  Obtained from environmental sample
  misc_feature (1)..(903): n is a, c, g, or t
atgaataattatttaccctgcaatcccaatgctcagactgaggcgcgtaatgtgctggattatttgtcgaatctgcgcggacgcggaattattttaggtcagcacactcagacgcgcgctcaggaggaacttgaatacatccgggaagtgacgggcaaagagccggctctttgcgggtttgaacttctcgcttattcgccaaacatcaactataaagaaagcggcgctgaatgtattacagaagttgaagaaaataaaaactcccttgaaaaagcttttgaatgggcagataaaaaagggcttataacctttacatggcactggttctcgccgctatacggcgcggacaaggcgttttatcagaaaaacacgacttttgacgcaagactggcgcttaaagaaaccggtccggagcgcgccgcattcttaagcgacatggacgcaatggcggaactgttaaagccgttttgccaaaaacacattcccatcctgtggcggcctttccacgaagcgcacggcgaatggttctggtggggaagccgagggccggatatagcgcgaaagctgtggctggatatgtatgaacgttatacctgcgtccacaagctggacaatttaatctgggtatggaattcgccgttaaaaaaaggttatgtaggcgataattattgtgacgtaatttcccgcgacatgtacctgcccgagcatacgcacagcgactaccacgaagcttatgaagagcttttacaattgacatcttccgataaaattaccgcattgggagaaacaggctctatcccgggtcttgccgccctcgccgaaacaaaaattccatggacatggtttatgacatggagcaagagtattgccgcgaagcttcacaagccgtactcggccatctga

SEQ ID NO: 11092 - protein, 300 aa, Unknown
  Obtained from environmental sample
  DOMAIN (7)...(299): Glycosyl hydrolase family 26
  misc_feature (1)..(300): Xaa is any amino acid
MNNYLPCNPNAQTEARNVLDYLSNLRGRGIILGQHTQTRAQEELEYIREVTGKEPALCGFELLAYSPNINYKESGAECITEVEENKNSLEKAFEWADKKGLITFTWHWFSPLYGADKAFYQKNTTFDARLALKETGPERAAFLSDMDAMAELLKPFCQKHIPILWRPFHEAHGEWFWWGSRGPDIARKLWLDMYERYTCVHKLDNLIWVWNSPLKKGYVGDNYCDVISRDMYLPEHTHSDYHEAYEELLQLTSSDKITALGETGSIPGLAALAETKIPWTWFMTWSKSIAAKLHKPYSAI

SEQ ID NO: 11093 - DNA, 672 bp, Unknown
  Obtained from environmental sample
  misc_feature (1)..(672): n is a, c, g, or t
atgataggttttaatgtaattcatgcggcgtataaaaacaatgtaaaaaaacttgtcaatcttggttcgtcatgtatttatccaaaacttgccccccagcccatgaaagaagagtaccttttatctgatctgcttgaaccaaccaatgaagcgtacgcgattgcaaaaataaatgttataaagctttgtaccttttttaatctgcaatatcgtaccaattatctttcggtgatgcctgctaacctgtatggaccgggtgataattatgatccaaacagctcccacgtgctaccggcgcttatccgtaagttccatgaagcgaaaatttcaggttctgaccgggtaatcctttggggcgacgggtcgccccggcgcgaatttttattcagcgatgatctggcgtccgcgctggttatgctcatgcagaaatataacgccggtgatttatcgaaccctgccggtgattttgtcaatatcggcagcggtaaggatttgaccatcaaagaattggcggaaaagatacgggacattgtatatagaggcatacaaaaccggacttgccatattgaatgggatagttcaaagcccaacggtacgccgcagaaattgctggatatttccagaataaccaacctgggcttttcaccgaaaatcgggttacaaggggaatag

SEQ ID NO: 11094 - protein, 223 aa, Unknown
  Obtained from environmental sample
  DOMAIN (1)...(160): NAD dependent epimerase/dehydratase family
  misc_feature (1)..(223): Xaa is any amino acid
MIGFNVIHAAYKNNVKKLVNLGSSCIYPKLAPQPMKEEYLLSDLLEPTNEAYAIAKINVIKLCTFFNLQYRTNYLSVMPANLYGPGDNYDPNSSHVLPALIRKFHEAKISGSDRVILWGDGSPRREFLFSDDLASALVMLMQKYNAGDLSNPAGDFVNIGSGKDLTIKELAEKIRDIVYRGIQNRTCHIEWDSSKPNGTPQKLLDISRITNLGFSPKIGLQGE

SEQ ID NO: 11095 - DNA, 468 bp, Unknown
  Obtained from environmental sample
  misc_feature (1)..(468): n is a, c, g, or t
gtgaacgagattatcagaatcggttcggcgggaggctataaggacagcctgaacttgtttgacgtggttctggtaacggaagcctacagcgaatccacttttgcccgcagccagagcgggtatgccgacaaccgccttaagccggacgatgaaatgtgccggaagctcagagaggctgccgtaaaactggggtatcctctggtagaggggactatccattccagcgatgttttttaccatgaagacagacaaggcgagccttactggaagcaggtaatgaaagagcacgactgcctcggcgttgagatggaaagtttcgcccttttccataacgcgaaggtaacggggaaaaaagccgcatgcctgctgaccatttccaacttgttttcaggcgggcaggaaaccacaaccgaagaacgggaaaagagctttacccggatgatggagatagctttgggagttttatag

SEQ ID NO: 11096 - protein, 155 aa, Unknown
  Obtained from environmental sample
  DOMAIN (1)...(155): Phosphorylase family
  misc_feature (1)..(155): Xaa is any amino acid
MNEIIRIGSAGGYKDSLNLFDVVLVTEAYSESTFARSQSGYADNRLKPDDEMCRKLREAAVKLGYPLVEGTIHSSDVFYHEDRQGEPYWKQVMKEHDCLGVEMESFALFHNAKVTGKKAACLLTISNLFSGGQETTTEEREKSFTRMMEIALGVL

SEQ ID NO: 11097 - DNA, 576 bp, Unknown
  Obtained from environmental sample
  misc_feature (1)..(576): n is a, c, g, or t
ttgtggcttcttcaggaaagccgcagacaatggaaacgcgaaggcgaaacattaagttacgccgcgatagaagacgcgatagccgataacgcctctccggaagtttaccttgacgcggaacttaatgatttcggcgctccgggagatcttccttccctatttaacaagttttttacggagacaggccagaagccgctgaaaaataagattgacatggcgcattgcatcatggaaagcctcgcgttaagttatgattacagaatcaggcagcttgagcgcataacaggaaaaaaatttaactctgtcaatattatcggaggcggatcaaaagatacgaacctgatgcgttttaccgcaaacgcgacggggaagaaagtaattgccggcccctcggaggctaccgcgattggcaatatcatcatacagctgattgcggcaggagaattaaagtcggtaaaggaagcgcgtgaaaaaattgagggcttggtcagttaccttcctgaagacggggaaatctggaacaggaagcgggaaaaattccaggcaattttagccgcctctaaaaaccggaaataa

SEQ ID NO: 11098 - protein, 191 aa, Unknown
  Obtained from environmental sample
  misc_feature (1)..(191): Xaa is any amino acid
MWLLQESRRQWKREGETLSYAAIEDAIADNASPEVYLDAELNDFGAPGDLPSLFNKFFTETGQKPLKNKIDMAHCIMESLALSYDYRIRQLERITGKKFNSVNIIGGGSKDTNLMRFTANATGKKVIAGPSEATAIGNIIIQLIAAGELKSVKEAREKIEGLVSYLPEDGEIWNRKREKFQAILAASKNRK

SEQ ID NO: 11099 - DNA, 594 bp, Unknown
  Obtained from environmental sample
  misc_feature (1)..(594): n is a, c, g, or t
atggtatgcgaaacaggaaatttcgccgtccgctgcctaggcaagctggacaaagaatttgacagcacgacaaaaaatcccggtgtatattttcttgaaaaggcgacggcgggagcgtaccttggtcctttgacgttacacattcttaaacaggcaataaaagataaaattttaaaatttaaaaagtccgatgaactgttgaatatgccccatcttgaaacaagattcttaaacgagtttgcccacgctcccctgtcaaatcagggaccgctgggctcgctcttcgccgccgatgaaaccaacgctctcgcctcagtccaatacattacgtcgttagttacagaacgcggcgctcttttttcggcggcagtgttagccgcaactattatcaaagcgggcggcaaatatgagccgtattcgcccatccgcgtcgccgtagagggaactacatacatgatttacaaaggaatgcgccgttctcttgagtcgtaccttcatcaaatattgttcaaagaaaaaccgcgtccgtatattgtttctcctgttgaacaagcaagccttttcggagcggctgtcgcggcattgtcaaaataa

SEQ ID NO: 11100 - protein, 197 aa, Unknown
  Obtained from environmental sample
  DOMAIN (3)...(195): Hexokinase
  misc_feature (1)..(197): Xaa is any amino acid
MVCETGNFAVRCLGKLDKEFDSTTKNPGVYFLEKATAGAYLGPLTLHILKQAIKDKILKFKKSDELLNMPHLETRFLNEFAHAPLSNQGPLGSLFAADETNALASVQYITSLVTERGALFSAAVLAATIIKAGGKYEPYSPIRVAVEGTTYMIYKGMRRSLESYLHQILFKEKPRPYIVSPVEQASLFGAAVAALSK

SEQ ID NO: 11101 - DNA, 804 bp, Unknown
  Obtained from environmental sample
  misc_feature (1)..(804): n is a, c, g, or t
atggaagaaatttccggcataaaaaccgaccaaaaaggattaaatgaattcataaaacaagtttctccgttttatgaaggaaaagaaattataaaaactctcgtcttgcgtaaaaatcacataactccggtatcattgcgaaaaaacggcgaagaaagtaaagaaactgccggtaaaggtacatctgttaataaagaattttcaggcgttagatcgaatgatgtttttaaaaaagtagattcaatactgtcccgtttttcacaaagcgatgatgaatcatcggaaaaatttaattcgggcagtttcggaacaattgcgcacatttgtattgaggcgcatttggaaaaagaggaggctgtaataccgtcaaatattttagggcttttaaatgaaaatgaatttgacagtctgcttgaagccgggaaaaaaatagcccgccgttttgtggcttctccccttggaaaaatagcgcaaatggcaaagttgagggagagcgagtttccattcagaacgctgttaaaaaacaaagaaggaaaagaaatattcataaacggtactattgacttattttttgaagataagaacgccattcatattgtagattttaaaaccgacaacgccgaaagaccatgcgagcatacggcgcagatgtcctgttattatcaggctatttcaaatctttttgccattcccgcgaaaaaagaatgccgtatttggctttactatttaagaacgggtcatgcggtggaaatgacggagagggtgaaggcggctaatattgagcaaagggcgtttgaggattga

SEQ ID NO: 11102 - protein, 267 aa, Unknown
  Obtained from environmental sample
  misc_feature (1)..(267): Xaa is any amino acid
MEEISGIKTDQKGLNEFIKQVSPFYEGKEIIKTLVLRKNHITPVSLRKNGEESKETAGKGTSVNKEFSGVRSNDVFKKVDSILSRFSQSDDESSEKFNSGSFGTIAHICIEAHLEKEEAVIPSNILGLLNENEFDSLLEAGKKIARRFVASPLGKIAQMAKLRESEFPFRTLLKNKEGKEIFINGTIDLFFEDKNAIHIVDFKTDNAERPCEHTAQMSCYYQAISNLFAIPAKKECRIWLYYLRTGHAVEMTERVKAANIEQRAFED

SEQ ID NO: 11103 - DNA, 810 bp, Unknown
  Obtained from environmental sample
  misc_feature (1)..(810): n is a, c, g, or t
ttggcgatgaatctttttgatgtgactgaacaatacggtcttgatctctccgcgggcggttatattgaagcgtgtaaccgcgaatggcaaagcattgacgattttcgcctcagcggaaaagacctaaactgcccaaagtccatgaatactaatttgcatgttttggaagcttatacaaatcttgtttgcgcctgtggaggtgaacgggtacgcaatgcacttgaagcattgttgcgtataacgcttgataaaattattaatcgcgattggcactttgaactattcttcgacatgaattggaattcgcttgcgaaagatatttcctatggccatgatattgaaggtagttggcttttgtatgaagcggcgctggctattggtgatgaaaatattatctccaaagtaaagcaaactgcgttagctattacggaagttacctataacgccgccattgaccgtaacaacggcgggctactcagcggttgtgacgcggcggggaatcatcacgctaaaaaggaatggtggccgcaggcggaggcagtcgttggtttttacaatgcgtatgagttatcgggtgagcggaaatattttgacgcggctgatagcgtttggggttacatccagaatcattttgtagatagcgcacatggcgaatggtttaatgaattgagtattgataatacgccggatattaatttgccaaaagccgggttttggaagtgcccttatcataatgctcgcgcttgtttggaggtggggaggagagttgggggtgaagataatttacttttcaggaagcgcaaatggtaa

SEQ ID NO: 11104 - protein, 269 aa, Unknown
  Obtained from environmental sample
  DOMAIN (6)...(248): N-acylglucosamine 2-epimerase (GlcNAc 2-epimerase)
  misc_feature (1)..(269): Xaa is any amino acid
MAMNLFDVTEQYGLDLSAGGYIEACNREWQSIDDFRLSGKDLNCPKSMNTNLHVLEAYTNLVCACGGERVRNALEALLRITLDKIINRDWHFELFFDMNWNSLAKDISYGHDIEGSWLLYEAALAIGDENIISKVKQTALAITEVTYNAAIDRNNGGLLSGCDAAGNHHAKKEWWPQAEAVVGFYNAYELSGERKYFDAADSVWGYIQNHFVDSAHGEWFNELSIDNTPDINLPKAGFWKCPYHNARACLEVGRRVGGEDNLLFRKRKW

SEQ ID NO: 11105 - DNA, 786 bp, Unknown
  Obtained from environmental sample
  misc_feature (1)..(786): n is a, c, g, or t
ttgacatatatcattgattattcggaaaaaaaatttgcaaaagaattggtaggtgaaattaattctgatagcgatgtaataaatgaaggaaaaatcacagatgatattttagaagtcttggttaaaacaggttatgcgataaatattgccaaagcaaaaggtaaattactccttgatgatataattgatgaacacgattatataaaggatattgataagttattagaattgttaccggaagaaagcggtttcaagctaagaaacggagtaattactggtagcggaatgcctgaacgcccaaaggtttgtcttaaccagaaaaatttttataaaatccgagacctatgggacacggttacaaaacgttatatacttaaatttgaaaaattaagtaaagacgaaatagaaaatttgctgatagatatattttctaacaatgaatattttataaaacctttaatagagataaaggacgagtatataaaaaataatgggcaaattgccattattgaaactggcggatacagagctattgaatccgacatcagtataataaattatggcgaatttttaaaacgactaaataaacgtacatcactgccaatagccatgttacacaaaactctttctatagcgcgtaaagagaaaaaaacgtctgctgaactatttaataccaatacacttgaaaaaattattaaagtatttgaattaaaatttgcagaaacatataaacaaaagttcacataccaatctcttgattacaccgctcnnaacagtcttttttag

SEQ ID NO: 11106 - protein, 261 aa, Unknown
  Obtained from environmental sample
  misc_feature (1)..(261): Xaa is any amino acid
MTYIIDYSEKKFAKELVGEINSDSDVINEGKITDDILEVLVKTGYAINIAKAKGKLLLDDIIDEHDYIKDIDKLLELLPEESGFKLRNGVITGSGMPERPKVCLNQKNFYKIRDLWDTVTKRYILKFEKLSKDEIENLLIDIFSNNEYFIKPLIEIKDEYIKNNGQIAIIETGGYRAIESDISIINYGEFLKRLNKRTSLPIAMLHKTLSIARKEKKTSAELFNTNTLEKIIKVFELKFAETYKQKFTYQSLDYTAXNSLF

SEQ ID NO: 11107 - DNA, 654 bp, Unknown
  Obtained from environmental sample
  misc_feature (1)..(654): n is a, c, g, or t
atgggtatatatatagaggcgcttatcctttatattctcctgtttttccccggatcagcctttatatttacaaataaggaagccgtggttacgaatttttccgtaacagcggaattattaaatattttcacatatttattaccttcgttagccttaatctggtatttaatatacaaggcgcgtaagattgaattatgggctgtaaagccggggagaaaagatattgcggcctttgttatcacattcccgagcttattaattatagggttagccgttacttttacaggcgtatatataggcgaacaatcctctcaaataactcttcaatctccttcgtcagttattgaatggattattcttattattaactgcttccttgcggcttaccttgaggaaagctatttccgctattatattataaccaaaagagaagaattaaatttaaacgccgcgtcagcgctggcgctttctgtagttatgttctctgtttgccatatttacgaggggccctggggttttatgaacgccgtaatttcaggtacggttcttgcctatatttttttacggtacacttctcttcacggtatcgctattgcccatgcgttgtataatatttcaatatttattattaacgcattaatcaataaaacctaa

SEQ ID NO: 11108 - protein, 217 aa, Unknown
  Obtained from environmental sample
  DOMAIN (118)...(211): CAAX amino terminal protease family
  misc_feature (1)..(217): Xaa is any amino acid
MGIYIEALILYILLFFPGSAFIFTNKEAVVTNFSVTAELLNIFTYLLPSLALIWYLIYKARKIELWAVKPGRKDIAAFVITFPSLLIIGLAVTFTGVYIGEQSSQITLQSPSSVIEWIILIINCFLAAYLEESYFRYYIITKREELNLNAASALALSVVMFSVCHIYEGPWGFMNAVISGTVLAYIFLRYTSLHGIAIAHALYNISIFIINALINKT

SEQ ID NO: 11109 - DNA, 591 bp, Unknown
  Obtained from environmental sample
  misc_feature (1)..(591): n is a, c, g, or t
atgcgtcaaaccgaaggaaagtttgtttatgaacgcgccgccccgggaactccaagcgcgtcggcaaggcaagctcttgaacttcttattatggcaggactggttcatccggtaacccataccgctgccaatggtattccccttggcgccgaggcaaaccggaaataccgccggatgattccctgtgataccggcctctttttgcatacccttggtcttcgttcagagatgctacccgccgctgatttttccgctgttaatcgtggttctctggcggaaatttttaccggcttagaactgttaaaagccgcttcctgttttgccccacaggaattattctgctggcagagatcggctggtccgggttcttcaaaaggtaacgcccaagtcgattttcttgttcagagagggtcaagcattatacctatagaagtcaaatcgggaacccagggcagcatgcaaagcctccgtctttttatgaaagaaaagcatattgaaaggggcgtacgtacatcccttgaaaacttcggacgctatgaggatatagatatttatccgttatatgcgattggaaatgtagttaggggctga

SEQ ID NO: 11110 - protein, 196 aa, Unknown
  Obtained from environmental sample
  misc_feature (1)..(196): Xaa is any amino acid
MRQTEGKFVYERAAPGTPSASARQALELLIMAGLVHPVTHTAANGIPLGAEANRKYRRMIPCDTGLFLHTLGLRSEMLPAADFSAVNRGSLAEIFTGLELLKAASCFAPQELFCWQRSAGPGSSKGNAQVDFLVQRGSSIIPIEVKSGTQGSMQSLRLFMKEKHIERGVRTSLENFGRYEDIDIYPLYAIGNVVRG

SEQ ID NO: 11111 - DNA, 675 bp, Unknown
  Obtained from environmental sample
  misc_feature (1)..(675): n is a, c, g, or t
atgatggcccatgtcagggtgagagtagaaaatcttgatgagacggattctcttataaccgccctgatgaaaaaatataacgcgtacgcaagctccactaacattgaagagaattcccgccattattcgatccgcgttccctcgcctgtatacaaggccgctatggatgaaataaacggcatgggaaggttactgggccgctcggaaaacgccgaggacgtaaccctccgttactatgatcttgaggggcgtcttgcaaccaaaaaagaactgctaaaaacttttcaatcatatttggggaaagccaaaaatatcgaagagattttatccgtggaaaagagaatcgccgaactacaatatgaaatagagggaaccggcaaggaactgcgtaacctcgctaacagggtggattatgccacaatcgaactttccgtttttgggccaatagcctcatcgccgtatcggggcctaaccctggccgacagacttaaggaactttttggcagttttggcaatttcctttctttgatggtaacaatgatcataggcattgtgatttttggcattccgattttgctcctgctgattttctttttctggctattattcggaaagattggcctgttgaaaaaaatttggcgtaaggcggcaggcgagaaacagaaacctgtttag

SEQ ID NO: 11112 - protein, 224 aa, Unknown
  Obtained from environmental sample
  misc_feature (1)..(224): Xaa is any amino acid
MMAHVRVRVENLDETDSLITALMKKYNAYASSTNIEENSRHYSIRVPSPVYKAAMDEINGMGRLLGRSENAEDVTLRYYDLEGRLATKKELLKTFQSYLGKAKNIEEILSVEKRIAELQYEIEGTGKELRNLANRVDYATIELSVFGPIASSPYRGLTLADRLKELFGSFGNFLSLMVTMIIGIVIFGIPILLLLIFFFWLLFGKIGLLKKIWRKAAGEKQKPV

SEQ ID NO: 11113 - DNA, 378 bp, Unknown
  Obtained from environmental sample
  misc_feature (1)..(378): n is a, c, g, or t
ttgtgggagagattcgagcgaagagcggcgcaggcggtgaggggcaaagcctccggaaccgtagacatgaaccagctcaagcagagcgtcagttacgccgccgaggagctctcgtccggcatcgacctcgcgttttcctactacaaaaactctgaaaaaacggattccatagataagatagtgctttcgggcggaggggcgtacatacccaccttggtgcaatttttggagtcgcgccaccagacgaaggtgcagatttcaaacccgctcgcccacatccagtacaacaaaaatctcttcgggaacaccaatgtggataccataggcgccctcctaaccgtggccgtgggattggcgctgaagaagacgggtgaataa

SEQ ID NO: 11114 - protein, 125 aa, Unknown
  Obtained from environmental sample
  misc_feature (1)..(125): Xaa is any amino acid
MWERFERRAAQAVRGKASGTVDMNQLKQSVSYAAEELSSGIDLAFSYYKNSEKTDSIDKIVLSGGGAYIPTLVQFLESRHQTKVQISNPLAHIQYNKNLFGNTNVDTIGALLTVAVGLALKKTGE

SEQ ID NO: 11115 - DNA, 849 bp, Unknown
  Obtained from environmental sample
  misc_feature (1)..(849): n is a, c, g, or t
atgatcgcgagaagcgattacatgttatgcttcaacgctaatgtaaaaataattgaatgtgatataaaacctttttcgctaaaagaattacttttcttccctctcaaaacagcgcggcaaataaatagcgcaagtctttatttctcgccctatttcaatatcccctgttctgtaataatccctatctttaccgcaattcacgacattattttcgccgatatgcctgaactaacatctggaatcggtctttccgcgcgtatgtggttttaccgcagagcatataaaaaatcgcggaaaatatttaccgtttccaaattttcaaaatcaagaatacaacatcatcttgggataaaaaagcctgttattgttactcattcggctattcaacctatgttccttgcgtaccgcgccaatattcaaaacatacaaaaaacgcaaaccattgtatttgtcggtaacataaaaaaacacaaagggcttgatattttaattgacgcttttattcttgcaaaaaacgaaggtttgccgcataagttatttgtcattggcgcaaaagaaaattttcgcacttccgacaatacggtattaaaaaaaatagaagcgctcggcggcgaagcggtaacttttacaggatttatttctgatgaacaagttatggagtacctttcaaaagccgctctccttgtacagccttcgttgtatgagggtttttgccttcctccgcttgaggctcttgttttgggcactcacgctctgatttccgatattcccgtactaaaagagatttattcgggctatcctgtaacattctttanaagcgaagatccggcggacttaaaagaaaaatga

SEQ ID NO: 11116 - protein, 282 aa, Unknown
  Obtained from environmental sample
  DOMAIN (132)...(282): Glycosyl transferases group 1
  misc_feature (1)..(282): Xaa is any amino acid
MIARSDYMLCFNANVKIIECDIKPFSLKELLFFPLKTARQINSASLYFSPYFNIPCSVIIPIFTAIHDIIFADMPELTSGIGLSARMWFYRRAYKKSRKIFTVSKFSKSRIQHHLGIKKPVIVTHSAIQPMFLAYRANIQNIQKTQTIVFVGNIKKHKGLDILIDAFILAKNEGLPHKLFVIGAKENFRTSDNTVLKKIEALGGEAVTFTGFISDEQVMEYLSKAALLVQPSLYEGFCLPPLEALVLGTHALISDIPVLKEIYSGYPVTFFXSEDPADLKEK

SEQ ID NO: 11117 - DNA, 795 bp, Unknown
  Obtained from environmental sample
  misc_feature (1)..(795): n is a, c, g, or t
atgggcgaaaacaagcgtgtagtgtcattgcccactccaacaaaaacaggtcacgatttgaacggttggtttacggcttcgacaggtggcgaaaaggtaacagaaggttatataataagcggaaatatcaccgtttatgctcgatggattcctacctacaccataacgttcggtgccgctacaaacggcgtactaacagcaacgcttgacggcagtccgataactaccggcacattgatacaaagcggtaaaaacgttgtattcactgcggttcctgatatgggttacgacataggcagttggatggtcaacggtacgttagttgccgaagccactaacatatatactctcttaaatgtctcatcaacagcagtggtaacagtatcatttaacttacgcgctgtagatgcaatagcatcgccaaaccgcgtaatccccgccacccgtcccaacaacgaagccgtgtcaatatcccccgtctcttcgctaaccgccgagttcaccgtcggaccgaacccagcgagcagatcgtccggcaaggtgaatttcttcctacacggtagccgcatagcctacgcgacgctgtcgatttatgacgcttcgggtaatatcgttaggaagatacgcgtaattgacgacgctgtcggcagccaaacaaggcgtaaggtaagttcgtgggatttgcgtgacagcaatggtcgtttggtggcggagggcacgtatttggtacgcggcgtggtcaagacgaaaggcggcaagtcggagcgtgtgtcgttggtcgtgggggtgaggtag

SEQ ID NO: 11118 - protein, 264 aa, Unknown
  Obtained from environmental sample
  misc_feature (1)..(264): Xaa is any amino acid
MGENKRVVSLPTPTKTGHDLNGWFTASTGGEKVTEGYIISGNITVYARWIPTYTITFGAATNGVLTATLDGSPITTGTLIQSGKNVVFTAVPDMGYDIGSWMVNGTLVAEATNIYTLLNVSSTAVVTVSFNLRAVDAIASPNRVIPATRPNNEAVSISPVSSLTAEFTVGPNPASRSSGKVNFFLHGSRIAYATLSIYDASGNIVRKIRVIDDAVGSQTRRKVSSWDLRDSNGRLVAEGTYLVRGVVKTKGGKSERVSLVVGVR

SEQ ID NO: 11119 - DNA, 909 bp, Unknown
  Obtained from environmental sample
  misc_feature (1)..(909): n is a, c, g, or t
atggccgagatagccgctggtagagccgcttatgaatacgaagaatttgtcggcggctatcttcttgttgaagaaaatgaagatacgcttgacgctattcttactgccatgatccgcgccggttatgcaggagcggtgcgccatgtgaaccagctcttggacgcgaaggtcgtcggcgtgatcaattctccggcgcctctccccaacagcaataccgcctatatccccctggacgtgctacaagatgaagccggcatgatgctggaaggcgcggtaacggaacttgttatccgcgagaaaaacgcgcctgattcccgccttcccggcaaaagcgaaagcgccgccgcgattagtgccgcgctggaacggggccttgccgcgaatgggcaaaccatgccgacagaactggcggtgcatacctgggaagagtatatgcgggactacctgggtttcgaagctctggaaaactcgatgccgcagatggtagccgtactattgctgttgctatccttcatgggaatttcaaatacgatcctcctggctattttggaacgcaccagggaaaccggcatgatgcgcgcaatgggcatgaccgacaaccaaatgatcctggtctatatgctggaggctggctttctgggattcattggctcggtattggggatgattttgggctgcgctatcaattatccaatggtgaagtacggcatagattttagcgcaatagtcgatgtgatgggcggaagcggtgttggttttcgcgttacatcgctctttcgtagtatatggaatgtgccggtgattatcggttcangcatagtggcaaccctgatctcgtcttttatggcttacttccccgtccgcaggncgctgaagatgccgattacagagagcttgagngttgaatag

SEQ ID NO: 11120 - protein, 302 aa, Unknown
  Obtained from environmental sample
  DOMAIN (92)...(295): Predicted permease
  misc_feature (1)..(302): Xaa is any amino acid
MAEIAAGRAAYEYEEFVGGYLLVEENEDTLDAILTAMIRAGYAGAVRHVNQLLDAKVVGVINSPAPLPNSNTAYIPLDVLQDEAGMMLEGAVTELVIREKNAPDSRLPGKSESAAAISAALERGLAANGQTMPTELAVHTWEEYMRDYLGFEALENSMPQMVAVLLLLLSFMGISNTILLAILERTRETGMMRAMGMTDNQMILVYMLEAGFLGFIGSVLGMILGCAINYPMVKYGIDFSAIVDVMGGSGVGFRVTSLFRSIWNVPVIIGSXIVATLISSFMAYFPVRRXLKMPITESLXVE

SEQ ID NO: 11121 - DNA, 369 bp, Unknown
  Obtained from environmental sample
  misc_feature (1)..(369): n is a, c, g, or t
gtggtgctgccgggcagcctggtcaccaagcccaagcccaaccccactaaggcgggctacacttttggcggctggtacagggagtccgcctgcaccaacgcgtgggacttcgccaccgaagtggtaacgcaggatacggtgctgtacgccctgtgggggtatcgcgtatgggtaaactgcatgggcggtaggggcgtagggcatcaggtggtcgcgccgaacggcaccgctgttcagcccgccgacccggtgcgcgtgaacaagcgcttcatcggctggtacgccgaccagtgctgcgccaccccctgggacttcgacaacaacgagataacgaaagacggcgtgatgatttacgcaaagtgggagtga

SEQ ID NO: 11122 - protein, 122 aa, Unknown
  Obtained from environmental sample
  misc_feature (1)..(122): Xaa is any amino acid
MVLPGSLVTKPKPNPTKAGYTFGGWYRESACTNAWDFATEVVTQDTVLYALWGYRVWVNCMGGRGVGHQVVAPNGTAVQPADPVRVNKRFIGWYADQCCATPWDFDNNEITKDGVMIYAKWE

SEQ ID NO: 11123 - DNA, 378 bp, Unknown
  Obtained from environmental sample
  misc_feature (1)..(378): n is a, c, g, or t
atgaaagtaatatccaccgattcagcgccgaaggcaatcggaccatattctcaggctatcgtaacggacggactgctctttgcgtcagggcaaattccgctgtcgccggaaacaggcgatgtggtatcgggcggcataaaagagcaggcggaacaagttatgcaaaatatcgcggcggtgcttacggcggcgggaagtgattttacaaaagttgtaaaatcgacatgctttttaaccagcatggataatttcgccgcgttcaatgaagtttacgcaaagtattttaccgagaaacccgcccgttcctgcgtagccgtatccgccctgccgcgcggcgttttggttgaagtcgaagttatagccgaagtttccggataa

SEQ ID NO: 11124 - protein, 125 aa, Unknown
  Obtained from environmental sample
  DOMAIN (6)...(123): Endoribonuclease L-PSP
  misc_feature (1)..(125): Xaa is any amino acid
MKVISTDSAPKAIGPYSQAIVTDGLLFASGQIPLSPETGDVVSGGIKEQAEQVMQNIAAVLTAAGSDFTKVVKSTCFLTSMDNFAAFNEVYAKYFTEKPARSCVAVSALPRGVLVEVEVIAEVSG

SEQ ID NO: 11125 - DNA, 414 bp, Unknown
  Obtained from environmental sample
  misc_feature (1)..(414): n is a, c, g, or t
atggcggttgaatattttaattcgnaatatcacaatttcaatttaagctttaaaacaggaatagacaagttatatacttcaattgttgtttcttttgaaaacacatggaataattccgcttcgggagtaggaattggttccatccttcccataggtaaaatattttattttaatcccgaattaacttctctatggccttccataagtaattttagttatgagagttttgttccgtattttggcgttaactttaaaaatttcagtattgcggctggacctactataacatgggtaagaagaaataataaagataacccgctgccgaaaccgaattacagtttgtattatcacgaaataaacgataacaacagtatttcaattggttttagagcggcggcaagatttaggttttaa

SEQ ID NO: 11126 - protein, 137 aa, Unknown
  Obtained from environmental sample
  misc_feature (1)..(137): Xaa is any amino acid
MAVEYFNSXYHNFNLSFKTGIDKLYTSIVVSFENTWNNSASGVGIGSILPIGKIFYFNPELTSLWPSISNFSYESFVPYFGVNFKNFSIAAGPTITWVRRNNKDNPLPKPNYSLYYHEINDNNSISIGFRAAARFRF

SEQ ID NO: 11127 - DNA, 762 bp, Unknown
  Obtained from environmental sample
  misc_feature (1)..(762): n is a, c, g, or t
gtgtcgaaaggcgtagacgccgccctaaacgccggtgcgcgctcattcttgctcttcggcgtgccggagccaaaaacaaaagatgaaaccggcagcggcgcctacgacgaaaacggcgcggttcagcagtcgctcagaaacataaaaaaaaggttcggcggcgacgcctgcctcatcaccgacgtgtgcctatgcgaatacacaacgcacgggcactgcggccttgttaataacggcgcggtcgacaacgattcaaccctgccgcttctttcacaaaccgccctctcccacgttagatccggcagcgatatggtcgccccttccgcgatgatggacgggaccgtggccgccatacgaaacgcccttgacgcggacgggttcacggagatcccgataatgagctacgccgctaaatacgcctcagcgttctacggcccgttccgcgaagcggcagggtcggcgcctcggttcggggatagaaagagctatcaaatggactatcataacagcaacgaagcgcttaagcggatagatatcgatattgacgaaggggcggacatcgtaattgtaaaaccggctcttccctgcctagacataatctcattagcggcatcacggcggataaaagcgcctatagcgggttacagcgtcagcggcgagtacgctatgattaaggcggnggcggcttctgggtttattgacgaatataaagtgatgtgcgagagcgctgtctctgtttttagggcgggggcgggatattga

SEQ ID NO: 11128 - protein, 253 aa, Unknown
  Obtained from environmental sample
  DOMAIN (1)...(251): Delta-aminolevulinic acid dehydratase
  misc_feature (1)..(253): Xaa is any amino acid
MSKGVDAALNAGARSFLLFGVPEPKTKDETGSGAYDENGAVQQSLRNIKKRFGGDACLITDVCLCEYTTHGHCGLVNNGAVDNDSTLPLLSQTALSHVRSGSDMVAPSAMMDGTVAAIRNALDADGFTEIPIMSYAAKYASAFYGPFREAAGSAPRFGDRKSYQMDYHNSNEALKRIDIDIDEGADIVIVKPALPCLDIISLAASRRIKAPIAGYSVSGEYAMIKAXAASGFIDEYKVMCESAVSVFRAGAGY

SEQ ID NO: 11129 - DNA, 321 bp, Unknown
  Obtained from environmental sample
  misc_feature (1)..(321): n is a, c, g, or t
atggatacgttgttttttactgacgccatcattaacgagattgaaggcattatcggaatgccaaaactcaagcgcagtaaagagcaaattgactacatactcgcgaatattaaaaagcgcggtaaaaagatcgttacctctccgcaacaccgcgtaacaggcgtctgccgagaccccgacgacgacaagtacctagagtgcgccctcgccgccggagctgactacatcatcaccggcgacaaagatctgttagtcctcaaggagtacggtggagtgaaaatcgtgaacgcacggagttacttaaatatcgtgggcggatga

SEQ ID NO: 11130 - protein, 106 aa, Unknown
  Obtained from environmental sample
  misc_feature (1)..(106): Xaa is any amino acid
MDTLFFTDAIINEIEGIIGMPKLKRSKEQIDYILANIKKRGKKIVTSPQHRVTGVCRDPDDDKYLECALAAGADYIITGDKDLLVLKEYGGVKIVNARSYLNIVGG

SEQ ID NO: 11131 - DNA, 516 bp, Unknown
  Obtained from environmental sample
  misc_feature (1)..(516): n is a, c, g, or t
ttggccgtctacggcaagatcatcggcggcggaatgcctgtgggggcntacggcggcaaaaaggagatcatggaacttgtcgcgccaagcggccccgtctatcaagccgggacgctctccggcaatcctatcgcgatggcggcaggactcgcccaacttaccgcgcttgaaaatcaggacgtttacgaccgtatcaataagatgggtgaacgattagccgacgggctatccgacatagtgaaacgattgaggctaaaagcctgcgttaatcgtgcaggctctctcgtctgcctatttttcggaattgaaagcgccgacgattacacgtcggtcaaaagggcggatacgggactttacgctaaatatttccacggaatgctggacaacggcgtctacctcgcgccgtcgcagtttgaggcgatgtttgtttcgggcgcgcatacggagagcgatgttgacgagacgctggatagggcggaacgtgttgtggagagttcatccgcccacgatatttaa

SEQ ID NO: 11132 - protein, 171 aa, Unknown
  Obtained from environmental sample
  misc_feature (1)..(171): Xaa is any amino acid
MAVYGKIIGGGMPVGAYGGKKEIMELVAPSGPVYQAGTLSGNPIAMAAGLAQLTALENQDVYDRINKMGERLADGLSDIVKRLRLKACVNRAGSLVCLFFGIESADDYTSVKRADTGLYAKYFHGMLDNGVYLAPSQFEAMFVSGAHTESDVDETLDRAERVVESSSAHDI

SEQ ID NO: 11133 - DNA, 609 bp, Unknown
  Obtained from environmental sample
  misc_feature (1)..(609): n is a, c, g, or t
ttgcaaacaaaagggctcggcagagttatggaagcnccgtgtccgaaacaggagcagatatttttctcgtccgccggcgactttatgggcggcaatgtcaggctgcattttgattatgtcgtttttatcaaggcgactgagtaccttgaactgagcgatcaggataaataccaggcggcgcgggtgataggcgccgtcaaccagaagttgaaagacaaaaccgttttattgatggggccgggacgatggggaacgactacgccgtcgctgggtgttccggttcatttcagcgagttatgcaacatggccgcgttatgcgaagtatcatatccaaaagcgggcatagtgccggaattgtcttttggcagccacttttttcaggacatcgtggaatccgatattttttacgccgctgtttttgacggggaaccgggtattgtattctgccccgatcaaattttatcgcgggaaaatctgctggaacaaatgtataccggagaaaaaaaatgggattcggtgatacatgtagcgcaaacgcccggcttgatattacattccgatattaccaaccaaaaactgattatttattgggataaagatgctgtataa

SEQ ID NO: 11134 - protein, 202 aa, Unknown
  Obtained from environmental sample
  misc_feature (1)..(202): Xaa is any amino acid
MQTKGLGRVMEAPCPKQEQIFFSSAGDFMGGNVRLHFDYVVFIKATEYLELSDQDKYQAARVIGAVNQKLKDKTVLLMGPGRWGTTTPSLGVPVHFSELCNMAALCEVSYPKAGIVPELSFGSHFFQDIVESDIFYAAVFDGEPGIVFCPDQILSRENLLEQMYTGEKKWDSVIHVAQTPGLILHSDITNQKLIIYWDKDAV

SEQ ID NO: 11135 - DNA, 912 bp, Unknown
  Obtained from environmental sample
  misc_feature (1)..(912): n is a, c, g, or t
ttgaaaagattggatggacaggcgatgaaatgcgaattcagttttancccgtaccggaaagagactcccgactggagcgatccctttttcgattttctgaagagcagcgatatgggcgaatttcaccgctccatcgacggctatgccgaaacccccgttgtgagcctacctaaactcgccgatgagctcgggcttggcgcgattctcataaaggatgagtcgcatcgctacgggatcaacgccttcaagggtctcggcgcgagctacgcgatctaccgctttcttaaaggacaatggcaaaagaaatttgacgataccttttccccggccagttttaaggatccggaaaccatgaagcgcctggggtcttttaccttttgcgccgccaccgacggcaatcacggcaaggcggtcgcctggacagccaacaagctcagacagcgcgccgttatttatatgcccgataactccgcccaggcgcgcatcgacaatatcacgaaagagaacgccgaggttgtgcttgtcccgggcacctttgacgactgtgtggagaagtgcgcgggcgacgccgcaaaaaacggctggcaggtgatcggcgataccgcctatcccgggtatatggaaatcccgcagtacatcattttggggtactccacgatctttcgcgagcttgagtccaccctctgcaagccggtcagggctgatctggatatcgtttttctgcccgccggcgtgggcggggtagcgtccgcaggcgcgagctattttacgctgcgctacggcaaggatcgcccgaagctcgtgtgcgttgagccgaatgagtccgactgctttcttgaatccatcaaaaacggaaacggggatcccctctttacaaaagaggaatcggatgntcgatcatggcgggcttaa

SEQ ID NO: 11136 - protein, 303 aa, Unknown
  Obtained from environmental sample
  DOMAIN (44)...(303): Pyridoxal-phosphate dependent enzyme
  misc_feature (1)..(303): Xaa is any amino acid
MKRLDGQAMKCEFSFXPYRKETPDWSDPFFDFLKSSDMGEFHRSIDGYAETPVVSLPKLADELGLGAILIKDESHRYGINAFKGLGASYAIYRFLKGQWQKKFDDTFSPASFKDPETMKRLGSFTFCAATDGNHGKAVAWTANKLRQRAVIYMPDNSAQARIDNITKENAEVVLVPGTFDDCVEKCAGDAAKNGWQVIGDTAYPGYMEIPQYIILGYSTIFRELESTLCKPVRADLDIVFLPAGVGGVASAGASYFTLRYGKDRPKLVCVEPNESDCFLESIKNGNGDPLFTKEESDXRSWRA

SEQ ID NO: 11137 - DNA, 594 bp, Unknown
  Obtained from environmental sample
  misc_feature (1)..(594): n is a, c, g, or t
ttgctcgcgctaatgagctgggatgagggggattgccataacgnatcatgggccgcccttcgggcggggagatgnaataatccgttttttgagcggtttaagtcgccgtatccgaacattgagctgctgaagggtatggagtgcaacgtggtggacaatcagggaaagattgatctgccgccgcagttcaagaagtttatggacgtggttctgctcgggctccaccccaatatccccaccggccagagtaaagagacctacaccgctatgttgatcaacgccatagagaagaatccctgcgtggatataataacgcaccccaatgatccgaactatccggttgactacaaaagtttggccaaagccgccaaagccgccggcgtagcgatagagctgaacaactcaaagattatgtacgccagggctgagaaacagagcgcggaggaattggtgaccgcttgtaaggaggccggttgccgattagtggtaaacagcgacactcacgcgatacatgagttggggctggatgactccgtgaagccgattttgaagtcggtagggttccctgttgagttggtgatcaaccaggtatga

SEQ ID NO: 11138 - protein, 197 aa, Unknown
  Obtained from environmental sample
  DOMAIN (10)...(171): PHP domain
  misc_feature (1)..(197): Xaa is any amino acid
MLALMSWDEGDCHNXSWAALRAGRXNNPFFERFKSPYPNIELLKGMECNVVDNQGKIDLPPQFKKFMDVVLLGLHPNIPTGQSKETYTAMLINAIEKNPCVDIITHPNDPNYPVDYKSLAKAAKAAGVAIELNNSKIMYARAEKQSAEELVTACKEAGCRLVVNSDTHAIHELGLDDSVKPILKSVGFPVELVINQV

SEQ ID NO: 11139 - DNA, 789 bp, Unknown
  Obtained from environmental sample
  misc_feature (1)..(789): n is a, c, g, or t
atggctaaatcagaagaaaaaacccggggcgatccgaacgcgacgcccgaggaaaagttaaaagcgctggaagcggcccgtttgcagattgaaaaacagttcgggacaggctcgcttataaaacttggctcgcatgacaacgccgccggtgtagaagttataccttcgggggctatacttctggacgaggccctgggagtgggcggctacccgcgcgggagaatcattgagatattcggccctgaatcttcgggcaagacaacgctggccctccacgcaatcgccgaggcgcagaaactgggcggcatggcggcttttatcgacgcggaacatgctctggaccccgtatacgccaaaggcctcggcgtcaatattgacgacctctgggtctcacagccggataacggcgagcaggcgatggaaataaccgacagcctggtacgctcgggcgccgtggatgttatcgtggtggactctgtcgccgccctgaccccgcaggcggagattcagggggacatgggcgacgcccagatgggcgcccaggcgcgcttgatgagccaggccctgcgcaagctcacagccaccatcggcaagtcgcgcaccatcctgatcttcattaaccagatacgcatgaaaatcggcgttttcatgggaaacccggaaaccacgaccggcggaaacgccctgaaattttattcttccgtgcgccttgaggtgcgtaagaccgaaacgatagaggtctcaaaagacacggacgccataggcaaccgcgtaagggttaaggtgtaa

SEQ ID NO: 11140 - protein, 262 aa, Unknown
  Obtained from environmental sample
  DOMAIN (21)...(262): recA bacterial DNA recombination protein
  misc_feature (1)..(262): Xaa is any amino acid
MAKSEEKTRGDPNATPEEKLKALEAARLQIEKQFGTGSLIKLGSHDNAAGVEVIPSGAILLDEALGVGGYPRGRIIEIFGPESSGKTTLALHAIAEAQKLGGMAAFIDAEHALDPVYAKGLGVNIDDLWVSQPDNGEQAMEITDSLVRSGAVDVIVVDSVAALTPQAEIQGDMGDAQMGAQARLMSQALRKLTATIGKSRTILIFINQIRMKIGVFMGNPETTTGGNALKFYSSVRLEVRKTETIEVSKDTDAIGNRVRVKV

SEQ ID NO: 11141 - DNA, 303 bp, Unknown
  Obtained from environmental sample
  misc_feature (1)..(303): n is a, c, g, or t
gtggatatttggagtctgatgaaaaccttctccgcgatgatacggaagatacccggagaaaggatcattaacatgtacgaagaagttacagttaacgagaaaatcgccctgctttccgaattgctggaagaaaaaggcgagtgttttttcaccgatctgattgtccgttcaaaatcaataatggacgtggtctgtaccatactcgcgattctggaagcggtaaaaacacgtatgataattatttcacagcacgtcatgtttggcgacataaagatcaggcctagggtaattcccgcggaataa

SEQ ID NO: 11142 - protein, 100 aa, Unknown
  Obtained from environmental sample
  misc_feature (1)..(100): Xaa is any amino acid
MDIWSLMKTFSAMIRKIPGERIINMYEEVTVNEKIALLSELLEEKGECFFTDLIVRSKSIMDVVCTILAILEAVKTRMIIISQHVMFGDIKIRPRVIPAE

SEQ ID NO: 11143 - DNA, 474 bp, Unknown
  Obtained from environmental sample
  misc_feature (1)..(474): n is a, c, g, or t
ttgatcaatgttattgaaaatattagtataaaaaaaatgaaagacaaacgcgtctatatagattataacgccacaacacctttaagaagcgaagtaaaggacgctattgtttccgatcttgacatttatggcaacgcttccagtttgcatacgtcaggaaggcaggcccgcgccagagtagaagaagcccgcaaagctgttgctacgcttattggttcagatccggcttcaatcatttttacttccggaggctcggaatccaacaacgccgtcttccagaccatgaggcagttccggtcggacaggaacgaatttattacaacaaagatagagcatccctgcgttttgaattccgccgaattcacaaaagagcagggattcaaagtgcattttattccggtagatgaacagggcaaaatcaagatggaagcctttaaagccgcgttaagcgaaagaacccttttgtttcggtga

SEQ ID NO: 11144 - protein, 157 aa, Unknown
  Obtained from environmental sample
  misc_feature (1)..(157): Xaa is any amino acid
MINVIENISIKKMKDKRVYIDYNATTPLRSEVKDAIVSDLDIYGNASSLHTSGRQARARVEEARKAVATLIGSDPASIIFTSGGSESNNAVFQTMRQFRSDRNEFITTKIEHPCVLNSAEFTKEQGFKVHFIPVDEQGKIKMEAFKAALSERTLLFR

SEQ ID NO: 11145 - DNA, 750 bp, Unknown
  Obtained from environmental sample
  misc_feature (1)..(750): n is a, c, g, or t
gtgaacgatccaacttcttanngaattaacagcattgcaaaagcttttgacgcaagcgtattcagggcggaagtcggcgaggctaacgtagtggagcttgccggaaaactcagggaacaaagctaccttgtcagaatcctgggagaaggttcatccggcggtactattatccacccttcaacagtaagggatcctattgatactcttggggcattaattaagctgctttcgattagaagcggtgaaaagcgcgggctctttgaaatttggtgcgccatatccaaccagaaagagctttatcgggaagaatttacaatggcggatattatttcttcgcttcccgcttttattactactgagaccgtatccggcgatgccatgataaatgtaaaaagccaggatcacggactattaaaaggcaggtatcagaaaatttttacacgcgaatgggaagaaaaaaaacagctttttaaagagaaatacggtatatcagaatggctcgcgatagcatataatgggacggtagagaaacgggatcttgccgacttcgccgaagcgggtcgcggcggacttaaaatagaattttcaaatttggctggcgaggcaaccgcatttatatggatgcggggatcgggtacagaagcagtttttcgccttatagcggacgcggtggggccggacaatagtcttgaacgaacccttattgagtggcagcgccatatggcgcttgaatcggatattattggctga

SEQ ID NO: 11146 - protein, 249 aa, Unknown
  Obtained from environmental sample
  misc_feature (1)..(249): Xaa is any amino acid
MNDPTSXXINSIAKAFDASVFRAEVGEANVVELAGKLREQSYLVRILGEGSSGGTIIHPSTVRDPIDTLGALIKLLSIRSGEKRGLFEIWCAISNQKELYREEFTMADIISSLPAFITTETVSGDAMINVKSQDHGLLKGRYQKIFTREWEEKKQLFKEKYGISEWLAIAYNGTVEKRDLADFAEAGRGGLKIEFSNLAGEATAFIWMRGSGTEAVFRLIADAVGPDNSLERTLIEWQRHMALESDIIG

SEQ ID NO: 11147 - DNA, 741 bp, Unknown
  Obtained from environmental sample
  misc_feature (1)..(741): n is a, c, g, or t
ttgtttgaggtggtaaacagcgtagtcggtctcgcgaacgcggaagtggcggcgcacccttacggcaaggcgaacacgtttctgagatatttcgggcgtcaaaacgagaggcactttctctcgttaaagagccaagtttttgacaaggcgattccgatggatgtcgtccgttgcggcaacaactacggaatatgctacggcgtggcggggatagaggcccaagcgagagtgcacggcgataattgggttgaaatgggtatcgccaccgatataagttttgtggtggccgcgattttccacatcttgggcaacaaaaccagccaacattaccatgttgatatagacggcgttaggatagagggcgatttcgtctccgtgctggtggcgaacgtgccgtgttacggtatcaatatgtactcggcggtagacgcccacccggacgacggggtgttggacgtttacacattcaaagaaacatccaagttgaatctgatgtacagcattccgacatacgcccacggcaactaccataagctgcccgatttggtttcgcattacaccgcaaaaaagataaaactctcgtccgacgaggttatgtgcatgagcgtggacggcgagcatttttacgggacgtcgatggagtatgagataatgccaaaagccgttaattttgtctgccccgccagatcaaactcgcgaaactcccgcgcatttccggcaagcaaaggaggggacaggtga

SEQ ID NO: 11148 - protein, 246 aa, Unknown
  Obtained from environmental sample
  misc_feature (1)..(246): Xaa is any amino acid
MFEVVNSVVGLANAEVAAHPYGKANTFLRYFGRQNERHFLSLKSQVFDKAIPMDVVRCGNNYGICYGVAGIEAQARVHGDNWVEMGIATDISFVVAAIFHILGNKTSQHYHVDIDGVRIEGDFVSVLVANVPCYGINMYSAVDAHPDDGVLDVYTFKETSKLNLMYSIPTYAHGNYHKLPDLVSHYTAKKIKLSSDEVMCMSVDGEHFYGTSMEYEIMPKAVNFVCPARSNSRNSRAFPASKGGDR

SEQ ID NO: 11149 - DNA, 732 bp, Unknown
  Obtained from environmental sample
  misc_feature (1)..(732): n is a, c, g, or t
atggtgggatttggcgtattctttgattgctgggagataacccccatcgttaaggcgcaacgcgcgccgaaagccgccagcaagagcaaatcgaacttcctcgccaccatgtctcacgaaatccgcacaccgatgaacgccattatcggaataacgcagatacagttgcagcgcggcgatttgccggacgactacgcaaccgcgctgcggaagatatacagctccgccaataaccagctcagtatcatcaacgatatcttggatatgtccaagatcgaaacgggcaagatggagctgaacccggtagaatacgacataccgaacctgatcaacgacgcgatgcagctcaatgtcgttcgaataggggagaaacatattgagtttatagttgacgttgacgaaaatttgccgtcaaggctttacggcgacgaattgcggatcaagcaaatacttaacaacctgctctccaacgccataaagtataccgacgaggggtgcgtgaagctgtcggtaggctatttaacggatagcgacggcgtgatattgcgttttgtcgtggaggataccgggcagggcataaagccgaaggataaagaacggctcttttcggagtaccaacgtttcaacgccgaagccaaccgcgccaccgaggggacggggctcggcttgaatatcacaaaaaaattagtggagatgatgggcggcacgataggcgtgagctcggccatctga

SEQ ID NO: 11150 - protein, 243 aa, Unknown
  Obtained from environmental sample
  DOMAIN (29)...(95): His Kinase A (phosphoacceptor) domain
  misc_feature (1)..(243): Xaa is any amino acid
MVGFGVFFDCWEITPIVKAQRAPKAASKSKSNFLATMSHEIRTPMNAIIGITQIQLQRGDLPDDYATALRKIYSSANNQLSIINDILDMSKIETGKMELNPVEYDIPNLINDAMQLNVVRIGEKHIEFIVDVDENLPSRLYGDELRIKQILNNLLSNAIKYTDEGCVKLSVGYLTDSDGVILRFVVEDTGQGIKPKDKERLFSEYQRFNAEANRATEGTGLGLNITKKLVEMMGGTIGVSSAI

SEQ ID NO: 11151 - DNA, 441 bp, Unknown
  Obtained from environmental sample
  misc_feature (1)..(441): n is a, c, g, or t
ttggccgagaatatggttatccttgccccggcaagcgataacgaactgaggcttatgctggactatgccctttccctcgatgtcccttcgatgatccgctaccccaaacacccctgtcccgccgaactgcccgagttttcgcttcccctggagaaaggcaggggggtatggctcgcgcgtaacaagaacagccgcgtctgcatagcctttaccggaagcctttatccgcaggcgttcggcgctctgcagatcctgaaagacagggggacagcggcggacgcgtacaacctccgcttcctaagtcaggttgatgaggattacctggttgatatcctgaacagttacgacctagtaacatttgtcgagaaaggggtgaacagggcggcttcggcgattatgcggctgccctggccccgctgccgaactgcagggcgcggataa

SEQ ID NO: 11152 - protein, 146 aa, Unknown
  Obtained from environmental sample
  misc_feature (1)..(146): Xaa is any amino acid
MAENMVILAPASDNELRLMLDYALSLDVPSMIRYPKHPCPAELPEFSLPLEKGRGVWLARNKNSRVCIAFTGSLYPQAFGALQILKDRGTAADAYNLRFLSQVDEDYLVDILNSYDLVTFVEKGVNRAASAIMRLPWPRCRTAGRG

SEQ ID NO: 11153 - DNA, 621 bp, Unknown
  Obtained from environmental sample
  misc_feature (1)..(621): n is a, c, g, or t
atgtccgcaagcgacgctactcttgagaacataaagaaaaaaatgcattcggcaatgccgggaacgccgttttataaagaactgattgatgaaatcattaaggaagattattccaaaagcggccaggacatgaaagatatcattcttaacgctctaaaggttcccgcaacaaagcaaaaagcggtaaaagctgctgtaaatttcaagagcatcctgttggatggtatccaggtaatcggcggagcctcaacctcgctcaatgaaatcttgaataaacttgatgaaaaccaaaccataatggaaagctataaaaaaggcttaatgcatatgataaaggagcttatcaggcagattacaaacgccgaaccggaagaagttatctacactgtagaatatctggatcaaaccaaaggcacaacgacaaaagaaaaggtatatttttatcagcttagggaagaattggaaaaaaagataagatttttatccagtttaatgaaaggagcggcttacaaaaaattggcggcaatgacagaggaacagattataagctatctggaaaaaaatataagtgaagtacagagttatcatagagttctgggtgcgcttgatgattttttttaa

SEQ ID NO: 11154 - protein, 206 aa, Unknown
  Obtained from environmental sample
  misc_feature (1)..(206): Xaa is any amino acid
MSASDATLENIKKKMHSAMPGTPFYKELIDEIIKEDYSKSGQDMKDIILNALKVPATKQKAVKAAVNFKSILLDGIQVIGGASTSLNEILNKLDENQTIMESYKKGLMHMIKELIRQITNAEPEEVIYTVEYLDQTKGTTTKEKVYFYQLREELEKKIRFLSSLMKGAAYKKLAAMTEEQIISYLEKNISEVQSYHRVLGALDDFF

SEQ ID NO: 11155 - DNA, 735 bp, Unknown
  Obtained from environmental sample
  misc_feature (1)..(735): n is a, c, g, or t
atgatcngcgaggtttcccacatggatgccgtcccaaaagagaagaagaatttaagagaggagaattgtatggtgtggaaatccctaaaaatgcctaggaattttcagaaaacagaagtttctgagaatggttgtcgtgctaaatttgaaatagaggctctggaacgtggttggggaataactttggggaatgctcttcgcagggttttattatcttcaattcagggtgctgctattgtatctgttaaaatagacaaggttcaaaaggaatacacaagcatccccggtgttagagaggatgtgacagatataattctcaaccttaaagctattcgctttaaactcttgagcgataaagatgaaattttaaatctggatgtttccggtgaaggcgaagtgacggcaaaaaatatagatgcaaatcctgccgttgttattctaaatccagacactcatatagcaacccttagcgggaacgcatctcttagcatagagatgaaggtttcttctgggcgtggctatgttccggcagatgaccataaccgcagaaggggtgctgaaaatgcacctgttggcgaaattttaatagatgccaattttaaccctgtttttgatgtggctatgcaggtttctgatactcgtattgaagagcgcacggattttaaccgcttggaactggatataaccacggaacgggagcatagacccngaagatgcgttggcttatgcggctaa

SEQ ID NO: 11156 - protein, 244 aa, Unknown
  Obtained from environmental sample
  DOMAIN (42)...(145): RNA polymerase Rpb3/Rpb11 dimerisation domain
  misc_feature (1)..(244): Xaa is any amino acid
MIXEVSHMDAVPKEKKNLREENCMVWKSLKMPRNFQKTEVSENGCRAKFEIEALERGWGITLGNALRRVLLSSIQGAAIVSVKIDKVQKEYTSIPGVREDVTDIILNLKAIRFKLLSDKDEILNLDVSGEGEVTAKNIDANPAVVILNPDTHIATLSGNASLSIEMKVSSGRGYVPADDHNRRRGAENAPVGEILIDANFNPVFDVAMQVSDTRIEERTDFNRLELDITTEREHRPXRCVGLCG

SEQ ID NO: 11157 - DNA, 357 bp, Unknown
  Obtained from environmental sample
  misc_feature (1)..(357): n is a, c, g, or t
atggccgtctttgactggacaagatccgatttggcgaagccacgtcccgacggcgcttttgtgatggcatatcagcagaaactaattaataaagttaatcccgacaatatgtttgacgtaatgagcgaaaaggcgcaagggcatttgcttcccggttgggaaccggaaagaatggcgaatatacgcagactgtttgaactttacggtaaaattgacgaagacgtactatttgcaaatcttgtatanttccttaaagcgattatgcccacctgcgaacaatacggtataaaaatggcgattcatccggatgatccgtcatggtctgtattcgggccttccgcgaatatgaaaaaataa

SEQ ID NO: 11158 - protein, 118 aa, Unknown
  Obtained from environmental sample
  DOMAIN (1)...(118): D-mannonate dehydratase (UxuA)
  misc_feature (1)..(118): Xaa is any amino acid
MAVFDWTRSDLAKPRPDGAFVMAYQQKLINKVNPDNMFDVMSEKAQGHLLPGWEPERMANIRRLFELYGKIDEDVLFANLVXFLKAIMPTCEQYGIKMAIHPDDPSWSVFGPSANMKK

SEQ ID NO: 11159 - DNA, 534 bp, Unknown
  Obtained from environmental sample
  misc_feature (1)..(534): n is a, c, g, or t
gtggcaaacaggatatacgacttcagggagaagaaggacgaaaggacgcacaagtacctggacggtaaggacgtgggcaggtactggcacaggtgggacggcgcgtggctgcagtacggcgacaacctgtcggcgccaaggagcatgaggctgttttccagtccggctgtcatagtcagggagataacggggaagtacccaaggtgcctgaagtgcgcatacacggacggctccgaggtgctgttgttcaatttgagcaacatagctgtccttgccagggacccaagctacgacctgaaattcctgctgggcctgctgaacagcgccctcatgtcgtaccacttcacgcgctccacgcccaagtccgtgcggaagctgttccccaagataatcctggccgacctgcggaagttccccatcaaaaagaccgacaccgccggccaggcccccatcatacgggcggtggagcgcatgttggcgcggcaccaagaactggggcggctagagcaatttaactttgaaatgtcacattga

SEQ ID NO: 11160 - protein, 177 aa, Unknown
  Obtained from environmental sample
  misc_feature (1)..(177): Xaa is any amino acid
MANRIYDFREKKDERTHKYLDGKDVGRYWHRWDGAWLQYGDNLSAPRSMRLFSSPAVIVREITGKYPRCLKCAYTDGSEVLLFNLSNIAVLARDPSYDLKFLLGLLNSALMSYHFTRSTPKSVRKLFPKIILADLRKFPIKKTDTAGQAPIIRAVERMLARHQELGRLEQFNFEMSH

SEQ ID NO: 11161 - DNA, 837 bp, Unknown
  Obtained from environmental sample
  misc_feature (1)..(837): n is a, c, g, or t
ttgcgggaaaaatcgtcatacagtttctttccctccttttgttcaggattccgttctaaaatgctgcttcgttccataaatgcgccgttaactgcaattcaggggatcagcccgaggataatgaatgaaaacgcgccaagactcgcccgcctgggtatacgggatgcagccggtcttttatgtcattacccgcgtgattgggaagatcgcaggttctctgtcccaatagccgaatttcagcgggctaaggtttgtaccgaagttactgtactcgcccatgactggattggttttggccataatcgaactcccaaaatatttatagaagatgaaagcggcagggccgttctggtcgggtttaaccgtccatggcttgcgaaacagatgactgtcggcggacgctacagggtttggggcagttttgactataaacgcggtgaaatacaatccagcaattttgaatttgaagaagcttccaaagctgagaattttaactcaatactgcctgtttatcccctgtgcgccgggctcaaacaggctgtgcttcgccgttttacagctaacgccattgaacagtacgcagcccggctggaaaatgagcttcccgatgaaataatagccagggacaagctgctttcaaaagccgccgctgtcagagcttttcattatccggcttcaccagaagagctggagcaggcaaagaaaacgcttgtttacgaagaattgttttatcttgaagtaatggtgggtaaaagagcattggatagaaaagggagtagggagntggggagtagggagtgggaagagggaacagcgtgcagggaacagagtaattag

SEQ ID NO: 11162 - protein, 278 aa, Unknown
  Obtained from environmental sample
  misc_feature (1)..(278): Xaa is any amino acid
MREKSSYSFFPSFCSGFRSKMLLRSINAPLTAIQGISPRIMNENAPRLARLGIRDAAGLLCHYPRDWEDRRFSVPIAEFQRAKVCTEVTVLAHDWIGFGHNRTPKIFIEDESGRAVLVGFNRPWLAKQMTVGGRYRVWGSFDYKRGEIQSSNFEFEEASKAENFNSILPVYPLCAGLKQAVLRRFTANAIEQYAARLENELPDEIIARDKLLSKAAAVRAFHYPASPEELEQAKKTLVYEELFYLEVMVGKRALDRKGSREXGSREWEEGTACREQSN

SEQ ID NO: 11163 - DNA, 579 bp, Unknown
  Obtained from environmental sample
  misc_feature (1)..(579): n is a, c, g, or t
gtgcttatcgccnacggccgaggatctgggtttgaccctcatgaagatgaggataataaagacgaaattggaacattaggtgagtatttccacatgaccataatcgatccccttaccggtatttacaacaggcgttatttagacggcagtttaaggaagataataaaactccattcccgtaccggcggcagcttgagcgtattaatgatagacatagatttctttaaaaaatacaacgacacttacggtcatgactcaggggatgtctgccttggaaaagtcgcggccgccctttctaaatgtgtaataagagaagaagattttatcgcaaggtacggaggagaggaatttgccgctgttttaccgaataccgatgaaaacggcgcccggttgatttgcggaagaatgctggaaaaaatacgtgaaatgcatatacccccacgaaaaagcgatatagccacttatgttactgtctccatcgggggtactacgggtattataaatcatttacggcatggaaacgattattcaaaacccgcgaataagcgttataccaaatccaaaaataacggtccgtaa

SEQ ID NO: 11164 - protein, 192 aa, Unknown
  Obtained from environmental sample
  DOMAIN (29)...(191): GGDEF domain
  misc_feature (1)..(192): Xaa is any amino acid
MLIAXGRGSGFDPHEDEDNKDEIGTLGEYFHMTIIDPLTGIYNRRYLDGSLRKIIKLHSRTGGSLSVLMIDIDFFKKYNDTYGHDSGDVCLGKVAAALSKCVIREEDFIARYGGEEFAAVLPNTDENGARLICGRMLEKIREMHIPPRKSDIATYVTVSIGGTTGIINHLRHGNDYSKPANKRYTKSKNNGP

SEQ ID NO: 11165 - DNA, 795 bp, Unknown
  Obtained from environmental sample
  misc_feature (1)..(795): n is a, c, g, or t
gtggcgaccgccgtcgccgagtttttccgcgatcagggccttgatgtcatgctgctctttgactcggtgacccgttttgcccgcgccatacgcgagatcggccttgcgtcgggagagcccgccgctaccaggggttatacgccgagtatgttcgattccatgcccaaactgctggaaagatccggcacatcggatacgggcagcatcaccggtttttacacgatcctggttgacgcggatgatatggacgagccggtttcagatacggtgcgcggtattcttgacgggcatataactctctcccgccgccttgctcaaggctatcattatccggcgattgatgtactgcaaagcatttcccgtcttgcccccgtagtgtcaggtccttcggctacaaaagcggccgcggcgatacgcaggagcatggccgtatacgccgaggccgaggaactgatcaacgtgggcgcataccgcgccggttccaatcccgccattgacgaggcgattgcaaagcatcagcccattgaggaatttttgatccaggaagtcacggatcgctgcccgcttgaagatacatattcggtaatggaagaactctccggcattgccatatccgtcgaggagaagacgggcggcaaggtagcggtaaattcaacggaggtgaaacccaaagccaaaatccccgcaggcggtaacgaaggcggtcaggcggtgaattggcagaacaacagcgtcgcgtctcttttcgcgagccggatgtcacctgaaggcgattttgaaagtgaaacggtttaa

SEQ ID NO: 11166 - protein, 264 aa, Unknown
  Obtained from environmental sample
  DOMAIN (1)...(120): ATP synthase alpha/beta family, nucleotide-binding domain
  misc_feature (1)..(264): Xaa is any amino acid
MATAVAEFFRDQGLDVMLLFDSVTRFARAIREIGLASGEPAATRGYTPSMFDSMPKLLERSGTSDTGSITGFYTILVDADDMDEPVSDTVRGILDGHITLSRRLAQGYHYPAIDVLQSISRLAPVVSGPSATKAAAAIRRSMAVYAEAEELINVGAYRAGSNPAIDEAIAKHQPIEEFLIQEVTDRCPLEDTYSVMEELSGIAISVEEKTGGKVAVNSTEVKPKAKIPAGGNEGGQAVNWQNNSVASLFASRMSPEGDFESETV

SEQ ID NO: 11167 - DNA, 828 bp, Unknown
  Obtained from environmental sample
  misc_feature (1)..(828): n is a, c, g, or t
ttgaagacattgcccatgacaacggcgttgaaacgctggttcggcgccatgatgaatgacgaatgtgtaagcctgcgccgcagcgaatttacggaagacgaagccgcttttttgtctccccgcggcgttcagtcaatactgattgttcccgtttttgcggaacgcaacctttggggcgttactacttttcaggataacgccgaagaaagggattttgacgatgaatgtatcgccatgctgcggtcaaccgcccgtttatgcgtaaacatgctgcagcgcagcgaaatggagaacgtcctgtccaatgcggaaaagaacgcaagggaactcaaaattgaagcggataaaataaactacgacgcgctgaccggcatttacagcaggcggtattttgatgaaggcatgaagcgaatcataaattccttatcccgatcagactgtttattaagcctgctgatgatcgacattgacttctttaagcggtacaacgacacatacggccatatcgcaggtgataaatgccttataactgtcgcgcaggcgctttcccggagcataacaagggcggatgactttgtcgccaggtatggcggggaagaattcgtcgttgtcctgccccataccaacgaaaagggcgcgaagctggtcgctgaaaaaatgcttaacaatatccggaaatgcaatataccgcatagacataacgatgctgcggattacgttaccatttccatcggagtcacaaccggtaaagtggtgcatacgcaaagcgcggatgattttgtaaaaaggctgacgagatgctgtataaatcccagcaggcggacgtaa

SEQ ID NO: 11168 - protein, 275 aa, Unknown
  Obtained from environmental sample
  DOMAIN (110)...(268): GGDEF domain
  misc_feature (1)..(275): Xaa is any amino acid
MKTLPMTTALKRWFGAMMNDECVSLRRSEFTEDEAAFLSPRGVQSILIVPVFAERNLWGVTTFQDNAEERDFDDECIAMLRSTARLCVNMLQRSEMENVLSNAEKNARELKIEADKINYDALTGIYSRRYFDEGMKRIINSLSRSDCLLSLLMIDIDFFKRYNDTYGHIAGDKCLITVAQALSRSITRADDFVARYGGEEFVVVLPHTNEKGAKLVAEKMLNNIRKCNIPHRHNDAADYVTISIGVTTGKVVHTQSADDFVKRLTRCCINPSRRT

SEQ ID NO: 11169 - DNA, 717 bp, Unknown
  Obtained from environmental sample
  misc_feature (1)..(717): n is a, c, g, or t
gtgcgtaccaatttatctcccattatttctcacggagacactaagcacacagaggacacagagaaaaataaagaaattacgaaaaatccatctaaatattcaccgtgttctttgtgccgcgaaccgcaggttcgatgtggactccgtgagatgtcttctgggaatggccttgtgccgattacgctggaagagtcgaatgtgctgcttcttgacatggccgaatacgcgctggacgctggcgagtggaggccaaaggaagaaatactcaggcttgacaataaacttagagccgagctgaaatggccgagccgcggggacgcctgggcacagccctgggttgagcgcgacgccagcactccttttactctgagactgcgttttagctttgaaagtgaaattgccgtaaccggaacggagcttgccttggaaaacgccgcgtcagccagagttgcgcttaacggcgaggcggcaggagtggtcaagggctggtatgtagacaagtgtattggcaaagtcagtcttcctgcaatcaaggcgggagccaacgttctggaagtgagtttcccctacggccgcaaagttgatgttgaggccatgtacctcctgggcgatttcggcgtgaatgtcgctggctcctcctgtgttattaccaggccggtacgcagcctgggctttggcgacattagccgtcagggcctgccctctcggccgatctga

SEQ ID NO: 11170 - protein, 238 aa, Unknown
  Obtained from environmental sample
  misc_feature (1)..(238): Xaa is any amino acid
MRTNLSPIISHGDTKHTEDTEKNKEITKNPSKYSPCSLCREPQVRCGLREMSSGNGLVPITLEESNVLLLDMAEYALDAGEWRPKEEILRLDNKLRAELKWPSRGDAWAQPWVERDASTPFTLRLRFSFESEIAVTGTELALENAASARVALNGEAAGVVKGWYVDKCIGKVSLPAIKAGANVLEVSFPYGRKVDVEAMYLLGDFGVNVAGSSCVITRPVRSLGFGDISRQGLPSRPI

SEQ ID NO: 11171 - DNA, 861 bp, Unknown
  Obtained from environmental sample
  misc_feature (1)..(861): n is a, c, g, or t
ttgtcaccttttctgcaaccgcgcgacggcaaacgcgcctcgcgctccacccatccggacgaatgggaaaaattcaaagagtactgccgccgcgacgtggaagccgagcgcgcgctatataataaactccccgcgtggaattgcggcgggagcgaacgcgatataatcgagcttgactataagataaattcgcgcggcttcaaggtcgatgtcgagctcgccgaagccgccgtcgccgccgtcaaaaaggagaagcagtcgcgcgacaataaagcgttcgagctcaccggcggccgcgtgacttcgggaacgcagcgcgacaaaatgctcgagcatattctgaaggaatacggcgtggccctgcccgacatgacggaggccgttctgacgcgccgcctcgaagatcccgatttgccgcaggccgtcaaggagctgatcgcgctgcgcctcgcctccgccggcacgtcggccaaaaagtatcaggcgcttctcgacagcgtctcgtccgacgggcggctgcgcggcacgcttcaatactgcggcgcgtcgcggacgggacggtggacgggcagaatcttccaaccgcaaaatttgccgcgcccggcgttaggcaacgacgaaatcgacgcggggataaaggctataaaggccggaagcgcggagtacgtttacgccgacgtgacggcggtcgcctcgtccgcgcttcgcggcgcgatagtcgcgccggagggcaagaagctcgtggtcgcggacttggcgagcatagaggggcgcgtcctcgcgtggctcgcgggggaagatggaaagtcgaagcgtacgccgaattcgacaagggcgtcggcttcgatatgtatacgctga

SEQ ID NO: 11172 - protein, 286 aa, Unknown
  Obtained from environmental sample
  misc_feature (1)..(286): Xaa is any amino acid
MSPFLQPRDGKRASRSTHPDEWEKFKEYCRRDVEAERALYNKLPAWNCGGSERDIIELDYKINSRGFKVDVELAEAAVAAVKKEKQSRDNKAFELTGGRVTSGTQRDKMLEHILKEYGVALPDMTEAVLTRRLEDPDLPQAVKELIALRLASAGTSAKKYQALLDSVSSDGRLRGTLQYCGASRTGRWTGRIFQPQNLPRPALGNDEIDAGIKAIKAGSAEYVYADVTAVASSALRGAIVAPEGKKLVVADLASIEGRVLAWLAGEDGKSKRTPNSTRASASICIR

SEQ ID NO: 11173 - DNA, 513 bp, Unknown
  Obtained from environmental sample
  misc_feature (1)..(513): n is a, c, g, or t
ttgagtccttactatactatagacaaggtaaatcaagacccgaataacacagatagttcggacacattgaaatggactgtaacacggaacagcgcggcaaccgggtaccgcttgccgactgaggcgcagtgggaatacgcggcgaaaggggggaacccaagcgcggcaggctgggaaggatatacgtattcggggagcgacacagtagatgatgtggcttggtattatgaaaacagcggcaataggtcgcatgaagtagggaagaaacagcccaacgggcttggattgtacgacatgagcggaaacgtgtgggagtggtgctgggactggtatggaagttattcgagcggggcgcagactgacccggtcgggcccgctgctggcaccgaccgggtgtttcgcggcgggggttggaacggcattgccgtctacgcgcgctctgcgtatcgggtcaacagctacccgtacaacggggtcctcacttttggcttccggctggtgcgtccccaataa

SEQ ID NO: 11174 - protein, 170 aa, Unknown
  Obtained from environmental sample
  DOMAIN (1)...(168): Domain of unknown function (DUF323)
  misc_feature (1)..(170): Xaa is any amino acid
MSPYYTIDKVNQDPNNTDSSDTLKWTVTRNSAATGYRLPTEAQWEYAAKGGNPSAAGWEGYTYSGSDTVDDVAWYYENSGNRSHEVGKKQPNGLGLYDMSGNVWEWCWDWYGSYSSGAQTDPVGPAAGTDRVFRGGGWNGIAVYARSAYRVNSYPYNGVLTFGFRLVRPQ

SEQ ID NO: 11175 - DNA, 834 bp, Unknown
  Obtained from environmental sample
  misc_feature (1)..(834): n is a, c, g, or t
gtgactactaaatataataaggagagaaagatgagtgaatccacggcgattgcgtcaaaggagtacgttgacaaaagagttaagatacatcaggggccggagaacgctgggaaggccatgatcgtcgatcatgacggcaacatgaaaccgatgtcgctgctcaacacgcacacgcacaccgtaaatgacataactgatttatcacttaatgatggaaatatagaagtagacgtgtctgatttttatgcaaaaaatgagattaatggcttattagacgataaagcaaacaagaatcacacccacaccaaggcaaacataactgatttcccgatcgttgcttcaaaaacggcgagcgggttatgtcctcaattaccgaatgagactgcgaccacaaagtatcttagacaagatggttcttggcaggcaccgcctaacgataataccacttacagcaatttcgttaaatccggatcaactgccgccgccggtctggttccgactccaggtaccactgcgggaaccactaagtatttgagagaagacggaacgtggacggttcctcccaatgacaatactacttacagcaactttgtaaagtcgggtagtactgccgccgccggtctggttccgactccaggtaccactgcgggaaccactaagtatttgagagaagacggaacatggacggttcctcccaatgacaatactacttacagcaactttgtaaagtcgggtagtactgccgccgccggtctggttccaactccaggtaccactgccgggactactaagtatttgagagaagacggaacatggacagttcctcccccatga

SEQ ID NO: 11176 - protein, 277 aa, Unknown
  Obtained from environmental sample
  misc_feature (1)..(277): Xaa is any amino acid
MTTKYNKERKMSESTAIASKEYVDKRVKIHQGPENAGKAMIVDHDGNMKPMSLLNTHTHTVNDITDLSLNDGNIEVDVSDFYAKNEINGLLDDKANKNHTHTKANITDFPIVASKTASGLCPQLPNETATTKYLRQDGSWQAPPNDNTTYSNFVKSGSTAAAGLVPTPGTTAGTTKYLREDGTWTVPPNDNTTYSNFVKSGSTAAAGLVPTPGTTAGTTKYLREDGTWTVPPNDNTTYSNFVKSGSTAAAGLVPTPGTTAGTTKYLREDGTWTVPPP

SEQ ID NO: 11177 - DNA, 843 bp, Unknown
  Obtained from environmental sample
  misc_feature (1)..(843): n is a, c, g, or t
ttgaccgtcatcggcgacccggaccagagcatctacggcttccggggggccgaaccgggcctcttcgcccgcctggaggccctgcccggagggctgaccaccgtcaccctggccgccaactaccgctccacccgcaccattctagaggccgcggaaagcctgtggccccaggccggccgcccccgccgccgggcggcccggggcgaaaacgggccccggctgacccgggcggtcctctccaccaccctgggggaggcggcctatgtggtgaaacgcataaaggcccacctggggctcttgaagctgggcctgggcgcctcggcccgccaggacgctgaattcatgcccggcttgaatttcggtgatatcgccgtcctcttccgcctgcgcgccctggggccgccggtggccgaagccctgaccgccgccggcctgccctggcagatgtgcggggaagagcccctgaccgccgcggaccacctggattggaccgcggacaaaatcagcctcctgaccatgcacgcggccaagggcctggagttcaagctggtcttcgtcatcggggtcgaggccgggctctgcccctatttccggccggaccaggaggggccgggggcctcccccgaggctctggccgaagagcgccgcctcttctatgtggccctgacccgggcccgggaccgcctctacctgacccggtccgcccggcgccggctatacggccaaaccctggccggcgaaccttcccccttctnggccggcctgccccggggactctgcgccgatccgccggtcggccaggcccggcggccggggaaaccgaaaagcctcttagacctgtga

SEQ ID NO: 11178 - protein, 280 aa, Unknown
  Obtained from environmental sample
  misc_feature (1)..(280): Xaa is any amino acid
MTVIGDPDQSIYGFRGAEPGLFARLEALPGGLTTVTLAANYRSTRTILEAAESLWPQAGRPRRRAARGENGPRLTRAVLSTTLGEAAYVVKRIKAHLGLLKLGLGASARQDAEFMPGLNFGDIAVLFRLRALGPPVAEALTAAGLPWQMCGEEPLTAADHLDWTADKISLLTMHAAKGLEFKLVFVIGVEAGLCPYFRPDQEGPGASPEALAEERRLFYVALTRARDRLYLTRSARRRLYGQTLAGEPSPFXAGLPRGLCADPPVGQARRPGKPKSLLDL

SEQ ID NO: 11179 - DNA, 309 bp, Unknown
  Obtained from environmental sample
  misc_feature (1)..(309): n is a, c, g, or t
gtgagccttgtatggcggaggctcacaggtctaagaggcttttcggtttccccggccgccgggcctggccgaccggcggatcggcgcagagtccccggggcaggccggccnagaagggggaaggttcgccggccagggtttggccgtatagccggcgccgggcggaccgggtcaggtagaggcggtcccgggcccgggtcagggccacatagaagaggcggcgctcttcggccagagcctcgggggaggcccccggcccctcctggtccggccggaaataggggcagagcccggcctcgaccccgatga

SEQ ID NO: 11180 - protein, 102 aa, Unknown
  Obtained from environmental sample
  misc_feature (1)..(102): Xaa is any amino acid
MSLVWRRLTGLRGFSVSPAAGPGRPADRRRVPGAGRPRRGKVRRPGFGRIAGAGRTGSGRGGPGPGSGPHRRGGALRPEPRGRPPAPPGPAGNRGRARPRPR

SEQ ID NO: 11181 - DNA, 396 bp, Unknown
  Obtained from environmental sample
  misc_feature (1)..(396): n is a, c, g, or t
ttgaattatattaagtctatgcaaggcacaaaacattatcaagagaaatttttcgtaaacttccgtctatcggagcgcattccttccgataatttctacaaacgtttaaaagactcactagacttggattatctgcgcccgttgactgcaaagcattacggcaaggaaggtcaaaagagcatagaccccgttgtatttttcaagcttatgcttgtcgggtaccttgaaaacatctgctcagaccgtaaaatcatagagcaatgctctctgcgtctggatatactttattttttgggttacgacatagacgagcctcttccttggcacagcaccttgagccgtacacgcaaactgctgggcgaggaagtgtttttaagtttttttcgcgacatatga

SEQ ID NO: 11182 - protein, 131 aa, Unknown
  Obtained from environmental sample
  misc_feature (1)..(131): Xaa is any amino acid
MNYIKSMQGTKHYQEKFFVNFRLSERIPSDNFYKRLKDSLDLDYLRPLTAKHYGKEGQKSIDPVVFFKLMLVGYLENICSDRKIIEQCSLRLDILYFLGYDIDEPLPWHSTLSRTRKLLGEEVFLSFFRDI

SEQ ID NO: 11183 - DNA, 888 bp, Unknown
  Obtained from environmental sample
  misc_feature (1)..(888): n is a, c, g, or t
atgtttcccggcgcaaaagaaaatatcgacgcagtttnaaggcagtacaatatcgaatcaaaatatacatctattgataatttcnccgtccgcatcacaacaaaacagactatcccttttgttgaaatggcggcttttgacgtagcgagcaaatttatgacattccttaccgcaagcaaggttgaggctataatcggcaattttgtgcgggcaagggggcttggcgtccaaaacggcgttgacacggaacacgccggtcttgtggacaagattttcaaagattcgctggaaagggtgttgaatctgggcatggttcccattcttccctgcataggctggagcccgtccgggaagccctacaatgtgccaagcgcggaaattgcccttgccgcggcgtccgccctgaaagcggaaaaattgttcttcctttccgtacacgacaggcctctggttaaaaaccttaatatggaagatttggaaacaaggccggacggaagccttttaaggcttaccccccagcaggcggaaaagctgatagcttccggctcaaattcgagctctgtccccgctccattcctgcgggagctaagtcttgcattaagcgccagccgggcaggcgttaacagggtgcatttattggacgcaagggaagaaggcgccgtattgaaagagctcttttccaacctcggcgtgggaacaatggtttataatgacgaatacgactctatccgggccttccattctagggatctgcccgatattctgcggatgatggagccgttaatgcaaaaaggcgtccttatcaggcggaaccccgagcaaattcaggaaaaaaaggccgattatgccgtccttgagattgacggctctgtcgctcggccgatctga

SEQ ID NO: 11184 - protein, 295 aa, Unknown
  Obtained from environmental sample
  misc_feature (1)..(295): Xaa is any amino acid
MFPGAKENIDAVXRQYNIESKYTSIDNFXVRITTKQTIPFVEMAAFDVASKFMTFLTASKVEAIIGNFVRARGLGVQNGVDTEHAGLVDKIFKDSLERVLNLGMVPILPCIGWSPSGKPYNVPSAEIALAAASALKAEKLFFLSVHDRPLVKNLNMEDLETRPDGSLLRLTPQQAEKLIASGSNSSSVPAPFLRELSLALSASRAGVNRVHLLDAREEGAVLKELFSNLGVGTMVYNDEYDSIRAFHSRDLPDILRMMEPLMQKGVLIRRNPEQIQEKKADYAVLEIDGSVARPI

SEQ ID NO: 11185 - DNA, 768 bp, Unknown
  Obtained from environmental sample
  misc_feature (1)..(768): n is a, c, g, or t
gtgtttccggagacaagcggagctgtcgtcagcatagccgcgataaagggcgtaacccctcccgccgcaggtgataccccggtaacggaaattaccgaaacggatcagtacgttgggactgtaacatggtctcccacggtatcagatactttttccgcgtccaccgaatataccgctactattacgctgactccaaaaagaggttacggctttcaagggatagccgccaatttctttaccgttgtgggagcggcatcggcgcgtaactccgccaattcaggcgttgttacggcggtattccccccgtcagtgacgataaatttacccgtcataacaggtgttaaacccccggtagccggaaaaaccccggtaacggcaattgtcgaaaccgcgcaatacggcgggaccgtaacatggtctcctgaagtaaagggaaccttcgccgccactaccacgtacaccgcgaccattacgctggttccaaaacccggctacacgccaaagggggtaaatgcaaacttctttaaagttgcgggtgcagtgtcggcaagcaacaatgccgactcagtcgttattacggccgagtttgcgccgactaaagaagaaaagtccgttcaagccggtgacgagaagtacaaagcgattggcgtttcggttggtaccgcgtttgacacgccccttattatcggcacggtacacgggacaatcccgttattcagcggcttatttcttgacgtgggcgctgacgcgggttatggaacaagctag

SEQ ID NO: 11186 - protein, 255 aa, Unknown
  Obtained from environmental sample
  SIGNAL (1)...(24)
  misc_feature (1)..(255): Xaa is any amino acid
MFPETSGAVVSIAAIKGVTPPAAGDTPVTEITETDQYVGTVTWSPTVSDTFSASTEYTATITLTPKRGYGFQGIAANFFTVVGAASARNSANSGVVTAVFPPSVTINLPVITGVKPPVAGKTPVTAIVETAQYGGTVTWSPEVKGTFAATTTYTATITLVPKPGYTPKGVNANFFKVAGAVSASNNADSVVITAEFAPTKEEKSVQAGDEKYKAIGVSVGTAFDTPLIIGTVHGTIPLFSGLFLDVGADAGYGTS

SEQ ID NO: 11187 - DNA, 597 bp, Unknown
  Obtained from environmental sample
  misc_feature (1)..(597): n is a, c, g, or t
atgaacatcggcattatcggcttggggttaatcggcggctcgtttgccaaagcgtacaaggccgccgggcacactgtatacgcaaacgagaccgataaaagcattctggatttcgccattctttcaggcgctgccgatgctccgctggacgatgacgctctgcgtcactgcgatctagtcctgattgcgatatacccgcaagcggcgatcaaattcctggaggagacggcgcatcacatcccgcctgaaaccatggtcattgactgttgcggaacaaaaaaaaatatatgcgacgccgggtttaaggcggctgcacaatacgggtttacttttgtgggcgggcatccaatggcgggtactgagcagtcgggttttaagcacagtaaggcaaatatgttcaagggcgcgtccatgatcgtagtgccgcccgtttacgacgatatcctgtttctcgataagatcaagcgcctgcttgcgcccgctgaattcggcaggctgaccgttaccacggctgaaaagcacgacgcgatgatcgcgtttaccctcgcaatggcgcatcttgtttcaacgcgttcattaaagcccgaccgtgtttga

SEQ ID NO: 11188 - protein, 198 aa, Unknown
  Obtained from environmental sample
  SIGNAL (1)...(28)
  DOMAIN (1)...(142): NAD binding domain of 6-phosphogluconate dehydrogenase
  misc_feature (1)..(198): Xaa is any amino acid
MNIGIIGLGLIGGSFAKAYKAAGHTVYANETDKSILDFAILSGAADAPLDDDALRHCDLVLIAIYPQAAIKFLEETAHHIPPETMVIDCCGTKKNICDAGFKAAAQYGFTFVGGHPMAGTEQSGFKHSKANMFKGASMIVVPPVYDDILFLDKIKRLLAPAEFGRLTVTTAEKHDAMIAFTLAMAHLVSTRSLKPDRV

SEQ ID NO: 11189 - DNA, 831 bp, Unknown
  Obtained from environmental sample
  misc_feature (1)..(831): n is a, c, g, or t
ttgatcgcgagcaaagctcttgagggcaaacaaaaccttatcgacaccctgattatcgacactaccggccgcctgcagattgacgaaccgatgatggcggaactttcccggttaaaagaagcgtcccagcccgatgaaatgctccttgtagccgacgcgatgaccggccaatccgctgtggatattgctaaaacttttgacgaaaaaatcggcctaacgggcgttatcctgaccaagtttgattcggatacgcgcggcggcgcggccctttccctgaaaaccattaccggcaagcctctgaagtttacgggaaccggggaaaagccggaagattttgagccgttctaccctgagcgtatcgcaggccgcattttgggcatgggtgacgtggtcagtctggtagaaaaagcccaggaagtcattgatcaaaaagaagctctggaactccagaaaaaaatggagaaagaaaactttacccttgaggattggctgagccagcttcgttcggtaaagaagatgggttctctgcaatcaatgctggaaatgatccccggtatgcagggccaaataagcgaggaagatattgacaaggcggacctcaagcggcaggaagcgattatttcttcaatgacccgcaaggagcgggctaatcacctgataatcggtccgccccgccgcagccgcatagcccgcggttccggcacttcggtagcggaagttgcccgccttataaaaaaatttgaaaagatgcgcgggatgatgaaaaaaatggcaaagtacggaaagaatcccaataatttaatgcaggcaatgcaggggagattttcttaa

SEQ ID NO: 11190 - protein, 276 aa, Unknown
  Obtained from environmental sample
  DOMAIN (1)...(126): SRP54-type protein, GTPase domain
  misc_feature (1)..(276): Xaa is any amino acid
MIASKALEGKQNLIDTLIIDTTGRLQIDEPMMAELSRLKEASQPDEMLLVADAMTGQSAVDIAKTFDEKIGLTGVILTKFDSDTRGGAALSLKTITGKPLKFTGTGEKPEDFEPFYPERIAGRILGMGDVVSLVEKAQEVIDQKEALELQKKMEKENFTLEDWLSQLRSVKKMGSLQSMLEMIPGMQGQISEEDIDKADLKRQEAIISSMTRKERANHLIIGPPRRSRIARGSGTSVAEVARLIKKFEKMRGMMKKMAKYGKNPNNLMQAMQGRFS

SEQ ID NO: 11191 - DNA, 537 bp, Unknown
  Obtained from environmental sample
  misc_feature (1)..(537): n is a, c, g, or t
ttgaaaggtaatatagtaacaattatttcagcaatcaggaaaatcggtgaatcgtggttcagacaatttggcacggtttttgcatatatacaaaatgaggttactatgcttacaaaactagccatattagacaaaacaagcatccctgttgcgagcaaggggttagatgcttatgcccacagaggcagggctattgctaataatatagccaatgtaagcaccccaggataccgccgcatagaggtttcttttgaagaccaactgcgcagggcacttgacaaacaactcaatttggctggggaacgcaccaatggcaatcatttatttttaggtcgcccagagcttgaacacgtgaaaagcgaaggatatcgcgtgaacgactatacaaatcctggcgaaataaacaatgtggatatagatatagaaatggcaaaacttgcagaaaacgaaattgcttttaattttgcagctacattcataaaagaccgtagcggggcaataggggaggcaattagaggaagcagaggaggtgaatag

SEQ ID NO: 11192 - protein, 178 aa, Unknown
  Obtained from environmental sample
  DOMAIN (48)...(78): Flagella basal body rod protein
  misc_feature (1)..(178): Xaa is any amino acid
MKGNIVTIISAIRKIGESWFRQFGTVFAYIQNEVTMLTKLAILDKTSIPVASKGLDAYAHRGRAIANNIANVSTPGYRRIEVSFEDQLRRALDKQLNLAGERTNGNHLFLGRPELEHVKSEGYRVNDYTNPGEINNVDIDIEMAKLAENEIAFNFAATFIKDRSGAIGEAIRGSRGGE

SEQ ID NO: 11193 - DNA, 804 bp, Unknown
  Obtained from environmental sample
  misc_feature (1)..(804): n is a, c, g, or t
gtggatgatggtcagcccgaggcgttcgggcttagcggctggaccgatgccgtaaaaatatccttcctgtctgtggcggtatggtggatggttttctcgatccctatcctcctctttgtcaaagagaaaaatcgcaaagcgtcaacacgcaaaaatattattaccgtcgtctccgacgccgtgggcgccgtaaaaaagacatttctggctataatacaaaaaaaggagttgttactctttttggtcgcatattggctctactacgacggcataaacacgttcatacgcatggcggtagacttcggcctctctataggcttcggcccggaatcgctgatggccgcgctggttatatcgcagctgacggcctttccggcgtctctgcttttcgggtacctatccacaaagataggggcaagccgtatgatttcggcgggtgttattgtgtaccttctgacaagcattgcgggcgcgctctttatgcgtaccgaggcgcattttatgattttggcggcgatgataggtttggctcagggcggcatacaggcgctcagccgctcatacttcggaaagttgattcccattgaggagtcggcggagtacttcggtttctacaacgtggtaagccgcttcgcggtggccggccccgcggtggtcggaatggtggcgatggccgcgaggggtgtcggggcgggggagtcggtcgcgtcgagagtcggtatgtcgtccgtgggcctgtttttcgcggccgggctgattatactgtggatgagccaaagtaagcgtcggtcggcggtaggttga

SEQ ID NO: 11194 - protein, 267 aa, Unknown
  Obtained from environmental sample
  misc_feature (1)..(267): Xaa is any amino acid
MDDGQPEAFGLSGWTDAVKISFLSVAVWWMVFSIPILLFVKEKNRKASTRKNIITVVSDAVGAVKKTFLAIIQKKELLLFLVAYWLYYDGINTFIRMAVDFGLSIGFGPESLMAALVISQLTAFPASLLFGYLSTKIGASRMISAGVIVYLLTSIAGALFMRTEAHFMILAAMIGLAQGGIQALSRSYFGKLIPIEESAEYFGFYNVVSRFAVAGPAVVGMVAMAARGVGAGESVASRVGMSSVGLFFAAGLIILWMSQSKRRSAVG

SEQ ID NO: 11195 - DNA, 852 bp, Unknown
  Obtained from environmental sample
  misc_feature (1)..(852): n is a, c, g, or t
ttgacgcgatggttgaaaatctacgaagagaccggtaccgtagacgcactgagggggctatcggtgtcgtataatgatatggggaatcacctgacgtcgttaggcaagatggaagaagcgggagagtatttccaaaaaggtcttgacgcgatggtgaaaatctacgaggagaccggtactgtagacgcactgagggggctatcggtgtcatataataatatgggggctcacctgacggcgttaggcaagatggaagaagcgggggagtatatccggaaatcccttgacgtgagtgcgcaaatttacgggcagactggtaccgcaaccgcattgagtaatttatctgtgttgtacattaatatgggggatcacctgaggacggaaggtaaaatggaagaggcggaagaatattactggaaaggtcttgacgcgatggtgaaaatttatgagcagactggtactgtagatgtgctgagaaggctgtcggtgtcgtacggtaagatgggaatgcacctgacggagctgggccgtacggaagaagctggggagtgttaccggaaatctcttggcgcgagcgcgcaattctacgggcagaccggctccgcgacttcgcttattgctttggcagagtcgtacattaggacaggggatcacctgatgtctttaggccatactgaagaagcaggggagtgttaccggaaatcccttgatgcgaatgcgcaaatctacggtcagacaggtactatagcggcactgtggaatctgtcgacgtcgtatgaaagaatgggggatctcatgagaacactaggccgtatggaagaagncgggcgagtattatcaggaatcccttga

SEQ ID NO: 11196 - protein, 283 aa, Unknown
  Obtained from environmental sample
  misc_feature (1)..(283): Xaa is any amino acid
MTRWLKIYEETGTVDALRGLSVSYNDMGNHLTSLGKMEEAGEYFQKGLDAMVKIYEETGTVDALRGLSVSYNNMGAHLTALGKMEEAGEYIRKSLDVSAQIYGQTGTATALSNLSVLYINMGDHLRTEGKMEEAEEYYWKGLDAMVKIYEQTGTVDVLRRLSVSYGKMGMHLTELGRTEEAGECYRKSLGASAQFYGQTGSATSLIALAESYIRTGDHLMSLGHTEEAGECYRKSLDANAQIYGQTGTIAALWNLSTSYERMGDLMRTLGRMEEXGRVLSGIP

SEQ ID NO: 11197 - DNA, 693 bp, Unknown
  Obtained from environmental sample
  misc_feature (1)..(693): n is a, c, g, or t
gtgacgccgcaggaatattccaactccgccatggtctacgactacgacagggacttcgtctacgagctttactgccagcccttcagggtctccgacattacgctccagccgggggaaagggcaaacgacccgccgttcgtctcggacagcgaaaggtggatgctcggggccggggtcagctacgagtcgggagttcccgtgcagcacttttacgttaagcccacggaggcgaaccttacggcctcgcttattgtcaacacggacgtcagggtataccaccttatcctccgcagcttccgcgacgtctacatgccgatagtgcgatggcgttaccacgacagggacatgccgcagaattacataaatgcaaacacggggcagcctgcgtccggcgattcggccttttccaccgatccaaggaacctgtcctttaattacaaaattacttacggcgtctttaaaaagccgaagtggctgcctaccctggtttacgacgacggcagaaaaacctacgtcgcttttcccgacctggtcttaaccacggaactgccgtccgtttttgaccgcagggcggatatcgtaaactaccgcgtttggcaaaacgtgatgattattgacaagctgatcgaaaaaatcaccgtcaagctgggcgacaggatcgctaccatagagaagaaaaggggtaaacaatga

SEQ ID NO: 11198 - protein, 230 aa, Unknown
  Obtained from environmental sample
  DOMAIN (7)...(227): Conjugal transfer protein
  misc_feature (1)..(230): Xaa is any amino acid
MTPQEYSNSAMVYDYDRDFVYELYCQPFRVSDITLQPGERANDPPFVSDSERWMLGAGVSYESGVPVQHFYVKPTEANLTASLIVNTDVRVYHLILRSFRDVYMPIVRWRYHDRDMPQNYINANTGQPASGDSAFSTDPRNLSFNYKITYGVFKKPKWLPTLVYDDGRKTYVAFPDLVLTTELPSVFDRRADIVNYRVWQNVMIIDKLIEKITVKLGDRIATIEKKRGKQ

SEQ ID NO: 11199 - DNA, 498 bp, Unknown
  Obtained from environmental sample
  misc_feature (1)..(498): n is a, c, g, or t
atgaccacaattcattcctataccgctacccagaaaaccgtagacggcgtttcccagaaagactggagaggcggacgcgcggcggccatcaacattatcccctccacaaccggcgcggcaaaagccgtaggcgaagtgcttcccgtcaccaagggcaagcttaccggcatgagtttccgcgtacccacacccaccggctcggtagtggacctgaccttccgcgcgacaaaagacacttctattgaggaaattgacgccgccatgaaaaaagccgcggattcctacctcaaggggatactggcctactgcaacgaggaaatcgtttcaaccgacatcattcacgatacccacacttcaatttacgacagcaaagccaccctcgaaaacaacctcaaaggcgaaaaacgcttctttaaggtagtttcctggtacgacaacgaatggggctactccaataaggttgttgatctgctcaagtatattgatagcaagaaatag

SEQ ID NO: 11200 - protein, 165 aa, Unknown
  Obtained from environmental sample
  DOMAIN (1)...(144): Glyceraldehyde 3-phosphate dehydrogenase, C-terminal domain
  misc_feature (1)..(165): Xaa is any amino acid
MTTIHSYTATQKTVDGVSQKDWRGGRAAAINIIPSTTGAAKAVGEVLPVTKGKLTGMSFRVPTPTGSVVDLTFRATKDTSIEEIDAAMKKAADSYLKGILAYCNEEIVSTDIIHDTHTSIYDSKATLENNLKGEKRFFKVVSWYDNEWGYSNKVVDLLKYIDSKK

SEQ ID NO: 11201 - DNA, 486 bp, Unknown
  Obtained from environmental sample
  misc_feature (1)..(486): n is a, c, g, or t
gtgtatgaccgttctgttctggaaggcatcgccaacatcgcccgtgagaataaccttatcgtatacgccgatgaaatctacagccgcatcacctacgaccaggcggagcatatacccatgtcaacgatagctccggatattcttaccgtgagttttgacggcctttcaaaagcctggcgcgcggccggtttccgcgccggctggctggttctttccggggacaagaaaagcgcggcaagttatatagaagggctagagatgcttgccagcatgaggctctgcgccaacatgccctcccagttcggcatacaaaccgcgcttggcggctatcaaagcgttaatgaattgctgttgccgggcgggcgtctgcacgagcagagggacatcactgtgaaaatggtaagggaaaatcccgggctttcggttgtaatgcccaaaggcgcccctgtactgttccccnaaatagacgtgaaacgtttcacataa

SEQ ID NO: 11202 - protein, 161 aa, Unknown
  Obtained from environmental sample
  misc_feature (1)..(161): Xaa is any amino acid
MYDRSVLEGIANIARENNLIVYADEIYSRITYDQAEHIPMSTIAPDILTVSFDGLSKAWRAAGFRAGWLVLSGDKKSAASYIEGLEMLASMRLCANMPSQFGIQTALGGYQSVNELLLPGGRLHEQRDITVKMVRENPGLSVVMPKGAPVLFPXIDVKRFT

SEQ ID NO: 11203 - DNA, 549 bp, Unknown
  Obtained from environmental sample
  misc_feature (1)..(549): n is a, c, g, or t
ttgcgccgaaaaaaagatttgactcctagcgcggaaagtagtatattaataagtgtggacaaaaatactataagctcgccgatagaacaagggcgtcataatacggggcaagggcggccaagcgcgattttacatacgggttcgccgcttaccgctagacaacaagcaattttataccaattgcccgaatacgatagccgcgtaacggtcaagaaaaacgacgtttctatgaaagatttgtcagcattgacggcaaagaccggtgtagaattcgcgatgtttacgcggaagcaggagcggttgattgtgcgcggggatgctacgcacgtaaatataactccggacaaggcgacagcattaagtgcacaagggtataagtggagcggacatacgcatgtagggttacatgatggatgggagctaagtccttctgacggagatcgtgaagttttaagcaggttcgctcaaaaagaaagcgcaatatacaatgttaagggcgaaagtctaacatttgaaaacgatttgagagaggagctgacagatggttaa

SEQ ID NO: 11204 - protein, 182 aa, Unknown
  Obtained from environmental sample
  misc_feature (1)..(182): Xaa is any amino acid
MRRKKDLTPSAESSILISVDKNTISSPIEQGRHNTGQGRPSAILHTGSPLTARQQAILYQLPEYDSRVTVKKNDVSMKDLSALTAKTGVEFAMFTRKQERLIVRGDATHVNITPDKATALSAQGYKWSGHTHVGLHDGWELSPSDGDREVLSRFAQKESAIYNVKGESLTFENDLREELTDG

SEQ ID NO: 11205 - DNA, 483 bp, Unknown
  Obtained from environmental sample
  misc_feature (1)..(483): n is a, c, g, or t
ttgaacgttttccgccttgagccgggcgaggcggtttttctgaaagccgggattcttcatgcctacattcacggctttggcgttgaactcatggcaaattccgacaatgtgctgaggggagggcttacgtcaaaacatattgacattcctgaattgatgaaggtgctggactttaaccccttaaagccgcagattataaaaccggagccgggtttttcatgctttacttacccggccccctgcgaggaattttctcttacggtgatacgcggtacgggcggcatgatgaatatgccggaaacatcgccgttggctttggctcaaagcgcctcaataggtattgtcaccgaaggggaggtttctgtttccggtatgattcttaaacagggggaatcggttttttttccccctgccaataacagtgaaagccccctgactttgcagggacatttcaccctttatgtcgcgtcggtgccgcaatga

SEQ ID NO: 11206 - protein, 160 aa, Unknown
  Obtained from environmental sample
  misc_feature (1)..(160): Xaa is any amino acid
MNVFRLEPGEAVFLKAGILHAYIHGFGVELMANSDNVLRGGLTSKHIDIPELMKVLDFNPLKPQIIKPEPGFSCFTYPAPCEEFSLTVIRGTGGMMNMPETSPLALAQSASIGIVTEGEVSVSGMILKQGESVFFPPANNSESPLTLQGHFTLYVASVPQ

SEQ ID NO: 11207 - DNA, 777 bp, Unknown
  Obtained from environmental sample
  misc_feature (1)..(777): n is a, c, g, or t
atgtacgcatacggccaatatatcaagcactgccccgacggagagaaaattgccgccgctaaagagaagtatgcgaagctggcaagccaggtcacagtaacagaattctccgcgaaggacttaaaccggacttaccgcaagaacacaatgctctttgccgaaggagagccgggtgaagaactctttatcatccagaaaggctccataaaaatagctaaaatcgttgacaataaagaggtgcttctggcaatgctgaagcccggggatatgctcggcgaaatggcacttttggaaggcaagccgcggactgccagcgcggtggcttatgaggacagcgatgtgatggctataaacaaggcaaactttgaattaatgattaagaaccagccccagctcattgctaaaatcaccactctccttgcggatcggatctggctgatttacaagcagttggccaataccatgtttaaaaatccgttaggccggatgtatgacatactgcttatccagcttgaaaaaaaccgtgttcccgtagaaagcacaaccccttataccttcgcctttgggcggcctgaattgattaacatggccggacttcctgatagagatggcaatatacttttcgcgcagatgctggaaaacaagaaaatccggataacagacaacaaaatccttgttacatcggtggatgaaatatataaacagtccgaacacttccgcagaatggacagattagaaaaagccagacaggaaagcaaaagcacagataacagataa

SEQ ID NO: 11208 - protein, 258 aa, Unknown
  Obtained from environmental sample
  DOMAIN (42)...(131): Cyclic nucleotide-binding domain
  misc_feature (1)..(258): Xaa is any amino acid
MYAYGQYIKHCPDGEKIAAAKEKYAKLASQVTVTEFSAKDLNRTYRKNTMLFAEGEPGEELFIIQKGSIKIAKIVDNKEVLLAMLKPGDMLGEMALLEGKPRTASAVAYEDSDVMAINKANFELMIKNQPQLIAKITTLLADRIWLIYKQLANTMFKNPLGRMYDILLIQLEKNRVPVESTTPYTFAFGRPELINMAGLPDRDGNILFAQMLENKKIRITDNKILVTSVDEIYKQSEHFRRMDRLEKARQESKSTDNR

SEQ ID NO: 11209 - DNA, 606 bp, Unknown
  Obtained from environmental sample
  misc_feature (1)..(606): n is a, c, g, or t
gtggaaaaagcccaccccgaggttttcaatgtgttcctccagctcctggatgacggccgcctgaccgacggccagggccgcaccgtggatttcaagaacaccgtggtcatcatgacctccaacatcggctccgagttcatcgtggaaaacgcctcggaccagtggccccgggtgctggaggccctgaagcgccatttccggccggagttcttgaaccgcatcgacgacacggtcattttccaggccctgaccgaagaggatatccggcgcatcgtggccatccaggtcgggctactggccgcccgcctggccgagcgcaagctcgggctcatcctttcgcccgaggccgaggctttcctggcccgggccggttacgacccggtttacggggcccggcccttgaagcgggctctccagaccttcctcatggaccctttggccctgggccttttgaacggcgaaatactggaagggcgggatttgttggtggaactgaacgcccggggcgacggcctggcctttcggccggccggagatgaaagggccggggaggcaccggccgaagaggccggcgactcaagcccccggctgctcatgctcaattaa

SEQ ID NO: 11210 - protein, 201 aa, Unknown
  Obtained from environmental sample
  DOMAIN (1)...(77): ATPase family associated with various cellular activities (AAA)
  misc_feature (1)..(201): Xaa is any amino acid
MEKAHPEVFNVFLQLLDDGRLTDGQGRTVDFKNTVVIMTSNIGSEFIVENASDQWPRVLEALKRHFRPEFLNRIDDTVIFQALTEEDIRRIVAIQVGLLAARLAERKLGLILSPEAEAFLARAGYDPVYGARPLKRALQTFLMDPLALGLLNGEILEGRDLLVELNARGDGLAFRPAGDERAGEAPAEEAGDSSPRLLMLN

SEQ ID NO: 11211 - DNA, 378 bp, Unknown
  Obtained from environmental sample
  misc_feature (1)..(378): n is a, c, g, or t
gtggccccgggtgctggaggccctgaagcgccatttccggccggagttcttgaaccgcatcgacgacacggtcattttccaggccctgaccgaagaggatatccggcgcatcgtggccatccaggtcgggctactggccgcccgcctggccgagcgcaagctcgggctcatcctttcgcccgaggccgaggctttcctggcccgggccggttacgacccggtttacggggcccggcccttgaagcgggctctccagaccttcctcatggaccctttggccctgggccttttgaacggcgaaatactggaagggcgggatttgttggtggaactgaacgcccggggcgacggcctggcctttcggccggccggagatga

SEQ ID NO: 11212 - protein, 125 aa, Unknown
  Obtained from environmental sample
  misc_feature (1)..(125): Xaa is any amino acid
MAPGAGGPEAPFPAGVLEPHRRHGHFPGPDRRGYPAHRGHPGRATGRPPGRAQARAHPFARGRGFPGPGRLRPGLRGPALEAGSPDLPHGPFGPGPFERRNTGRAGFVGGTERPGRRPGLSAGRR

SEQ ID NO: 11213 - DNA, 780 bp, Unknown
  Obtained from environmental sample
  misc_feature (1)..(780): n is a, c, g, or t
ttgaccaactacagggaagactccattgaaagctttggctttgaacttgacgttgttgattttatctccaaaccgttttcaacgcccgtgcttatcaaccgtattaaaacacaacttgacattgactcattaatccgcgacaggactgaaagaattaaaaaactgcaaaacggcatcatgacggttttagccaatgttgttgaggaacgcgacagggacactgaagggcataacgaccgcatagcctcgtatattaagatacttatagaagcaatggcggaacgcggagtgtacacggatgaaatgaaaggttgggacatagaaaaggtagtttttgcttcccgtctgcatgatatgggaaaaataaaagtagtggacacaatcttgaataaacccggtaaattaagcgaagacgaatatgaacagattaaatcccacaccgaagaaggcgtaaaaataatcgacagaatgatagaacagacgggcgaggaagaattattgagtaacgccaaattgtacgccgaattccaccatgaacactgggacggcaccggttatccgcatgggcttaaggggactgacatacccttacatgggcgaattttggcgatagtggacgcgtatgacgcgcttatatccaaacgggcttacaaaaacgcgctggcggacaaagaagtggcaaaaatcatttcagaagaatccggcaagcagtttgaccctaaaattgttgaagtgtttcttgagatacaggatcaatttaaggatgtaaggggtttttag

SEQ ID NO: 11214 - protein, 259 aa, Unknown
  Obtained from environmental sample
  DOMAIN (88)...(211): HD domain
  misc_feature (1)..(259): Xaa is any amino acid
MTNYREDSIESFGFELDVVDFISKPFSTPVLINRIKTQLDIDSLIRDRTERIKKLQNGIMTVLANVVEERDRDTEGHNDRIASYIKILIEAMAERGVYTDEMKGWDIEKVVFASRLHDMGKIKVVDTILNKPGKLSEDEYEQIKSHTEEGVKIIDRMIEQTGEEELLSNAKLYAEFHHEHWDGTGYPHGLKGTDIPLHGRILAIVDAYDALISKRAYKNALADKEVAKIISEESGKQFDPKIVEVFLEIQDQFKDVRGF

SEQ ID NO: 11215 - DNA, 300 bp, Unknown
  Obtained from environmental sample
  misc_feature (1)..(300): n is a, c, g, or t
atgccggctgttacaagacaaggcgacgcgtgcacggggcacgactgcttcccgccgaggacaagcatcggggggagcgggaacgtctatataaacggaatccccgcgcaccgccagggcgacggctggaagccgcatacctgcaccgatcccaggacgccgcacgggacgcacgcgggatcgcttgccgccggaagctccagcgtccgcgtaaacgggctgccgctcggcagggccggcgatccggtcgactgcgggtctttggtggcgtcgggctcgcccgacgtttttgcggggtaa

SEQ ID NO: 11216 - protein, 99 aa, Unknown
  Obtained from environmental sample
  misc_feature (1)..(99): Xaa is any amino acid
MPAVTRQGDACTGHDCFPPRTSIGGSGNVYINGIPAHRQGDGWKPHTCTDPRTPHGTHAGSLAAGSSSVRVNGLPLGRAGDPVDCGSLVASGSPDVFAG

SEQ ID NO: 11217 - DNA, 606 bp, Unknown
  Obtained from environmental sample
  misc_feature (1)..(606): n is a, c, g, or t
gtgcacggggcacgactgcttcccgccgaggacaagcatcggggggagcgggaacgtctatataaacggaatccccgcgcaccgccagggcgacggctggaagccgcatacctgcaccgatcccaggacgccgcacgggacgcacgcgggatcgcttgccgccggaagctccagcgtccgcgtaaacgggctgccgctcggcagggccggcgatccggtcgactgcgggtctttggtggcgtcgggctcgcccgacgtttttgcggggtaattatggacaccgtacgcatagaacaatggaatgacatccgcgaattggcactcatgagcatcgggaccgacaagggcacatggtgggccgatccgaacttcggcagcgaactgtggctgcttcggaaaaacggcaaggtggacggccagaccgcgggaacccttagaaggatggtgctcgagagcctgcaatggcttgtccagggctcccttgccaagaaaatcgactgcgctgccgagcgcaccggcaaaaacgaaatccgctacagcgtggttattttccgtccggacgggaacagccttcccccgataacggaggcatggcgtgccgtttaa

SEQ ID NO: 11218 - protein, 201 aa, Unknown
  Obtained from environmental sample
  DOMAIN (101)...(198): Phage protein GP46
  misc_feature (1)..(201): Xaa is any amino acid
MHGARLLPAEDKHRGERERLYKRNPRAPPGRRLEAAYLHRSQDAARDARGIACRRKLQRPRKRAAARQGRRSGRLRVFGGVGLARRFCGVIMDTVRIEQWNDIRELALMSIGTDKGTWWADPNFGSELWLLRKNGKVDGQTAGTLRRMVLESLQWLVQGSLAKKIDCAAERTGKNEIRYSVVIFRPDGNSLPPITEAWRAV

SEQ ID NO: 11219 - DNA, 744 bp, Unknown
  Obtained from environmental sample
  misc_feature (1)..(744): n is a, c, g, or t
gtgggattacggccatcccaattcacgcacatgggcattttagggcgttactcgatagaagatctggataaactgcttacggagaaggcggcggagtacgaggaagtgagcgacggaagaagagttgtaaaagctttttatataatatacgggactgtatggcccggcggcgacataggaattttaagcaatgatattcttatgaagtacattgattacggccttaaaaacgacattctggtttttattgatcatcaaatcggaaagcatgatcccgttgaatctcttaaaaaaatgctgccgtacctgaaatatcccaatgtccatcttgcccttgatcccgaatggcgcacattaaaaccgctggtagaaatagggtctgtaaccgcggaagaaattaacaccgcgcagcaggttatggaagaatacatgattaaaaacaacattcccggcgagcgcatgcttgtaatccaccaatttaattataaaatgatagaaaaccgaagagcggttaaggccaatttcaacagggtgcgtcttgtccactgcgccgacggattcggaggcccgggaatgaagcgcgacacttacgcctttaacgcgcttgcgagcaacatgccggttaaagggtttaaattgttttataattttaacattcccggcgcggggtatgatgatcctattatgacgccgaaacaggtttatgaattanatcctcggccttatgtgattatgtatcagtag

SEQ ID NO: 11220 - protein, 247 aa, Unknown
  Obtained from environmental sample
  misc_feature (1)..(247): Xaa is any amino acid
MGLRPSQFTHMGILGRYSIEDLDKLLTEKAAEYEEVSDGRRVVKAFYIIYGTVWPGGDIGILSNDILMKYIDYGLKNDILVFIDHQIGKHDPVESLKKMLPYLKYPNVHLALDPEWRTLKPLVEIGSVTAEEINTAQQVMEEYMIKNNIPGERMLVIHQFNYKMIENRRAVKANFNRVRLVHCADGFGGPGMKRDTYAFNALASNMPVKGFKLFYNFNIPGAGYDDPIMTPKQVYELXPRPYVIMYQ

SEQ ID NO: 11221 - DNA, 438 bp, Unknown
  Obtained from environmental sample
  misc_feature (1)..(438): n is a, c, g, or t
atggcttatctccctcaaatccgcgcattgctgggtatatacggcctgccagaacggatgtaccggtttgccaatgtatcggaatttgacaaccgctattcgcagtttaacagcgtccgctatatcaagacctttcattgcgacgagcttgaaacctgcgcgatattgtttgaaacaagcagcgggcttgtgttttattcaggcgacatgaaggaccccgccccgctcctggcccttgtcaagagcgggcagaggatcgataaaatatacatggactccaacaatgacccggaacctaacccttatcatctcaggcttaaggaaatatacgacatcgttccgcccgaattaaggcccagggtttattgcatgcatttcaacagcagccggtgcatggacgacgccgttgccgtcggcttcaaggttgtcgaaatctaa

SEQ ID NO: 11222 - protein, 145 aa, Unknown
  Obtained from environmental sample
  misc_feature (1)..(145): Xaa is any amino acid
MAYLPQIRALLGIYGLPERMYRFANVSEFDNRYSQFNSVRYIKTFHCDELETCAILFETSSGLVFYSGDMKDPAPLLALVKSGQRIDKIYMDSNNDPEPNPYHLRLKEIYDIVPPELRPRVYCMHFNSSRCMDDAVAVGFKVVEI

SEQ ID NO: 11223 - DNA, 519 bp, Unknown
  Obtained from environmental sample
  misc_feature (1)..(519): n is a, c, g, or t
atgggagcacccattgggaaattcatcgcggcaacaaacataaataaaacggtgccggattatcttgaaagcggaagttatgaggagaggctttccaaggccacattgtccaacgcaatggatgtcggtgctcccagcaactttgagcgcatggcggcgcatttttccttggctcaaatgcgcgatattattatgggcgcttcggtcagcgacagtgaaaccaaggagacaatttccgaagtgttttcccgttgcggttattacctggatcctcatagcgccgtggcctggaaagcagcggataaattgggggaatcaggaaaactggcgaaagaaaaacctctggcaattttttccaccgctcatccggccaagtttgccgaaactgttgagccgcttaccgggcccgtgcctgtgcctccctcgcttcaaaaggcaatggagcggacagtaaaggctaaaaccattccagcggaacctgaggctttaaaagacgttttgtcggaggagaatttatga

SEQ ID NO: 11224 - protein, 172 aa, Unknown
  Obtained from environmental sample
  misc_feature (1)..(172): Xaa is any amino acid
MGAPIGKFIAATNINKTVPDYLESGSYEERLSKATLSNAMDVGAPSNFERMAAHFSLAQMRDIIMGASVSDSETKETISEVFSRCGYYLDPHSAVAWKAADKLGESGKLAKEKPLAIFSTAHPAKFAETVEPLTGPVPVPPSLQKAMERTVKAKTIPAEPEALKDVLSEENL

SEQ ID NO: 11225 - DNA, 597 bp, Unknown
  Obtained from environmental sample
  misc_feature (1)..(597): n is a, c, g, or t
atggacgaagcgatgaagggcgctgacgtgcttatcgcgctttctactccgaaccctgatactgtgaaacgcccgtggatccgttccatggctccccgttccatagtgtttacctgcgccaacccagtgcccgaaatctggccctatgccgcaaaagaggagggtgccttcatagtcgcgacaggccgcgccgattttccgaaccaggtaaacaactctgtttgctttcccggcattctaaaaggtgccctgcttgttcgcgcaaaaaaaatcaccgacggtatggccatacgctgtgcccattcgatcgcggatttttccgaaaagcgtgggattgctccggaaaacattattgcctcgatggacgaaaccgaagtctttgccgtggaagccgcagacacggcgcaggaggccattaaggaaagcgtagccggcgtgaatctttcgtgggacgaagtgtatcgccgcgccaagtccgacatagaagctgcccgctctgttaccgaggatttaaagaaactggggtacatttccgagccgcccatggaactgcttgagaaagctttggaagaggcgataacctcggcgcgagtataa

SEQ ID NO: 11226 - protein, 198 aa, Unknown
  Obtained from environmental sample
  DOMAIN (1)...(139): Malic enzyme, NAD binding domain
  misc_feature (1)..(198): Xaa is any amino acid
MDEAMKGADVLIALSTPNPDTVKRPWIRSMAPRSIVFTCANPVPEIWPYAAKEEGAFIVATGRADFPNQVNNSVCFPGILKGALLVRAKKITDGMAIRCAHSIADFSEKRGIAPENIIASMDETEVFAVEAADTAQEAIKESVAGVNLSWDEVYRRAKSDIEAARSVTEDLKKLGYISEPPMELLEKALEEAITSARV

SEQ ID NO: 11227 - DNA, 327 bp, Unknown
  Obtained from environmental sample
  misc_feature (1)..(327): n is a, c, g, or t
ttgagcataactgaacttccagccgaggttgaagactttgaaaaccttgccgagatcaatgtaagttgcaatcaactggaatcgctggctgactggatgggcaaattacgttcattgaaaaagctcaatctgcatggaaacaacattgataccctgcctgagtggctgggcggttttgcgcatttggaagaactggatatcagcgccaacatgcttcgcatagtaccggaatttatcgggaaactaaaaaatctccgcactcttaatttgggttgttccagtgaaggggaatatcgagtcgtccattttggcatcgccggcaagtaa

SEQ ID NO: 11228 - protein, 108 aa, Unknown
  Obtained from environmental sample
  misc_feature (1)..(108): Xaa is any amino acid
MSITELPAEVEDFENLAEINVSCNQLESLADWMGKLRSLKKLNLHGNNIDTLPEWLGGFAHLEELDISANMLRIVPEFIGKLKNLRTLNLGCSSEGEYRVVHFGIAGK

SEQ ID NO: 11229 - DNA, 690 bp, Unknown
  Obtained from environmental sample
  misc_feature (1)..(690): n is a, c, g, or t
ttgattgcgagaattcgcaggactggtcgtcgctcgtggcgcatataccagggtttgaaggtatgcttccctgcaaccccgtatgacgccaaaggattaatgaatgcagcgttgcagggaaccgaccccgtgattttctttgaaagccagcgtatatatgatattggcgaacagttccacgaaggcggagttcccgaaggatattacgagataccattcggcgagcctgatgtgaaacgcgcaggtaatgatattacaattctgacaataggttcgacactttatactgcattacaggcagccgatgttttgaaggaaaagtacggcgtagaagccgaaataatagacgcacgcagtttagttccgttcaattacgaaccggtgctgcaatctgtccgcaaaacaggacgtatattgcttgccagcgatgcatctgttcgaggctcgttcctcaacgatatggctcaaaatatcacacaacttgctttcgacgaactcgacgcaccacctgttttagtaggctcgcgcaactggataacccccgcatacgaacaggaaacgttcttcttcccgcaaaaggaatggattattgatgcaatccatgaaaaaatactcccattgacaggacacaaatcaacaagtaactggagcgatgaggaaatgctgaggaggaacagagcaggggtttag

SEQ ID NO: 11230 - protein, 229 aa, Unknown
  Obtained from environmental sample
  DOMAIN (74)...(196): Transketolase, C-terminal domain
  misc_feature (1)..(229): Xaa is any amino acid
MIARIRRTGRRSWRIYQGLKVCFPATPYDAKGLMNAALQGTDPVIFFESQRIYDIGEQFHEGGVPEGYYEIPFGEPDVKRAGNDITILTIGSTLYTALQAADVLKEKYGVEAEIIDARSLVPFNYEPVLQSVRKTGRILLASDASVRGSFLNDMAQNITQLAFDELDAPPVLVGSRNWITPAYEQETFFFPQKEWIIDAIHEKILPLTGHKSTSNWSDEEMLRRNRAGV

SEQ ID NO: 11231 - DNA, 492 bp, Unknown
  Obtained from environmental sample
  misc_feature (1)..(492): n is a, c, g, or t
atgacagataacaatgaattgagtcttgccgccctggttgaacgcggcggcgtatactacgatgttcccggcgcaagcccgaaagagctgattgacagcgtaatcggcctgatgccgcctataaagggcgttgcccctgaggaattacgccggcagataatggaaagggaagcccttgtatcaacaggggtaggccatggcattgccctgcctcatccgcgcagcccggtgcttgaaggcacggacgagccgccgcttgtggctatagcgttccccgttatgccgattgactggaatacccaggacggcagcaaggtccatacggtattcctcatcatctccgcgtcggcgaaacagcaccttaataccctgtcaaagatcaatttcctgtgtcaaaaagaaaaattctacagcctgattgaagcgcgagtctcaaaaaaagagattgtaactgctgttaaagaagcggaagattcatgggttaacaaataa

SEQ ID NO: 11232 - protein, 163 aa, Unknown
  Obtained from environmental sample
  DOMAIN (11)...(156): Phosphoenolpyruvate-dependent sugar phosphotransferase system, EIIA 2
  misc_feature (1)..(163): Xaa is any amino acid
MTDNNELSLAALVERGGVYYDVPGASPKELIDSVIGLMPPIKGVAPEELRRQIMEREALVSTGVGHGIALPHPRSPVLEGTDEPPLVAIAFPVMPIDWNTQDGSKVHTVFLIISASAKQHLNTLSKINFLCQKEKFYSLIEARVSKKEIVTAVKEAEDSWVNK

SEQ ID NO: 11233 - DNA, 852 bp, Unknown
  Obtained from environmental sample
  misc_feature (1)..(852): n is a, c, g, or t
gtggttacggcgaccattgcaaacgggatagagcaaggcacggaggactacacacaagactttactattccattcatcgtgccagtcaccgacattaccggtgttcccaaagcaggagcggtaggtatcccgcttaacctcaccgggacggttgaacccagcaatgcgaacaacaatattatcgtctggacgattaaggatgctggcaccacaggaatcacagaaataataaaaaccggtgacacggtaaccgcgatggatgtgggaactctggtagttacggcgaccattgcaaacggggaaacagcaaccacgccctacataaaaaactttactattgtttttaacgcgttcgtgccagtcatcaacattaccgatgttcccgaagcaggggcggtaggcacgtttactctcaccgggacggttaaccccgtcaacgcaaccaacaagaatattgtctgggaggttagagatgcggacaccaccggaatagagtcgggtttcgtgacaggcgacacaatagaagcgaaggcagcgggaaccctgctggttacggcgaagatcgataacggaacaccgcagggggaacctcacaggcaagactttagaattgaattcatcgtgccggtcacccacattaccggtgtttcccaaaaagggacggtaggtaccgagcttctcctctcggggactgttatgcccaacaatgcaaccaacaatattatcgtctggacgattaaggacgctgacaccacaggaatcacggaaataaaaacgcgggaatacggtaaccgcaacagccccgggaatccggggtacgcgccatccaaacggccgtccaatctgacctag

SEQ ID NO: 11234 - protein, 283 aa, Unknown
  Obtained from environmental sample
  misc_feature (1)..(283): Xaa is any amino acid
MVTATIANGIEQGTEDYTQDFTIPFIVPVTDITGVPKAGAVGIPLNLTGTVEPSNANNNIIVWTIKDAGTTGITEIIKTGDTVTAMDVGTLVVTATIANGETATTPYIKNFTIVFNAFVPVINITDVPEAGAVGTFTLTGTVNPVNATNKNIVWEVRDADTTGIESGFVTGDTIEAKAAGTLLVTAKIDNGTPQGEPHRQDFRIEFIVPVTHITGVSQKGTVGTELLLSGTVMPNNATNNIIVWTIKDADTTGITEIKTREYGNRNSPGNPGYAPSKRPSNLT

SEQ ID NO: 11235 - DNA, 579 bp, Unknown
  Obtained from environmental sample
  misc_feature (1)..(579): n is a, c, g, or t
ttggaacgtgaccttgaacggcaaggacgtgggccaggctcgcgatttgtggataaccgcggcccgggaactgcacctgccgggcgtgggcacgggcacaaacaaggatttcgaagacatcatcaacgggctggaccgctacagcttcgtggaaatccagaacgccgcggacggcatctgggccggggccgacgtgcggacccagagccacgcccaggaggccctggacgccctgaactactccatcaacgtcaaagacaaggtgcgggccgacctcggggcggtccagaaccggctggagaacaccatgaccaacctggaaatacaggccgaaaacctgcaagcctcggaaagccgcatctcggatgtcgatgtggccaaggaaatgaccgagttcaccaagaacaacgtcttgacccaggcggccgtgggcatgctgtcccaggccaactccctcggccagttggccctctccctcatcggcgggtagaaagagcctcaagaaaagaaaaggccggcccagccggccttttcttttcttggcaaagtccggcttggccggctttttatttaccttga

SEQ ID NO: 11236 - protein, 192 aa, Unknown
  Obtained from environmental sample
  misc_feature (1)..(192): Xaa is any amino acid
MERDLERQGRGPGSRFVDNRGPGTAPAGRGHGHKQGFRRHHQRAGPLQLRGNPERRGRHLGRGRRADPEPRPGGPGRPELLHQRQRQGAGRPRGGPEPAGEHHDQPGNTGRKPASLGKPHLGCRCGQGNDRVHQEQRLDPGGRGHAVPGQLPRPVGPLPHRRVERASRKEKAGPAGLFFSWQSPAWPAFYLP

SEQ ID NO: 11237 - DNA, 621 bp, Unknown
  Obtained from environmental sample
  misc_feature (1)..(621): n is a, c, g, or t
gtggattttgaaaacgtggagaccggcttctggcacaagggcggcaccaacntgagcctgggcaccaacgccgccaacgtctgggccaagatgaagcccgtgcagaccaaggaagcccagggcaacgctgtttggaacgtgaccttgaacggcaaggacgtgggccaggctcgcgatttgtggataaccgcggcccgggaactgcacctgccgggcgtgggcacgggcacaaacaaggatttcgaagacatcatcaacgggctggaccgctacagcttcgtggaaatccagaacgccgcggacggcatctgggccggggccgacgtgcggacccagagccacgcccaggaggccctggacgccctgaactactccatcaacgtcaaagacaaggtgcgggccgacctcggggcggtccagaaccggctggagaacaccatgaccaacctggaaatacaggccgaaaacctgcaagcctcggaaagccgcatctcggatgtcgatgtggccaaggaaatgaccgagttcaccaagaacaacgtcttgacccaggcggccgtgggcatgctgtcccaggccaactccctcggccagttggccctctccctcatcggcgggtag

SEQ ID NO: 11238 - protein, 206 aa, Unknown
  Obtained from environmental sample
  DOMAIN (112)...(183): Bacterial flagellin C-terminus
  misc_feature (1)..(206): Xaa is any amino acid
MDFENVETGFWHKGGTNXSLGTNAANVWAKMKPVQTKEAQGNAVWNVTLNGKDVGQARDLWITAARELHLPGVGTGTNKDFEDIINGLDRYSFVEIQNAADGIWAGADVRTQSHAQEALDALNYSINVKDKVRADLGAVQNRLENTMTNLEIQAENLQASESRISDVDVAKEMTEFTKNNVLTQAAVGMLSQANSLGQLALSLIGG

SEQ ID NO: 11239 - DNA, 543 bp, Unknown
  Obtained from environmental sample
  misc_feature (1)..(543): n is a, c, g, or t
ttgtttgacgaaggtggacgcaaaggctacaaattctggaagtccgaaccggacaggctccactccgctcaggagatggttgataaatatgccaactggatagcaaaatatcctataatttccatagaagacggtcttgaccaaaacgactggcagggttatgttgacttcacaaagagactcggtgctaaaacacagctcgttggagacgatttttttgtcaccaacccagagcgtttggcaaagggcattaaaatgaaagccgctaacgctatcttaatcaaggtaaaccaaatcggtacagtaaccgaaactttggacgcaattaaaatggcccagaaagcgggctacggggtaattgcttctcaccgttccggcgaaaccgaagattcctttatcgcagaccttgcagtgggcaccggtgctggccaaatcaaaaccggctctctttcccgcacagaccgcatttgcaaatacaaccagctccttcgcatagaagcgcagatcggcaaaaaagcggtttatcaaggcaagataaagtaa

SEQ ID NO: 11240 - protein, 180 aa, Unknown
  Obtained from environmental sample
  DOMAIN (1)...(179): Enolase, C-terminal TIM barrel domain
  misc_feature (1)..(180): Xaa is any amino acid
MFDEGGRKGYKFWKSEPDRLHSAQEMVDKYANWIAKYPIISIEDGLDQNDWQGYVDFTKRLGAKTQLVGDDFFVTNPERLAKGIKMKAANAILIKVNQIGTVTETLDAIKMAQKAGYGVIASHRSGETEDSFIADLAVGTGAGQIKTGSLSRTDRICKYNQLLRIEAQIGKKAVYQGKIK

SEQ ID NO: 11241 - DNA, 345 bp, Unknown
  Obtained from environmental sample
  misc_feature (1)..(345): n is a, c, g, or t
atgtttgctgttgttgtggacgattttgaagaaaatatagatttgataatgcgcggcgaagatttaaaagattccatagataagcaaatcactttagcgaaagtttttggcagaaaagagatgccgcaattttttcaccacagcttaatctacgattcaagcggaaaaaaattgagcaaacgagatggctctgagggaattttcaaagagagggaagcgggaatttctgcaaaaaaaataattagcggtttgtgcaaaaccgctatgcccaatgcggaaattccaaacgaaatttcctgggcagaagcagttgatatttggaatacttactttatcttgccttga

SEQ ID NO: 11242 - protein, 114 aa, Unknown
  Obtained from environmental sample
  misc_feature (1)..(114): Xaa is any amino acid
MFAVVVDDFEENIDLIMRGEDLKDSIDKQITLAKVFGRKEMPQFFHHSLIYDSSGKKLSKRDGSEGIFKEREAGISAKKIISGLCKTAMPNAEIPNEISWAEAVDIWNTYFILP

SEQ ID NO: 11243 - DNA, 546 bp, Unknown
  Obtained from environmental sample
  misc_feature (1)..(546): n is a, c, g, or t
atgttttcagcgggcaattttatttttcatcttaaaaacacaggcttatctcttttttcaggcatcagaggaggcatttacgaattttcatccgctgtttcaagaacagttctttccgtaaaagaacttgccaatttaagaaaagaacatgccgagttgttaaagcaccttgaacgttacgaagaacttgaacgctcaagcgcggaaatatatcaggaaaatatacgtcttcgcgaacaactgggttttgcgcaaaccctgcgatacagacggattcccgcgcagatttccggccgtgatccgaataatcttttttccgccgtagttattaacaagggcagttttgcgggtgttacgcgcgacatgactgtagtagcgtggcaaaacggcacacaagcacttgtaggaaaggtaatacaaataggcgcttttgaaagccttgttatgcctgtttttgataataatgctcttgtatcctcgcggctgtccgttacacgctatgaaggtattgttgaaggacagggaaaccaggaaactcctctttaa

SEQ ID NO: 11244 - protein, 181 aa, Unknown
  Obtained from environmental sample
  misc_feature (1)..(181): Xaa is any amino acid
MFSAGNFIFHLKNTGLSLFSGIRGGIYEFSSAVSRTVLSVKELANLRKEHAELLKHLERYEELERSSAEIYQENIRLREQLGFAQTLRYRRIPAQISGRDPNNLFSAVVINKGSFAGVTRDMTVVAWQNGTQALVGKVIQIGAFESLVMPVFDNNALVSSRLSVTRYEGIVEGQGNQETPL

SEQ ID NO: 11245 - DNA, 474 bp, Unknown
  Obtained from environmental sample
  misc_feature (1)..(474): n is a, c, g, or t
atggcggataaccgtcattatgaagcgcaggatattccagaatatcttggacttgcatacgctgccgcaggggattaccgctcaagcgtagaagcgtttacaaaagcttttaaaacaggttctctgtcagataatttgttaatgtcaattgcacgttcatatatggcaatggaagaatacaatatggccgcaagttatattcagcgctgtattgaactttcaccggactctaaatcaatatttaccgccagactgcttttggcggaaatttatatacatttaggcgatcataacaacgctcaggcgcagtatttgagtatacttaatgaattaggagaaaatgccgaagttcgttatcaactgggagaattgtttaaccttatgggtgatacaactcgggcgcgtgctgaatggagaattgcctacagacaggatccggcccatgcaaaagcaagagcgcggcttaatatttag

SEQ ID NO: 11246 - protein, 157 aa, Unknown
  Obtained from environmental sample
  misc_feature (1)..(157): Xaa is any amino acid
MADNRHYEAQDIPEYLGLAYAAAGDYRSSVEAFTKAFKTGSLSDNLLMSIARSYMAMEEYNMAASYIQRCIELSPDSKSIFTARLLLAEIYIHLGDHNNAQAQYLSILNELGENAEVRYQLGELFNLMGDTTRARAEWRIAYRQDPAHAKARARLNI

SEQ ID NO: 11247 - DNA, 351 bp, Unknown
  Obtained from environmental sample
  misc_feature (1)..(351): n is a, c, g, or t
atgtttggcaatttttcatcagatctcggcattgatttagggacatgtaacacgcttatttatattaaaggaaagggtgtggtattgaatgaaccgtcggttgtagctgttgaacgcggcacaaaaagaattgtcgccgtcggcgccgacgcanaacgaatgttatggaaaacgccggagaaacattatgccatanggcctatgcgcgacggagttattgcggatattgaatcaacggaaaaaatgatacggtattttatttaccgtggttttccacgctaccgttttctaaaaccgcgcatggttataaggattccgccctgccatacgaaagtaaaaagcccgccctaa

SEQ ID NO: 11248 - protein, 116 aa, Unknown
  Obtained from environmental sample
  DOMAIN (6)...(116): MreB/Mbl protein
  misc_feature (1)..(116): Xaa is any amino acid
MFGNFSSDLGIDLGTCNTLIYIKGKGVVLNEPSVVAVERGTKRIVAVGADAXRMLWKTPEKHYAIXPMRDGVIADIESTEKMIRYFIYRGFPRYRFLKPRMVIRIPPCHTKVKSPP

SEQ ID NO: 11249 - DNA, 822 bp, Unknown
  Obtained from environmental sample
  misc_feature (1)..(822): n is a, c, g, or t
atgccttacggcagagttttgatagtagacgatgtggatacaaacctttatgtcgccaaaggattgatgtccccttatggtttgtcgcttgaaaccgccaagagcggttttgaaatgattgataagattaaaggcggcgctgtctttgacataatattcctggatcattttatgcctaaaatggacgggatagaagccgcaagaataataagagaaatgggttacaagcatcctgtcatagcgttgacagctaacgcaattgtaggacaggcggaaatgtttttagagaacggattcgacggatttatttccaaaccgatagacatacggcagttaaacactgtgcttaataaactggtacgcgataaatacccgcctgaagttgttgaagccgcgcgaaaacaggcagctgttattacagacaaagaagttaagaatatagaaccatccactgattccaaattaagggctattttcacgcgcgacgccgaaagcgcctatataagaatgaaaacaatactatcgaattcattccgcagaagcgacgatatacagcaatttgttatcgacgtccactcaatgaaaagcgcgcttaaccatatgagtgaaaaacagttatctgccgtcgcgcgtaaactggaaatggcaggacgggcaaaagatgtacctgtaatgatagccgaaactccggcatttttggaagagttacgcanaaccattaacaaattcaaacaaaaagacgacgattccgtggaagaagtttttgaaaatgatctggttttgttatccgaaaaaatgctcgctattcaaatgcctgcgtaa

SEQ ID NO: 11250 - protein, 273 aa, Unknown
  Obtained from environmental sample
  DOMAIN (4)...(117): Response regulator receiver domain
  misc_feature (1)..(273): Xaa is any amino acid
MPYGRVLIVDDVDTNLYVAKGLMSPYGLSLETAKSGFEMIDKIKGGAVFDIIFLDHFMPKMDGIEAARIIREMGYKHPVIALTANAIVGQAEMFLENGFDGFISKPIDIRQLNTVLNKLVRDKYPPEVVEAARKQAAVITDKEVKNIEPSTDSKLRAIFTRDAESAYIRMKTILSNSFRRSDDIQQFVIDVHSMKSALNHMSEKQLSAVARKLEMAGRAKDVPVMIAETPAFLEELRXTINKFKQKDDDSVEEVFENDLVLLSEKMLAIQMPA

SEQ ID NO: 11251 - DNA, 489 bp, Unknown
  Obtained from environmental sample
  misc_feature (1)..(489): n is a, c, g, or t
gtgcggggcgacatagctttcggaggacggcacatcaggttaaaacaggattcctgttccgggtttttctgcgattataaagggtattttccctacaggatgcagactacaatatgctccgctatgggttttgacgaagaaaacaggcgttttggctttaatattgccgaaaatcagaatagagacacaaacaagaataacgaaaacgcgttatggttaaacggacaattaacccccctgccgccggttttgataaccatgccgaacggcattgagtccgactgggttattcaggatgttgagggtatggtggatttgacatttacgccgaaggaacaaaacaaaacctctatgaatttgattcttacaaaagccgagttaaattgcgcggttggatactataatggaatgttaatggattccgaagggaaaaaaatacaaataaaaaatctctttggaacaggagaaaaactttatttacgggtgtaa

SEQ ID NO: 11252 - protein, 162 aa, Unknown
  Obtained from environmental sample
  misc_feature (1)..(162): Xaa is any amino acid
MRGDIAFGGRHIRLKQDSCSGFFCDYKGYFPYRMQTTICSAMGFDEENRRFGFNIAENQNRDTNKNNENALWLNGQLTPLPPVLITMPNGIESDWVIQDVEGMVDLTFTPKEQNKTSMNLILTKAELNCAVGYYNGMLMDSEGKKIQIKNLFGTGEKLYLRV

SEQ ID NO: 11253 - DNA, 858 bp, Unknown
  Obtained from environmental sample
  misc_feature (1)..(858): n is a, c, g, or t
gtgggacccgttgaaaagggtctgcaagggtcgtataagtttacagtttcaaatccaacagaaaaaatcaacttttcaaatatagggctaatagccattgataatttggaatatattggaaaaattcccgttattgagaaaagaaaactacccattgtgtttttcggtgactctggtgattttttaactgaaatccatgccagaaaattgggcgttgcggattttttttccattccctttaaccgcgatttatttttgcttcgccttaaagatgtaaaagccaatacagaaaatatacgctggatgcaaatgattaggcgtgaaatgatttatatgcaagactgcatggcagaaatactcgctcaaacagtggaaagcagagatgaaaataccggcggtcatatacttagaacagctacgtgcatagggatattggcagaggaatttgtagaaagtggcatactaacaagggagcaggtggatcttataatacgggctgcgcttttgcatgatattgggaaaataggggttagagattcaattttgctaaaacccggtccattaacggaagaagaacgcacggaaatgaaaacccactcggaaaagggagctgttctgataaaaaagatgcaacagaggtttgaaagccacgcttatttgcaatatgcctacgatatagctttgaaccatcacgaatattttgacggcagcggctacccaaatggcagaaaaggcgaagaaatacctttctgggcaaggcttatgtctgtggttgatgtttacgatgctttggtctcagatagggtttatcgcaagaaaatgccaaaagataaggctttgaaatcatttcagcggtag

SEQ ID NO: 11254 - protein, 285 aa, Unknown
  Obtained from environmental sample
  DOMAIN (131)...(264): HD domain
  misc_feature (1)..(285): Xaa is any amino acid
MGPVEKGLQGSYKFTVSNPTEKINFSNIGLIAIDNLEYIGKIPVIEKRKLPIVFFGDSGDFLTEIHARKLGVADFFSIPFNRDLFLLRLKDVKANTENIRWMQMIRREMIYMQDCMAEILAQTVESRDENTGGHILRTATCIGILAEEFVESGILTREQVDLIIRAALLHDIGKIGVRDSILLKPGPLTEEERTEMKTHSEKGAVLIKKMQQRFESHAYLQYAYDIALNHHEYFDGSGYPNGRKGEEIPFWARLMSVVDVYDALVSDRVYRKKMPKDKALKSFQR

SEQ ID NO: 11255 - DNA, 963 bp, Unknown
  Obtained from environmental sample
  misc_feature (1)..(963): n is a, c, g, or t
atgatcaacggcgtcgccacggtagtggtcgacaggggcataaaaattgagcgcggcatgggttacgcggacaggattttgggttccgccttttttatcgattcaacgggtttattaataaccaattaccatgtaatcgcgagcgaggtagaccctaagtatgaggggtactcccgcatgtatatcaggatgggtgacagctcaagcccccgcataccggcgcgggtaataggttatgataaggcgctggatctcgcgttgattaaaacagagtataaaagcgagttcgtgttttccatagtggacagggttattccccaggtaggcgatacggtccttgccatagggtcgccgggagggcttgagaagacagtcacctccggtattgtatcatcgcttagccgccgcttcctgcaaatcggggatgtttatcagatagacgcggctgttaaccccggtaattccggcggccccgtagtggactcatcgggccggctggttggcattgtctttgcgggcgcggaacagttccaggggcttaattttgccgtgcccgcacagcggcttgccgccgcgctccccgccatgataaagggcggcaaggcccagcgtccctggcttggcataaccctgagcgagagttccggcagcgcggaaataatctacaccgcgcccaatacccccgcgtccaggcaccgcgtgaccgaaagcggtaaaatagttacgcttaacggccaaaaaattacagccccacagagtatgcttatccccgccatgcaggacgcgatttttcaatcccgacccggcgagcttgtcgccctggaaacccaggattccaatggcgcggttaagaagcacctggtgatgagcgttccgcgtcctgagcttccccttgtgacgcggcaaaactggatagccgtgagcggcttgccgcgcctctcggccaatctgatacttgggtaa

SEQ ID NO: 11256 - protein, 320 aa, Unknown
  Obtained from environmental sample
  DOMAIN (10)...(193): Trypsin
  misc_feature (1)..(320): Xaa is any amino acid
MINGVATVVVDRGIKIERGMGYADRILGSAFFIDSTGLLITNYHVIASEVDPKYEGYSRMYIRMGDSSSPRIPARVIGYDKALDLALIKTEYKSEFVFSIVDRVIPQVGDTVLAIGSPGGLEKTVTSGIVSSLSRRFLQIGDVYQIDAAVNPGNSGGPVVDSSGRLVGIVFAGAEQFQGLNFAVPAQRLAAALPAMIKGGKAQRPWLGITLSESSGSAEIIYTAPNTPASRHRVTESGKIVTLNGQKITAPQSMLIPAMQDAIFQSRPGELVALETQDSNGAVKKHLVMSVPRPELPLVTRQNWIAVSGLPRLSANLILG

SEQ ID NO: 11257 - DNA, 741 bp, Unknown
  Obtained from environmental sample
  misc_feature (1)..(741): n is a, c, g, or t
ttggaaacaagtttttcaaaaattgatatgaaattagtaatacccctgtttacaggggtattgtgttctttgctcgcttgcgctgtaataggcgtttcatctggttatctgaaaagagccataacagaaaattttttagaagaagaattcgaagaagatttttccgctctnttcgctccgtcggaacatattcccgattccgttttggaatactaccgcaattttgactacaaagaatgggtaatagatttttttacctctatatgcaagaacagagaaatagcgtggtctattttggacagttccgacgaatttgacattccgcctgcgttggcttttgcgctgtgctgggaagaaagcagatttaacccgaacgccataaacagacagaacaaagacggaagcatagatcggggtttgtttcagttgaataacaaatcttttcctcaactggaaatctcgtctttttacgggattaattccaacgcccgttacggagtaggtcatttgcggtactgcctgaatgtcggcggcagtgaagtctccgctcttgccatgtacaacgccggagcgggaagggtaagatcgacaggagcgcccgaagttactcttaattacatcagcaggattttggaaaaccgcagaaagatagaaagccgcttccattcaaaattgattaaggaagaagaaagccgccttgccgaagaatcgccgggcggattattcaatcgggtattctag

SEQ ID NO: 11258 - protein, 246 aa, Unknown
  Obtained from environmental sample
  SIGNAL (1)...(28)
  DOMAIN (96)...(210): Transglycosylase SLT domain
  misc_feature (1)..(246): Xaa is any amino acid
METSFSKIDMKLVIPLFTGVLCSLLACAVIGVSSGYLKRAITENFLEEEFEEDFSALFAPSEHIPDSVLEYYRNFDYKEWVIDFFTSICKNREIAWSILDSSDEFDIPPALAFALCWEESRFNPNAINRQNKDGSIDRGLFQLNNKSFPQLEISSFYGINSNARYGVGHLRYCLNVGGSEVSALAMYNAGAGRVRSTGAPEVTLNYISRILENRRKIESRFHSKLIKEEESRLAEESPGGLFNRVF

SEQ ID NO: 11259 - DNA, 696 bp, Unknown
  Obtained from environmental sample
  misc_feature (1)..(696): n is a, c, g, or t
atgacagattggccgagccttggcggagacgcttactatcacataaccttgaacaacacgattgtgggaacaaaatgggacaaaatcccaaacacgggttctacgcctcttattacggatgcctcaagctgtatcctttcagaaccgcttgatgtaagcaaattcgggttgatctacgcgggcgctcaaaaaaatctgggacctgcgggaactacccttgttattatccatgaagatttaatcaaaaagacgcccgattgggttcccgttatgctccgctatgacactcacgcaggcgaaggctcgatgtacaatactccgccgtgctacggcatttacattatcgggcttgtgctggactggttaaaaaaattgggcggcgttgaggcaatcgggaaattaaaccgtgaaaaagccaagctcttttatgattatcttgattcgtcaaaactgttttattctcccgttcaaaaggaataccgcagtttgatgaacattccgtttgtaacaacagagcaggatgaagccaaaaagacggaactggaaacccgctttgtaaaagaagcggcggcggcgggacttatcaatcttgcgggacacaggcttgtaggcggcatgagggcaagtatttataacgcaatgccgattgaaggcgtaaaagcgttgataagtttcatggaaaaattcaaggagtaa

SEQ ID NO: 11260 - protein, 231 aa, Unknown
  Obtained from environmental sample
  DOMAIN (1)...(222): Aminotransferase class-V
  misc_feature (1)..(231): Xaa is any amino acid
MTDWPSLGGDAYYHITLNNTIVGTKWDKIPNTGSTPLITDASSCILSEPLDVSKFGLIYAGAQKNLGPAGTTLVIIHEDLIKKTPDWVPVMLRYDTHAGEGSMYNTPPCYGIYIIGLVLDWLKKLGGVEAIGKLNREKAKLFYDYLDSSKLFYSPVQKEYRSLMNIPFVTTEQDEAKKTELETRFVKEAAAAGLINLAGHRLVGGMRASIYNAMPIEGVKALISFMEKFKE

SEQ ID NO: 11261 - DNA, 501 bp, Unknown
  Obtained from environmental sample
  misc_feature (1)..(501): n is a, c, g, or t
atgatggccgagagacatgaggcttattgtgtttctcgatccgaatatagatccaggggagcgggctggcatattatacaatccatcacggccattggctcgggagggcttacggggcagggttatttgaagggtacccagagtcattaccgctttcttcccgaacagagcaccgactttatcttttcgattttttccgaggagacaggctttatcggcgggattgtggtgtttatcctgttcctgatcatctgcctgaggattttacagataattaaaataaccgcggacccctttgccgcgtacatctgcgccggtctggcggggatgttcagctttcacttcattattaatgtgggcatgactatgggtattatgccgattaccggcatccccctgctgtttatatcttacggcggttccgctatgttctcggcaatgataggaatagggcttgcactgagtatacacatcagaaggtatatcctccctgcgttatga

SEQ ID NO: 11262 - protein, 166 aa, Unknown
  Obtained from environmental sample
  DOMAIN (1)...(162): Cell cycle protein
  misc_feature (1)..(166): Xaa is any amino acid
MMAERHEAYCVSRSEYRSRGAGWHIIQSITAIGSGGLTGQGYLKGTQSHYRFLPEQSTDFIFSIFSEETGFIGGIVVFILFLIICLRILQIIKITADPFAAYICAGLAGMFSFHFIINVGMTMGIMPITGIPLLFISYGGSAMFSAMIGIGLALSIHIRRYILPAL

SEQ ID NO: 11263 - DNA, 528 bp, Unknown
  Obtained from environmental sample
  misc_feature (1)..(528): n is a, c, g, or t
gtgactatgggcccgccggctgccgccgcggtgctgaaagaatgtttgtaccggggcgcggattttaccgccctggtgtccgaccggggttttgccggcgcggatacccttgccacctcctacgcgctcaaatgcgccatcaacaaaatcgggaattttgacatagtgttgggcgggcggcaggcgattgacggcgataccgcccaggtaggcccccaaacggcggaaaaactgggtatcaaccagattacctgcgtttccaaaatcgaatcgatagatccttcaaaaaaagagattatcgcgatacgttcaatagaaggcggctgggaaaaggtaaaggcaaaactgcccgttttgctgacctttaccgaagaaggtgaagcgccgcggcccgcttccgctatcaagaccatgacctataaaagggcggcccctgcttccggcggcgcgtgttcccccagtgatccgttccgcgaaagaacacagaccgccgacccgatggcgtatatgggatattgcctggattaa

SEQ ID NO: 11264 - protein, 175 aa, Unknown
  Obtained from environmental sample
  DOMAIN (2)...(160): Electron transfer flavoprotein domain
  misc_feature (1)..(175): Xaa is any amino acid
MTMGPPAAAAVLKECLYRGADFTALVSDRGFAGADTLATSYALKCAINKIGNFDIVLGGRQAIDGDTAQVGPQTAEKLGINQITCVSKIESIDPSKKEIIAIRSIEGGWEKVKAKLPVLLTFTEEGEAPRPASAIKTMTYKRAAPASGGACSPSDPFRERTQTADPMAYMGYCLD

SEQ ID NO: 11265 - DNA, 306 bp, Unknown
  Obtained from environmental sample
  misc_feature (1)..(306): n is a, c, g, or t
atgctttctaaccaaaatattccccagtccccgatccctgatccccagtccctaatgactaatgaaggttatgtaaaatatactgtggaacatacaatgggcccgacgattgaaacgccgctttgggttgatctcaataaggcaaggacgaagctttgtgagatggggcttgtgggagcaagatccgacggtatcggctttggaaatctgagcgtccgtattaatggtaataaatttcttatcagtgggacagctaccgggtcctcgcctgtatggggccggacgggtatgcctatcagtcattga

SEQ ID NO: 11266 - protein, 101 aa, Unknown
  Obtained from environmental sample
  misc_feature (1)..(101): Xaa is any amino acid
MLSNQNIPQSPIPDPQSLMTNEGYVKYTVEHTMGPTIETPLWVDLNKARTKLCEMGLVGARSDGIGFGNLSVRINGNKFLISGTATGSSPVWGRTGMPISH

SEQ ID NO: 11267 - DNA, 498 bp, Unknown
  Obtained from environmental sample
  misc_feature (1)..(498): n is a, c, g, or t
gtgttctgcgatgaaacaaggcccctcctccagggcgccaggctttcggcttttgagatggttaccattggggcggacaccacgcttatctgcgacaatatggcaagcatggttatgaagaacggctgggttaactgttgttttgtaggctgcgacagggttagtgccaacggggacgcggccaacaagataggcacctcggggctcgcgataatcgccaagcattacggtatacccttttacgtctgcgcccccacgtcaacaatcgacatgacgataaaggacggcactggcattgtaatcgaggaacgcgacgcgcaagaaattaccgatatgtggtacaaggagcgcatggccccgcccaatgtaaaggtatacaaccccgcattcgatgttacagataacaaactgataaccgcgttcattaccgaattcggcattatcaggccgccgtatacggaaaactttagggacttgggactggggaccagggactag

SEQ ID NO: 11268 - protein, 165 aa, Unknown
  Obtained from environmental sample
  DOMAIN (2)...(152): Initiation factor 2 subunit family
  misc_feature (1)..(165): Xaa is any amino acid
MFCDETRPLLQGARLSAFEMVTIGADTTLICDNMASMVMKNGWVNCCFVGCDRVSANGDAANKIGTSGLAIIAKHYGIPFYVCAPTSTIDMTIKDGTGIVIEERDAQEITDMWYKERMAPPNVKVYNPAFDVTDNKLITAFITEFGIIRPPYTENFRDLGLGTRD

SEQ ID NO: 11269 - DNA, 360 bp, Unknown
  Obtained from environmental sample
  misc_feature (1)..(360): n is a, c, g, or t
atgcaggaaggaattttctcgcttatgcagatggcgaaaacctgcgcggcgatttctatgcttaacgaaaaaaacataccttatgtttcggttttgaccgacccgacgacaggtggggtttcggcttcttttgcaatggttggcgacgtaaatatcgccgaaaaaggtgcgctgattgcgtttgcagggcgaagagttatcgaaaatacgataaaacaaaaacttcccgacgaatttcagacggcagaatatttgctggaacacggatttgtcgataaagtcgtatcacgtagcgagatgaaaaaaactatttcagatattttgtcgttttacaatcggcagtcagggggaagcaaatga

SEQ ID NO: 11270 - protein, 119 aa, Unknown
  Obtained from environmental sample
  misc_feature (1)..(119): Xaa is any amino acid
MQEGIFSLMQMAKTCAAISMLNEKNIPYVSVLTDPTTGGVSASFAMVGDVNIAEKGALIAFAGRRVIENTIKQKLPDEFQTAEYLLEHGFVDKVVSRSEMKKTISDILSFYNRQSGGSK

SEQ ID NO: 11271 - DNA, 702 bp, Unknown
  Obtained from environmental sample
  misc_feature (1)..(702): n is a, c, g, or t
ttgaagcggaaaatcgcatccgtcaaagcatttttcaactatcttgaattcgaagatttaatagtggtaaccccatttagaaaaatacggattaatatcaaagaaccaaaacgcttgccaaaatcattgtctctatttgatatggaaaagttattgtcgtttttatattctcaaacgcatattaaaaaaatatccattagaaaccttgccatatttgaacttatgtttgccactggaatccgagtttcagaattatgcaatataaggctgtcagacataaatcttgaaacgcagacattatctattaaaggcaaaggcaataaagagcgtttaggcattgtgaacaaccatcatgttatttccgcgttaaaaagctatctttccattcgcccaatcaccgattcgccttttttctttataaatagaatcaaaaagcaaatatcaacccaatcagtgcgtttttttatagaagcacttggcaaaacagttctcaataaacttgttactccccacatgattcgccatactttcgctacgcttttgttggaagaaggcgtggatattacctacataaaatcctttctcggtcattcttcaatctcaactacccaaatatacgctgcttctactacatacaagcagcgacagatattaaccgctttgcatcctaggaataggattgggggcgtgaatgaaggataa

SEQ ID NO: 11272 - protein, 233 aa, Unknown
  Obtained from environmental sample
  DOMAIN (51)...(216): Phage integrase family
  misc_feature (1)..(233): Xaa is any amino acid
MKRKIASVKAFFNYLEFEDLIVVTPFRKIRINIKEPKRLPKSLSLFDMEKLLSFLYSQTHIKKISIRNLAIFELMFATGIRVSELCNIRLSDINLETQTLSIKGKGNKERLGIVNNHHVISALKSYLSIRPITDSPFFFINRIKKQISTQSVRFFIEALGKTVLNKLVTPHMIRHTFATLLLEEGVDITYIKSFLGHSSISTTQIYAASTTYKQRQILTALHPRNRIGGVNEG

SEQ ID NO: 11273 - DNA, 579 bp, Unknown
  Obtained from environmental sample
  misc_feature (1)..(579): n is a, c, g, or t
atgngacgagcaccaggggaaccagccaaaaccggcaatacttttggcggttggtatcgggataataatacctttaaccagcgcgtggaattcccattcaccactaccgaaagcattaccctgtacgcaaagtggacacctctcaagtacaccgtaacctatttacctgacggcggaactccggctccgtccccgctcatccaaaccgcggactacggcgctcaaattagccagccatcctctatgactaaaacggggtatacatttgacggctggtttacggattccgccaagaccgcggccgctgttttccccatcaccgtaaccggtgacattacactgtacgcgaagtggacaccggtatattataccgttaccttcaaatcaaacgggggtatccccgatcccgcacaacaaaaagtactctccggcgaaaaagctgttgagccgaatcccttccaaaaagatggctacatattagtcggctggttcagggataacggcaacgagtgggactttgataaagataccgtaaccagtgacatcaccctgtcggcaatgtggcggataaagccataa

SEQ ID NO: 11274 - protein, 192 aa, Unknown
  Obtained from environmental sample
  misc_feature (1)..(192): Xaa is any amino acid
MXRAPGEPAKTGNTFGGWYRDNNTFNQRVEFPFTTTESITLYAKWTPLKYTVTYLPDGGTPAPSPLIQTADYGAQISQPSSMTKTGYTFDGWFTDSAKTAAAVFPITVTGDITLYAKWTPVYYTVTFKSNGGIPDPAQQKVLSGEKAVEPNPFQKDGYILVGWFRDNGNEWDFDKDTVTSDITLSAMWRIKP

SEQ ID NO: 11275 - DNA, 864 bp, Unknown
  Obtained from environmental sample
  misc_feature (1)..(864): n is a, c, g, or t
gtgctggttaaagatgaaaagcttaaaataatatggcggccttttgaaacgctgccacaggtaaacaaaatgctggaagccgtcagctcccgtgaatgtgggatgctttccctgaaggccaaaggaaaaaaagacaaagcggaaaaactggtaagcgggcgcagcgtagtcgatctgcttgcctgcgcgtttttgaaagagataatcaggaggaggttcctttccttcaaagaggccttctacaaatacggaaccggagacgaataccgggattatttattcctgtttttccagggaatcgggctggatgtttcttctccggcgtggcgcagccttcccgccgccatagaccgctggctttcccccctgcacatacatttcgacgcttaccgttacagccttaccgtgaaagcccttaacacaaaggatgccggtgaaacggacttacagtacgccctttccatggatctgctcagcgaaacggaagacggggtaaaaagcacgcccatttcacagatcagggatttggagatactgcgcgcgccaacagccctgtccaattacctgccggaaatacgggagcttgcctcgccttcaaagacaacgcgcagcccggcggtgccgctttccgaggaacgccttgtttcttttctcgattccgcctccgttctccttacaaggctcggcatgacggtgaaccttcccaaagccctgcacagggaattaaaaccccggcttgtaatcaagggaagcgcgaccaaaaagaaacagggatctctggttcgtttcctgggtctggatactttgcagaattttgaatggcagatagccataggcgatcaaaccctgacgctgaggaattaa

SEQ ID NO: 11276 - protein, 287 aa, Unknown
  Obtained from environmental sample
  misc_feature (1)..(287): Xaa is any amino acid
MLVKDEKLKIIWRPFETLPQVNKMLEAVSSRECGMLSLKAKGKKDKAEKLVSGRSVVDLLACAFLKEIIRRRFLSFKEAFYKYGTGDEYRDYLFLFFQGIGLDVSSPAWRSLPAAIDRWLSPLHIHFDAYRYSLTVKALNTKDAGETDLQYALSMDLLSETEDGVKSTPISQIRDLEILRAPTALSNYLPEIRELASPSKTTRSPAVPLSEERLVSFLDSASVLLTRLGMTVNLPKALHRELKPRLVIKGSATKKKQGSLVRFLGLDTLQNFEWQIAIGDQTLTLRN

SEQ ID NO: 11277 - DNA, 753 bp, Unknown
  Obtained from environmental sample
  misc_feature (1)..(753): n is a, c, g, or t
gtgccgaaccttcttaatataggaatgctgccctttaccttaatcgcgatgctgacagtcaccacgggaaccatgttccttatgtggataggcgaacagataaccaagcgcggcatcggcaacggcatatcgcttctgatcttcgccggcatcgtggcgcggcttccccacgccgtgtgggagctgggcggcagggtgcgcgacgggcagctgaacctggtgtttgtaatcgtggtgttattgatgttcgtggccgtcgtggccctggtcgtgttcgagcagcagggccagcgcaagatacccgttaattacgccaaacgcgtcgtcggaaggaagatgtacggcgcgcagaacacctacatacctttcaagatcaacccctccggggtcataccggtaatcttcgcatcgtctatcctcacgttccccctgcagattgcgacgaccattggcggcaacataccatggctcgcgagcgtagcccgagtgttaagcccccgcggcacggtttataatatagcgtatgttttattgataattttcttcgcgtatttctacacgcaggtgtcgcttaaccccatagagatcgcgaagcagataagggagaacggcggttccattcccgggatcaggtcggatcgcatagaggagtacctcacaaagattctgaaccgcatagtgcttccggggtcgctttatctcgcgtttatcgcggttattccgaccatatacagattgtctcggccaatctga

SEQ ID NO: 11278 - protein, 250 aa, Unknown
  Obtained from environmental sample
  DOMAIN (4)...(249): eubacterial secY protein
  misc_feature (1)..(250): Xaa is any amino acid
MPNLLNIGMLPFTLIAMLTVTTGTMFLMWIGEQITKRGIGNGISLLIFAGIVARLPHAVWELGGRVRDGQLNLVFVIVVLLMFVAVVALVVFEQQGQRKIPVNYAKRVVGRKMYGAQNTYIPFKINPSGVIPVIFASSILTFPLQIATTIGGNIPWLASVARVLSPRGTVYNIAYVLLIIFFAYFYTQVSLNPIEIAKQIRENGGSIPGIRSDRIEEYLTKILNRIVLPGSLYLAFIAVIPTIYRLSRPI

SEQ ID NO: 11279 - DNA, 393 bp, Unknown
  Obtained from environmental sample
  misc_feature (1)..(393): n is a, c, g, or t
gtgaggctgacgccgtcgccgcattcgaggctaggtattttacatggatcgtactcctacgttttgcaggataaggacgggcagatcgcggacacgcactcggtctcggcggggctggactacagcggcgtggggccggagcacgcccacctctttgagagcggacgcgcccattacacatacgccacggacgaggaggcggtgggggcgttcaggctgctctgcgaggcggagggaattattccggcgcttgagtcgtcgcacgcggtcgcctacgcggtgaagcgcgtgccaaagatggccgccggctccgtcgtcgtggtgaacttgtcggggcggggcgataaggatatggattccgtcgcgaaatttctggaggctaagggaaaatga

SEQ ID NO: 11280 - protein, 130 aa, Unknown
  Obtained from environmental sample
  misc_feature (1)..(130): Xaa is any amino acid
MRLTPSPHSRLGILHGSYSYVLQDKDGQIADTHSVSAGLDYSGVGPEHAHLFESGRAHYTYATDEEAVGAFRLLCEAEGIIPALESSHAVAYAVKRVPKMAAGSVVVVNLSGRGDKDMDSVAKFLEAKGK

SEQ ID NO: 11281 - DNA, 342 bp, Unknown
  Obtained from environmental sample
  misc_feature (1)..(342): n is a, c, g, or t
atgaaaaaccataactacatcaacccgctaatcgaggccataaagccgtccgacccgtaccggataatcctgttcggctcctacgcaaacggaaccgcgacggaaaacagcgatattgatatggtggtgatattggacaacgacgacgtagcgcgtacatatgatgaaaggctgaagaaaaggctggacattaataagttagtaagagatataaattacaaagtggcgctcgatattttggtgtattcaagggcagagtacagaatcgtcaaggattgcggaaattatcttattgatgaaatagaaaggaatgggaaggtcgtatatgaaaaagacagttga

SEQ ID NO: 11282 - protein, 113 aa, Unknown
  Obtained from environmental sample
  DOMAIN (3)...(92): Nucleotidyltransferase domain
  misc_feature (1)..(113): Xaa is any amino acid
MKNHNYINPLIEAIKPSDPYRIILFGSYANGTATENSDIDMVVILDNDDVARTYDERLKKRLDINKLVRDINYKVALDILVYSRAEYRIVKDCGNYLIDEIERNGKVVYEKDS

SEQ ID NO: 11283 - DNA, 315 bp, Unknown
  Obtained from environmental sample
  misc_feature (1)..(315): n is a, c, g, or t
gtgataatgggaaacggaaaaaaatcaaaagataaattccgtcttgtggatcttcttgttatcctgatctgtctttttggggcgttctacagcgttaacctgttttggagtgatctgtttcaaaccctcaatgggcaaaacaaaacgcccattggcactgtttccgtaaaaaagaatatcgtacaacgccgtatgtcggatagggtagtatgggacaggctgattagggaatcgcccgtatattccaacgacttaatccgcgtgggggataattccgagatcgaccttcatgtaggcggaaacagcctaaaataa

SEQ ID NO: 11284 - protein, 104 aa, Unknown
  Obtained from environmental sample
  misc_feature (1)..(104): Xaa is any amino acid
MIMGNGKKSKDKFRLVDLLVILICLFGAFYSVNLFWSDLFQTLNGQNKTPIGTVSVKKNIVQRRMSDRVVWDRLIRESPVYSNDLIRVGDNSEIDLHVGGNSLK

SEQ ID NO: 11285 - DNA, 552 bp, Unknown
  Obtained from environmental sample
  misc_feature (1)..(552): n is a, c, g, or t
atggcgcattgggggacagccaccacatcgagaagcccgcagaaagacgcttttaactgcgtcaagtcggctctgatgatgagggatatgttgaaaaaaatgaataaaaaccggaaagaagaaaacgtaggatcaccgcctatccgtataggctgcggcattaacacgggcattgttacggccggacaaataggctccgacctccgcatggaatacaccgtcataggcgatccggttaacctcgcttcccgtgttgaggcgcttaacaaacctttgggcactgatattcttatcaccgaaaatacatataatctggtaaagaaatattttatcaccgaagaaatgcccccggtaacggtaaaaggaaaagaaaaacccatacgcctctttgccgtagtaaattttaatttttccgcaatgaatataagccccgccgcttcggaaccggtgactcttgcacaagtgcgaaagattttgggaatagaggcaaaggatatttcaaaggcgaatgttaacgccgaagaacttaagtacaaaattggcggtaagtga

SEQ ID NO: 11286 - protein, 183 aa, Unknown
  Obtained from environmental sample
  DOMAIN (6)...(134): Adenylate and Guanylate cyclase catalytic domain
  misc_feature (1)..(183): Xaa is any amino acid
MAHWGTATTSRSPQKDAFNCVKSALMMRDMLKKMNKNRKEENVGSPPIRIGCGINTGIVTAGQIGSDLRMEYTVIGDPVNLASRVEALNKPLGTDILITENTYNLVKKYFITEEMPPVTVKGKEKPIRLFAVVNFNFSAMNISPAASEPVTLAQVRKILGIEAKDISKANVNAEELKYKIGGK

SEQ ID NO: 11287 - DNA, 657 bp, Unknown
  Obtained from environmental sample
  misc_feature (1)..(657): n is a, c, g, or t
atggagaaaaaagacctaacagcagcagacgtctgggcaatgttcgccgagacccgactcataatgcaggaaaacgaccgcaaaattgcggaaggacatcgtattttagacgagaaacttgccgaaaccgaccgcaatctcgccgaaaggcttgccgagaacgaccgcaaactcaccgagaaattcgaagaacttggtattaaagtcaatgacttaaaatcaaatgtaaatggtattagcgatagcaacggcgaatttgcggaagagtattttttcacttccttgaaaaggaaaatggaattcgcaggagtgcattttgacgacatcgacaaagacatcaaactattgagaaaactgccaaacggcgaaaggctcaaagatcagtttgatatcgtaatgataaacgatgatgcagtagcaataatagaaatcaaatacacagctagaaagggttacccagcaataatggtaaatcaaaaagttcccaattttagaactttattccccgactatgcaggttacaagatatatctaggtctaggtgctttgtctatcagcaaagaagttgcgcaggaagctgaaaaactcggtataggactgcttanngcagtaggcgaaaccgttgaatacgaaacccagtgggtgagagcgtattag

SEQ ID NO: 11288 - protein, 218 aa, Unknown
  Obtained from environmental sample
  misc_feature (1)..(218): Xaa is any amino acid
MEKKDLTAADVWAMFAETRLIMQENDRKIAEGHRILDEKLAETDRNLAERLAENDRKLTEKFEELGIKVNDLKSNVNGISDSNGEFAEEYFFTSLKRKMEFAGVHFDDIDKDIKLLRKLPNGERLKDQFDIVMINDDAVAIIEIKYTARKGYPAIMVNQKVPNFRTLFPDYAGYKIYLGLGALSISKEVAQEAEKLGIGLLXAVGETVEYETQWVRAY

SEQ ID NO: 11289 - DNA, 438 bp, Unknown
  Obtained from environmental sample
  misc_feature (1)..(438): n is a, c, g, or t
atggaccaaggaataatcagcgcagaaggagtggtgggcagaatatggtctgtcggcagctcncaatcaatcgtccttccattggacgcatacaatgcctcaacgagcgtcatgctcgccaagagccgcgccacaggagtgctccaggggagcaaagcgccaggcgtttctacaatcaggtacatcagcaaccaagaggcagtgcaaattggggagccagtatatacgtcagggctggacagggtattccccccaggaatgctcgttgggtatgtgtcggacagctccgccggggcaaacgaaatgaacattgccgtaacgctggccgcgcccttggataaattggggattctttttgtgttgccggtcaccccgaaattggagtttgacaccaaattggagataccacagtcggtgtccagaaggggacgaagttga

SEQ ID NO: 11290 - protein, 145 aa, Unknown
  Obtained from environmental sample
  DOMAIN (2)...(125): rod shape-determining protein MreC
  misc_feature (1)..(145): Xaa is any amino acid
MDQGIISAEGVVGRIWSVGSSQSIVLPLDAYNASTSVMLAKSRATGVLQGSKAPGVSTIRYISNQEAVQIGEPVYTSGLDRVFPPGMLVGYVSDSSAGANEMNIAVTLAAPLDKLGILFVLPVTPKLEFDTKLEIPQSVSRRGRS

SEQ ID NO: 11291 - DNA, 675 bp, Unknown
  Obtained from environmental sample
  misc_feature (1)..(675): n is a, c, g, or t
atggtcatttccgtggacagggacggaaatgtcagcgcggaagcctatgatcttgaagccgggccggaggggaaacgccataccctgaacgtctcgctgcaaaacatagattcgctggataacgctccggatttcgcgtttaataatcagtcgtacaaatacagtgaaaaacataccgtacatgacaggaaattcccctggcttgtccttgttattgccgcgttgtttgtcgccctcgcgatcatggcgctttggtacttcttccttggcggcagtgatgtcttttcgactgccgaagcgccggaatattccgcgccgcgtcaggaaatacagcagcctcctccgcctcctccgcctctgcccccgctcccaaaatatgagcctgaaccggaaccggttgtgattaaagcccctgcggccccggcaaagccaaaaccggtcgtcaagcgcgtccgtccgcgcgcgcccgttctgtcgtataaagtcccggctgtcattcctaaaaacggcgtagtgtaccagatccaatggggcgataccctttgggatatttcatccgccttctataggaatccctggctctacccccgtatcgcgaaggataacaagatccgcaacccggatctgattatcgccggccgcaatttacggatcatgccgaagcccaagaaatag

SEQ ID NO: 11292 - protein, 224 aa, Unknown
  Obtained from environmental sample
  DOMAIN (173)...(219): LysM domain
  misc_feature (1)..(224): Xaa is any amino acid
MVISVDRDGNVSAEAYDLEAGPEGKRHTLNVSLQNIDSLDNAPDFAFNNQSYKYSEKHTVHDRKFPWLVLVIAALFVALAIMALWYFFLGGSDVFSTAEAPEYSAPRQEIQQPPPPPPPLPPLPKYEPEPEPVVIKAPAAPAKPKPVVKRVRPRAPVLSYKVPAVIPKNGVVYQIQWGDTLWDISSAFYRNPWLYPRIAKDNKIRNPDLIIAGRNLRIMPKPKK

SEQ ID NO: 11293 - DNA, 849 bp, Unknown
  Obtained from environmental sample
  misc_feature (1)..(849): n is a, c, g, or t
gtgattggggcaaaattcccctggataatcggcagggcgattcaggcggggcttttatcgcagaaggatattggatacgcccttaaagcgcttaccagcgctccgttaggtgcaatacaagatgcttcaggcgaaccgtctgatgtagcgcatgcgtatatccgcattgcatataacaacgctctcttgtctgacggcaaggccttatactaccggagcctcagcgccgccgcgcttggagagcctttcttaatgttgccaacggcaacaccattgccggaaccggaagcaaaacccgtggcaacgaagcctgctggcgaacgcagcgaccccgccataatagaattcctgcttggctttttcaaaaacggcacggcgaaattcgcgccccgttacatcaggatgatggaaagcgacctttcccccgaagatctgctccggcttgccgaggctctgggcaacggcggcgcacctaactgtgcggggcagtaccaggaatccatgcgcctagcctcgatcgctgtcaggcgggcctctgaacctgaaaagcggtatttggaattaatatatccgaggccctttgccgaacaggtaagccagtatgcgcgggaaaccggaataggcgaggcgaagctgttcgggcttatacgctcggaaagcgcttttaatcccgacgctatttcccgctccggggctatcggcctgacgcagcttatgcccgccacggcggaagaaatggcggcgcgtatcctgcggaggggaggccccgattacacccgaagatccgacaaggacactgccgccacaggcggtgccgccatagcgagcgataaattccaggcgacatga

SEQ ID NO: 11294 - protein, 282 aa, Unknown
  Obtained from environmental sample
  DOMAIN (196)...(275): Transglycosylase SLT domain
  misc_feature (1)..(282): Xaa is any amino acid
MIGAKFPWIIGRAIQAGLLSQKDIGYALKALTSAPLGAIQDASGEPSDVAHAYIRIAYNNALLSDGKALYYRSLSAAALGEPFLMLPTATPLPEPEAKPVATKPAGERSDPAIIEFLLGFFKNGTAKFAPRYIRMMESDLSPEDLLRLAEALGNGGAPNCAGQYQESMRLASIAVRRASEPEKRYLELIYPRPFAEQVSQYARETGIGEAKLFGLIRSESAFNPDAISRSGAIGLTQLMPATAEEMAARILRRGGPDYTRRSDKDTAATGGAAIASDKFQAT

SEQ ID NO: 11295 - DNA, 897 bp, Unknown
  Obtained from environmental sample
  misc_feature (1)..(897): n is a, c, g, or t
ttgtgcgccagacccccgtgcctggaacgcccattacaccggagactgttatcatcttggaactggaataaagtacaagcaaggaggatttgtatgtatagtttagtaaccatgaataagaaaagattggtattcaaactgttgggaatgttgatatttgcagttatggcggctgcctgctctcccaaaaaaaccgaagaacaaaaagcgccggaggccggtggcgcggaattacaggtggaatcggcggtcttgaacgaaccggacaaaaaagttgaagaagcggcggcccaaacaatggcggcttccgctatcaccacgtcaacgcagcttcaaggcagcggaacggcgggagctccctaccttatctacaccgaagccgatctccgggcggtcggtttaaaattttcagccgaagcacactaccgcctcatggcggacattacattgactggcgacaacgacgacgatccggagaacggtaactggataccgattggcgggacagcgggattctccggcacattcgacggcaacgggcataccatcaccggcctcagaatcaacatccccgaagattttcctcactttatgagcgggggattgtttagtgctgtcgatggcgtagtagaaaatctggggcttatagacataagcattaaggtcggcacgcaaggtataggcggaatcacgggagtgaacaacggcgccattcagaactgttatgttacaggcagcattggagatatgtacggaaaaggcggaattgttgggagcaacccggcaagtggcataatacagaactgttttttcgcgggcacgatctaccacaggcgtgaagaagattcagcggtatcaggcggaattacccggtgtatcgagcggtaccgtcactaa

SEQ ID NO: 11296 - protein, 298 aa, Unknown
  Obtained from environmental sample
  misc_feature (1)..(298): Xaa is any amino acid
MCARPPCLERPLHRRLLSSWNWNKVQARRICMYSLVTMNKKRLVFKLLGMLIFAVMAAACSPKKTEEQKAPEAGGAELQVESAVLNEPDKKVEEAAAQTMAASAITTSTQLQGSGTAGAPYLIYTEADLRAVGLKFSAEAHYRLMADITLTGDNDDDPENGNWIPIGGTAGFSGTFDGNGHTITGLRINIPEDFPHFMSGGLFSAVDGVVENLGLIDISIKVGTQGIGGITGVNNGAIQNCYVTGSIGDMYGKGGIVGSNPASGIIQNCFFAGTIYHRREEDSAVSGGITRCIERYRH

SEQ ID NO: 11297 - DNA, 618 bp, Unknown
  Obtained from environmental sample
  misc_feature (1)..(618): n is a, c, g, or t
atggcgagcggccgagattttggcatagatattcctcccggacttgaaagaatcttcataatagaagaactcttgctggaaaacgcctacttgagcgagcccaaaacagaggaagaaatacagattataccgtcgtatacggaatctgtcgctttgcccaagcagtacaatatctcctttgtcgaggtaataatacgggacccgctttgggcttatgttttctgggaaattaaaagccatgacagggaattgcatgaaaataccgatgattttaaagggtattttttaagggtaattcctttaattgagggcgaaaaagttaaaaaatccgcggaaaatttctttaccgttttgattgataaagacgacagcgccagatatttaggctttgccgaacattcaccccaaacggaaggccgctatgttataaaactcggcgtaattcgcggtgagtcggaagtgcagattgcggtgtcccagcctttcaatatgccgcgccttattgacagtacaaccctctgcgggacggacagtaatcctttaatacgcctttccggggcgccggactttttgactataaacagcactgaccgcgaagccagggttaagaggcaataa

SEQ ID NO: 11298 - protein, 205 aa, Unknown
  Obtained from environmental sample
  misc_feature (1)..(205): Xaa is any amino acid
MASGRDFGIDIPPGLERIFIIEELLLENAYLSEPKTEEEIQIIPSYTESVALPKQYNISFVEVIIRDPLWAYVFWEIKSHDRELHENTDDFKGYFLRVIPLIEGEKVKKSAENFFTVLIDKDDSARYLGFAEHSPQTEGRYVIKLGVIRGESEVQIAVSQPFNMPRLIDSTTLCGTDSNPLIRLSGAPDFLTINSTDREARVKRQ

SEQ ID NO: 11299 - DNA, 684 bp, Unknown
  Obtained from environmental sample
  misc_feature (1)..(684): n is a, c, g, or t
atgttttcattaaaacgattttttattctgataataacggctgttattattgtgtcaacagcggctgctcaaagcaactcgacggcaaaaagagaaatgtctgttgaggagtcctatttgcaggaatcaatagaaatgatgattatcagagaaaccgcaagagcgtacaccagagaacaaaaaatgatcgctctggaatatatcaacgacgcgcttgatcgaggaagtacaaacgacgaaatacgtcagaccttggaattcctttccagagaaggaagaatgaaccaggcgagggaaaacggacgtcttatgaacaacttccccgaagtcaggaggcagtcggcaaagtatcttggaaagatgggaacggaagaagccagacaatctctccttgaaatttgcacctttgaaaatgagccgatggtcttgcaggaagcgattaaatctctcggcgacatcggatcaaatgaaaataatgaaactgtaacgcacattgcttggatcatgagtcggtttaactctacaaatcccgataaccttatggcgcttgccactatcgacgcttttgaaaaaatcgccagaaaaaataacggtataagcgctcccgaagttcccagagttttaaactcatcgcagagggacaatatgttacccctgtcaaggaaagagccagaacattattag

SEQ ID NO: 11300 - protein, 227 aa, Unknown
  Obtained from environmental sample
  SIGNAL (1)...(23)
  misc_feature (1)..(227): Xaa is any amino acid
MFSLKRFFILIITAVIIVSTAAAQSNSTAKREMSVEESYLQESIEMMIIRETARAYTREQKMIALEYINDALDRGSTNDEIRQTLEFLSREGRMNQARENGRLMNNFPEVRRQSAKYLGKMGTEEARQSLLEICTFENEPMVLQEAIKSLGDIGSNENNETVTHIAWIMSRFNSTNPDNLMALATIDAFEKIARKNNGISAPEVPRVLNSSQRDNMLPLSRKEPEHY

SEQ ID NO: 11301 - DNA, 699 bp, Unknown
  Obtained from environmental sample
  misc_feature (1)..(699): n is a, c, g, or t
gtggactatgtaaacggcatgaaggacataaaaaacaaacaggtaaaaaacataatcaatctttccgacatttttacggatgatcctgtaagaatgatccgagcggtaaaatacgccgcaacaacgggtttttctcttccgttgaatttgaaaatgaaaataacaagccagtcgaatttgcttagaactatttctccctcgcggcttacggaggaaattttcaaaattattaattcggataaagcgggaattattgttgatatgttggataaaataggactctattcttacctacagcctcaagcggcggaacttatgcgcaagaacgcaaatttcaaaaagagttacttgcagacaatgacggacttaaaaggaagagagaatcagagaggacaggctatttcttctcttttccgcgactatcttgagggcgcatacgaatggaagccgggtccgattgaaaattacaaagatatttgtaaaagcgtccgtgattttgtccttcccatgaacccgccgaggtttgagcttgaatacgcccttaaaaaatttctttctaataagggaataataataaaaagaactccgtttaagacggcggcggaaggagaaaatcccgcttccaaaagaagacgccgcagaagaaaaccaaaatcgacatccgccgacaatggcaatgccaatacggaaaaaaactag

SEQ ID NO: 11302 - protein, 232 aa, Unknown
  Obtained from environmental sample
  DOMAIN (1)...(108): Poly A polymerase family
  misc_feature (1)..(232): Xaa is any amino acid
MDYVNGMKDIKNKQVKNIINLSDIFTDDPVRMIRAVKYAATTGFSLPLNLKMKITSQSNLLRTISPSRLTEEIFKIINSDKAGIIVDMLDKIGLYSYLQPQAAELMRKNANFKKSYLQTMTDLKGRENQRGQAISSLFRDYLEGAYEWKPGPIENYKDICKSVRDFVLPMNPPRFELEYALKKFLSNKGIIIKRTPFKTAAEGENPASKRRRRRRKPKSTSADNGNANTEKN

SEQ ID NO: 11303 - DNA, 930 bp, Unknown
  Obtained from environmental sample
  misc_feature (1)..(930): n is a, c, g, or t
atggccgatgccttttatattggcagcctggttctggaggatataaaatcacggtcaaaaggcgaagcttccattgaactcgttatctcatccgcttcaaatgggaacatttccgcagatgctgtagacctggacgcttccggagggcggcagacccttaatgtctcccttaagtccatggaagaaaacggcggcgctgatattcccgattttgaatttgataataacgagaacgcgcctaaagggctttatgacgaatccggtaaaaaagggaagaaaaagttcccgtggctgttggtggttttagccgctcttatattgatagccgttgggcttttgatctggctctttttttttcggggaaacaaccctttaacatctcttttcaggccggtggcccctgtatcgcaaagccagccggcggaaactacccctcagacgtcttctgcccaggtggagcagcccacgccgcaaccggaggcggtgcagccggctaacccttccgccgagcctgtggcgcaatctacgcctcaaccggaagccccggctcaaccagttgccgtggctgcccagagcccctctccgccggtgattcaatctcctgcccaggcgccggcaactgccgcttcggttaaccggcaacggccccccgctcctgtatcttcctataacgttcctgcggtaatacccagggaaggggtttcttacaggatacgttacggcgatactctttgggatattgccgacgctttttaccgtaatccacggctttatccgaatattgcccgatttaataatatacataacccgaatcttataatctcggggactacgatcattgtcccggccaggnaattaacggctttagccgtattgtgttgcgcagcttttttttgttctttttttccatgtttctgctttcatgtatag

SEQ ID NO: 11304 - protein, 309 aa, Unknown
  Obtained from environmental sample
  DOMAIN (236)...(282): LysM domain
  misc_feature (1)..(309): Xaa is any amino acid
MADAFYIGSLVLEDIKSRSKGEASIELVISSASNGNISADAVDLDASGGRQTLNVSLKSMEENGGADIPDFEFDNNENAPKGLYDESGKKGKKKFPWLLVVLAALILIAVGLLIWLFFFRGNNPLTSLFRPVAPVSQSQPAETTPQTSSAQVEQPTPQPEAVQPANPSAEPVAQSTPQPEAPAQPVAVAAQSPSPPVIQSPAQAPATAASVNRQRPPAPVSSYNVPAVIPREGVSYRIRYGDTLWDIADAFYRNPRLYPNIARFNNIHNPNLIISGTTIIVPARXLTALAVLCCAAFFCSFFPCFCFHV

SEQ ID NO: 11305 - DNA, 660 bp, Unknown
  Obtained from environmental sample
  misc_feature (1)..(660): n is a, c, g, or t
atggcgagctcggccgtcaaagggcggcaggtgctcttcgtcggaaccaaaaagcagcttagagactgcatccgcgaggaggcgacccgctgcggaatgccctacgtcacggaacgttggctgggcggtatgctgaccaacttccagaccatcaagcagagcatcgcgaaactcgacaaaatcgagaagatggagaccgacggcaccatcgagctgctcccaaagaaggagcgtatgctcatcgccaagaagaaggataagttagtgtccattttgacgggtattaggtacatgcggcgcacgccgtctatcgtgttcgtcgtcgataccataaaggagcacatcgcgatcaccgaaggcaagcgcctcggcatacccatcggggcgattgtcgatactaactgcgatcccgacatggtcgactatccgatccccggcaacgacgacgcgatcaagtcggtgcagttgatcacgcgcgccgttagcgacatcatcctcgaacacgcggtcgccgcggcgacggctgaggagatggccgccaaggacgaaccggtcgagactcgcgaaccggctgagaaggaaggcgacgagaacaaggccaagcgccaccgcgtagcgcacaagaagaacgcgaaaatcgccgaggacgacgacgattaa

SEQ ID NO: 11306 - protein, 219 aa, Unknown
  Obtained from environmental sample
  DOMAIN (1)...(169): Ribosomal protein S2
  misc_feature (1)..(219): Xaa is any amino acid
MASSAVKGRQVLFVGTKKQLRDCIREEATRCGMPYVTERWLGGMLTNFQTIKQSIAKLDKIEKMETDGTIELLPKKERMLIAKKKDKLVSILTGIRYMRRTPSIVFVVDTIKEHIAITEGKRLGIPIGAIVDTNCDPDMVDYPIPGNDDAIKSVQLITRAVSDIILEHAVAAATAEEMAAKDEPVETREPAEKEGDENKAKRHRVAHKKNAKIAEDDDD

SEQ ID NO: 11307 - DNA, 735 bp, Unknown
  Obtained from environmental sample
  misc_feature (1)..(735): n is a, c, g, or t
atggcaaaagacaaatttacccggaataaaatccacatgaacgtcggaaccattggtcacgtcgaccatggcaaaaccacgctttcagcggctatcactatgtactgcgccaagaaattcggcgacaagattatgacttacgatcagattgataacgcgccggaagagaaagcccgcggtatcaccatcaatacccgccaccttgaataccagtccgacaagaggcattacgcccacatcgactgtcccggccacgccgactacatcaaaaacatgatcaccggcgcggcccagatggacggcgcggtgctggtcgtttccgctccggactcggttatgccccagacccgcgagcacatcatcctggcccgccaggtcggcgttcccagcatgctggtcttccttaacaagattgaccttgttgacgatcccgaactgctggaactggtcgaggaagagattaaagacgttctgacccagaacggcttccccggcgacaagacccccatcatcaaaggttcggctttcaaggcgatgtccgagctggccgaaggcaaaccctccgaagaaaccaccaaatgcatcgaaggtctccttgaagcgatggacacctacttccccgatccggtacgcgattcggataaacccttccttatgcctatcgaagacgttttcacgatttcaggccgcggcaccgtcgtcaccggcaagtggacaggggcatcctcaagctga

SEQ ID NO: 11308 - protein, 244 aa, Unknown
  Obtained from environmental sample
  DOMAIN (10)...(210): Elongation factor Tu GTP binding domain
  misc_feature (1)..(244): Xaa is any amino acid
MAKDKFTRNKIHMNVGTIGHVDHGKTTLSAAITMYCAKKFGDKIMTYDQIDNAPEEKARGITINTRHLEYQSDKRHYAHIDCPGHADYIKNMITGAAQMDGAVLVVSAPDSVMPQTREHIILARQVGVPSMLVFLNKIDLVDDPELLELVEEEIKDVLTQNGFPGDKTPIIKGSAFKAMSELAEGKPSEETTKCIEGLLEAMDTYFPDPVRDSDKPFLMPIEDVFTISGRGTVVTGKWTGASSS

SEQ ID NO: 11309 - DNA, 621 bp, Unknown
  Obtained from environmental sample
  misc_feature (1)..(621): n is a, c, g, or t
atgttagggctattggccaggaaagtgggaatgacccaggtcttcgacgaagaaggcaacatgattccggtaacggtaatgagtgtcgcgccgaacgttgtcattgccaaaaagacggaagagaaagaccattataacgccgtggtcatcggcgtgggcgacgcgaagaaaagccgggttacaaagccttatgccggccagtttcccgaaaacatcgctcccaaaaagcggctgcaggaattgcgggattttgaaaaagaaaccgcggtgggggactcccttggagttgagacgctggaagggatccgctatgtcgacgtatccggcgtatccaagggcaagggtttccagggcgttgttaagcgatatggttttggcggcgggcggaaaacccacggttccaaattccaccgcgagccgggttcgaccggccagagcacctacccgcacaggaccttcaagaacacgaaactccccggccgcatgggcagggataatgtgacggtcttaagcctgcgggtagtgaaactggacgccgagaaacagcttatcctggtacgcggatcggttccgggcaacaacggcggccttgtgctggtccgcgcggcggtgaaaaggtag

SEQ ID NO: 11310 - protein, 206 aa, Unknown
  Obtained from environmental sample
  DOMAIN (8)...(201): Ribosomal protein L3
  misc_feature (1)..(206): Xaa is any amino acid
MLGLLARKVGMTQVFDEEGNMIPVTVMSVAPNVVIAKKTEEKDHYNAVVIGVGDAKKSRVTKPYAGQFPENIAPKKRLQELRDFEKETAVGDSLGVETLEGIRYVDVSGVSKGKGFQGVVKRYGFGGGRKTHGSKFHREPGSTGQSTYPHRTFKNTKLPGRMGRDNVTVLSLRVVKLDAEKQLILVRGSVPGNNGGLVLVRAAVKR

SEQ ID NO: 11311 - DNA, 597 bp, Unknown
  Obtained from environmental sample
  misc_feature (1)..(597): n is a, c, g, or t
ttgnttttatgcgcagtttcacatctttacgcggtttccggcgatgattcatctgcgaatactgatattacctatatgcccgcgccgctttttccgcacatgttttttacggatacaatcgaccaatggaaaaaagccgataattcgcggccatattgggttagtacaaaagaagagatagaaaattttaagcaaataacgaattatcaaatttcttttttgctgaataacgatattcttgcgtattatggccatcccggctcgcgtatcatgggaattttaggccgttattctattgaagagctggataagatgatgactgcccttgccgccgaatacgaaaaagttaatggcgggcggaaagtgcgtaaggcgttttatctgatttatgggactgtttggcccaagggcaggatagggataatcggagataatgtccttatgcagtatattgagtatgggttgaagaacgatatattggtttttatagatcatcagattggccgttatgatcctatagattcattgaaaacatgctgccgtatttacgctatccaaacgtacatcttgcccctgatcctgaatggcggaccataa

SEQ ID NO: 11312 - protein, 198 aa, Unknown
  Obtained from environmental sample
  misc_feature (1)..(198): Xaa is any amino acid
MXLCAVSHLYAVSGDDSSANTDITYMPAPLFPHMFFTDTIDQWKKADNSRPYWVSTKEEIENFKQITNYQISFLLNNDILAYYGHPGSRIMGILGRYSIEELDKMMTALAAEYEKVNGGRKVRKAFYLIYGTVWPKGRIGIIGDNVLMQYIEYGLKNDILVFIDHQIGRYDPIDSLKTCCRIYAIQTYILPLILNGGP

SEQ ID NO: 11313 - DNA, 375 bp, Unknown
  Obtained from environmental sample
  misc_feature (1)..(375): n is a, c, g, or t
gtggttgtgtattatcgcaaagaagaggatatatacgagatagtggatggctttcacagatattccataatgcttcgctatcctgatatatatgaaagggaaaaagggcttctgccctgttctatcatagaaaaacccataagcgggcgcatagcatccaccataaggcataacagggctcgcggtagccataatatagatttgatgagtaatatagttgcggaattggttgagatgggcaaaagcgacaattggatttcaaaacatttgggaatgtctaaagatgaaattttgagattgaaacaagtaacaggtttggcaaccctattcaaagaccaagaattttcaaaaagctgggaagtggaatacaattaa

SEQ ID NO: 11314 - protein, 124 aa, Unknown
  Obtained from environmental sample
  misc_feature (1)..(124): Xaa is any amino acid
MVVYYRKEEDIYEIVDGFHRYSIMLRYPDIYEREKGLLPCSIIEKPISGRIASTIRHNRARGSHNIDLMSNIVAELVEMGKSDNWISKHLGMSKDEILRLKQVTGLATLFKDQEFSKSWEVEYN

SEQ ID NO: 11315 - DNA, 693 bp, Unknown
  Obtained from environmental sample
  misc_feature (1)..(693): n is a, c, g, or t
ttgagaaaacttcctttcaccacaaaacaagacctgcgcgacaattacccttatggtatgttcagtgcctctatgaacgatatagtgcgtgtccacgcatcaagtggcacaacgggcaaactcaccgttgcaggctatacacaaaacgatatacatatatggtctgctgtgatggcacgtgcgtttatggcaggcggttgctcgcatagcagcataattaacgttgcttatggctacggattatttacaggcgggcttggcgcgcattatggcagcgaactcctcggtgcgcttaccatacctgcctctagcggaaacacaaaaaggcagttgcagatgtttaaagatttcaaagtatccaccctatgctgcacaccttcgtatgcgctctatttggcagatgaaatggaaaaagaaggctataaaatctctgattttaatttaaaacagggctttttcggtgctgaaccttggtctgaggaaatgcgtacgcaaattcaagagaggcttgggattaaagcctataatatttatgggttaagcgaaataataggacctggtgtttcaatagaatgtgagtaccaatgcggagcgcatatatgggaagaccactttttgccagagataattaacccagaaacacttgaacccttaaaaacggcgagcaaggcgaacttgtattcacaacaataa

SEQ ID NO: 11316 - protein, 230 aa, Unknown
  Obtained from environmental sample
  misc_feature (1)..(230): Xaa is any amino acid
MRKLPFTTKQDLRDNYPYGMFSASMNDIVRVHASSGTTGKLTVAGYTQNDIHIWSAVMARAFMAGGCSHSSIINVAYGYGLFTGGLGAHYGSELLGALTIPASSGNTKRQLQMFKDFKVSTLCCTPSYALYLADEMEKEGYKISDFNLKQGFFGAEPWSEEMRTQIQERLGIKAYNIYGLSEIIGPGVSIECEYQCGAHIWEDHFLPEIINPETLEPLKTASKANLYSQQ

SEQ ID NO: 11317 - DNA, 768 bp, Unknown
  Obtained from environmental sample
  misc_feature (1)..(768): n is a, c, g, or t
atggcggaacttgaggctgaagaccgcgatttcctggccccctataccgagagactccttgccatgtcggttgatcttgcgtcgtatctggtacaccggaaaaattcgcagatactgtttgaaggggcgcaagggactttgctcgatcttgatttgggaacctatccctatgtgagcagcggaatgtcctgcgccgcaggagcggcggtaggcggctgtatcgggccgagggccattgacaaggtgctgggggtttttaaggcctattcaacccgcgtgggaaacggccccctgcccagcgaatttgatccccagtccgaggacgagttgtgccgttttgtccgtgaaacaggccgcgaatacggcgttaccaccggaaggccgcggcgctgcggttacctggacttggtttctctgcgctacgcctgtataaccaattccatcgacagtctggtgatgacccaccttgacgtgtacgacactttcgacgaaataaaagcctgcatcgcctaccgtatcggcgaccgcattgtggaaaaattcccctcttccattgaagaactcaacaacgcaaagccggtgctgcggacttttgccggctggaaaaaatcactcgccggcgcccttacttacgaggaatttccccttgccgcgatggagtacattgactttgtagagcgttattgcgaaacgccgattgatattgtttcagtcggctatgaccgcaaggcaacgattatccgcaaaagtccctggacaaaatggtaa

SEQ ID NO: 11318 - protein, 255 aa, Unknown
  Obtained from environmental sample
  DOMAIN (1)...(247): Adenylosuccinate synthetase
  misc_feature (1)..(255): Xaa is any amino acid
MAELEAEDRDFLAPYTERLLAMSVDLASYLVHRKNSQILFEGAQGTLLDLDLGTYPYVSSGMSCAAGAAVGGCIGPRAIDKVLGVFKAYSTRVGNGPLPSEFDPQSEDELCRFVRETGREYGVTTGRPRRCGYLDLVSLRYACITNSIDSLVMTHLDVYDTFDEIKACIAYRIGDRIVEKFPSSIEELNNAKPVLRTFAGWKKSLAGALTYEEFPLAAMEYIDFVERYCETPIDIVSVGYDRKATIIRKSPWTKW

SEQ ID NO: 11319 - DNA, 729 bp, Unknown
  Obtained from environmental sample
  misc_feature (1)..(729): n is a, c, g, or t
gtgcgttcagcgcagatacgaaaaaaaatagcttcaggcgaagcctggcgttatcttgttccgcctggcgcaaggtgtattattgaagacaggggtctttacggttttttaaaaacccaggacgaaggaaaagatgcaaaggaaaacaacatccttgcggaaaccattattagcgtagagaatgatgcccgcacctgccttgacgctgagaggtttaagcactcgagaaatactgctctattatcatgggatctctgccgccgcctgggatttgatcctcaaaagggatatttggcgggaatagcccatgatatctgtaaggagatggaagaaagcgaggttatacgcctggcccgccaggatagcggcggtatttctaagcttgaacaaaaaaggcccggcttgcttcacgcacgggcggcggcagtgtatgttaacaaaaaatacggcatcaaagataaggacattcttgaggcaatcaggtatcataccactggggttcgcgacatgggacccattgccaaagtcatttatatagcggacaagatagagatatccagaaccgatgtggatcctattttaaggagaatgagcagggaaagcgatctggatactctttttacggaggttttaagcgataccgtgaactaccttaaatcccgccacatggatatttcttatggcacaagaaggctgatggcggcaatgcgaaaaaagaacaagccatga

SEQ ID NO: 11320 - protein, 242 aa, Unknown
  Obtained from environmental sample
  DOMAIN (71)...(186): HD domain
  misc_feature (1)..(242): Xaa is any amino acid
MRSAQIRKKIASGEAWRYLVPPGARCIIEDRGLYGFLKTQDEGKDAKENNILAETIISVENDARTCLDAERFKHSRNTALLSWDLCRRLGFDPQKGYLAGIAHDICKEMEESEVIRLARQDSGGISKLEQKRPGLLHARAAAVYVNKKYGIKDKDILEAIRYHTTGVRDMGPIAKVIYIADKIEISRTDVDPILRRMSRESDLDTLFTEVLSDTVNYLKSRHMDISYGTRRLMAAMRKKNKP

SEQ ID NO: 11321 - DNA, 522 bp, Unknown
  Obtained from environmental sample
  misc_feature (1)..(522): n is a, c, g, or t
gtgggcgaaaaaattgtaagcggacaggtaattgccgacggtcccgctacccaaaacggagaacttgctcttggaagaaatatccttgtaggctttatgccgtggaacgggtacaactatgaggactcgatccttatttctcagcgtgttgtaaaagatgatatgtttacttcaatacatattaaggaatttgttgtcgaagtaagggaaacaaaactcggtcccgaaaaaattacccgtgatattcccaacacttcggaaaaaagtcttgataacatggacagcgaaggcattatccgcatcggcgctaaagtgcgctcccgcgatatattggttggcaaagttacgcccaaaagcgaaaacgaaacacgcctgaattcaactgctcaattcatcttcggcgaaaagcaaaggagggccgacactcccttaagtccccccgaattgacgaaacgttttcgacttccagggtttaaaccccggatcaagaaccctttgtccccccgctttaataaaatttaa

SEQ ID NO: 11322 - protein, 173 aa, Unknown
  Obtained from environmental sample
  DOMAIN (1)...(172): RNA polymerase Rpb2, domain 6
  misc_feature (1)..(173): Xaa is any amino acid
MGEKIVSGQVIADGPATQNGELALGRNILVGFMPWNGYNYEDSILISQRVVKDDMFTSIHIKEFVVEVRETKLGPEKITRDIPNTSEKSLDNMDSEGIIRIGAKVRSRDILVGKVTPKSENETRLNSTAQFIFGEKQRRADTPLSPPELTKRFRLPGFKPRIKNPLSPRFNKI

SEQ ID NO: 11323 - DNA, 438 bp, Unknown
  Obtained from environmental sample
  misc_feature (1)..(438): n is a, c, g, or t
atgcgttattttttagatacgaatatctttgtattctatgctttgggcggtgagaatttagacagagaaacaaccgccatatttggcgactacgaaaacataatttacgtaagtgccgaagtagtaaaagaaacaatgcacttaataaggcaaaagaaaatagacgtaaaacattggaaaaccccaaacgacatttggaaatctattagtgaatggggttttgtcgttgattatgtcaaagaagaacacgtaagaacattaggcaatttatctacggcaaaagaccacaaagacccaaccgaccacataatcatagcacaagcaataacaaacaaaatgcccgtaatcagtagcgacagccaattcaggcattacaaaggacagggattgagtttggttttcaacaacgcccacgagagaaataagatagcaaggtag

SEQ ID NO: 11324 - protein, 145 aa, Unknown
  Obtained from environmental sample
  DOMAIN (3)...(130): PIN domain
  misc_feature (1)..(145): Xaa is any amino acid
MRYFLDTNIFVFYALGGENLDRETTAIFGDYENIIYVSAEVVKETMHLIRQKKIDVKHWKTPNDIWKSISEWGFVVDYVKEEHVRTLGNLSTAKDHKDPTDHIIIAQAITNKMPVISSDSQFRHYKGQGLSLVFNNAHERNKIAR

SEQ ID NO: 11325 - DNA, 666 bp, Unknown
  Obtained from environmental sample
  misc_feature (1)..(666): n is a, c, g, or t
ttggtttttgctgcctgcatgattagttttataaccgccaataagctcacaacttccgccaatgtaatcatgcttcagtacagcgctcctgtatgggcggcactgcttggctgggccctggtgcgtgaaaaaccgcgctgggagcaatggggggcgcttgtcctggtttgctcaggctttttccttttttttcgggacggcttaagctttggctcccacgcgggagacgcgctttctgtattgtcaggaatgttattgggcggatcttcggttttttttcgaatgataaaaaagggcaatccgcaagacgcaatgcttatgggccagttaatcgtcgctgttatctgtactccctttttctttctgtttcccccttcttttgacgctacagtcattgcatcaatttcctttctgggtatcttccaggcaggcttggcatcgctgactttttcctacggcataaagcgaatcagcgccgtgcaggccatgctcatcgcgacagcggagcctattttaaacccgatatgggtttttatcctaataggggaaaaaccttccctgacggcgctcgcaggcgggataattattataatcgcggtggtgtcctcgtccctgattggcaaataccatgaagacatggatgtaaagagtttgagcaatgactga

SEQ ID NO: 11326 - protein, 221 aa, Unknown
  Obtained from environmental sample
  DOMAIN (84)...(205): Integral membrane protein DUF6
  misc_feature (1)..(221): Xaa is any amino acid
MVFAACMISFITANKLTTSANVIMLQYSAPVWAALLGWALVREKPRWEQWGALVLVCSGFFLFFRDGLSFGSHAGDALSVLSGMLLGGSSVFFRMIKKGNPQDAMLMGQLIVAVICTPFFFLFPPSFDATVIASISFLGIFQAGLASLTFSYGIKRISAVQAMLIATAEPILNPIWVFILIGEKPSLTALAGGIIIIIAVVSSSLIGKYHEDMDVKSLSND

SEQ ID NO: 11327 - DNA, 822 bp, Unknown
  Obtained from environmental sample
  misc_feature (1)..(822): n is a, c, g, or t
ttgggttttttatttgcagcggcgatctctgccttttttccacaggggctttacgctcaggaaaaggtgcataccgtccaaaaaggtgaaaccctgtattccatagcgcggtccctgggaattaaagcggacgatattataaactacaacggaattaccgatccgtcccgccttctggcaggccagatcattaaaattccttctacgggggtaaccggttcgccagcaaccggcagtacaagctaccgtgtagttaaaggagatactttatacagcattgccagaaaattttcggtaaccataacatcgattcaggaactaaacagcctttcggctaattatgtgctaaaagaaggagattttcttaaaattccaaataatgctgcggcgcctgtgaaaacagcggtaacccagcctcaacaggagaaaacaagcaccggcgggacggtgcaaaccgcggttaattcacaggtcagttggcccattgcagcaagggagcttagttacatgaccggtaaactaagcggggtggttcttaccggccttcgctctgaatccgtatccagccttacccgtgggactgtattgtcggcgggtccctacagggggtttggaaaggttgtaatcattcaggtggatgggggttatctatatgtttacggcggtcttgaaagtttatcggtaaaggagggtgacagggttggtccgggttctgaaatcgggaaactgggcgttgacgcgatgtcaaataagccgcagttattttttatggtctacttgagcaatactcctgtagacccggctaaagcccccagggcttag

SEQ ID NO: 11328 - protein, 273 aa, Unknown
  Obtained from environmental sample
  SIGNAL (1)...(19)
  DOMAIN (172)...(267): Peptidase family M23
  misc_feature (1)..(273): Xaa is any amino acid
MGFLFAAAISAFFPQGLYAQEKVHTVQKGETLYSIARSLGIKADDIINYNGITDPSRLLAGQIIKIPSTGVTGSPATGSTSYRVVKGDTLYSIARKFSVTITSIQELNSLSANYVLKEGDFLKIPNNAAAPVKTAVTQPQQEKTSTGGTVQTAVNSQVSWPIAARELSYMTGKLSGVVLTGLRSESVSSLTRGTVLSAGPYRGFGKVVIIQVDGGYLYVYGGLESLSVKEGDRVGPGSEIGKLGVDAMSNKPQLFFMVYLSNTPVDPAKAPRA

SEQ ID NO: 11329 - DNA, 882 bp, Unknown
  Obtained from environmental sample
  misc_feature (1)..(882): n is a, c, g, or t
atgcgtatcaaccacaacttaaccgccatcaacacccaccgccaaatgggtatcagcgagctcgacggctcgaaatcgatggaaaaactgtccagcggattccgcatcaaccgcgcaggcgacgacgccgccggtctggcgatctccgaaaaaatgagaggacaggttagaggcctctcaatggcgtccaaaaactcatcggacaccatctccctaatccaaacagctgaaggcgccctcgccgaaacgcactccatcctccagaggatgcgcgaactgtcagtccaatcggccaacgacacaaacaccgacaaagaccgcgaagaactccaagccgaagtcagacagctgaaagccgaaatcgaccgcatcggcaacacgacagagttcaacacgaagaaactcctcgaaggcagcgccacaggcgtccgcgacgagatcgtcggcacactgcgcgtgaacaacaacagcagcgtggtgatagacgccaataaagagaagggaatggccgccagcatcggcaacgataagagctgggcgttcgacggcgcttatatgctcgtgaaggtaaaccagacacacgacgccgaaggcaagaaagtgtttaaggcggaagactacaatctggtcgggccggacgggaacgtcttcaagtttaagacctatacgccggataccaaggtgctggctaacgggttggaggcgaacacgataattgctgagggtggggagataaagaatattgccagctctgccgatgattttgccactcagggcataggcgcgttggttctcggcgaaaagcttacggagaaagagcttgcggaagtaggagatggaagcacttggcatccggttccagtttacgctcggccgatctga

SEQ ID NO: 11330 - protein, 293 aa, Unknown
  Obtained from environmental sample
  DOMAIN (27)...(177): Bacterial flagellin N-terminus
  misc_feature (1)..(293): Xaa is any amino acid
MRINHNLTAINTHRQMGISELDGSKSMEKLSSGFRINRAGDDAAGLAISEKMRGQVRGLSMASKNSSDTISLIQTAEGALAETHSILQRMRELSVQSANDTNTDKDREELQAEVRQLKAEIDRIGNTTEFNTKKLLEGSATGVRDEIVGTLRVNNNSSVVIDANKEKGMAASIGNDKSWAFDGAYMLVKVNQTHDAEGKKVFKAEDYNLVGPDGNVFKFKTYTPDTKVLANGLEANTIIAEGGEIKNIASSADDFATQGIGALVLGEKLTEKELAEVGDGSTWHPVPVYARPI

SEQ ID NO: 11331 - DNA, 549 bp, Unknown
  Obtained from environmental sample
  misc_feature (1)..(549): n is a, c, g, or t
ttgccgatgctggcggccattcccttctctttattggcgtctatcaccacgctgctgttgttgttcacgcgcagtgtgccgacgatctcgtcgcggacgcctgtggcgctgccttcgaggagtttcttcgtgttgaactctgtcgtgttgccgatgcggtcgatttcggctttcagctgtctgacttcggcttggagttcttcgcggtctttgtcggtgtttgtgtcgttggccgattggactgacagttcgcgcatcctctggaggatggagtgcgtttcggcgagggcgccttcagctgtttggattagggagatggtgtccgatgagtttttggacgccattgagaggcctctaacctgtcctctcattttttcggagatcgccagaccggcggcgtcgtcgcctgcgcggttgatgcggaatccgctggacagtttttccatcgatttcgagccgtcgagctcgctgatacccatttggcggtgggtgttgatggcggttaagttgtggttgatacgcataaaaccctcctggttttgtagttaa

SEQ ID NO: 11332 - protein, 182 aa, Unknown
  Obtained from environmental sample
  SIGNAL (1)...(30)
  misc_feature (1)..(182): Xaa is any amino acid
MPMLAAIPFSLLASITTLLLLFTRSVPTISSRTPVALPSRSFFVLNSVVLPMRSISAFSCLTSAWSSSRSLSVFVSLADWTDSSRILWRMECVSARAPSAVWIREMVSDEFLDAIERPLTCPLIFSEIARPAASSPARLMRNPLDSFSIDFEPSSSLIPIWRWVLMAVKLWLIRIKPSWFCS

SEQ ID NO: 11333 - DNA, 321 bp, Unknown
  Obtained from environmental sample
  misc_feature (1)..(321): n is a, c, g, or t
ttgattctcctggatgaaatagaaaacggtataaacccatatttaaccgaacaaattatttttttattacgcaatcttgtaaaaaaatcaaatcggcaagtcattatatctacccacagtccggtaatgctcaatgattttaataagggagaaattgtttttatgtggagagataaaaaaggttttgttcatgctaaaaatttttttgatactgaagaaatgaaagaggccctcagtttccttaatcccggtgaaatttgggaaaatttcgggaaagatacaatcctgacaaaattaggtgttaatcaggaagatagatga

SEQ ID NO: 11334 - protein, 106 aa, Unknown
  Obtained from environmental sample
  misc_feature (1)..(106): Xaa is any amino acid
MILLDEIENGINPYLTEQIIFLLRNLVKKSNRQVIISTHSPVMLNDFNKGEIVFMWRDKKGFVHAKNFFDTEEMKEALSFLNPGEIWENFGKDTILTKLGVNQEDR

SEQ ID NO: 11335 - DNA, 459 bp, Unknown
  Obtained from environmental sample
  misc_feature (1)..(459): n is a, c, g, or t
atggcgtacaatattttgattgttgacgattcgcagacgatgcgcgccgtgctgacgaaaacgatctgcatggccggcgtcgagatcggtacggtcttcgaggctgagaacggcagagaagcgctcgacgtcttggagaaggagtgggtcgacctcgtattcgccgacatcaacatgccagtgatgaacggcgtggagatggtcaaggcgatgcagtcgctgggctacatggagtcgacgcccgttgtggtcatctccacggagggcagcaagacgaggctcgacgcgctgcgcgagatgggcgtgaggggcttcttgagaaaaccggtcaccccggagctcttcaagtcggtggtcgacgggatcctcctcggcaacacggaggacatcgccaccggggccgccgtcgcggccagcatcgccgccgagagcccggccgcgaatgccgttgacaaatag

SEQ ID NO: 11336 - protein, 152 aa, Unknown
  Obtained from environmental sample
  DOMAIN (3)...(120): Response regulator receiver domain
  misc_feature (1)..(152): Xaa is any amino acid
MAYNILIVDDSQTMRAVLTKTICMAGVEIGTVFEAENGREALDVLEKEWVDLVFADINMPVMNGVEMVKAMQSLGYMESTPVVVISTEGSKTRLDALREMGVRGFLRKPVTPELFKSVVDGILLGNTEDIATGAAVAASIAAESPAANAVDK

SEQ ID NO: 11337 - DNA, 381 bp, Unknown
  Obtained from environmental sample
  misc_feature (1)..(381): n is a, c, g, or t
ttgttcaggagtgaaaagatgaataaaggcatgaatatgggaagcttgatcggagcgattggcgcgatggtcatgattcttggatccattatattgtccggtaacagtattggggcgttcatagatattccatcactcctcctcgttcttgtcggttcatattttgcccttatgatagcgttctcattgtcggacagcttgggtatttttgccgctatcggacttgcctttcaacagcctgtatttgatacgggaagtataattcaaaaaatgattgcgttttccgagaaagcccgccgcgagggcttgcttgctttggaagacgaacttgaagaccttgaagatgaatttatgaaaaaagggtttgcgtcttgtagttga

SEQ ID NO: 11338 - protein, 126 aa, Unknown
  Obtained from environmental sample
  misc_feature (1)..(126): Xaa is any amino acid
MFRSEKMNKGMNMGSLIGAIGAMVMILGSIILSGNSIGAFIDIPSLLLVLVGSYFALMIAFSLSDSLGIFAAIGLAFQQPVFDTGSIIQKMIAFSEKARREGLLALEDELEDLEDEFMKKGFASCS

SEQ ID NO: 11339 - DNA, 528 bp, Unknown
  Obtained from environmental sample
  misc_feature (1)..(528): n is a, c, g, or t
gtgccgcaggattacgcaaaagcggcgtactggtacaccaaggctgcggaacagggagatgcttcggcgcaatgcaacctcggaatttgttatgataacggacaaggcgtgccgaaagataacgcaaaagcggtgtactggtacaccaaggctgcggaacaggggaatgaaaaggcacaagagtatttaaggcaattagttgggaccgcgattaacgggccggcaagcgccggaccaacagacgcggcagaacagtttgagcttgccggaaaatattttacaggacaaggcatgccgcaggactatgtaaaagcggtgtactggtgcgccaaggcagcggaacaggggtatgctcacgcgcaaaacgccctcggagcttcttatatgtcaggacaaggagtaccgcangatttcgcaaaagcggtgtactggttaccnaggcagtggaacagggtaatgttaacgcgncaattcggccttggnatatgntatatgacnagacaagggcgtaccgcaggatgtcaataa

SEQ ID NO: 11340 - protein, 175 aa, Unknown
  Obtained from environmental sample
  DOMAIN (82)...(117): Sel1 repeat
  misc_feature (1)..(175): Xaa is any amino acid
MPQDYAKAAYWYTKAAEQGDASAQCNLGICYDNGQGVPKDNAKAVYWYTKAAEQGNEKAQEYLRQLVGTAINGPASAGPTDAAEQFELAGKYFTGQGMPQDYVKAVYWCAKAAEQGYAHAQNALGASYMSGQGVPXDFAKAVYWLPRQWNRVMLTRQFGLGIXYMTRQGRTAGCQ

SEQ ID NO: 11341 - DNA, 630 bp, Unknown
  Obtained from environmental sample
  misc_feature (1)..(630): n is a, c, g, or t
gtgttgattctgctcttctctgtcgcggttgcagctgtcggccgcttattccttggcaatctcgaagacagttcattggtttttatcatgatggtacgcaggattttcccgggagttatcgccggtatcctgttgtccgcaatcctggccgctgccatgagtaccgcggactcccagcttcttgcttccgcgtccgcttttgcggctgacgtgtataaccctgtactgcgcagaggaacaggtactgaagaagagatgttctgggcggggcgttttgttgtcgcgattatcgcgcttttagcgattattatcgcctcaaatccgggcagcggcaccattatgagccttgtcggaaacgcgtggggcgtattcggcgccgcctttgggccggttatcctgctgtcgctgttttggaaacgtttaaccttttccggcgcgggagccggcattgtcgccggcgctatagcggatgtggtttggctcgcggcattttccaacacgggcctgtacgagattatccctggttttattgtaggtttaaccacaaccgttattgttaccctgtgcggcaaaggccccggcgccgaggtcgaagcgctgtttgataaatctgtagctttaaaggattaa

SEQ ID NO: 11342 - protein, 209 aa, Unknown
  Obtained from environmental sample
  misc_feature (1)..(209): Xaa is any amino acid
MLILLFSVAVAAVGRLFLGNLEDSSLVFIMMVRRIFPGVIAGILLSAILAAAMSTADSQLLASASAFAADVYNPVLRRGTGTEEEMFWAGRFVVAIIALLAIIIASNPGSGTIMSLVGNAWGVFGAAFGPVILLSLFWKRLTFSGAGAGIVAGAIADVVWLAAFSNTGLYEIIPGFIVGLTTTVIVTLCGKGPGAEVEALFDKSVALKD

SEQ ID NO: 11343 - DNA, 672 bp, Unknown
  Obtained from environmental sample
  misc_feature (1)..(672): n is a, c, g, or t
gtgnaangggcttacccttcccatggctattatttagcggtgctggttctggtagctttctttatggtcgaattacagggacgcaagaaaaaaatcgccaatggttttgaagtaacgcctttcccgctgtttgtaacccagcttgttttaatcagcgtcttaactctcggccttgccgatcgtttcgcgcgctacaggggtcttccggttgtagttctcgtcctcggcattgccgttgttgctttccacttccttttgaacaataccgttcttggccgctacatctacgcggtcggcggcaacccgcgttcggcgactctttccggtatcaactcggaaatggtaacgttcatcgttttctgtttcatgggcggattaacggggcttgcggcggtagtcagcaccggttacatgaacagcgctcttcctcaggcgggcaacctctttgaattggacgcgattgccgcgtgttacatcggcggcgtatccgcgggcggcggcattggctccgtaatcggggttgttgtcggcggtcttgtaatgagcgcgattaacaacggcatgaccttgatgaaccttgggcagcattaccagtatgttgttaaagcttcaattttgattttagcggtcttctatgatgtttattcaagacgcaaagcgggattgggctga

SEQ ID NO: 11344 - protein, 223 aa, Unknown
  Obtained from environmental sample
  DOMAIN (5)...(210): Branched-chain amino acid transport system / permease component
  misc_feature (1)..(223): Xaa is any amino acid
MXXAYPSHGYYLAVLVLVAFFMVELQGRKKKIANGFEVTPFPLFVTQLVLISVLTLGLADRFARYRGLPVVVLVLGIAVVAFHFLLNNTVLGRYIYAVGGNPRSATLSGINSEMVTFIVFCFMGGLTGLAAVVSTGYMNSALPQAGNLFELDAIAACYIGGVSAGGGIGSVIGVVVGGLVMSAINNGMTLMNLGQHYQYVVKASILILAVFYDVYSRRKAGLG

SEQ ID NO: 11345 - DNA, 516 bp, Unknown
  Obtained from environmental sample
  misc_feature (1)..(516): n is a, c, g, or t
ttgattgcggaattaggacttgtcatggcgatttcttcttttattgataagatgtcgattccggcggcaaacgccctgtttttcctctatgcggcagtcaacggcctaaccatatcggttattttctttgcctacaaccttggggatatttatagcgcgtttggcatttccgcgctgatgttccttgcaatggccggcttcggggccctgacccacagggatttatcgtctgtcggcagtatttgcataatggcgctgtttgggattatcctggccagcatagtcaacttcttcttaaaatcgaatgtgatggactatgttatttgttatatcggcatttttgttttcatcggtttaacggcatacgatacccaacggataaaaaagatgctggcgacggcggcagaagcgagccaggaagactcaataaggaaaatcgcggttataggcgcgttgacattgtaccttgattttatcaatctgtttttgatgatattacgcctcaaaaaaaaataa

SEQ ID NO: 11346 - protein, 171 aa, Unknown
  Obtained from environmental sample
  DOMAIN (3)...(171): Uncharacterised protein family UPF0005
  misc_feature (1)..(171): Xaa is any amino acid
MIAELGLVMAISSFIDKMSIPAANALFFLYAAVNGLTISVIFFAYNLGDIYSAFGISALMFLAMAGFGALTHRDLSSVGSICIMALFGIILASIVNFFLKSNVMDYVICYIGIFVFIGLTAYDTQRIKKMLATAAEASQEDSIRKIAVIGALTLYLDFINLFLMILRLKKK

SEQ ID NO: 11347 - DNA, 426 bp, Unknown
  Obtained from environmental sample
  misc_feature (1)..(426): n is a, c, g, or t
atgatcgctccggcgctgaccattaacaaccgtttccttgccgcttttatagcctttaccatgaacagcgcggcgtattgcgcggagataatcagggctgcgattcaaagcatcgacaaggggcagttcgaggcgtcccgcgcgctggggctgtcttacggccagaccatgcggctggtggtcatcccccagtcaatacgaaggctaataccgcctgtcggcaacgagttcatcatgatgcttaaagacgcgtcgctggtttcaatgattgcgttggttgacattacaaaggcgacaaggaacattgagggctccacccgatccgcgcttgtttatatcccggcaatgatcctctatctgatcattaccgccgttttttcctttttcttccacaagctggaaaaaaaatattcgttatacgaataa

SEQ ID NO: 11348 - protein, 141 aa, Unknown
  Obtained from environmental sample
  SIGNAL (1)...(28)
  misc_feature (1)..(141): Xaa is any amino acid
MIAPALTINNRFLAAFIAFTMNSAAYCAEIIRAAIQSIDKGQFEASRALGLSYGQTMRLVVIPQSIRRLIPPVGNEFIMMLKDASLVSMIALVDITKATRNIEGSTRSALVYIPAMILYLIITAVFSFFFHKLEKKYSLYE

SEQ ID NO: 11349 - DNA, 939 bp, Unknown
  Obtained from environmental sample
  misc_feature (1)..(939): n is a, c, g, or t
atggggnnaacatggtcagattggccgagctaccccgaagaactggagcaggcaaagaaaacgctgatatatgaggaatcgttttatcttgaactcatagtcggcaagcgtgcgttggaaagaaggggatatagcatacaacaatcccccgaaccccgaaccccgaaccccgaacccttttctcctttgcagaaacgtttgcttgaacgcttaccattttcgcttacaaaaggccaacaaaaggctatcgttgaaattaattctgatatgacttgcaatgattcacactattccatggctcggctcttgcagggggacgtcggttcaggcaaaacgcttgtttcgtttttggccgctttacgggcgattgacaacggcggacaggccgcgttgttggctccaacggaactgcttgcccgccaacatgcggaaaacgccgcccgcctgcttgagcccctgggcctgcggatagcgttcctgacaggaaacataaaagcggcgggcagaaaagatttattaaaacatttggaagcgggggagatagacattgccgtgggcacccatgcgctgttttcaaaggatgttaactataaaaatttgcagttggtaattattgacgagcagcaccgttttggcgtaacgcagagggcgctcatcatggccaaaggccttaatggcgctgcgtctggcggaccccatctattgatgatgagcgccacccctattccccgcacccttgccatgacggttttcggcgacatggacgtttcagtaataagcgatatgccgccggggagaaagccggtaataacccaccttgcaagggaatcaaatgagcaaaaggtgtatgactttgtacgtaataaactgaaagccggttcccaggcttactttgtgtatccgttaattgaaagcgacgacgaaaagaaacaggcttga

SEQ ID NO: 11350 - protein, 312 aa, Unknown
  Obtained from environmental sample
  DOMAIN (72)...(243): Type III restriction enzyme, res subunit
  misc_feature (1)..(312): Xaa is any amino acid
MGXTWSDWPSYPEELEQAKKTLIYEESFYLELIVGKRALERRGYSIQQSPEPRTPNPEPFSPLQKRLLERLPFSLTKGQQKAIVEINSDMTCNDSHYSMARLLQGDVGSGKTLVSFLAALRAIDNGGQAALLAPTELLARQHAENAARLLEPLGLRIAFLTGNIKAAGRKDLLKHLEAGEIDIAVGTHALFSKDVNYKNLQLVIIDEQHRFGVTQRALIMAKGLNGAASGGPHLLMMSATPIPRTLAMTVFGDMDVSVISDMPPGRKPVITHLARESNEQKVYDFVRNKLKAGSQAYFVYPLIESDDEKKQA

SEQ ID NO: 11351 - DNA, 684 bp, Unknown
  Obtained from environmental sample
  misc_feature (1)..(684): n is a, c, g, or t
ttgaggcctaacatgggttttagaagattcgccgtgacttattttctgaaaggcatattaagcgttatctgtaaaattgactgcaaagaatttatatctgcgttaacaaacaacaaaccgatgctggttatttttaaccatattaattttttggaagtccctattctggtaacgcacagttatcctctttatgtatcggggcttgttaaatcggaaacatgggataacccggtgttcgcgtttctttttaatacctacaaagcgattccgattgacagaagaggcgcttttaacggatctttcaggaaagtgctggaagcgatagaaaaagggtattatatgtgcgtcgcgccggaagggacaagaagcaaaaacggcgtattgggaaaagggaaaccgggaattatacagcttgcccttgaggcaaacgtgcctatacttcctgtcgcccattacggcggtgagaatatctggaaaaacatccgccgtctgcgccgcaccccgtttcatttcagggcaggccgccctttccgcattaactgtaacagcatgcccggaaaagaagaacgggaaaaaataatgacggaagttatggctcanatggcgcgtcttttgcctgaaaagctgcgcggagaatacgccgggcacgcggacaacgaatgtaaatatctgggatttatttaa

SEQ ID NO: 11352 - protein, 227 aa, Unknown
  Obtained from environmental sample
  DOMAIN (25)...(152): Acyltransferase
  misc_feature (1)..(227): Xaa is any amino acid
MRPNMGFRRFAVTYFLKGILSVICKIDCKEFISALTNNKPMLVIFNHINFLEVPILVTHSYPLYVSGLVKSETWDNPVFAFLFNTYKAIPIDRRGAFNGSFRKVLEAIEKGYYMCVAPEGTRSKNGVLGKGKPGIIQLALEANVPILPVAHYGGENIWKNIRRLRRTPFHFRAGRPFRINCNSMPGKEEREKIMTEVMAXMARLLPEKLRGEYAGHADNECKYLGFI

SEQ ID NO: 11353 - DNA, 792 bp, Unknown
  Obtained from environmental sample
  misc_feature (1)..(792): n is a, c, g, or t
gtgtattttccgtttgcccggacagttctctacagtttttcccgggtaaatttcaggggggagattaccggcttcacaggtttaaggaatttccgccggctctttggtgatcctgtttttatcacggttttaaagaacaccctgacactgactacggtctatgtgatccttaacctgtttctttctttctcccttgccgtccttgccgtgaagaaacgcaggttcgggatgttttacgaaactatgtttatgctgccgatggcggtttccatgcccgcggcttcacagattttcaagctgctccttgaaccgacaatgggaatactcaattacaaactggggcttaacatcggctggtttacggatccccatactgccatttttggaattgtcatggtctgcctctggataggtatgccgtttgatttccttctctttctttcggcgttgcgcaatatacccgcttctctcatggacgcggctgatattgacggcgccggtttcgctcataaccttttcagaattcagataccgttggccgctcctaccatcctcttcgttatctgtaccaacacggtacttgccatgatgacttccaccccggtgatgatcattacaggggggcagcctggttattccacggcaacccttatttacatgatgtatagctgggggtaccagtcttccaattacagtctggcttcctgtatcagcatcgtgaccttcgcgctcaccttcggcatgattctcctggccttttccttcgaacacaagaaggtgcactatcaatga

SEQ ID NO: 11354 - protein, 263 aa, Unknown
  Obtained from environmental sample
  DOMAIN (40)...(261): Binding-protein-dependent transport system inner membrane component
  misc_feature (1)..(263): Xaa is any amino acid
MYFPFARTVLYSFSRVNFRGEITGFTGLRNFRRLFGDPVFITVLKNTLTLTTVYVILNLFLSFSLAVLAVKKRRFGMFYETMFMLPMAVSMPAASQIFKLLLEPTMGILNYKLGLNIGWFTDPHTAIFGIVMVCLWIGMPFDFLLFLSALRNIPASLMDAADIDGAGFAHNLFRIQIPLAAPTILFVICTNTVLAMMTSTPVMIITGGQPGYSTATLIYMMYSWGYQSSNYSLASCISIVTFALTFGMILLAFSFEHKKVHYQ

SEQ ID NO: 11355 - DNA, 618 bp, Unknown
  Obtained from environmental sample
  misc_feature (1)..(618): n is a, c, g, or t
atggcgagattctggattatcttataccgctattcttccctacgccaggccctctcccgctttcccgcccaccttcagcagctcgacatggaatccaacggaaagtgcgtgaaccgtgacgggaagccgattgcttactccacggggcctgtggttttcggggagcctggcaccaacggccagcactctttttaccagctcctgcatcagggtacggatatcataccccttcagtttatcggtttcagggaaagccagcgcaaggacgatggtgtaattgacggctccacaagccaggccaagctcaaggcaaacctggctgctcaaataaccgccttcgcgaacggaaaaagcgacagcgacggaaacaagaattttcccggcgggaagccttccagcttaatttacggtgaaaggcttaccccgagaaccctcggagccctgcttgcccattacgagaacaaggtcatgttccagggttttgtctggaacgtgaacagtttcgatcaggaaggcgtccagctcggcaaggttctggctaaaaagatacttaccaaaacggaagcgggttccggcgacaaggtgctggacgcttacagtgggctgttggggttgtaa

SEQ ID NO: 11356 - protein, 205 aa, Unknown
  Obtained from environmental sample
  DOMAIN (1)...(203): Phosphoglucose isomerase
  misc_feature (1)..(205): Xaa is any amino acid
MARFWIILYRYSSLRQALSRFPAHLQQLDMESNGKCVNRDGKPIAYSTGPVVFGEPGTNGQHSFYQLLHQGTDIIPLQFIGFRESQRKDDGVIDGSTSQAKLKANLAAQITAFANGKSDSDGNKNFPGGKPSSLIYGERLTPRTLGALLAHYENKVMFQGFVWNVNSFDQEGVQLGKVLAKKILTKTEAGSGDKVLDAYSGLLGL

SEQ ID NO: 11357 - DNA, 645 bp, Unknown
  Obtained from environmental sample
  misc_feature (1)..(645): n is a, c, g, or t
gtggtaaaaatgaaagctctggtaattgaaaaaccgggaacagccagtgttcagacagtgcaggttgccccggttggcgacagggatctgcgagtaaaagtaaaggtttccggaatttgcggaacggatgtacacattttcaggggagaatacctgggcaattatccggttattcccggccatgaattttccggggttttagaagaagttggtgaaaaagttacgcggtttaaggttggggatcatgtcgcgatagagccgaatatcagctgcgataactgtcacgcctgcctgagcaacaggcagaatttttgcgagcggtggaatgctgtcggcgttacgcttcccggagggatggcagaatacgcggtggttcccgaaaaggcggctttcaatatcggggatcttccgtttttatccggcgcttttgtcgagccactttcctgcgttttgcacggagttgaaagggcccgcatcaaattggcggacaaggtgctgattttaggcgcgggcccaataggtatccttctttctaaagccatacaactacaaggtgcctgtgaaattacccaggttgacctgaatcaaagcaggctggaactggcaaaaaaaagncggcgctgtaaaggtgtatgcctcgcttga

SEQ ID NO: 11358 - protein, 214 aa, Unknown
  Obtained from environmental sample
  DOMAIN (27)...(133): Alcohol dehydrogenase GroES-like domain
  misc_feature (1)..(214): Xaa is any amino acid
MVKMKALVIEKPGTASVQTVQVAPVGDRDLRVKVKVSGICGTDVHIFRGEYLGNYPVIPGHEFSGVLEEVGEKVTRFKVGDHVAIEPNISCDNCHACLSNRQNFCERWNAVGVTLPGGMAEYAVVPEKAAFNIGDLPFLSGAFVEPLSCVLHGVERARIKLADKVLILGAGPIGILLSKAIQLQGACEITQVDLNQSRLELAKKXRRCKGVCLA

SEQ ID NO: 11359 - DNA, 918 bp, Unknown
  Obtained from environmental sample
  misc_feature (1)..(918): n is a, c, g, or t
atggaaacgaaggttattgatttagcttcaggcggaggcacacaaattatcgctgagggcaccaccgggaccggcgcaaactttacaggcggtcttctgcaaatccacgagcaggtcgccggctgggaaataacaagcaaactcggcacaatctccggcgaagcggacatttatatcgcgcagaaagacggacaaaaaggagtagtcaagtattatcgcagcgtaaccaaacccaagactgaaatcctggaaaaactaaaaaggctcaaccaccccgacattgttaacatatacgattatggccagtacaacgaccgtttctacgaaatcatggagtacgccgagggcggcgctctggacacccttaactcagacggttcttaccgttatcttccgcttccagaagaaaagacagaaggcatctgcaaagagataattaactcttttaaaacctgtcatgaaaaaaatattattcacagagacattaaaccggcgaacatctattatcgaacgttgaaaattgaggagatcgaaggcgtcaagggcgagggaaaaaagacagtttacaaaggcgatgatgttgttatcgctgacttcggaatttcaagcatcatggacgataccgaacaacttcacaaaacccgcaccggttcacgaactacaggatacgccgcgccggaagtgctttccggcatcatcgggccccaaatggattattacgcgcttgggatcactctctgggaactgctcacagggaaagacccgtttacccttgacaacggcaaacgccgcaacgacgcgcatctgatacgcgacaccatcgaggggagaatcgcagacgatattttaaagcaggaaccccagagtagccaaaagatgggaacgccttatacgcggactattggtaatcgaccctga

SEQ ID NO: 11360 - protein, 305 aa, Unknown
  Obtained from environmental sample
  DOMAIN (42)...(301): Protein tyrosine kinase
  misc_feature (1)..(305): Xaa is any amino acid
METKVIDLASGGGTQIIAEGTTGTGANFTGGLLQIHEQVAGWEITSKLGTISGEADIYIAQKDGQKGVVKYYRSVTKPKTEILEKLKRLNHPDIVNIYDYGQYNDRFYEIMEYAEGGALDTLNSDGSYRYLPLPEEKTEGICKEIINSFKTCHEKNIIHRDIKPANIYYRTLKIEEIEGVKGEGKKTVYKGDDVVIADFGISSIMDDTEQLHKTRTGSRTTGYAAPEVLSGIIGPQMDYYALGITLWELLTGKDPFTLDNGKRRNDAHLIRDTIEGRIADDILKQEPQSSQKMGTPYTRTIGNRP

SEQ ID NO: 11361 - DNA, 441 bp, Unknown
  Obtained from environmental sample
  misc_feature (1)..(441): n is a, c, g, or t
ttgaatttcaacttttgtgccgtaaaccgcgtccttaaacgggatttcgatatcgtaacggaggttcgctccctgccttacgcccgacgaacctcccctgcgaaaaccgccgccgaaaaaactctcgaagatactgcccaaaccgccgtctccgaagatatcttcaaaaccacggaaattactccagtcgtggctttgccccataccttcgacgcccgcgtggccgtactgatcataagcggcttttttctgatcatccgcgagaatctcgtaagcctcggtcgcctctttaaatttttcttcagcctgcttgtcgcccgggttcttgtccggatggtattgaatagcgagttttcgatacgccttttttatttcatccttggacgcgttcttttgaacaccaagaacttcgtagtaatcacgttttgccatttttattag

SEQ ID NO: 11362 - protein, 146 aa, Unknown
  Obtained from environmental sample
  misc_feature (1)..(146): Xaa is any amino acid
MNFNFCAVNRVLKRDFDIVTEVRSLPYARRTSPAKTAAEKTLEDTAQTAVSEDIFKTTEITPVVALPHTFDARVAVLIISGFFLIIRENLVSLGRLFKFFFSLLVARVLVRMVLNSEFSIRLFYFILGRVLLNTKNFVVITFCHFY

SEQ ID NO: 11363 - DNA, 792 bp, Unknown
  Obtained from environmental sample
  misc_feature (1)..(792): n is a, c, g, or t
atggacaggctattctcggtgatattaacgttgaccgtcgccgttttcttcaccgcgggcgcggttctttacaagatgggaaagggagatctgctactcgacacgaaagatccggacgcgataaaggcgtcgtttgtcatggaggagcgcaagccgcatgtcaaggaggcggagaaacccaagcccaaacccaagaccgaggagaaaaagaaggcggaggaggtcgtccccgtagaccttacaaagaagccggagccggtcaaagaggaggtgagggaagaggtcaaagaggagcccaagcccgaccccaagccggcgcggcaggtctacggtcttaaaaaagtctactcgcagggcttaggcgccgccggcgatgccggagacgccattgtcggcaaactgggcaacacgttaaacaagggctacgacaccctgaccgccaccgccgacgacctaaagggcagacccggccaagggcagggaggaaccgcccccgtctcctcagccgcctcggtaaccaaatacccgcgcctcaaagacggtttccgcagtatgaaaccgcaatactcaaaagagatgctccaaaaccgggtggagggcgcggtcaaagcgaagctgttaatcgcttcggacggaacagtgaagcaagtggagatactgagcgatattggctacgattcaggcgagatagccaaggcctttttgatgacgctgcaatttgaaccggccatgaagggagatcaggcggtgtctgtctggataccgttttccatacggtttgaattgatatag

SEQ ID NO: 11364 - protein, 263 aa, Unknown
  Obtained from environmental sample
  SIGNAL (1)...(21)
  misc_feature (1)..(263): Xaa is any amino acid
MDRLFSVILTLTVAVFFTAGAVLYKMGKGDLLLDTKDPDAIKASFVMEERKPHVKEAEKPKPKPKTEEKKKAEEVVPVDLTKKPEPVKEEVREEVKEEPKPDPKPARQVYGLKKVYSQGLGAAGDAGDAIVGKLGNTLNKGYDTLTATADDLKGRPGQGQGGTAPVSSAASVTKYPRLKDGFRSMKPQYSKEMLQNRVEGAVKAKLLIASDGTVKQVEILSDIGYDSGEIAKAFLMTLQFEPAMKGDQAVSVWIPFSIRFELI

SEQ ID NO: 11365 - DNA, 636 bp, Unknown
  Obtained from environmental sample
  misc_feature (1)..(636): n is a, c, g, or t
ttgagcggagctaccgcagcagggaaactttatgaacggagttcaagtaaacggagtttgcacgtgagaggtattgaatataagggtttaagccgcatcgaagggccggtggttgttaccgcaagaagcaggaacgtcggctttaacgaggtagtggcgattttcgacaaggacaaaggccgcaggcttggccgggtagtggacttgagcgaggactggacggcggttcaggtttttggaagcaccaccggcctttccgccgatcacagccgcgtggagtttttaggggagccgatgaaactccgggttgggcccgggcttcttggcaggatcttcaacggccttggggagcctgtagacggctacggggatattttttcctcaacctgcctggacgtgaacgggcttcccatcaacccctatgcccgcacttacccgcgggacttcattcaaaccggcatatccgctatcgacggcatgaacacccttatcaggggccagaaactccccatcttttcaggcaacgggcttccccataaccggcttgccgcccagatcgtgcgtcaggcaaagatcctgcatggttctagtggcgaagctgagcgcttgtcatcatattgtctcggccgatcctga

SEQ ID NO: 11366 - protein, 211 aa, Unknown
  Obtained from environmental sample
  DOMAIN (30)...(96): ATP synthase alpha/beta family, beta-barrel domain
  misc_feature (1)..(211): Xaa is any amino acid
MSGATAAGKLYERSSSKRSLHVRGIEYKGLSRIEGPVVVTARSRNVGFNEVVAIFDKDKGRRLGRVVDLSEDWTAVQVFGSTTGLSADHSRVEFLGEPMKLRVGPGLLGRIFNGLGEPVDGYGDIFSSTCLDVNGLPINPYARTYPRDFIQTGISAIDGMNTLIRGQKLPIFSGNGLPHNRLAAQIVRQAKILHGSSGEAERLSSYCLGRS

SEQ ID NO: 11367 - DNA, 597 bp, Unknown
  Obtained from environmental sample
  misc_feature (1)..(597): n is a, c, g, or t
ttgcaggcaaggcgattgcttgcaaataacaatgaacaaatagtaaataaaaaaggaaataggaatttagatttattcgctgcggaggtttttcctgcttttgacaatacgcgaaaaagcgtaatcgcgccgcaagtaaagaaagcggttaaaaacgataacgatttatgggaagaatataacgctttaggatttttaaggaatactcacccacttgcgttgtggaaagatgacgtattggcggtaaaacatcgggttaaggctttatatattggagaatatgtcgggcggaatgttaaaatgatcggctggcctgttacacaaaaggacgtatggaccagggacggtttatctatgtgttttttaagtttggaagacgaaacggctttgtatgagacagttgtttttccgcaggtttatgagcgttacaatagactgctttttgaccagcagcccttgcttgtttttggacttgtttcgaacgacgaaggggctgtttctcttgaaattaacaggatcgaggcattagggaaacaggctgcggaggagatacagaactctattaaggttaatgctttaggatttacggcagattga

SEQ ID NO: 11368 - protein, 198 aa, Unknown
  Obtained from environmental sample
  DOMAIN (99)...(176): OB-fold nucleic acid binding domain
  misc_feature (1)..(198): Xaa is any amino acid
MQARRLLANNNEQIVNKKGNRNLDLFAAEVFPAFDNTRKSVIAPQVKKAVKNDNDLWEEYNALGFLRNTHPLALWKDDVLAVKHRVKALYIGEYVGRNVKMIGWPVTQKDVWTRDGLSMCFLSLEDETALYETVVFPQVYERYNRLLFDQQPLLVFGLVSNDEGAVSLEINRIEALGKQAAEEIQNSIKVNALGFTAD

SEQ ID NO: 11369 - DNA, 576 bp, Unknown
  Obtained from environmental sample
  misc_feature (1)..(576): n is a, c, g, or t
atgaacctatttaaaatattcatcagcgcttttttaattgataacgtggttttgatgcggtttatagccctctgtccctttatcgggatgagtaccgatgaggacaaatccataggaatgggcttggcggtcacgtttgttacggtgcttgcgacctgcgtcacctggccggtttataaattcattctggaacccatgggtttggtgtttcttcagttgctggtttttattctggtcatcgcgtctctggttcaactggtggagttttaccttaaaaaatccgcgcccgctctgtacaacgccatgggtatttatcttgccttaattacgaccaactgcgccattttggcggtaaccttggacaacatttccaaggggtataattttgccgaatctttggcttacgccatcggcattgcccttggctttcttctttccatgctgcttttagcgggacttaggcggaggctcaggacaagcccgattccggcatttcttaaagggacgcccatactttttgtgtgcgcctgccttctttcgcttgccttcgcgggtttctcaggtttggtaaagtag

SEQ ID NO: 11370 - protein, 191 aa, Unknown
  Obtained from environmental sample
  DOMAIN (2)...(191): Rnf-Nqr subunit, membrane protein
  misc_feature (1)..(191): Xaa is any amino acid
MNLFKIFISAFLIDNVVLMRFIALCPFIGMSTDEDKSIGMGLAVTFVTVLATCVTWPVYKFILEPMGLVFLQLLVFILVIASLVQLVEFYLKKSAPALYNAMGIYLALITTNCAILAVTLDNISKGYNFAESLAYAIGIALGFLLSMLLLAGLRRRLRTSPIPAFLKGTPILFVCACLLSLAFAGFSGLVK

SEQ ID NO: 11371 - DNA, 300 bp, Unknown
  Obtained from environmental sample
  misc_feature (1)..(300): n is a, c, g, or t
gtggtcaactgtatcatcatgggcagggtagagggctttgcgtccanagcgccgcttccggacgccatagccgactcctttggcatggggctgggctatacctgggtactactaggcatttcttttattagggagctgcttggctccggtacaattctgggtgcccaggtgttgcctgacagttatgtgcctatactctttttcattatgcctccgggcggctttttggtgtttgccttgtttatcagccttaacctctttataaaatcaaagctaaagagcgaagggagcccttcatga

SEQ ID NO: 11372 - protein, 99 aa, Unknown
  Obtained from environmental sample
  DOMAIN (1)...(83): Rnf-Nqr subunit, membrane protein
  misc_feature (1)..(99): Xaa is any amino acid
MVNCIIMGRVEGFASXAPLPDAIADSFGMGLGYTWVLLGISFIRELLGSGTILGAQVLPDSYVPILFFIMPPGGFLVFALFISLNLFIKSKLKSEGSPS

SEQ ID NO: 11373 - DNA, 858 bp, Unknown
  Obtained from environmental sample
  misc_feature (1)..(858): n is a, c, g, or t
atgggcgatgattacgcggacgaacaaggctggctctntgaatcagacaccgagcgggcaaaaagacgcaatgactctattgagttctaccagcataaaaacaaatggacaaaccgcctcatagccggagacagcctcgtcataatgaattccatgcttgaaaaagaaggaatggcgggacaagtacaaatggtctacatagacccgccctacggcataaaatacggctccaatttccagccctttgtgaacaagcgagacgtaaaagataaaaaagacgaagacctgacaacagaacctgaaatgataaaagcgttccgcgacacatgggaattgggcatacattcgtatttaacatatttgcgggacaggcttttgcttgcaaaggaattactttctgatactggtagtgtttttgtgcagataggagatgaaaatgtacatcatgtacgtgaaatttgcgatgaagtgtttatcaatgaaaactttgttacattaataacggttaggaaaactggtggatttagtagttcaaaactggattctgtatgtgattatataatatggtatgcaaaagatatatcaaaactcaaatatcatgatctctttcttaacaagacagacaaagatcggccatctatatataatgctttgcaatttagtgatgatactattcgtaggatgactagagaagaatttgaaaacaattctattatttctaatgatgcaaaaattgtagcatttgataatttatcatctatgggaaaagcaaatattgaacaaccatttgattttaatggaaaaatatattttccaagtacaaatactcattggaaatgtaaatatccagaaggttag

SEQ ID NO: 11374 - protein, 285 aa, Unknown
  Obtained from environmental sample
  DOMAIN (62)...(260): DNA methylase
  misc_feature (1)..(285): Xaa is any amino acid
MGDDYADEQGWLXESDTERAKRRNDSIEFYQHKNKWTNRLIAGDSLVIMNSMLEKEGMAGQVQMVYIDPPYGIKYGSNFQPFVNKRDVKDKKDEDLTTEPEMIKAFRDTWELGIHSYLTYLRDRLLLAKELLSDTGSVFVQIGDENVHHVREICDEVFINENFVTLITVRKTGGFSSSKLDSVCDYIIWYAKDISKLKYHDLFLNKTDKDRPSIYNALQFSDDTIRRMTREEFENNSIISNDAKIVAFDNLSSMGKANIEQPFDFNGKIYFPSTNTHWKCKYPEG

SEQ ID NO: 11375 - DNA, 942 bp, Unknown
  Obtained from environmental sample
  misc_feature (1)..(942): n is a, c, g, or t
atgatgcgaggcctgagccgacagccgataatccgcggcaccgcgcagaaccccgacaccttcttccaggccagggaggcaaacacccccttctacgtcaagtgccccgacatagtccaagaggagatggacaagttcgccaagctgacgggccgccagtaccgcctgtatgaataccacggcgcgcccgacgcagaccgcgtggtaatcagcatgggctccagcgtggacaccatacacgagtacattgaatgggccaccgcaaagggcgaaaaagtgggcgtgctgaaggttcgcctcttccgcccattctcgatcaagcactttgtgaaggccctgccggccagcgtcaagaagatagccgtgctggaccgcgtgaaggaagccggcgcgcttggcgacccgctgtacatggatgtcgtcgcggcgcttagggaggccagggaagaaggtctcaccacccttgaccccaaggtccttgccggccgctatggtctttccagcaaggagttcacgcccgcctgcgtccgcgccgtctttgaaaacctgtccagcgcgaagcccgtcaaccactttgtcgtgggcatcaacgacgacgtgagcaagaagagcctgagcgttgaccccgagttcgacatagagcattcggacgtgaaacgcgccatgttctttggccttggctccgacggaaccgtcggcgccaacaaggactccatcaagataatcgccgacgaggcaggtctctgcggtcagggctactacgtctatgactccaagaaggccggcgccctcacggtcagccacctgcgcttcggccccaaccagattcgctccgcctacctgattcggaaggccaacttcatcgcctgccaccagactgagttcatccaccaatacaacatgctggggcttcgcgtccgaacgcgccgcggttccttttga

SEQ ID NO: 11376 - protein, 313 aa, Unknown
  Obtained from environmental sample
  DOMAIN (227)...(312): Pyruvate ferredoxin/flavodoxin oxidoreductase
  misc_feature (1)..(313): Xaa is any amino acid
MMRGLSRQPIIRGTAQNPDTFFQAREANTPFYVKCPDIVQEEMDKFAKLTGRQYRLYEYHGAPDADRVVISMGSSVDTIHEYIEWATAKGEKVGVLKVRLFRPFSIKHFVKALPASVKKIAVLDRVKEAGALGDPLYMDVVAALREAREEGLTTLDPKVLAGRYGLSSKEFTPACVRAVFENLSSAKPVNHFVVGINDDVSKKSLSVDPEFDIEHSDVKRAMFFGLGSDGTVGANKDSIKIIADEAGLCGQGYYVYDSKKAGALTVSHLRFGPNQIRSAYLIRKANFIACHQTEFIHQYNMLGLRVRTRRGSF

SEQ ID NO: 11377 - DNA, 957 bp, Unknown
  Obtained from environmental sample
  misc_feature (1)..(957): n is a, c, g, or t
gtggcgcccgccacgttcaagtccgtggactacaagggcancgagtacaaggggcagaagtacacgctccaggtggcgcccgaagattgctccggctgcggcatctgcgtggccgcctgcccatcaaaggacaaggccgaccccaagcgaaaggccatcaacatgtcccatctggcgcccctgcgcgagtccgaggccaagaacttcgagttcttcctcaatctgcccgaagttgaccgcaccaccgccaagcaggacgtcaagggcagccagttcctgaggccgctgttcgagttcagcggcgcctgcgccggatgcggcgagacgccctacgtcaagctgctcacgcagctcttcggcgaccgcacactcatagccaacgccaccggctgttcgtccatctatggcggcaacctgcccaccacgcccttctgcgtggacgaggcagggcgcggcccgacgtggagcaacagcctgtttgaagacaacgcggagttcggctatggcatgcgcctggccgtggacgagcacaagcagcaggccatcggcctgttgggcaagctctccgcccagataggcgacgaccttgtgtccaagctgtgcaaagcagaccagaccacagaggccggcatacgcgaacagcgcgagcgcgtcgcggcattgaagaagaagctgcagtccatcgggacgccggaggccaagtggctggagctcatcgccgattacctagtgaagaagagcgtctggatagtcggcggcgacggctgggcctacgacatcggctacggcggtctggaccacgttatagccgcaggccgcgacgtgaacctgctggtgctggacaccgaggtctattccaacacaggcggccaggcgtccaagtcaacgccgatcggcgcaaacgcactgttcgccaaggccggcaagcacctgcccaagaaggacctcggcatatag

SEQ ID NO: 11378 - protein, 318 aa, Unknown
  Obtained from environmental sample
  DOMAIN (23)...(46): 4Fe-4S binding domain
  misc_feature (1)..(318): Xaa is any amino acid
MAPATFKSVDYKGXEYKGQKYTLQVAPEDCSGCGICVAACPSKDKADPKRKAINMSHLAPLRESEAKNFEFFLNLPEVDRTTAKQDVKGSQFLRPLFEFSGACAGCGETPYVKLLTQLFGDRTLIANATGCSSIYGGNLPTTPFCVDEAGRGPTWSNSLFEDNAEFGYGMRLAVDEHKQQAIGLLGKLSAQIGDDLVSKLCKADQTTEAGIREQRERVAALKKKLQSIGTPEAKWLELIADYLVKKSVWIVGGDGWAYDIGYGGLDHVIAAGRDVNLLVLDTEVYSNTGGQASKSTPIGANALFAKAGKHLPKKDLGI

SEQ ID NO: 11379 - DNA, 495 bp, Unknown
  Obtained from environmental sample
  misc_feature (1)..(495): n is a, c, g, or t
atgatcagatcggccgagggcacgagcaagttctgcggcagctgcggcggctcaatgtccgtcatccggccgcccgacgcgggttcctctttgtcttccgcgccgtcaacgccggtcaaagaaacaccgcctgctgctcctccatctgtctcttctccatccgccccttcgtcctcggcgacagtaattgtttcgcttccttcggaaaaaattcttctgtgccaccttgacggctggaacatggaaattgctgacggcaatattcttggcaggacaaacggcccgcacgctgcggcgctcggcaaattccccgtgatttcgtcaaatcacgcgaaagttacgcgggaaaataacgaatggtttattacggatttaaaatccacaaataaaacttttgttaacggcgtaaaattggagcctaatgttccggtaaaaataaaacagaatgacgtagttttactagccaatgttacatttactgtgagggacgcgtga

SEQ ID NO: 11380 - protein, 164 aa, Unknown
  Obtained from environmental sample
  DOMAIN (87)...(155): FHA domain
  misc_feature (1)..(164): Xaa is any amino acid
MIRSAEGTSKFCGSCGGSMSVIRPPDAGSSLSSAPSTPVKETPPAAPPSVSSPSAPSSSATVIVSLPSEKILLCHLDGWNMEIADGNILGRTNGPHAAALGKFPVISSNHAKVTRENNEWFITDLKSTNKTFVNGVKLEPNVPVKIKQNDVVLLANVTFTVRDA

SEQ ID NO: 11381 - DNA, 909 bp, Unknown
  Obtained from environmental sample
  misc_feature (1)..(909): n is a, c, g, or t
gtgatttacagtcctgtttccctgaccacgaaaaaccccgcgctccaggttgtcatctcaattgtgcaaaaggccctgcacaacggttctcttggttatatatccggcctgcataagctgggagaaaatgaacaccggcggcataaactgtttatgcgcctgaccgaagaagaaaaagcgtatatacgcaataatccagcggtatcggttgccgccgaatacgacaattacccggttagtttttacaataaatatgaaaacaaatggcagggaatcgcccatgatatattgagagagctggaatcgcttaccggtttaacttttaaaatagccaatgataaaaacacggaatggcctgaactgctgagttcgctggaaagcggcgaaacatccatggtaaccgagcttttgttttcggaagaccgcattggattatttctgtggcccaggtccgtgattatgacggataattacgcgcttatttccaaatcggactacccaaacgtcagtatcaacgacatcctgcgcattaaagtcgggttgatcaaaaataccgcgtatgcttcgttattcaacacctggttttcggaccataaaaataacgtgctatacgataacaccgacgccgcgtttgacgctttggaaagcggcgaagttgatatagtaatggcgaatttaagccagcttctcatgctgaccaattactatgagcgtacgggctacaaggcaaattttgtgtttgattttacttctgaatctacttttgggtttaaccggaacgagacagttctgtgctccattgtggacaaggcgctccgccttgttgataccagggttatttccggacagtggatgcgcaagacttatgattacagtgcaaaactggcgcgttcgcagcgtccgtggtaa

SEQ ID NO: 11382 - protein, 302 aa, Unknown
  Obtained from environmental sample
  DOMAIN (68)...(287): Bacterial extracellular solute-binding proteins, family 3
  misc_feature (1)..(302): Xaa is any amino acid
MIYSPVSLTTKNPALQVVISIVQKALHNGSLGYISGLHKLGENEHRRHKLFMRLTEEEKAYIRNNPAVSVAAEYDNYPVSFYNKYENKWQGIAHDILRELESLTGLTFKIANDKNTEWPELLSSLESGETSMVTELLFSEDRIGLFLWPRSVIMTDNYALISKSDYPNVSINDILRIKVGLIKNTAYASLFNTWFSDHKNNVLYDNTDAAFDALESGEVDIVMANLSQLLMLTNYYERTGYKANFVFDFTSESTFGFNRNETVLCSIVDKALRLVDTRVISGQWMRKTYDYSAKLARSQRPW

SEQ ID NO: 11383 - DNA, 702 bp, Unknown
  Obtained from environmental sample
  misc_feature (1)..(702): n is a, c, g, or t
gtgccgcacaccgatcgcacttatggctatgtagctcggaaggataagaatgatggtaccagagatacaatgacagttactgatggcatggctccttcaactccaggtgtacaaggtcgcttgggcttgaaagttccggcatcttgggcaggcgaaaaagcaaacttgtcgcttggcattgccggtctttatgccaaaaacgaaggtgctaatccagatggtaaagatggagaacgttatgaaagacccgaaccttctcatgcgttcggtgtggatttatcaattccagtaatagatattttaacccttacgggtgaattcttttctggacaaaacctgagccgttatggtgatggaagtttaaagcgttctcgcgcttatagcgatgatggcggcatacagtccattgcttggtggggcggtttggcagctaaattgccttccgatgtctctgccggagctggtattggatcagaaagccttgacaagaaaagcagagcagatggagcaatagaaagcaatatgttcatattcgcaaacctagcttataacttcacttctgccgcaaaagtcacatttgagtacttaacattctcaacagactacagcgttgccaacaaagatgacaaaaccaagttcgacaaaagcgacaacaggtctctagatcgctttgaattgaacttcagatacgatttcaagtag

SEQ ID NO: 11384 - protein, 233 aa, Unknown
  Obtained from environmental sample
  misc_feature (1)..(233): Xaa is any amino acid
MPHTDRTYGYVARKDKNDGTRDTMTVTDGMAPSTPGVQGRLGLKVPASWAGEKANLSLGIAGLYAKNEGANPDGKDGERYERPEPSHAFGVDLSIPVIDILTLTGEFFSGQNLSRYGDGSLKRSRAYSDDGGIQSIAWWGGLAAKLPSDVSAGAGIGSESLDKKSRADGAIESNMFIFANLAYNFTSAAKVTFEYLTFSTDYSVANKDDKTKFDKSDNRSLDRFELNFRYDFK

SEQ ID NO: 11385 - DNA, 567 bp, Unknown
  Obtained from environmental sample
  misc_feature (1)..(567): n is a, c, g, or t
ttgaaacgcgcatacaaccaaacgcaggtgctatccgagcttattgcggatatgagccttttgaccaaaattgatgagcacgcggagagccttaaaatgggcaaggtgaatgtgaatgagcttctccaaaatataaaaaccgcttctgacaaagctcttgaagaaaaaaatatccagttcaatgcgaatttaccggaaaatttattcatatttggcaatgagagccttatatattccattttcaggaatttaaccgataatgttatacgccacgcgggcgagaatgtgagcattaatataagaactttgccagaattgaaagatggaagggtttattttgtgttttccgacactggaaagggtgttggggaaaatgttatgctggagcgtttgtttgagcgtttttaccgcgtggaagaggggcgttcccgcgatacgggcggttcggggcttgggctttccattgtgaaaaacgcggttcttttccacggcggcaccataacggtgcgcactggaggggagaatatgggtttggaatttttgttttcactcaaaaaaactgtctga

SEQ ID NO: 11386 - protein, 188 aa, Unknown
  Obtained from environmental sample
  DOMAIN (72)...(187): Histidine kinase-, DNA gyrase B-, and HSP90-like ATPase
  misc_feature (1)..(188): Xaa is any amino acid
MKRAYNQTQVLSELIADMSLLTKIDEHAESLKMGKVNVNELLQNIKTASDKALEEKNIQFNANLPENLFIFGNESLIYSIFRNLTDNVIRHAGENVSINIRTLPELKDGRVYFVFSDTGKGVGENVMLERLFERFYRVEEGRSRDTGGSGLGLSIVKNAVLFHGGTITVRTGGENMGLEFLFSLKKTV

SEQ ID NO: 11387 - DNA, 411 bp, Unknown
  Obtained from environmental sample
  misc_feature (1)..(411): n is a, c, g, or t
atgaaagttttgatagacactaatgttgttttggatgtgttgataaacaacgccctctttttcacccattccaaaaaaatatttgattttgctgaacaaaagcgaattaccggattcatttccgcttctgcaattaccgacattttctatatagcccaaaaaaagcttggtaaaaaagccataaaagaagctataaaaaaagtgttgaaagttttttacccggctaccataaccgacaataatatctatcaggcgcttgatttggaatgggatgactttgaagactctgttcaatatatcgttggggaaggtctttctgttgggtatatagttaccagaaacactaaagattttgcttccggttctattcctgcggtaactcctgaacagtttataagaatcattacctaa

SEQ ID NO: 11388 - protein, 136 aa, Unknown
  Obtained from environmental sample
  misc_feature (1)..(136): Xaa is any amino acid
MKVLIDTNVVLDVLINNALFFTHSKKIFDFAEQKRITGFISASAITDIFYIAQKKLGKKAIKEAIKKVLKVFYPATITDNNIYQALDLEWDDFEDSVQYIVGEGLSVGYIVTRNTKDFASGSIPAVTPEQFIRIIT

SEQ ID NO: 11389 - DNA, 564 bp, Unknown
  Obtained from environmental sample
  misc_feature (1)..(564): n is a, c, g, or t
atgcgcaaactcatactgactacggcggcggtcgcggcggctattggattggcggggtgctcgaaaaaacctgcgctggaatccacgcccgctacactgacggtggcagaaacggactccgcaacacaaacggcggcggaaacaaactccgcagagacagactctgttaccggtacgcttaccgataggagagacggtaagaaatatcggacagtggtgatcggcggtgagaggtggatggcggagaatctgaattatcagacgaatcgttccgggtgttacaaagaagttgattctaattgcgacaaatacggcagattgtacgcttgggatgcggcgatgacggcttgccctgccgggtatcatttggcgtcagataaagattgggatgatttggttgctacggtaggaggtaaagtgcgttatgtagtcaaaagtaccgatacgaaccgtgtttgggagggcacgggtaagaaattgaaggcgaaaagcggctggaatgatttttgcggcgttgatggtcatgagcgctgcaaaagcggtaacggtacggatgactactga

SEQ ID NO: 11390 - protein, 187 aa, Unknown
  Obtained from environmental sample
  SIGNAL (1)...(25)
  misc_feature (1)..(187): Xaa is any amino acid
MRKLILTTAAVAAAIGLAGCSKKPALESTPATLTVAETDSATQTAAETNSAETDSVTGTLTDRRDGKKYRTVVIGGERWMAENLNYQTNRSGCYKEVDSNCDKYGRLYAWDAAMTACPAGYHLASDKDWDDLVATVGGKVRYVVKSTDTNRVWEGTGKKLKAKSGWNDFCGVDGHERCKSGNGTDDY

SEQ ID NO: 11391 - DNA, 891 bp, Unknown
  Obtained from environmental sample
  misc_feature (1)..(891): n is a, c, g, or t
atgggcagtaaaacaattatattnttatntgcggttattttttatttttccggtttattatacgcgcagcagtcctcgcntgaatcacagccggggtattatgttgataaaagcgccggggagccggtttttaaacaacgtcttgtctgggatgaagaagaatatgttttatactatgaggtgacaattcaaattttttccggacagtacagggattatcgtgttgaaaaaaccaagaataattttattgaaatttctctgaacccgggaaggtatcgatacagggtaactccctacgatttactggaacgcagaagtgaaagctcggattgggaagaatttaccattactacggcttttcagccggaaattattaaaattgtccctgaatttttttacatggatcaaaataagagcagggtattgatagtaacggggaataatattttaccggattccgttatttatctaagaaatgaaaataatgaattattacccattgagaaagttataaccgacaatacaagcgtaaagcttacctttgatgatgatacattaattcccggaacttatgaggtttatataaaaaatcccggcggattggatacatctttaggcggtttttttgtcggttatcaaaaatggcttgaaacattcattaaagtaggttttaatcctgtaattccgataggaggagagttgatggatatgtttggaccatatttatattatccgggtttaactattaggctggaatcgcttacttcagaacgctcttcttttaaggcgggaatggaatttgcggcgtcgatttattatttgcataaggatttttcaattaggccaatatccggtgagtatgatgctttctccgatttcggcgtattttaa

SEQ ID NO: 11392 - protein, 296 aa, Unknown
  Obtained from environmental sample
  SIGNAL (1)...(22)
  misc_feature (1)..(296): Xaa is any amino acid
MGSKTIIXLXAVIFYFSGLLYAQQSSXESQPGYYVDKSAGEPVFKQRLVWDEEEYVLYYEVTIQIFSGQYRDYRVEKTKNNFIEISLNPGRYRYRVTPYDLLERRSESSDWEEFTITTAFQPEIIKIVPEFFYMDQNKSRVLIVTGNNILPDSVIYLRNENNELLPIEKVITDNTSVKLTFDDDTLIPGTYEVYIKNPGGLDTSLGGFFVGYQKWLETFIKVGFNPVIPIGGELMDMFGPYLYYPGLTIRLESLTSERSSFKAGMEFAASIYYLHKDFSIRPISGEYDAFSDFGVF

SEQ ID NO: 11393 - DNA, 744 bp, Unknown
  Obtained from environmental sample
  misc_feature (1)..(744): n is a, c, g, or t
ttgatcgcgggtgtcgggtgggagagcgctttcaagcccgccgccacgagggcgcttataaacgagataaacagcggtgtcgcggttgtaaactggttcgggcacggatcgtccagccagatagcggacgagttgcttttctccagagagaatgtcgcggcgcttgaaaataggaagcgctacccgctgttctccatattttcctgccaggtaggcaagtacgatcagcctggtgaagagcctttggccgccacgctggtcaagcggccgcagggcggcggaatagccgttgtcgccgccgcccgcgacgtttactccggccccaacgaggatttggctataccgtttttctctgagcttttcggccccggagaccacgcggagctgtcgataggcggcgcccttgtaaaggctaaggctcgttccgcgggataccaagataggtactacgtgctttttggcgacccgtcgatcaagattataggccgcggaagcggtgtccaggagttcagaattacggataccgccggcgtgcctgacgatacgctaaaagcgttgcaacgggttacggcaaggggaaaggtgagcggtgtgcgtgagggcgacagcgcctacgccgccgttacgctcttcaatccgccgcaagattcggtgcgccggaaggacggcggcaggttcgatacgatctcgacgtacagtctgcccggaagcccggtcttcagcgcgactaaagtacgcgtgtga

SEQ ID NO: 11394 - protein, 247 aa, Unknown
  Obtained from environmental sample
  misc_feature (1)..(247): Xaa is any amino acid
MIAGVGWESAFKPAATRALINEINSGVAVVNWFGHGSSSQIADELLFSRENVAALENRKRYPLFSIFSCQVGKYDQPGEEPLAATLVKRPQGGGIAVVAAARDVYSGPNEDLAIPFFSELFGPGDHAELSIGGALVKAKARSAGYQDRYYVLFGDPSIKIIGRGSGVQEFRITDTAGVPDDTLKALQRVTARGKVSGVREGDSAYAAVTLFNPPQDSVRRKDGGRFDTISTYSLPGSPVFSATKVRV

SEQ ID NO: 11395 - DNA, 339 bp, Unknown
  Obtained from environmental sample
  misc_feature (1)..(339): n is a, c, g, or t
atgggtgaaaacctcggcggcgcggaggcgatgggcagaattaaccgcgaaaaggcggggcttatctacgattaccttgaaagttcaaagatgttttattcgcctgtggacaaacaataccgcagtttgatgaatatcccgtttattcccgccgaaaaggacgaggcaaagaaggccgagatcgagaaacgctttgtcaaggaagcggctgaacagaggcttgtgaacctcgcggggcacaggcttgtcggcggtatgagagcgagcgtctacaacgccatgcccattgacggagtgaaggcgttaatcagttttatgaagaagtttgagaaccaataa

SEQ ID NO: 11396 - protein, 112 aa, Unknown
  Obtained from environmental sample
  misc_feature (1)..(112): Xaa is any amino acid
MGENLGGAEAMGRINREKAGLIYDYLESSKMFYSPVDKQYRSLMNIPFIPAEKDEAKKAEIEKRFVKEAAEQRLVNLAGHRLVGGMRASVYNAMPIDGVKALISFMKKFENQ

SEQ ID NO: 11397 - DNA, 609 bp, Unknown
  Obtained from environmental sample
  misc_feature (1)..(609): n is a, c, g, or t
ttgagaaccaataaggcaaaaggaagaaatatgtttcgtatacagacattgaacaagatttcaccgctggggctggagcttttcccgcgtgataaatacgaggttgcaagcgatattccgaacccggacgctgttcttgtgcgcagtgcggacatgaacagcgcggatattcccgcttctgtccttgcgattgcaagggcgggcgcggggtacaacaatattcctgtccagaagtgcagtgagaagggtgtggttgtgtttaatactcccggcgctaacgctaacgctgtcaaagagcttactcttgcggctctgcttatcgcttcaagagacattgtcggcggcattaactggactgcctcagttgcggacaaagccgatgtctctgatttggtagaaaaagaaaagtcaaagtttacggggcccgaactaaagggcaagacgctcggcgtggtggggctcggcgcaatcggcgtaatggtcgccaacgacgctattgccctcggcatgaacgttatcggctacgatccctacatctcggtagacgccgcgtggaatctttcgcgcgaaagtgtccggcgccgacactatggaaagccttncttatga

SEQ ID NO: 11398 - protein, 202 aa, Unknown
  Obtained from environmental sample
  DOMAIN (102)...(198): D-isomer specific 2-hydroxyacid dehydrogenase, NAD binding domain
  misc_feature (1)..(202): Xaa is any amino acid
MRTNKAKGRNMFRIQTLNKISPLGLELFPRDKYEVASDIPNPDAVLVRSADMNSADIPASVLAIARAGAGYNNIPVQKCSEKGVVVFNTPGANANAVKELTLAALLIASRDIVGGINWTASVADKADVSDLVEKEKSKFTGPELKGKTLGVVGLGAIGVMVANDAIALGMNVIGYDPYISVDAAWNLSRESVRRRHYGKPXL

SEQ ID NO: 11399 - DNA, 504 bp, Unknown
  Obtained from environmental sample
  misc_feature (1)..(504): n is a, c, g, or t
gtgcaggctattctggaaaatgccgataggtttaacgttccggtgtcgcttgcctntgcgttaagctgggaagaaagcaagtttaacccaaacgcggtaaaccgtaataaccgtgacggaagtattgatcgcggattgtttcagcttaataacaaatcatttcccaatcttgatgttcagtattattttgatattgaaaaaaacgcgtactacggtattgcccatatgcgttattgtcttaattcaggagacaatgaagttgccgctcttgcgatgtacaatgccggtgcaggaaaagtaagatctaccggtgcgccggaagtaacattgaattacatcagcaggattttggaaaacaggagaagaatagaaagccgtttccatgcgcgtcttataaaagaagaagaaacacgcattgctaaagccatccctgttattgaaagtgaagaaattgtttctcagccttattataaccgcaccttaattattgcttctccgctgtaa

SEQ ID NO: 11400 - protein, 167 aa, Unknown
  Obtained from environmental sample
  DOMAIN (2)...(116): Transglycosylase SLT domain
  misc_feature (1)..(167): Xaa is any amino acid
MQAILENADRFNVPVSLAXALSWEESKFNPNAVNRNNRDGSIDRGLFQLNNKSFPNLDVQYYFDIEKNAYYGIAHMRYCLNSGDNEVAALAMYNAGAGKVRSTGAPEVTLNYISRILENRRRIESRFHARLIKEEETRIAKAIPVIESEEIVSQPYYNRTLIIASPL

SEQ ID NO: 11401 - DNA, 408 bp, Unknown
  Obtained from environmental sample
  misc_feature (1)..(408): n is a, c, g, or t
gtggagtatctggcaagccttttggacgacgcgagaatcatctaccaggcacctgccggaggccatggtgtttttgttgacgcaagatcgatgtttccccatattccatataacgaatttccggcgcaggcgctggcggtggagctgtacaagggagcgggagtccgctcgtgcgacatcggctcgtacatgctcggcaacgaccctgacaccggcaagcaattgaaatcaacctttgagttcactcgccttgcggtgccacgccgcgtttacacccaggcccatttcgatcttattgccgaggcgttaatcgaaattaaaaagcgtgcggataaagtgaagggttacaggattacctgggagcctccggtactgcggcactttcaggcgcatcttgagccggtatga

SEQ ID NO: 11402 - protein, 135 aa, Unknown
  Obtained from environmental sample
  misc_feature (1)..(135): Xaa is any amino acid
MEYLASLLDDARIIYQAPAGGHGVFVDARSMFPHIPYNEFPAQALAVELYKGAGVRSCDIGSYMLGNDPDTGKQLKSTFEFTRLAVPRRVYTQAHFDLIAEALIEIKKRADKVKGYRITWEPPVLRHFQAHLEPV

SEQ ID NO: 11403 - DNA, 432 bp, Unknown
  Obtained from environmental sample
  misc_feature (1)..(432): n is a, c, g, or t
ttgaagctgcaaactatccataatcctcccgaaaacgcttttggaattcacggtgcctctgtcgccgattccccaacttctcgaagcggtgattttgtcatccacaaaactattattcattgtacaaccgcccctggagagcccctaatggataaatgtaaatccaatcttaaaaatggctatttaccgcttatcatcactatctttgaccgtgtaaaaaccgcatgtgatttagccgctgactcaggcatatctgatagaattgaagtatgggacatacaacaatttttatcaacgaatattaacgaacactgccaatttgatgaaaaaaaccggaatgtaaaattagcggatatcatagaaaattacaatcgtattattagcgagaaagaaaccgatcccagtttaagaatagaatttgaaacaaaatga

SEQ ID NO: 11404 - protein, 143 aa, Unknown
  Obtained from environmental sample
  misc_feature (1)..(143): Xaa is any amino acid
MKLQTIHNPPENAFGIHGASVADSPTSRSGDFVIHKTIIHCTTAPGEPLMDKCKSNLKNGYLPLIITIFDRVKTACDLAADSGISDRIEVWDIQQFLSTNINEHCQFDEKNRNVKLADIIENYNRIISEKETDPSLRIEFETK

SEQ ID NO: 11405 - DNA, 864 bp, Unknown
  Obtained from environmental sample
  misc_feature (1)..(864): n is a, c, g, or t
gtggacaacccggacacttgggcggactcagcgcaggcgcacaaagacgcctatgccgcttttgacatgctcatgccctggccggttggacgctacggcgacaattatgaatccacccggaactggatgaataataatttcccggccatgaaaaccttntgcgaggcgaacaaaagaagctgggcgggtaataagcctattaatatcatggggggtatttatacgggcggcggatggacaaacctgggcaacccaggaggtcctaacagtccccccaagagtaaagggcagcccatgtggaaccagatatacctgttgctgggcggtagttataaaccggacactttctatatttgtatgtttgacgaatacgatgaatccacagccattatgaaagcggggagcgactactttgatatcccgacggatcaatggttcctgacgctttcgaccgacggctggtggctgtcgaacgactactatttgcgggtggcgggcgaaggcatcaaggttattaaaggccaggtcacggcggaacgagagatcaatatcccccattctttaggcccgctctactatcgcaacagctttgaaaagcgggacggatgggagaacttgaaaaatgtgtcaccgcagcaacaggcgcaggatgaggagattgagggcgtccggaaaaaagtacccgacttacaactcgacccctgcctcaataatcctggccggctgaccaataaaggttccggcagcgtgacgctgacgactaacgcaattgtaaaaacacccggcaggaacggcgggttcgtcttccgactcgcgggtaacgggaacggcgctgcgtactacaagattggcgatgtaaaataa

SEQ ID NO: 11406 - protein, 287 aa, Unknown
  Obtained from environmental sample
  misc_feature (1)..(287): Xaa is any amino acid
MDNPDTWADSAQAHKDAYAAFDMLMPWPVGRYGDNYESTRNWMNNNFPAMKTXCEANKRSWAGNKPINIMGGIYTGGGWTNLGNPGGPNSPPKSKGQPMWNQIYLLLGGSYKPDTFYICMFDEYDESTAIMKAGSDYFDIPTDQWFLTLSTDGWWLSNDYYLRVAGEGIKVIKGQVTAEREINIPHSLGPLYYRNSFEKRDGWENLKNVSPQQQAQDEEIEGVRKKVPDLQLDPCLNNPGRLTNKGSGSVTLTTNAIVKTPGRNGGFVFRLAGNGNGAAYYKIGDVK

SEQ ID NO: 11407 - DNA, 573 bp, Unknown
  Obtained from environmental sample
  misc_feature (1)..(573): n is a, c, g, or t
ttgtccaccacgggcttttttgggggccctgccgagaggataacggggagccggcgtgaacggatcaaattcctcctggacaataacctggccctntacgccgttcacctgcctctggatcagcaccccgttttgggcaataacgcggtcctggctgaacttttaggcatagaaaacccggagccttttggcctttaccatgggcgtaaggtcggctacaagggaaacctaaaaaaagccctgactctggatgaagcggtaaagaaaatcagctttatgaaccgccctccgctgggcatctttccgtttggaaaaagcgaaagccaaaattgcgctgtaatatcaggcggcgctgctcaggaagcttttcaggccctggaagaaaaagtcgatctttatgttacaggggaaagttcccatacggtttaccatcatgcgctggaaggtcgaatgaacattatcgctggagggcattattcaacggaggtttggggagtaagacggataatggaagaatgtgctataaagctcggaatagatacagtttttatagatgtgccaaccggtttataa

SEQ ID NO: 11408 - protein, 190 aa, Unknown
  Obtained from environmental sample
  DOMAIN (3)...(186): NIF3 (NGG1p interacting factor 3)
  misc_feature (1)..(190): Xaa is any amino acid
MSTTGFFGGPAERITGSRRERIKFLLDNNLALYAVHLPLDQHPVLGNNAVLAELLGIENPEPFGLYHGRKVGYKGNLKKALTLDEAVKKISFMNRPPLGIFPFGKSESQNCAVISGGAAQEAFQALEEKVDLYVTGESSHTVYHHALEGRMNIIAGGHYSTEVWGVRRIMEECAIKLGIDTVFIDVPTGL

SEQ ID NO: 11409 - DNA, 363 bp, Unknown
  Obtained from environmental sample
  misc_feature (1)..(363): n is a, c, g, or t
atgggatcaatattgattgttgatgataatcttgtcagtctcaagcagataagtgctctgctttccaaagattacgatgtttcactggcaaagtccggcgagatggcgctgcagatttgcgcccagaaacagccaaatttgatcttgcttgacgtggaaatgcccgacatggacggctttgaaacaataacccgcctgaaggcggacggaaacttgaagaacatcccggtaattttccttacaggcaacattgatgccggaacacaggcaaaatgcctgggagcgggagccgtggactttatcaccaagccgcccgatgtcgaggtcctgcaaaacaggataaaaacgcatcttaaggcttaa

SEQ ID NO: 11410 - protein, 120 aa, Unknown
  Obtained from environmental sample
  DOMAIN (2)...(115): Response regulator receiver domain
  misc_feature (1)..(120): Xaa is any amino acid
MGSILIVDDNLVSLKQISALLSKDYDVSLAKSGEMALQICAQKQPNLILLDVEMPDMDGFETITRLKADGNLKNIPVIFLTGNIDAGTQAKCLGAGAVDFITKPPDVEVLQNRIKTHLKA

SEQ ID NO: 11411 - DNA, 330 bp, Unknown
  Obtained from environmental sample
  misc_feature (1)..(330): n is a, c, g, or t
ttgtccgcggcacaacgagccgccgctggttgcgctcttaaaagcgcgggcgcgaaagaagtgcacatacggatttcttcgccgcccgtatgctttccctgttatttcggcatgnacacgccgcatcgcaaggaccttataagcaacgccagcaacgccgaagagctgtgcaaattcctgggcgcgaacagccttgcttttataactacaaaaggcctgcttgagtcaattgacgcgaattgcaactccgacaacccgaacggctgcggttactgcatgggctgtttcaccggagaatacccgattgccgtcgccggcggagcgcggtaa

SEQ ID NO: 11412 - protein, 109 aa, Unknown
  Obtained from environmental sample
  misc_feature (1)..(109): Xaa is any amino acid
MSAAQRAAAGCALKSAGAKEVHIRISSPPVCFPCYFGMXTPHRKDLISNASNAEELCKFLGANSLAFITTKGLLESIDANCNSDNPNGCGYCMGCFTGEYPIAVAGGAR

SEQ ID NO: 11413 - DNA, 480 bp, Unknown
  Obtained from environmental sample
  misc_feature (1)..(480): n is a, c, g, or t
atgaaagccgcgatattttttggttcaaaatccgacgcccagacaatgaagaaggcggcggatgtttttaaggaattcggcgtttcctgcgtttcatatgctgtttcggcgcaccggagcccggaactgctcgccgaagtcttaagcgccgtggaagcagggggtacggaagtgataatagccggcgccgggctagccgcccaccttcccggcgttatcgccagccggacgcttattccggttatcggcgtgccaatcgcttccggctctttgggcgggatggacgcgctgctttcgatcgtgcagatgcccaaacagatacccgtcgcggctgtcggcattgacaacgccgcgaacgcggcctatcttgcctgcgaaatccttgccgtaaaataccctgaattgaaaaaatcattaacagaattccggagaaaaatgaaagaagacctcgctaaagagagcgggataacggaattatga

SEQ ID NO: 11414 - protein, 159 aa, Unknown
  Obtained from environmental sample
  DOMAIN (1)...(157): AIR carboxylase
  misc_feature (1)..(159): Xaa is any amino acid
MKAAIFFGSKSDAQTMKKAADVFKEFGVSCVSYAVSAHRSPELLAEVLSAVEAGGTEVIIAGAGLAAHLPGVIASRTLIPVIGVPIASGSLGGMDALLSIVQMPKQIPVAAVGIDNAANAAYLACEILAVKYPELKKSLTEFRRKMKEDLAKESGITEL

SEQ ID NO: 11415 - DNA, 312 bp, Unknown
  Obtained from environmental sample
  misc_feature (1)..(312): n is a, c, g, or t
ttgagtgggacgaaaggaggtattattattgcgacagtaaagcataccattaaaactctaccaactgtcagtaaaaaagaccttgctcggatagacgctattaaagatgaagacattgactgttccgatattcccgaagcaactgcttcctcaaacttccacccttgggaacaacgccaaatgttcaagcctgttaaggtcgctgttacatgcaaattggatgcagatattgtcgcttggcttaaacaaggtggtaaaggttatcaaaccagactcaataccattctgcggaaagctatgtcgcatgcttaa

SEQ ID NO: 11416 - protein, 103 aa, Unknown
  Obtained from environmental sample
  misc_feature (1)..(103): Xaa is any amino acid
MSGTKGGIIIATVKHTIKTLPTVSKKDLARIDAIKDEDIDCSDIPEATASSNFHPWEQRQMFKPVKVAVTCKLDADIVAWLKQGGKGYQTRLNTILRKAMSHA

SEQ ID NO: 11417 - DNA, 558 bp, Unknown
  Obtained from environmental sample
  misc_feature (1)..(558): n is a, c, g, or t
ttggtcaaccgcctaggcgaaaaaattgcgagcgaaaaattttccctttccagcgaaccccttagacccgatttatccggctccgagctaatggatagcgaaggtatgccaacagccgctttggaagttgttgcccaaggggagttcaagagttttttgtacaatatggaatctgcggcaaaggagaatcgcaaaagcacagggcatggcacaaggggattttcagggaaggcgggcacaagtttcataaatgccgtcgttccgctcggcgaattgcacagcaaggaaattttggcattatttcccaaatgcctgttcataacccatttggaaggtagctccgggtgccatcctgtaagcggtgaaataagcataggggcacagggtttttggtgtgaaaacggggttcccctatatgccacggataatttgaccatttcctcaaacttttttgatttgctcaaaaacatagttggaataggcaacaaatataacgattccttttcccatgtaaaggttccaagccttgccataagcgaaatgtcggtttctatttaa

SEQ ID NO: 11418 - protein, 185 aa, Unknown
  Obtained from environmental sample
  misc_feature (1)..(185): Xaa is any amino acid
MVNRLGEKIASEKFSLSSEPLRPDLSGSELMDSEGMPTAALEVVAQGEFKSFLYNMESAAKENRKSTGHGTRGFSGKAGTSFINAVVPLGELHSKEILALFPKCLFITHLEGSSGCHPVSGEISIGAQGFWCENGVPLYATDNLTISSNFFDLLKNIVGIGNKYNDSFSHVKVPSLAISEMSVSI

SEQ ID NO: 11419 - DNA, 867 bp, Unknown
  Obtained from environmental sample
  misc_feature (1)..(867): n is a, c, g, or t
gtgcacgacgacgccataatgtactgcgatatcgcaaggtcgatcttcgctcggtctgtactcggctgtaccgatatgaaaaaactctggacggaaattgtgcgcatcgccgacagtaccaaaaccatcgcgtccggcgataccgcntgcggtttcggcaatacggcgatggtactggcggaaagaaactacatcccccgcgttttcgcggctacggtaagggttgtaacagcggtaagaagccttgtcgcacttgaatgcggcgcgaagggcccccacaaggactgcggttacgaaggcgtctacataaaagccataacaggcactcccatttcaatggaaggaagaactgcggcttgcgcccatctttcgcctgtcgggaacatagccgcctgcgtcgcggatctttggagcaacgaatcaattcaaaacataaagcttctgggaggcatggccccgaccgtctctttcgagcagttgggctacgattgcagactgatgaacgaagcgaccgcaaaaggaaaacagcaggcgctcctgctccgcgacctgcacgccgacagcgacagccgtcttgatccgcaggcttatgttctgcgccccgacgtcgttcttgagatttccaaagaactggtcaaggtagacggatattatcaacggtcaaaaaaagccgccgccctcgcgttgacacatataaggaaagggtacgataataaagaactggaattgaacgataaagagcaaacgtggcttgataacttaacggaagccgttgaaggattgccgaacgatattgagacattgacggcaaacgtaatcgacgattgcgagaaactggacccaaagaaatacgatctaaaattttaa

SEQ ID NO: 11420 - protein, 288 aa, Unknown
  Obtained from environmental sample
  misc_feature (1)..(288): Xaa is any amino acid
MHDDAIMYCDIARSIFARSVLGCTDMKKLWTEIVRIADSTKTIASGDTACGFGNTAMVLAERNYIPRVFAATVRVVTAVRSLVALECGAKGPHKDCGYEGVYIKAITGTPISMEGRTAACAHLSPVGNIAACVADLWSNESIQNIKLLGGMAPTVSFEQLGYDCRLMNEATAKGKQQALLLRDLHADSDSRLDPQAYVLRPDVVLEISKELVKVDGYYQRSKKAAALALTHIRKGYDNKELELNDKEQTWLDNLTEAVEGLPNDIETLTANVIDDCEKLDPKKYDLKF

SEQ ID NO: 11421 - DNA, 351 bp, Unknown
  Obtained from environmental sample
  misc_feature (1)..(351): n is a, c, g, or t
atggcacaaacggaaatagatttatcagcattttttccagagttattaaagataataaatgtactaaacagaaagaaggaaatacatatcttcatcaaatcccaaacgcatacccagatatgcccgtcatgcaaacaagaatgtaatgaataccacagcacctatcatcggaagatccaagacctgccgatattaggcaagacggtatacatacacttaacggcttaccgatattattgccgtaacagtgaatgtgagcaagacgtgttttgtgaaaccgttaacgttttttttgggttttacaaacggatgaccggacggctgggagaactcgcaatcgcgcttgcttaa

SEQ ID NO: 11422 - protein, 116 aa, Unknown
  Obtained from environmental sample
  misc_feature (1)..(116): Xaa is any amino acid
MAQTEIDLSAFFPELLKIINVLNRKKEIHIFIKSQTHTQICPSCKQECNEYHSTYHRKIQDLPILGKTVYIHLTAYRYYCRNSECEQDVFCETVNVFFGFYKRMTGRLGELAIALA

SEQ ID NO: 11423 - DNA, 663 bp, Unknown
  Obtained from environmental sample
  misc_feature (1)..(663): n is a, c, g, or t
gtgacaaacgaagagattttccgccatatcgatcacaccctgttaaaggccgtgtcttcgtgggcggaaatcgaaaagctctgtgccgaggcgatccgtttcaggaccgcctcggtatgcgttcctccctcctatgtaaaacccatcagcagcgcttacggtaatttgaacatttgtacggttattggctttcctctgggttacagcgtaagcgcggtcaagcagcgggaggcggaagccgcgcttgccgatggtgccgccgagctggatatggttattaatattggcgatgtaaaaaacggcacttttgaaaaagttgaggaagaaatctctgtccttaaaaaaatcgcgggaacaaacatcctgaaagttatcgtagaaacctgctatctgacgcaggaagaaaaaatccggctttgcaaaatcgtaaccaatacgggcgctgaatacatcaagacctcaaccggcttcggcactgccggggctacgcttgaggatgtgcttttatttaaggaacacatcggccccggtgtaaaaataaaggccgccgggggcgttaagacccgcgaagaccttgaaaaattcatcgacgcaggatgtgaccgcataggtacaagctccgccatagcgcttctgaccggtggcggcgcggcaggttattag

SEQ ID NO: 11424 - protein, 220 aa, Unknown
  Obtained from environmental sample
  DOMAIN (5)...(214): DeoC/LacD family aldolase
  misc_feature (1)..(220): Xaa is any amino acid
MTNEEIFRHIDHTLLKAVSSWAEIEKLCAEAIRFRTASVCVPPSYVKPISSAYGNLNICTVIGFPLGYSVSAVKQREAEAALADGAAELDMVINIGDVKNGTFEKVEEEISVLKKIAGTNILKVIVETCYLTQEEKIRLCKIVTNTGAEYIKTSTGFGTAGATLEDVLLFKEHIGPGVKIKAAGGVKTREDLEKFIDAGCDRIGTSSAIALLTGGGAAGY

SEQ ID NO: 11425 - DNA, 819 bp, Unknown
  Obtained from environmental sample
  misc_feature (1)..(819): n is a, c, g, or t
atgggccttgcccttgcaaattccattgccgcggtgcaggcaggatgcgttcacgcgcaggggacactggttggtttcggcgagcgctgcggcaataccgcgctggcagcccttattcccagcatggaactcaagatgggccggcgctgcctgccttcgggaaacctgagccgcatttccgagctgacccgcagggtggcggaaattgccaatgtatcaatcaacgatgacatgccttatgtgggggcacacgcattttcccacaaggcgggcatgcacgcggacggaattattaaaaacagacaaacatttgagcacattgatccgtccatggtgggaaatgaccgacattttttgatgagcgaagtcggcgggcgttcggcgattgcggaaaaggcaaaaaaaattgaaccgtctgtcaccagggaccatccggttacggcggccctggcggataaaatcaagagcctggaagccaggggctgggcctttgagggcgccgacgcgagttttgaaattcttgtcaggcgggaactgggcatttacaaacccctgttcaatattgaggcctacagggtgatgagcgaacatccctcaagcgaggcgcttgcctgttcccatgcctgggtaaaagtcctggttgaaggccagtacgagatagccgccgccgagggggacggcccggtaaacgccctggacggcgcactccgccgggcgctgcttcggttctttcccaatctcgcgaaggtacgccttgaggattacaaggtgcgcgtcattgacggtaaagagcaaccgccgcccgcgtccgtgttctga

SEQ ID NO: 11426 - protein, 272 aa, Unknown
  Obtained from environmental sample
  SIGNAL (1)...(19)
  DOMAIN (165)...(265): LeuA allosteric (dimerisation) domain
  misc_feature (1)..(272): Xaa is any amino acid
MGLALANSIAAVQAGCVHAQGTLVGFGERCGNTALAALIPSMELKMGRRCLPSGNLSRISELTRRVAEIANVSINDDMPYVGAHAFSHKAGMHADGIIKNRQTFEHIDPSMVGNDRHFLMSEVGGRSAIAEKAKKIEPSVTRDHPVTAALADKIKSLEARGWAFEGADASFEILVRRELGIYKPLFNIEAYRVMSEHPSSEALACSHAWVKVLVEGQYEIAAAEGDGPVNALDGALRRALLRFFPNLAKVRLEDYKVRVIDGKEQPPPASVF

SEQ ID NO: 11427 - DNA, 789 bp, Unknown
  Obtained from environmental sample
  misc_feature (1)..(789): n is a, c, g, or t
atggggatgggcgctattcnccatgaccacaggctttgtacgggaatgataggcatgcacggcaccgccgcttccaacaaggccgtgcagaaatctgacctgctgattgcagcaggcgcgcggttttcagaccgcgttaccagccaggtcgagaaatttgcccataacgcaaggatactccatattgatattgatcctgcggagatcaacaaaaacatcagttgcgatgcgcatatatcgggcgatgtaaaggccgtgctgtcccggattttgaacagacttcccgcccggatagaaaccgggtggaaaggcgaaattgaggaatggaaggcaataatccccagggatcaccaccggagcgcggctctgcatccccgctttattatccggaaaaccgccgaagccctaggtgaaaaaaccattgccgttaccgatgtcggccagcaccagatatggaccgcccagttcttccctttcagacacccccgttccttccttacatccggaggaatgggcgctatgggttacggcatgggggccgctctgggagccaggatcgcaaatccgcggctgcccgtggtcctcttttccggcgacggttgtttcagaatgaactgcgccgagatggccactttggtacactataaacttccggttctgattattgttttcaataaccgcactttgggaatggtacgccagtggcaaaactttttctgcgagggccgctatttcgagactgacctgataacagggggcctgatttataaaactctcggccgaatctga

SEQ ID NO: 11428 - protein, 262 aa, Unknown
  Obtained from environmental sample
  DOMAIN (1)...(113): Thiamine pyrophosphate enzyme, central domain
  misc_feature (1)..(262): Xaa is any amino acid
MGMGAIXHDHRLCTGMIGMHGTAASNKAVQKSDLLIAAGARFSDRVTSQVEKFAHNARILHIDIDPAEINKNISCDAHISGDVKAVLSRILNRLPARIETGWKGEIEEWKAIIPRDHHRSAALHPRFIIRKTAEALGEKTIAVTDVGQHQIWTAQFFPFRHPRSFLTSGGMGAMGYGMGAALGARIANPRLPVVLFSGDGCFRMNCAEMATLVHYKLPVLIIVFNNRTLGMVRQWQNFFCEGRYFETDLITGGLIYKTLGRI

SEQ ID NO: 11429 - DNA, 528 bp, Unknown
  Obtained from environmental sample
  misc_feature (1)..(528): n is a, c, g, or t
gtgatggcgagcttgcccgtaatcaagaataaattacgtgatggcacaaagggaatcgcttctgctgcttttgaagactgcaagagccttaccggcatagtcataccggatagcgttaccaccattgagtatggggcttttaacggctgcagcaaccttacgagcgtaaccataccaagcagcgttatgaccattgatgtggaggcttttaacggctgcggcggacttgaaagcatcaccataccagacggcgttacccgcattgaggatggggctttttccggttgcacgggccttaccagcatcaccataccgaacagcgttaccagcattgacattagggcttttgcgggctgcaccagctttgagcgcgtaaccttcctcggcactatcccttcaggcggatttgatcatgacgcgttcaagggcctgggcgacttgcgcaaaaagtatcttgccaaaggcgggggcccagggacgtacactacagcaaagccggggaagaaggcggcgtggacgaaacagtaa

SEQ ID NO: 11430 - protein, 175 aa, Unknown
  Obtained from environmental sample
  misc_feature (1)..(175): Xaa is any amino acid
MMASLPVIKNKLRDGTKGIASAAFEDCKSLTGIVIPDSVTTIEYGAFNGCSNLTSVTIPSSVMTIDVEAFNGCGGLESITIPDGVTRIEDGAFSGCTGLTSITIPNSVTSIDIRAFAGCTSFERVTFLGTIPSGGFDHDAFKGLGDLRKKYLAKGGGPGTYTTAKPGKKAAWTKQ

SEQ ID NO: 11431 - DNA, 378 bp, Unknown
  Obtained from environmental sample
  misc_feature (1)..(378): n is a, c, g, or t
atgagcgcaaactggaactggtatactgtaaaagtgattaaacagatactggtcaaaggcaagcccgacaaaaagcgtttggatgcgcagtatgacgacagcaggcagcattatgaggaatcattgcttttgcttcgggcgcagtccatcggccatgcctataaaatcgccgaaaggaagtcaacggacaatggcttttatgtaaacacgtacgggcagaaagtcacgtggaagttcatcaaagctgtcgattgctttttactatccgacgggctggcatccggcgctgagatttattcctgcctgcatgttacagataaaggcaccactgcaaaggaattcattgacaagtggtttaacggttatgatgaaaagtaa

SEQ ID NO: 11432 - protein, 125 aa, Unknown
  Obtained from environmental sample
  misc_feature (1)..(125): Xaa is any amino acid
MSANWNWYTVKVIKQILVKGKPDKKRLDAQYDDSRQHYEESLLLLRAQSIGHAYKIAERKSTDNGFYVNTYGQKVTWKFIKAVDCFLLSDGLASGAEIYSCLHVTDKGTTAKEFIDKWFNGYDEK

SEQ ID NO: 11433 - DNA, 540 bp, Unknown
  Obtained from environmental sample
  misc_feature (1)..(540): n is a, c, g, or t
ttgccccgctgtgtccccggctgctgcccgtgcggggggcgcatgaccgcgttcaacaagggccagccttttgaggtgctggtggattatgcccacaccccttcgtcgtttcagacgatttttccgccgttgcggaaacggattgatctttcaggcggcaggattatcagcctttttggttccgccggcgagcgggatacccaaaaacgcgccgaacagggaaaaatcgccgccgcgtattcggactatatcgtattaaccgatgaagacccgcggggtgaagttcccatggacatacttgatgaaattgcccgcgggatatatgctgaaaaatcaggcttattcaaacaaggtgaaaatctttttttaatacccgaccgtcctgccgccattcgtaaggttttgtcccttgcccgctcaggcgatatagcgttgttgttgggcaaaggccacgagaatacgataatatataaggatcatgtaatgccttttgacgaaatcgccgaggcggaaaaggcgttaggtgaattaaaagggtga

SEQ ID NO: 11434 - protein, 179 aa, Unknown
  Obtained from environmental sample
  DOMAIN (11)...(100): Mur ligase family, glutamate ligase domain
  misc_feature (1)..(179): Xaa is any amino acid
MPRCVPGCCPCGGRMTAFNKGQPFEVLVDYAHTPSSFQTIFPPLRKRIDLSGGRIISLFGSAGERDTQKRAEQGKIAAAYSDYIVLTDEDPRGEVPMDILDEIARGIYAEKSGLFKQGENLFLIPDRPAAIRKVLSLARSGDIALLLGKGHENTIIYKDHVMPFDEIAEAEKALGELKG

SEQ ID NO: 11435 - DNA, 897 bp, Unknown
  Obtained from environmental sample
  misc_feature (1)..(897): n is a, c, g, or t
atggcggggatcagacaggctgctcctcacgtgcaggatttcgccctggccgacgacccggcccaaggtgaaaaagccctgcgccagttcataggcgaagggtcgctgaacgccgtaaacgcccattacgataccgtgtcgcagatggcttcggccctggacggccgctttcagactatcctgtcagggccgaccgcgccgtccgccggaagcggccccaccgaaaaccgcctctgggtgaaacccttcggccagtggaaccgccaggatgacgagaatggcctcctcggctaccgctaccactccggcggcctcatgctgggctacgaccgggaaatggccggcctgaccctgggcctttacggcgccgtctccaaaggcaacctggaaaacgatttggccgaaaccgacatccaaaccacgggcctgggcctctacggcctctacgaattctgcggcggctactttgcggacctcaatttcggttacggccactccaataacgaatccgtcatcgacctggtcttcggcggccggaagaccagcaagttctccaccgacagtttccagaccggcctgaatttaggccgggtttttcaactaagtcaagatgttgccctgacccccagcgccgggcttcgctatacccatgtcaagcagaacggctgggaggaaaaaatagtctccgaccccgataataaggtcgtggccaactggttcggggacagccggcaggattttgtggaaatcccccttaacctgaagctggccgccacttttgaaaccggtggcggggcgctcgtcaccccggaactgcatttagggggtataatcgcggccaaccaccccaagtcggaactccgcatgggttttgtgggctcggatgaatcacaataa

SEQ ID NO: 11436 - protein, 298 aa, Unknown
  Obtained from environmental sample
  DOMAIN (72)...(293): Autotransporter beta-domain
  misc_feature (1)..(298): Xaa is any amino acid
MAGIRQAAPHVQDFALADDPAQGEKALRQFIGEGSLNAVNAHYDTVSQMASALDGRFQTILSGPTAPSAGSGPTENRLWVKPFGQWNRQDDENGLLGYRYHSGGLMLGYDREMAGLTLGLYGAVSKGNLENDLAETDIQTTGLGLYGLYEFCGGYFADLNFGYGHSNNESVIDLVFGGRKTSKFSTDSFQTGLNLGRVFQLSQDVALTPSAGLRYTHVKQNGWEEKIVSDPDNKVVANWFGDSRQDFVEIPLNLKLAATFETGGGALVTPELHLGGIIAANHPKSELRMGFVGSDESQ

SEQ ID NO: 11437 - DNA, 504 bp, Unknown
  Obtained from environmental sample
  misc_feature (1)..(504): n is a, c, g, or t
ttggcaacgcgagccgcttctcgcggggcttccctgattaagcgctccgcttccgcttcgcgggctgcacgtgccgcttctgcttctctggccaagcgcaccatttcttcgcgttcccgcgtttctcttgctatgtactccgcttcttcgcgggctttcgcttcctgggcctctctcgccgcgcgggcggcttcttcccgctctctcgcttcgcgagcttccttcgctacgcgctccgcttcctcgcgggcctccctggtgatgcgctccgcttcctcgcgggcttccctgattatgcgctccgcttcctcgcgatctttcgcttcacgggcttcttttgccagacgctccgcttcttcccgttctctggcttcctgggcttccttcgcaaggcgcgcttcttcacgctcctgggcttctctggcctcccgctccaaaaggatctccaaaagcctgtcaagctgcgggttggtttcagaacttccggcaggcggggggggctga

SEQ ID NO: 11438 - protein, 167 aa, Unknown
  Obtained from environmental sample
  SIGNAL (1)...(25)
  misc_feature (1)..(167): Xaa is any amino acid
MATRAASRGASLIKRSASASRAARAASASLAKRTISSRSRVSLAMYSASSRAFASWASLAARAASSRSLASRASFATRSASSRASLVMRSASSRASLIMRSASSRSFASRASFARRSASSRSLASWASFARRASSRSWASLASRSKRISKSLSSCGLVSELPAGGGG

SEQ ID NO: 11439 - DNA, 549 bp, Unknown
  Obtained from environmental sample
  misc_feature (1)..(549): n is a, c, g, or t
atgaacgaaaaagcggcccatgttcccgaaagaatcaaggaattgcgggaaattcttgagataagcgtccttgacatggcgaaggatacggagattccgtttgacacttacacaaaatatgaatcgggcgagattgatataccgataagcgttttatatacgattgccggccgtcttggaacggacgttacggtacttttgacaggcgaagaggcaagaatggacagcgccgccgtatgcagaaaggacaagggcgttcagatcgaaagatatccgggttatgaattttcaagccttgcctataattttaagcacaggactatggaacccttgctggtctcattagattcttccaaaccgcaggcggcgcaggtgtcccattcggggcaggagtttaactttgtgattgaaggcaaggtaaaagtgactgtaggaaagagcgagtatgtcctttcagccggagattcaatttattttgacgcccgcctgccccacggccagagcgccgccggcggaagagcgcaatttattacaataatacaggaataa

SEQ ID NO: 11440 - protein, 182 aa, Unknown
  Obtained from environmental sample
  DOMAIN (12)...(66): Helix-turn-helix
  misc_feature (1)..(182): Xaa is any amino acid
MNEKAAHVPERIKELREILEISVLDMAKDTEIPFDTYTKYESGEIDIPISVLYTIAGRLGTDVTVLLTGEEARMDSAAVCRKDKGVQIERYPGYEFSSLAYNFKHRTMEPLLVSLDSSKPQAAQVSHSGQEFNFVIEGKVKVTVGKSEYVLSAGDSIYFDARLPHGQSAAGGRAQFITIIQE

SEQ ID NO: 11441 - DNA, 834 bp, Unknown
  Obtained from environmental sample
  misc_feature (1)..(834): n is a, c, g, or t
atggacgtactgcttaacagaatttttttcccaaattcgttcaacgaactgttttacgcgtggaaccagaacccgtccgcccaaccctacgccggaggcaccgttcttttgtggaaacaaagaaaaaccataatagatttgccgcccgtcatcatctgccttgataatttacaggaactgcaaaacattacaagaaccgaacattaccttgaaatcggctctatggtaaaattaaataaaataataagaatgggaaaaatagtgccgcaagtactctgcgactgccttgaaaatatcggcggagtccagttaaggaatgtcgcgaccataggcggcaatatctgcgctacgacggggctgcttgacatatccgcgccccttgtcgccctcgacgcccaatacgagttccggggcgcgcaaaactcgcgctgggtttccgcttcgcgctttcactcggaagaagaccgaagcgcgcccggaaaaaaggaaattcttaccagaatcaggctgccccttcatcattgggattattcaatgtataaaaagtttttctcggaagatatgtataaccacaaaacaatcacttttttggcaaaagcccaaaaaaacctcctttccgacataaaagttatttgcaaaggagatacgattatcaggaacaagggcgccgaaggcatactaatcggcagccacttgcccctgcaccggaaatcagcctccgattttgtcgaaaactggaaggaatttctgtccggtaacggcgaactggatgaattcttaaaatatgagataattaactgcattgaaataaatgtttatgaccttacagaatag

SEQ ID NO: 11442 - protein, 277 aa, Unknown
  Obtained from environmental sample
  DOMAIN (6)...(173): FAD binding domain in molybdopterin dehydrogenase
  misc_feature (1)..(277): Xaa is any amino acid
MDVLLNRIFFPNSFNELFYAWNQNPSAQPYAGGTVLLWKQRKTIIDLPPVIICLDNLQELQNITRTEHYLEIGSMVKLNKIIRMGKIVPQVLCDCLENIGGVQLRNVATIGGNICATTGLLDISAPLVALDAQYEFRGAQNSRWVSASRFHSEEDRSAPGKKEILTRIRLPLHHWDYSMYKKFFSEDMYNHKTITFLAKAQKNLLSDIKVICKGDTIIRNKGAEGILIGSHLPLHRKSASDFVENWKEFLSGNGELDEFLKYEIINCIEINVYDLTE

SEQ ID NO: 11443 - DNA, 609 bp, Unknown
  Obtained from environmental sample
  misc_feature (1)..(609): n is a, c, g, or t
gtgataggcgtaattgactacggcgcgggaaatctaggctctgttatgaacgccttaaagcggctttccgtccctgcgcgttttgccgccgacccgcaagaactttcgccctcatcttcgccgtttgaaaaaataatttttcccggagacggacatttcgccaccgcaatggcatcgataaacaagtcaggttacgcgcaagcgataaaagaatggataaaagcggacaagccctttttgggaatatgtatcggcttacagttgttatttgaaacttccgaagaagccccgaatacgcaaggtctttccgtaatacccggaacagtgcggcgtttccccggacgtaaagttccgcagattggctggaaccaaacaagcgcgcgaaaagaatcaaaaatttttcatgggttaatcgaaaacagttttttttattacatacattcatactatgccgaccccgttgacaattcagtaaccgccgcgcaaacagaatattatgtccgttactgctgtgccgttgaacgcggcgcattagccgcagtgcagtttcaccctgaaaaatcangcgcggcagggcttgctcttttgcaaaattgggtggaggggtaa

SEQ ID NO: 11444 - protein, 202 aa, Unknown
  Obtained from environmental sample
  DOMAIN (37)...(143): CobB/CobQ-like glutamine amidotransferase domain
  misc_feature (1)..(202): Xaa is any amino acid
MIGVIDYGAGNLGSVMNALKRLSVPARFAADPQELSPSSSPFEKIIFPGDGHFATAMASINKSGYAQAIKEWIKADKPFLGICIGLQLLFETSEEAPNTQGLSVIPGTVRRFPGRKVPQIGWNQTSARKESKIFHGLIENSFFYYIHSYYADPVDNSVTAAQTEYYVRYCCAVERGALAAVQFHPEKSXAAGLALLQNWVEG

SEQ ID NO: 11445 - DNA, 849 bp, Unknown
  Obtained from environmental sample
  misc_feature (1)..(849): n is a, c, g, or t
ttggagttgacgcgctttcggggagaaatcagggatacttatgccgatttgatcttttccagggaaaatccggaagttgccagttattttgaaccggccgtactgactccccgcaatcaacaggaagcggatgaagaccttatttttatggcagattttcttgaaggaaagaaaaacattgttcataatatggactaccccgatccgtcaatgattgagcagacgctggcaatgataaagcccgatagcttttcacacaattcattccgtccaggcgccataattgacatattttcgcgtacgggattaaggatcataggcctcaaagttcatcgtttttcgcccgcccaggcaattgaattttacggtccggttaaagcaaaattaaaagaaaaacaggcccccgattttggaaaaaaagcaaaagaattactggaaaaagaatttaaagtcaccttaagcgccgaatcgttaaaagccctgtcagaaatagttggcgtcgattatgcggaagatcaatttaatcaaattatcgaatatatgtgcggcaaaaaatgcggaaattattctcccgaagagcaatatatgcctggcgatgtaaagtccatgattttaatttacgagggtgagcacgcgatagaaaaaatccgtgaagcgctaggttccacagatccaagcaaggcgacaggcggaacaatacggcgcgaattgggtttaagcataatgcataattccgcccatgcttccgattcggttgaaagctacaaccgtgaaaaagaaattttaaggatagaagaaaattccctctgttcgataatcaggaaacatatagggaatacgggggaatga

SEQ ID NO: 11446 - protein, 282 aa, Unknown
  Obtained from environmental sample
  DOMAIN (73)...(261): Nucleoside diphosphate kinase
  misc_feature (1)..(282): Xaa is any amino acid
MELTRFRGEIRDTYADLIFSRENPEVASYFEPAVLTPRNQQEADEDLIFMADFLEGKKNIVHNMDYPDPSMIEQTLAMIKPDSFSHNSFRPGAIIDIFSRTGLRIIGLKVHRFSPAQAIEFYGPVKAKLKEKQAPDFGKKAKELLEKEFKVTLSAESLKALSEIVGVDYAEDQFNQIIEYMCGKKCGNYSPEEQYMPGDVKSMILIYEGEHAIEKIREALGSTDPSKATGGTIRRELGLSIMHNSAHASDSVESYNREKEILRIEENSLCSIIRKHIGNTGE

SEQ ID NO: 11447 - DNA, 609 bp, Unknown
  Obtained from environmental sample
  misc_feature (1)..(609): n is a, c, g, or t
atggacggcgataacacagaccttaaatcaattttcgaaattgattttgaattaaggaaaatacaggatcttgatctgcttttggaacggatcctttttgaagcccgcagagtagtccacgccgacgcaggctcaatatatgtaaaacagacagtggaagaaaacggagaaaccaatgacatacttttctttaaatactcccaaaatgacactttccagaaatccctgcctcccggccagaaactgatctactcgacattctccatgccgattaatgaaaaatccgtatccggctacagcgctttaaccggaaaaattattgatgtgccggatatgtacaatctcccggcggacgtgccttattcctttaactcttcattcgataaaaaagccggttacaaaaccatttcgacgctgaccttcccgctgatcaccgcggacgggcgtattctgggcgtcattcaggtcatcaacaagatggatgataaaagaaatgttatagtattttcccaggaagatatattcctgataacccattttgcggctaacgctacggtggcattgcagcaggcttatgaaccagggccatatcctctcggccgattctga

SEQ ID NO: 11448 - protein, 202 aa, Unknown
  Obtained from environmental sample
  DOMAIN (23)...(188): GAF domain
  misc_feature (1)..(202): Xaa is any amino acid
MDGDNTDLKSIFEIDFELRKIQDLDLLLERILFEARRVVHADAGSIYVKQTVEENGETNDILFFKYSQNDTFQKSLPPGQKLIYSTFSMPINEKSVSGYSALTGKIIDVPDMYNLPADVPYSFNSSFDKKAGYKTISTLTFPLITADGRILGVIQVINKMDDKRNVIVFSQEDIFLITHFAANATVALQQAYEPGPYPLGRF

SEQ ID NO: 11449 - DNA, 681 bp, Unknown
  Obtained from environmental sample
  misc_feature (1)..(681): n is a, c, g, or t
atgaataccggagacagcgccgccgccagcgccaacgggcttttaaccaccgttgccgcgggctntgataaaaaagttcaatacgcgctggaaggctcagtctttacgggaggcgctgttattcagtggctaagggatgaaatgcgccttatcaccgacagcgcggacagcgagtattttgcgtctagtgtaaaagacacgggcggcgtttaccttgttcccgcttttacaggtctcggcgcgccgtactgggacatgtacgcgcgcggctgtatcgtaggaataacaaggggaacaaaacgcgcccacataataagagcggctcaggaatcaatcgcgtatcaggtgatggatcttcttcacgcgatggaaaatgatttgggaataaaattgaaggaaatgaaagtagacggcggagcaagcagggataaattccttatgcagttccaagccgatatttacggcatttctcttgtacggccggcggtaaaagaaacgacagcgctgggagccgcccagcttgccggaattaccgtgggtttctggaaagaccaagccgagataaaaaaactttggcaaagacaagctgagtttgaatcgaaaatggacgggaaaaaacgggaagaattaatcgaaggctggcacaaggctgtggacagaagccgaggctgggctcagtaa

SEQ ID NO: 11450 - protein, 226 aa, Unknown
  Obtained from environmental sample
  SIGNAL (1)...(21)
  DOMAIN (1)...(208): FGGY family of carbohydrate kinases, C-terminal domain
  misc_feature (1)..(226): Xaa is any amino acid
MNTGDSAAASANGLLTTVAAGXDKKVQYALEGSVFTGGAVIQWLRDEMRLITDSADSEYFASSVKDTGGVYLVPAFTGLGAPYWDMYARGCIVGITRGTKRAHIIRAAQESIAYQVMDLLHAMENDLGIKLKEMKVDGGASRDKFLMQFQADIYGISLVRPAVKETTALGAAQLAGITVGFWKDQAEIKKLWQRQAEFESKMDGKKREELIEGWHKAVDRSRGWAQ

SEQ ID NO: 11451 - DNA, 909 bp, Unknown
  Obtained from environmental sample
  misc_feature (1)..(909): n is a, c, g, or t
atgcgtcgtttattaaagggaattctcggcctgatagggcgtttttcaccgtcgcccctggaagtaacggtagaggccaaccctgaatcggcggacgaagcttttctgacggcaatccgcgaggaaggggcaacgcggctttcccttggcgttcagactttctatggcccttcccggaaagctgtgcatagggcaggggaggagaccgtactgcccggccgtcttgcccttgccgccgcttttttccctaacgctttttctgtagacctgatgtcaggtcttccttttcaaaacaaaagcgtccttcttgacgacatagccggagcggcaagttacaaaccggcgcatatttcgctttacgcacttagcggcaaaaaggcggagagcctggagcatgacgaagcggacgagctttggctttacggcagggataccctcgaaaaatcaggttattttcagtacgaggtctctaatttttgtcttcccggtatggaatgtaagcacaacatacgctactggcgaatgaagaactggcttgccctggggcctgccgcgtcgggaaccattattgatgacgcaagcggaactggcttaaggtatacatttccatcagatacgagtaactggcaggaaagcgtagaagagcaattgaatagccttaccctgataaaagaaacgtttcttatgggttttcgctatgtggagggccccgacgagggctcttttctgagccgttttaaaaaaaccataggagaagtgatacccaaaactctgaacgcatggcgaagccgaaggcttttatgcggggacaaatgtgcccttacaaaagaaagcctgctttttttgaatcgctttttgcttgaggcgtttgaggaagtggagttgttatttccctcaatttatatttga

SEQ ID NO: 11452 - protein, 302 aa, Unknown
  Obtained from environmental sample
  DOMAIN (170)...(280): HemN C-terminal region
  misc_feature (1)..(302): Xaa is any amino acid
MRRLLKGILGLIGRFSPSPLEVTVEANPESADEAFLTAIREEGATRLSLGVQTFYGPSRKAVHRAGEETVLPGRLALAAAFFPNAFSVDLMSGLPFQNKSVLLDDIAGAASYKPAHISLYALSGKKAESLEHDEADELWLYGRDTLEKSGYFQYEVSNFCLPGMECKHNIRYWRMKNWLALGPAASGTIIDDASGTGLRYTFPSDTSNWQESVEEQLNSLTLIKETFLMGFRYVEGPDEGSFLSRFKKTIGEVIPKTLNAWRSRRLLCGDKCALTKESLLFLNRFLLEAFEEVELLFPSIYI

SEQ ID NO: 11453 - DNA, 639 bp, Unknown
  Obtained from environmental sample
  misc_feature (1)..(639): n is a, c, g, or t
ttgccgagatcagaaaagagattccgaaccaagcctaaagaaaggggcttggtaaagggcgtggattacgatgcggaagaagctttatatgattttagttatgcaaaaatagcccgctatggtactcttgtccttaaccataagccgttaataaaagttcatagcctagacgtagtaaataggtatgtcaattcttacagcctactcgattctacccatgttgattacacgaagggtgttttgaaaatgatgcgccgtccaatacgcccctccgaaactataagcggcataagcacggcaatttatccctatggcaacgaaacttttagccagcatatgttttttgcggttgactacgatgccggatatgaaaccagcgatgacataccggatgatttgcgggaagcagtcgccaaggccgccgctatctctctgttaaatgccatcggcgatgggcttatggcaggcttctcctcttcaagcctctcgatggacggaatgagcgaatccttctcttctactcaatcggctacttcagcttactttggtgcgcggataaaggtctatgaagatgaattggcggcatacatagaagatgtaaagagaaaattcggctttatgcagatgggagtaatttaa

SEQ ID NO: 11454 - protein, 212 aa, Unknown
  Obtained from environmental sample
  misc_feature (1)..(212): Xaa is any amino acid
MPRSEKRFRTKPKERGLVKGVDYDAEEALYDFSYAKIARYGTLVLNHKPLIKVHSLDVVNRYVNSYSLLDSTHVDYTKGVLKMMRRPIRPSETISGISTAIYPYGNETFSQHMFFAVDYDAGYETSDDIPDDLREAVAKAAAISLLNAIGDGLMAGFSSSSLSMDGMSESFSSTQSATSAYFGARIKVYEDELAAYIEDVKRKFGFMQMGVI

SEQ ID NO: 11455 - DNA, 540 bp, Unknown
  Obtained from environmental sample
  misc_feature (1)..(540): n is a, c, g, or t
gtggtggacgccatgaacgatcttggtataattcccgatctttcccatgcttctgaaaccgctttttgggatgtaatcaatagaatgaaaaatcggtcgaaaaaaccgcccatcgcttcccactcctgcgcttacggcatttgcgccgctgcgaggaacctgaaagacgatcagcttaaagccattgccgactcaggaggcgtggtgggagtaaatttcttttccgcttttttgtacgaaccgtttcgatcggcttttgatgacgaagggaagaatagcaatacagatcctgatgtttccattaatgtaccgcagtcaattatcgcggatcacattgactacatggtgaatattgcaggagaggactgcgtcacgcttggctcggattttgacggaatcccgaccgcaccgcagggagtaacgggcagcgatttctacccggtactggaagcggagcttcgttcaaggggctattcggagaaacgcatcgggaagatttttaatggtaattttttgagggcgcttgaagcgtgggagtag

SEQ ID NO: 11456 - protein, 179 aa, Unknown
  Obtained from environmental sample
  DOMAIN (1)...(177): Membrane dipeptidase (Peptidase family M19)
  misc_feature (1)..(179): Xaa is any amino acid
MVDAMNDLGIIPDLSHASETAFWDVINRMKNRSKKPPIASHSCAYGICAAARNLKDDQLKAIADSGGVVGVNFFSAFLYEPFRSAFDDEGKNSNTDPDVSINVPQSIIADHIDYMVNIAGEDCVTLGSDFDGIPTAPQGVTGSDFYPVLEAELRSRGYSEKRIGKIFNGNFLRALEAWE

SEQ ID NO: 11457 - DNA, 366 bp, Unknown
  Obtained from environmental sample
  misc_feature (1)..(366): n is a, c, g, or t
atgaaagcccacgccgccgaaggcgttaagataatcgagaggatgatagaacagacaggggaagaggaattattgagcaatgccaaattgtacgccgaataccaccatgaacgttgggacggaaaaggttacccgtatgggcttaaggggactgacatacctttacacggacgtattatggcgtttgtggacgcgtatgacgcgcttattaccaaacgcccatacaaaaacgcgttaacggacgaagaagtggcaaaaatcatttcagaggaatccggcaaacagttcgacccggaaatcgttaaagtgtttcttgaagtgcaggggcgatttaaagatgtaaggggggtttcatactccatttaa

SEQ ID NO: 11458 - protein, 121 aa, Unknown
  Obtained from environmental sample
  misc_feature (1)..(121): Xaa is any amino acid
MKAHAAEGVKIIERMIEQTGEEELLSNAKLYAEYHHERWDGKGYPYGLKGTDIPLHGRIMAFVDAYDALITKRPYKNALTDEEVAKIISEESGKQFDPEIVKVFLEVQGRFKDVRGVSYSI

SEQ ID NO: 11459 - DNA, 819 bp, Unknown
  Obtained from environmental sample
  misc_feature (1)..(819): n is a, c, g, or t
atgggcactacggacaaggcgcaaaattccgcaagcgcggaactgacaaatattatccttgactcaagggaagccggagcgtttataacaacttccgtttcggcaatcgcgcctgcgaagaatcaaagttctaatatggtgaacttcaccatacgtcttttgttaaatgacggtatcgacaactggaaacttgaattaaaagatgatgccggaaacgtgcaaagaacattcgcgggaagggctccggttccttcagttcagggctggaacggtcttgacgaacagggacaaatacaagaaagcttgtacactcctgagcttacggtaaattacacaaggggcgatatagtaaaagcgtcagcctcaactgttttagttgacgtaacagggccggttctgactgtcgtaactgcgccggaatacttcagtcccgataatgacggagaaaacgacgaattatttatcaaccttaccactaaggacgcttctccgatagcgacatggtcttttgaaatacgcaatcctgttgaaagcggttcaactcaagttttccgcaagattgaaggacgcggaagcccggcaaacagaattatttgggacggcaagagcgacaagggcgaacttgtccaatccgcgatgtactatcctttcaaatttaccgcgactgacgcgcttggaaattccaactctatggaaggcagaatcggcgttgacgtgcttgtcatccgcgaaggggacaggttaaagattcaaatcccgtcaatccaattcagaccgaatttcgcggactttgaaggattgcctttggacgttatttga

SEQ ID NO: 11460 - protein, 272 aa, Unknown
  Obtained from environmental sample
  misc_feature (1)..(272): Xaa is any amino acid
MGTTDKAQNSASAELTNIILDSREAGAFITTSVSAIAPAKNQSSNMVNFTIRLLLNDGIDNWKLELKDDAGNVQRTFAGRAPVPSVQGWNGLDEQGQIQESLYTPELTVNYTRGDIVKASASTVLVDVTGPVLTVVTAPEYFSPDNDGENDELFINLTTKDASPIATWSFEIRNPVESGSTQVFRKIEGRGSPANRIIWDGKSDKGELVQSAMYYPFKFTATDALGNSNSMEGRIGVDVLVIREGDRLKIQIPSIQFRPNFADFEGLPLDVI

SEQ ID NO: 11461 - DNA, 441 bp, Unknown
  Obtained from environmental sample
  misc_feature (1)..(441): n is a, c, g, or t
atggattatgaagcagattttaaaaatattgtccgtttagactcagaattaaatcaaattcaagattacgatttattgcttgaaaaaatactttttgaagcaagaaaattcgttcatgccgatgcgggatcaatttatattacagtccctacggaaccgggcgaggaaggaacggaaaaattatcaataaaatattcacaaaatgaaactattcagaaaactatgccgcccggacaaaaaatgatctattcaattttttccgtttttattaacgaagaatccatttccggttattgcgcgcttaaaagaactctgataaatattcccgatatgtacaatattccctctgaagcgccttatcaattcaattcaacctttgatgtaattacaggttataaaacgggtttcctctcttactattcctctggttgcaacgaataa

SEQ ID NO: 11462 - protein, 146 aa, Unknown
  Obtained from environmental sample
  misc_feature (1)..(146): Xaa is any amino acid
MDYEADFKNIVRLDSELNQIQDYDLLLEKILFEARKFVHADAGSIYITVPTEPGEEGTEKLSIKYSQNETIQKTMPPGQKMIYSIFSVFINEESISGYCALKRTLINIPDMYNIPSEAPYQFNSTFDVITGYKTGFLSYYSSGCNE

SEQ ID NO: 11463 - DNA, 900 bp, Unknown
  Obtained from environmental sample
  misc_feature (1)..(900): n is a, c, g, or t
ttgggggagggtgcagccgaagatgcaaccgacaaatatcgcaaagcaaacgacttggttaaccgcctcaaaagagacgatgactacaccatagacgaaaaacacaaaaatgtgcaactcaccgaaaagggcgtgactcacattgaatccataatgggcataaaagggctttatggagaacattccgactgggtgcattatattttgcagtcagtaaaggctcacaatgtttttgtaaaagatgtggattatattgttagagatggagaaattgtaatagttgacgaaaacacaggtcgcttgatggaaggccgccgttattcggagggtattcatcaatccattgaagcaaaagaaaacgtgcaaattcgcagggaaaaccaaacgctcgcaaccataaccttccaaaatcttttccgtatgtacaaaaaactctccggcatgacaggcacggcagaaaccgaggcaacggaatttttgaaaatttacaatatgcccacttgggttatacccacgcacaaaccttgcatcagaaacgatatgcaagaccagatttacaaaaccgcagatgcaaaatggaaggcgataattgcagacataacagagaggcacgaaaaggggcaaccaattctagttggaacaatatctgtagaaaaatctgaaaaactatcaaagatgcttcgtatagctaacattccacacgatgttttgaatgcaaaaaatcacggacgagaagcggaaattatccaatatgcagggcacaaagggaaagtaacagttgcaactaatatggcaggtcgtggaacggatattgcgcttggccccggcgttgttgagcttggcggtttgcacgttcttggcaccgaaaagcacgagagccgccgcatagacaccagttga

SEQ ID NO: 11464 - protein, 299 aa, Unknown
  Obtained from environmental sample
  DOMAIN (1)...(160): SecA DEAD-like domain
  misc_feature (1)..(299): Xaa is any amino acid
MGEGAAEDATDKYRKANDLVNRLKRDDDYTIDEKHKNVQLTEKGVTHIESIMGIKGLYGEHSDWVHYILQSVKAHNVFVKDVDYIVRDGEIVIVDENTGRLMEGRRYSEGIHQSIEAKENVQIRRENQTLATITFQNLFRMYKKLSGMTGTAETEATEFLKIYNMPTWVIPTHKPCIRNDMQDQIYKTADAKWKAIIADITERHEKGQPILVGTISVEKSEKLSKMLRIANIPHDVLNAKNHGREAEIIQYAGHKGKVTVATNMAGRGTDIALGPGVVELGGLHVLGTEKHESRRIDTS

SEQ ID NO: 11465 - DNA, 387 bp, Unknown
  Obtained from environmental sample
  misc_feature (1)..(387): n is a, c, g, or t
gtgggccgccatgtttcacgcatggttcgcacgcttgtaatgccgtcttcttccccctggcttgcgctggaaaaattcggctcagttcatgtgctgccggtaagccacggcgagggacgcctcgttatcggcagagcggaaggggaagcgttgttcaaaaacgcgcaggttccattttgttatgccgacgagaacggccggccaaccatgcgggagccggacaaccccaacggatcggattttgccattgaggggttgtgcagtcccgacggcagaatactcggcaagatggcgcattcggaacgccggggcgaatacgtccacattaatatacccggcgataaaaggcagactatttttgaagccggggtccggtattttagttaa

SEQ ID NO: 11466 - protein, 128 aa, Unknown
  Obtained from environmental sample
  misc_feature (1)..(128): Xaa is any amino acid
MGRHVSRMVRTLVMPSSSPWLALEKFGSVHVLPVSHGEGRLVIGRAEGEALFKNAQVPFCYADENGRPTMREPDNPNGSDFAIEGLCSPDGRILGKMAHSERRGEYVHINIPGDKRQTIFEAGVRYFS

SEQ ID NO: 11467 - DNA, 339 bp, Unknown
  Obtained from environmental sample
  misc_feature (1)..(339): n is a, c, g, or t
atgtttgaattaacattttctgaaagaataaacgatgatattatttcttcaataagttatataaaaaacacattaaaagctccaatggccgccggaaaccttgtagaagaattaaagaaaaaatatataaaattgaaagaaaatccatttgccagaccattagttcagaataagtttttggcatcaaaaggcatacgcttcattatggttaaaaaatatatgcttgtttacaaaattgatgaagaaaatagtacggtctttttatatagatttatatattgtcgaagggattgggtaaacatattaacaaatgaaataaaagcagggacaggagattag

SEQ ID NO: 11468 - protein, 112 aa, Unknown
  Obtained from environmental sample
  misc_feature (1)..(112): Xaa is any amino acid
MFELTFSERINDDIISSISYIKNTLKAPMAAGNLVEELKKKYIKLKENPFARPLVQNKFLASKGIRFIMVKKYMLVYKIDEENSTVFLYRFIYCRRDWVNILTNEIKAGTGD

SEQ ID NO: 11469 - DNA, 744 bp, Unknown
  Obtained from environmental sample
  misc_feature (1)..(744): n is a, c, g, or t
atgaaaatccgttcgtcctttttcatagctatacgttaccttctgggacgagcccatgagggcgggcgctatttgcgcggcgccgccgccgggatcgccatcagccttgtaccaatcatcgtcacccttatcgtcgccgacggtatgatcaggggcatcatcgaccgttacatggagctggggacgggacatatgcaggtattcagctttgccggcgcggagggactgaacggggcggctgataaaatacgggaggttaacggcgtcaggggagtgtggcttgaacagcggggaatgggggtgctggtagggaaaaaaggaagaaccggggccagcatccgcgccatagatccctcattctgggaggaacaagtgtatcttaagcttattgacggaaacgtccggcttgagacagaccggcagatgctgttaggcgaaagccttgccgcttccatcggcgcccaaaccggggacacggtgcgccttatgaccattgtggcaaatgataacggaataaatatgccgaaaattacgcccttcaccgtttcgggcatagtatcatccggctatcacgaactggacgccctctggtgtataatcagcgacgggggcggccgccggatatttccgccggagacttcgtcaagccttattgtcaaggttgaaaatccgtataacaacgttaactcaatggcctggcccctgtacgcggttctggaagcggggttcagcgtgtatacatga

SEQ ID NO: 11470 - protein, 247 aa, Unknown
  Obtained from environmental sample
  misc_feature (1)..(247): Xaa is any amino acid
MKIRSSFFIAIRYLLGRAHEGGRYLRGAAAGIAISLVPIIVTLIVADGMIRGIIDRYMELGTGHMQVFSFAGAEGLNGAADKIREVNGVRGVWLEQRGMGVLVGKKGRTGASIRAIDPSFWEEQVYLKLIDGNVRLETDRQMLLGESLAASIGAQTGDTVRLMTIVANDNGINMPKITPFTVSGIVSSGYHELDALWCIISDGGGRRIFPPETSSSLIVKVENPYNNVNSMAWPLYAVLEAGFSVYT

SEQ ID NO: 11471 - DNA, 708 bp, Unknown
  Obtained from environmental sample
  misc_feature (1)..(708): n is a, c, g, or t
atgaaactgctggccgtcctcggttccgatgacaactacgcggttatttcccggcgcataaaatctctgggctttgaacctgtccgttacaggcatgtgatcaaggctatggacaatattgatgaaataaatcccagggcaattattgtcagcgcgcgggattttccccgccattggaaaatccttgtacaatttgttcgcgccacgctgaccaaagaagactgcccaatcatagtgctgaaatctcccggtttttccgtcgaagaaagttccaaggcgtcttttctgggtgtaagctgtttggtaaatgataacctggacaatccggcggaactggaacatcttttgaaaattttaagtcggcatataaaaacaaatgagcggcggctgaaccggcgtttctttgttgagccatggttcaggtttggctttatgtttgcaaggccccaggacaagctcattgtcccgtgcgaacttgtaacaatttccacagccgccatttcctttaagcccgccgctgttgatttaatcaagggcttacaccccggcatggaatttgccgaatgcagtctgcgcatgggcagcgcgatcttttcgcccgtctgccgtctggtccgcgtaggcgagtccgtctcaatggaatttgtttccttccctgacggcgggaaacagatactggaacagtacctggcaggcttttccgtctga

SEQ ID NO: 11472 - protein, 235 aa, Unknown
  Obtained from environmental sample
  misc_feature (1)..(235): Xaa is any amino acid
MKLLAVLGSDDNYAVISRRIKSLGFEPVRYRHVIKAMDNIDEINPRAIIVSARDFPRHWKILVQFVRATLTKEDCPIIVLKSPGFSVEESSKASFLGVSCLVNDNLDNPAELEHLLKILSRHIKTNERRLNRRFFVEPWFRFGFMFARPQDKLIVPCELVTISTAAISFKPAAVDLIKGLHPGMEFAECSLRMGSAIFSPVCRLVRVGESVSMEFVSFPDGGKQILEQYLAGFSV

SEQ ID NO: 11473 - DNA, 858 bp, Unknown
  Obtained from environmental sample
  misc_feature (1)..(858): n is a, c, g, or t
gtggggttttattcggcgtttatggtcgcggataaaattgaagtgattagccgcaaggcaaacgagcccgccgcgtggaaatggataagcgacggcaaagaaggctttgaaattgagggcgcgtcgcgggatactcaggggacgacagtcatccttcatttgaccgaagagggaacagagtacgccaaccgctggacaattgaggacattatcaaacgttactccaaccatgtggcattcccgattttcctcacatacgatgaaaaagagtacgatgacaagggaaaagagaagggcagcaaaacaaaaaccgacaggataaattcgggaacagcgctttggcggcgcgcaaagaacgagcttaagcccgaagattacaatgaattttacaaacagcttggacatgacagcgaagagccgttagactacattcatacaaaggccgagggaacattagagtactcaacattgtttttcattccaaaaaaagcgccgtttgatttgtacaatgtggactacaagcccggcgtaaaactatatgtaaagcgcgtctttattaccgatgacgacaaggaacttatgcccacctatctgcgttttgtgcgcggcgtaattgattccgaagacttgcccctgaacgtaagccgcgaaatcctgcagcagaacaaggtcttgctcaacataaaaaacgcctccgtaaaaaaactgctttccgaattcaagcagatggcggataacgccgtttcaggctctgacgaggcgaaagcaaaatgggaaacatttatttcccagttcaacccgtcgttaaaggaagggctttatcangatttttccacccgcgagctatacaggagatag

SEQ ID NO: 11474 - protein, 285 aa, Unknown
  Obtained from environmental sample
  DOMAIN (60)...(284): Hsp90 protein
  misc_feature (1)..(285): Xaa is any amino acid
MGFYSAFMVADKIEVISRKANEPAAWKWISDGKEGFEIEGASRDTQGTTVILHLTEEGTEYANRWTIEDIIKRYSNHVAFPIFLTYDEKEYDDKGKEKGSKTKTDRINSGTALWRRAKNELKPEDYNEFYKQLGHDSEEPLDYIHTKAEGTLEYSTLFFIPKKAPFDLYNVDYKPGVKLYVKRVFITDDDKELMPTYLRFVRGVIDSEDLPLNVSREILQQNKVLLNIKNASVKKLLSEFKQMADNAVSGSDEAKAKWETFISQFNPSLKEGLYXDFSTRELYRR

SEQ ID NO: 11475 - DNA, 744 bp, Unknown
  Obtained from environmental sample
  misc_feature (1)..(744): n is a, c, g, or t
atgaatttcgccgccgatatgtaccggcgttttctaaagaacggcaaatacaacgcggattttgagatttcaatagatgaaacttccactcccaccactccgcttcagcattattttgtcgccagggaattaattgactcaggtgtttctttcgccacaatggcgccaaggttctgcggggaattccagaagggggtcgattattcaggcgaccttgatcaattcaacaaagaaattaaggttcacgcgataatcgcccggcacttcaagtacaagctaagcatacactcaggctcggacaaattcagcgtattcccggccatcggaaaagaaacccgccatatattccatgtaaaaaccgccggcaccaactggctcgaagcgatgcgcgttatcgcccaggttgatcccgccctatacagggaaattcacaagtacgccctgtccgtattcagcgaggcgaaaaagtactatcatgtcaccaccgatctaagcaaaatccccgacgtagattcactggcaaacgaggatctgccgaaactctttgaaaacaacgactcgcgccagctcatccatattacctacggcctaatcctgaacaagaaaaacccggacggcgaaacctttacattcagggacaagctatacgatttatggcagaaaaatgaagaccaatacaaccagcttctatcccgccacatcggcaaacatttggatctgttaggggtaaaagataaaccctaa

SEQ ID NO: 11476 - protein, 247 aa, Unknown
  Obtained from environmental sample
  misc_feature (1)..(247): Xaa is any amino acid
MNFAADMYRRFLKNGKYNADFEISIDETSTPTTPLQHYFVARELIDSGVSFATMAPRFCGEFQKGVDYSGDLDQFNKEIKVHAIIARHFKYKLSIHSGSDKFSVFPAIGKETRHIFHVKTAGTNWLEAMRVIAQVDPALYREIHKYALSVFSEAKKYYHVTTDLSKIPDVDSLANEDLPKLFENNDSRQLIHITYGLILNKKNPDGETFTFRDKLYDLWQKNEDQYNQLLSRHIGKHLDLLGVKDKP

SEQ ID NO: 11477 - DNA, 774 bp, Unknown
  Obtained from environmental sample
  misc_feature (1)..(774): n is a, c, g, or t
ttgtttgttttgatgatgagaaccctgaccttacagggaaatattatgaagcaatacacgagaataaaaaaatatgatcaaaaatggattgaggaaaactggatggggccgaacccgctcattctgcttgaagagttatgtgagaatttaacgctgtcgcctggaatgagggttttggacatgggctgcgggaaaggcattacttcggtatttctcgcgaaagaattcggcgtgaccgtattcgcaaacgatttgtggattgacgccacagaaaaccggcaaaggtttgaggccgccggtgtcgatgacaaggtgtttcccattcacgcggaggcgcatgcccttccgtacgctaaaggcttttttgacgctgcgatttcgattgacagttacaattattatggcgcggatgagatgtatttcccctgcactttttcacaactggtaaaacccggcggccaatttggtatcgtgtgtccgggcctgataaaggaatacgaaagcggatatccagaaacccttaaacctttttgggaaggggaattattttctcttcacagcgcggcatggtggcgcgctctctgggaaaaaaccggaatcgctgaaattacttcgtgttataatatgaacgaccccaaagaaatctggtatccctgggcgcattgggcgaaagagcatctcagttttaacgacgtggaattcctggacgccgacacagggaatgaggtagcgatgattgtcatgaccgctgtaaagagtgaacaaaaaaaatga

SEQ ID NO: 11478 - protein, 257 aa, Unknown
  Obtained from environmental sample
  DOMAIN (59)...(157): Methyltransferase domain
  misc_feature (1)..(257): Xaa is any amino acid
MFVLMMRTLTLQGNIMKQYTRIKKYDQKWIEENWMGPNPLILLEELCENLTLSPGMRVLDMGCGKGITSVFLAKEFGVTVFANDLWIDATENRQRFEAAGVDDKVFPIHAEAHALPYAKGFFDAAISIDSYNYYGADEMYFPCTFSQLVKPGGQFGIVCPGLIKEYESGYPETLKPFWEGELFSLHSAAWWRALWEKTGIAEITSCYNMNDPKEIWYPWAHWAKEHLSFNDVEFLDADTGNEVAMIVMTAVKSEQKK

SEQ ID NO: 11479 - DNA, 429 bp, Unknown
  Obtained from environmental sample
  misc_feature (1)..(429): n is a, c, g, or t
gtgcgtggcgaagtacacgacgagaacgcgatggttatgggcggggtaagcggtaacgcggggattttctcatgcgctccggatatgacccggcttggcgccgcgatgcttacgtcgcttgaagacgggatcttttttaaaaaagcaaccgcaaaattaatgacccgtaaccatacgtcaggcaaagggcaggatcgcggcctttgctggatgctcgcggggcctggtacctcgtcgggggatctcttgtcccaaggcagctttggccacacgggattcaccggaaccagcatctggatagatcctgagaggaaattttacgccctgcttttgtccaaccggatccacccgaatcgggacaacgagaaacttttccgtgcccgtcatattttccataaccttgcggttcttgagtatggcaatgggtga

SEQ ID NO: 11480 - protein, 142 aa, Unknown
  Obtained from environmental sample
  misc_feature (1)..(142): Xaa is any amino acid
MRGEVHDENAMVMGGVSGNAGIFSCAPDMTRLGAAMLTSLEDGIFFKKATAKLMTRNHTSGKGQDRGLCWMLAGPGTSSGDLLSQGSFGHTGFTGTSIWIDPERKFYALLLSNRIHPNRDNEKLFRARHIFHNLAVLEYGNG

SEQ ID NO: 11481 - DNA, 567 bp, Unknown
  Obtained from environmental sample
  misc_feature (1)..(567): n is a, c, g, or t
gtgcccgtcatattttccataaccttgcggttcttgagtatggcaatgggtgaaaccttaaatcagctttccgcggaagcccttgaccgttttaccaccgagcggcgaaacgaggcgtcgtctgatattgattcaaagacatccctggaaatcgtttctatcattaataatgaagacaaaaaagttcccgccgcggttgaaaaaatacttcccgagatcgctgccctggtagacgacattgtcgtttctttcaggaaaggcggccggctcttttacataggcgcggggacttccgggcgtctgggtgtactggatgcttccgagtgtccgcccacctacggggtagatcccgggatggtgcgggggcttatcgcgngcggcagggaggctctgacaacttctattgaggcggctgaagacagggccgaagaaagggtgaaggagctgaaggcgcttggctttactccagcgatgtgctggtgggcattacagcgtccggccaggccccctatgtgctgggcgcgcttgaatacgcgcgcagcctgggcgcggttaccggagccataa

SEQ ID NO: 11482 - protein, 188 aa, Unknown
  Obtained from environmental sample
  misc_feature (1)..(188): Xaa is any amino acid
MPVIFSITLRFLSMAMGETLNQLSAEALDRFTTERRNEASSDIDSKTSLEIVSIINNEDKKVPAAVEKILPEIAALVDDIVVSFRKGGRLFYIGAGTSGRLGVLDASECPPTYGVDPGMVRGLIAXGREALTTSIEAAEDRAEERVKELKALGFTPAMCWWALQRPARPPMCWARLNTRAAWARLPEP

SEQ ID NO: 11483 - DNA, 903 bp, Unknown
  Obtained from environmental sample
  misc_feature (1)..(903): n is a, c, g, or t
atggcggggcgaggcacggacatcaagcttggcggcaacccggaacaccgcgcccgcaggcgggctggcacagacgctgcccaaaccgacgccgcttcgtctgcggcagcagacgcggctgcccaaaaatacgcaaccattttcaaggaagaatacgaaaagtggaaaaaggattacgccgaagtaaaagccgcaggcggcctttacgtaattggtaccgaaaggcacgaaagccgccggatagacaaccagcttcgcgggcgttcgggccgacagggcgatccaggcaggtccaaattctttatctcccttgacgacgatttaatgaggctctttggcggcgagaacataaagggcttaatgtcaaagataggaatgagcgacggggaacccatctaccacccgtggctgaataaaagcattgagagggcgcaaacgaaagtcgaagaaagaaactttgaaatccgcaaacaccttcttgaatacgacgacgtattaaaccagcagcgaaagtttatatatgagcaacgaaacgctattatggaagacacgaacctgacggagagggttaataccgcgaccgacgacatggttggttcttatttggatacatacggcgaaaccagccggaaagatccgcctggcgcaatgaaggaactgtccgatacgctaaacaataaattcaactacattttaaaaacaagcgcagacgaagcaaaagatgtcgaggctctggaaaaacgcatttgcgcggaactcaaggcagacattgaaaaacaagaaaggattatcgggaagaattacctttacctttttatccgcgagcagtacctaatgatggtggaaaaacaatgcctggatcaccttgaaaacatggagccccttaggaggcggggtatttaa

SEQ ID NO: 11484 - protein, 300 aa, Unknown
  Obtained from environmental sample
  DOMAIN (131)...(300): SecA Wing and Scaffold domain
  misc_feature (1)..(300): Xaa is any amino acid
MAGRGTDIKLGGNPEHRARRRAGTDAAQTDAASSAAADAAAQKYATIFKEEYEKWKKDYAEVKAAGGLYVIGTERHESRRIDNQLRGRSGRQGDPGRSKFFISLDDDLMRLFGGENIKGLMSKIGMSDGEPIYHPWLNKSIERAQTKVEERNFEIRKHLLEYDDVLNQQRKFIYEQRNAIMEDTNLTERVNTATDDMVGSYLDTYGETSRKDPPGAMKELSDTLNNKFNYILKTSADEAKDVEALEKRICAELKADIEKQERIIGKNYLYLFIREQYLMMVEKQCLDHLENMEPLRRRGI

SEQ ID NO: 11485 - DNA, 741 bp, Unknown
  Obtained from environmental sample
  misc_feature (1)..(741): n is a, c, g, or t
atggaagctttgctcgcccaaaaaaggcgtattcgcagcccggtaggggctggaatgttttatcccgaagataggaaggaaattctcaattatttaaggtcatttggcttggaagaagggcagggcggcaatgcacgggcaattattgcccctcatggggcgtggagctattccgggacgctggttgcaaaggctttttcctcggctatgggcagaagtgacagcatcaaacgggtggtcattctagggccaatccatgataaaagggaaaaagggctgtttttatcaaattctcactcttttcatacccctattgggaatattccagttgaccgagaaatgtcagaagaactggaatttcacggtaattcctttgaaatcaatgatattccacacttggcggagcattccatagaaatccttctgccttttgtaaaatactgcttccccaacgcgtcgattgttcctattttgatgggacagccgaaggctcagtatatttacgaccttgcacaggctttaaaaaccgtagttgggcccgttttggacgaaacattgatagtagtttcctgtaatctttcctgtaataccgatcagaagacggcgcggctttctgccgaagaagttttacgtcttttctttgaaaaagactcatcctctctcgcttccgctattttagatggccgtcttaacgcctgcggtggggcgttggttgcccgtctatttgaaagcgtttactag

SEQ ID NO: 11486 - protein, 246 aa, Unknown
  Obtained from environmental sample
  DOMAIN (13)...(246): Protein of unknown function DUF52
  misc_feature (1)..(246): Xaa is any amino acid
MEALLAQKRRIRSPVGAGMFYPEDRKEILNYLRSFGLEEGQGGNARAIIAPHGAWSYSGTLVAKAFSSAMGRSDSIKRVVILGPIHDKREKGLFLSNSHSFHTPIGNIPVDREMSEELEFHGNSFEINDIPHLAEHSIEILLPFVKYCFPNASIVPILMGQPKAQYIYDLAQALKTVVGPVLDETLIVVSCNLSCNTDQKTARLSAEEVLRLFFEKDSSSLASAILDGRLNACGGALVARLFESVY

SEQ ID NO: 11487 - DNA, 774 bp, Unknown
  Obtained from environmental sample
  misc_feature (1)..(774): n is a, c, g, or t
atgttctgggtacgccgctacgatgacatacgccgcatggaatatatctcgctggtgcggcagatacggaacactactacaggcgcgcatgtcgggatactctgcgttaatcttgatatggggattctggaaagcatatgcgcggcggaacttaacgacacgtttatttcccttaacaacagggtaatatatcccgagggaaaaagccccggcagcttctccgggacgggcaattggattattaccaattcatttacgccgagatcaacccagaacagtgtttttgacataacctacattattccaaggaaaacgctttttgccccggtttattccatgatacgcaaaagccttgtcattatcctcgcgagcctcgcggtctcacttatctttattctgcagattgttaatgaagtttacgttcaaaaactgcaaaaggaacagcttttctcaaggcagaaagaaatgcagttaaaaattctttccggccagattaacccgcattttctctacaatacccttgaaacgatccgcatgatggctcttgaaaaaaaagaaaaggaaattgccgctaccataaaaatgctttcccggcttttgcgccaaagcctttccgccaacgataaaactatcccgctggaaaaagaacttgagcttgtgcggaattatcttgccattcaaaaactccgttttgggaacaggatggattattcgataaatacggaaaacgaccccggcagctgcagcatcctgccacttttgatccaccattag

SEQ ID NO: 11488 - protein, 257 aa, Unknown
  Obtained from environmental sample
  DOMAIN (157)...(239): Histidine kinase
  misc_feature (1)..(257): Xaa is any amino acid
MFWVRRYDDIRRMEYISLVRQIRNTTTGAHVGILCVNLDMGILESICAAELNDTFISLNNRVIYPEGKSPGSFSGTGNWIITNSFTPRSTQNSVFDITYIIPRKTLFAPVYSMIRKSLVIILASLAVSLIFILQIVNEVYVQKLQKEQLFSRQKEMQLKILSGQINPHFLYNTLETIRMMALEKKEKEIAATIKMLSRLLRQSLSANDKTIPLEKELELVRNYLAIQKLRFGNRMDYSINTENDPGSCSILPLLIHH

SEQ ID NO: 11489 - DNA, 870 bp, Unknown
  Obtained from environmental sample
  misc_feature (1)..(870): n is a, c, g, or t
ttgatcgccggggggctatgtccntcccataaccatgtgatagaaagggcgaccaaagtttttatcaatcttgccgacggcagtcagtttgaggggcatattgtaggaagagaccctgaaaatgacattgcggtgttaaaatttgatcctcccaagggaatggaattgcagactataggttacggtgattcttcccttcttaaagtagggcagaaggttttggcgattggcaaccccttcggttttgaccgcacgttaacggttgggattgtttccagtctcggaagacctattcaaatatccagaaaccgcattatccgcgacatgatacagaccgacgcctcaataaatcccggtaattcaggcggcccccttcttgacactcagggcaggatgataggcattaacacgatgatcatttccccgtccggcggctctgtgggagtgggctttgccattcccgtaaataccgccatgcgcgttgtccgcgaacttatccagtacgggaaagtccgccgcggctggatagacgcgaccgtcgtgcagattttcccaagcctcgtccgttacgcaaagctgcctgttgattccggcttgattgtttcgcgtgttgtgcgcggcggcttaagcgaaaaagccggattaaggcagggtaatgacgccgtgcaatacgggcgcagcgtaatttatctcggcggtgacattattaccgccgtaaacggggtaaaaatcaacacctttgccgacctttatacgtcgctggaagcctccaagcccggcgatgttgttaaagtggagattatccggggcgggcaggcaagcacgctgaatattcccctggcggacagagaagaagtaatgagagagtaa

SEQ ID NO: 11490 - protein, 289 aa, Unknown
  Obtained from environmental sample
  DOMAIN (2)...(162): Trypsin
  misc_feature (1)..(289): Xaa is any amino acid
MIAGGLCPSHNHVIERATKVFINLADGSQFEGHIVGRDPENDIAVLKFDPPKGMELQTIGYGDSSLLKVGQKVLAIGNPFGFDRTLTVGIVSSLGRPIQISRNRIIRDMIQTDASINPGNSGGPLLDTQGRMIGINTMIISPSGGSVGVGFAIPVNTAMRVVRELIQYGKVRRGWIDATVVQIFPSLVRYAKLPVDSGLIVSRVVRGGLSEKAGLRQGNDAVQYGRSVIYLGGDIITAVNGVKINTFADLYTSLEASKPGDVVKVEIIRGGQASTLNIPLADREEVMRE

SEQ ID NO: 11491 - DNA, 714 bp, Unknown
  Obtained from environmental sample
  misc_feature (1)..(714): n is a, c, g, or t
atggtgcgcgagaagatcggtatcatctttcagcatccgagccttgatccgcagttgacggcggagcagaacatccgctttcatgcatgcctgtacggaatgtgcggataccgcccggcgttcaagcttatgccctcggcgtaccgcaagcgggtaatggagcttgccgaaattgtcgggatacaggacgcgcttttcaaaccgattaaaaaactttccggcggaatgcagagaaaactggaaattatccgaagccttatccacacgccggacgtgcttttccttgacgagccgacgcagggactggacgctgtaagcaggcgcgggctttgggagtacatcaatgaaacgcgcagtcgttacggaacaaccgtttttcttacgacgcattacattgacgaagccgagaacgtggacaccgtgtgccttatcaacaacggtaagatcgcgtcttgctgtccgcccgccgaattgaaacgaagcctgttgaaacacgagcttgttttagacgcagctgacagaacggcgctgacaaacgagctttccgcgcttgggcttcaatatacgctgaacgggcatgtcgttgttccttacaatgaatccccgcaggaaattatttcgcggataaaaacaaaattgaccgtattgaaaatacacgaaccttcgcttgaagacgcgtatattgagtttctaacaaagcagaaggagatatag

SEQ ID NO: 11492 - protein, 237 aa, Unknown
  Obtained from environmental sample
  DOMAIN (2)...(147): ABC transporter
  misc_feature (1)..(237): Xaa is any amino acid
MVREKIGIIFQHPSLDPQLTAEQNIRFHACLYGMCGYRPAFKLMPSAYRKRVMELAEIVGIQDALFKPIKKLSGGMQRKLEIIRSLIHTPDVLFLDEPTQGLDAVSRRGLWEYINETRSRYGTTVFLTTHYIDEAENVDTVCLINNGKIASCCPPAELKRSLLKHELVLDAADRTALTNELSALGLQYTLNGHVVVPYNESPQEIISRIKTKLTVLKIHEPSLEDAYIEFLTKQKEI

SEQ ID NO: 11493 - DNA, 666 bp, Unknown
  Obtained from environmental sample
  misc_feature (1)..(666): n is a, c, g, or t
atggcaaaaaaagaaagccttgtaaggcccgaacaaattaacgaagacgaacgcgacatgactcttcgcccaaagtacctgtcggaatttttaggacagaagacgatgaaggaaaatctttctgtttttattacaaccgccaaacagcgcaaagaaagcctggatcacctgttcttgataggacctccgggtttgggcaaaaccactctcgcgcaggtagtggctaacgaacttgaaacgggctttgtgcagacttccgcgcccgctctggacaagccgaaagatttggttggtcttttaacaaacttaaaaaaaggcgacgtattttttattgatgaaattcacaggttaaaacccgctatcgaggaactgctgtatatcgccatggaagattacggaattgactgggtagtagggcaggggccgatggcgagaacgcacaggattccgattaacccttttacgcttgtaggcgctacaacaaaagcgggaattgtctcaggccctttgataagccgtttcggaattacctgtcgtttttcattttacgaacaggaagatatggaagcgatagtgcgccgttccgcggggttattggatataaaaattcaaaacgacgccgcgtccctttctgcgaaatcttcagggggactccgcgtgntgtaa

SEQ ID NO: 11494 - protein, 221 aa, Unknown
  Obtained from environmental sample
  DOMAIN (56)...(182): ATPase family associated with various cellular activities (AAA)
  misc_feature (1)..(221): Xaa is any amino acid
MAKKESLVRPEQINEDERDMTLRPKYLSEFLGQKTMKENLSVFITTAKQRKESLDHLFLIGPPGLGKTTLAQVVANELETGFVQTSAPALDKPKDLVGLLTNLKKGDVFFIDEIHRLKPAIEELLYIAMEDYGIDWVVGQGPMARTHRIPINPFTLVGATTKAGIVSGPLISRFGITCRFSFYEQEDMEAIVRRSAGLLDIKIQNDAASLSAKSSGGLRVX

SEQ ID NO: 11495 - DNA, 612 bp, Unknown
  Obtained from environmental sample
  misc_feature (1)..(612): n is a, c, g, or t
atgataaatgtatcaaaaggctggaatcaagaccaaaagaagttaaatattctcttacagaatcaaaaaacatttgaaaaaggaattaatttattattggaaatgcatagtttattgcacgataaaaaggtatataaaataaactccagaacattttatgacgatttatgggaaaatatgaaagatgatacttgcagaattatctccaataaagaaacatcaatattgtggaatatttggcatataactcgaattgaggacattatttcaaatatagtaattggaaggaaagagacaatatttaataaagaaatacaaacaaaattgaatataaaaataaaagacactggaaatgcaatggcattttctgaaatagaatcatttaataaaagtataaatataaaggaattaaaagattatagggttaaagtagggaaatcgacccaaaaaataattaaggctttagaatttagtgatataaaaaggaaattggaaaaagagcaacttgagaaaataaaacaaaatggaggtgtaatagacaatcaaaaatcaatatggctattggatttttggggaaagaaaaatatactgggattaataaatatgccataa

SEQ ID NO: 11496 - protein, 203 aa, Unknown
  Obtained from environmental sample
  misc_feature (1)..(203): Xaa is any amino acid
MINVSKGWNQDQKKLNILLQNQKTFEKGINLLLEMHSLLHDKKVYKINSRTFYDDLWENMKDDTCRIISNKETSILWNIWHITRIEDIISNIVIGRKETIFNKEIQTKLNIKIKDTGNAMAFSEIESFNKSINIKELKDYRVKVGKSTQKIIKALEFSDIKRKLEKEQLEKIKQNGGVIDNQKSIWLLDFWGKKNILGLINMP

SEQ ID NO: 11497 - DNA, 750 bp, Unknown
  Obtained from environmental sample
  misc_feature (1)..(750): n is a, c, g, or t
gtgtcacagtttgacgcaatgtggctgtcaagcctgtgtgacagtaccatgaagggaaaacctgatatagaagtcgttgatttcagcagccgtatgcgcacggtcaacgatatattggatgttacaacaaaaccgattattttcgatgccgataccggtggtatgccggaacatttctcatttaccatgcaaacgctggaacgtgttggcgtgtctgccgcaattgtagaggacaaaataggcctgaaacgcaattcattgtttggggtcagcggaaatcaaacacaagatacaattgaaagctttcagcgcaaacttcaggtcgggaaagcggcgcttaagacaaaagataccatgataattgcccgtattgaaagcttaatccttgagcagggacaggacgacgcgattcgcagggcgcttgcctacgttgacgcgggcacggatggaatcctgatccacagccgtaaagaaacccctgacgaggtatttggattttgccgtaaatttcgcgaataccatcccgctgtaccgcttgccgttgtaccgtcaacatatacacaggtaagagaagacgagttggctgcctgcggagtgaacatcgtaatttacgcgaaccagcttttgcgaagcggttttcgcgcaatgcagaacgcggctgaaattattctgcagaaccatcggacaaaagaagcggatgaactctgccttccgataaatgaaataatcaggctcataccggagtcatag

SEQ ID NO: 11498 - protein, 249 aa, Unknown
  Obtained from environmental sample
  misc_feature (1)..(249): Xaa is any amino acid
MSQFDAMWLSSLCDSTMKGKPDIEVVDFSSRMRTVNDILDVTTKPIIFDADTGGMPEHFSFTMQTLERVGVSAAIVEDKIGLKRNSLFGVSGNQTQDTIESFQRKLQVGKAALKTKDTMIIARIESLILEQGQDDAIRRALAYVDAGTDGILIHSRKETPDEVFGFCRKFREYHPAVPLAVVPSTYTQVREDELAACGVNIVIYANQLLRSGFRAMQNAAEIILQNHRTKEADELCLPINEIIRLIPES

SEQ ID NO: 11499 - DNA, 498 bp, Unknown
  Obtained from environmental sample
  misc_feature (1)..(498): n is a, c, g, or t
atggttcccaattactccaccgatcccataacagcgctgcaaaccgacatggacgcaatctggatttattacgcgtgggaagggcttgaagccgacgtactcggccttgacaccaattatattgacctgagagagcttggttcccaatttgatttttatacgatgataattacagctaacacagactggctgaataaaaaccccgaaacggcgaaaaaattcatgcgggctgtaagcaggggttataatttcgccattgaaaacccggccgaagccggggaaatcctcttaaaatgcgcgcctgagcttgaccgcgaactggtcatgcgaagccaggaatatcttgcttcccgctacagggaggacgcgccgcgctggggagaaatcgatcccgaacgctggggcggtttttaccgctggatgtacgatcgcggtcttttagataaagacataggcgcgggcggttttaccaatgagtatttaccaaatgagcaatga

SEQ ID NO: 11500 - protein, 165 aa, Unknown
  Obtained from environmental sample
  misc_feature (1)..(165): Xaa is any amino acid
MVPNYSTDPITALQTDMDAIWIYYAWEGLEADVLGLDTNYIDLRELGSQFDFYTMIITANTDWLNKNPETAKKFMRAVSRGYNFAIENPAEAGEILLKCAPELDRELVMRSQEYLASRYREDAPRWGEIDPERWGGFYRWMYDRGLLDKDIGAGGFTNEYLPNEQ

SEQ ID NO: 11501 - DNA, 372 bp, Unknown
  Obtained from environmental sample
  misc_feature (1)..(372): n is a, c, g, or t
atgcaagaggcgatggagccaaataaccaaagtgatgtagaattggctaatatggcgatgagtgcagaagaaaaataccagtactggctggacgccgcgcagtacgacttgaaaacggcagcagcaatgctaacaaccggacgctggctgtatgtggcgttcatgtgccaacaggcggtggagaaactcgtcaagggcctctatgttctgtacgtggacgacaacgtcccaaggacgcacaacatcaggactatcattaggcgttacgaaaaaaagctgccagttgaattatccagtggagcaataaaactatttgatgaactatctacctgctatctgaataaccgataccctgaatataaagaccaatga

SEQ ID NO: 11502 - protein, 123 aa, Unknown
  Obtained from environmental sample
  DOMAIN (26)...(123): HEPN domain
  misc_feature (1)..(123): Xaa is any amino acid
MQEAMEPNNQSDVELANMAMSAEEKYQYWLDAAQYDLKTAAAMLTTGRWLYVAFMCQQAVEKLVKGLYVLYVDDNVPRTHNIRTIIRRYEKKLPVELSSGAIKLFDELSTCYLNNRYPEYKDQ

SEQ ID NO: 11503 - DNA, 366 bp, Unknown
  Obtained from environmental sample
  misc_feature (1)..(366): n is a, c, g, or t
gtgcggcgatgccggagtactctgctggttggaggcataggtattatgaacattatgttggtttcagtaaccgagcgtacccgtgaaatcggtataagaatggcaataggcggacgcaaacgagacatactttttcagtttctgacagaatcagtgatcctcagtctcatgggaggattgctcggtataggtatggctttttttgcctgccgtatacttatgacaatgggaattcctacagccgtcaatccgctgattgtggcgatttccgctttctttgccgcatttgtaggagtaattttcggatattatcctgcgttgaaagccgctcggctgtatccgattgacgcattgagatacgagtaa

SEQ ID NO: 11504 - protein, 121 aa, Unknown
  Obtained from environmental sample
  DOMAIN (1)...(114): Predicted permease
  misc_feature (1)..(121): Xaa is any amino acid
MRRCRSTLLVGGIGIMNIMLVSVTERTREIGIRMAIGGRKRDILFQFLTESVILSLMGGLLGIGMAFFACRILMTMGIPTAVNPLIVAISAFFAAFVGVIFGYYPALKAARLYPIDALRYE

SEQ ID NO: 11505 - DNA, 888 bp, Unknown
  Obtained from environmental sample
  misc_feature (1)..(888): n is a, c, g, or t
gtgcgtattgataaaactatctataatattgacgacgatatccgcatagatccgaataaaaaacatactatcgaggtcgtggtcgaccgcttggtcaactcccccaccgttacgtcgcggctcacggaatcaatcgagacggcgctgtcggttagcgccgaggagaccgtgatcgtcgacgtcgccggcaaagaggagttgctattctcacagcgcctcgcctgtcctgtctgcggaatcagcagcgaagagccaagcccggccatgttttcgttcaacaacccgctgggcgcatgcgaggagtgccacgggttgggttttctcatggaggtagaccccgatctggtagctccagaccaaacaaagacgatacttgacggcgcgataatcccgtggaacggagcctacattgacggcgggtggaacaaccacatgctacacgcggtttgcaaacgctacaagataccaatggacaaaccctataaatcgctatcccaaaagcataaagacatcctactgtacggaagcgacggcgaaaaggtggaggtgcagttcgagggcaaggacgggaaaagtcacgcacgtttcaatcgcgcctttgagggggtcgcgccaaacctattgcgccgctacagagacacagcctccgaagacatgcgccgctggatagagggttttatgacgcaacgggcgtgtccggcctgcaagggaacgcgctacaagaaacaaccgctggcggtgctcatcgatgagaaaaatatcgccgaggtgtccgccatgtncatagagtcggcgctgaagttttttagggctactcccccaaaggcaacgcgaaggagatatcaaagcccgtcgtccgtgagatatttgcacggctgggatttctga

SEQ ID NO: 11506 - protein, 295 aa, Unknown
  Obtained from environmental sample
  misc_feature (1)..(295): Xaa is any amino acid
MRIDKTIYNIDDDIRIDPNKKHTIEVVVDRLVNSPTVTSRLTESIETALSVSAEETVIVDVAGKEELLFSQRLACPVCGISSEEPSPAMFSFNNPLGACEECHGLGFLMEVDPDLVAPDQTKTILDGAIIPWNGAYIDGGWNNHMLHAVCKRYKIPMDKPYKSLSQKHKDILLYGSDGEKVEVQFEGKDGKSHARFNRAFEGVAPNLLRRYRDTASEDMRRWIEGFMTQRACPACKGTRYKKQPLAVLIDEKNIAEVSAMXIESALKFFRATPPKATRRRYQSPSSVRYLHGWDF

SEQ ID NO: 11507 - DNA, 681 bp, Unknown
  Obtained from environmental sample
  misc_feature (1)..(681): n is a, c, g, or t
atgctgcccgaaagcaagattcgcggctacctgccggggcgattcagcttcaacaccaaaggcggaaggtgcgaggcctgcgaaggcgacggggagctgcggatagaaatgcacttcctgcccgatgtctacgtcaaatgcgaaacatgcggcgggaaacgctacaatcgagagacgcttgaggtgctttacaaggggaaatccatcgcggacgtattggagatgacggtagacgaggcgttgattttctttgataacctgtcggcgatacggcagaagttgcaagtattgtcgcaagtaggccttggctacatcaaactcggccaatccgccacaacgctctccggcggcgaggcgcagagaatgaagttagcctccgaactgtcaaaaagggccacgggaaaaactctgtatattctagacgaaccgaccactggattgcactttgaggatataagaatgttgatgtcagtcatacaagagctagtcgacaaagacaactcggttatcgtcatagagcataatctggacgtgataaaatgcgccgaccacatcgtagacttaggccccgacggcggagacaaaggcggtacgatagtggcgacgggaacgccggaagaggtggcaaagaatccggcgtcggttactgggaaatttttgaaggggtatctaaaacggtaa

SEQ ID NO: 11508 - protein, 226 aa, Unknown
  Obtained from environmental sample
  DOMAIN (31)...(192): ABC transporter
  misc_feature (1)..(226): Xaa is any amino acid
MLPESKIRGYLPGRFSFNTKGGRCEACEGDGELRIEMHFLPDVYVKCETCGGKRYNRETLEVLYKGKSIADVLEMTVDEALIFFDNLSAIRQKLQVLSQVGLGYIKLGQSATTLSGGEAQRMKLASELSKRATGKTLYILDEPTTGLHFEDIRMLMSVIQELVDKDNSVIVIEHNLDVIKCADHIVDLGPDGGDKGGTIVATGTPEEVAKNPASVTGKFLKGYLKR

SEQ ID NO: 11509 - DNA, 486 bp, Unknown
  Obtained from environmental sample
  misc_feature (1)..(486): n is a, c, g, or t
ttgcagaaagagcttgacaatcgcgggatcaagtttgagacggacgtgaacgtggcgaaggcgggtcgcgggacgcttatcgatctcttatataagaaagtttcccgtccggcgttgataaacccgatcttcatcatccatcacccgctcgacctatcgccgttagcccgtagtaacgacgataatccgacagtcgttgaccgcttccagttagttgtaaacggttgggaagtggtaaacgcctactctgagttagtagacccaatagaccaagcggcgcgtttccgtcaacaagccgcggcaagggcccacggggacacagagaccatggatattgataacgatttcttgctctgcatggagtacggaatgccgccgatttccgggtggggtatgggcatagacagaatagtcgcgctattaacaaacgccgctactctgcgtgacgccgtactattcccgttacttaggccggagaacaattaa

SEQ ID NO: 11510 - protein, 161 aa, Unknown
  Obtained from environmental sample
  DOMAIN (3)...(158): tRNA synthetases class II (D, K and N)
  misc_feature (1)..(161): Xaa is any amino acid
MQKELDNRGIKFETDVNVAKAGRGTLIDLLYKKVSRPALINPIFIIHHPLDLSPLARSNDDNPTVVDRFQLVVNGWEVVNAYSELVDPIDQAARFRQQAAARAHGDTETMDIDNDFLLCMEYGMPPISGWGMGIDRIVALLTNAATLRDAVLFPLLRPENN

SEQ ID NO: 11511 - DNA, 402 bp, Unknown
  Obtained from environmental sample
  misc_feature (1)..(402): n is a, c, g, or t
atgaatggaaagatggaactctttgttgcgctgcgctacctccgcggcaagcgcaaaatcggttttgtctcgtggatcacctacatctccgccgccggcgtttgcctcggctcgtttgtgctcgtcatagcgctttccatcgccaacggtttcgagaaagaggtccgcgaccgcattgtcggtacgcttgcccatgccaaaatatcgcggtaccacatatttcaaatgaacgactatgagtctctgcgcgagttaattttggaacatcccgacgtcgtaggcgccgccccgtacatcacgggcaagggcggcgtagagtaccagcaatatcaggagggggtgtttatcaacggcgtagacccgaaatacgagacgacagtgaccgatatccacagtcgataa

SEQ ID NO: 11512 - protein, 133 aa, Unknown
  Obtained from environmental sample
  misc_feature (1)..(133): Xaa is any amino acid
MNGKMELFVALRYLRGKRKIGFVSWITYISAAGVCLGSFVLVIALSIANGFEKEVRDRIVGTLAHAKISRYHIFQMNDYESLRELILEHPDVVGAAPYITGKGGVEYQQYQEGVFINGVDPKYETTVTDIHSR

SEQ ID NO: 11513 - DNA, 819 bp, Unknown
  Obtained from environmental sample
  misc_feature (1)..(819): n is a, c, g, or t
ttgcacggaacggttatggaaatcctgagcggacgcggtccgtgctatcttaagacgaccggtattactaaagagcaggaggcggatttgataaaggcctacctcaacatggctcccagccaaagccttcgttggctggaaagcggattgccgccgggcgttcaagatgtggagattgagggaaccgaaccctatatcacaggcggccacaccgcggcgggatattgggtggacacgaatcgggaaacaaccatacgcggcttgtttgcggccggagacgcggcgggaggctgcccgcaaaaatatgtgaccggggccttggtagaaggagaaatcgcggctagcggagccgtcaaatatatggataaagagacttccgcgccggatacggacggagccgaagcggtcaagcaaaagttagaagactatttatcccctactcgcggcgaggcctctttcgccgtggacggcttggaagaggagatgcaggcggtaatggacaaatacgccggcgggatcggcgcctcttaccgtttctcggagacgtcattaaacgacgccgacaaaaaaatccgcgaattggaggcgcgatccaaccatgtttcagccgcggatatgcaggagttagtttacatattggagctcanagagcgcttgacgctatgcaagtcgcttatcgttcacctatccgccagaaaagagacgcgctggcacagtttcgccgagcgcgtcgattttccggaaaaaagcgataaatgggagtgctatngtcattcccgtttagaaacggcaaaatcnacgcggtccggcgtccgttaa

SEQ ID NO: 11514 - protein, 272 aa, Unknown
  Obtained from environmental sample
  misc_feature (1)..(272): Xaa is any amino acid
MHGTVMEILSGRGPCYLKTTGITKEQEADLIKAYLNMAPSQSLRWLESGLPPGVQDVEIEGTEPYITGGHTAAGYWVDTNRETTIRGLFAAGDAAGGCPQKYVTGALVEGEIAASGAVKYMDKETSAPDTDGAEAVKQKLEDYLSPTRGEASFAVDGLEEEMQAVMDKYAGGIGASYRFSETSLNDADKKIRELEARSNHVSAADMQELVYILELXERLTLCKSLIVHLSARKETRWHSFAERVDFPEKSDKWECYXHSRLETAKSTRSGVR

SEQ ID NO: 11515 - DNA, 948 bp, Unknown
  Obtained from environmental sample
  misc_feature (1)..(948): n is a, c, g, or t
ttgttaataggtattgataaatatatttttattaaaagggataaatcctatatgccgctaactcatctcgacaatctagaagccgaagccgtctacatattccgcgaggtagccgccgagtgcgagcgcccggtaatgctttattcaatcggcaaggattcgtcggtaatgctgcatctggcgatgaaagccttctntccggaaaagccgcctttcccgtttctgcacatcgatacgagctggaaattcaaggagatgcttgcctttcgcgacaggcgcgccggtgagctgggtatcaatatgctggcctaccgcaacgaggaagccatcgctcagggcatcaacccgtttgataacggcgccgcctacaccgacattatgaaaacccaagcgcttaaggacgctctaacgaagtacggctttacggcggccttcggcggcgggcggcgcgacgaggagaaatctcgcgccaaagagcggatattctcttttcgcaacgagcgccacgcttgggatcctaaaaatcagcggcctgaaatgtggaagctctacaacactaagatcaataagggcgagagcataagggtcttccccatctccaactggacggagaaggatatatggcaatatatcaaacgtgaaaacattcccatcgttccgctctattttgcggcggagcgtccggtggtataccgcgacggcaatatcataatggcggacgacgagcggatgcgctttttgccgggtgagaaaccgcagatgagaaaagtccgtttccgcacgctcgggtgctatccgttaaccggcggagtggaatcggacgcggacaccttagacgcggtaatcgcggagactctggcgtcggttaccagcgagcgcacgagcagggtcatagacaacgaggcggccggcagcatggagcgccgcaagcgggagggatacttttaa

SEQ ID NO: 11516 - protein, 315 aa, Unknown
  Obtained from environmental sample
  DOMAIN (43)...(270): Phosphoadenosine phosphosulfate reductase family
  misc_feature (1)..(315): Xaa is any amino acid
MLIGIDKYIFIKRDKSYMPLTHLDNLEAEAVYIFREVAAECERPVMLYSIGKDSSVMLHLAMKAFXPEKPPFPFLHIDTSWKFKEMLAFRDRRAGELGINMLAYRNEEAIAQGINPFDNGAAYTDIMKTQALKDALTKYGFTAAFGGGRRDEEKSRAKERIFSFRNERHAWDPKNQRPEMWKLYNTKINKGESIRVFPISNWTEKDIWQYIKRENIPIVPLYFAAERPVVYRDGNIIMADDERMRFLPGEKPQMRKVRFRTLGCYPLTGGVESDADTLDAVIAETLASVTSERTSRVIDNEAAGSMERRKREGYF

SEQ ID NO: 11517 - DNA, 894 bp, Unknown
  Obtained from environmental sample
  misc_feature (1)..(894): n is a, c, g, or t
atgaaaccaacagattcaactagccaattttataaagacataattggcgtacatgccccatgggtgattacagctgtancaatggacgatgcatccaggaaagtancaatacggatagagcatgatcctgagaaaatactggcctgcccaatatgcgcacaaagcaccaagctgcatgaccatcgggtacgggtattaaggtatttagacacctgtcagtacgagacttttctggaagtgcatgtgccgagaatacggtgcgaaaaagacggagtgcagcaaatacagataccgtttgcggaaaaacattcccggtttaccagccggtttgaaatggctgtcctggtatggcttagaagcagccccatatctgacgtggcggaaaacttcgacatgagctgggacgaagtggacgggatattgcaacgggcggtcaagcgggggcttgcccggaggaagcgggagaaagtagtcaacatggggatcgacgagacgtcatatcaaaaggggcacaaatatgtgaccataatccaggacaaagaccgggattgcgtgatagacgtgcttgacgaccggaaggcggaaactgtcgaaaaatggcttaaaacgcaggaaaagagcgatttaagcgaagtaaacagcatatccatggatatgtgggacgcgtatataaaagcggtaaaagcggcgattcctggagcgaaggagaagatagcgtttgaccggtttcatgtgagcaagcatataaacgaagcgttggacaaagtgaggaggcgggaacacggtgcttttatgaaacaggccggggaaagcccgctcagcaagagccggtttcagtggctgataaattcgaaccggacggacaaccgaagcgggaaacggaaagcgttttga

SEQ ID NO: 11518 - protein, 297 aa, Unknown
  Obtained from environmental sample
  DOMAIN (159)...(260): Transposase
  misc_feature (1)..(297): Xaa is any amino acid
MKPTDSTSQFYKDIIGVHAPWVITAVXMDDASRKVXIRIEHDPEKILACPICAQSTKLHDHRVRVLRYLDTCQYETFLEVHVPRIRCEKDGVQQIQIPFAEKHSRFTSRFEMAVLVWLRSSPISDVAENFDMSWDEVDGILQRAVKRGLARRKREKVVNMGIDETSYQKGHKYVTIIQDKDRDCVIDVLDDRKAETVEKWLKTQEKSDLSEVNSISMDMWDAYIKAVKAAIPGAKEKIAFDRFHVSKHINEALDKVRRREHGAFMKQAGESPLSKSRFQWLINSNRTDNRSGKRKAF

SEQ ID NO: 11519 - DNA, 588 bp, Unknown
  Obtained from environmental sample
  misc_feature (1)..(588): n is a, c, g, or t
gtgtgggtggatcattgcaaatttaccgacggtacctgtgacgacatgattcgtaactaccatcatgacggcgcctttgacatcaagaaaggcaaaaatattaccgtttcatggtgcgaatttaccaaccacgacaaggtaatgctggtcggttccggggataccggcgagtatcttaccgcgacggatcggcagataaccctgcatcacaactatttccataaaaccactcagcgcacccccaggacgcgcgggacccagatgcatctgtacaataactattggaatgatatcggggtaaaagataattcgggttactgcatggggccgggcgtcgccgcccagttcatcgtggaaaacaactactttggatcattgtatagttcgagcaccaaagtgatagattactacgatacatcggcgaatccccgcattgtctggtcctcgggcaaacacaagaccgttgacaggtccaagaatgacaaaggcaccagcaaaccgtggactccgtcttacagtattcgctggatccaactccagttgactcatccattcctaaagcccaggtccgacatgaccagtttctaa

SEQ ID NO: 11520 - protein, 195 aa, Unknown
  Obtained from environmental sample
  DOMAIN (1)...(123): Pectate lyase
  misc_feature (1)..(195): Xaa is any amino acid
MWVDHCKFTDGTCDDMIRNYHHDGAFDIKKGKNITVSWCEFTNHDKVMLVGSGDTGEYLTATDRQITLHHNYFHKTTQRTPRTRGTQMHLYNNYWNDIGVKDNSGYCMGPGVAAQFIVENNYFGSLYSSSTKVIDYYDTSANPRIVWSSGKHKTVDRSKNDKGTSKPWTPSYSIRWIQLQLTHPFLKPRSDMTSF

SEQ ID NO: 11521 - DNA, 846 bp, Unknown
  Obtained from environmental sample
  misc_feature (1)..(846): n is a, c, g, or t
ttgaaaaaaatgaacggttgggcaatagatggaatgaaaaaaacttacgagcgcaccggcgtttcttttgacaaatactattttgaaagcgaaacatatatgctaggcaaggacgaagttcttaaaggccttgaaaagggaattttttttcgtcaggaagacggagccgtcgccgtagatttaaaagacgaaaatttggataaaaagattttattgcgaagcgacgggacttcgatttacattactcaggatttcgggactgcgataaaccggcacaaggactggccgtttgatcaaatgatctacgtagtcggctccgaacagcagtatcattttaaggtgctttttattcttcttgataaactggggttcgagtgggcgaaaaacctgtaccacctttcctacggcatggtaaaccttcccgaagggaaaatgaaaagccgcgaaggaaccgttgtagacgccgacgacttaatcgacagcctgcgcgatatggcgttagaggaaatccgcgaaaaggaaagagaagaggaggtgggcgatcccgcgcaggtggctgaaaaaatcgccgttgccgccctgcattatttccttttacagccaagcccggtaaaagacatgctttttgacccgaaagaatcgctttcatttaatggcaataccggcccatatttacagtacatgggcgcgcgtatttcctcaatgttaagaaaaagtacgcaaaaaataacggacagcgggaattttgaagatattaacgaatgtttttccttgttggtttccgatcctgaatgggagcttgtcaaaattcttgccgcctatctcggccaatctgatcattgttga

SEQ ID NO: 11522 - protein, 281 aa, Unknown
  Obtained from environmental sample
  DOMAIN (1)...(211): tRNA synthetases class I (R)
  misc_feature (1)..(281): Xaa is any amino acid
MKKMNGWAIDGMKKTYERTGVSFDKYYFESETYMLGKDEVLKGLEKGIFFRQEDGAVAVDLKDENLDKKILLRSDGTSIYITQDFGTAINRHKDWPFDQMIYVVGSEQQYHFKVLFILLDKLGFEWAKNLYHLSYGMVNLPEGKMKSREGTVVDADDLIDSLRDMALEEIREKEREEEVGDPAQVAEKIAVAALHYFLLQPSPVKDMLFDPKESLSFNGNTGPYLQYMGARISSMLRKSTQKITDSGNFEDINECFSLLVSDPEWELVKILAAYLGQSDHC

SEQ ID NO: 11523 - DNA, 915 bp, Unknown
  Obtained from environmental sample
  misc_feature (1)..(915): n is a, c, g, or t
atggcgtcatttgaagttatcgggggcagcaggttgaagggggatattaccccacagggcgcgaaaaatgaggcgttacaggtgatttgcgctgtgctgctcacctccgagaaggtaaccattcgcaacgttcccgaaatnttagatgtaagcaagctcattgagctgctgtccgacttgggcgtggaggtagctaaggagggtgtcggcgtttacactttttgcgcaaggcaggtgaataccgagctgctgtgcgctcccgagtttgccaagaaagcagcaagtttgcgcggctctattatgatggtgggtccgctgttggcgcgttacggcttggtgtacgcgccgcgcccgggaggcgataaaattggtcgccgccgcttggatacgcactttgtgggctttgaaaagctgggcgcaagcttcagctacgagcctgacagcgcgttctaccgcgtggaggcaaaacgcctgagcggtgcgtatatgctgcttgacgaggcatcggttacaggtacggcaaacattgtaatggcagctgtcttggctaagggaaaaaccaccatttacaacgccgcctgtgagccgtacgtgcagcagctatgcaaaatgctggtgcgcatgggcgcaaacatttcgggcattggctcaaacctgcttaccattgagggcgtagcgcagcttggcggcgcagaccacaccatactccccgacatgattgaggtcggcagcttcattggcatggctgccatgacgcatagcgagctgaccataaaaaattcctcgtttgacgacctcggcattattcccgatgcttttcgccgactcggtattcagctggagcggcgcggagacgatatttacattcccaagcaggacagctacgaaatagaaacttttatgacggctcaataa

SEQ ID NO: 11524 - protein, 304 aa, Unknown
  Obtained from environmental sample
  DOMAIN (6)...(304): EPSP synthase (3-phosphoshikimate 1-carboxyvinyltransferase)
  misc_feature (1)..(304): Xaa is any amino acid
MASFEVIGGSRLKGDITPQGAKNEALQVICAVLLTSEKVTIRNVPEXLDVSKLIELLSDLGVEVAKEGVGVYTFCARQVNTELLCAPEFAKKAASLRGSIMMVGPLLARYGLVYAPRPGGDKIGRRRLDTHFVGFEKLGASFSYEPDSAFYRVEAKRLSGAYMLLDEASVTGTANIVMAAVLAKGKTTIYNAACEPYVQQLCKMLVRMGANISGIGSNLLTIEGVAQLGGADHTILPDMIEVGSFIGMAAMTHSELTIKNSSFDDLGIIPDAFRRLGIQLERRGDDIYIPKQDSYEIETFMTAQ

SEQ ID NO: 11525 - DNA, 510 bp, Unknown
  Obtained from environmental sample
  misc_feature (1)..(510): n is a, c, g, or t
ttgatggccgagatcantctgatctgctggatccgcacaatattggatgattttacgcaaactatacaaaatttattacgaaacggatatgaccgcgtaaagctgacctcttataccgaggatataacaagccatttactcttaaaacataaagatacaatcagcactaacggccttttcggctatatcgaaaaatctccggaaggcccgttcttttttaacggcatcaactggcgcccggaggatagttttaagccgatggaacgcccatggtacaaagccgccatgaaagcgaacggtgaaattgctgaaaccgaaccttatacagacgtagcaacaggcgaaactgttttttcgtattcccgctgtatttttgacaatgcgggtaatagtataggcgttatcagcattgacgtgcgcgccggctatataggggacagagtcgcccataccgcgtttgccagaagaaaaagctaccgagtggtggcccagtcaaggactttaccataa

SEQ ID NO: 11526 - protein, 169 aa, Unknown
  Obtained from environmental sample
  misc_feature (1)..(169): Xaa is any amino acid
MMAEIXLICWIRTILDDFTQTIQNLLRNGYDRVKLTSYTEDITSHLLLKHKDTISTNGLFGYIEKSPEGPFFFNGINWRPEDSFKPMERPWYKAAMKANGEIAETEPYTDVATGETVFSYSRCIFDNAGNSIGVISIDVRAGYIGDRVAHTAFARRKSYRVVAQSRTLP

SEQ ID NO: 11527 - DNA, 576 bp, Unknown
  Obtained from environmental sample
  misc_feature (1)..(576): n is a, c, g, or t
ttgaggacccgaacccgcgaggggattcccaaaaaaccccgggaaccaacgggttccgggaagcggtacaaagggtttaggcaaaaaggattagggcgggggctttttccatttatatgcaaatgcttgaacattgggggactcaaagcggcttttgcccaagtggcggttcgccgccaaaatgctgcgggaggacgacctcccggccgacatctgcgtcatatctggggcttcagcgccgcgatgacgcgcaaggcggtcgccacgctgcgcaaacgcggcattaaaatcgcgtgcctctacccgcgcatactctttccgtttatcaacgggcattacttcgaactgctcaactactgcccgcgcatagccgtgatagagtcgaactacacggggcagctggcctcccttatacgcatacaaacgggaatcaataccatctccattaagaaatataacggcgagcctttcactccggaggagatcgaagcggaactcctcggtatcattgagatggagaaatttataaccgacctaaacaaaccaaacagcgacggagcggcgacaaatgggtga

SEQ ID NO: 11528 - protein, 191 aa, Unknown
  Obtained from environmental sample
  misc_feature (1)..(191): Xaa is any amino acid
MRTRTREGIPKKPREPTGSGKRYKGFRQKGLGRGLFPFICKCLNIGGLKAAFAQVAVRRQNAAGGRPPGRHLRHIWGFSAAMTRKAVATLRKRGIKIACLYPRILFPFINGHYFELLNYCPRIAVIESNYTGQLASLIRIQTGINTISIKKYNGEPFTPEEIEAELLGIIEMEKFITDLNKPNSDGAATNG

SEQ ID NO: 11529 - DNA, 474 bp, Unknown
  Obtained from environmental sample
  misc_feature (1)..(474): n is a, c, g, or t
ttgtcgaaatgtcgtagggtatttaatactcgcaaaaaaaaatgttatttggaggataaaatgtctgttccgtatactgaaaaaccttgggagtttttaaaagattaccgtgggaaagtcttttcaggcgaatggcccactttgcctgaaatgtttaaaattaccgtttcccgttttccgcaccgagcctgtttcaccatttacgaacctaatagaatcagtctggattacacggaagcgcttaaagtgatagaagccgtcgcccgctggctgcatagtaatggaattcgccgaggcgacagggttgttgtaacggggaaaaacgctcccgaatggacagtcgcgtatcttgccatacttttcgcaggcggcgtggttgttccaatagattatcagcttaagaatgaagaaatcgatcttttgataaaagcctcaggcgcgcgcatgatttttgttgatgaagaaagggcatga

SEQ ID NO: 11530 - protein, 157 aa, Unknown
  Obtained from environmental sample
  misc_feature (1)..(157): Xaa is any amino acid
MSKCRRVFNTRKKKCYLEDKMSVPYTEKPWEFLKDYRGKVFSGEWPTLPEMFKITVSRFPHRACFTIYEPNRISLDYTEALKVIEAVARWLHSNGIRRGDRVVVTGKNAPEWTVAYLAILFAGGVVVPIDYQLKNEEIDLLIKASGARMIFVDEERA

SEQ ID NO: 11531 - DNA, 564 bp, Unknown
  Obtained from environmental sample
  misc_feature (1)..(564): n is a, c, g, or t
atggtcgagggaatgcaggcgggtatattacattcaacgcatttattcaacgcgatgagcaggatggatcaccggaaccccaacgccgtaggggcgatattgatccacagcgagatgtcatgcgaaattatcgcggataatttccatatacaccccgatctgctccagctcctgttacgcgacaaacccatagagaaaatcgtcctgataactgacgggcttaagcctaccgaacagcgggaaagcccgttcttcgccaacggggaggaagttgtttttcatgacggggctttccaccgggtctcggacgatgttatcgcgggatcgggtctgacgatgatcagagggattcaaaaccttgtctcgtctggtttcagcctggttgacgcggttaaaaccgcgacgattaaccccgcccaggttatgcgttatgcgcgacaaggcgccttaattcccggtaagctggcggatataacggtgttcgacagggattttaagatacgccttgttatgattggcggaaaaattatagaggggaaagaaaatgcggatagttattcataa

SEQ ID NO: 11532 - protein, 187 aa, Unknown
  Obtained from environmental sample
  misc_feature (1)..(187): Xaa is any amino acid
MVEGMQAGILHSTHLFNAMSRMDHRNPNAVGAILIHSEMSCEIIADNFHIHPDLLQLLLRDKPIEKIVLITDGLKPTEQRESPFFANGEEVVFHDGAFHRVSDDVIAGSGLTMIRGIQNLVSSGFSLVDAVKTATINPAQVMRYARQGALIPGKLADITVFDRDFKIRLVMIGGKIIEGKENADSYS

SEQ ID NO: 11533 - DNA, 393 bp, Unknown
  Obtained from environmental sample
  misc_feature (1)..(393): n is a, c, g, or t
atgcggatagttattcataaaaaccacgaagaggccagccgctgggcggcgtattatatagccggcagaatcaacggttacaacaaaaccgcggacaagccctttgtactggggcttcccacgggctcaagccccctgtttatataccgcgagtttataaaattgaacagcgtcgggaaactttcttttgccaacgtccatactttcaacatggacgaatacgtgggactgccgcccgaacatccctacagctaccattactacatgatggaaaatctttttaagcatattgatataaaacccccccacacgcatattttagacggaatggcgaaagaccctgtggaggaatgcgccctttacgagaaggcatcccgaaaatgggcggcatag

SEQ ID NO: 11534 - protein, 130 aa, Unknown
  Obtained from environmental sample
  DOMAIN (15)...(127): Glucosamine-6-phosphate isomerases/6-phosphogluconolactonase
  misc_feature (1)..(130): Xaa is any amino acid
MRIVIHKNHEEASRWAAYYIAGRINGYNKTADKPFVLGLPTGSSPLFIYREFIKLNSVGKLSFANVHTFNMDEYVGLPPEHPYSYHYYMMENLFKHIDIKPPHTHILDGMAKDPVEECALYEKASRKWAA

SEQ ID NO: 11535 - DNA, 882 bp, Unknown
  Obtained from environmental sample
  misc_feature (1)..(882): n is a, c, g, or t
atggaaagttttaactgggacagaccaaccgactttgatccgacagaacgggcatggtttctggacgcggttgcggcaaaaggcggtatcgcggaaactttaatgtatcatgatattatttacggagacgccatgcttatatattctatgtgcctttttgataacaaaggaaaacgtttgggcgttgtggggttaagagtacaaatcgacgctataaaaaaatatatcgttaatacgatgctcgcaaataatgaatacggagtgctgctcagtaaagatatgattatactcgcccatcctaatgaggatttagtcgggagaaacgcgcgtgaaccggacattcatttttcgaaatttgtaaacgaattagagaaaggaatagaaatttacggacgcccggtaacaacctttaaaggtgaaagcgccatcgctaattttagaatactccccaacggctgggttattggcataatatcgcctaaagaaccttactataaaagcgtaatcaatatagcgataattcttattatattgggcacagtgctttcgtctattttaatttttgttctgattcgcgttgataccgcaagggaaaaatcggacttggcaaacatacataaatcttctttcttggcaaacatgagccatgaaatacgaacgcctatgaacgccattatcggcatgacggatcttttggcttacgaacagcttaacaaacggcagatgggttttgtccacgacatanaattatccgctcaatcgcttctcgccattatcaacgacatattggatctgtctaaaattgaagccggtaaattggagcttaatcctgtcaactacgattttcatgtgcttttggaaatatttttccatgttcactaa

SEQ ID NO: 11536 - protein, 293 aa, Unknown
  Obtained from environmental sample
  DOMAIN (33)...(112): Cache domain
  misc_feature (1)..(293): Xaa is any amino acid
MESFNWDRPTDFDPTERAWFLDAVAAKGGIAETLMYHDIIYGDAMLIYSMCLFDNKGKRLGVVGLRVQIDAIKKYIVNTMLANNEYGVLLSKDMIILAHPNEDLVGRNAREPDIHFSKFVNELEKGIEIYGRPVTTFKGESAIANFRILPNGWVIGIISPKEPYYKSVINIAIILIILGTVLSSILIFVLIRVDTAREKSDLANIHKSSFLANMSHEIRTPMNAIIGMTDLLAYEQLNKRQMGFVHDIXLSAQSLLAIINDILDLSKIEAGKLELNPVNYDFHVLLEIFFHVH

SEQ ID NO: 11537 - DNA, 630 bp, Unknown
  Obtained from environmental sample
  misc_feature (1)..(630): n is a, c, g, or t
gtggtgggcatgatgctctgcttcagcatgacgttctggtttgtgttccagcaggccggcgggacattgaaccttttcgcccgcgactacaccgaccgcgtcctattcgggtgggagattcccgccccctggttccagtcggtaaacgcccttttcatagtcgcactcggccccgtcttcgtgaaactctggtcgcttaggcagggcaagtggcccagcagcccaatcaagttcgcccttggcatcatgttcgccgcgctgggcttcttctggatggtgccagccgcgctgcaggtccagtccgtcccaggcgaaatcacaaaagtgggcatgtactggctggtcggcgtctatttcatccacacactgggcgagctgtgcctaagccctgtcggcatgagctatgtttcaaagctggcccccaagcagataggcagccagttgatgggcgcgtggttcttcgcaacgggctgcggctcgtacctagccggaaaggccgcaggcatgatggattccgtgccgctctggcagttgttcctcgtctgcggtgccatcgcgatggtcatgtcgctcatcctgtggttcctcgtcagccgcctgatatataggctgatgggcggtcatagttaa

SEQ ID NO: 11538 - protein, 209 aa, Unknown
  Obtained from environmental sample
  SIGNAL (1)...(27)
  misc_feature (1)..(209): Xaa is any amino acid
MVGMMLCFSMTFWFVFQQAGGTLNLFARDYTDRVLFGWEIPAPWFQSVNALFIVALGPVFVKLWSLRQGKWPSSPIKFALGIMFAALGFFWMVPAALQVQSVPGEITKVGMYWLVGVYFIHTLGELCLSPVGMSYVSKLAPKQIGSQLMGAWFFATGCGSYLAGKAAGMMDSVPLWQLFLVCGAIAMVMSLILWFLVSRLIYRLMGGHS

SEQ ID NO: 11539 - DNA, 783 bp, Unknown
  Obtained from environmental sample
  misc_feature (1)..(783): n is a, c, g, or t
ttgatggagaaggcctcgcccgcgccaaaactgatcttcgtcttcgcgacctgcatagtcggcgttataggcgacgacgtggacgcggtgtgcagggcggcggaggcgaagcacggaatccgcgtgatccccgtgaaagcaccggggttctccgggacgaagatgcacgggtatcggctggcgtgcgacgcgataatgacgctcgtaaagccgcacgccgacgcgcctcagcggttcggcgtcaacattttgggcgactacaacctcgccggcgagatgtggatcatcaagaactatctggaggagatcggcatacccgtcgtttcgaccgtaacaggcgactcgtcctacgagacgctgactcgcgctccgtcggccacgctcaacatcgtgcagtgcgccggatcgtcggcctatctggcggagcgtatggaggcggagttcgggataccgtacatcaaggtcagcttcttcggcgtggaagacacaaccgcgtcgctgctgcgcgttgcggacgctctcggcaggtcggacgtctcggcgaacgcccgcgccttcgcggagcggcgcacggcggaggtcatgcccgtcatagagaaataccgcccgcgcttaaagggcaaacgcgccgcgatcttcgtgggcggcgggttcaaggccatatcgcttatcaggcaattcaacgagttgggcatggagacggtggtcgtaggcacgcagacgggcaagaaggacgagtacgagattatcgcggaactcgtgggcggcggcgcggtcatntag

SEQ ID NO: 11540 - protein, 260 aa, Unknown
  Obtained from environmental sample
  DOMAIN (1)...(260): Nitrogenase component 1 type Oxidoreductase
  misc_feature (1)..(260): Xaa is any amino acid
MMEKASPAPKLIFVFATCIVGVIGDDVDAVCRAAEAKHGIRVIPVKAPGFSGTKMHGYRLACDAIMTLVKPHADAPQRFGVNILGDYNLAGEMWIIKNYLEEIGIPVVSTVTGDSSYETLTRAPSATLNIVQCAGSSAYLAERMEAEFGIPYIKVSFFGVEDTTASLLRVADALGRSDVSANARAFAERRTAEVMPVIEKYRPRLKGKRAAIFVGGGFKAISLIRQFNELGMETVVVGTQTGKKDEYEIIAELVGGGAVX

SEQ ID NO: 11541 - DNA, 564 bp, Unknown
  Obtained from environmental sample
  misc_feature (1)..(564): n is a, c, g, or t
gtgagctgggtcaattggtccgtcacctacaaggacgagggcgcctcggcgctcaagccgtccgtgaagaaattcgatgggaattggacggtcgacgatctgacggaatcaggcgcgtacatccgcggcaaactgatagccgcagcccaaaaagaggacaacgagtggaacaccgccacgttcgtcactgacctagtaatccccaacacccaacagaccggcggatcggcggccatagcccccgtaagcgcccaatctaacagcttctccgtaggcccgatccccgcaagcaaatcaaagggcggcgtcaaattcttttggcagggtaaagccgttgcgggcggatcactattcatctacgacgccttgggaaataccgtaaagaacatccgtataaacgagatatccgcaagcaatccatcaaagcggacaataggcgcgtgggacttgacagacgctaaaagccgtcgggtcaagacgggtagttattttgtgaaaggcaaggtaatcgtacagaacggaagcgttgcgaatgtgtcttcaataatagtggtcggtaattag

SEQ ID NO: 11542 - protein, 187 aa, Unknown
  Obtained from environmental sample
  misc_feature (1)..(187): Xaa is any amino acid
MSWVNWSVTYKDEGASALKPSVKKFDGNWTVDDLTESGAYIRGKLIAAAQKEDNEWNTATFVTDLVIPNTQQTGGSAAIAPVSAQSNSFSVGPIPASKSKGGVKFFWQGKAVAGGSLFIYDALGNTVKNIRINEISASNPSKRTIGAWDLTDAKSRRVKTGSYFVKGKVIVQNGSVANVSSIIVVGN

SEQ ID NO: 11543 - DNA, 882 bp, Unknown
  Obtained from environmental sample
  misc_feature (1)..(882): n is a, c, g, or t
ttgatggccgaggcccttttctctcttggtattgaagccggagaagcgcagatagaagcgctgcgcgccgaaatggggcttgataaaagctttgccgaacagtacttttcctggctgggaaaattcctcacgggaaacctggggaactcttcccgcttccgcggcgtctccatttccggagtgttaagtgaaaggctccctgtaacattcgctttggctggactttcctttttgttcattattctgatcgccatacccgcatcccttatcggcgtaaaaaaagaaagctccattttaaataacatcatcaccggtttaacggcgctgaacatttcatttcccggttttttccttggcgtgctttttatttttgtcttcggcatcttctttaagctttttgtcccgggtgagttcatcagctaccaccagaacccggtaatttttttacgctgccttgtattccctggccttgccatcgccttgccaaacgcggcgctgcttgtaaagtttctgcgcccttccatttacagcgagcttcgcagcgactatgcccgcaccgcaaagagcaaaggcgcggacagcgtgcgcatactccgtagccacgcgcttaaaaacgcctcccttccggcaataacgctgctcgggatgatcacgggagaaatactttcaggcagcgttgtcatcgaacaggtttttggcatccccggaatcgggaagcttctgattgcttcgattacggcaagggattatttaacgatcgaaacaatagtgatctacattgcctttgtcgttatactcgccaatacactttcggatattattctacagataatcgatcccagaattcgcttaacgcanagcttgaaaaggtgttctacatag

SEQ ID NO: 11544 - protein, 293 aa, Unknown
  Obtained from environmental sample
  DOMAIN (66)...(284): Binding-protein-dependent transport system inner membrane component
  misc_feature (1)..(293): Xaa is any amino acid
MMAEALFSLGIEAGEAQIEALRAEMGLDKSFAEQYFSWLGKFLTGNLGNSSRFRGVSISGVLSERLPVTFALAGLSFLFIILIAIPASLIGVKKESSILNNIITGLTALNISFPGFFLGVLFIFVFGIFFKLFVPGEFISYHQNPVIFLRCLVFPGLAIALPNAALLVKFLRPSIYSELRSDYARTAKSKGADSVRILRSHALKNASLPAITLLGMITGEILSGSVVIEQVFGIPGIGKLLIASITARDYLTIETIVIYIAFVVILANTLSDIILQIIDPRIRLTXSLKRCST

SEQ ID NO: 11545 - DNA, 945 bp, Unknown
  Obtained from environmental sample
  misc_feature (1)..(945): n is a, c, g, or t
ttggccgagaagcgagactcacgacacctgcgcctggcggaaaagggccgcgactggagccttttgcgaaaccgtctgtgcgcccttgccagcaacagcggcgcctttggcttcgcctgcggggtggagtggctggcatccgaaaaaatagacgtacacgagtccagaggtcttgcttggggcagtgggacaaacatagtcggtgaactggcggcgctgaaccgccttgtttcgggtcacccctgcttccatgacggggccattgtagagcgcgtgagtaaagaagattcatgggtgctggccctttcgcgccaaagcgcagacaggctgaaccgaggcctcgtattggtcaacttggatcccgagagttggcagagcatcgaaattcccaaggcgatttggaacaccttgggcgagcctagcatagacctgctggggcaaagctcgccccacatggaagtcagcggcggcaaagtccttattcggctccagccagccgactgctttttcctgtcggattctttggaaccagcggggacacacggcacgaactacagggacgcaagggcgagggcggcgtgggcagttcagtctctggcagagcatgtcccaacggagtcccttggcaagttcgactggaaagaactggccgccttggttgacagtgacccgctgacgttcctagccgccctgtccaacttggaaaacagtgaatcgggcttggtggcgcgcatccgcagtgcaatgaactccaaagcctatccacaggcgctcctatggacgcccgccgaccttggcagggtgttcttgataccgccaagccattcggttctgatcagggacattgccccatttgaagcggcggtggaactgcctggccgcggtcatctgagtctgcgctccattccgccgcagggtatcacattgcctccctgccgcccataa

SEQ ID NO: 11546 - protein, 314 aa, Unknown
  Obtained from environmental sample
  misc_feature (1)..(314): Xaa is any amino acid
MAEKRDSRHLRLAEKGRDWSLLRNRLCALASNSGAFGFACGVEWLASEKIDVHESRGLAWGSGTNIVGELAALNRLVSGHPCFHDGAIVERVSKEDSWVLALSRQSADRLNRGLVLVNLDPESWQSIEIPKAIWNTLGEPSIDLLGQSSPHMEVSGGKVLIRLQPADCFFLSDSLEPAGTHGTNYRDARARAAWAVQSLAEHVPTESLGKFDWKELAALVDSDPLTFLAALSNLENSESGLVARIRSAMNSKAYPQALLWTPADLGRVFLIPPSHSVLIRDIAPFEAAVELPGRGHLSLRSIPPQGITLPPCRP

SEQ ID NO: 11547 - DNA, 414 bp, Unknown
  Obtained from environmental sample
  misc_feature (1)..(414): n is a, c, g, or t
atgtggaaaggtctaaataagccaaaaattatcaagtggctgattataattttcacaggttttgcgcttgcgacctttttatttttcttttatatgattcttattgttccatctcagaacccagatggaaaattcacaaaagaaaatattttaagaaacctcaacggagaaagccgagttttatattccgatggtgcttccattataggggctttctttgaaataaatcatagattatatgtaccctacgattcaattcctcaaacccttatagatgctatagtctctgccgaagattcaaaattttggaagcacaagggttttgatatgggcggttttatgcgtgccatgttcaacaatgtgaaaagcaggagttttaggcaaggaggcagcaccctagctcggccgatctga

SEQ ID NO: 11548 - protein, 137 aa, Unknown
  Obtained from environmental sample
  DOMAIN (58)...(136): Transglycosylase
  misc_feature (1)..(137): Xaa is any amino acid
MWKGLNKPKIIKWLIIIFTGFALATFLFFFYMILIVPSQNPDGKFTKENILRNLNGESRVLYSDGASIIGAFFEINHRLYVPYDSIPQTLIDAIVSAEDSKFWKHKGFDMGGFMRAMFNNVKSRSFRQGGSTLARPI

SEQ ID NO: 11549 - DNA, 564 bp, Unknown
  Obtained from environmental sample
  misc_feature (1)..(564): n is a, c, g, or t
atgggaatagtangcacaaatgaanttcgcaaaaagctcaaaatcatggtgnatgggcagccttatatgattatgnagaaccagtttgtaaagccgggcaagggtcaggcgttcaatagggttaaaattaagaacttaattacggggcgtgttttagagcgcacttggaaaagcggcgataccgtggaagaagcagatgttacctataacgaggtcacatactcctataacgatggttccaactggttttttcttgacccaagcggagaaatggtggaaataccaaaagatgctcttaatggtgcggagctttggctgcttgatggcgcaactgtgcaagttacctggtggaatggaaaagcaatagaagttattccgcccacatttgtggatttattgatagtggattcgccgcccggcgttcaaggcaataccagcggcaacgttatgcgcgccgctattatggaaaccggagctgaggtacaaataccgctatttattgaacagggaatgcgcattaaggtagatacccgcacgggagaatatgtggaaaggtctaaataa

SEQ ID NO: 11550 - protein, 187 aa, Unknown
  Obtained from environmental sample
  DOMAIN (69)...(122): Elongation factor P (EF-P) OB domain
  misc_feature (1)..(187): Xaa is any amino acid
MGIVXTNEXRKKLKIMVXGQPYMIMXNQFVKPGKGQAFNRVKIKNLITGRVLERTWKSGDTVEEADVTYNEVTYSYNDGSNWFFLDPSGEMVEIPKDALNGAELWLLDGATVQVTWWNGKAIEVIPPTFVDLLIVDSPPGVQGNTSGNVMRAAIMETGAEVQIPLFIEQGMRIKVDTRTGEYVERSK

SEQ ID NO: 11551 - DNA, 525 bp, Unknown
  Obtained from environmental sample
  misc_feature (1)..(525): n is a, c, g, or t
gtgattaccacgggcgaatgttgttttttcaaaaaagaccttacggaaaacctcgaaaagaccccttatgtactgcggcccgacaaccttaacccccaggccccgggaacaggctcgcggatttacaaaaccggagctcagtccggaactgaaaagatagcggtggccgtcctgttggggcaaagcggcttcggcaggctccattcggcaaacccctttatccgcttgccggtacttctggagcggctgcgccaggaaacgccttacgtcattattgattttcacgcccaggcgaccgccgaaaagaaaaccctcttcttcatcgcggacggctcctgctccgcggttatcggttcccataccagggtgcaaacagccgatgaaacgatactccccaaagggacggccgtgataagcgacgcgggacgcacgggctcaagcgaatcggtcggcggctgcgatactggttcccgcatacaggaatacctcagcggcatccccctcggccgatctgatcattggtaa

SEQ ID NO: 11552 - protein, 174 aa, Unknown
  Obtained from environmental sample
  misc_feature (1)..(174): Xaa is any amino acid
MITTGECCFFKKDLTENLEKTPYVLRPDNLNPQAPGTGSRIYKTGAQSGTEKIAVAVLLGQSGFGRLHSANPFIRLPVLLERLRQETPYVIIDFHAQATAEKKTLFFIADGSCSAVIGSHTRVQTADETILPKGTAVISDAGRTGSSESVGGCDTGSRIQEYLSGIPLGRSDHW

SEQ ID NO: 11553 - DNA, 867 bp, Unknown
  Obtained from environmental sample
  misc_feature (1)..(867): n is a, c, g, or t
atgtccgccctcgatgatgccgtcgccacgggaggcgacatcttcgaaaaaagcgacgttcccgatgaagatgttacggaagaaagcgcgctttccgaggaaagcgatgttaccgaagaaaacgatatttccgcagaagacgatcttgcaaaagacgattttgatatgtcctcacttgacgactcaactgtaagcgacgcttctgaagaaagcgcgctttctgaggaaagcgatgtttccgaagaaagtagcgcttccgaagaaagcggcgctcctgaaggaagcgatgatgttgtctcttttgatgatgatgatttaggaagcgaactttccatggacgatttcgatatgtcggacattggcgatgataccatcggcgacgattccgcggaaagcgatgttaccgcagaagaagacactcctgtagaagaagatgttcccgaagaaagcgccgccgacaataaaggcgaagaaaaacaagagtatatcgacattgacatcgcggatcttggagtcaatctggactctgattcccttgaatctgattccatagactctgattctttagactccgccctcacagacgatcaaacggatctttcaacagacgcaccggatgaaagcgccgaagcagagatagaaattgacccctcaaaagatcacgaagcgctggaagaattacgcgaaaaaggcgctaccccggtaaccttcccccctgaaaacagttcgtaccttgaagaagaagaggaagacgatcacattaatttagacctttccgaggcggtaattgacgagcctaatttatncaccgaagatattgatgaaccgttgaatgaaccttctttggacatggattctttgggatga

SEQ ID NO: 11554 - protein, 288 aa, Unknown
  Obtained from environmental sample
  misc_feature (1)..(288): Xaa is any amino acid
MSALDDAVATGGDIFEKSDVPDEDVTEESALSEESDVTEENDISAEDDLAKDDFDMSSLDDSTVSDASEESALSEESDVSEESSASEESGAPEGSDDVVSFDDDDLGSELSMDDFDMSDIGDDTIGDDSAESDVTAEEDTPVEEDVPEESAADNKGEEKQEYIDIDIADLGVNLDSDSLESDSIDSDSLDSALTDDQTDLSTDAPDESAEAEIEIDPSKDHEALEELREKGATPVTFPPENSSYLEEEEEDDHINLDLSEAVIDEPNLXTEDIDEPLNEPSLDMDSLG

SEQ ID NO: 11555 - DNA, 927 bp, Unknown
  Obtained from environmental sample
  misc_feature (1)..(927): n is a, c, g, or t
atgatcagattggccgaggttcgatctgtacctgaagattacttcccggcggcctccgtattcaagacgatcgtcgccgccgccgccgtggaacgcggcgggatgaacggcaaaacggtattggaacacttcgggcgcaaccacacgctctacaccacgcaattgcagaaggaactcaaagtctcacgcgaaatcaccttggaggacgcctacgcctactccgtaaatccggttttcgcccgtatcgctctcttcaacataaacaaggacgtcgtgacggagtacgggcgccgcttcggattcaatgaatccataccgtttgagtacgacgcggacgtgagcgagatgttcgcgccggacaccgggttctccgtggcggagttcgcctcaggcttcaaccgcaagacgacgatcacccccatattcggggcgcttttggcgggggcgatatgcgagagcggcgtgatcttcgagcctaccgtaatcgataccgtccgctcctcagtccgcggcgactcatgcgtctacgtcaggcggccaaaggtgtggcggcgggcggtgaaggagtccaccgccgctgagcttagggagctgatggcaaaggtgacgcagtacggcaccgcgcgaaatacctttagacggctgcgtgatttgcccaagtacaacgccttcgagttcggcgggaaaaccggatcggtgaaccaagtcgggctcgggcgcgtggactggttcgttgggtttgcgagaaatccgaataacaagagccaaaggatagcggtaggcgtggtaactacgcacggcgactattggacagtgcactcaagctacgtcgccgccgaactgatgaaaaagtacatcagcaacgttaccgccgcaacatccgctcgtgcaacctctcaacctgcaggcaaaacgcctncatcctag

SEQ ID NO: 11556 - protein, 308 aa, Unknown
  Obtained from environmental sample
  DOMAIN (1)...(287): Penicillin binding protein transpeptidase domain
  misc_feature (1)..(308): Xaa is any amino acid
MIRLAEVRSVPEDYFPAASVFKTIVAAAAVERGGMNGKTVLEHFGRNHTLYTTQLQKELKVSREITLEDAYAYSVNPVFARIALFNINKDVVTEYGRRFGFNESIPFEYDADVSEMFAPDTGFSVAEFASGFNRKTTITPIFGALLAGAICESGVIFEPTVIDTVRSSVRGDSCVYVRRPKVWRRAVKESTAAELRELMAKVTQYGTARNTFRRLRDLPKYNAFEFGGKTGSVNQVGLGRVDWFVGFARNPNNKSQRIAVGVVTTHGDYWTVHSSYVAAELMKKYISNVTAATSARATSQPAGKTPXS

SEQ ID NO: 11557 - DNA, 414 bp, Unknown
  Obtained from environmental sample
  misc_feature (1)..(414): n is a, c, g, or t
ttggccgagtctgggcttcaggttctggacgataacggaaagccagtggggcagggtgggcaggtactggcgaaaatcgcctcggttgatgcgtcctgtgcggataaaaggctgaaagatgtctccgtcaaagttgcctgcgacgtgaccaaccccctgctgggcgttaacggggcttctgccgttttcggcccacagaagggtgcgacgccacagatggtaaagaccctggatgccgggcttgcgaaacttgcgaacgcctggataaaagcgggattggccaaagatgcggagcgtagcggggacggagccgccggcggggcaggggctgccctgaggatttgtttgggggcgaanatggaatcgggcgcaatgcttgttatgcgctatgcgggttttttcgattgcctttaa

SEQ ID NO: 11558 - protein, 137 aa, Unknown
  Obtained from environmental sample
  DOMAIN (1)...(137): Glycerate kinase family
  misc_feature (1)..(137): Xaa is any amino acid
MAESGLQVLDDNGKPVGQGGQVLAKIASVDASCADKRLKDVSVKVACDVTNPLLGVNGASAVFGPQKGATPQMVKTLDAGLAKLANAWIKAGLAKDAERSGDGAAGGAGAALRICLGAXMESGAMLVMRYAGFFDCL

SEQ ID NO: 11559 - DNA, 462 bp, Unknown
  Obtained from environmental sample
  misc_feature (1)..(462): n is a, c, g, or t
atggaaaaacagcaactaccggacgacttcaaagaatttatacaatgtctaaactcaaataatgttaaatatttgcttatcggcgggtgggcagtcggactgcacggacatccaagagcgacaaaagacattgattttcttatttttatagataataccaatttagagaatcttgaaaaagcattaaaaagttttggggctccgcctgttgatatagattaccttcgtgaaaagggtaatgttatcaggattggagtttctccaattctaattgatattattaatgaagctgatggtattgatattgaagattgttattcaagaaaagaaataattaaagttgaagatattgaaataccggtaatttcaagggctgatttaataataaacaaaaaatcaaccggcagaaaagcagatatggcggatgttgagaaattagagtgttataaaaatgaaaaataa

SEQ ID NO: 11560 - protein, 153 aa, Unknown
  Obtained from environmental sample
  misc_feature (1)..(153): Xaa is any amino acid
MEKQQLPDDFKEFIQCLNSNNVKYLLIGGWAVGLHGHPRATKDIDFLIFIDNTNLENLEKALKSFGAPPVDIDYLREKGNVIRIGVSPILIDIINEADGIDIEDCYSRKEIIKVEDIEIPVISRADLIINKKSTGRKADMADVEKLECYKNEK

SEQ ID NO: 11561 - DNA, 621 bp, Unknown
  Obtained from environmental sample
  misc_feature (1)..(621): n is a, c, g, or t
gtgacgggctttggcaacgatgcacttgcgggctacatcagcgcatcgcataaccatttctactntgagatagaggggatagcggaagtatcgggagaaccatacacatcagcccatgaaccaccacgtatattactctatccaacagaattgacacgtgcaaatcacgcccttgctgatttctacaatgacattaaccgttctgctccggttaacgcattagatcgcattcaacatttttcacacgccgtccacactcgcatgcgttacgaacgaggcacaaccacaaattcaacttcggcggcagaatcgtttgatatgggtattggtgtttgtcaggactatgcgcaaatattgttagccattctgcgtcttgacaaaatcccttgtcgctacgtagctggtatggcatccgactacggcgaaactcatgcttgggttgaggcatggacaggaacctggtactgtgctgtagaccccacgcgcgacaaacttatagatgaaggctacatcgcaatctcaagaggtcgcgactttgcagactgctccatagaacgcggagtattcaagggtatgtgccgcggaacgcagatagttagtctaaatatgaaaatttcgtga

SEQ ID NO: 11562 - protein, 206 aa, Unknown
  Obtained from environmental sample
  DOMAIN (107)...(161): Transglutaminase-like superfamily
  misc_feature (1)..(206): Xaa is any amino acid
MTGFGNDALAGYISASHNHFYXEIEGIAEVSGEPYTSAHEPPRILLYPTELTRANHALADFYNDINRSAPVNALDRIQHFSHAVHTRMRYERGTTTNSTSAAESFDMGIGVCQDYAQILLAILRLDKIPCRYVAGMASDYGETHAWVEAWTGTWYCAVDPTRDKLIDEGYIAISRGRDFADCSIERGVFKGMCRGTQIVSLNMKIS

SEQ ID NO: 11563 - DNA, 891 bp, Unknown
  Obtained from environmental sample
  misc_feature (1)..(891): n is a, c, g, or t
gtgtttaatgtggtttcctaccgtttgcataagtacaaagaaaatgacgatgtcgcgctctttgacgaacaccgcttatccaaagaaccgctaagggtcgacatcatagtcgtcaaaaagaaccgcgacgtagaattagacccttgctgggcaaaaatcttccgcggacacaacatcatagagtacaaaagccccgtcgataacccaccatcgctaaccgtcttcaacaaactgataggctacgcaaatatctacgccgcccaagaaaaggtaaaaatcagcgacatgacggcgacgataatctgcgccgcacccccggaaaagctgtttaagatactcgaagacgaatttgactacgaaattttgcaaaaagacgacggaatttattatattgtacaaaagggggtggccgccgaaaaaaacttggcaatccaagtagcggttcagacgagcgatctgctcctgcaagcgctggacaaaagggctttggacgcggctacgatgaacaaggtggctgattttgtatataccgacggtatggagaataaagaacggctgggttattggtttgaagtaatattgtctgaatttttaacaaatatacgcgaagggatgggtgataatatggaaccgagcaagcgcttattggatcttatggaatcaaccggctttgcagagaaggtaaggcaaaaagtcaggcgggaaggacgtgaggaaggacggcaggaaggacggcaggaaggacggcaggaaggacggcaggaaggcatcgaaatcggcctccgggaaggaaaggtgaaaaacgcactcgcaatgaaaaatgaagggttcgataccaaaacaatagcacgaataaccggactgaccgaagacgaaatcaaccggctctaa

SEQ ID NO: 11564 - protein, 296 aa, Unknown
  Obtained from environmental sample
  misc_feature (1)..(296): Xaa is any amino acid
MFNVVSYRLHKYKENDDVALFDEHRLSKEPLRVDIIVVKKNRDVELDPCWAKIFRGHNIIEYKSPVDNPPSLTVFNKLIGYANIYAAQEKVKISDMTATIICAAPPEKLFKILEDEFDYEILQKDDGIYYIVQKGVAAEKNLAIQVAVQTSDLLLQALDKRALDAATMNKVADFVYTDGMENKERLGYWFEVILSEFLTNIREGMGDNMEPSKRLLDLMESTGFAEKVRQKVRREGREEGRQEGRQEGRQEGRQEGIEIGLREGKVKNALAMKNEGFDTKTIARITGLTEDEINRL

SEQ ID NO: 11565 - DNA, 945 bp, Unknown
  Obtained from environmental sample
  misc_feature (1)..(945): n is a, c, g, or t
gtggccgccggcaaggagaggctggaggcccaagtgctggacataatggacaagaccgacagccagctccacgtcctcagcgatgtattgggcgagagggtggagcgcctgttgaagggcgacgagcttttgccgggcgtcctcaaaaacgtcaaagtgtacgtcgccgtcaagcgcaagctgcaagtgggcgacaagatggcgggccggcacggcaacaagggcgtggtcagccgcatcctccctatagaggacatgccgtaccttccagacggcactccggttgacatcgtcctcaatccgctgggcgttccctcccgcatgaacatcggtcagatccttgagacccacctcgggtgggccggcagggtgatgggcgtgcatttcaccacgcccgtcttcgatggcgcgcgcgaatccgaaatcaaggaatggcttgaaaaagcgtatgaaaaaaatggtcgcagcggccccgactcgtcgggcaagacaaagttgtacgacggcatgacaggcgaagctttcgagcagcccgtggtggtcgggtgcagctacatgctgaagctgcaccaccttgttgacaacaagatacatgctaggagcatagggccctatagcctcatcactcagcagcccttgggcggcaaggcgcagttcggcggccagcggttcggagagatggaagtctgggcgctggaggcctacggagcggcgcacgtccttcaagagctgctcacgtacaagtcggacgacatgcacggccgcacccagatataccaagccatcatcaagggcgaggccatcaaagagccaagccttcctgagagctggaacgttgttaagaaagaactgaacgcgctttgcatagatgtcgagatgctcacccgcgaagagctgtccgcccttgagcccgaagaaagagcgacgttcactatcgaaggctaa

SEQ ID NO: 11566 - protein, 314 aa, Unknown
  Obtained from environmental sample
  DOMAIN (220)...(296): RNA polymerase Rpb2, domain 7
  misc_feature (1)..(314): Xaa is any amino acid
MAAGKERLEAQVLDIMDKTDSQLHVLSDVLGERVERLLKGDELLPGVLKNVKVYVAVKRKLQVGDKMAGRHGNKGVVSRILPIEDMPYLPDGTPVDIVLNPLGVPSRMNIGQILETHLGWAGRVMGVHFTTPVFDGARESEIKEWLEKAYEKNGRSGPDSSGKTKLYDGMTGEAFEQPVVVGCSYMLKLHHLVDNKIHARSIGPYSLITQQPLGGKAQFGGQRFGEMEVWALEAYGAAHVLQELLTYKSDDMHGRTQIYQAIIKGEAIKEPSLPESWNVVKKELNALCIDVEMLTREELSALEPEERATFTIEG

SEQ ID NO: 11567 - DNA, 510 bp, Unknown
  Obtained from environmental sample
  misc_feature (1)..(510): n is a, c, g, or t
atgggactggaccccgcgcaggacgcggttcgttatgtgcaaaatacgcttggcattcccgccgttcagggttttttccccaactgccatcttccgtccgcggactcccggcgttacgatattatcaccctatggtttgttattgagcatttccgcgactgcgccgcggtgttagccgaaataaaaaaaatcctaaaacccggcggtgttctggcgttttcaacaccttcgctttcaggcataagcgggcgcaaatcgctgtgcaggtttctggaaaaaagccccgccgatcactttacagtctggtcgccgaaaatgtgcgtaaaagctcttgccctcgccggttttcaagcggaaaaaacagtgataacaggccaccaccccgagcgtttcccgttgttgggaataatcgcaaagagcaaaaaaagtcctttttattggctgtttttggctgtaagtattatttttcgtttgggcgacacttttgaggtttacgcgaaactggtttaa

SEQ ID NO: 11568 - protein, 169 aa, Unknown
  Obtained from environmental sample
  misc_feature (1)..(169): Xaa is any amino acid
MGLDPAQDAVRYVQNTLGIPAVQGFFPNCHLPSADSRRYDIITLWFVIEHFRDCAAVLAEIKKILKPGGVLAFSTPSLSGISGRKSLCRFLEKSPADHFTVWSPKMCVKALALAGFQAEKTVITGHHPERFPLLGIIAKSKKSPFYWLFLAVSIIFRLGDTFEVYAKLV

SEQ ID NO: 11569 - DNA, 972 bp, Unknown
  Obtained from environmental sample
  misc_feature (1)..(972): n is a, c, g, or t
atggacgacggcagagacatcagcgccgacaagacgttgtatgccataggcgaaacattaagcacggacgggctggttgtaacggcggcctacaccgatggctcaaagcaggcggttacaggctacaccacaagcggctttgattccgcaacggaaggtttaaaaaccattaccgtcaattattcgggcaagacggcaagcttcaacgtaactatcagcagtaaagttgttgcaaggccttctgcaaacattccggcgggaacctactactctgcgcagagcgttaccctgtccacagcaaccgaaggcgcggcaatccgctacaccttagatggatcaactccaaccgcttcaagcgcattgtattcgagcgcgatcagcgtcagcgcgacaacaaccatacaagccattgccattaaagacggctgggaaaacagcgcaatatttacggcggtgtatcaatttttgaatatgaccgacggtatatgggctgacgttaccaccaatggcattgaaaaatggtttaagtttaaagcgacggcgactacccaatatatatatttccaggcaggctcagtgtccagcgtaaatatacaactgtatgaagttgacggtaaaacagctatagatgcttcggcttctagtctttcttcttctaccaccagagaaaagctaaccatcggcaaagagtactatataaaagccaacacgagcagcatcggcacatataggatagcgttctcatcacaatcaacagcgcctacaaaaataactttgccgacgaatgtaaccatactgagcgccgccgacaaatggaccgacggcaatattgcctcaaacgttagcgaacaatggttcaagtttaccgcgancgcaaccagccaatatctttatttatatacgggcacaacgaacagcgtaagggttcaatggtataaagcgaacggtacacatttggagcagctcttctaa

SEQ ID NO: 11570 - protein, 323 aa, Unknown
  Obtained from environmental sample
  DOMAIN (7)...(72): Bacterial Ig-like domain (group 3)
  misc_feature (1)..(323): Xaa is any amino acid
MDDGRDISADKTLYAIGETLSTDGLVVTAAYTDGSKQAVTGYTTSGFDSATEGLKTITVNYSGKTASFNVTISSKVVARPSANIPAGTYYSAQSVTLSTATEGAAIRYTLDGSTPTASSALYSSAISVSATTTIQAIAIKDGWENSAIFTAVYQFLNMTDGIWADVTTNGIEKWFKFKATATTQYIYFQAGSVSSVNIQLYEVDGKTAIDASASSLSSSTTREKLTIGKEYYIKANTSSIGTYRIAFSSQSTAPTKITLPTNVTILSAADKWTDGNIASNVSEQWFKFTAXATSQYLYLYTGTTNSVRVQWYKANGTHLEQLF

SEQ ID NO: 11571 - DNA, 828 bp, Unknown
  Obtained from environmental sample
  misc_feature (1)..(828): n is a, c, g, or t
atggagagtttcgggcaagacggacaaggttggcttagagcgaaattcgaagaattgctcaggaaaaaaatagaaaaagaaattaaaaaggcggaaggagaatacaagaaatacttagaggcttctcttgaaataaatgaaaaaaacgaaatgaaagccatcgctggatattttgctgaagacaattccaaaaaaggcgatgccgctattcaagacgaagttgataaagttttacgtgacaaggaacaatctttacaattcaaaaacaaaaacggcgagtggaatgtatgccgttttttcttttcaaaatggactctgtgcgaaggttgggataatcctaatgtttttgtaattgcaaaattgcgaagttccggctcagaaacaagaaaaattcaggaagtaggtcgaggtttgcgccttccctttgatgaaaccggttccagggttacaccggaaagatataacgaagattttcgattaacttacattattgattattcggaaaaagaatttgcaaaaaaactggtaggtgaaattaatgccgatggtggtaagattggaggaaaaattaccaatgatattttggaaattttggtaaaagaaggttatgcggtaaatgtagcaaaggcaaagggtaaattacttcttgatgatataatcgatgaaaatgacaatataaaagataaagacaaattatttagcttattaccggaagaaagcggattaaaagtaagaaacggagtcattaccggaaatgaaatgccgccgccgcccaaggtacgccttaatcgggagaattttataaaattcgagacctttgggacgtag

SEQ ID NO: 11572 - protein, 275 aa, Unknown
  Obtained from environmental sample
  misc_feature (1)..(275): Xaa is any amino acid
MESFGQDGQGWLRAKFEELLRKKIEKEIKKAEGEYKKYLEASLEINEKNEMKAIAGYFAEDNSKKGDAAIQDEVDKVLRDKEQSLQFKNKNGEWNVCRFFFSKWTLCEGWDNPNVFVIAKLRSSGSETRKIQEVGRGLRLPFDETGSRVTPERYNEDFRLTYIIDYSEKEFAKKLVGEINADGGKIGGKITNDILEILVKEGYAVNVAKAKGKLLLDDIIDENDNIKDKDKLFSLLPEESGLKVRNGVITGNEMPPPPKVRLNRENFIKFETFGT

SEQ ID NO: 11573 - DNA, 471 bp, Unknown
  Obtained from environmental sample
  misc_feature (1)..(471): n is a, c, g, or t
atgggttgcatggtgagtccaggcaggaggactgccgctataaacaagaaaaccgcatggctttgccttgcgataattttgtgggcagtattcgcggctaatttctggcgctttttcccgcgtgatcccgattgcgttgaagcggtttccatctatgcagaattactaaaaaaaacaacgattattggccttgattattcatctctgacaactacccttggaagttattccgccaaaaaaagctcagaaaacccgatcacggcggcgcttatggtcaggctgctcaaagactcaggagcgtcttcagactccgttgccgcgataaacgcttcaggctccttccccggttttgtgcttgcgtctctatccgcctgtgctgcaatgaagataaaaacatttataattgcttcgataggagcatctacttatggcgcgaatattcccggaaataccattgcagattgctgctaa

SEQ ID NO: 11574 - protein, 156 aa, Unknown
  Obtained from environmental sample
  misc_feature (1)..(156): Xaa is any amino acid
MGCMVSPGRRTAAINKKTAWLCLAIILWAVFAANFWRFFPRDPDCVEAVSIYAELLKKTTIIGLDYSSLTTTLGSYSAKKSSENPITAALMVRLLKDSGASSDSVAAINASGSFPGFVLASLSACAAMKIKTFIIASIGASTYGANIPGNTIADCC

SEQ ID NO: 11575 - DNA, 312 bp, Unknown
  Obtained from environmental sample
  misc_feature (1)..(312): n is a, c, g, or t
atgtcatttaaattgatagcggacgccggaacagacgcaagctggacggcaaaagcttcttatgaaatagggcgctgcatgttcctgatgaacaagtttgacgatagcctgaaatatttaacaaatatgcttaccaagtatcccaagcaccccaatctgttagacgccatgcttattatcggccagtgccacgaaaagatgggaagaaaggaacaggcggcggctttctttaagaagataatttccatgggcggcagcagcgacggcgccgcggaaaaagcaaaaagggcgttagccgccctgggagcgtaa

SEQ ID NO: 11576 - protein, 103 aa, Unknown
  Obtained from environmental sample
  misc_feature (1)..(103): Xaa is any amino acid
MSFKLIADAGTDASWTAKASYEIGRCMFLMNKFDDSLKYLTNMLTKYPKHPNLLDAMLIIGQCHEKMGRKEQAAAFFKKIISMGGSSDGAAEKAKRALAALGA

SEQ ID NO: 11577 - DNA, 579 bp, Unknown
  Obtained from environmental sample
  misc_feature (1)..(579): n is a, c, g, or t
atggctatggatttggccgcgttcggccgtttttcacggacatttcaagccggtgacataattttctccgaatatgaacttggcgatactttttatcttatccagtcgggcagggtgcagctcgtaaaacttgtaggcgacattgaaaggacgctcgacgtccttcagccttcagaaatgttcggcgagatggcgattttggaaaactccccccgttccgcgtcagcggtagctcttgacgaagttaaggtgcttgaatttaactcccaaaactttgaaatacttttactcggcaacccgcagattgcactgaaactgttaaaaatgttctgcaaacgcatttacgactcanaacgcaggtttatgattttaactctccccgacccgcagacaaaagtcgccgacgtattccttatgttggatgaaaccggccttgacatagacaaatccacagaacgccgtgaatttaaaactaccgttgagggagtggcgcactgggccggaatgtccgtaaatgaagtaagggacgtccttggnnncatatgtaaccagaggcgcgtggagattttccgnngatag

SEQ ID NO: 11578 - protein, 192 aa, Unknown
  Obtained from environmental sample
  DOMAIN (12)...(101): Cyclic nucleotide-binding domain
  misc_feature (1)..(192): Xaa is any amino acid
MAMDLAAFGRFSRTFQAGDIIFSEYELGDTFYLIQSGRVQLVKLVGDIERTLDVLQPSEMFGEMAILENSPRSASAVALDEVKVLEFNSQNFEILLLGNPQIALKLLKMFCKRIYDSXRRFMILTLPDPQTKVADVFLMLDETGLDIDKSTERREFKTTVEGVAHWAGMSVNEVRDVLGXICNQRRVEIFRX

SEQ ID NO: 11579 - DNA, 453 bp, Unknown
  Obtained from environmental sample
  misc_feature (1)..(453): n is a, c, g, or t
atgatgaatgtgaatgtgcgcctttcccntaaagtttatgagatagacaagaatgactttgacaatgaattgaatgccctgttggacagattgcttatcaccagggtagaaaaaaacgaaagccagccctcggtaagcgaaacgcaaacagccaacgcttattttgtggatataaagctcccagacgcaagcaaagaagacgtggaagtctgtttagaagacggaagcctgaccattgaatccgtacctgacgaggccagggatggaaccaaaaagaaagcgggggtattattttttgcaagcggcggaaaaaacgccggtttacggaattctaataaacctaatttcaagaaaatatacagattgccgacagacgcggatcccagcttaatttcagcgtcgttctgtaaaggcgttctttcattggagatcagcaggaaggcaatcgcttaa

SEQ ID NO: 11580 - protein, 150 aa, Unknown
  Obtained from environmental sample
  DOMAIN (46)...(150): Hsp20/alpha crystallin family
  misc_feature (1)..(150): Xaa is any amino acid
MMNVNVRLSXKVYEIDKNDFDNELNALLDRLLITRVEKNESQPSVSETQTANAYFVDIKLPDASKEDVEVCLEDGSLTIESVPDEARDGTKKKAGVLFFASGGKNAGLRNSNKPNFKKIYRLPTDADPSLISASFCKGVLSLEISRKAIA

SEQ ID NO: 11581 - DNA, 918 bp, Unknown
  Obtained from environmental sample
  misc_feature (1)..(918): n is a, c, g, or t
atggaagaggagagcaaggcgcttgacgcgcacatggacgaggtaaactccatggaggtgcggcttgtcgagatgcaaaaaaacatctacggtcttgccctggagaaaaacgccaaagaaaacgaggcgcggcttttgggcgaacggcgcaacgaatgtaaaaccaagatagaacagggcgaagtacgggaaaaacagataaataacaagatagaagagctaaatgacgacgctgcgacgcaggatgaagttgtgtctgaattgagacaaaaagctgcgggtatagaaaataacatcaaatcctttgaggaaaacatccggcttgcctcaacccgcataggcgacaacgacaaagcgatacataaagccgaatctgagatacacggccttgaaaaagagcaggcgcagtttgaagtacagttggcgcagataaccgatgacattgtggcggaactggacgcggggctgaaaaaagccggttactcggcttcggagcgccgtaatatagaagcgtctcttaacgaaacattgagcaggctgcgcacagtgcttacaggcaggggaacccttatcaacgaccttgcctccgccgcttccgttgaggctgccgagcttcagcgcattgccggaactcttgcaacagaacttaccaatgccgcagcggacgcggaaaaagccattaccctgtttgaaagctaccgcagccattcgcccctgttcctcgacgagtttctggctccggagggtatcatcaccaagaagcgggaactggacgcgaaaatccggggcgcgaaagagggcatagaagaacgccgccagaagatcaagaccctgcaagccgacaacgcggctctggcggcaaagatcaacgaataccgcgtcaccttgggagaccttcgggtaaacctcccaggatga

SEQ ID NO: 11582 - protein, 305 aa, Unknown
  Obtained from environmental sample
  misc_feature (1)..(305): Xaa is any amino acid
MEEESKALDAHMDEVNSMEVRLVEMQKNIYGLALEKNAKENEARLLGERRNECKTKIEQGEVREKQINNKIEELNDDAATQDEVVSELRQKAAGIENNIKSFEENIRLASTRIGDNDKAIHKAESEIHGLEKEQAQFEVQLAQITDDIVAELDAGLKKAGYSASERRNIEASLNETLSRLRTVLTGRGTLINDLASAASVEAAELQRIAGTLATELTNAAADAEKAITLFESYRSHSPLFLDEFLAPEGIITKKRELDAKIRGAKEGIEERRQKIKTLQADNAALAAKINEYRVTLGDLRVNLPG

SEQ ID NO: 11583 - DNA, 771 bp, Unknown
  Obtained from environmental sample
  misc_feature (1)..(771): n is a, c, g, or t
atgcgcaatattatctggttttcctttttaaagatgaataatccgcttttacgccttattatttatgatgcgggctggtattggagtacagataatatgggtagatccattattaactttatcaattcatatgcaatcctggattttttaccggatcttacttcctttgaatcttcagaacaggcggcgctgttaatcaccaatgaattaactcacgaagccgtatggctgcatgggcaggacaataaaccttctgaaatcctgtcaacaatcggaagcagtgaatatgcatctgagggaaaatatcattcaaacactgcgctttatttaaaattgggcgaatggtttgatttcttgcgtaagaacggcgtttatgataatacaagaataataataatcgccgatcatggcggcggcgctgataatctgatatcaaatgatccattacccataaaaggcgaagaacgggaaacatataaccctgtttttttatataaagattttaattctcacggtacattatccataaataatgattttatgacaaatgccgacgttcctttttttacgattaatggtttattggaaaatccggtgaatccatttaccggtaatccgattaccacgcagccaaaagaaaatggaatattaatcacaatgcataacttgccgatggccagcagtcacggaaaatacgtttttaatattaaaaaaaatgatggatatnattacgcgatttcatttatgaagcgtcaaattgggaagaactaa

SEQ ID NO: 11584 - protein, 256 aa, Unknown
  Obtained from environmental sample
  misc_feature (1)..(256): Xaa is any amino acid
MRNIIWFSFLKMNNPLLRLIIYDAGWYWSTDNMGRSIINFINSYAILDFLPDLTSFESSEQAALLITNELTHEAVWLHGQDNKPSEILSTIGSSEYASEGKYHSNTALYLKLGEWFDFLRKNGVYDNTRIIIIADHGGGADNLISNDPLPIKGEERETYNPVFLYKDFNSHGTLSINNDFMTNADVPFFTINGLLENPVNPFTGNPITTQPKENGILITMHNLPMASSHGKYVFNIKKNDGYXYAISFMKRQIGKN

SEQ ID NO: 11585 - DNA, 930 bp, Unknown
  Obtained from environmental sample
  misc_feature (1)..(930): n is a, c, g, or t
atgagggcggaaaacctgttaaagcgccttgaaacttcggaactgcntgaataccgggagaaaatcgcaaaggcatatcaggacgcggagaaagagtttaaagaccactttatttcccgtttgaatgaacacatcgaagaagccagggagagtntcagggagatcaacgacattctccgcacccttctctttggccgggatcagtactggttccaccttgaggaactgagtgagcgcaaggggcaaattgaggtgatcaggcaggccgccaaaataccgactatcgagggcggccttttttcccagcttgaagaacctgcggaacggaaagccgcggaggagctttttaaccgtattcttaattctcccctggattcaaaagagctgcgggacatttgcgattaccgcacctactttcactacgatatcaggatcaaagaaaccgacaaccttgatgaagaaggcaacgcggttatcctttccctttcgagagtgctgaaggaaaagtccggcggcgaatcccagacaccctactatgtggcaatcgccgccagtttctaccgtttctacaaggcaaggcccgagaacaccgtgcgcctcgtaatctttgacgaagcctttaaccgcatggacgacgagcggatcgccaagatactctcgttttacaacaacctgaatttgcagatcctcacctcagtcccgccggagaagatcgaggcgattgccccgtacatgaacaggatcaatgtgataagccgtttcggcagcgcagtcaaggtaagggactgccacatcgataacgttgatattggcggcgttgatattggaataaccngtggaatgagtaactggaaaacaaaaatactggaagccttaatcgaccattatttaattctgtttcgaggccgaagaaaccctccctgtcgataa

SEQ ID NO: 11586 - protein, 309 aa, Unknown
  Obtained from environmental sample
  misc_feature (1)..(309): Xaa is any amino acid
MRAENLLKRLETSELXEYREKIAKAYQDAEKEFKDHFISRLNEHIEEARESXREINDILRTLLFGRDQYWFHLEELSERKGQIEVIRQAAKIPTIEGGLFSQLEEPAERKAAEELFNRILNSPLDSKELRDICDYRTYFHYDIRIKETDNLDEEGNAVILSLSRVLKEKSGGESQTPYYVAIAASFYRFYKARPENTVRLVIFDEAFNRMDDERIAKILSFYNNLNLQILTSVPPEKIEAIAPYMNRINVISRFGSAVKVRDCHIDNVDIGGVDIGITXGMSNWKTKILEALIDHYLILFRGRRNPPCR

SEQ ID NO: 11587 - DNA, 720 bp, Unknown
  Obtained from environmental sample
  misc_feature (1)..(720): n is a, c, g, or t
gtgccgcgcaccgtgatgttcgcgggcaaggcggcgccgggctactacatggccaagctcatcatcaagttcataaacaacgtggccgggatcatcaacaacgacccgtctaccaaggggctgctgtcggtgcacttcctgcccaactacagagtctcgctggccgaatacgtaatccccgccgccgacctgtccgagcagatctccacagccggcacggaggcgagcggcacgggcaacatgaagttcgccctcaacggcgcactcacgataggcacgatggacggcgcgaacgtcgagatgcacgaggagatcggcgacgagaacatcttcatcttcggtctgcggacaaacgaggtggaagccctataccgcaacggctacaacccgtgggacttctacaacggcagccagacgctcaagcaggtcatagacctgatatccagcggctacttcagccccgaggacaccgccatgttcagcccgatatacgacaccctcctcaaaaacggcgaccgcttcttggtcatggccgacttcgacgcttatgttaaatgccaagaagacgtgtcgaactgctaccgcaaccacgacgagtggatgcggaagtcgatccttaacgtcgcgaacatgggcaagttctcgtcggacaggccgatcgcggagtacgcaaaagacatctggggggtcaaggcggcggatgttaagctggatatttaa

SEQ ID NO: 11588 - protein, 239 aa, Unknown
  Obtained from environmental sample
  DOMAIN (1)...(232): Carbohydrate phosphorylase
  misc_feature (1)..(239): Xaa is any amino acid
MPRTVMFAGKAAPGYYMAKLIIKFINNVAGIINNDPSTKGLLSVHFLPNYRVSLAEYVIPAADLSEQISTAGTEASGTGNMKFALNGALTIGTMDGANVEMHEEIGDENIFIFGLRTNEVEALYRNGYNPWDFYNGSQTLKQVIDLISSGYFSPEDTAMFSPIYDTLLKNGDRFLVMADFDAYVKCQEDVSNCYRNHDEWMRKSILNVANMGKFSSDRPIAEYAKDIWGVKAADVKLDI

SEQ ID NO: 11589 - DNA, 756 bp, Unknown
  Obtained from environmental sample
  misc_feature (1)..(756): n is a, c, g, or t
gtggaaataggagaagccgtcggaacaatcgctgcgcagtctatcggacaacccggcactcagcttacaatgcgcaccttccacatcggcggcgttgcgaccaaggcaagcgaggaaagccgtatcactttgaaatatccggtatatatcagaaatgtcgccggaacgcacctgacgcttgataacggacacctgctctttacccgccgcggacattcaattgtcaacaaggtaatgaataaatacaaaattgaaaaaggcgacaggcttgccgccgtggacggaaagaaaatcaacaggggagacgtgattattcataggggcggtcaggacattgtttcatcggaaatagcgtatgccatgattctgaagaataatgatgaagaaacgctttacttaatcggtccggatcaaaaaattgaaatcaggaacggttccgcttttgaggcgcagataggaaccgttattgacgccgagaaaacaatcgccacgttcgacccgttctccgacccgattatcgcggaaaaaggcggaacggtaaaatttgaggatattattcttggcacgactcttaatgaggtaattgacgaagataccggcaatacagaaaagcgcataacagaatcccagcatgaaaaacagccgcgtatttttattgtagacgacaatgaaaacgaagtcgcgtcttatcctatgcccggcggcgcttatatcctggttgatgagggcgagaaaatccacgcgggaagaacatag

SEQ ID NO: 11590 - protein, 251 aa, Unknown
  Obtained from environmental sample
  DOMAIN (1)...(229): RNA polymerase Rpb1, domain 5
  misc_feature (1)..(251): Xaa is any amino acid
MEIGEAVGTIAAQSIGQPGTQLTMRTFHIGGVATKASEESRITLKYPVYIRNVAGTHLTLDNGHLLFTRRGHSIVNKVMNKYKIEKGDRLAAVDGKKINRGDVIIHRGGQDIVSSEIAYAMILKNNDEETLYLIGPDQKIEIRNGSAFEAQIGTVIDAEKTIATFDPFSDPIIAEKGGTVKFEDIILGTTLNEVIDEDTGNTEKRITESQHEKQPRIFIVDDNENEVASYPMPGGAYILVDEGEKIHAGRT

SEQ ID NO: 11591 - DNA, 720 bp, Unknown
  Obtained from environmental sample
  misc_feature (1)..(720): n is a, c, g, or t
atgagaaaacgcagtccggctcaggaggacagacgtttcatacaggatattgaagccctggctctggggaaatcggcaaaaagccgtaccatgaaggaaattggtttaggagaaacccccgaggaagcacatgccctgctccttgaatgcggtttctggaacgagcaaaacaatccccaccccgcaagattcggcgttgttctccagcctgcggaacacaagcctgaagcgcctccgcccgaagaacgctgtgacctgacccgtttagccgcctacgcgattgacagcccctggagcagcgatcccgacgatgccatttccatagagcttgaagagggcagacagtccctttatgtccatgtcgccgatcccggatcttcaatcaggatggacagccccgtagaaaaagaggcccgcgaccgtggggcaacactttatatccccgagggcattattcgcatgctcgccgatgatagtctgccgcttttcgccctcggtcttgccgaaacgtcccctgccctgactttcaaaatgacgcttaacaacaccggagaaattgaaaaaaccgaaatctttccatcaacagtaaaggttaaacggttaacctacaaagaggcggatgaatatttaaataatacacataatgaaacatctgaagccgccgatttgcgatcgctttacgcattggctgaacgcacaccaagcggcgcgctgcgttag

SEQ ID NO: 11592 - protein, 239 aa, Unknown
  Obtained from environmental sample
  DOMAIN (84)...(238): RNB-like protein
  misc_feature (1)..(239): Xaa is any amino acid
MRKRSPAQEDRRFIQDIEALALGKSAKSRTMKEIGLGETPEEAHALLLECGFWNEQNNPHPARFGVVLQPAEHKPEAPPPEERCDLTRLAAYAIDSPWSSDPDDAISIELEEGRQSLYVHVADPGSSIRMDSPVEKEARDRGATLYIPEGIIRMLADDSLPLFALGLAETSPALTFKMTLNNTGEIEKTEIFPSTVKVKRLTYKEADEYLNNTHNETSEAADLRSLYALAERTPSGALR

SEQ ID NO: 11593 - DNA, 840 bp, Unknown
  Obtained from environmental sample
  misc_feature (1)..(840): n is a, c, g, or t
ttgccgcttcgcgggatcgcctgcatcgcaggctattttgaatatagggtgctgccaaaagaaacattgtacagcatcgcccgatcccatggcgtggtgtttcaggccctttgcgacataaacaatttccccaaaaactatatggtcaaagccggggaaaaaataaagataccgaaaccagcccccgtgcagccggctcctgtacaacagcctgtcaggcagccggcccccgcacagcagcctgttattacacagccgaccccgaatgttatcgtactgcagccccccgtacagcctatcgtacagcagcccgccgcgcagccgccggcgcagtccgccgtgcagccaaccgtgcagcccccggcgcagccaaccgcgcagccgccggcgcagcccgccgtacagccaaataacacccctgtaattataatgccttcatggacgacactggaacgatcgccaaacgtacggcctattccgaaaaacccggcaatccgctggcctgtttcagcaaaggaaattttttacatgaacggcaacataggggcgctcgtatcgggcgaggagtcggaatcggtcaaaagcctttcaaaaggaactgttgtccacgccagcccctggcggggttacggcaatgtcgcgattattgaagcggagggaggttacaggtatttatacggggcctgcaaaaccctctcggtcagaaaaggggataccattgagcccggaacggaattgggaaaattggggatctatccggcatccggcaaaccggaactggtttttatagtatcatataacgggtcgccggttgatccggtaaaagcgcccagactatag

SEQ ID NO: 11594 - protein, 279 aa, Unknown
  Obtained from environmental sample
  DOMAIN (15)...(58): LysM domain
  misc_feature (1)..(279): Xaa is any amino acid
MPLRGIACIAGYFEYRVLPKETLYSIARSHGVVFQALCDINNFPKNYMVKAGEKIKIPKPAPVQPAPVQQPVRQPAPAQQPVITQPTPNVIVLQPPVQPIVQQPAAQPPAQSAVQPTVQPPAQPTAQPPAQPAVQPNNTPVIIMPSWTTLERSPNVRPIPKNPAIRWPVSAKEIFYMNGNIGALVSGEESESVKSLSKGTVVHASPWRGYGNVAIIEAEGGYRYLYGACKTLSVRKGDTIEPGTELGKLGIYPASGKPELVFIVSYNGSPVDPVKAPRL

SEQ ID NO: 11595 - DNA, 492 bp, Unknown
  Obtained from environmental sample
  misc_feature (1)..(492): n is a, c, g, or t
atgattttttccgactgcgcggtaataccggcgcctttgcccgagcagctggcggatattgcagaaggcgctgccaattcctgccgtgaatttcttgatgtcgagcctgtcgtggcgatgatgtcattctcgaccaaaggttcagccgagcatgagaatgtcgccaaggtgcaggccgccgttaaaatcctgaaagacagaaatgtaaaatttgtttttgacggcgaactgcaggccgacgccgcgcttgttccttcagtgactgatcagaaagccccgggcagcccggtaaaaggccaggttaacaccctggtcttccccgatctcggcgcgggcaacatcggttataagctggtacagcgccttggcaacgcgcaggctttcgggcctttactccagggtttcgcgaagcccataagcgatctttcccgtggcgcctcggttgatgacattgtgacgacttgcgcggttacgctgtcgcgggttaaataa

SEQ ID NO: 11596 - protein, 163 aa, Unknown
  Obtained from environmental sample
  DOMAIN (1)...(159): Phosphate acetyl/butaryl transferase
  misc_feature (1)..(163): Xaa is any amino acid
MIFSDCAVIPAPLPEQLADIAEGAANSCREFLDVEPVVAMMSFSTKGSAEHENVAKVQAAVKILKDRNVKFVFDGELQADAALVPSVTDQKAPGSPVKGQVNTLVFPDLGAGNIGYKLVQRLGNAQAFGPLLQGFAKPISDLSRGASVDDIVTTCAVTLSRVK

SEQ ID NO: 11597 - DNA, 354 bp, Unknown
  Obtained from environmental sample
  misc_feature (1)..(354): n is a, c, g, or t
atgccagttctttctgtttctcacttaaaagcaggctatgggaaaaaaatagttttgcaaaacatttccttttcgcaggaacaaggagaaatcagagctattttgggaacatccggttgcggaaaatccacgcttttgaataacattcttgggcttgaaaaagcgatggctggcgaaatagaaattttaggcacaagattaaaagcgggcaaagagcaagttccactttccgtgcaaaaacgcatgggggttttgttccaaaacggcgcgctactgagttcgctaactgtttttcaaaacagttgccctgccaattcgcctgcaccgcccaaaaactccagaatcagaagttag

SEQ ID NO: 11598 - protein, 117 aa, Unknown
  Obtained from environmental sample
  misc_feature (1)..(117): Xaa is any amino acid
MPVLSVSHLKAGYGKKIVLQNISFSQEQGEIRAILGTSGCGKSTLLNNILGLEKAMAGEIEILGTRLKAGKEQVPLSVQKRMGVLFQNGALLSSLTVFQNSCPANSPAPPKNSRIRS

SEQ ID NO: 11599 - DNA, 870 bp, Unknown
  Obtained from environmental sample
  misc_feature (1)..(870): n is a, c, g, or t
gtggatattacgggacaaaacttcggagcgtcaaaagaaggctcgggcgttttcttttcatgggattacgcggcgcattcaattaatccctatgttgtaacggagccggaatatatcgaagtttccgaaattgaattcggctatgaatcatggaacgcgcgcgaaatacgcgtccgcctgccggacggagccgtcagcggcagcctaaaaataaaaacacctaacggggaatcgcggcctgttttctttgacgttgcgggcaaacctggttataaaaattttaaggacaaacgaagttataccataagttattcggttgacgtaaaaattaacgaagccgtaaggccgaataacctgtacctgtggatgcctctgcccgtaacatccgcttcacagcggaaagttactttagtctccagaagcatggagccttttgtggaaaaccacaggggagtaagcctttttaagctggacaatcttatggccggcgcggctcatacgatcaatctttcttttaatgttgaagtatacgccgttgaaacaaacgtaagaccggtatcgataaggcagggcaaaagtcagctttataccgcgtacacccaaagcacgaatttaattcccgcggacaattcgcatataaaatcaaccgtagcgaacattgtcggcaaggagcagaatccgtatattaaggcaaggatgttatacgaatggatcataaaaaatatagatattgatgaaattccctttattacatccggcgcggtttcggcgttggggcaaaaaaagccgacccctacagcgccgccctgctttacgcgggcatggcccgcgccgcanaagtgccctgtattcccacagccggcgttttga

SEQ ID NO: 11600 - protein, 289 aa, Unknown
  Obtained from environmental sample
  misc_feature (1)..(289): Xaa is any amino acid
MDITGQNFGASKEGSGVFFSWDYAAHSINPYVVTEPEYIEVSEIEFGYESWNAREIRVRLPDGAVSGSLKIKTPNGESRPVFFDVAGKPGYKNFKDKRSYTISYSVDVKINEAVRPNNLYLWMPLPVTSASQRKVTLVSRSMEPFVENHRGVSLFKLDNLMAGAAHTINLSFNVEVYAVETNVRPVSIRQGKSQLYTAYTQSTNLIPADNSHIKSTVANIVGKEQNPYIKARMLYEWIIKNIDIDEIPFITSGAVSALGQKKPTPTAPPCFTRAWPAPXKCPVFPQPAF

SEQ ID NO: 11601 - DNA, 846 bp, Unknown
  Obtained from environmental sample
  misc_feature (1)..(846): n is a, c, g, or t
atggaatgtaaaaaaatagaaaaagattccgcctatataaaatatataaaaaattacagttccgatgatacttcaaagtcagcctcggattctgttgaaatcaggaatgtatgtttagattcttttatacctttttatatggttggtttctcttctcaattaataggagcgaaaaaacatttagctgattatttcagacttaaaataaagtatctcggccctttacgtgaaaatcttcaatggacttacaaaaaacagaaagacgactttgacagaaagggtgaatcattttctgaatattattcaaggatgagtaatgtcggcgttaaaggggaaaggactccgtttgttgttgattatctgataaaatataacataagaataaaaaattattattcgccgcacttttttgaagagccgggttatatgccggaaatacagtttcgagatggcttgaaagactggttaaattatattgaaatatccgaggatataacagttggaagcattgaaaggcccgataattttatagtaaagatggttattgacaggcaggaatttgccctgccccagttgggaactggagtaagccaggttcttcccattttggtaatgtgccttgccgcccctgttggttccacgttaataattgaacagccggaactgcacctccacccaaaaatgcaatcgcggctggctgacttttttatcgccatgtccctttcggggaggcaatgcctgatagagacgcacagcgagtacttaattaaaaaattacggtacagaatagtaaaagaagaaaatgagaatattaaagcaaaaacaaagatatactttgcggaataa

SEQ ID NO: 11602 - protein, 281 aa, Unknown
  Obtained from environmental sample
  misc_feature (1)..(281): Xaa is any amino acid
MECKKIEKDSAYIKYIKNYSSDDTSKSASDSVEIRNVCLDSFIPFYMVGFSSQLIGAKKHLADYFRLKIKYLGPLRENLQWTYKKQKDDFDRKGESFSEYYSRMSNVGVKGERTPFVVDYLIKYNIRIKNYYSPHFFEEPGYMPEIQFRDGLKDWLNYIEISEDITVGSIERPDNFIVKMVIDRQEFALPQLGTGVSQVLPILVMCLAAPVGSTLIIEQPELHLHPKMQSRLADFFIAMSLSGRQCLIETHSEYLIKKLRYRIVKEENENIKAKTKIYFAE

SEQ ID NO: 11603 - DNA, 771 bp, Unknown
  Obtained from environmental sample
  misc_feature (1)..(771): n is a, c, g, or t
atgcttactaaaagactgattatttgcctggatgttcgcgatcgcaaggtcaccaaaggcgttaagttcgaaggtaacatagatattggagaccctgttgaaatgggtgccaaatatagcaaagatggagttgacgaacttgttttttacgatataacagcaagcgcggaacacaggcaatgcgatattgaaatggtaaaagatattgcaaaaaacgtgtttattccattttctgttggcggcggtgtacgcaatttggaagatatgcatcaaattttgctagcaggagcggaaaaagttagcattaacagccttgccgtgctaaacccagaaataatagcagaaggagctaaggcttttggcaaccagtgcatggtgcttggaatggatgcgaagtttgtgggcgtttctgagaaaattccaagtggctacgaggttgttattcgcggcggcagggaatttatgggtttagatgcggttgagtgggcaaagaaagctgaaagtttgggcattggagaaatttgcctgaacagcatagacacagatggcgttaaaaatggctatgagcttacaatcacagaaaaaatagcccaagccgtgtcaattcctattatagcgagcggcggtgctggagagccaaaccatatagttgaattattcgcaaaaactcacgcagatgcggctttgatagcctccatggtccattttggaacttatagcatatcccagataaaaacggagatgaaatccgcaaacattcctacacgctaa

SEQ ID NO: 11604 - protein, 256 aa, Unknown
  Obtained from environmental sample
  DOMAIN (5)...(240): Histidine biosynthesis protein
  misc_feature (1)..(256): Xaa is any amino acid
MLTKRLIICLDVRDRKVTKGVKFEGNIDIGDPVEMGAKYSKDGVDELVFYDITASAEHRQCDIEMVKDIAKNVFIPFSVGGGVRNLEDMHQILLAGAEKVSINSLAVLNPEIIAEGAKAFGNQCMVLGMDAKFVGVSEKIPSGYEVVIRGGREFMGLDAVEWAKKAESLGIGEICLNSIDTDGVKNGYELTITEKIAQAVSIPIIASGGAGEPNHIVELFAKTHADAALIASMVHFGTYSISQIKTEMKSANIPTR

SEQ ID NO: 11605 - DNA, 501 bp, Unknown
  Obtained from environmental sample
  misc_feature (1)..(501): n is a, c, g, or t
atggctttcggcctcgacccggaagcggcagcggctttaaccgcgcaggtacgcagggccgcgccaaataagcctctcatggtaaaactctcgcccaacgcccccgacctgacggcagtggccaaatcctgcgccgcagccggggctgatgccttttctcttgtgaacaccttcaagggcatggccatcgacatcgacaaaagaaaacctgtttttgaaaatacgagcgccggcctttcagggccatgcataaggccgatagcccttcgcatggtctgggagctttacgaagccgtccaggttcccgtcgttggcatgggcggcatagcatccgccgacgacgcgcttgagttcctgctcgccggggccgccgccgttcaagtcggcagcgcaactttcgcccaccctcccctgatgaccgagatcatcaggggcatcgaagaatacatgaaagaaaaaggctatacggagctgggcaagctgaacatacggggcttttag

SEQ ID NO: 11606 - protein, 166 aa, Unknown
  Obtained from environmental sample
  DOMAIN (1)...(150): Dihydroorotate dehydrogenase
  misc_feature (1)..(166): Xaa is any amino acid
MAFGLDPEAAAALTAQVRRAAPNKPLMVKLSPNAPDLTAVAKSCAAAGADAFSLVNTFKGMAIDIDKRKPVFENTSAGLSGPCIRPIALRMVWELYEAVQVPVVGMGGIASADDALEFLLAGAAAVQVGSATFAHPPLMTEIIRGIEEYMKEKGYTELGKLNIRGF

SEQ ID NO: 11607 - DNA, 819 bp, Unknown
  Obtained from environmental sample
  misc_feature (1)..(819): n is a, c, g, or t
atgcgtattggagaaatatcaagagattgccgctgcataatgtntcagagaataaaaagcgcggcactgcgcggcatagaggcaatccctgtggaaatagaagtggatagcacttcggggcttcctgggttttcgcttgtgggcttgcctgataatgccgtgcgagaggcaagggagagggtggttgccgctatgcgaagttgcggattttacggctgctccactagaatgaccgtgaatatgtcgcctgcggatttgcgcaaagaaggtgctgcttttgatttggggctagctattggaatactaaccgccacggaacaaattgtggttaatgagcttgaaaattttttgtttttgggcgaactttctttggatggcaaactgcgccctgttcacggagttttggcggttgcggcaaacattgcccgtagcgcgccacaaacaattctcgttgttcctcacgaaaatgcacaagaagcaacttgcgtggaaaggctcagagttatagcaccaaagaccttggaagaatgtttaaacgggttgcagaaacctgaacaggtttattgctcctacccagaatgcagttctgtttctgcaacccaaaacaaaataccggatttttctcaagtgtatggaatggcaaacgttaaacgcgctcttgaaatttctgctgccggagcacataattttcttttggttggttcaccgggttctggaaaaactctttctgcccgttgtttgccgggcattttgccagctatgcgccaaagcgaatctttagaaagcacaataatacactcgtgcgctgaacttaattaa

SEQ ID NO: 11608 - protein, 272 aa, Unknown
  Obtained from environmental sample
  DOMAIN (206)...(271): Magnesium chelatase, subunit ChlI
  misc_feature (1)..(272): Xaa is any amino acid
MRIGEISRDCRCIMXQRIKSAALRGIEAIPVEIEVDSTSGLPGFSLVGLPDNAVREARERVVAAMRSCGFYGCSTRMTVNMSPADLRKEGAAFDLGLAIGILTATEQIVVNELENFLFLGELSLDGKLRPVHGVLAVAANIARSAPQTILVVPHENAQEATCVERLRVIAPKTLEECLNGLQKPEQVYCSYPECSSVSATQNKIPDFSQVYGMANVKRALEISAAGAHNFLLVGSPGSGKTLSARCLPGILPAMRQSESLESTIIHSCAELN

SEQ ID NO: 11609 - DNA, 897 bp, Unknown
  Obtained from environmental sample
  misc_feature (1)..(897): n is a, c, g, or t
atgagtaaaccgaatccgctgaagcaaaaaatccctgttccccgatccccgatccccggttccctatcccccatgtacctctttaccctcgcctttgtttntgggcctcttgtgtatatggcggcgttaagctttatgcggcggcggggcgtctgggatgtagaggcggtattcaccntgcggaactaccgccttattcttgagcctgtctacctggaaacattcaggcagtctgtaaaacttgcgcttgtaagcaccttaacagtcacgctgataggttaccccttcggttattttatggcccgccttagcccaatctggcggggcagggtaatgctccttttgataataccgttttggaccagcgcccttatgcggctttacggctggatcatcgtgttcaggtcaaacggcgttcttgaccgcctactggcgagcctgcttatgcgttttggtctgacgcatgaacctttgcgcctcttgtacagttatcccgcggtcgttaccggcatgatctacgccctgctgccctttatgatctactcggtatacgccagcgcggagaaaatggaccgttctctggtggaagcggcgcgtgttctcggagccgggcgtttgcgcgcctttctcaccgtcaccctgccgctgacaatgccgggtctgttttccggcgttattctttctttcatcccatcaatgggcctttatttcatcgccgacatactcggcggcaacaaggtggttctggtaggaaacttaatccgcgagcaggtaatgaacgtacacaacctgccctttgcggcggccctcagcgttacgctgatggcgctgaccagcctgttcctgtacttgtaccgcctcgccgcccgcaccggtgagatcgaggggctgatatga

SEQ ID NO: 11610 - protein, 298 aa, Unknown
  Obtained from environmental sample
  DOMAIN (75)...(293): Binding-protein-dependent transport system inner membrane component
  misc_feature (1)..(298): Xaa is any amino acid
MSKPNPLKQKIPVPRSPIPGSLSPMYLFTLAFVXGPLVYMAALSFMRRRGVWDVEAVFTXRNYRLILEPVYLETFRQSVKLALVSTLTVTLIGYPFGYFMARLSPIWRGRVMLLLIIPFWTSALMRLYGWIIVFRSNGVLDRLLASLLMRFGLTHEPLRLLYSYPAVVTGMIYALLPFMIYSVYASAEKMDRSLVEAARVLGAGRLRAFLTVTLPLTMPGLFSGVILSFIPSMGLYFIADILGGNKVVLVGNLIREQVMNVHNLPFAAALSVTLMALTSLFLYLYRLAARTGEIEGLI

SEQ ID NO: 11611 - DNA, 348 bp, Unknown
  Obtained from environmental sample
  misc_feature (1)..(348): n is a, c, g, or t
ttgacgcccgaaggccgcatcaaagcagactgcttgcgctatttggaaaggcgcggtttcttcgcttggaacaacccttcaggagccgcccgcattgccccggatcgttgggttcgattcgggcataagggaagcgctgacattctgggatgtttgcctgacgggcgattcctggccatcgagatgaaggcgcagcgtgggcgtctttcgccggagcaatcggcgttccttgaaaagatccggggctatggcggcctggccattgtcgctcggtcattcagggaacttgacgaggcgttacgcgaagcggggtatgccatgaaagatatgccgctgtttgcggggtag

SEQ ID NO: 11612 - protein, 115 aa, Unknown
  Obtained from environmental sample
  DOMAIN (21)...(102): Protein of unknown function (DUF994)
  misc_feature (1)..(115): Xaa is any amino acid
MTPEGRIKADCLRYLERRGFFAWNNPSGAARIAPDRWVRFGHKGSADILGCLPDGRFLAIEMKAQRGRLSPEQSAFLEKIRGYGGLAIVARSFRELDEALREAGYAMKDMPLFAG

SEQ ID NO: 11613 - DNA, 540 bp, Unknown
  Obtained from environmental sample
  misc_feature (1)..(540): n is a, c, g, or t
ttgcgggagataccgcaggcgcgtgtgagtgagcagaacgaggccgcgctgctgccatacgcggtaatgctcaacgtcgacctcgtgtggatacacgcgtcggcgaccgtactggaatcaacgctggcgcactcgctcaatatgcgcgacgtgaagacgctggtgatcgagatgggcgtaggtatgcgcatcacggaaagcttctgtgcgcagattgtggacggcatactgaatttgttgagcgaactcggaatgtggaaagggaaggccgggcggacgcggccgccgctcgtttcaaaggatcgcggagtcggctttttgaattcggacgcggcggggatatttattccgcgcgccgcgcacggcagccatgtaaacgccggtgactgcatcggcattgtcatagacccgcttaccggtgcagtcgtcgaggaaacgctcgcgccctgtgacggcttgctgtttacgctgagggaataccccgtcgtcttcggcggttcgcttttggcgcgaatcatggaggactccaaaaatggttaa

SEQ ID NO: 11614 - protein, 179 aa, Unknown
  Obtained from environmental sample
  misc_feature (1)..(179): Xaa is any amino acid
MREIPQARVSEQNEAALLPYAVMLNVDLVWIHASATVLESTLAHSLNMRDVKTLVIEMGVGMRITESFCAQIVDGILNLLSELGMWKGKAGRTRPPLVSKDRGVGFLNSDAAGIFIPRAAHGSHVNAGDCIGIVIDPLTGAVVEETLAPCDGLLFTLREYPVVFGGSLLARIMEDSKNG

SEQ ID NO: 11615 - DNA, 942 bp, Unknown
  Obtained from environmental sample
  misc_feature (1)..(942): n is a, c, g, or t
ttgatggccgaggggagatttcgccccgccgcccgtgctctacgtgaggggcgacctctcggctctgcgcggccacgcgctcgccgtcgtggggacgcgcaagccaaccccctacggcgtcgcttgcacgcgctcgctgaccgcggagctatgcaagaacgccgtgatcgtgagcggcctggccgtcggcgtggacaccgccgcccacgagcgctgcctcgaactcggcggcaagacggtggccgtcttaggcagcgggatcgaccgcgtctacccctcagaaaacatcgacctcgccaggcgcatccgcgaacacggcgcgctcgtctccgagttcccgcccggcaccgtcccggaggcgtacaactttccgcggcgcaaccgcgtgataagcggcatctcctgcggcgtaatagtggtggaggccggcgaaaggagcggggcgctgataaccgccgactacgccctccagcagaacagggtcgtcttcgccgtgcccgggcctatagactcgccgatgagcgccggcacgttcaaactgatcaaggacggcgccgtgcctataagatccgccgcggacgtcttcgagcacatctcctccgtctcattcgccccgctcttgaccgcgcccccgcaaggcataaggagcgagacgccgccgctgctcccggaaaacgaaatcgcggtttgggacgccctgtcaaacgaaccgcagcgcgtggacgcgatatcggaagcctgccgcgtggaaatcccgcaactgttggcaatattgctgaacctggaactgaaaggtttcgtaacgcagatcggcgggcagcaattcaggagggcgctttcttgagactgaaaaataacagacgccttttaatgataacggcggcatttgccgtcgtagccgttgttcttgccgtattgacgttcatgaacaaggtttcctag

SEQ ID NO: 11616 - protein, 313 aa, Unknown
  Obtained from environmental sample
  misc_feature (1)..(313): Xaa is any amino acid
MMAEGRFRPAARALREGRPLGSARPRARRRGDAQANPLRRRLHALADRGAMQERRDRERPGRRRGHRRPRALPRTRRQDGGRLRQRDRPRLPLRKHRPRQAHPRTRRARLRVPARHRPGGVQLSAAQPRDKRHLLRRNSGGGRRKERGADNRRLRPPAEQGRLRRARAYRLADERRHVQTDQGRRRAYKIRRGRLRAHLLRLIRPALDRAPARHKERDAAAAPGKRNRGLGRPVKRTAARGRDIGSLPRGNPATVGNIAEPGTERFRNADRRAAIQEGAFLRLKNNRRLLMITAAFAVVAVVLAVLTFMNKVS

SEQ ID NO: 11617 - DNA, 810 bp, Unknown
  Obtained from environmental sample
  misc_feature (1)..(810): n is a, c, g, or t
gtgctctacgtgaggggcgacctctcggctctgcgcggccacgcgctcgccgtcgtggggacgcgcaagccaaccccctacggcgtcgcttgcacgcgctcgctgaccgcggagctatgcaagaacgccgtgatcgtgagcggcctggccgtcggcgtggacaccgccgcccacgagcgctgcctcgaactcggcggcaagacggtggccgtcttaggcagcgggatcgaccgcgtctacccctcagaaaacatcgacctcgccaggcgcatccgcgaacacggcgcgctcgtctccgagttcccgcccggcaccgtcccggaggcgtacaactttccgcggcgcaaccgcgtgataagcggcatctcctgcggcgtaatagtggtggaggccggcgaaaggagcggggcgctgataaccgccgactacgccctccagcagaacagggtcgtcttcgccgtgcccgggcctatagactcgccgatgagcgccggcacgttcaaactgatcaaggacggcgccgtgcctataagatccgccgcggacgtcttcgagcacatctcctccgtctcattcgccccgctcttgaccgcgcccccgcaaggcataaggagcgagacgccgccgctgctcccggaaaacgaaatcgcggtttgggacgccctgtcaaacgaaccgcagcgcgtggacgcgatatcggaagcctgccgcgtggaaatcccgcaactgttggcaatattgctgaacctggaactgaaaggtttcgtaacgcagatcggcgggcagcaattcaggagggcgctttcttga

SEQ ID NO: 11618 - protein, 269 aa, Unknown
  Obtained from environmental sample
  DOMAIN (1)...(178): SMF family
  misc_feature (1)..(269): Xaa is any amino acid
MLYVRGDLSALRGHALAVVGTRKPTPYGVACTRSLTAELCKNAVIVSGLAVGVDTAAHERCLELGGKTVAVLGSGIDRVYPSENIDLARRIREHGALVSEFPPGTVPEAYNFPRRNRVISGISCGVIVVEAGERSGALITADYALQQNRVVFAVPGPIDSPMSAGTFKLIKDGAVPIRSAADVFEHISSVSFAPLLTAPPQGIRSETPPLLPENEIAVWDALSNEPQRVDAISEACRVEIPQLLAILLNLELKGFVTQIGGQQFRRALS

SEQ ID NO: 11619 - DNA, 669 bp, Unknown
  Obtained from environmental sample
  misc_feature (1)..(669): n is a, c, g, or t
atggttccggttttggggggaacgtttactatggggtgctcatcggagcagtggagcgattgcgagagtgcagaacaaccaacgcattcggtgacgcttagcggctactacattgggaggtatgaggtgacagaggggttttggaaggcagtgatggacagcagtaattatctgtcaacgtttatagggggtgataatttgcctgtggtggctattgattggaatgatattctattatttatacagacgttgaatagcaaaaccggaagagcgtatcgattgcctacggaggcggagtgggagtatgcggctcgcgggggcgcgaacgatggcgggtacaagtatccaggaagcaacacgattgatgatgttgcatggtatattggaaacagcggtaagaagttacatgatgtaggtacaaaattgccgaatgtattgggtatctatgatatgagcggcaacgtgtgtgagttggtgagcgattggtacgtgagctatcgcccgggtgcacagaccaatccaaccgggggggcggcttctatcaatcgccgcgtggcgcggggcggcagttggggccacatcgaggggaattgccgtgtctttttccgcggcaactactatatgcgtatcgttaacacgggcttccgcattgcgttgccgttcccctag

SEQ ID NO: 11620 - protein, 222 aa, Unknown
  Obtained from environmental sample
  DOMAIN (1)...(219): Domain of unknown function (DUF323)
  misc_feature (1)..(222): Xaa is any amino acid
MVPVLGGTFTMGCSSEQWSDCESAEQPTHSVTLSGYYIGRYEVTEGFWKAVMDSSNYLSTFIGGDNLPVVAIDWNDILLFIQTLNSKTGRAYRLPTEAEWEYAARGGANDGGYKYPGSNTIDDVAWYIGNSGKKLHDVGTKLPNVLGIYDMSGNVCELVSDWYVSYRPGAQTNPTGGAASINRRVARGGSWGHIEGNCRVFFRGNYYMRIVNTGFRIALPFP

SEQ ID NO: 11621 - DNA, 918 bp, Unknown
  Obtained from environmental sample
  misc_feature (1)..(918): n is a, c, g, or t
ttgccaatgatcagatcggccgagaatgaagtaaagagcggcagcggaaaaggtcatgcagtgtatattgattccaacccggttaatttcagggatactaccgcaggagcgggggataattttgattatagcggcgaggaaagcgaacccaatcaaacccctacaatattagattatgacatcggcaacctgactcagaccgtaggcagtgttaccgccgtaaccataacgccgaaatacggcaagtcaagcggcgcgcgaactatttattactcggggacaggcggcacgacttacaccaaaagcacaacgcttcctacggcaggcggaacttacgcggtaacttttgacgtagcggcggtaacaggctggaacgaggtaaaaggcttgagcgcgggaacgcttacgattagcgccggcagccctagcgcgccgcaagaaacgcctgttgtaaatgcgggaaacggtcagcttgcggtaacatggaaaatggcggaaggagcaaacgtttacgaagtctggatgggaactgacacaaatcccactttagcgacaaagcgaggcggtgatgttacgggcttatcttcggttataaccggattaaccaacggaactgtttattatgtgtgggtaaaggcaaagaacgatgccggttcaagcggctttagtcccatggcaagcggtactcctcaggaaatagacattagcggaaaaatcccgacggctcctgttgttagtattgataacgaacaattgtcactgacatggcaggcggtggaaggcgcaacggcgtatgaagtatggctagggacagtcaacaattccgcgtcccgcacgaanaacggcgctgatgttaccacttcgctttccgtaacgatgagcggacttacaaacgaancaccctatacgtttggctga

SEQ ID NO: 11622 - protein, 305 aa, Unknown
  Obtained from environmental sample
  DOMAIN (142)...(223): Fibronectin type III domain
  misc_feature (1)..(305): Xaa is any amino acid
MPMIRSAENEVKSGSGKGHAVYIDSNPVNFRDTTAGAGDNFDYSGEESEPNQTPTILDYDIGNLTQTVGSVTAVTITPKYGKSSGARTIYYSGTGGTTYTKSTTLPTAGGTYAVTFDVAAVTGWNEVKGLSAGTLTISAGSPSAPQETPVVNAGNGQLAVTWKMAEGANVYEVWMGTDTNPTLATKRGGDVTGLSSVITGLTNGTVYYVWVKAKNDAGSSGFSPMASGTPQEIDISGKIPTAPVVSIDNEQLSLTWQAVEGATAYEVWLGTVNNSASRTXNGADVTTSLSVTMSGLTNEXPYTFG

SEQ ID NO: 11623 - DNA, 837 bp, Unknown
  Obtained from environmental sample
  misc_feature (1)..(837): n is a, c, g, or t
gtggctatgaacaagtttatcgcctgggacgtttttaagcaggattcgataaaatcaaaggtaaaagacaagaaaagcgtgccttccgtccttagaaaaatttttgtaagccgccttttaaatgaaaacgcggaaggttatgaaaaaggaacgcctgtttttacctctcttatacgcgcaaagtgggcgaagcaggcggctcatttcgcgccgtggcttacgggtattctgccccagcttggcgcgtggtttaaaaagagcgccgggctcccgatagaaactattttgagcgaaaaagcaaaggcggcggcgcaagattttgagggggacgacagggatttgtttgtacttgcgtgccgttatgcgcaatttcttgaaaagtacgggctttttgaaccggcgtgggaaactcccccgtttaataacgacggaaaggaatattttttattttttccgcaatccctgtccgattacggcgaatataaagaactgctgtccgagggcggacaagtaaaaacaatagatgttacaaacgccgatgtcccgtttgatactttcttttattccaattcccgcggtgaaataacggaagccgcgctttacatacgagcattacacgaaaaagaaggcgtagactgggactctatcgcggtttgcattcccgactctgaaaaatacgaaccttatgttttacgcgaatttactaacaggaatattccctatgtaaaacgcgtaagcaagccggttactgattataccgcgggaagtttcttccgttccgtaatagagtgtacttcgggtaattttgccttttccgcccttgtttcgcttgtttaa

SEQ ID NO: 11624 - protein, 278 aa, Unknown
  Obtained from environmental sample
  misc_feature (1)..(278): Xaa is any amino acid
MAMNKFIAWDVFKQDSIKSKVKDKKSVPSVLRKIFVSRLLNENAEGYEKGTPVFTSLIRAKWAKQAAHFAPWLTGILPQLGAWFKKSAGLPIETILSEKAKAAAQDFEGDDRDLFVLACRYAQFLEKYGLFEPAWETPPFNNDGKEYFLFFPQSLSDYGEYKELLSEGGQVKTIDVTNADVPFDTFFYSNSRGEITEAALYIRALHEKEGVDWDSIAVCIPDSEKYEPYVLREFTNRNIPYVKRVSKPVTDYTAGSFFRSVIECTSGNFAFSALVSLV

SEQ ID NO: 11625 - DNA, 930 bp, Unknown
  Obtained from environmental sample
  misc_feature (1)..(930): n is a, c, g, or t
gtgtttttcgacacccccgcgatgaccgccacgagcggcccggggctgtcgcttatgcaggagttcctgggctactgctccatgacggagaccccggccgtggtggtggacgtgcagcggacggggccgtcaatcggcatgcccacgaagcacagccaggacgacctgatggcggcgatattcggcggccacggggaggggcagcggatcgttttggccccctcaaccatagaggagtgcttctacatgacggtggaggcgttcgacatcgcccgccacttccgctgtccggttataattctgacggacagcgctctggggaacctccaaacgttatgcaggcggcccgacacttccgtgggcttcaaagggcatatcttgaacgccgcgcaagacgaggaagcggcaaaggccgccgcgcgggccgctaaacccggcacggccgtccgccgcataacgggactggagcacgacgccaaggggatgccgagcaacaccgcgaacaaccgcatccgtcagcagtacaagcgcttcagtaagatggatagaatcgaggcggaatacggctatatgcagacgttcgacttaggcgacatcaaaccgcccatgcctaaatcgcggttcgccgccaggatgaacatagactccgcgcccgccgatttatgcgtcatatcgtggggcttcaacgcggccatgacgcgcatagcggtgtcctcgttgcgcaaacgcggcatgaaaatcgcctgcctctacccgcgcatgcttttcccgttcgtcagcggaccttacttggagctgctgagtttttgcaaacgcatagccgtggtggagtcgaactacacggggcagctggcctccctgatacgtatgcacacaggggtcaacacgatctccggaagaagacaacgggagccctcacgcccgcgataa

SEQ ID NO: 11626 - protein, 309 aa, Unknown
  Obtained from environmental sample
  DOMAIN (1)...(176): Pyruvate flavodoxin/ferredoxin oxidoreductase, thiamine diP-binding domain
  misc_feature (1)..(309): Xaa is any amino acid
MFFDTPAMTATSGPGLSLMQEFLGYCSMTETPAVVVDVQRTGPSIGMPTKHSQDDLMAAIFGGHGEGQRIVLAPSTIEECFYMTVEAFDIARHFRCPVIILTDSALGNLQTLCRRPDTSVGFKGHILNAAQDEEAAKAAARAAKPGTAVRRITGLEHDAKGMPSNTANNRIRQQYKRFSKMDRIEAEYGYMQTFDLGDIKPPMPKSRFAARMNIDSAPADLCVISWGFNAAMTRIAVSSLRKRGMKIACLYPRMLFPFVSGPYLELLSFCKRIAVVESNYTGQLASLIRMHTGVNTISGRRQREPSRPR

SEQ ID NO: 11627 - DNA, 732 bp, Unknown
  Obtained from environmental sample
  misc_feature (1)..(732): n is a, c, g, or t
gtggagcgacccgcccgttgtctttgttccgccccgcccgaagaaagcgcttggggttgtagagcgcctgcgagtccacgcccccggagaggacgcggcccggagtggggcgcccccggtatngtgggcgcggcccaggcgggtgatgctgtcgagcaggatcaccacgtcgcggttgtgctccacaaggcgcttggcgcgttctatcgccatctcggccactaccacgtggcggtcggcgggttcgtcgaaagtcgagcttatgatctcggcgttgacggagcgctgcatgtcggtgacctcttccgggcgctcgtctatgagcagcacgatcaggtgcacctctttgtggttggccaatatggcgttcgccaagtttttgagcaaaacggtcttaccggtgcgggggggcgccactatcaggccgcgctgacccttgccgatgggggccatcaggtttatgatgcgggtggcggtttctttcgggttatactccagatcgaactttttgtcggggaagagcggggtgaggtcgtcgaagttgatcttgcgtttgcactcctccgggtcctcgtagttgatcatctcaaccctgagcagcgcgaagtagcgctccgagtccttgggcggccttacctgcccggagacggtgtccccggtcttcaggtagaacctcttgatctgcgacggcgagacgtatatgtcgtccgggccgctgaggtagctgtttga

SEQ ID NO: 11628 - protein, 243 aa, Unknown
  Obtained from environmental sample
  misc_feature (1)..(243): Xaa is any amino acid
MERPARCLCSAPPEESAWGCRAPASPRPRRGRGPEWGAPGXVGAAQAGDAVEQDHHVAVVLHKALGAFYRHLGHYHVAVGGFVESRAYDLGVDGALHVGDLFRALVYEQHDQVHLFVVGQYGVRQVFEQNGLTGAGGRHYQAALTLADGGHQVYDAGGGFFRVILQIELFVGEERGEVVEVDLAFALLRVLVVDHLNPEQREVALRVLGRPYLPGDGVPGLQVEPLDLRRRDVYVVRAAEVAV

SEQ ID NO: 11629 - DNA, 630 bp, Unknown
  Obtained from environmental sample
  misc_feature (1)..(630): n is a, c, g, or t
ttgctaagaagaagaaagggtaatataaggaggaaagacatggccgcagtggatgaactgttgagcgaactctgcgatgagggtaagagcgcgcttctgcttatgcgcgagatgtctgactactatcgccgcctgctcaagaaactggagcttgattcgctcaccggactgcccgggagcaacaagtaccacgaactcatttcggagctgaccacgcgtccggcgaagagcgtcggcattatcatgttcgacgtaaacgacctgaagcactgcaacgataccctggggcaccacgccggagacatgctgttgcagagggcggcggagagcttccacgccgtaacgggggagggggtgcggatcttccgcaccggcggcgacgagttcgtcgcggttatgccgaattgcgcggagagcgatatggacgccgtcgtcgccaagtggcaagaggcgcttgacggtttgaacgcctccgtcgcgggtccgttacgctgcaccatagcccacggcaccgcctttggcgagggcgagtacgcgcttgccgaagtgatgaagttcgccgacgagcggatgtacggcgagaagcgccgaatgaaagagtgcgggctcaaaatcagcgatgtgcgctga

SEQ ID NO: 11630 - protein, 209 aa, Unknown
  Obtained from environmental sample
  DOMAIN (46)...(201): GGDEF domain
  misc_feature (1)..(209): Xaa is any amino acid
MLRRRKGNIRRKDMAAVDELLSELCDEGKSALLLMREMSDYYRRLLKKLELDSLTGLPGSNKYHELISELTTRPAKSVGIIMFDVNDLKHCNDTLGHHAGDMLLQRAAESFHAVTGEGVRIFRTGGDEFVAVMPNCAESDMDAVVAKWQEALDGLNASVAGPLRCTIAHGTAFGEGEYALAEVMKFADERMYGEKRRMKECGLKISDVR

SEQ ID NO: 11631 - DNA, 825 bp, Unknown
  Obtained from environmental sample
  misc_feature (1)..(825): n is a, c, g, or t
atgcgcctcgagtcctccgacgcagaggtcttcgagtacctgaagcgcaacccgctcccggggctcgacacggcgttcgtcttccagaccaacgggcagttcgacacggccaagtacgttcagtggctcaacacgccgcagacctactccatgtacccgtggctggcgcaggtggagcagcaggtgagccagcaggtgatgccggggcagaagctcgacgcgcttctcaaggccggcgtattcgtctccagatcggaggcggcctacgagttcgcccagaggaacgacagggcgaccttcgagtactacaaggtgctcagcggcgaccacaaggacgacagcgcgaaggtcaccgacaagatgatcagcgactactacgcgtccaaccagaaccgcttccgccgcgacgagctggccgacctgtacttcgtcaagatccccaagaccgccaccgaggccgacttggagctgaacaggaagaaccttcttgagatcaagaggaaagtgaccgccggagagtccgccttcgaagccgaggcggagttcgagtcggacgacgaagggtcggcctcgaacggcggcgatctgggctggttcggcaaaggcgcgatggttaaggagttcgaggacgcggtgttcgccatggagccgggggagatatccgatccggttaagacggttttcggctggcacataataaagctggacgagcgcgaaaagcccgacagcagcggtaacttcagggtgaaggcgcggcacatactgataaagaacaacccctccaacgagacgctcgacgccctgtccgaaaggcggagcagataa

SEQ ID NO: 11632 - protein, 274 aa, Unknown
  Obtained from environmental sample
  DOMAIN (144)...(237): PPIC-type PPIASE domain
  misc_feature (1)..(274): Xaa is any amino acid
MRLESSDAEVFEYLKRNPLPGLDTAFVFQTNGQFDTAKYVQWLNTPQTYSMYPWLAQVEQQVSQQVMPGQKLDALLKAGVFVSRSEAAYEFAQRNDRATFEYYKVLSGDHKDDSAKVTDKMISDYYASNQNRFRRDELADLYFVKIPKTATEADLELNRKNLLEIKRKVTAGESAFEAEAEFESDDEGSASNGGDLGWFGKGAMVKEFEDAVFAMEPGEISDPVKTVFGWHIIKLDEREKPDSSGNFRVKARHILIKNNPSNETLDALSERRSR

SEQ ID NO: 11633 - DNA, 765 bp, Unknown
  Obtained from environmental sample
  misc_feature (1)..(765): n is a, c, g, or t
ttgatactcaatacggaggatgatatggcaataatcggaataataggcggaagcggtctggataatcctgatatactttccaatccccgcgatgaaaaagttactacccaatacggagaaccttcatcgcctttgaaacacgggcttattgacggcgttcaagtggttctgcttgcgcgtcacgggcgcgagcacaccatccctcccacacaggtaaactaccgcgccaatattgccgctctcaagtcggcgggctgcacccacattgtagcgagtacggcggtaggctccctcagggaagaaatccgcaggggcgatcttgtcatcatcgatcaattcattgactttaccaaacagcgaaaaatgacgtttcacgaatcattcgccccccacaatcccgttcactgctccatggccgatccctacgacagccgcctcaggcagcttctcatcgacgagtgcaggagcaggggataccccttccacgatcgcggcgcggtggtaaccatcgaaggcccccgtttttcaacccgcgccgagtctttaatgttccgcgtcttaggcgcagacattatcaacatgtccatcgcaaccgagaccgtccttgccaacgaggcaggcatcccctacgcggcagtcgccatgagtaccgattacgactgctggaaaaccgacgaagaacctgtaagctgggaagcgattctgaaagtcttctccgaaaacgccgctaaagtaacagctttgctaaaagngtgtcgttactaa

SEQ ID NO: 11634 - protein, 254 aa, Unknown
  Obtained from environmental sample
  DOMAIN (9)...(253): Phosphorylase family 2
  misc_feature (1)..(254): Xaa is any amino acid
MILNTEDDMAIIGIIGGSGLDNPDILSNPRDEKVTTQYGEPSSPLKHGLIDGVQVVLLARHGREHTIPPTQVNYRANIAALKSAGCTHIVASTAVGSLREEIRRGDLVIIDQFIDFTKQRKMTFHESFAPHNPVHCSMADPYDSRLRQLLIDECRSRGYPFHDRGAVVTIEGPRFSTRAESLMFRVLGADIINMSIATETVLANEAGIPYAAVAMSTDYDCWKTDEEPVSWEAILKVFSENAAKVTALLKXCRY

SEQ ID NO: 11635 - DNA, 714 bp, Unknown
  Obtained from environmental sample
  misc_feature (1)..(714): n is a, c, g, or t
atggcaaagcggactgtggaaaaaaaaggaaaaattttaatcccgtcatttgcgattgaacgcacgcaggagcttgtttactatttccacattcttgtagacgaaggcataatccccgaagtgcctattttcgtcgattccccgatggcgactaatgcgacgacaattttccaggttcacccggaatgttacagcgaagaaataaaaaacgcctttattaaacatcataaaaacccgtttggctttaacagcctgcactttaccacaagcgtagacgaatcaaaggcgttaaacgaacaaaagggaccgtttatcataatttcggcggacggtatgtgcgaagccggacgcatacagcaccatcttatccacaatatacaggacccgaacacaacgattatgacggtaggctacatggcggaaaacacgcttgggcggcgtatccgcaaccgcgagggcgaggtaaaaatacacggcgaatggtttaagctaaaagcgcaagtagaggaaattaacgcgttcagcgcccatgccgattactttgaaatgcttgaatggcttaaagcgctggacacttcacgcttaaagggaatttttctggttcacggcgaaaagaaatctcaaacctttttgcaaaaatatctaaaagagaacggtttcccgaacgtggaaattgtgaaatacggcaagacttacgaattaacttcatcttaa

SEQ ID NO: 11636 - protein, 237 aa, Unknown
  Obtained from environmental sample
  DOMAIN (160)...(206): RNA-metabolising metallo-beta-lactamase
  misc_feature (1)..(237): Xaa is any amino acid
MAKRTVEKKGKILIPSFAIERTQELVYYFHILVDEGIIPEVPIFVDSPMATNATTIFQVHPECYSEEIKNAFIKHHKNPFGFNSLHFTTSVDESKALNEQKGPFIIISADGMCEAGRIQHHLIHNIQDPNTTIMTVGYMAENTLGRRIRNREGEVKIHGEWFKLKAQVEEINAFSAHADYFEMLEWLKALDTSRLKGIFLVHGEKKSQTFLQKYLKENGFPNVEIVKYGKTYELTSS

SEQ ID NO: 11637 - DNA, 720 bp, Unknown
  Obtained from environmental sample
  misc_feature (1)..(720): n is a, c, g, or t
atgcgaataattccaatagcaagcggaaaaggcggcgtgggaaaatcacttgtttcagctaacctgggagtagcttttgcccaggcgggaaagcgcgtagtgcttgcggaccttgaccttggagcttcaaatctccacctggtactcggtcatcaagcgccgcagatgggtattggaacatttctcagcaacactaaatcaaattttgccaatgtaattgtggataccgatgtacggggtttacgtttcattccaggcgacaatgaaattccaggaaccgcaaatcttactgtgtttcagagaaaagctcttgtaaagcagtttctcgcccttaaagatgatgccgacattcttatacttgaccttggcgcgggaacgcaccaatctatccttgatttttttctgctttcaaatcaggggatagtggtttcagctccggcggttaccgcagttttaaacgcttatgtatttttaaaaaacactattttccgcctgatgtttaacagttgtacaagaggctctcccgcccgctcatatcttgaaaaactgcgcaaggacagttccggcggacatcacaaactctacattcctaaaatactgccggaaatcgaaagaatagattctgtttcccatggaaattttttaaagcgaattgagatgctacatccaaagcttgtaatgaatttggtcgacgagccaaaaaacgcggatgtgcaatga

SEQ ID NO: 11638 - protein, 239 aa, Unknown
  Obtained from environmental sample
  DOMAIN (4)...(208): CobQ/CobB/MinD/ParA nucleotide binding domain
  misc_feature (1)..(239): Xaa is any amino acid
MRIIPIASGKGGVGKSLVSANLGVAFAQAGKRVVLADLDLGASNLHLVLGHQAPQMGIGTFLSNTKSNFANVIVDTDVRGLRFIPGDNEIPGTANLTVFQRKALVKQFLALKDDADILILDLGAGTHQSILDFFLLSNQGIVVSAPAVTAVLNAYVFLKNTIFRLMFNSCTRGSPARSYLEKLRKDSSGGHHKLYIPKILPEIERIDSVSHGNFLKRIEMLHPKLVMNLVDEPKNADVQ

SEQ ID NO: 11639 - DNA, 669 bp, Unknown
  Obtained from environmental sample
  misc_feature (1)..(669): n is a, c, g, or t
gtgtcccgcaaagccccaagctgcgcccgcgtggtatacgactattacggcggcgacgcaaaactggggcgtttcgcggaaatggttcattatgtagacaaggtggattcaggggatcttatcgccgaagaaattcttcacccccacggatgggttctgcttggttttatcatggatccccgaacgggacttggccgcttccgcaattttaccatcagcaattacgatctgatgaaagagcttgcccgcgcctgcgttgaaaaggacattgatgaaattctttccatgcccgatgttaaagagcggatagcggtgtacaaggaacaggcggagttgttccatgatatggttaaaaaatacgccaaagtcgaaggcaatgccgtggttattgattttcgcggcgtggagacgatctacgcgggaaaccgcttccttgtctacaccatatttcccgaacaaaatatttcaatatggattgttgatggacgcagtaaagccaacgtcgccattaccgttggttacagcatcatcaaccgcagcgccaccgttgacgtcggcagcctgatgcttcattacggcggcggcggtcatcatcaggtgggaacctgccaggtttcatattcggacgccgacaagattctcgctgaaattatagaaaaggtgaaatag

SEQ ID NO: 11640 - protein, 222 aa, Unknown
  Obtained from environmental sample
  misc_feature (1)..(222): Xaa is any amino acid
MSRKAPSCARVVYDYYGGDAKLGRFAEMVHYVDKVDSGDLIAEEILHPHGWVLLGFIMDPRTGLGRFRNFTISNYDLMKELARACVEKDIDEILSMPDVKERIAVYKEQAELFHDMVKKYAKVEGNAVVIDFRGVETIYAGNRFLVYTIFPEQNISIWIVDGRSKANVAITVGYSIINRSATVDVGSLMLHYGGGGHHQVGTCQVSYSDADKILAEIIEKVK

SEQ ID NO: 11641 - DNA, 513 bp, Unknown
  Obtained from environmental sample
  misc_feature (1)..(513): n is a, c, g, or t
gtggatgtcctgaccggggtcattaaaaataatttccccgcgcgcatcgcctttcaggttgcctccaccattgactcccgcaccattctggacgcgaagggggcggacaagcttctgggaaagggcgattcgctctttatggggccgggctctcccggtgcgcggcgggtgcagggcgcgttcctctccgagaccgaggtggaaaaaaccacggattatctccggtcgcttggcgagccgcagtatcagatggatatcctggacgacgacagcgaagaggcggaggacgacgactatgccggcgccgacgacgccgacgatgatcccctgtatgaggaggccgtttcgatagtgctgacgacccaaagggcgtccgcctcctatctccagcggcggctcaagatcgggtacaaccgggcatcgcgcatggtggagcgcatggaaagggacggcatcatcggtccgcagattggctcaaaaccgcgcgagatccgcgtcacatcctggccgtaa

SEQ ID NO: 11642 - protein, 170 aa, Unknown
  Obtained from environmental sample
  misc_feature (1)..(170): Xaa is any amino acid
MDVLTGVIKNNFPARIAFQVASTIDSRTILDAKGADKLLGKGDSLFMGPGSPGARRVQGAFLSETEVEKTTDYLRSLGEPQYQMDILDDDSEEAEDDDYAGADDADDDPLYEEAVSIVLTTQRASASYLQRRLKIGYNRASRMVERMERDGIIGPQIGSKPREIRVTSWP

SEQ ID NO: 11643 - DNA, 816 bp, Unknown
  Obtained from environmental sample
  misc_feature (1)..(816): n is a, c, g, or t
gtgcattttgccgcagaaagccatgtagaccgctctatcttaggccccgaggcttttgttaaaaccaacgtgatgggaaccttcactttacttgatattgcgcgtaacacatggaaaaacgacaatgacgcgctctttcaccacatcagcaccgatgaagtttacggctctttgggcgaaaccggctattttacggaggataccccttacgacccgcgctcgccctattcggcaagcaaagccgcaagcgatcacctcgcgatggcttataaccacacttacggtctgcccgtaacgctttccaactgttctaataattacggcccttaccagtttcctgaaaaactcatcccgttaatgatcttgaatatgcttgaaggaaagcccctgccggtttacggcgacggaaagaatatccgcgactggctgtttgtagaagaccacaattcggcggtttggacgattatgcaaaacggcaaagccggagaaacgtataacataggcggcgaaaacgagtgggagaacatcaaattgctcaacgtattgattgacattgtctgcgccaaagccaaacttgaacccgccaaagcccaaagtaccataaattatgtaaaagaccgtcccggccacgaccgccgttacgcgatagactgctccaagcttaagcgcgaacttggctggaaacaagctgtaaattttgaagaagggctgtcccgtaccgtagactggtatctggcgaatccgcaatggatagagagcatacgctccggcgagtaccggcagtgggtggagaagaattacggggatagaggataa

SEQ ID NO: 11644 - protein, 271 aa, Unknown
  Obtained from environmental sample
  DOMAIN (1)...(168): NAD dependent epimerase/dehydratase family
  misc_feature (1)..(271): Xaa is any amino acid
MHFAAESHVDRSILGPEAFVKTNVMGTFTLLDIARNTWKNDNDALFHHISTDEVYGSLGETGYFTEDTPYDPRSPYSASKAASDHLAMAYNHTYGLPVTLSNCSNNYGPYQFPEKLIPLMILNMLEGKPLPVYGDGKNIRDWLFVEDHNSAVWTIMQNGKAGETYNIGGENEWENIKLLNVLIDIVCAKAKLEPAKAQSTINYVKDRPGHDRRYAIDCSKLKRELGWKQAVNFEEGLSRTVDWYLANPQWIESIRSGEYRQWVEKNYGDRG

SEQ ID NO: 11645 - DNA, 792 bp, Unknown
  Obtained from environmental sample
  misc_feature (1)..(792): n is a, c, g, or t
atggcggcgctgacttcagccgccgcgaaacttgccgaaaaacaaccggttaaatggataatcaacagcgccgcctacacagcggtagacaaagccgaagacgatgttgatatttgccgcgcgctgaatacgcagggagcggcaaacatcgccgctgtcgcgaaaagtaacgctattttcaatagcagcggagcccggctgattcacatttccaccgattatgtttttgacggaaaaggagagcgcccctaccgcgaagacgacgcggtggcgcccacaggcgtttacgggctgacaaagagagacggggaaatcgcggtgcaggaaaacgctccccgttcgtacataatccgcaccgcgtggttatacggcaagcatggcaataattttgtccataccatgctaaagctgatgaacgagcgggacgaagttaaagtagttaacgaccagcgcggcagtcccacatgggcttttgatctggcttccgtgatattaactttgataaaaacagttgattccggcaaagaaattccctttggcatttaccattttacaaatgagggaaacataacatggtttgactttgccgaagagatttacaaacagggaagagagcagggcagaatcaccaaaaactgcgccgtaagcccctgcacaagcgccgaatatccggcaaaagttaaacgccctgcgtattcagttctggacaaaagtaagattaagaccgcgttgggagtaaaaataccggcgtgggatgaaagtttgaaagagtttataaagaagcaaaaatga

SEQ ID NO: 11646 - protein, 263 aa, Unknown
  Obtained from environmental sample
  DOMAIN (2)...(180): NAD dependent epimerase/dehydratase family
  misc_feature (1)..(263): Xaa is any amino acid
MAALTSAAAKLAEKQPVKWIINSAAYTAVDKAEDDVDICRALNTQGAANIAAVAKSNAIFNSSGARLIHISTDYVFDGKGERPYREDDAVAPTGVYGLTKRDGEIAVQENAPRSYIIRTAWLYGKHGNNFVHTMLKLMNERDEVKVVNDQRGSPTWAFDLASVILTLIKTVDSGKEIPFGIYHFTNEGNITWFDFAEEIYKQGREQGRITKNCAVSPCTSAEYPAKVKRPAYSVLDKSKIKTALGVKIPAWDESLKEFIKKQK

SEQ ID NO: 11647 - DNA, 648 bp, Unknown
  Obtained from environmental sample
  misc_feature (1)..(648): n is a, c, g, or t
atggccgaggctagtcaaaatatttatggcttacttgacgttttgaataaaaaagcaccagatttgtttaaaaaactaccaggcttatcgggcgataggaagtcttttacagatacccgcgatggcaaggaatacagaactactgtgataggaaagcagacttggatggcggagaatttgaactacaacgcaagcggttctaaatgctatgataacaaaccagccaactgcgataagtatgggcggttgtataattgggaaacggcgatgaaggcttgcccaaaggggtggcatttgccgagcgataaagattggaatgttttgatgaaattcgtcaatccgaattgttctgacaatagcgattgtgacaaggctggaaccaagttgaaggctactaacggttggaatagtaatgaaggaaaatcaggcaacggtacggatgattttggctttgcggctctgccaggcggcggtcgccgttccgatggcagtttcgaccatatcggcgacctcggcaactggtggagtgcctcgaagtacaatgctaatgactcctactatcagggcatatactacgacattgaggacgccttatggcgtaaatacagtaagaactacttgcgtagtattcgttgcgtgaaggattaa

SEQ ID NO: 11648 - protein, 215 aa, Unknown
  Obtained from environmental sample
  misc_feature (1)..(215): Xaa is any amino acid
MAEASQNIYGLLDVLNKKAPDLFKKLPGLSGDRKSFTDTRDGKEYRTTVIGKQTWMAENLNYNASGSKCYDNKPANCDKYGRLYNWETAMKACPKGWHLPSDKDWNVLMKFVNPNCSDNSDCDKAGTKLKATNGWNSNEGKSGNGTDDFGFAALPGGGRRSDGSFDHIGDLGNWWSASKYNANDSYYQGIYYDIEDALWRKYSKNYLRSIRCVKD

SEQ ID NO: 11649 - DNA, 423 bp, Unknown
  Obtained from environmental sample
  misc_feature (1)..(423): n is a, c, g, or t
ttgagatcgcttggcggtttgagcaataacgtaggccatcacgcggagcagttttttcaagatatattcaaaagaaagctggagtttggcggagtaaaatacgataagatgattcccaatttggcatataagggcaatgaggaaatagaatttgacattgccttgctaaacggcgattccatagccttgatagaggctaaaaaccgcatacacccaaattttgtggataagtttgctggtgagcgcatagagagattcaggaaatatttccaggaattcagcaattacagagcctacctaggcatagctggcttttcctttagcgatgaggttttagaccgagcaggccgctacggcataggcatagtaaaacaggtaggcgaaggcgtagaaataaaagcggacaatttacgggtgtattaa

SEQ ID NO: 11650 - protein, 140 aa, Unknown
  Obtained from environmental sample
  misc_feature (1)..(140): Xaa is any amino acid
MRSLGGLSNNVGHHAEQFFQDIFKRKLEFGGVKYDKMIPNLAYKGNEEIEFDIALLNGDSIALIEAKNRIHPNFVDKFAGERIERFRKYFQEFSNYRAYLGIAGFSFSDEVLDRAGRYGIGIVKQVGEGVEIKADNLRVY

SEQ ID NO: 11651 - DNA, 423 bp, Unknown
  Obtained from environmental sample
  misc_feature (1)..(423): n is a, c, g, or t
ttgagcgaaaattctggaacgccggagcagattgcacccatcttggcgggcagcggccaagcggccatagcggagaaaacgagatggctttctgtgttaaagagacccggcataaaagccgaaactttttttagcgtggcttgcccgcagctccccttgaccagaaaagagaaattgcacatactctccgaggagctttacagcggcttttttgtccgcgccgcggaggagattgcgaatctgcaaaagatggcaaacctgaaaatccccgaaaatttcgattattcaaaaataagtgctttgagcatagaagcgcggcaaaagctcgccgccgctatgccgctcacattgggagcggcggcaaaagtcgcgggtgtaagggctggggatattgttgtgttgaagcatttaatacacccgtaa

SEQ ID NO: 11652 - protein, 140 aa, Unknown
  Obtained from environmental sample
  misc_feature (1)..(140): Xaa is any amino acid
MSENSGTPEQIAPILAGSGQAAIAEKTRWLSVLKRPGIKAETFFSVACPQLPLTRKEKLHILSEELYSGFFVRAAEEIANLQKMANLKIPENFDYSKISALSIEARQKLAAAMPLTLGAAAKVAGVRAGDIVVLKHLIHP

SEQ ID NO: 11653 - DNA, 657 bp, Unknown
  Obtained from environmental sample
  misc_feature (1)..(657): n is a, c, g, or t
ttggtacgaaaagatatggatagtaagacaaagccgttcgtgttagttagtgtggttcgtggtaaatttcttctctctcccgtgttggttcgtggtaaaaaattcttcctcttatttctaattctccccctcatatttatccaatgtcacggaaaagacacccacaaagccctgaccgattccgaaaaattcgcgcaggaatacccattggtgggaagcgataatatatttgtatacaggaatgcaagcgagacagcggacattttagaaaaaggcaggggcattgtatttctgggatttaaggaatgtccgtggtgtcagcaatacgccgtttaccttcacgatgccgcacgcgaaatggaagttgagaaaattttttactgcgatataaaagaagacagggaaagcaactcggaaagttaccgaagaatagtcgatattttttcaggtcgtctccagtatgatgacgaaggacgcccaagagtctatgtgccggatgcggcgatagtaagcaggggcagaataatcacccacgattttgaaacatcaaaggaaacgttagggtacgaaacgccgcaggaatactggaacgaagagcgggtaaatgcgctcaaggaacggctcaaggaagggattgatattttaaatcagatttag

SEQ ID NO: 11654 - protein, 218 aa, Unknown
  Obtained from environmental sample
  misc_feature (1)..(218): Xaa is any amino acid
MVRKDMDSKTKPFVLVSVVRGKFLLSPVLVRGKKFFLLFLILPLIFIQCHGKDTHKALTDSEKFAQEYPLVGSDNIFVYRNASETADILEKGRGIVFLGFKECPWCQQYAVYLHDAAREMEVEKIFYCDIKEDRESNSESYRRIVDIFSGRLQYDDEGRPRVYVPDAAIVSRGRIITHDFETSKETLGYETPQEYWNEERVNALKERLKEGIDILNQI

SEQ ID NO: 11655 - DNA, 336 bp, Unknown
  Obtained from environmental sample
  misc_feature (1)..(336): n is a, c, g, or t
atgtgttaccttttaattatgaagctgatcggcattgaatgggacgatgacaaaaacattctcaataagcagttacatgacttgagttttgaaactgctcagtatgtctttgccgatccagagaggcttgagcggtttgacaggagtcaagacaacacgtcgggagaagaacgatggcagacattaggaaaagtcgggcctgttcttttcgtggtttatactgagcgcggggaaaccaggcggattatcaccgcacgcccggcagataaaacagagaggagaagctatcatgggaattaccagatcgacggtcatggttggtcaaaagccacctaa

SEQ ID NO: 11656 - protein, 111 aa, Unknown
  Obtained from environmental sample
  DOMAIN (10)...(99): Protein of unknown function (DUF497)
  misc_feature (1)..(111): Xaa is any amino acid
MCYLLIMKLIGIEWDDDKNILNKQLHDLSFETAQYVFADPERLERFDRSQDNTSGEERWQTLGKVGPVLFVVYTERGETRRIITARPADKTERRSYHGNYQIDGHGWSKAT

SEQ ID NO: 11657 - DNA, 813 bp, Unknown
  Obtained from environmental sample
  misc_feature (1)..(813): n is a, c, g, or t
atggttaagcgaaacgatgccgccgttccttcgatggttcaccgtgaatgggaagcgtcatggcggagcgatcctttgcccttgctcggcccctggctgcgttatgaaggcccgatctcactatcgcgcattgccgtggttttcggcataagccttgccgaagccgaggacgccgtcaacgcccttgccgaagttgaggaggtaatctgtgatgtgcgtcttgctgaagcggtttccccgctcatctgtgacagcagaaaccttgagatgctgctgcgtctttcccggcgaaaacagcgccctgaaatcagcgaaaggccagccgcacttttggttccttttcttgctttgcggcagggacttttaacagggagcaatgagcagttagcagtgagcaatgcaagagaacagataacaggtaacagagaacaaagtcaattcaaagagcagagcaacgaggctgctattaaaaagctaaatgcttgctgtgcgcctgttaaattgtgggaaacagaattctttactgcgcgttgcgctcattatagtccggaaattattaataacgaaattaacgagggccgtctggtctggtacggcgcgggtaaggaaaaaatagggttttgccggcccgatgatctggaattggtgaatgtgaattctgttcataatcacaaacaaaagatacattcagaaaacaaagtcgtatctgtgggggaagccgggcttctttcagaagccgggcttctttcagaagccttcgcgcagttaataaatcggggcttttttgaccggccccgcgatttctgggaataa

SEQ ID NO: 11658 - protein, 270 aa, Unknown
  Obtained from environmental sample
  misc_feature (1)..(270): Xaa is any amino acid
MVKRNDAAVPSMVHREWEASWRSDPLPLLGPWLRYEGPISLSRIAVVFGISLAEAEDAVNALAEVEEVICDVRLAEAVSPLICDSRNLEMLLRLSRRKQRPEISERPAALLVPFLALRQGLLTGSNEQLAVSNAREQITGNREQSQFKEQSNEAAIKKLNACCAPVKLWETEFFTARCAHYSPEIINNEINEGRLVWYGAGKEKIGFCRPDDLELVNVNSVHNHKQKIHSENKVVSVGEAGLLSEAGLLSEAFAQLINRGFFDRPRDFWE

SEQ ID NO: 11659 - DNA, 549 bp, Unknown
  Obtained from environmental sample
  misc_feature (1)..(549): n is a, c, g, or t
ttgtttttccccagggggcggaaaaaaaaggggtttttttttgaaaaagggcccattttttatttacgttggattttggagtttttttgggttttttgcctggggttttcgggccatttggggtttgagcccgcaccccagtctcatttggtttttgcgtcttcaccagcgcagcgggtttttacgcctgccccgccgccacagcaaccatntaatccagcctcctcctcccgttctacagatatcatcctggatggcgctgagacttatacagttgtcaggggagacacgcttacgaaaattgctcgagacaaatatcgaaatggtttttattatccgcttatcttgatggcctcgcaaaatgtcgttagggatcaggatttaattaggccgggtatgagattaacaattccgagactgcaggccaatttggatgatcccagggccagagaacgcattaaaaattacttaatagagattgcgagtcttactgaacgtaaaaggccccgcgatgccgctggcttgcggagcttggcgaactcgctgtag

SEQ ID NO: 11660 - protein, 182 aa, Unknown
  Obtained from environmental sample
  DOMAIN (90)...(138): LysM domain
  misc_feature (1)..(182): Xaa is any amino acid
MFFPRGRKKKGFFFEKGPIFYLRWILEFFWVFCLGFSGHLGFEPAPQSHLVFASSPAQRVFTPAPPPQQPXNPASSSRSTDIILDGAETYTVVRGDTLTKIARDKYRNGFYYPLILMASQNVVRDQDLIRPGMRLTIPRLQANLDDPRARERIKNYLIEIASLTERKRPRDAAGLRSLANSL

SEQ ID NO: 11661 - DNA, 579 bp, Unknown
  Obtained from environmental sample
  misc_feature (1)..(579): n is a, c, g, or t
gtgctcttcggcaacatagcgaagcgcggttgcatcgtcaagacggccggggtcgacgagtcgattttcaagttcagcgggacggccaagatttacgactcgcaggaggccgcctgtgacgggatcctaagcggcgagatcaaggctggcgacgtggtggtcatacgctacgaggggcccagaggcggtcccggtatgcaggagatgctctatcccacctcctacatcaaatcaatacacttaggcaaggagtgcgccctaatcaccgacgggcggttttccggcggaacgtccgggttatcaatagggcacatatcgccggaggcggcgagcggcggggaggtagccctgataaggacgggcgacgttatcgacatcgacattcctgagcgtactataaacgtgcgcgtagatgataaagagatggataggagacgctccgaggagcttgccaagggcaaggaggcgttcaaaccggtcgggcgcgaccgttacgtctccccggcgcttagggcgtacagcctattcgccgcgtcggcggacgagggggcggtgagggtgctgccggaggggggctga

SEQ ID NO: 11662 - protein, 192 aa, Unknown
  Obtained from environmental sample
  DOMAIN (1)...(187): Dehydratase family
  misc_feature (1)..(192): Xaa is any amino acid
MLFGNIAKRGCIVKTAGVDESIFKFSGTAKIYDSQEAACDGILSGEIKAGDVVVIRYEGPRGGPGMQEMLYPTSYIKSIHLGKECALITDGRFSGGTSGLSIGHISPEAASGGEVALIRTGDVIDIDIPERTINVRVDDKEMDRRRSEELAKGKEAFKPVGRDRYVSPALRAYSLFAASADEGAVRVLPEGG

SEQ ID NO: 11663 - DNA, 807 bp, Unknown
  Obtained from environmental sample
  misc_feature (1)..(807): n is a, c, g, or t
ttgcagtgcgtcgccgccgtactctttttggccgcttcctgcgccgccggttcaaataggcgcggcagcgccgaaagcgaggcgatactgccgcagatcgacgtaataaaggtcaaggagagcgccgacgaagctctgcgcaccgccaatgacctcaagcgcgagaacgcggcgctcttagcgaagattacggaattagacaaccgtctgattctcctctccgaggaggtctcaaacgtctccacggcaaagatcgaggaacttgagacgcgcttggcgctcctcaccgaagcctacaaagatatgttcgtgaagttgcaggcgatagagatcgcgctgcgccccgtgccgaagccgacgccgccgccgcccaacaaatcaactttcacaacaacgtcagacgggttcattgtggcgtcgccggagtacgagatgtttcaaaccggactgcgcctcttcaacaaccgcagttacgaaaagtcgctggcaatgttcatcgactgtctgtcaaaattccccgatggcgagtaccgcgacagggtgcagtactggataggggagtgcaactaccaactaaagcggatggatcaggcgatagaggcttacaagaaagtcttcgcctaccaaaattccaccaaggccgacgccgcccaattccaaatagcgctggcttaccagaagatggggcagacggagaaggcgagggcggaatttcggaggcttgtcgagaggtatccggcgagcagttacgtagagagggcgaagaagtatatagcggaactcaatgagtatttggtatgcagttga

SEQ ID NO: 11664 - protein, 268 aa, Unknown
  Obtained from environmental sample
  SIGNAL (1)...(23)
  DOMAIN (215)...(248): Tetratricopeptide repeat
  misc_feature (1)..(268): Xaa is any amino acid
MQCVAAVLFLAASCAAGSNRRGSAESEAILPQIDVIKVKESADEALRTANDLKRENAALLAKITELDNRLILLSEEVSNVSTAKIEELETRLALLTEAYKDMFVKLQAIEIALRPVPKPTPPPPNKSTFTTTSDGFIVASPEYEMFQTGLRLFNNRSYEKSLAMFIDCLSKFPDGEYRDRVQYWIGECNYQLKRMDQAIEAYKKVFAYQNSTKADAAQFQIALAYQKMGQTEKARAEFRRLVERYPASSYVERAKKYIAELNEYLVCS

SEQ ID NO: 11665 - DNA, 744 bp, Unknown
  Obtained from environmental sample
  misc_feature (1)..(744): n is a, c, g, or t
atggaagaaaaacgccgggaaacaggtaccgccgccgctgtaagcgcatggaacagggaacagtttgagtaccacgaaaccctggcaaaaaaagtcgaagaagacggtgctccgcctttattcctgtgttttgcccttcacccccagctctcaggcgaaaagaatttttccctatcggaaggtctggggcttctcaattcacttgcggatgaagaaaggctggatgccgtgggggaaacaggttttgatttatacaatgaaaaattcaaagccgccgaaaacattcaggatacactgttcaacaagcacctcgaaaccgcattgtatcggggtttgccaatgatccttcatttaagaaaggcgatgcacaaaatattcccattcacaaaagtattaaaaaaaattcccgctgttatttttcattcatggccaggaaccagaggggaggctgaagctctgctaaaaaagggtatcaacgcatatttttcatttgggacggcggtactaaagaatcataaaaatgcaatagcttcggcagctgttttgccggcggaaaggatacttctggaaaccgatgccccataccagccgcttcggggtaaaaatttttcaagctggcaggatttgagcctgatatgctcatgtatagccgatttgagaaaaaactcaggctgttcatgcacaactcctgaagaactcgaagagcaaaacacggctaattttttccgtgtttttaaccgttaa

SEQ ID NO: 11666 - protein, 247 aa, Unknown
  Obtained from environmental sample
  DOMAIN (1)...(246): TatD related DNase
  misc_feature (1)..(247): Xaa is any amino acid
MEEKRRETGTAAAVSAWNREQFEYHETLAKKVEEDGAPPLFLCFALHPQLSGEKNFSLSEGLGLLNSLADEERLDAVGETGFDLYNEKFKAAENIQDTLFNKHLETALYRGLPMILHLRKAMHKIFPFTKVLKKIPAVIFHSWPGTRGEAEALLKKGINAYFSFGTAVLKNHKNAIASAAVLPAERILLETDAPYQPLRGKNFSSWQDLSLICSCIADLRKNSGCSCTTPEELEEQNTANFFRVFNR

SEQ ID NO: 11667 - DNA, 501 bp, Unknown
  Obtained from environmental sample
  misc_feature (1)..(501): n is a, c, g, or t
atgaagtggtatgccaaagaattgggctttggcgatgaagcggatttttgggcaattgtggggcttcttcacgacatcgacttcggcgaatacccggatgaacactgcgtaaaggcgcgccaattgctctcagatgcgggagccaatgaagagctcatttacgcggtttgcagccacggctggggcatgacaggcgccaaagaaaagcctgaacgccttatggaaaaagtgctttataccgttgatgaacttacgggactaatttgggcagtcgcgataataaggccctccaaaagcgtcatggatatggaaataaaatctgtcaagaaaaaatataaaaccttgaattttgctgcgggatgtaaccgggaaacaatagataaaggcgctgcggagctgggttgggaactggacaaactcattgagcagacaattctcgcgatgagaagctgtgaagcggatataaacgcttatagagggaggtcttacgattcaaggtag

SEQ ID NO: 11668 - protein, 166 aa, Unknown
  Obtained from environmental sample
  misc_feature (1)..(166): Xaa is any amino acid
MKWYAKELGFGDEADFWAIVGLLHDIDFGEYPDEHCVKARQLLSDAGANEELIYAVCSHGWGMTGAKEKPERLMEKVLYTVDELTGLIWAVAIIRPSKSVMDMEIKSVKKKYKTLNFAAGCNRETIDKGAAELGWELDKLIEQTILAMRSCEADINAYRGRSYDSR

SEQ ID NO: 11669 - DNA, 702 bp, Unknown
  Obtained from environmental sample
  misc_feature (1)..(702): n is a, c, g, or t
gtgaaaaatgaaaatgcccgccgtttttatgaaatggaagcatcgagccagcagtggtcaataaggcagctacagcgccaagtcgaaagttcgctctatgaacgcctggcgctttcccgcgacaaagacaaagttctggcactggccaacgaggggcagatgctggaaaacccgcgcgacattttcaaaacgccatacgtgctggagttcactgggctcgagcagcgggcggaatacagcgaaagcgaattggaacaagcattgatagacaatttgcagtcatttctgcttgaactcggcaagggcttcttgttcgaggcgcggcaaaaacgcttttcgtttgaggaaaaatccttctatgttgacctcgttttttataacaggctgctgcaatgctatgtcctgatagacctcaagactgccgagctaaagcaccaagacttggggcagatgatgatgtacgtcaattattttgaccgccatgtcaagcgggagttcgagaaatccactgtgggcatcttgctatgcagccagaaaaacgacagcgtcgtcgagctgaccttgccagaagacagcaacatctatgcatcggcgtatagcctttacctgccagccaaagcactgctacagcgcaaactggccgagtgggtcaaggaatttgaggatgagcatagcctgtcaagcggagacagcgacacatga

SEQ ID NO: 11670 - protein, 233 aa, Unknown
  Obtained from environmental sample
  DOMAIN (1)...(216): Protein of unknown function (DUF1016)
  misc_feature (1)..(233): Xaa is any amino acid
MKNENARRFYEMEASSQQWSIRQLQRQVESSLYERLALSRDKDKVLALANEGQMLENPRDIFKTPYVLEFTGLEQRAEYSESELEQALIDNLQSFLLELGKGFLFEARQKRFSFEEKSFYVDLVFYNRLLQCYVLIDLKTAELKHQDLGQMMMYVNYFDRHVKREFEKSTVGILLCSQKNDSVVELTLPEDSNIYASAYSLYLPAKALLQRKLAEWVKEFEDEHSLSSGDSDT

SEQ ID NO: 11671 - DNA, 345 bp, Unknown
  Obtained from environmental sample
  misc_feature (1)..(345): n is a, c, g, or t
ttgccggaattgagcgggaagctcttcggggatcggggatatatcagccaagaactatttgaacacctataccagcagggcatccaattgatcaccagactgcgaaaaaacatgaagaataagttgatggacatgggtgataagatactgttacggaaacgggcggtgatagagtcggtaaatgattttctaaaaaacatctgccaagtggaacacagccgtcaccggagcgtcattaattttctagtcaatgtattggcggctctatcggcatatagctttctgccgcataagccgtctattcacggtctatgtgatgaaaaggctttgccgataattgtttaa

SEQ ID NO: 11672 - protein, 114 aa, Unknown
  Obtained from environmental sample
  misc_feature (1)..(114): Xaa is any amino acid
MPELSGKLFGDRGYISQELFEHLYQQGIQLITRLRKNMKNKLMDMGDKILLRKRAVIESVNDFLKNICQVEHSRHRSVINFLVNVLAALSAYSFLPHKPSIHGLCDEKALPIIV

SEQ ID NO: 11673 - DNA, 825 bp, Unknown
  Obtained from environmental sample
  misc_feature (1)..(825): n is a, c, g, or t
ttgccgcgaatgggcatcaaggccccgccgcctgacttgggcgaatggggggcgatggcggccaatatttcaaagaagcagaaagaagccacaatagcaatcgtcggcaaatacatccaactgcacgacgcctatctctcgatcatagagagcctaaaccacgcaggaatagaaacgggcgcaaacgtgaacatccgatggatagactgcgaagacgtgactgctgaaagtgcgcctgggctgttcagcgggataaatggcatgattgtgcctggaggctttggagacaggggcatagagggcaaaatcgccgcttgccgctacgccagggaaaacaatgtaccctttttgggcatctgcctaggcatgcagatagccgtcatagagttttcgcgcgacgtgtgcgggctggagggggcacattcagcagagttcaacgaagcctcgccccatcccgttatccacatcatgcccgaccaagtgggcagagaaggcacaggcggcaccatgcgcctcggcgcgtacccctgcaataccgcgcctggctcgctgctcgaaaaactgtacgggactccagaaattagcgagaggcacagacacaggtttgaagtgaacaaccactatagggagacattgaccggcaagggcctagtaatctcggggctgtcccccgacggctccttggttgaggccgtagagctgcccagccaccccttcttcgtaggcgtacagttccaccccgaattcaagagcaggccgaacaagcctggccccctgtttgtggggctggtaaaggccgcgctggaaagtgcatatccgaaatga

SEQ ID NO: 11674 - protein, 274 aa, Unknown
  Obtained from environmental sample
  DOMAIN (30)...(248): Peptidase C26
  misc_feature (1)..(274): Xaa is any amino acid
MPRMGIKAPPPDLGEWGAMAANISKKQKEATIAIVGKYIQLHDAYLSIIESLNHAGIETGANVNIRWIDCEDVTAESAPGLFSGINGMIVPGGFGDRGIEGKIAACRYARENNVPFLGICLGMQIAVIEFSRDVCGLEGAHSAEFNEASPHPVIHIMPDQVGREGTGGTMRLGAYPCNTAPGSLLEKLYGTPEISERHRHRFEVNNHYRETLTGKGLVISGLSPDGSLVEAVELPSHPFFVGVQFHPEFKSRPNKPGPLFVGLVKAALESAYPK

SEQ ID NO: 11675 - DNA, 363 bp, Unknown
  Obtained from environmental sample
  misc_feature (1)..(363): n is a, c, g, or t
ttggaattgacgcnggtttttataaaacgcatggaaaaatgggttacaaaccgcaagcttatggaaaaattttttcatcaggacgaagtcgcgtatgttacatcccgcggaaaaagcgccgctcagtcccttgcggcaaggtttgcggcaaaagaagcgttcggcaaagcgcttggaacagggcttgccaacattacattaaaagatattatggttattaataacattaacggaagacctgaaattaaatttattaattcggctaagagcgcgtttgaaaaaacaggcgccaacagggctcatatttcccttactcacgagaaggacagcgcgatagctatggtagttttggagaagatataa

SEQ ID NO: 11676 - protein, 120 aa, Unknown
  Obtained from environmental sample
  DOMAIN (6)...(67): 4'-phosphopantetheinyl transferase superfamily
  misc_feature (1)..(120): Xaa is any amino acid
MELTXVFIKRMEKWVTNRKLMEKFFHQDEVAYVTSRGKSAAQSLAARFAAKEAFGKALGTGLANITLKDIMVINNINGRPEIKFINSAKSAFEKTGANRAHISLTHEKDSAIAMVVLEKI

SEQ ID NO: 11677 - DNA, 879 bp, Unknown
  Obtained from environmental sample
  misc_feature (1)..(879): n is a, c, g, or t
atgcctgagataatgattgaaaccgcccacgggcagatggacgcgcaggaacttgaggatgtgatgcgccgttttattcacggcggtttccatgttcttgtatcgactacgattattgagaacggcatagacattccaaatgtaaacacgattatcatagaccgcgccgatatgtacggcgtgtcgcagttataccagctaaggggcagggtaggcaggtcggatcgcgttgcatacgcgtaccttttttatcctgaacaaaaagccctttctgaaatcgccatgaagcgtttacagacaatttccgattttacggaactcggttctggttttaagatagcgatgaaagacatggaaatcaggggagctggaaatcttttgggtagggaacagtcgggggatatttattcggttgggtttgatttatacgtaaaacttttagacgaggccgttaaacgccttgaagactcaaattatgaagcggaaacggaaaccctgcttgagcttgaatatacgggctttattcccgactcatatattgactccccccaacagaaaatggaagtttacaaaatgatagccgcaatacgcgacaaagaagacttggagcgcgtatactcgcagttacttgaccgttttggcccgttacccgatgaagccgcctccctgcttgcccttgccgagataaggattatttgccgccaactgacggtatcttcgctaaaagagagagcaggcgttgtgcggatagaattcgctaaagtcgcccgtgtaaaagtggagcggcttgtgcgattgatgcaacaatccgccggaaaaataaacttgatcctaaatgggcgaatgcgatcttgcttaaaacgggaagtatcggcttga

SEQ ID NO: 11678 - protein, 292 aa, Unknown
  Obtained from environmental sample
  DOMAIN (1)...(75): Helicase conserved C-terminal domain
  misc_feature (1)..(292): Xaa is any amino acid
MPEIMIETAHGQMDAQELEDVMRRFIHGGFHVLVSTTIIENGIDIPNVNTIIIDRADMYGVSQLYQLRGRVGRSDRVAYAYLFYPEQKALSEIAMKRLQTISDFTELGSGFKIAMKDMEIRGAGNLLGREQSGDIYSVGFDLYVKLLDEAVKRLEDSNYEAETETLLELEYTGFIPDSYIDSPQQKMEVYKMIAAIRDKEDLERVYSQLLDRFGPLPDEAASLLALAEIRIICRQLTVSSLKERAGVVRIEFAKVARVKVERLVRLMQQSAGKINLILNGRMRSCLKREVSA

SEQ ID NO: 11679 - DNA, 420 bp, Unknown
  Obtained from environmental sample
  misc_feature (1)..(420): n is a, c, g, or t
atgggcgttttcatacagctcattgttgttaattgtattatcatggggcgcgtggaaggctttgcctcgaaacgccccttgcttgacgttatcccggacgccctgggcatgggtctgggctttacatgggttcttgccggcatagccacggtccgcgagcttttgggcaacggcacgattctgaattttcaggtgctgccctcaagctatcagccgcttcttttctttgtgctgccgccgggcgggttttttgttttcgccctgtttatcgcccttaatatctacatcaagtcgcggcttaaagatcccgccgcggccggtaatgacagcgaaggcttcggctgctgtaagatagataatgctacagaatgtggcgccggctgcgactgcggccgcggcgcggatgggggtaaggcatga

SEQ ID NO: 11680 - protein, 139 aa, Unknown
  Obtained from environmental sample
  DOMAIN (2)...(91): Rnf-Nqr subunit, membrane protein
  misc_feature (1)..(139): Xaa is any amino acid
MGVFIQLIVVNCIIMGRVEGFASKRPLLDVIPDALGMGLGFTWVLAGIATVRELLGNGTILNFQVLPSSYQPLLFFVLPPGGFFVFALFIALNIYIKSRLKDPAAAGNDSEGFGCCKIDNATECGAGCDCGRGADGGKA

SEQ ID NO: 11681 - DNA, 312 bp, Unknown
  Obtained from environmental sample
  misc_feature (1)..(312): n is a, c, g, or t
atgaaaaccaccaaatggaacatttacgaagaactcaaaaccgaggaagaaatacaggcgtttgtggaagcgtccattgtggaagccgaaaatgatactgaccccagcctgcttgcctatgccctgggcgttgcggctaaggcacggggtatgctggcggtttcccgtgataccggtattgaccgcgcaggcctataccgttcattcacaaaaggaggagatccacgtatcagtacttttgataaggtagcgcgttctcttgggtatcatcttacgcttactccccttcaaaacaataagaaaaccatataa

SEQ ID NO: 11682 - protein, 103 aa, Unknown
  Obtained from environmental sample
  misc_feature (1)..(103): Xaa is any amino acid
MKTTKWNIYEELKTEEEIQAFVEASIVEAENDTDPSLLAYALGVAAKARGMLAVSRDTGIDRAGLYRSFTKGGDPRISTFDKVARSLGYHLTLTPLQNNKKTI

SEQ ID NO: 11683 - DNA, 804 bp, Unknown
  Obtained from environmental sample
  misc_feature (1)..(804): n is a, c, g, or t
atgagcaatgaacaatgttgttgtttgcaatctattcgtgaaagttccacgttatgcttacgagtaaaaacagtccccagtccccgatccctagctcctttcttattgttcattgctacttgctcattgttcattggctgttataccctcaaacagggaacaaccatgcttggctatattaaccgctccgtcccgctggagtcactgcttgaaagtaataccagcggcgcagatagttttgaagcggaaaagaaccgccgctttgtagagcaggttcaggatatacgccgttacgcgaaagaagaactcgggcttaatctgggcaggaattacacccgttatgtaaaaatcgatcgtgattaccttgcggcggtggtatcggcgtcagccgcggactcttttacacagcatgagtggaagtacccaatcgtaggcgcgatgccctacaaaggtttttttaagattgaggacgcgcgcaaggaacgggtaaaacttgaaaagaaagggcttgatgtctggatacggggcgttgacgcgttcagtacgcttggctggttcagggatcccctgtattcctatatgcgggattatccccctgacaggctcgccgatctgatcatccatgaatcgcttcatgcgacggtatttataaaggggcagtcgcagtttaacgaggagcttgccgaatttgtgggcagcgaaggcgcaagaatgtacacggagtcccgttatggtacggattccgctgaatatagggctatgctcgccggcgaagcggataacaaacgttctcggccgatctga

SEQ ID NO: 11684 - protein, 267 aa, Unknown
  Obtained from environmental sample
  misc_feature (1)..(267): Xaa is any amino acid
MSNEQCCCLQSIRESSTLCLRVKTVPSPRSLAPFLLFIATCSLFIGCYTLKQGTTMLGYINRSVPLESLLESNTSGADSFEAEKNRRFVEQVQDIRRYAKEELGLNLGRNYTRYVKIDRDYLAAVVSASAADSFTQHEWKYPIVGAMPYKGFFKIEDARKERVKLEKKGLDVWIRGVDAFSTLGWFRDPLYSYMRDYPPDRLADLIIHESLHATVFIKGQSQFNEELAEFVGSEGARMYTESRYGTDSAEYRAMLAGEADNKRSRPI

SEQ ID NO: 11685 - DNA, 642 bp, Unknown
  Obtained from environmental sample
  misc_feature (1)..(642): n is a, c, g, or t
atggccgagagtctgtgcgctaggatcgcgcctgggggagcattggaaacgctgcttccgagtggagcatggctgggggagctggcgagcgcgtcaaaacggtgcgcggcaatccgcttagtggcaccaatcggcgaggagagggaggctccgattgagatacacgcctgcctgccaataacagcgcaattgaacatttgggccgattttttgccaagtgccgtcgaacttggtgcaacgctgatacagccagtgatttatgaaaggagccaattcgatggttgccaagttaagccgcgcatggagcggtggcgtagggtcatcctagcggcctgcgagcagtcccatagaaataaagtcccagaattattgccgcccttgcccgttgatgcgcttcaaacttggggggccgcgcaaaaatgggtggcgtatgaggcccagacgggcgagcgaaacccacgccttggtccaggcagcatagccttcacacacgggccggagggtgggatcgccgactctgaaatggagttgttgataaaatccggctggaaggccattactctcgggaagagcatactaagagccgccacatgccccgccgcgattttgggggccatacagatggaactaggaaggggatag

SEQ ID NO: 11686 - protein, 213 aa, Unknown
  Obtained from environmental sample
  DOMAIN (8)...(208): Protein of unknown function (DUF558)
  misc_feature (1)..(213): Xaa is any amino acid
MAESLCARIAPGGALETLLPSGAWLGELASASKRCAAIRLVAPIGEEREAPIEIHACLPITAQLNIWADFLPSAVELGATLIQPVIYERSQFDGCQVKPRMERWRRVILAACEQSHRNKVPELLPPLPVDALQTWGAAQKWVAYEAQTGERNPRLGPGSIAFTHGPEGGIADSEMELLIKSGWKAITLGKSILRAATCPAAILGAIQMELGRG

SEQ ID NO: 11687 - DNA, 666 bp, Unknown
  Obtained from environmental sample
  misc_feature (1)..(666): n is a, c, g, or t
atgacttggtgcaaaacggccgttatcgtgcaggaagtgtcaaacgactattccgtcggcttggcgaaattctttgtcgataacttcaccaggctcaccggaaaccccaacgcaattcttgccacggtaaactacaatacaggcgatcaggacttcagcgcccagcttaccaccatccgctccctgaacccggacgtaatcttcgcgccgggcaactacacggaatccgcgcttgttatgaagcaggcccgcgagcttggcatcaacgttccggttatcggcggcgatacctgggaaaccccggaatttattgatgttggccgtgagcgtgttgaaggcgccgtgttctcctccttcttcgcggcagaatatgccggaacccccgaggcgaaagcgttccttgacgcgtacgcgaaaaagtataacaaggaacctgcctctgtaacggctctgggatatgacggttatctggtcgcgcttgacgccattaagcgcgccggctccaccgatcccgcgaagatccgcgacgccattgccacgacgtcgggttttgtcggagctaccggtataaccactcttgacaagaacggcgacgccaccaagagcgcctacatcaaagcggttgacggcggcaggtttgttttcaaaaccattgtaaatccgtaa

SEQ ID NO: 11688 - protein, 221 aa, Unknown
  Obtained from environmental sample
  misc_feature (1)..(221): Xaa is any amino acid
MTWCKTAVIVQEVSNDYSVGLAKFFVDNFTRLTGNPNAILATVNYNTGDQDFSAQLTTIRSLNPDVIFAPGNYTESALVMKQARELGINVPVIGGDTWETPEFIDVGRERVEGAVFSSFFAAEYAGTPEAKAFLDAYAKKYNKEPASVTALGYDGYLVALDAIKRAGSTDPAKIRDAIATTSGFVGATGITTLDKNGDATKSAYIKAVDGGRFVFKTIVNP

SEQ ID NO: 11689 - DNA, 435 bp, Unknown
  Obtained from environmental sample
  misc_feature (1)..(435): n is a, c, g, or t
ttgcggctgtcaatcagccgagtaacacgcagggacaagcggcggcagccccggtcagtccgccgaataatgcgcagtcatcaacgcccgctaacgccgcaaaggtcgacgacgcgaagaagccgacgaccccggcggcaacgggtgctccctctgtcgcgtctgtcaatcagccgagtaacacgcagggacaagcggcggcagcgccggtcagtccgccgaataatacacaagcgtcaacgcccgctaatgccgcaaaggtcgacgacgcgaagaagccgacgaccccggcggcaacggtcaatcctcctgtcgcccctgtcaatcaaccgagcaatccgcccgcaaagacgccgacagcgcccgttgacgcgaatacaaagcctgcgccagccggcgcaaaaccggcggagattctctttacaatacaggtag

SEQ ID NO: 11690 - protein, 144 aa, Unknown
  Obtained from environmental sample
  misc_feature (1)..(144): Xaa is any amino acid
MRLSISRVTRRDKRRQPRSVRRIMRSHQRPLTPQRSTTRRSRRPRRQRVLPLSRLSISRVTRRDKRRQRRSVRRIIHKRQRPLMPQRSTTRRSRRPRRQRSILLSPLSINRAIRPQRRRQRPLTRIQSLRQPAQNRRRFSLQYR

SEQ ID NO: 11691 - DNA, 633 bp, Unknown
  Obtained from environmental sample
  misc_feature (1)..(633): n is a, c, g, or t
ttgaccagggccgaatggtcgggcctgttggaactggcggcaaaaaaggctctgccgctgattgtcgatgaagtcttcgcgccgtatccgattgagcggcaagcagatgcgctttggaccattttggacggtccagagccagaagcccccgtgttccttttgtcaggcctaagcaaggtcgcgctgctgccccaaatgaagctgggctggattgccatgcttggccccgcaatggaggcaagtgagccgctggccttcattgccgaccagtacctgtccgtttcggccgcagtggcctgcgccgcgccgcgcctgctcgcgctcgcgccaggactgcaaaaaatggcaatagagcgcgtaaggggaaacattgccaccttggacgcgctgttgaagggacacgcacaccttgggcgctgcccggtgcatgggggctggagcgcgcttttgcggctgcccgacatcgaagacgatgaagcctgcgccctgcgcctgctgtccgaccaccgcgttctggtgtatccggggcgcttctttgacattcaaaagaatggctttttggcgatgagcctgctgccggagccggacacattcaaagtggcagcaagggcgttgatggatgggctgtcgtaa

SEQ ID NO: 11692 - protein, 210 aa, Unknown
  Obtained from environmental sample
  misc_feature (1)..(210): Xaa is any amino acid
MTRAEWSGLLELAAKKALPLIVDEVFAPYPIERQADALWTILDGPEPEAPVFLLSGLSKVALLPQMKLGWIAMLGPAMEASEPLAFIADQYLSVSAAVACAAPRLLALAPGLQKMAIERVRGNIATLDALLKGHAHLGRCPVHGGWSALLRLPDIEDDEACALRLLSDHRVLVYPGRFFDIQKNGFLAMSLLPEPDTFKVAARALMDGLS

SEQ ID NO: 11693 - DNA, 513 bp, Unknown
  Obtained from environmental sample
  misc_feature (1)..(513): n is a, c, g, or t
atgaatcaaaatatgccgtcaatcgcatatacatattcagaaccgttaattcacatagaatttgttcttgaatgtatggcgcttgcgcgcagacacggcatcgcaaatgttcttgttaccaacggctgcgccaatgcgcaagccgccgaaaaaattcttgaattaacagatgccgcgaatattgatttaaaatcttttaatgagacaacatacagaaaatgtttaaaaggtgatttaaaaaccgtattggactttatcaaacttgcatataaaatgggcgttcatattgaaataaccactcttgttgtgcccgatcttaacgattcaactgacgagttggacgccgccgcacaatttatcgcaggcgtagacagcaaaatcccatggcacctaacagcctatcaccccgattaccgctggaatgcgccgccgacagaccccgcttttttaatacgcactgccaaagaagccggaaaaaaactatcctgcgttcacactggcaatataagatga

SEQ ID NO: 11694 - protein, 170 aa, Unknown
  Obtained from environmental sample
  misc_feature (1)..(170): Xaa is any amino acid
MNQNMPSIAYTYSEPLIHIEFVLECMALARRHGIANVLVTNGCANAQAAEKILELTDAANIDLKSFNETTYRKCLKGDLKTVLDFIKLAYKMGVHIEITTLVVPDLNDSTDELDAAAQFIAGVDSKIPWHLTAYHPDYRWNAPPTDPAFLIRTAKEAGKKLSCVHTGNIR

SEQ ID NO: 11695 - DNA, 720 bp, Unknown
  Obtained from environmental sample
  misc_feature (1)..(720): n is a, c, g, or t
gtggggcttgttggaaagaatggttcgggcaaatcgacaatggccaaatgtatctgcggttttgtgcgtccggacaagggggcggtttactacaaggggcaggatttggcggcgctttcgattatggaaagagccgaaaaaataggctacgttatgcaaaaccccaaccagatgatttcattcccgatgatcttcgatgaagccgcgctggggctgcggacgagaaacattcctgaggccgatgttaaaacaagggtatacgacgcgcttaaggtctgcggtctgtaccctttcaggaactggccggtgaacgccctgagttacggccagaagaagcggctgacaattgccgccattctggtactgcgtccttctctcatgattcttgacgaaccaacggcagggcaggattaccggcattacaccgaatttatggaattcctcctgggccttaaccaggatctgggaatatccctcctcctgatcacccatgacatgcatttgatgcttgagtatacgtcaagggcggtggttctttccgaaggggtttgtattgccgacgaggagccgtttgaggcgcttaccgatgacgggattattgaaaaagcatgccttaaacggacaagcctttattctctggcgttgaaagccgggctgccggatccgcggggttttgtggggcggtacatcgcctttgacaggcagaggcggagaagatga

SEQ ID NO: 11696 - protein, 239 aa, Unknown
  Obtained from environmental sample
  DOMAIN (1)...(182): ABC transporter
  misc_feature (1)..(239): Xaa is any amino acid
MGLVGKNGSGKSTMAKCICGFVRPDKGAVYYKGQDLAALSIMERAEKIGYVMQNPNQMISFPMIFDEAALGLRTRNIPEADVKTRVYDALKVCGLYPFRNWPVNALSYGQKKRLTIAAILVLRPSLMILDEPTAGQDYRHYTEFMEFLLGLNQDLGISLLLITHDMHLMLEYTSRAVVLSEGVCIADEEPFEALTDDGIIEKACLKRTSLYSLALKAGLPDPRGFVGRYIAFDRQRRRR

SEQ ID NO: 11697 - DNA, 723 bp, Unknown
  Obtained from environmental sample
  misc_feature (1)..(723): n is a, c, g, or t
atgcgcggctacaagccggggcgtttttcctttaatgtccgcggtggcagatgcgaaaattgcgagggcgacggaacaattaaaattgaaatgaatttcttaccggatgtgtacattacctgcgatgtttgccacggcaagcgctttaacagggagactctggatatacactacaagggcaaaagcatcgccgatgttttggaaatgaccatagaagaggcggcagaattttttgcacccattccccagatcgcccgcaaaatggataccctgctttcggtgggcctgggatacgtgaaactgggccagtctgctcttaccctttcagggggggaggcccagcgggtaaaactcgctctggagctttccaagcgctcaacgggcaaaaccttctacatccttgacgagccaacaaccggcctccacttcgccgatgtgaaacagcttatggaagtgatccagcgccttgtggatcaaggcaatacggtggcgatgatcgagcataacctggacgtgcttttgcaggcggatcatataatagacctggggcctgaaggaggcgaccggggcgggcaggtgatagtcaccggaacgcctgagaaagtggccgagtattccgattcgtatacgggcaattacatcaaggaacacttattaaggcacggcaggaaacccgtaaatcctggcgcgttaaagcaaggggcgcggcaaaaaacaaagtga

SEQ ID NO: 11698 - protein, 240 aa, Unknown
  Obtained from environmental sample
  DOMAIN (29)...(186): ABC transporter
  misc_feature (1)..(240): Xaa is any amino acid
MRGYKPGRFSFNVRGGRCENCEGDGTIKIEMNFLPDVYITCDVCHGKRFNRETLDIHYKGKSIADVLEMTIEEAAEFFAPIPQIARKMDTLLSVGLGYVKLGQSALTLSGGEAQRVKLALELSKRSTGKTFYILDEPTTGLHFADVKQLMEVIQRLVDQGNTVAMIEHNLDVLLQADHIIDLGPEGGDRGGQVIVTGTPEKVAEYSDSYTGNYIKEHLLRHGRKPVNPGALKQGARQKTK

SEQ ID NO: 11699 - DNA, 402 bp, Unknown
  Obtained from environmental sample
  misc_feature (1)..(402): n is a, c, g, or t
gtggtccatatcggagcaaacatggatcaagaacgcaagttttatatcggcacaatgacatcgaagggtcttggtatccgcaatgtcggtgacgatacatttatttcactgtcctccccggacggtgccaaccgtgccattggaactctcgataaagcgcttaaaattatcaacaaacaaagagctgatcttggcgcctaccagaaccgtcttgaacacactattcgtggattagatgtgggtgcagaaaacctccaagctgcagaatcccgcatccgcgacgcgaatatggcaaatcagactgtagattacaccaaaaacatgattcttacacagtctggtaccgctatgttggcacaggccaatcaaagaggtcagtcagtattgcagcttctgcaatag

SEQ ID NO: 11700 - protein, 133 aa, Unknown
  Obtained from environmental sample
  DOMAIN (40)...(111): Bacterial flagellin C-terminus
  misc_feature (1)..(133): Xaa is any amino acid
MVHIGANMDQERKFYIGTMTSKGLGIRNVGDDTFISLSSPDGANRAIGTLDKALKIINKQRADLGAYQNRLEHTIRGLDVGAENLQAAESRIRDANMANQTVDYTKNMILTQSGTAMLAQANQRGQSVLQLLQ

SEQ ID NO: 11701 - DNA, 930 bp, Unknown
  Obtained from environmental sample
  misc_feature (1)..(930): n is a, c, g, or t
gtgaaaatgccggcgtttgacgttgcgagtaaatttatgactttctttaccgccagcaaggtggaagctataatcggtaactttgtgcgggcaagggggcttggagtccaaaacggcgttgataccgagcatgccggtattgtagacaaaatttttaaagattcgctggaaagggtactgaatctgggcatggttccgattctcccctgcattggttggagtccatcaggaaagctctacaatgtgccaagcgcagaaatcgccttggctgttgcatcggccctaaaagcggaaaaattgttttttctgtctgtccatgacaggttgcaagtgaaaaacctcaatattaagggagaattggaaacaaggccggatggtagccttgtaaggcttacccctcaacaggctgaattgcttataaattcgagctctgtccccaatcaattcctgtctgaacttaaactggcattaaacgcaagccgggcaggcgtgcacagggtacatttattggacgcaagagaagaaggtgtcgtcttaaaagagcttttttccaatcttggcgtgggaacaatggtttataatgatgaatatgactctatccgggcgttccattccagagatttgcctgatattctgcggatgatggagccgttaatgcaaaaaggcatccttatcaggcggaatcccgagcaaattcaggaaaaaaaggccgattattcagttttagagatagacggttctgtccgggcatgcggcgctttgcatgattggggcgaatctcaaggggaaattgccgccgttgccatagaccctcagtatacggacatgggtcttgggcggaaaatcgtcggctaccttgtcgaaaaagcccganaaaagcaaaatgaagcgcgtttttgtgcttacaacccaattctcaggactggttga

SEQ ID NO: 11702 - protein, 309 aa, Unknown
  Obtained from environmental sample
  misc_feature (1)..(309): Xaa is any amino acid
MKMPAFDVASKFMTFFTASKVEAIIGNFVRARGLGVQNGVDTEHAGIVDKIFKDSLERVLNLGMVPILPCIGWSPSGKLYNVPSAEIALAVASALKAEKLFFLSVHDRLQVKNLNIKGELETRPDGSLVRLTPQQAELLINSSSVPNQFLSELKLALNASRAGVHRVHLLDAREEGVVLKELFSNLGVGTMVYNDEYDSIRAFHSRDLPDILRMMEPLMQKGILIRRNPEQIQEKKADYSVLEIDGSVRACGALHDWGESQGEIAAVAIDPQYTDMGLGRKIVGYLVEKARXKQNEARFCAYNPILRTG

SEQ ID NO: 11703 - DNA, 645 bp, Unknown
  Obtained from environmental sample
  misc_feature (1)..(645): n is a, c, g, or t
atgttagccggcgacatattcaacgacaactacaacgccttatcgaatccggagggggcgagcgccctattcaagagcctgcgggcgacctacggcgtctacgcctgcccgggcaaccacgacgccgggaagagcgccgaggatatgatcgacttcctgacgcggagcggcgtaacgcttcttagcgacgagttcgatgtagtgaacggccaagcggtggtaatgggacggctcgacccgaggccgataggcggcttcatgggaaaacgcagagcgggcataggcgaactcatcgtacgggcaagcaacgaaacctccgtcacattgatcaacaacagaacggcgccggggcaaacgaaattatttacgatcaacggaaacacgcccataatcgtgatcgaccacaatcccaaatcgatacatgaatacggcaacgaggtggacttggtgctctccgggcacacgcacaaagggcagctgtttccggtcaacctgataactaagatgatctacaccgccgactacgggcactacaggaaagagccgggggcgccgcacctgatagtgacatccggcgcggggacgtggggggcgcccatgagggtggggacgaactgcgagattgtttgcgtgtctgtgttctaa

SEQ ID NO: 11704 - protein, 214 aa, Unknown
  Obtained from environmental sample
  misc_feature (1)..(214): Xaa is any amino acid
MLAGDIFNDNYNALSNPEGASALFKSLRATYGVYACPGNHDAGKSAEDMIDFLTRSGVTLLSDEFDVVNGQAVVMGRLDPRPIGGFMGKRRAGIGELIVRASNETSVTLINNRTAPGQTKLFTINGNTPIIVIDHNPKSIHEYGNEVDLVLSGHTHKGQLFPVNLITKMIYTADYGHYRKEPGAPHLIVTSGAGTWGAPMRVGTNCEIVCVSVF

SEQ ID NO: 11705 - DNA, 603 bp, Unknown
  Obtained from environmental sample
  misc_feature (1)..(603): n is a, c, g, or t
ttgttcgtacatatgctggatcgttccaacgaggagaacattgcttacgcaaagtcaaaaggcttgggcgttgttgtaatgggtcccgtcggcggcgggcggcttggcgcgccaagcgaacagattcagagtttactgaaaagtaaatctacaagcactgcggaaatggctttgcgctttgttcttgcgaacgaaaacgtggacatggctctttccggcatgggcaacatggacatgttaaaggaaaattttgagatcgcgtcacgcacgggacacttaacggaagaagaaataagccatgtaaaatctatgatggaagaaaataaaaacctcgcgaagctgtactgcaccggctgtaattactgtaaaccctgtccgcagggaatagacattccgtatctttttgaaatcatgaaccgctaccgcgtttacggtttgaaagaacacgcgataagcgcttacaaggaaatgatgaacgggtggagctggataaagagcgcggacgcttcaaagtgcgttgcgtgcgggacttgcgagggaaagtgtccgcagaagattccgattatcaagcagttgaaggagacgcatgaaacattggcgtaa

SEQ ID NO: 11706 - protein, 200 aa, Unknown
  Obtained from environmental sample
  DOMAIN (165)...(188): 4Fe-4S binding domain
  misc_feature (1)..(200): Xaa is any amino acid
MFVHMLDRSNEENIAYAKSKGLGVVVMGPVGGGRLGAPSEQIQSLLKSKSTSTAEMALRFVLANENVDMALSGMGNMDMLKENFEIASRTGHLTEEEISHVKSMMEENKNLAKLYCTGCNYCKPCPQGIDIPYLFEIMNRYRVYGLKEHAISAYKEMMNGWSWIKSADASKCVACGTCEGKCPQKIPIIKQLKETHETLA

SEQ ID NO: 11707 - DNA, 603 bp, Unknown
  Obtained from environmental sample
  misc_feature (1)..(603): n is a, c, g, or t
gtgccaggaagaaatgcccaagggcgcaaaagcggagaaaaccctantaagttaatagacggcgctgcactcgcgtccccgcccggcgctaacggactgctctacctgccttatcttttgggagagcgttccccgcgttggaaccacgatgcccgtggagcatttgtcggactttcaataactaccggcaaaggcgatatctcccgtgcgattctggaaggagtggccttcaatctcaggataattttggaaaccctggaaaaaggcgctgctgccggaaaaatcgatgaagtaattatgatcggaggcggcgcgaagggaaatgtatggctgcaaattctttccgatatttggcagaaacctctggcagttccgaaatataccgaagaagcaaccagccttggcgctgccgtctgtggcgggattggaataggcgtgtttaaggatttttctgttatccataaattcaacagtcctgtaaagaggatcaccccaaacaaggattgtgcaagcaagtacgacaaactcttcccgcttttcaacaaagcctatgacgcactggttgatacatttcggggactggctgaatacaaccgtagttaa

SEQ ID NO: 11708 - protein, 200 aa, Unknown
  Obtained from environmental sample
  DOMAIN (1)...(174): FGGY family of carbohydrate kinases, C-terminal domain
  misc_feature (1)..(200): Xaa is any amino acid
MPGRNAQGRKSGENPXKLIDGAALASPPGANGLLYLPYLLGERSPRWNHDARGAFVGLSITTGKGDISRAILEGVAFNLRIILETLEKGAAAGKIDEVIMIGGGAKGNVWLQILSDIWQKPLAVPKYTEEATSLGAAVCGGIGIGVFKDFSVIHKFNSPVKRITPNKDCASKYDKLFPLFNKAYDALVDTFRGLAEYNRS

SEQ ID NO: 11709 - DNA, 507 bp, Unknown
  Obtained from environmental sample
  misc_feature (1)..(507): n is a, c, g, or t
ttgattcgggatatggtaaaggaagtgaatgacaaatatttggctttgccttccggcagtaaaccctcaggcgatcccgccggcagactgcttatcgaaggcattggaatgcaggaacaccacaataccaatgtgactgccgcccaaatcagggccacaataaacctgttcaggccgctgggcgtaaaactttccgtcagcgagcttgacgtgctgtgccagggatatagcgagtacagttcaaaccccgccaaagacagcaaaaccgatccggcttttccagaaacatccaacaattcagttaccaacaatgggtttataaaagcggcccaactgtatggcgaatacatgaaactgtacattgaaaacaaggacattatcgagcgcgtggccctgtggggcgttattgacaaacaaagctggcgcgacagagggttaccgctgatctttgataaagacggcaaggccaaacccgcgtactataaagtgattggagcgctggactag

SEQ ID NO: 11710 - protein, 168 aa, Unknown
  Obtained from environmental sample
  DOMAIN (1)...(167): Glycosyl hydrolase family 10
  misc_feature (1)..(168): Xaa is any amino acid
MIRDMVKEVNDKYLALPSGSKPSGDPAGRLLIEGIGMQEHHNTNVTAAQIRATINLFRPLGVKLSVSELDVLCQGYSEYSSNPAKDSKTDPAFPETSNNSVTNNGFIKAAQLYGEYMKLYIENKDIIERVALWGVIDKQSWRDRGLPLIFDKDGKAKPAYYKVIGALD

SEQ ID NO: 11711 - DNA, 606 bp, Unknown
  Obtained from environmental sample
  misc_feature (1)..(606): n is a, c, g, or t
ttgcattttgttgatggtaaggtagaaaatttttctatatttaatcccatgaaaacaaaccactttctaacatacaccttagcattgctcgccacattcacctttgcatgcaacaaagaacccgaatcacaaagccgaagcaccatttccgtctctggaatcggcacggtagcagcacagccagatatgattcaaatgagcattactttaagtaaagttgctcagacaactaaaatggctcaagaagagataagcaaaatggttaggcaggctatgaaaatattaaaggaagcaaacattgaagataaaaatataaacacagcctcgcttaggtttaactcagaatatgactatagcaaacatccacgtattttaattgggcaaagagccgaacaaagcataacattttctattgagggtatcaacaacaatagtgaaaaagcctctggaataatagaccagcttatacaaatcaacggaatagaattaaatcaagtaaattttagcgtaaaaaatccaaccgagtattatgttaaatctcgtgaactcgcatataaaaaaactgttgaaaaagctaatcaatatgcagaactggctaaactttaa

SEQ ID NO: 11712 - protein, 201 aa, Unknown
  Obtained from environmental sample
  DOMAIN (45)...(200): Protein of unknown function (DUF541)
  misc_feature (1)..(201): Xaa is any amino acid
MHFVDGKVENFSIFNPMKTNHFLTYTLALLATFTFACNKEPESQSRSTISVSGIGTVAAQPDMIQMSITLSKVAQTTKMAQEEISKMVRQAMKILKEANIEDKNINTASLRFNSEYDYSKHPRILIGQRAEQSITFSIEGINNNSEKASGIIDQLIQINGIELNQVNFSVKNPTEYYVKSRELAYKKTVEKANQYAELAKL

SEQ ID NO: 11713 - DNA, 459 bp, Unknown
  Obtained from environmental sample
  misc_feature (1)..(459): n is a, c, g, or t
ttgatcgcgagtacacggactgttagcgtcatgatgctggatattgattattttaaaaaatataacgatacctatggtcacagtatgggcgatgcgtgcctaaagtctgtcgcaaaagcgctttatgagacggcaaggggtaacgactgtgttatacgttatggcggtgaggaattcgtggtcttgctgccaaacaccgacgaggcgggcgcgggaaaaatagctattaggctgcttaacagcgtaagctcccttgaaataccccatataaacagcgacatcgcggattatgtaaccatttcgattggagcgacaacaatcaaagtgaaacacaaccatcaatacatgaattacatagaacgcgccgatgaagcgttgtacacgtcaaaagataccgggcgtaacaagtacacccatctaaaatatcatgatgaagaaggaggcggtaatgaggtttaa

SEQ ID NO: 11714 - protein, 152 aa, Unknown
  Obtained from environmental sample
  DOMAIN (2)...(136): GGDEF domain
  misc_feature (1)..(152): Xaa is any amino acid
MIASTRTVSVMMLDIDYFKKYNDTYGHSMGDACLKSVAKALYETARGNDCVIRYGGEEFVVLLPNTDEAGAGKIAIRLLNSVSSLEIPHINSDIADYVTISIGATTIKVKHNHQYMNYIERADEALYTSKDTGRNKYTHLKYHDEEGGGNEV

SEQ ID NO: 11715 - DNA, 726 bp, Unknown
  Obtained from environmental sample
  misc_feature (1)..(726): n is a, c, g, or t
atgattacgaaaattgccgatgtggactatgaccctaatgccgactgcccgatgtggaagaagtttgtccgtgaaattatggattataaagcggacataattaagtttgtccagactgcggcggggtggtctttgtccggcgacatttcagagcagacgatgttcattctgtacggcactggcgcaaacgggaaatcaacctttttgaatacgattatgtatatattgggcgattacgcgaccgcgacgcctaccgaaacatttatgaaaaaaacaggggataatttttcaaatgacgttgcccgtctgcggagtaccaggttcgttacgacgactgaagttgagcaggggcggcggctgtccgaaccgctaattaaaaagataacaggcaacgatgaaatgactgcgcggtttttgtatggggagttttttaatttcaagcctactttcaagatattcatggcgacaaaccacaagcctgtgattaaaggcactgatcacggaatatggcggcggataaagctaatccctttcaccgaaaggataccggaagaaaaacaggacaagcatttggaattgaaactgcgggaggaagcaagcggcattcttaactggctgctggaagggatagaaaactggaagcaggagcggctgaagactccgaaagctgtattgtttgccactgacgaatacaggggggaaatggacgttatccgaaatttctaa

SEQ ID NO: 11716 - protein, 241 aa, Unknown
  Obtained from environmental sample
  DOMAIN (1)...(241): Poxvirus D5 protein-like
  misc_feature (1)..(241): Xaa is any amino acid
MITKIADVDYDPNADCPMWKKFVREIMDYKADIIKFVQTAAGWSLSGDISEQTMFILYGTGANGKSTFLNTIMYILGDYATATPTETFMKKTGDNFSNDVARLRSTRFVTTTEVEQGRRLSEPLIKKITGNDEMTARFLYGEFFNFKPTFKIFMATNHKPVIKGTDHGIWRRIKLIPFTERIPEEKQDKHLELKLREEASGILNWLLEGIENWKQERLKTPKAVLFATDEYRGEMDVIRNF

SEQ ID NO: 11717 - DNA, 720 bp, Unknown
  Obtained from environmental sample
  misc_feature (1)..(720): n is a, c, g, or t
ttgaattacaggctgccgcgtttggctcataagtacattgacctttcccgtcagcgcggcggtcgttacgggacaaaaggctcaggcgaaacgcggctggaaaccgaccgccgcaaaattgaacagcgtattcacaaactggaaaaagaaatagaagaagtgtcaaaacaacggcaggtacagcgcaggcagagggaacgccagggactgccggtctgcgcgattgtcggctataccaacgcgggtaagtcttcgctccttaacgcgcttacaggcgcggatgtattggtagaagacaaactctttgcaacgttagacgccactacccgccgctttgaaccgtctgcgggaacacctgtcttacttaccgacactgtcggctttatcaggcggcttccccactcgcttatcaaagctttccgttcaacactggaagaagcggcacattccaatctgttaattcatgtcatggatgcctctgatgccgccgttgaagaatgttacaagacgacaatttccgtattatctgaattgggcgcgggggaaatacctgttataaccgcgttgaataaagttgacaagctggataaccaggcgcagattgaaaacaaatttcctgacagtatcgcgatttctgttaaaagcggatatggactggatgagttaaaacgcctaatctcggagaagattataagatgtatgcccagtaaaatactttag

SEQ ID NO: 11718 - protein, 239 aa, Unknown
  Obtained from environmental sample
  DOMAIN (71)...(193): GTPase of unknown function
  misc_feature (1)..(239): Xaa is any amino acid
MNYRLPRLAHKYIDLSRQRGGRYGTKGSGETRLETDRRKIEQRIHKLEKEIEEVSKQRQVQRRQRERQGLPVCAIVGYTNAGKSSLLNALTGADVLVEDKLFATLDATTRRFEPSAGTPVLLTDTVGFIRRLPHSLIKAFRSTLEEAAHSNLLIHVMDASDAAVEECYKTTISVLSELGAGEIPVITALNKVDKLDNQAQIENKFPDSIAISVKSGYGLDELKRLISEKIIRCMPSKIL

SEQ ID NO: 11719 - DNA, 363 bp, Unknown
  Obtained from environmental sample
  misc_feature (1)..(363): n is a, c, g, or t
gtggcgggattttttcaaactcaggcaggttccggtgaagagcctgatatcttgcgtgtttgcggccttgaaaacgaagctctttaccgtgtggtgacgcatcttcaaaggctttatattagccgttttggcggccttgtcaaacatctgcttcccgtaacgttaaatcccgcagggtttatactgcggattgttaaccgccattacgcgcttaccgactgcgtagaaacttatgaatgccgtgggaacttgctttcttcaggcattcctctcaataatcaatttacgggcagttactacaataacaagacaaggcttttgggcgattacggctcaagtttatatacaatagaaaggatgtaa

SEQ ID NO: 11720 - protein, 120 aa, Unknown
  Obtained from environmental sample
  misc_feature (1)..(120): Xaa is any amino acid
MAGFFQTQAGSGEEPDILRVCGLENEALYRVVTHLQRLYISRFGGLVKHLLPVTLNPAGFILRIVNRHYALTDCVETYECRGNLLSSGIPLNNQFTGSYYNNKTRLLGDYGSSLYTIERM

SEQ ID NO: 11721 - DNA, 552 bp, Unknown
  Obtained from environmental sample
  misc_feature (1)..(552): n is a, c, g, or t
atggcgggccagccgcctgagcctttttttgtaatagcgacggaaaacccgatagaaagcgaaggcactttcccgcttcccgccgcgcagttagacaggtttatgatgaagctggctttggggtatcccgaccgtgaagcggaacttgctatccttgaggaaaatcccgccgaagaggggcttgcgaaactgcagcctgtcatccgcgtaagcgaatttatcgcggcgaaaaaagcggcctcttccgtcttttgccacaaggctattaaagaggcaatcgcggacataatcagggacacgcgtattcataaaagttttagtcttggggcaagccccagagccgccctgcattttttagcggcggtaaaggcgcgcgcttttgtaaagggcagggattatgttattgatgaagaccttgcgctccttgccgcgcctgtgcttgcgcaccgcgtgagacttcgcgacccaagaacttcgggcgaaaaaatcatacgcgaaatttgccttgccagaattgacggtttggtaaccgatgaaaaagagaaaagttaa

SEQ ID NO: 11722 - protein, 183 aa, Unknown
  Obtained from environmental sample
  misc_feature (1)..(183): Xaa is any amino acid
MAGQPPEPFFVIATENPIESEGTFPLPAAQLDRFMMKLALGYPDREAELAILEENPAEEGLAKLQPVIRVSEFIAAKKAASSVFCHKAIKEAIADIIRDTRIHKSFSLGASPRAALHFLAAVKARAFVKGRDYVIDEDLALLAAPVLAHRVRLRDPRTSGEKIIREICLARIDGLVTDEKEKS

SEQ ID NO: 11723 - DNA, 327 bp, Unknown
  Obtained from environmental sample
  misc_feature (1)..(327): n is a, c, g, or t
atgcaatgcgaatactttgctatggaagggcttacccatcttcttcagaccatcaggaggataaaaaaaggctccaatccttctctggaaatccgggggatctttttcaccatgtacgatcccaggacccggcttgcccagcaggtggtaaaggaagtaaccgcgtatttccaggataaggtttttgctacgattattccccggaatgtccggctttccgaagccccttcccacgggctcccgatttcaaaatacgacccccattccagcggggcaaaagcatacaagagcttgaccgcagaggtaatggaaagtgacaaccaataa

SEQ ID NO: 11724 - protein, 108 aa, Unknown
  Obtained from environmental sample
  misc_feature (1)..(108): Xaa is any amino acid
MQCEYFAMEGLTHLLQTIRRIKKGSNPSLEIRGIFFTMYDPRTRLAQQVVKEVTAYFQDKVFATIIPRNVRLSEAPSHGLPISKYDPHSSGAKAYKSLTAEVMESDNQ

SEQ ID NO: 11725 - DNA, 441 bp, Unknown
  Obtained from environmental sample
  misc_feature (1)..(441): n is a, c, g, or t
atggaattggagtattcaggctttattcctgacgcttacattgactctccgcaacgcaaaatggaaatttacaagatgattgccgccgtcagggaaagggacgaacttgagcgcgtatacggcgaacttatcgaccgtttcggcccgctgccggatgaagccgcttcccttcttgcgctcgccgagataaggatcatctgccggaaacttgctgtatcttcgataaaggaaaggggcggcgttgtccgcatcgagtttgcgaaagtcgcccgtgttaaaatagacacgcttgtgcgcatgatgcaggaatcgcggggcaaaataaaaatcgatcccaaaaagccgaatgtgcttctgctcgcaacaggcagtatcggcttaaaggaaaagagcgaatttatccgcgagaagctgtccgtattaacggccgggcagctttag

SEQ ID NO: 11726 - protein, 146 aa, Unknown
  Obtained from environmental sample
  DOMAIN (2)...(110): TRCF domain
  misc_feature (1)..(146): Xaa is any amino acid
MELEYSGFIPDAYIDSPQRKMEIYKMIAAVRERDELERVYGELIDRFGPLPDEAASLLALAEIRIICRKLAVSSIKERGGVVRIEFAKVARVKIDTLVRMMQESRGKIKIDPKKPNVLLLATGSIGLKEKSEFIREKLSVLTAGQL

SEQ ID NO: 11727 - DNA, 669 bp, Unknown
  Obtained from environmental sample
  misc_feature (1)..(669): n is a, c, g, or t
ttggcctgctttagcctatatttggagcgaaaagtctatgtaaaaggcaggtattccaaccggaatgtaaggcttttggcaagttcctatctggtaatttccgattttcagtcggttttaaaacttgaaagcaaggctgttttagccaaaccgtccgtaataagcaaaaatatactgattttcggcgcggcaagggttttaagcggcggttataaagaagcggctgctttttttaaaacacatcttggaaaatgcaaaaaaacagataaacaatgggttcactggttttacggcttttcacagcttttaaacggcgattttaaacaggcggagaccgaattcttatcgtcggctgtttcctcggacagtattcttataaccgggctttccgctcactttttaaggaattctatcgaaaaacattctttagacccccaaaaatgccatgaaatggcggaaaacggccgtgaacgcgtgaaaaacgccattaataacgccgaaaactggaaaaaagagaaagaaaaattaggggcggaaatacatatcgcaataataaataaatatattgatgaagcgggaagatggcttttcagtaaagaaactgtcgatccgccgctttatgccgatcttcctgttaccggcgataattcggagaaagaaaatacatga

SEQ ID NO: 11728 - protein, 222 aa, Unknown
  Obtained from environmental sample
  misc_feature (1)..(222): Xaa is any amino acid
MACFSLYLERKVYVKGRYSNRNVRLLASSYLVISDFQSVLKLESKAVLAKPSVISKNILIFGAARVLSGGYKEAAAFFKTHLGKCKKTDKQWVHWFYGFSQLLNGDFKQAETEFLSSAVSSDSILITGLSAHFLRNSIEKHSLDPQKCHEMAENGRERVKNAINNAENWKKEKEKLGAEIHIAIINKYIDEAGRWLFSKETVDPPLYADLPVTGDNSEKENT

SEQ ID NO: 11729 - DNA, 819 bp, Unknown
  Obtained from environmental sample
  misc_feature (1)..(819): n is a, c, g, or t
gtgtcagacgagttagacgaaaaagccgtaaccgaaaaaataaaagaaatagccgagtacataaaagaagaccgccgttttttaatgaggatcttaaaaaacatcgaacctgcggaaggaaagaattatctcgctactcattcggtgcggacaaccatactttccatgataatcggcacataccttaaactgccgacctaccgtttgatagaacttggggtcgccgctcttatgcatgaagcgggaatgttaaaattaccgtcaaatatttatttaagccagagagctcttaatcccgtggaacaaaaagcgattcttacgcaccctgttcttggttacagtatgcttaaatcttttaacttcccgcttccggtttgtctggccgcgcttgaacatcatgaacgtgaacgcggaacaggttatccgcggcaaataccgggcgaaaaaataagcctgtactcaaaaataatagccgttacgtgctcatacgaggcgttaagttccaagagaccgcacaaagaagccaaagacggctacacaggaatgttggagcttttaaagaacgaaggcaaacaatacgacgatacgatagtaaaagcgcttgttctgtctctgtcaatttacccaatcggtctttatgtgcttttatccaacggaaagaaaggtcaggttgtggacgtaaaccccgaaaatccccgcttccctattgtgcaaatttttgacgagttcacgcccgacggaaaaataaaaaccatgcaaaccgctcccgacgtacttacaatagtacgtccgcttaaacgcatggagattggcaactag

SEQ ID NO: 11730 - protein, 272 aa, Unknown
  Obtained from environmental sample
  DOMAIN (44)...(166): HD domain
  misc_feature (1)..(272): Xaa is any amino acid
MSDELDEKAVTEKIKEIAEYIKEDRRFLMRILKNIEPAEGKNYLATHSVRTTILSMIIGTYLKLPTYRLIELGVAALMHEAGMLKLPSNIYLSQRALNPVEQKAILTHPVLGYSMLKSFNFPLPVCLAALEHHERERGTGYPRQIPGEKISLYSKIIAVTCSYEALSSKRPHKEAKDGYTGMLELLKNEGKQYDDTIVKALVLSLSIYPIGLYVLLSNGKKGQVVDVNPENPRFPIVQIFDEFTPDGKIKTMQTAPDVLTIVRPLKRMEIGN

SEQ ID NO: 11731 - DNA, 441 bp, Unknown
  Obtained from environmental sample
  misc_feature (1)..(441): n is a, c, g, or t
atggaaataaaacaaattttctcagaaaatgttttatggcaaaaaactattgaatatggaaaaaactgtagttggaaagcgggagcaacatttgccaaaaatttggaaaacaatgtgtttacagaatgggaaagagtttttgtggcagttgatgaaaataatttagctggtttttgtgcctttgttaaaaaggatagtattccaaatgttgaatatacaccatatatcagttttatatttgtaggagaacaatatcgtggaaaaagattaagtgaaaaaatgattttgatggtaattgaatatgcaatagaattaaattttaatgaaatttatattgtaagtgaccatataaatttatatgaaaaatatggttttataaaaatagacgaaaaaaaggattattggaataggatggaaagtatatataanaaagtattataa

SEQ ID NO: 11732 - protein, 146 aa, Unknown
  Obtained from environmental sample
  DOMAIN (47)...(126): Acetyltransferase (GNAT) family
  misc_feature (1)..(146): Xaa is any amino acid
MEIKQIFSENVLWQKTIEYGKNCSWKAGATFAKNLENNVFTEWERVFVAVDENNLAGFCAFVKKDSIPNVEYTPYISFIFVGEQYRGKRLSEKMILMVIEYAIELNFNEIYIVSDHINLYEKYGFIKIDEKKDYWNRMESIYXKVL

SEQ ID NO: 11733 - DNA, 822 bp, Unknown
  Obtained from environmental sample
  misc_feature (1)..(822): n is a, c, g, or t
gtgccggctattgcctgcgccgctgcgctgaccgtcgtcgtcatggttctgcaaggggtcaagtggtgggttctgatccgccgcttcgcccccgatcttggggtgggcaaggcggtttccgtgcacatggagagcgtcttctactccatagtgctgccctccgcgttggcgcaggatgtggtcaagtcggtgatgctctccaaagaccacgacccggcggtggtgtgggcgtcgtcgtggctggggcggttgatcgggtttttcgcgctcctctcctactcccttgccggcgtggcctacttgggcgacagcgccctcccgccggggttccgcgtgccgctcttctccgccgccggcgtaatcgccttgctctgcgcgctgtctttctcgaagcgcttcacgcgtccgcttggcgccgttgcggaaaaaatcgtcggccccaaaacgcttacaaccgtgaaaaaactgcgggacggcatctacgccttcaggcacgagcgcggaacgcttgcgcttaccctattggtctccgccgccattcagttcttggtggtgctcggcgcgtcgatcaccgtgtacgcggtgtccggcaggtacttcttcgcggagtgcttggcgttcgtgccgcttgtggaggttatggccatatctctgccgctcaccccgggcggcgtggggatacgggaggcgctgatggcgctgcttttcacgcgcctcggattttcggaggggcagaccgcgtcatacgtgaccataagcctgatgctgtcaatgacaaggcttgtcggcggtataccggttattatgccccgccgcaaatag

SEQ ID NO: 11734 - protein, 273 aa, Unknown
  Obtained from environmental sample
  SIGNAL (1)...(19)
  misc_feature (1)..(273): Xaa is any amino acid
MPAIACAAALTVVVMVLQGVKWWVLIRRFAPDLGVGKAVSVHMESVFYSIVLPSALAQDVVKSVMLSKDHDPAVVWASSWLGRLIGFFALLSYSLAGVAYLGDSALPPGFRVPLFSAAGVIALLCALSFSKRFTRPLGAVAEKIVGPKTLTTVKKLRDGIYAFRHERGTLALTLLVSAAIQFLVVLGASITVYAVSGRYFFAECLAFVPLVEVMAISLPLTPGGVGIREALMALLFTRLGFSEGQTASYVTISLMLSMTRLVGGIPVIMPRRK

SEQ ID NO: 11735 - DNA, 897 bp, Unknown
  Obtained from environmental sample
  misc_feature (1)..(897): n is a, c, g, or t
ttgatggccgagccgggcggcgatgttatcggaagaagaagattggacactcactttctggcgctcacggaattgggcgctaaggtaaaggtgggcgataattttacttttaccgcaaaagaactaatcggagcggatatttttcttgacgaagcgtctgtaacggcgacggaaaacgccataatggcggcggctttggcaaagggaaaaacaattttgaataatgccgcaagcgaaccccacgtgcaggatttgtgcaggatgttagtcgcaatgggcgctcaaattgaaggtatcggctccaatatacttacaattaccggagcggaaaaactttcaggctgtgattttgaaatcggcgctgattttatggaagtcggctcctttatcggtcttgccgccgtaacaggcggagacctgcatatagaaggcgcgcgtcctcaggatatgcgccccgcaaaaatcgcattcgggaaattgggcattgtttgggcgcatgagggaactgttatccatgtgcccaaaaatcaaagcatggaagtaaatcacgacctcggcggtatgattccgaaaatagacgacgccccttggcccggcttccctcccgatcttgtaagcataataatcgttgtggctacgcagataaaaggcacggtgctggttcacgaaaaaatgtacgagtccagaatgttctttgtagacaaacttatcggcatgggagcgagaattgtgttatgcgatccgcacagagccgttatttcgggaccggcaaaacttcacggctcggaattgataagccctgacgtgagagcgggaatgtctatgctgatcgccgctatgtgcgccgaaggcaagagtgttatacgcaatgtttaccagattgaaaaggggctatga

SEQ ID NO: 11736 - protein, 298 aa, Unknown
  Obtained from environmental sample
  DOMAIN (3)...(298): EPSP synthase (3-phosphoshikimate 1-carboxyvinyltransferase)
  misc_feature (1)..(298): Xaa is any amino acid
MMAEPGGDVIGRRRLDTHFLALTELGAKVKVGDNFTFTAKELIGADIFLDEASVTATENAIMAAALAKGKTILNNAASEPHVQDLCRMLVAMGAQIEGIGSNILTITGAEKLSGCDFEIGADFMEVGSFIGLAAVTGGDLHIEGARPQDMRPAKIAFGKLGIVWAHEGTVIHVPKNQSMEVNHDLGGMIPKIDDAPWPGFPPDLVSIIIVVATQIKGTVLVHEKMYESRMFFVDKLIGMGARIVLCDPHRAVISGPAKLHGSELISPDVRAGMSMLIAAMCAEGKSVIRNVYQIEKGL

SEQ ID NO: 11737 - DNA, 852 bp, Unknown
  Obtained from environmental sample
  misc_feature (1)..(852): n is a, c, g, or t
atgacttctggcggccctttttttgagcggggagtaaaacgcgtcggcgtgctttccgtaaactttttcaaagtggttttcgcttntgtactattaaccataacagcgtctttcctgcgcggaatacccctgccttttgacgcgtcgccacgcgccgtaatatttctctcattgtcaggaataatcggctttgtcattaccgatatgtttcttttttccgcttacggcgctatcggtcccagaatcaccatgctctttatggcgctttcccctccggtaacggcgggaatctctttcttttttttcggcgagcggcttggcactatgggcgccctcggcatgggacttgtcataatcggaatctgcatgacggttttcggcaaacaaaacagcgtttcaattttaaaaatagacaaagttgacaagcgcggctacgttttcgcttttatagcttccataggccaatcaataggcatgatattaacgaaagccggacttggcaattacgatccggtttcgggaacgcagatccgtgaaatcgcggccatcattggcttcgcgctattggcgttggtttacgacaggggaaaagggctaataaaagcggcaaagaatttcaatgggttgaaatttactgcggcaggttctgtcttcggcccttttatcggagttgtgctttcgctttacgcgattcagcgtatcagcgcaggcatagtaagcacccttatcggccttaccccagtaataattattctgccagaaattctgattttcaggaaaaggataaaacttttagagattgctggcgcggtggttgctgttattgggacggcgattttctttatgcggtga

SEQ ID NO: 11738 - protein, 283 aa, Unknown
  Obtained from environmental sample
  DOMAIN (1)...(126): Integral membrane protein DUF6
  misc_feature (1)..(283): Xaa is any amino acid
MTSGGPFFERGVKRVGVLSVNFFKVVFAXVLLTITASFLRGIPLPFDASPRAVIFLSLSGIIGFVITDMFLFSAYGAIGPRITMLFMALSPPVTAGISFFFFGERLGTMGALGMGLVIIGICMTVFGKQNSVSILKIDKVDKRGYVFAFIASIGQSIGMILTKAGLGNYDPVSGTQIREIAAIIGFALLALVYDRGKGLIKAAKNFNGLKFTAAGSVFGPFIGVVLSLYAIQRISAGIVSTLIGLTPVIIILPEILIFRKRIKLLEIAGAVVAVIGTAIFFMR

SEQ ID NO: 11739 - DNA, 459 bp, Unknown
  Obtained from environmental sample
  misc_feature (1)..(459): n is a, c, g, or t
ttgtttaacggaactatcgaggaaaatatcgcgtttgcgaggccggacgcttcgattgaagagattaaatccgcggcgcagaccgcaaggatacatgacgacataacgcaaatgcccgaagcgtatcagacgcagataggggaacgcggcgttaagttgtcgggcggccagaaacagcgcatagcgatagcgagggcggtactgtgccgggctccggtgcttattcttgacgaggcgaccgcgtccgtggacgtgcataccgaggagcagatacagctggcgataaacgagatagccggaagccgcacaatcgtaaccatcgcgcaccgtctctctaccattcgcaacgcggatattatctatgtttttgaaaaaggccgcattatccaggcgggcagccacgccgagttgattgaacaggaagggctttaccgaagtttatgccgtacaggcaaatga

SEQ ID NO: 11740 - protein, 152 aa, Unknown
  Obtained from environmental sample
  DOMAIN (1)...(126): ABC transporter
  misc_feature (1)..(152): Xaa is any amino acid
MFNGTIEENIAFARPDASIEEIKSAAQTARIHDDITQMPEAYQTQIGERGVKLSGGQKQRIAIARAVLCRAPVLILDEATASVDVHTEEQIQLAINEIAGSRTIVTIAHRLSTIRNADIIYVFEKGRIIQAGSHAELIEQEGLYRSLCRTGK

SEQ ID NO: 11741 - DNA, 765 bp, Unknown
  Obtained from environmental sample
  misc_feature (1)..(765): n is a, c, g, or t
ttggaacttcccgcttcggcccntgataaaagaaaatcggcaagcctgcgcgggcttcgcaaatccctgccgaaccgcagaatgggatacacccagaaagcgaaaatcgggggacactcaatttttatcagaaccggcgaatatgaggacggcagtcttggggaaattttccttgatatgcacaaggaaggagccgctttcagaagccttttgaacagttttgccattaccgtttccctgggactgcaatacggcgtaccgctggaagaatatgttgacgcgttcaccttcagcagatttgaacctaacggcatggtgcaggggcacgattatgtgaagatggcgacaagcgtaattgactatgttttccgcgatcttgcgattagttatcttaaacgcagtgacttgggtcaggtaaagcccgaagaccttgtggctaccgcgatgaagaacgaagcggaagcgtcagatccaaaaggccgtggcgagaaaaacagcgccggtttcaggcctaacagcgtcacggttccggcggttaagcccgttaaacaacagccgtccggcaattcgggaaatgcccccaaaggattagccttttcatcagcagtggcacaaccacagacgcaagtcgcggtaatggaaagctcttatccgcaggaaaacgaggtaataaaaattgtacaggcgcgtataaagggctatgagggagacccatgctcttcgtgcgggtcatttacattggttagaaacnggaaccctgtatga

SEQ ID NO: 11742 - protein, 254 aa, Unknown
  Obtained from environmental sample
  misc_feature (1)..(254): Xaa is any amino acid
MELPASAXDKRKSASLRGLRKSLPNRRMGYTQKAKIGGHSIFIRTGEYEDGSLGEIFLDMHKEGAAFRSLLNSFAITVSLGLQYGVPLEEYVDAFTFSRFEPNGMVQGHDYVKMATSVIDYVFRDLAISYLKRSDLGQVKPEDLVATAMKNEAEASDPKGRGEKNSAGFRPNSVTVPAVKPVKQQPSGNSGNAPKGLAFSSAVAQPQTQVAVMESSYPQENEVIKIVQARIKGYEGDPCSSCGSFTLVRNXNPV

SEQ ID NO: 11743 - DNA, 348 bp, Unknown
  Obtained from environmental sample
  misc_feature (1)..(348): n is a, c, g, or t
gtgtgcaacagcgaggctttgcgagaggctttgcagtcaaagcatttgggtggtgcggttatagacacttgggaaaacgagcctaacatagatgcttcgcttttgccattggttgaaatagcaacccctcacatagcgggtcatagcgcagaagcaaaaataaacgcaaacaaaatgataatagactcgttgtgcaaattttttaaagtggagtgttctatacgctttgatattcccagcaacaaaaccggcttctattcaattcgtgcagacgatttggcttttagaaaaaatccagagaatttcacggaaatcagaaatggatatgaaagaatttatgtaaattaa

SEQ ID NO: 11744 - protein, 115 aa, Unknown
  Obtained from environmental sample
  misc_feature (1)..(115): Xaa is any amino acid
MCNSEALREALQSKHLGGAVIDTWENEPNIDASLLPLVEIATPHIAGHSAEAKINANKMIIDSLCKFFKVECSIRFDIPSNKTGFYSIRADDLAFRKNPENFTEIRNGYERIYVN

SEQ ID NO: 11745 - DNA, 807 bp, Unknown
  Obtained from environmental sample
  misc_feature (1)..(807): n is a, c, g, or t
gtgggggctttcaacgctcaataccacactaagggtggttcatacatccactcaatggggattgttgaaggcggttcccttgccctccttgccggggtaggccctatgggacttggagctattgattacgccattcataacaagcgaaaaccgtcccgccttgttgttaccgacatcgacgacaggcgtcttgagcgggcggcgcagctcctgagtgttgaggaagccaaaaagaacaatgtggagcttcactatgtgaacaccaaagatatttctgatcctgtgggttacttaaagtcattgaacagcgggcggctttacgatgacgtcttcgtcttcgcgccggttaagcctgtgcttgaaatgggcgacagtcttttgggtcgggacggctgcctgaacttttttgcgggccccacggatacggctttttccgccggccttaatttttacaacgtgcattatgagtcccaccacattgtgggaacctctggcggtaacaccgacgacatgaaggagtccctggctatgatggcccaggggaaactcaacccggtttttatgatcacccacatcggcggccttgatgcggcggtaaaaaccaccattgacctggataaaattccaggtggtaaaaaactaatttacacgcataaaaaaatcccgcttaccgccattgacgattttgagacggttggcaaggccaatccattattcgccaagttagcggacatttgcggacgttacgggaatctctggaatgtagaggctgagaactatcttttacaaaacgcccctgaaatatag

SEQ ID NO: 11746 - protein, 268 aa, Unknown
  Obtained from environmental sample
  DOMAIN (24)...(180): Zinc-binding dehydrogenase
  misc_feature (1)..(268): Xaa is any amino acid
MGAFNAQYHTKGGSYIHSMGIVEGGSLALLAGVGPMGLGAIDYAIHNKRKPSRLVVTDIDDRRLERAAQLLSVEEAKKNNVELHYVNTKDISDPVGYLKSLNSGRLYDDVFVFAPVKPVLEMGDSLLGRDGCLNFFAGPTDTAFSAGLNFYNVHYESHHIVGTSGGNTDDMKESLAMMAQGKLNPVFMITHIGGLDAAVKTTIDLDKIPGGKKLIYTHKKIPLTAIDDFETVGKANPLFAKLADICGRYGNLWNVEAENYLLQNAPEI

SEQ ID NO: 11747 - DNA, 732 bp, Unknown
  Obtained from environmental sample
  misc_feature (1)..(732): n is a, c, g, or t
atgaatgaaataaataaacctgaaaaccaatgtgatatgtcccttgaaattgccggtgttaaattcaggaaccccgttatcgccgcttccggaacattcggtaaggcgagagagtacagcggtgtttttgatctatccctgctcggcggaatatgcacaaaagggctttcccttgttccgaaaaaaggaaacagcggaacgcgtatatgggaaactccgagcggattaatcaattcaatcggtcttgaaaattcgggaataaaatcgtttttagccgacgatcttgattacatgaaaaggcttggtcccgttataatagcgaatctttcaggctctacttccgatgaatacgttgacggcgcggctttgctgaatgagtcttcagtcgatataatcgaacttaatatttcatgtcccaacgttaaagacggcggtcttaccttcggtcttgacccgggaaccgccgccgcccttgtcgccgcggtgcgccgcgcttgcaagcacaagccgcttatggtaaaactttcgcctaacagtccttctatcgcctctgtcgccaacgcttgtattaaagccggcgcggacgctctatcccttgtaaatacaattaaagccgtagcgattgacactgaactccgcaagccggtgtttgaaaatgtaattgccggtctttccggccccgcgataaaaccaatcgctcttcgcatggtgtgggaattatacattctctaa

SEQ ID NO: 11748 - protein, 243 aa, Unknown
  Obtained from environmental sample
  DOMAIN (12)...(243): Dihydroorotate dehydrogenase
  misc_feature (1)..(243): Xaa is any amino acid
MNEINKPENQCDMSLEIAGVKFRNPVIAASGTFGKAREYSGVFDLSLLGGICTKGLSLVPKKGNSGTRIWETPSGLINSIGLENSGIKSFLADDLDYMKRLGPVIIANLSGSTSDEYVDGAALLNESSVDIIELNISCPNVKDGGLTFGLDPGTAAALVAAVRRACKHKPLMVKLSPNSPSIASVANACIKAGADALSLVNTIKAVAIDTELRKPVFENVIAGLSGPAIKPIALRMVWELYIL

SEQ ID NO: 11749 - DNA, 453 bp, Unknown
  Obtained from environmental sample
  misc_feature (1)..(453): n is a, c, g, or t
ttgaagttcgggcgcaccgttcattcccttgccaaggcgcttgcccgttacccgggtatcaatatgatttttatctcccctcaggagttgattttacctgagtatataaagaatattttggaaaaacaaaacataaaatttgacgaaagagagaaccttgagaaatccatgcccgagctggacgtgctgtatatgacacgcgtacaaagggagaggttttttaacgaggatgattatatccgcctgaaagacacctatgtgttaaatgccgaaaaaatggcggttggaaaagaaagaatggttgtcttgcatcctctgccgcgcgtcaacgaaatttccgtagaggttgattctgatccgcgcgcggcgtattttaaacaggcgaagtacggtatgtatgtacgcatggctttattggcttcggttctgggggcggaagatgttaaatattga

SEQ ID NO: 11750 - protein, 150 aa, Unknown
  Obtained from environmental sample
  DOMAIN (2)...(142): Aspartate/ornithine carbamoyltransferase, Asp/Orn binding domain
  misc_feature (1)..(150): Xaa is any amino acid
MKFGRTVHSLAKALARYPGINMIFISPQELILPEYIKNILEKQNIKFDERENLEKSMPELDVLYMTRVQRERFFNEDDYIRLKDTYVLNAEKMAVGKERMVVLHPLPRVNEISVEVDSDPRAAYFKQAKYGMYVRMALLASVLGAEDVKY

SEQ ID NO: 11751 - DNA, 741 bp, Unknown
  Obtained from environmental sample
  misc_feature (1)..(741): n is a, c, g, or t
atggcgggatttgtcttttggctcggcccagttcctgctccagtttgtcatggtcgggggtacangcttttgtacaataccagcatgggctggtacggcgcgtccgcgctgggagtcgctaatggcggcgacatagcactttccggaatgaacatagccggagccgttatgatgttgatactcatgcctatattcgggatcaaccagggagcgcagccgatactggggtttaattacggggcgaaaaagttcaaccgcgtgttacgcgcctaccttggagctgttaccgccgctacggtgatatgtacagtcgggtttacggtagcccaactgttccccgtgcagttgatcaggatattcgcccctaagggaagctccgcgcttttggtattcgccccgcgcgccatgaggacaatgatgatccttttgcccacggcaggctttcaggtaatctcgacaaatctttttgtggtgacaggccgccccaaaatttcgatattcctctccatgctgcgccagtgcctcgccttaattccctgtatattgatattcggacatatttggggcttgtggggcgtggtcgccgccgcgccggtggcggacggtttctcgttattcgtcaccggcacaatgatattatttgaactgcggaaacttcgtagcgtcatcgccgacagcggcgccaccacaggtggcggcgccaccacaggcggcggtggcgttaaagagcaaacagcatga

SEQ ID NO: 11752 - protein, 246 aa, Unknown
  Obtained from environmental sample
  DOMAIN (14)...(182): MatE
  misc_feature (1)..(246): Xaa is any amino acid
MAGFVFWLGPVPAPVCHGRGYXLLYNTSMGWYGASALGVANGGDIALSGMNIAGAVMMLILMPIFGINQGAQPILGFNYGAKKFNRVLRAYLGAVTAATVICTVGFTVAQLFPVQLIRIFAPKGSSALLVFAPRAMRTMMILLPTAGFQVISTNLFVVTGRPKISIFLSMLRQCLALIPCILIFGHIWGLWGVVAAAPVADGFSLFVTGTMILFELRKLRSVIADSGATTGGGATTGGGGVKEQTA

SEQ ID NO: 11753 - DNA, 729 bp, Unknown
  Obtained from environmental sample
  misc_feature (1)..(729): n is a, c, g, or t
gtgatgtggattgaacgccgcggatcaagcggtagcggcgctgccgatgcctggccggtttttacccaaagccctgtggatctagccgaaagcctcaaggaaagtcttttcctgccaaacaaaacggtggtatgcgtctcggcgacactggctataagcaataattttaactattgggcaacgcgctgcggcgcggcctgtgtcgctgaccggcccctttttaccggatgtttcttgtcgcccttcccttattcaagcgccgtgctgcttgccgcgccggatgacgcgcctctgcccgatgactcggattaccaggcctttgttgacagagcggtggcacagcttgcctcggtcgcgggcggttccgcccttgtgctgttcacatcgtaccagtcccttcaaagcgcctggcttgcggctcagcctgaattgacggcattgggcatacgctgcctcaggcagggcgatgatgaccgttcacggcttctgcaaacatttcttaacgatacccagtcggtgctgtttgccacggattcgttttgggaaggggtagacgcgcccggggataccttgcggctggtgatactctgccgcctgcctttcaggactcccagcgatcctgttttcgaggcccgccgcgaggcggtggaaaaaaacgggggcaatcccttcatggatctttcgctgcccgaggcggtgatgaagttcagcagggctttggccggttga

SEQ ID NO: 11754 - protein, 242 aa, Unknown
  Obtained from environmental sample
  misc_feature (1)..(242): Xaa is any amino acid
MMWIERRGSSGSGAADAWPVFTQSPVDLAESLKESLFLPNKTVVCVSATLAISNNFNYWATRCGAACVADRPLFTGCFLSPFPYSSAVLLAAPDDAPLPDDSDYQAFVDRAVAQLASVAGGSALVLFTSYQSLQSAWLAAQPELTALGIRCLRQGDDDRSRLLQTFLNDTQSVLFATDSFWEGVDAPGDTLRLVILCRLPFRTPSDPVFEARREAVEKNGGNPFMDLSLPEAVMKFSRALAG

SEQ ID NO: 11755 - DNA, 375 bp, Unknown
  Obtained from environmental sample
  misc_feature (1)..(375): n is a, c, g, or t
atgtatcagatcggccgagcccagtccgctttggtagaggaaaacaaagccgccatcgcccttgcccgcgagaatgttgccgcgcgagtggatttttttgcccagcgcagtgaagactgggctgaacgcaataacccgcgcgattttagttttattatcgccgacccgccgcggcagggtttaagccaaagcctgagcctccggcttgcgacagaaggccctccgatgcttgtctatgtctcatgtgatcccgcgactttggcaagggacagcaagatattgacggccggcaattacagcctgaaagagttgcgcttttatgatttctatccgcaaacggcccacattgaaagccttgcggtgtttgtaaaataa

SEQ ID NO: 11756 - protein, 124 aa, Unknown
  Obtained from environmental sample
  misc_feature (1)..(124): Xaa is any amino acid
MYQIGRAQSALVEENKAAIALARENVAARVDFFAQRSEDWAERNNPRDFSFIIADPPRQGLSQSLSLRLATEGPPMLVYVSCDPATLARDSKILTAGNYSLKELRFYDFYPQTAHIESLAVFVK

SEQ ID NO: 11757 - DNA, 468 bp, Unknown
  Obtained from environmental sample
  misc_feature (1)..(468): n is a, c, g, or t
gtgaggatgaccacaaagggccgctacgcactccgcgcaataattgccctggcgaaattgtatgaaaaaaacaaaatggtctccatcaacactctttccgaagaggaggatatttcttccttgtttctggaacagattttttttaagctaagaaaggcaggaatagtcaaatcaatacgggggcccggcggcggttttttattcaaccgcccgcttgattccataaatatcaaggaagtgcttgaggcggcaggggaggaattaacagtgctgccctgtgacaggcagacagccgaatgttatcgtataagcgaatgtattgcccataaacttattctctctgtaacagataaggtcaacgagtatttggaaagcataacattgaagatgctgctggagaatcaggaatggcagacagggtccggattagaagaaaatgaggaattaggagttaggaatgaggaataa

SEQ ID NO: 11758 - protein, 155 aa, Unknown
  Obtained from environmental sample
  DOMAIN (1)...(123): Transcriptional regulator
  misc_feature (1)..(155): Xaa is any amino acid
MRMTTKGRYALRAIIALAKLYEKNKMVSINTLSEEEDISSLFLEQIFFKLRKAGIVKSIRGPGGGFLFNRPLDSINIKEVLEAAGEELTVLPCDRQTAECYRISECIAHKLILSVTDKVNEYLESITLKMLLENQEWQTGSGLEENEELGVRNEE

SEQ ID NO: 11759 - DNA, 654 bp, Unknown
  Obtained from environmental sample
  misc_feature (1)..(654): n is a, c, g, or t
atgtcccaacccgtctctttcaagtaccttgatgttgttgcatcattctttgtcgttatcctcgtagtcagcaacattgcgtcttcggcaaaaattgtcgatcttggtttttctattttttcaataccgcttgtctttgacggcgggacgctgttgttcccgtttgcctatgtactgggcgatgtcttaacggaagtctacggttttaaaacaacgcgcagagtcatttttaccggatttgcggcgttagtgttaacagccgtagttttctttgtgttggaaatactgccgccggaagaaaactggtcggcggaaacaggcgggaatgccgcgtttagcgcgatacttggcggaataagttacggcggcattgtgcttgcgagcctgtccgcctatcttgtcggcgagctttccaacgcaatgatactttcaaaaataaaagttaaaatgaaggggcgttttctatgggtgcgcacaatcggttctacgctggtaggcgagtttttggattcggctatttttgtgctgatagccagcgtcttaggagtctttagctgggaaattttctggtcgcttgtattgacgaactatatactgaaatgcggaatagaaattgttgtgactccctttacttactgggcatcaggattttaa

SEQ ID NO: 11760 - protein, 217 aa, Unknown
  Obtained from environmental sample
  SIGNAL (1)...(29)
  DOMAIN (39)...(201): Uncharacterized ACR, YhhQ family COG1738
  misc_feature (1)..(217): Xaa is any amino acid
MSQPVSFKYLDVVASFFVVILVVSNIASSAKIVDLGFSIFSIPLVFDGGTLLFPFAYVLGDVLTEVYGFKTTRRVIFTGFAALVLTAVVFFVLEILPPEENWSAETGGNAAFSAILGGISYGGIVLASLSAYLVGELSNAMILSKIKVKMKGRFLWVRTIGSTLVGEFLDSAIFVLIASVLGVFSWEIFWSLVLTNYILKCGIEIVVTPFTYWASGF

SEQ ID NO: 11761 - DNA, 741 bp, Unknown
  Obtained from environmental sample
  misc_feature (1)..(741): n is a, c, g, or t
atggggtggcgagatattacaaatcctcaaacattaaggacagttattgttggtgcaataccattaagtggagtcggtaataatatgccgctaattatttttaataaaaaaatgaaaccagaatacaagatattattattttcgaatttgaattcaattgtctttgactttgttgcaagaaataaaactggtggaacacatattaattttttcttattaaagcaattccctgttcttcccccaaacgcctattctcaggacgacattgatttcatcgttcctcgtgtgcttgagcttacctataccgccgtagaccttatcccatttgcggaagacctctgggattgtgcagactcaaaaatgaggcgctattttctggaacagcgccacgggacacaagccgcagaatttgaagagtttaccaagtacgacaccgcccatctgccggagaagacggaaagtcaaggcaagcagacagaattggcagactttctccagccctttgtttttaaccccgaaagacgggcattgctccgtgccgaattagatgcccgctacgcccgtctctacggcctttcccgtgacgacctacgctacattctcgaccccgctgatttaatgggcgaggattatccttcggagactttccgtgttctcaagaagaatgaaatcgacgaatacggggaatatcggacacggcgattggtgctggaggcttgggatagggaggaaggggtgtag

SEQ ID NO: 11762 - protein, 246 aa, Unknown
  Obtained from environmental sample
  misc_feature (1)..(246): Xaa is any amino acid
MGWRDITNPQTLRTVIVGAIPLSGVGNNMPLIIFNKKMKPEYKILLFSNLNSIVFDFVARNKTGGTHINFFLLKQFPVLPPNAYSQDDIDFIVPRVLELTYTAVDLIPFAEDLWDCADSKMRRYFLEQRHGTQAAEFEEFTKYDTAHLPEKTESQGKQTELADFLQPFVFNPERRALLRAELDARYARLYGLSRDDLRYILDPADLMGEDYPSETFRVLKKNEIDEYGEYRTRRLVLEAWDREEGV

SEQ ID NO: 11763 - DNA, 903 bp, Unknown
  Obtained from environmental sample
  misc_feature (1)..(903): n is a, c, g, or t
ttggcgaatattatgggtgattacgaagatatcccggccgccgaaaggcgggaccgctttgacgatatgctgagcgccactgtggcggcggaggacagtttatatcaaacctataccgtttggaaaccaaacgcggttgacggcatggacagccgctttataggccgtaccggttccaccaataccgggcagtatgccgcagtatttactaaggaaaccggaacaataacaagccgggttaccaccgatgtagaggcttccatggcatattttaacggccccaactcgcgtaaggaccgtgtagaaaaccccgtagccagaaacgtaaacgggaaagatacctacgttgtcagattgatggttcccatcatcaattcccgtaccaaagaagtagtgggaggcgtgggcggtcttttggttatagacggattacagaccctggtcatggataccttaaaaaattatgacgagatcgccgtaatggttatatattctggtgacgggactgttatggggcattttattcctgatcgtataggcaaaaatacggttgatgttgatgtggaagtaggcgacggaaggccggagcttttaaggtcaattaaagaaggaaagccgtattcgggtgatacttatgatccaaccctaaaatcctatgtatactttaagatgcgacccattcaaatcggcacttcagacatgaactggggagtattggtaggaacctttgaatcgtttatattaaaagaagtcaacgatattaccagatttaccattatacttgcggtgttatccattatagtggccgcggtaataatgtacttcatcctccacgccaccaccaaaccaatagtccatgtaaccgacagcctcaaagaatatccgaaggcgaaggngacctga

SEQ ID NO: 11764 - protein, 300 aa, Unknown
  Obtained from environmental sample
  misc_feature (1)..(300): Xaa is any amino acid
MANIMGDYEDIPAAERRDRFDDMLSATVAAEDSLYQTYTVWKPNAVDGMDSRFIGRTGSTNTGQYAAVFTKETGTITSRVTTDVEASMAYFNGPNSRKDRVENPVARNVNGKDTYVVRLMVPIINSRTKEVVGGVGGLLVIDGLQTLVMDTLKNYDEIAVMVIYSGDGTVMGHFIPDRIGKNTVDVDVEVGDGRPELLRSIKEGKPYSGDTYDPTLKSYVYFKMRPIQIGTSDMNWGVLVGTFESFILKEVNDITRFTIILAVLSIIVAAVIMYFILHATTKPIVHVTDSLKEYPKAKXT

SEQ ID NO: 11765 - DNA, 582 bp, Unknown
  Obtained from environmental sample
  misc_feature (1)..(582): n is a, c, g, or t
atgatgcaatcaggcgatcatttgaaccggcagaccagtgaattaatacgatccagcaccgacgtagtaaacggcatgaacgagattgtaaacggagccatgaaggagataaaaaccgcggtaacccttgttgctgaaatgagcgccgaaaacagcaagaacttcgatgagcttaaagcggagtcgtcaaagttcaaggttgaatcgggcgatgagatgaagaagatcatcgtgattgacgacgatgaacccattcttgtcatggcaaaaactattctgggtaaagattatgacgttacgacagttaattcaggcaagaaagcgctggatttattcttccagggctatgttcccaatatggcattattggatttgagtatgcctgaaatgggcggttgggatactttcattagaattcgggacattagcagattacacaaaaccccaatagcgattttcacatcttcagaggatccgaaagacagagcccgtgcgcaggaactgggggcggttgattacatcaaaaagccctgtaagaaagaagagttgttaagcaaggtgggaaggataatacagagttaa

SEQ ID NO: 11766 - protein, 193 aa, Unknown
  Obtained from environmental sample
  DOMAIN (74)...(188): Response regulator receiver domain
  misc_feature (1)..(193): Xaa is any amino acid
MMQSGDHLNRQTSELIRSSTDVVNGMNEIVNGAMKEIKTAVTLVAEMSAENSKNFDELKAESSKFKVESGDEMKKIIVIDDDEPILVMAKTILGKDYDVTTVNSGKKALDLFFQGYVPNMALLDLSMPEMGGWDTFIRIRDISRLHKTPIAIFTSSEDPKDRARAQELGAVDYIKKPCKKEELLSKVGRIIQS

SEQ ID NO: 11767 - DNA, 615 bp, Unknown
  Obtained from environmental sample
  misc_feature (1)..(615): n is a, c, g, or t
atgttcacagggattgttgttctgcggaaccagaaagatttaaaggcgtactctgatctatgcgcgggcggcgcgggatttataccggagaatacttttgcggatcagcccggaaaaattcaactgcccgccgagtcaggcgattttatttttgaggaatatatagaaacaaaaaaactggaagtacagaagaatgatgttgtaatcaaaaacaaggcggattgggtggagttaacggttggggtacttgaaaaacacggaatataccactcgatgaacccaagcgtaaccgtagcggataacgcggttctttcgcttgaggaaaagtttcagggcgggacgggaattaattttactccccctcctgagcatattgttaagccgggactggcgcaaaaaattaaaagaaacatggaaattgccgcgaaggaatgcggcgttaaggattactgccgtatagacatattcgcgaataacgaaactaacgaaataattataatcgagataaacagcctgccggggttgtccccttccacagtgctgtttcaacagggagcgaaagaagcgcctccgctgtacccgacggaattattggagtatataatttccaaataa

SEQ ID NO: 11768 - protein, 204 aa, Unknown
  Obtained from environmental sample
  misc_feature (1)..(204): Xaa is any amino acid
MFTGIVVLRNQKDLKAYSDLCAGGAGFIPENTFADQPGKIQLPAESGDFIFEEYIETKKLEVQKNDVVIKNKADWVELTVGVLEKHGIYHSMNPSVTVADNAVLSLEEKFQGGTGINFTPPPEHIVKPGLAQKIKRNMEIAAKECGVKDYCRIDIFANNETNEIIIIEINSLPGLSPSTVLFQQGAKEAPPLYPTELLEYIISK

SEQ ID NO: 11769 - DNA, 789 bp, Unknown
  Obtained from environmental sample
  misc_feature (1)..(789): n is a, c, g, or t
atggacagacccatgacgagttgcggttgttttgaagtaatctgcgcctatgtacctgagtgcaacggcgtaatggcagttaaccgcgagtatcttggcgatactcccgttggaatgacattttcaacattggcgggttccgtcggcggaggccagcagactcccggtttcttcggttgcgggaaggtgtttcttacaagccggaagttcctgtttgcggaaggcggctacgcgagagtagtgtggatgcctaaagaattaaaggaacttttgcgtaacgatttgttaaaacgttttgaagaacaaaaactgccgggatttttcgatcaaattgcagatgaaacaaccgccgtaaccgccgaagatgtgcggaagttcatggaaaaaattaatcaccccgcgctgaaaatggaagacttatcccgttttgcgcaaagtgaacagataagggaaaccgccgcaaaaactgacgatttcaaaaaagacgcgccgttaggtgaatctcagtccgtgaaaaaggaagaaacggggaatatttccgcaagtatagatattgccgttatcacagaaaagataaaagccgacgtaacaaaggaggttgttaccggtataatcgacattttaagcgaacgttttttaggcaaagctccttcggcggcaagggcggaagttaagacagaatcagctaacatcgcgaataaacggaaaatatcggctcaagagcgtatttcctcgattaaaagtttcgctcttcccgccgacaaagcggtcaattccacatattcgtaa

SEQ ID NO: 11770 - protein, 262 aa, Unknown
  Obtained from environmental sample
  DOMAIN (1)...(141): CO dehydrogenase/acetyl-CoA synthase complex beta subunit
  misc_feature (1)..(262): Xaa is any amino acid
MDRPMTSCGCFEVICAYVPECNGVMAVNREYLGDTPVGMTFSTLAGSVGGGQQTPGFFGCGKVFLTSRKFLFAEGGYARVVWMPKELKELLRNDLLKRFEEQKLPGFFDQIADETTAVTAEDVRKFMEKINHPALKMEDLSRFAQSEQIRETAAKTDDFKKDAPLGESQSVKKEETGNISASIDIAVITEKIKADVTKEVVTGIIDILSERFLGKAPSAARAEVKTESANIANKRKISAQERISSIKSFALPADKAVNSTYS

SEQ ID NO: 11771 - DNA, 825 bp, Unknown
  Obtained from environmental sample
  misc_feature (1)..(825): n is a, c, g, or t
atgtcaaagcttatctgtacaagcgcgattgacggcgcggtcgcgattgtcgcccatgctgtcaacatggtggaagaagcggtaaaacaaaaaggtttaaacgccgccgtaggctttcccaataccaattattacctgcccgtcatttattcttttacgggcagaaaaatgaaaacgcttgaggatttacggagtattctggaagaagcaaaagcgctactacccgtaagaccggctgaaaatgtttggctgccttatttcggaaacgcccttgacgcgggagtagccgctcttttcgcgtgtgaagcgatagaggcatgtaagtaccttatcggtcctaatcctgttgaaggcatctggcttggagccgctaatgatgtaataatgcgcgagcgcgggattgagtttgtagacggaaccgctcccggttttgcggcgattacgggggccgcgccggataatgcgacggccgtgaaaatcgccaaggaattacagcaaaaaaatctttatgtgtttatgggcggatgtacaaaagacacgcaatttgcggagcagttagccgcggaaggcgtacaactcggctgggaaacccgacttgtgcctttcggacgggatgtttcctcattaatttacgcgcttgggttcgcaagccgggtcgcgctttcctttggcggagtaaaaccgggcgattatgaagccaacctaaaatataacaagaacaggattttcgcttttgtcatcgcattangtgaaataacaagtgacaagtccgcggcggcgatgggcgctattaactacggcttccccctatatttcagatattga

SEQ ID NO: 11772 - protein, 274 aa, Unknown
  Obtained from environmental sample
  SIGNAL (1)...(20)
  misc_feature (1)..(274): Xaa is any amino acid
MSKLICTSAIDGAVAIVAHAVNMVEEAVKQKGLNAAVGFPNTNYYLPVIYSFTGRKMKTLEDLRSILEEAKALLPVRPAENVWLPYFGNALDAGVAALFACEAIEACKYLIGPNPVEGIWLGAANDVIMRERGIEFVDGTAPGFAAITGAAPDNATAVKIAKELQQKNLYVFMGGCTKDTQFAEQLAAEGVQLGWETRLVPFGRDVSSLIYALGFASRVALSFGGVKPGDYEANLKYNKNRIFAFVIALXEITSDKSAAAMGAINYGFPLYFRY

SEQ ID NO: 11773 - DNA, 876 bp, Unknown
  Obtained from environmental sample
  misc_feature (1)..(876): n is a, c, g, or t
atgcgcctcaaatccaatcctgtacactggcttatcaggacagtacaggaggacacaatgaggtgtgaggaacctatgaagatcatcgaactattacggctctgggaacaagggtatacccagagagagatcgcggcgagcgtcaattgctcaaagactacggtagccgggctgcagaagcggctgaaggaaatcggcctgttatacgatacggctaaagggatggccgacgaggcagttgccaaactggcttatccgaactgccgaggcggacgcccggccaggaacgagcccgactgggaagccgtccagaagcggcttgacgggaacaagcggctaaacctgcagtacctgtatgaggagtaccgggatacagtgaaagaccctctgggccgcagccagttctacgcgtgttatacgacatggaaggccaaggctgggaaagacgtggtgatggtacaggagagggagccggggaaggaactgttcgtggactggatgggggacacccttgaatgcgtcctggacagcgagacgggaaagctgctgaaggcgcacttctttgtggcggcggtgggtgattcaggatacccggtagttctggcttacccgaacgagaagagtgagaactggatacatgcgcatgtggaaaccttcaaccggcttggcgggctgccccaggtcgtagtgccggataactgcaagaccgcggtcagcaaggcaaactattacgacccccagttgaacaaggcgtactacgaccttgcgctgtattataacattgcgggtatccccgcgcgggttcgccgaccacaagataaaagtttggtagaaggcagcatcgggtggcttgagacatggctggtccatggctga

SEQ ID NO: 11774 - protein, 291 aa, Unknown
  Obtained from environmental sample
  misc_feature (1)..(291): Xaa is any amino acid
MRLKSNPVHWLIRTVQEDTMRCEEPMKIIELLRLWEQGYTQREIAASVNCSKTTVAGLQKRLKEIGLLYDTAKGMADEAVAKLAYPNCRGGRPARNEPDWEAVQKRLDGNKRLNLQYLYEEYRDTVKDPLGRSQFYACYTTWKAKAGKDVVMVQEREPGKELFVDWMGDTLECVLDSETGKLLKAHFFVAAVGDSGYPVVLAYPNEKSENWIHAHVETFNRLGGLPQVVVPDNCKTAVSKANYYDPQLNKAYYDLALYYNIAGIPARVRRPQDKSLVEGSIGWLETWLVHG

SEQ ID NO: 11775 - DNA, 495 bp, Unknown
  Obtained from environmental sample
  misc_feature (1)..(495): n is a, c, g, or t
gtgcttcttcttgccgactgccgctggattcgcaaagggcataatctttttgtatccggcgcttgcggaancggcaagacctatctggcgagtgcgttcggcaacgccgcctgccgtcagggatactctgtccactgctaccgccttccccgccttcttgtggatttgcacatcgcgcggggggacggctcctgggagaagctcctcggggatcttaaaaagcccgacctgctcatccttgatgatttcggccttgccccccttgagccattgcaatgccgggactttctggaagtggtggaagaccgttatgcgtcagcctcaacgatagtggcttcccagcttccggtatcctgctggcacggagtctttgccgacgcgaccattgccgatgcggtgttggaccggctgcttcaaggggcgtaccggtttgagcttaaaggcccttccaggcggcaacggaatacgccggatgaaggcacggcggcggaataa

SEQ ID NO: 11776 - protein, 164 aa, Unknown
  Obtained from environmental sample
  DOMAIN (1)...(144): IstB-like ATP binding protein
  misc_feature (1)..(164): Xaa is any amino acid
MLLLADCRWIRKGHNLFVSGACGXGKTYLASAFGNAACRQGYSVHCYRLPRLLVDLHIARGDGSWEKLLGDLKKPDLLILDDFGLAPLEPLQCRDFLEVVEDRYASASTIVASQLPVSCWHGVFADATIADAVLDRLLQGAYRFELKGPSRRQRNTPDEGTAAE

SEQ ID NO: 11777 - DNA, 936 bp, Unknown
  Obtained from environmental sample
  misc_feature (1)..(936): n is a, c, g, or t
atgttgccaaacgctatggaaggcccaacgcctgtcagctcaataatacatagtgcgacaatggtagtagctggtgtttatttaaccgcaaggcttttcccattttttgcaagcattggaacagtgcttgaggttgccgcatttataggggctttcacagccttgttcgctgcgattatagcttgcacgcaaaaagacataaagcgtattttggcatactcaactcttagccagctcggttatatgatgtttgcgcttggagttggcggttatacagcttctatgttccacgtttttacgcacgcatttttcaagtgtatgttgtttttgatagcgggttctgttatacacgctgtgcatagcaatagcttagacgagatgggcgggcttcgcaaaaaaatgccatttgcttatttctcctgtttaatcgcttgccttgcaatcgctggcgttcccccgttttcgggcttttggagcaaagacgaaattctgctttccgcgtatgcggctgggaattacacagtattcttcacagggcttttaactggtggcttaaccgcattctatatgttcagaatgttctttttaacattccacggcaaagcgagaagcgagcacgttgctcacgcccacgaagacccttggatgaccttccccatagttgttctggcaattcctgcggcagctattggctttgtttctcataaattcttcgcggattttgtgcaggtaccgccgcttgcagaggttggaaatattggcaacactcccctgccgcatatagaatggctgccgatagctgcttctgctatgggtattctcggtttggctactgcttggtttttatacgctcgcaagggctcaaatgtggaagctgctctggaaacagatattcgcccaccgttgtacaaaaccatttacaacaaatttacttga

SEQ ID NO: 11778 - protein, 311 aa, Unknown
  Obtained from environmental sample
  DOMAIN (1)...(182): NADH-Ubiquinone/plastoquinone (complex I), various chains
  misc_feature (1)..(311): Xaa is any amino acid
MLPNAMEGPTPVSSIIHSATMVVAGVYLTARLFPFFASIGTVLEVAAFIGAFTALFAAIIACTQKDIKRILAYSTLSQLGYMMFALGVGGYTASMFHVFTHAFFKCMLFLIAGSVIHAVHSNSLDEMGGLRKKMPFAYFSCLIACLAIAGVPPFSGFWSKDEILLSAYAAGNYTVFFTGLLTGGLTAFYMFRMFFLTFHGKARSEHVAHAHEDPWMTFPIVVLAIPAAAIGFVSHKFFADFVQVPPLAEVGNIGNTPLPHIEWLPIAASAMGILGLATAWFLYARKGSNVEAALETDIRPPLYKTIYNKFT

SEQ ID NO: 11779 - DNA, 804 bp, Unknown
  Obtained from environmental sample
  misc_feature (1)..(804): n is a, c, g, or t
atgaaaatgcgtgttggcctttgctcggcttattctttgcttttcggggtacacaagccgggggagttgctggacaaagcggcttcgttcggcgtgaaggtagcgtcaatttgcgatttgaataatttgtacggggtacattcttttcttgaggaagcgaaagaaaagggaataaggccgatcatcggaacggctttagcaaagaacaatgagaagaaaccaatctattgctttgtggagaatcgggcggggttcggacggctttgcgaaatacttacggcacggaataaggataaagagcgttttgaccctttcctgctcttgagggaaaattccggcggcctggttctggcctcctccgacgaagcggctttgtccaaccttgcggggcaggtaaaacgcctgtatgcggcaataacgccaaccggagttggggcggcaagccttggcctgaaactcaacttaccgcttgcctttatagacgattcgatttttcttgagccggaagatttcgctgttcaccgcgtgttacgcgctatcgcccttcttaaaacaaccggcagcttggcccgggccgacacggcggaaaaagaacgtgttttaaagccctctaaagaaatcaaccggctcttgatgtcctggccggaagcggcaaagggaagtgtcaagattgcggaaatatgccaattcaacaccctgttcgacggctttatatttccctcttacggagaaaatcccggcgcggagttgcgaaagcgggtttatgatggtgccagcctgcgttacaaacattggacgaaataa

SEQ ID NO: 11780 - protein, 267 aa, Unknown
  Obtained from environmental sample
  misc_feature (1)..(267): Xaa is any amino acid
MKMRVGLCSAYSLLFGVHKPGELLDKAASFGVKVASICDLNNLYGVHSFLEEAKEKGIRPIIGTALAKNNEKKPIYCFVENRAGFGRLCEILTARNKDKERFDPFLLLRENSGGLVLASSDEAALSNLAGQVKRLYAAITPTGVGAASLGLKLNLPLAFIDDSIFLEPEDFAVHRVLRAIALLKTTGSLARADTAEKERVLKPSKEINRLLMSWPEAAKGSVKIAEICQFNTLFDGFIFPSYGENPGAELRKRVYDGASLRYKHWTK

SEQ ID NO: 11781 - DNA, 603 bp, Unknown
  Obtained from environmental sample
  misc_feature (1)..(603): n is a, c, g, or t
atgcagcggttgcgcgaattggctgtccaggcatctaacggtatttacacatcgcaggaccgcatgatgatgcagatagaagtatcccagctcgtcgatgaagtcgatcgcatcgcaagccatgcgcagttcaatgagatgaacctcctgaccggccgctttggcaacgatacccagggtcaatacgccggggcgagtatgtggttccacattggcgccaatatggatcagcgcaaacgcgtgtatatcggcaccatgtcaacccgcgctcttggtctgcggagtctctcaaccgcttcatttattaccctttcaactccaaatgacgctaacaagaccatcggagtactcgatcaggcgctcatgaaagtttcaaagcagagagccgatttgggcggttatcagaccaggcttgagtttgcggtgaagggcattatgatcgggtatgagaacattcaggctgcggaatccagaattcgcgatacggatatggcagagcagatgtcagagtttgtcaaggatcagatcctgacaacttccgctaccgcaatgcttgggcaggcaaacttgaaaccacaggcggtactcagactgctgcaataa

SEQ ID NO: 11782 - protein, 200 aa, Unknown
  Obtained from environmental sample
  DOMAIN (1)...(77): Bacterial flagellin N-terminus
  misc_feature (1)..(200): Xaa is any amino acid
MQRLRELAVQASNGIYTSQDRMMMQIEVSQLVDEVDRIASHAQFNEMNLLTGRFGNDTQGQYAGASMWFHIGANMDQRKRVYIGTMSTRALGLRSLSTASFITLSTPNDANKTIGVLDQALMKVSKQRADLGGYQTRLEFAVKGIMIGYENIQAAESRIRDTDMAEQMSEFVKDQILTTSATAMLGQANLKPQAVLRLLQ

SEQ ID NO: 11783 - DNA, 579 bp, Unknown
  Obtained from environmental sample
  misc_feature (1)..(579): n is a, c, g, or t
atgcttgaaggcttgtaccgcctgtacatggacaggttcatgcaggccatggccgaagccgccgcggaaccacgcaaaaacggcaatccgctcgatccggaacaggtagccgagatgtaccgcctctatgccgggcgcctgcggactttgtccggcatcatgcagggcgtggcctcgcttgacgatctgcgcgcccgagtcggccgcatccaggatatgtcgcaaagaaccatggccgccaacaccaagtacatggaagaagtgctcaaattcgaccaggcgcgcgcaaccggcaaccaggtactgatcgaaaaagcgcgagcgtccatggaagccgccagcgacgcctaccgccaaatcgccagggaacgggatctgctgcgcgatgctttgattgccgccatccgcagcaatccggccgcccggagttccgccgacgacaacgtgctctacgtggccctgtggattgaccgccgcctgcaacagtcgatcaacgcgcgggatgcttcggtgcagggcgcctccctgtttcttgatctggcccagcgattcgaacgcgctgcgggatcaaggccgtag

SEQ ID NO: 11784 - protein, 192 aa, Unknown
  Obtained from environmental sample
  misc_feature (1)..(192): Xaa is any amino acid
MLEGLYRLYMDRFMQAMAEAAAEPRKNGNPLDPEQVAEMYRLYAGRLRTLSGIMQGVASLDDLRARVGRIQDMSQRTMAANTKYMEEVLKFDQARATGNQVLIEKARASMEAASDAYRQIARERDLLRDALIAAIRSNPAARSSADDNVLYVALWIDRRLQQSINARDASVQGASLFLDLAQRFERAAGSRP

SEQ ID NO: 11785 - DNA, 834 bp, Unknown
  Obtained from environmental sample
  misc_feature (1)..(834): n is a, c, g, or t
atggggcataacggtatgctctacagcctgcccagccgcgacttaattgcagattccgtggaatacatggcaaacgcgcattgcgcagacggcctagtgtgcatcagcaactgcgacaaagtgacccccggaatgctccttgccgctatgaggctaaacattccagcagtatttgtgagcgggggtccaatggaagctggcagggcaacgttctccgatggcaaggaaattcatatagatttcatagacgccttgattgcctctgcaaacccaaatgtttctgaagaggatatgaaaaaaattgaagatgctgcctgccccacttgcggcagctgttcgggaatgttcaccgcaaactcaatgaactgcctaaccgaagctcttgggctttctctgcccggcaacggaacaatattggcaactcacacagaacgcaaaaaattatttgagcaagccgcaaaactctccgttgagctttgcaaccgatactacgataaagatgatacctctgttttgcccaaaagcattgccacaaaagaggcttttgaaaacgctatgcggctagacatcgccatgggcggttcaacaaacacggttttgcacatacttgcggttgcaaacgaagcgggcgtgaatttcacaatgaaagacataaacgagctatctcgctcaacgccttgcctttgcaaggttgctccgagcgtaaattacattcacatagaagatgtgcacagagcgggtggaattcctgccattttgggcgaacttggcgttgcagggcttttgaatttaaatgtgaatatggtgcattctccaagtcttagcgagtattga

SEQ ID NO: 11786 - protein, 277 aa, Unknown
  Obtained from environmental sample
  DOMAIN (1)...(276): Dehydratase family
  misc_feature (1)..(277): Xaa is any amino acid
MGHNGMLYSLPSRDLIADSVEYMANAHCADGLVCISNCDKVTPGMLLAAMRLNIPAVFVSGGPMEAGRATFSDGKEIHIDFIDALIASANPNVSEEDMKKIEDAACPTCGSCSGMFTANSMNCLTEALGLSLPGNGTILATHTERKKLFEQAAKLSVELCNRYYDKDDTSVLPKSIATKEAFENAMRLDIAMGGSTNTVLHILAVANEAGVNFTMKDINELSRSTPCLCKVAPSVNYIHIEDVHRAGGIPAILGELGVAGLLNLNVNMVHSPSLSEY

SEQ ID NO: 11787 - DNA, 573 bp, Unknown
  Obtained from environmental sample
  misc_feature (1)..(573): n is a, c, g, or t
atgcttacaggcgatctcaacattgttgaagttgaatggatcgttcagtaccgcattgtagattcaaaagcatgggtttttaatgtcatggaacgagagcgcactatcagcgatgtatcccgctccgttatcaatatgctggtaggagatcgcgcaataatggatattatgagtcctgaacggagcgccattgaaatagccggcgttgaactgatgaacgaaacatttaaaagtttcggtttgggaatctatgttatcgcggtaaaactacagaatatcgatcctccgaccggaagcgtacaggaagcgtttgatgatgtgaacaaagcgattcaagatatgaaccgccttataaatgaaggaatgcaaatttacaacgaggaaattccaaaagccagaggtgaagccgagcggatgattcttgtcgctcaaggttacgctgcggaaagggtgaacagatcaaagggcgatgtagcgcgctttaattccgtatatgacgagtaccgacgctctcctgaagtaacaagacagcggctctactatgaaatgatcgaaggaagtattcaaagatga

SEQ ID NO: 11788 - protein, 190 aa, Unknown
  Obtained from environmental sample
  DOMAIN (1)...(147): SPFH domain / Band 7 family
  misc_feature (1)..(190): Xaa is any amino acid
MLTGDLNIVEVEWIVQYRIVDSKAWVFNVMERERTISDVSRSVINMLVGDRAIMDIMSPERSAIEIAGVELMNETFKSFGLGIYVIAVKLQNIDPPTGSVQEAFDDVNKAIQDMNRLINEGMQIYNEEIPKARGEAERMILVAQGYAAERVNRSKGDVARFNSVYDEYRRSPEVTRQRLYYEMIEGSIQR

SEQ ID NO: 11789 - DNA, 579 bp, Unknown
  Obtained from environmental sample
  misc_feature (1)..(579): n is a, c, g, or t
atgaaacttaatgcgaaattattggtttttggggcttgcttcctgatggcgcggcccttattcgcgcagaatatttttctggagctgaacctgaacagccaaaggggacaaggcttcacgcgctcgatgcgttcaaagtcttctctggaattattcagggtgatagaacaggccggcgatgacaggaagatcggggggattatcctcaatatttcagcgtgccaggaaggaaaggaaaccctttgggaactgcggaacgccctggaaaaatttaaggcaaaagggaaaaaggtatgctcctttatcagcggggccgaccttgacctctattgtcttgcgaccataggggataaaatcgtaatggacgatcagggcgttctgatgctgacgggttacgcgtggggccgcggttatgtgaaacacagccttgaaaaacttgggattggggcgcgcgaactgcgttatctgaaattcaagtcggcggcggaaacatacacgcgggattcgatgtcggaagccgaccggacgcaatacggcgaaatactggacgacatgacgcagcttgcccgcgacacgtga

SEQ ID NO: 11790 - protein, 192 aa, Unknown
  Obtained from environmental sample
  SIGNAL (1)...(22)
  misc_feature (1)..(192): Xaa is any amino acid
MKLNAKLLVFGACFLMARPLFAQNIFLELNLNSQRGQGFTRSMRSKSSLELFRVIEQAGDDRKIGGIILNISACQEGKETLWELRNALEKFKAKGKKVCSFISGADLDLYCLATIGDKIVMDDQGVLMLTGYAWGRGYVKHSLEKLGIGARELRYLKFKSAAETYTRDSMSEADRTQYGEILDDMTQLARDT

SEQ ID NO: 11791 - DNA, 306 bp, Unknown
  Obtained from environmental sample
  misc_feature (1)..(306): n is a, c, g, or t
atgaaagccgcaaagggctactatggtcgccgcaaaagcaatttgcgccttgccatagatgcaacaacccacgccggccagtatgcttacgttcaccgccgcgacaaaaaaggcgattaccgctccctgtggataacccgcctgaacgcagcagtccgcgagcacgatttgaactacagcgagttcatacacttgctcggtgccgccaacataaacctgaaccgcaaggttctggcagatttggcaatcacggatccggctgcattcgcaaaggtagtggaaatagctaagaaagccaaaggctag

SEQ ID NO: 11792 - protein, 101 aa, Unknown
  Obtained from environmental sample
  DOMAIN (1)...(92): Ribosomal protein L20
  misc_feature (1)..(101): Xaa is any amino acid
MKAAKGYYGRRKSNLRLAIDATTHAGQYAYVHRRDKKGDYRSLWITRLNAAVREHDLNYSEFIHLLGAANINLNRKVLADLAITDPAAFAKVVEIAKKAKG

SEQ ID NO: 11793 - DNA, 636 bp, Unknown
  Obtained from environmental sample
  misc_feature (1)..(636): n is a, c, g, or t
ttgtcggatgaagaaccggccccgtcggtgatatttgagttcttcccggacgacgacgattcggcggaggaggtctacgaacctatagaattagattttgtaatgtcgccgccgcctccgccgcctccgcagcagcagcctgagccgaaccccttgccgcaacccacggcggaggagacggatatgctcaacgtctcccaacgcgctatcaacttcgtgtccggcagcgcaaacctgaccgaaggctcgtacgcgccgctcaacgcgatagctgaccttctgacgcattatccgcacatccgctacgaggtgcagggacacacagactcgcagggcgccgagatgtacaacctgctgctttccgcggagcgcgccgctgtggtgaagtactacctgatttcgcgcggggcgccggaatcgagcttagtcgccgtcggctacggtaaaaacatacccatagccgacaaccaaaaccccgtgggccgcgcgctgaacagacgcgtggagttcttgcaaatacaatcgcaggaacactacgattgggtaaaaagatttgaattggagatgataccgagactcaccaataaggtaataatttataagaggaagatcacggagccgaattgggaggaatag

SEQ ID NO: 11794 - protein, 211 aa, Unknown
  Obtained from environmental sample
  DOMAIN (71)...(166): OmpA family
  misc_feature (1)..(211): Xaa is any amino acid
MSDEEPAPSVIFEFFPDDDDSAEEVYEPIELDFVMSPPPPPPPQQQPEPNPLPQPTAEETDMLNVSQRAINFVSGSANLTEGSYAPLNAIADLLTHYPHIRYEVQGHTDSQGAEMYNLLLSAERAAVVKYYLISRGAPESSLVAVGYGKNIPIADNQNPVGRALNRRVEFLQIQSQEHYDWVKRFELEMIPRLTNKVIIYKRKITEPNWEE

SEQ ID NO: 11795 - DNA, 858 bp, Unknown
  Obtained from environmental sample
  misc_feature (1)..(858): n is a, c, g, or t
gtgataaacagcagaaacaccgcaacggtaagcggcagaacttctatcggcggcattgccggagcgaataacggcacgattgaaaacagttacaacacgggaaacattaccggcaacagtcaagtcggcggtatcgccggagctaattccggcactggcagttatataaggataaggaacagctataacacgggcgatattaccgcctccgccaccaacaccgcctatgccggaggcattgtcggggctaacctgtcaagctcaacggtagaattctgctacaataccggcaacgtatccaccgcaggcacaaatatcggcggcatagcaggacaaaatcaaagcggaagcaccgtgcaaaactgcgtatctctcggcgcaagggtaaccggtactggtgatgtcggtcgcatagccggaagcagtaacggcacactcggcaacaactacgcccgttcagatataaaaatcggcgcaagtggcgcggaggcggcagtaccaccagcaggagctaacacccctaacggcggaactgtcaatttgagtacggcacttaccgtcgttttcagcggctggaataccgcactttggaatatcagcggcaatttgactataggcggcgcattgcccacactcaaaacaaacacgcaaagcccagctcccacggttccggcggcgtacaatccgcccgctaacggcacggcaagcagtcccttcctcgttgccaccgaagccgatctccgcaaagtcggcacaggcacagacggctggtcgctctcggcgcactacaaacagacagcgaacatcacgctgtcaaacaacttacgaggattggctcgtgccgctcggccgatctga

SEQ ID NO: 11796 - protein, 285 aa, Unknown
  Obtained from environmental sample
  SIGNAL (1)...(22)
  DOMAIN (12)...(37): The GLUG motif
  misc_feature (1)..(285): Xaa is any amino acid
MINSRNTATVSGRTSIGGIAGANNGTIENSYNTGNITGNSQVGGIAGANSGTGSYIRIRNSYNTGDITASATNTAYAGGIVGANLSSSTVEFCYNTGNVSTAGTNIGGIAGQNQSGSTVQNCVSLGARVTGTGDVGRIAGSSNGTLGNNYARSDIKIGASGAEAAVPPAGANTPNGGTVNLSTALTVVFSGWNTALWNISGNLTIGGALPTLKTNTQSPAPTVPAAYNPPANGTASSPFLVATEADLRKVGTGTDGWSLSAHYKQTANITLSNNLRGLARAARPI

SEQ ID NO: 11797 - DNA, 768 bp, Unknown
  Obtained from environmental sample
  misc_feature (1)..(768): n is a, c, g, or t
ttgaatcggacagtcgtgaacttcgcagccgagagccatgtggacaacagcataaaggggccggcggcgttcatccagacaaacttggtgggcaccttttcccttttggaagccgctaggcaggtgtgggcaggggaaaagacgtgcagattcctgcacgtatccaccgatgaagtctatggcgcccttggggagacggggaaattcacggaagaaactccatacgcccccaacagcccctacagcgcctctaaagccggcagcgaccacttggccagggcctactttcatacctatggcctgcctgtcctgacgaccaactgctccaacaactacggcccaaggcagcaccccgaaaaattgatccctttggcgataacgcgcatgatgaaaaatgagcccatacccatttatggggatggcaggcaggtgcgggactggctttacgtcgaggatcactgcatggggatttttgctgtgcttcaaggcggaaaatgcggggagacatacaatatcggcggaagcaacgaatggaaaaatattgacctgatagatttgctgtgcgacgaggtggacaaagccatcggcagggcgcagggtaccagccgcaaactgaaaacctttgtggaggacaggcttggacacgacaggcgctacgctatagacgcgtcaaagatagagtccggactcggctggcgccacaaaacaagctttcctgtgggaatttcaaaaacggtgcagtggtatctggccaacttcggcaagtag

SEQ ID NO: 11798 - protein, 255 aa, Unknown
  Obtained from environmental sample
  DOMAIN (3)...(173): NAD dependent epimerase/dehydratase family
  misc_feature (1)..(255): Xaa is any amino acid
MNRTVVNFAAESHVDNSIKGPAAFIQTNLVGTFSLLEAARQVWAGEKTCRFLHVSTDEVYGALGETGKFTEETPYAPNSPYSASKAGSDHLARAYFHTYGLPVLTTNCSNNYGPRQHPEKLIPLAITRMMKNEPIPIYGDGRQVRDWLYVEDHCMGIFAVLQGGKCGETYNIGGSNEWKNIDLIDLLCDEVDKAIGRAQGTSRKLKTFVEDRLGHDRRYAIDASKIESGLGWRHKTSFPVGISKTVQWYLANFGK

SEQ ID NO: 11799 - DNA, 888 bp, Unknown
  Obtained from environmental sample
  misc_feature (1)..(888): n is a, c, g, or t
ttgctcccttactcgcgggagctgggggtcacgcgcaggctgccggcggtggccaagcccaagcctggcgacgtggtgattttcaggtatccggggacggacgccaaggactacatcaagcgcatggtggctggtccgggcgacgtcgtccagtttgtgggcaaccaaaagctcctcgtcaacggcgttgagcttaccctgccgccgcacggcaagtacacggggggcaacagggccgacccgcgcatcgtcaacttcgccccgttgcgcataccggccaaaggcgacgaactccgtcccgacaccatgccggttagggagtttttgttctttaagacgctggtgcaccaggagaaccccacaaagagggtatacatgcactttgacctatacgtcgacggcgagctggcgaacagcgccccgctcaacttcaacggggcgaggctctcgctggacgatttgcaggacggaaaattcatctacaaaaacgagatgacgcggcgcacggaggctttcgacttcaaccgcattgacgattggacgatgctcgactacgtattggagataatacgccgaaacttctcggcggaaaaaagcgtggagatacgcaaaaaactgtatttaggcaacgaccgcgtagagcgttacacggtacgcaacgacaactactttatggcgggcgacaaccgcgacaactcgctcgactcgcggtactgggggtatctgaattataattttgtgaaggccaaggcgctgatactctatttctcatacgacaacaccggcccggtttggaagtttccggcaaacatacggtggaaccgtatcggaaagctgatcagaagctgggacggggagaacgagaagaatcctaagattaagtattaa

SEQ ID NO: 11800 - protein, 295 aa, Unknown
  Obtained from environmental sample
  misc_feature (1)..(295): Xaa is any amino acid
MLPYSRELGVTRRLPAVAKPKPGDVVIFRYPGTDAKDYIKRMVAGPGDVVQFVGNQKLLVNGVELTLPPHGKYTGGNRADPRIVNFAPLRIPAKGDELRPDTMPVREFLFFKTLVHQENPTKRVYMHFDLYVDGELANSAPLNFNGARLSLDDLQDGKFIYKNEMTRRTEAFDFNRIDDWTMLDYVLEIIRRNFSAEKSVEIRKKLYLGNDRVERYTVRNDNYFMAGDNRDNSLDSRYWGYLNYNFVKAKALILYFSYDNTGPVWKFPANIRWNRIGKLIRSWDGENEKNPKIKY

SEQ ID NO: 11801 - DNA, 768 bp, Unknown
  Obtained from environmental sample
  misc_feature (1)..(768): n is a, c, g, or t
ttgcgcaatcgctttgcctctccatacattnggggcgtatcgtccggcgcgtctttgggagcgggaataatcatcatcagcgggatagcgattcccatgttgggcggcttcactctgccgctgacaggctttgtctttggactggcggcagtcttttttgtcgccgctttttcttcacgcatagaccgctcaatgtctaacaacacaataattctgtgcggtatggttctttcgctttttttaagcgcggcgcttaccatgcttagcgctgtattttccgatgaccttcggcgtatagctctgtggcaaatgggaagtttcgccatgcgaggatggtcgtcggtatggctgctgattccgtttttggtcgtcggaatagttggagttttctttttcacaaaggaaatggatattttaagtttcggcgacgaacaggcaaaatcttcgggagtggaaacaggcgcggtgcggaaaaaactgctcgctctctgcgccgtgctggcagggtcagccgtcgctctcagcggagttattggttttgtagaccttattgcccctcacgcggcgcgccgaatctgcgggtctaatcacagacatttaatcccaatgtcgtttgttctcggcggctccttgcttgttttaaccgatctgctggcaagaacagtcgtctcgccctcggagcttcccgtaggagcgattaccgccctaatcggcgcgccgttttttgcgtgggtctactttagacggcggcgcaaggcgcaggtgtaa

SEQ ID NO: 11802 - protein, 255 aa, Unknown
  Obtained from environmental sample
  SIGNAL (1)...(20)
  DOMAIN (1)...(249): ABC 3 transport family
  misc_feature (1)..(255): Xaa is any amino acid
MRNRFASPYIXGVSSGASLGAGIIIISGIAIPMLGGFTLPLTGFVFGLAAVFFVAAFSSRIDRSMSNNTIILCGMVLSLFLSAALTMLSAVFSDDLRRIALWQMGSFAMRGWSSVWLLIPFLVVGIVGVFFFTKEMDILSFGDEQAKSSGVETGAVRKKLLALCAVLAGSAVALSGVIGFVDLIAPHAARRICGSNHRHLIPMSFVLGGSLLVLTDLLARTVVSPSELPVGAITALIGAPFFAWVYFRRRRKAQV

SEQ ID NO: 11803 - DNA, 516 bp, Unknown
  Obtained from environmental sample
  misc_feature (1)..(516): n is a, c, g, or t
gtgcgcatcgtcgccgccaccaacaaggatttaaaagcggagattgaaaagggcaatttccgcgacgatctttatttccggcttaacgtggtaaacattcacgttcctcctttaagggaacgcaaagacgatcttccgcttctcatcaccgcctttttaaaagagttcgccgaggaaaacggcaagaccatcgaaggcattaacgacaaggcccgctcctgcctttacgcttacgactggccgggcaacatacgggaattgcgcaactgtatggaaagcgccgttgtcatgtcccagggaaaattaatcaccgtggaagatctcccgcccggtataagggccggcagcgaggaaggcctgattcgcatacccctgggaaccagcatggaagaggcggagaagatcattatccgcgaaaccgtttccgcccagaagggcaaccagagcaaggccgccgacattctgggaataggccgcaagactttgcaccggaaactttcaggcgaggatgaatga

SEQ ID NO: 11804 - protein, 171 aa, Unknown
  Obtained from environmental sample
  DOMAIN (129)...(169): Bacterial regulatory protein, Fis family
  misc_feature (1)..(171): Xaa is any amino acid
MRIVAATNKDLKAEIEKGNFRDDLYFRLNVVNIHVPPLRERKDDLPLLITAFLKEFAEENGKTIEGINDKARSCLYAYDWPGNIRELRNCMESAVVMSQGKLITVEDLPPGIRAGSEEGLIRIPLGTSMEEAEKIIIRETVSAQKGNQSKAADILGIGRKTLHRKLSGEDE

SEQ ID NO: 11805 - DNA, 819 bp, Unknown
  Obtained from environmental sample
  misc_feature (1)..(819): n is a, c, g, or t
atgagccatagccagggcgatttacgcttaagggtacaggatctatccattgattttgggggactaaaagccgtaagcgaattttcatgcgagctgtaccacggggaactggtcggacttatcggcccgaatggggcaggcaagacaacggtgttcaatatgctttccggaatatatgtcccgactggcggggagatagaattccgcgatcgcaggggcaatacccgtcttgtgaaaaaacagagccctgccacgatgaaccggattggccttgcccgtacttttcagaatatacgcctgttttccaatctttctgtcgaggacaatatccgcattgcgttacattccggcaggaccagcggccccctggacgcgctgttccgccttaagcgtttcagaattgatgaggagaggatgcacgcacaggcgggggaattgctttcccttttcaagattgaaaaaaagaaggatgaactggcgcgcaatcttccttatggcgagcagcgcagactggaaatagcccgcgccctggcttctaacccctgccttcttctgctggatgaacctgccgccggaatgaacccccaggaaacagaagaattaatgaagataataaaatttatcagaaatgaatttcacctgacgattcttctgatcgaacacgatatgcgcctggtaatggggatatgcgagcggcttatagtgctggattacggacggacaatcgccgcgggctcaccggaagagattcggcaaaatccggcggtgataaaagcttaccttgggacggaggctgtcagtgtctgcgacaatagctga

SEQ ID NO: 11806 - protein, 272 aa, Unknown
  Obtained from environmental sample
  DOMAIN (35)...(239): ABC transporter
  misc_feature (1)..(272): Xaa is any amino acid
MSHSQGDLRLRVQDLSIDFGGLKAVSEFSCELYHGELVGLIGPNGAGKTTVFNMLSGIYVPTGGEIEFRDRRGNTRLVKKQSPATMNRIGLARTFQNIRLFSNLSVEDNIRIALHSGRTSGPLDALFRLKRFRIDEERMHAQAGELLSLFKIEKKKDELARNLPYGEQRRLEIARALASNPCLLLLDEPAAGMNPQETEELMKIIKFIRNEFHLTILLIEHDMRLVMGICERLIVLDYGRTIAAGSPEEIRQNPAVIKAYLGTEAVSVCDNS

SEQ ID NO: 11807 - DNA, 915 bp, Unknown
  Obtained from environmental sample
  misc_feature (1)..(915): n is a, c, g, or t
ttgccgcctcgtcaatccgagggcgattttcttcccgggttgattgtcgataaatacgtcaggggcgtttgtatacagataggtacggcaggtatggagtgttggcgcggcgctatcgtagaggcgttgtccgatattgtcaaccccgcctttatctacgaacgttcggacacggcgtcacgcgagcgggaggggttgccgagtagcgagggattgatcgccggaacgcttcccgagacgcttgcgataacggagaacggcgtcaaatacaaggcggatttacgagccggacagaaaaccggattcttctttgatcaacgcgaaaaccgtgcgcttctgcgccgctacgccgccgggcgcaacgtgtgcgattgtttttcctacagcggaggcttcgcgataaacgccgcgctcggcggcgctagttccgtaatcgctgttgattcttcggaagatgccggtaattgtctctccgaaaacgcgcgtctgaatgatgtgtccgatatagcgaagtttcagaaatcggacgcgttcgcgtttctcagacaactgcctcccggctgtgacggttcgtctatcgacctattgattttagaccccccgaagttcgccaaccacccaagcgaggtggacagggccgcgcgcggctacaaagagatcaacttagccggactgcgtgcgcttgccccgggcggcattctcttcaccttctcatgttccggcgcggttgaccagtacctatttagacagatagtattcggtgccgcggcggacgcgcgccgcaatgttcagatactccatgttttgacggcgggtccggaccatccgattaatatcgcacatcgggagggggagtatctcaaagggcttgtgcttagggttcaaagttttaaattctttaaaatcaaaatctaa

SEQ ID NO: 11808 - protein, 304 aa, Unknown
  Obtained from environmental sample
  DOMAIN (17)...(217): Met-10+ like-protein
  misc_feature (1)..(304): Xaa is any amino acid
MPPRQSEGDFLPGLIVDKYVRGVCIQIGTAGMECWRGAIVEALSDIVNPAFIYERSDTASREREGLPSSEGLIAGTLPETLAITENGVKYKADLRAGQKTGFFFDQRENRALLRRYAAGRNVCDCFSYSGGFAINAALGGASSVIAVDSSEDAGNCLSENARLNDVSDIAKFQKSDAFAFLRQLPPGCDGSSIDLLILDPPKFANHPSEVDRAARGYKEINLAGLRALAPGGILFTFSCSGAVDQYLFRQIVFGAAADARRNVQILHVLTAGPDHPINIAHREGEYLKGLVLRVQSFKFFKIKI

SEQ ID NO: 11809 - DNA, 1011 bp, Unknown
  Obtained from environmental sample
  misc_feature (1)..(1011): n is a, c, g, or t
ttgatcgcgagaattcgctcagttcatgtgacgactacgatgacgtacgagatcgccttgtcgcctaaggaggtttcgttcgggttgctgcaaatgccgttcgcgcagcctgccgcgaagaccgtaacgataaccaatatcggcacgggcgatgttaagttgacgccgcctgagtctgaaaattacgaaatcggaaagctgacgccgacagacgtcgtaggggccggcaagacggcgacctttaccgtccgtcccaaaacgacgctgactgtgccgtccgataaagagatcgaaatattcgacgaggtgatagcgatcacgggcgtcggtgataaaacgaacccggccgtagcggcgagcggcgattatgaggtatcggtcaagttcacggtgaggaaggcgccgggaatagtgatcacctcccagcccgctccgagcacgtatgttcctttcggcgcgattaccggcagtctggatgttaaggcgctgattaaccgtgacttggattctatggtctttaagtggtacaagccgacttcggcggtcgccacgggcgggactttggttgcgacgacaaaggtgataccgtatacggcgggcgatgagacactttgttctttcccgatacagacgaacctcgcggcgggcgtgcactactactatgttgcggtctcggcgcccggcgcggcggaggtgaagtcggatttggctatggtgacggtctcctcgatcaaggtgacgccgcttgagatgtttgtgccggtggtatatgacgaagagagcaatcctccgtacatacagccggccgcgcagacggttaagattaccaacgtgngcggctccgcgattacgctgcagcagcccgcgtctagcgagacgaattcgagttacatcatcagccagttgtcgtccgcgagtttggctgccggcagggacgtgacctttaccgtgcagcctaagggcagggtgctcgnagacgcgcctcccgaaggcaggtatatgatgaggtga

SEQ ID NO: 11810 - protein, 336 aa, Unknown
  Obtained from environmental sample
  misc_feature (1)..(336): Xaa is any amino acid
MIARIRSVHVTTTMTYEIALSPKEVSFGLLQMPFAQPAAKTVTITNIGTGDVKLTPPESENYEIGKLTPTDVVGAGKTATFTVRPKTTLTVPSDKEIEIFDEVIAITGVGDKTNPAVAASGDYEVSVKFTVRKAPGIVITSQPAPSTYVPFGAITGSLDVKALINRDLDSMVFKWYKPTSAVATGGTLVATTKVIPYTAGDETLCSFPIQTNLAAGVHYYYVAVSAPGAAEVKSDLAMVTVSSIKVTPLEMFVPVVYDEESNPPYIQPAAQTVKITNVXGSAITLQQPASSETNSSYIISQLSSASLAAGRDVTFTVQPKGRVLXDAPPEGRYMMR

SEQ ID NO: 11811 - DNA, 648 bp, Unknown
  Obtained from environmental sample
  misc_feature (1)..(648): n is a, c, g, or t
ttgtttcctgaacccaatcaatattacaatccgtcaataagacttcaatatctatatgacagagaacacgcgttgaagctgctctccaatgccggatttaaaaaggacttattcggaaatatgcgtgacagtaaaaacaggcgtgtacaatttgatcttaccatacgctcggaaagttcgatgagttcggacatagcgtctattataagggacgagctttcaaaaatcggcataaaattgaatatccgtgttgtggatttccagaaacaggtagaacagttgttctctacctttgattgggattcaatgttaatggggctttccggctcaaatatatttcccagtcagggcagcaatgtatggccgtctcagggaaatcttcatatgtggaaccccaatcaggaaacacccgcaaccgaatgggaagctcgtattgattacctttacaatgaaggacaatttacaattgataccggaaaagcgcaggtaatttgggatgagtttcaatcaatattaattgaacaatgtccaatgatatacctgatgcgttcaaggggattttgggcgcttaacaaccgctgggattttacaaacgtgtattacgataatataaacggcgctgaaaccagttttatacacatcaaataa

SEQ ID NO: 11812 - protein, 215 aa, Unknown
  Obtained from environmental sample
  misc_feature (1)..(215): Xaa is any amino acid
MFPEPNQYYNPSIRLQYLYDREHALKLLSNAGFKKDLFGNMRDSKNRRVQFDLTIRSESSMSSDIASIIRDELSKIGIKLNIRVVDFQKQVEQLFSTFDWDSMLMGLSGSNIFPSQGSNVWPSQGNLHMWNPNQETPATEWEARIDYLYNEGQFTIDTGKAQVIWDEFQSILIEQCPMIYLMRSRGFWALNNRWDFTNVYYDNINGAETSFIHIK

SEQ ID NO: 11813 - DNA, 336 bp, Unknown
  Obtained from environmental sample
  misc_feature (1)..(336): n is a, c, g, or t
atggatgaaaatcaccattacgatcttgcgcttgtaaagaaagacgaaacatacagggtaattttaaaattaaacatcggcgatattaaatatgaaaaatcggttattgctgtttccggtgatgaggcgcagttaaaaattgtttctgacgcaatgaattataaattttactgtaccgaagacggcaaggaaacaatgctgggtactgcgcagactaaatacctttcatccgaagtagcaggcggctttaccggagttgttttaggtctttacagtcagtgcggcggaaacagctttaacgagtttaaagattttaagtgcagttatttatgctga

SEQ ID NO: 11814 - protein, 111 aa, Unknown
  Obtained from environmental sample
  misc_feature (1)..(111): Xaa is any amino acid
MDENHHYDLALVKKDETYRVILKLNIGDIKYEKSVIAVSGDEAQLKIVSDAMNYKFYCTEDGKETMLGTAQTKYLSSEVAGGFTGVVLGLYSQCGGNSFNEFKDFKCSYLC

SEQ ID NO: 11815 - DNA, 615 bp, Unknown
  Obtained from environmental sample
  misc_feature (1)..(615): n is a, c, g, or t
atggacatcttctgtcgccgggaatacaaatgccttctttgggagaaaaccggttttgatttgaagaaaatngaatgcattcttcttcgcgtccgggaaaaaaacaacgcgcaaaaagcgatggcaaaaatgaagaaacttcgtaatgaaggcgacagcgcaggcggcgtaatttcatgtcttgttacgggagcaaccgcaggtctcggagagccggtttttgacaaactggacgcgcgtcttgcctccgccattttgagcataggggcgtgcaagggtattgagttcggcgcgggatttgccgccgccggattaaaggggagcgaaaacaacgatatgcctggcgataacggaaaattcacggcaaataactgcggcggcatattgggcggcatatcttcaggtcaggacattttttttaaagccgctttcaaaccgactccgtcaataagtaaaccgcagaaagctttggacagtgaaggcaggataagagaaattgaaattaaaggccgccatgacgtatgtattgttccgcgcgctgttccggtagttgaagctatgaccgctcttgtacttgttgattttatgttattgtcgcgtgccgcaaagctataa

SEQ ID NO: 11816 - protein, 204 aa, Unknown
  Obtained from environmental sample
  DOMAIN (1)...(200): Chorismate synthase
  misc_feature (1)..(204): Xaa is any amino acid
MDIFCRREYKCLLWEKTGFDLKKXECILLRVREKNNAQKAMAKMKKLRNEGDSAGGVISCLVTGATAGLGEPVFDKLDARLASAILSIGACKGIEFGAGFAAAGLKGSENNDMPGDNGKFTANNCGGILGGISSGQDIFFKAAFKPTPSISKPQKALDSEGRIREIEIKGRHDVCIVPRAVPVVEAMTALVLVDFMLLSRAAKL

SEQ ID NO: 11817 - DNA, 543 bp, Unknown
  Obtained from environmental sample
  misc_feature (1)..(543): n is a, c, g, or t
ttgatacaatatttacagatggttgattttcacacacattcaaatatttctgatggagatttaccccctgccatacttgtcaaagaggcggttaagcaaggtcttaccgccattgctttaactgatcacgacaccattaacggactggaaagcgcgaaaattgccgctaaagaggaaaatatccattttatccccggaattgagataaatattaattggaaaaaagataaatccacgaataatgttccccatggtgtcccaggactcggccccggcggtgagtttcacttgttaggtttagggattaattcgccaacttcggcatttatttcatctattaagagtctcgcacatcgtagggaagtcagaaaccgggagattcttgaccggatggttgaattgagtatgattactcccagcgggcaagatactgtatgggaggaacttttgactattgccgganaagcgtcagttcccaaaggatcgggtaattcacttggacggcctcattttgcggcattgcttataaagcgtaaaatgtaa

SEQ ID NO: 11818 - protein, 180 aa, Unknown
  Obtained from environmental sample
  DOMAIN (8)...(146): PHP domain
  misc_feature (1)..(180): Xaa is any amino acid
MIQYLQMVDFHTHSNISDGDLPPAILVKEAVKQGLTAIALTDHDTINGLESAKIAAKEENIHFIPGIEININWKKDKSTNNVPHGVPGLGPGGEFHLLGLGINSPTSAFISSIKSLAHRREVRNREILDRMVELSMITPSGQDTVWEELLTIAGXASVPKGSGNSLGRPHFAALLIKRKM

SEQ ID NO: 11819 - DNA, 444 bp, Unknown
  Obtained from environmental sample
  misc_feature (1)..(444): n is a, c, g, or t
ttgaaggttgcgaccaaagcatacggcctgattgacgttgacgagcgtcaaaagctcgtcttcccccagggcctgtttggttttgaggaactcaaggactatctgcttcttgacgccgaacgccagcctttctactggctgcagtcaatggacgaggaagacgtggcgtttgtccttgtcaaccctttccttttccggcccgattacgaggttaacatcagcaacgaggagcttgccgggataggcatccgttcgccggaaaaggccctgattttttccatagtaaccatacctccggacggcagccccatgacagcaaaccttcaggggccgctgattatcaaccgcgataccaggatgggaaaacaggcggttcttgcggacgaccgctggaagacgaagcatgacattatggctgaactcgcggcgacggggaatcagtaa

SEQ ID NO: 11820 - protein, 147 aa, Unknown
  Obtained from environmental sample
  DOMAIN (17)...(140): Uncharacterized BCR, COG1699
  misc_feature (1)..(147): Xaa is any amino acid
MKVATKAYGLIDVDERQKLVFPQGLFGFEELKDYLLLDAERQPFYWLQSMDEEDVAFVLVNPFLFRPDYEVNISNEELAGIGIRSPEKALIFSIVTIPPDGSPMTANLQGPLIINRDTRMGKQAVLADDRWKTKHDIMAELAATGNQ

SEQ ID NO: 11821 - DNA, 957 bp, Unknown
  Obtained from environmental sample
  misc_feature (1)..(957): n is a, c, g, or t
atgatttcgaccattcgcaaacgcgacggtaagctcgttccgtatgacaactacaagatagcaaacgcgatttttaaggccgccgaggctgtgggcggcggggatatgtccagggcgcacgatgtggccaagcaggtcgagaacgtcatcgctcagaagtttcacacaaattccataccggctgtcgaggagattcaggacatagtcgagaaggtgctcatagagcttgggtacgcggcggtcgccaaggcctacatcctctaccgcgaccagcgccggcgcgtccgctccactaaggacctcctcctcgacatcgtcagcaccatggacggctacctcaagcaggaggactggcgggtcaacgaaaactcaaacgtcaactactcgctgggggggcttatcctccacaacagcggggcgattacggccaattattggctcgagaacatatacggctgcgacatatccagcgcccaccgcaacggcgacctccatatccacgacctcagcatgttctccggctactgcgccgggtggtcgctgcgccagctgatagccgaggggctgggcggcgtcacggggaagatatcctccaagccgccgaagcacctatctacattaatacagcagatggtcaacttcttgggcatcctgcagaacgagtgggcgggggcgcaggccttctcctctttcgacacataccttgccccgttcgtgcgggtggacaacctctcctacgcggacgtcaagcagcagatacagtcgttcctgttcggcgtgaacacgccctcccggtggggttcgcaggcgccgtttacgaatatcacgctggactggacggtgcccgacgacctccgcgatcagccggcgattgtggggcggggagcccctgccgcagacctacggcgacttccagcgcgaaatggacattgtgaacggggcgtctcgagctcctga

SEQ ID NO: 11822 - protein, 318 aa, Unknown
  Obtained from environmental sample
  DOMAIN (3)...(96): ATP cone domain
  misc_feature (1)..(318): Xaa is any amino acid
MISTIRKRDGKLVPYDNYKIANAIFKAAEAVGGGDMSRAHDVAKQVENVIAQKFHTNSIPAVEEIQDIVEKVLIELGYAAVAKAYILYRDQRRRVRSTKDLLLDIVSTMDGYLKQEDWRVNENSNVNYSLGGLILHNSGAITANYWLENIYGCDISSAHRNGDLHIHDLSMFSGYCAGWSLRQLIAEGLGGVTGKISSKPPKHLSTLIQQMVNFLGILQNEWAGAQAFSSFDTYLAPFVRVDNLSYADVKQQIQSFLFGVNTPSRWGSQAPFTNITLDWTVPDDLRDQPAIVGRGAPAADLRRLPARNGHCERGVSSS

SEQ ID NO: 11823 - DNA, 327 bp, Unknown
  Obtained from environmental sample
  misc_feature (1)..(327): n is a, c, g, or t
ttgggtacgcggcggtcgccaaggcctacatcctctaccgcgaccagcgccggcgcgtccgctccactaaggacctcctcctcgacatcgtcagcaccatggacggctacctcaagcaggaggactggcgggtcaacgaaaactcaaacgtcaactactcgctgggggggcttatcctccacaacagcggggcgattacggccaattattggctcgagaacatatacggctgcgacatatccagcgcccaccgcaacggcgacctccatatccacgacctcagcatgttctccggctactgcgccgggtggtcgctgcgccagctga

SEQ ID NO: 11824 - protein, 108 aa, Unknown
  Obtained from environmental sample
  SIGNAL (1)...(27)
  misc_feature (1)..(108): Xaa is any amino acid
MGTRRSPRPTSSTATSAGASAPLRTSSSTSSAPWTATSSRRTGGSTKTQTSTTRWGGLSSTTAGRLRPIIGSRTYTAATYPAPTATATSISTTSACSPATAPGGRCAS

SEQ ID NO: 11825 - DNA, 501 bp, Unknown
  Obtained from environmental sample
  misc_feature (1)..(501): n is a, c, g, or t
ttggctcgagaacatatacggctgcgacatatccagcgcccaccgcaacggcgacctccatatccacgacctcagcatgttctccggctactgcgccgggtggtcgctgcgccagctgatagccgaggggctgggcggcgtcacggggaagatatcctccaagccgccgaagcacctatctacattaatacagcagatggtcaacttcttgggcatcctgcagaacgagtgggcgggggcgcaggccttctcctctttcgacacataccttgccccgttcgtgcgggtggacaacctctcctacgcggacgtcaagcagcagatacagtcgttcctgttcggcgtgaacacgccctcccggtggggttcgcaggcgccgtttacgaatatcacgctggactggacggtgcccgacgacctccgcgatcagccggcgattgtggggcggggagcccctgccgcagacctacggcgacttccagcgcgaaatggacattgtga

SEQ ID NO: 11826 - protein, 166 aa, Unknown
  Obtained from environmental sample
  misc_feature (1)..(166): Xaa is any amino acid
MAREHIRLRHIQRPPQRRPPYPRPQHVLRLLRRVVAAPADSRGAGRRHGEDILQAAEAPIYINTADGQLLGHPAERVGGGAGLLLFRHIPCPVRAGGQPLLRGRQAADTVVPVRREHALPVGFAGAVYEYHAGLDGARRPPRSAGDCGAGSPCRRPTATSSAKWTL

SEQ ID NO: 11827 - DNA, 504 bp, Unknown
  Obtained from environmental sample
  misc_feature (1)..(504): n is a, c, g, or t
atggtggcgatgttggcctgccggggtacccatgaaaaggcgctgttaaaaggggagtacataggcgtaaaaagctgcagggccgcgaaaatttccaccggaagcatcaaacgctgtacctggggctgccagggttttggcgactgtacaagggtatgcaagtttggcgcaatctcgctgggcgaggacgggctgccccacattgacagcgaacgctgtaccggctgcagagcctgcgcgaatgaatgtccccagcacatcatctgggtaattcccagagatttaaaaggctcgcgcccccagtgttccaacttgaacgtcaacaaggcaatggtagccaaaaactgcaaaaacggctgtattaaatgcgagctttgcgtaaagaactgtccggagcaatgcataagaatggcaaacggcataccggttgttgacaatgcaaaatgcaccggttgcggggcctgcgttagtaaatgcccgatgaaggtaatgacattgctgtag

SEQ ID NO: 11828 - protein, 167 aa, Unknown
  Obtained from environmental sample
  DOMAIN (66)...(89): 4Fe-4S binding domain
  misc_feature (1)..(167): Xaa is any amino acid
MVAMLACRGTHEKALLKGEYIGVKSCRAAKISTGSIKRCTWGCQGFGDCTRVCKFGAISLGEDGLPHIDSERCTGCRACANECPQHIIWVIPRDLKGSRPQCSNLNVNKAMVAKNCKNGCIKCELCVKNCPEQCIRMANGIPVVDNAKCTGCGACVSKCPMKVMTLL

SEQ ID NO: 11829 - DNA, 816 bp, Unknown
  Obtained from environmental sample
  misc_feature (1)..(816): n is a, c, g, or t
atgaaaaaatcaaaaaaggaagatatatacaactgtacctgctgcggttacggaagctgcaaggcgatggcgacggcaatttacaacggactgaacaaacatgaaaattgcgcccattatattctcgccttgctcagggagaatcaggaacacatagccaacgcttcagaacttattgaaaggataaacaatttaatccaggaattgaacgatactatcagctcacaggcggcggcagttgatcactcctcggttgaaaccgaagaaatagtcgcctcgattaaagacacctcggaaatgtcccttaaacagcaggaatcagtaaaaggattgatagaaattgcgggacatggacaggaatccatgagaaaaaccattcaatcaataaatgagatttcccaacatgttgaaggcataagttcggcaatccgcataatttcttcaatagcggcaaataccaatttgctgtcaatgaatgcggcgattgaagccgcccatgccggagacgccggaaggggctttgcggtagtcgccggagaaatacgccgtctttcggaaaccaccagggaaaattcagtaagtatttcccatacgcttacaaatattatcaacggaatatccgacacgacaaaacaatccggcgaaacagacacgcgaatagcccaaatgtccaaagagttaagcgggtttgccgaaactatgtctgtctttttaaacacatttaatgaattatcggcaaaaagcggaaacattaccgtctcccttgtaagcctgaaagagcaaagttcggcggtaaaacaagttatgcgcaaatga

SEQ ID NO: 11830 - protein, 271 aa, Unknown
  Obtained from environmental sample
  DOMAIN (74)...(271): Methyl-accepting chemotaxis protein (MCP) signaling domain
  misc_feature (1)..(271): Xaa is any amino acid
MKKSKKEDIYNCTCCGYGSCKAMATAIYNGLNKHENCAHYILALLRENQEHIANASELIERINNLIQELNDTISSQAAAVDHSSVETEEIVASIKDTSEMSLKQQESVKGLIEIAGHGQESMRKTIQSINEISQHVEGISSAIRIISSIAANTNLLSMNAAIEAAHAGDAGRGFAVVAGEIRRLSETTRENSVSISHTLTNIINGISDTTKQSGETDTRIAQMSKELSGFAETMSVFLNTFNELSAKSGNITVSLVSLKEQSSAVKQVMRK

SEQ ID NO: 11831 - DNA, 732 bp, Unknown
  Obtained from environmental sample
  misc_feature (1)..(732): n is a, c, g, or t
gtgctggcgcgtaaccaggtggcgatatatcctacagtcgggggcaagctgatggaatcccgcataggcataggggacagggtcggcataggcaacgtggtggcgatggtggatccctcgcggcccggcgaggtttattcgctcagccctgttgtttccaccatatcagggacagtgctgcaggcgccttacagtatcggcgataccgtttcggcgcagtcatccctgtttgtggtgggcgacctttccgtcctgcgcgtggaaacctttgtgccggagcgttttgtctcgtcgataaggctggggcttggcgctgaggtgagtcttgaggctcttcccggtgaaaccttttccgccgagatagatgaggtaagccccgtgcttgatccggcaagccgcaccctgagaataaagctccgctttgtggacagggcgggcagaggcgcgacggatccccggattaaggcggggatgttcgcgacaatcagccttgttaccaggaccagagccaatgtgccgatcatacccagaacctcggcaatcaatacctacggctcgtggatagcttttattattgatgaaaataatattgcccgcaggcgaacgctggaattgggcatagaaaacgaaagattttttgaagtgctgagcggcatcaatcccggggacaaggttgtaaccgccgggcagaattttcttacggacggcgaccctgtccgcattgtggaataa

SEQ ID NO: 11832 - protein, 243 aa, Unknown
  Obtained from environmental sample
  misc_feature (1)..(243): Xaa is any amino acid
MLARNQVAIYPTVGGKLMESRIGIGDRVGIGNVVAMVDPSRPGEVYSLSPVVSTISGTVLQAPYSIGDTVSAQSSLFVVGDLSVLRVETFVPERFVSSIRLGLGAEVSLEALPGETFSAEIDEVSPVLDPASRTLRIKLRFVDRAGRGATDPRIKAGMFATISLVTRTRANVPIIPRTSAINTYGSWIAFIIDENNIARRRTLELGIENERFFEVLSGINPGDKVVTAGQNFLTDGDPVRIVE

SEQ ID NO: 11833 - DNA, 492 bp, Unknown
  Obtained from environmental sample
  misc_feature (1)..(492): n is a, c, g, or t
gtgaacgaggcggtcgacgcggcgtcgcacggctcgctgaagcaggtaacattgtactccatcatgcaggaccccatgacaagctgcggctgtttgagtngcatntgcggcatagagccgacatcgggcggtgtcgtcattgtgaaccgcgaacattccggcatgaccccgctgggcatgaccttttccgaaatggcgtcaatgaccggcggcggcgtgcagacgcccggctttatggggcacggaaagcattttatttcatcgaaaaaatttatgaaagccgaaggggggatcgccagaatcgtgtggatgccccgcgccttgaaagaacaggtgggcaaaaaactcaacaagaccgcgcaggaactgtacaacatcgaagattttacatcaatgatagccgacgagtcgtccaccgaagacccggagaaactggtgcaagtgctggttgaagccggccatccggtgctgagtttgccggctctaatatag

SEQ ID NO: 11834 - protein, 163 aa, Unknown
  Obtained from environmental sample
  DOMAIN (1)...(162): CO dehydrogenase/acetyl-CoA synthase complex beta subunit
  misc_feature (1)..(163): Xaa is any amino acid
MNEAVDAASHGSLKQVTLYSIMQDPMTSCGCLSXXCGIEPTSGGVVIVNREHSGMTPLGMTFSEMASMTGGGVQTPGFMGHGKHFISSKKFMKAEGGIARIVWMPRALKEQVGKKLNKTAQELYNIEDFTSMIADESSTEDPEKLVQVLVEAGHPVLSLPALI

SEQ ID NO: 11835 - DNA, 639 bp, Unknown
  Obtained from environmental sample
  misc_feature (1)..(639): n is a, c, g, or t
ttggacaagcgcattccccctggatcggggcttgggggaggttcttccgatgccgccgctgcccttctggccctgaatctgctttccggcacacccctttccatgcaaagcctgacggaaatggccgccgttttagggagcgatgtcccttttttccttacagggggggctgcttttgtcagcggacggggagaaacggtagaaccggtaaaatcacctggccaactgtgggttgtcttggtaaagcccgcgtttaaaagcgacacagccctagcttacagtctgcttgaccgtttaaggaaaaaaggaattattgtagaaaaagcgagaattcccaaggaaactttaattcttgccctggaagacgacagcgagaaatggccttttttcaatgattttttgccggtttttctctgcaaggaacattctgaatttgcggatatttacgggggtattttggggtctctgaacggttcaggtgcctcttttgccggcatttctggttccggctcgtgttgctttggtattttttgcacaaaaattaaggcggaaaaaacggtggaaaggcttcggaaggaaggaaatattgccatatctactttttttcttgcacacagagccgatccggtattagaataa

SEQ ID NO: 11836 - protein, 212 aa, Unknown
  Obtained from environmental sample
  SIGNAL (1)...(20)
  DOMAIN (1)...(56): GHMP kinases N terminal domain
  misc_feature (1)..(212): Xaa is any amino acid
MDKRIPPGSGLGGGSSDAAAALLALNLLSGTPLSMQSLTEMAAVLGSDVPFFLTGGAAFVSGRGETVEPVKSPGQLWVVLVKPAFKSDTALAYSLLDRLRKKGIIVEKARIPKETLILALEDDSEKWPFFNDFLPVFLCKEHSEFADIYGGILGSLNGSGASFAGISGSGSCCFGIFCTKIKAEKTVERLRKEGNIAISTFFLAHRADPVLE

SEQ ID NO: 11837 - DNA, 459 bp, Unknown
  Obtained from environmental sample
  misc_feature (1)..(459): n is a, c, g, or t
atgaaacatagaagaggctttaatcccctggagcggatgtccgctcaccggaaagccctgcaccgcaatatggtcacgtccctgttcaggtacgagaggatcagaaccacaaaagtaaaagcccaagctgtaaggcgcagtgcggaaaaactgatcacccgtgcaaaggttgacagcgttcacaaccgaaggattgtttcaagccgcctttatgatgaaggcatagtggcgaagctttttaccgacattgcgcttagaatgaaggaaaggcccggcggctataccaggataattaaactgggcgagaggtacggagacgctgccgaggttgtcgttcttgagttggttgactacaaactgaatgcggacgaagcatctgacaaaaaggccaagaaagacgcanagaaggctgaaaagaaagaaaccaaaaaagagaaagccaaagaggagaagaaataa

SEQ ID NO: 11838 - protein, 152 aa, Unknown
  Obtained from environmental sample
  DOMAIN (20)...(116): Ribosomal protein L17
  misc_feature (1)..(152): Xaa is any amino acid
MKHRRGFNPLERMSAHRKALHRNMVTSLFRYERIRTTKVKAQAVRRSAEKLITRAKVDSVHNRRIVSSRLYDEGIVAKLFTDIALRMKERPGGYTRIIKLGERYGDAAEVVVLELVDYKLNADEASDKKAKKDAXKAEKKETKKEKAKEEKK

SEQ ID NO: 11839 - DNA, 642 bp, Unknown
  Obtained from environmental sample
  misc_feature (1)..(642): n is a, c, g, or t
atggaaaaagaccaaaacgattttttggaaaaaataagctctatttcacaagatgatcgtgaaagaattctaaaggcgatagcctggactgaaagagaatccataagagctaaaaccgagatcgcatctattttaatggatcttaaccttgatacagatacactaatcgccgctttgttggcggaagcaggcatcaagacagtcgacacaaaagaacaggaagaaaagctttcgtcccttttcggcagccaaactgccatgctgataatgaacttcgccaaaatttcccggctgtccgctacaaacaaaactatcctcgaggcagaaaatatcagaaacatgcttttggccctgactgatgatatacgtgttatcctgattacactggcggaaaagctgtacctgctgagaatgccggatactatccctgacgaanaacgaaaaagctttgcccaggaatgtctcgatatctacgctcctttagccaaccgtttgggcatttccagaatcaaggacgagctggaagacctctcccttaaatatctcaaccgcgaggtatatcagcagataaaggatattgtctccgcgaagcgtgcggaacggattaaatttctttccgagcaagggaggctctcattatag

SEQ ID NO: 11840 - protein, 213 aa, Unknown
  Obtained from environmental sample
  misc_feature (1)..(213): Xaa is any amino acid
MEKDQNDFLEKISSISQDDRERILKAIAWTERESIRAKTEIASILMDLNLDTDTLIAALLAEAGIKTVDTKEQEEKLSSLFGSQTAMLIMNFAKISRLSATNKTILEAENIRNMLLALTDDIRVILITLAEKLYLLRMPDTIPDEXRKSFAQECLDIYAPLANRLGISRIKDELEDLSLKYLNREVYQQIKDIVSAKRAERIKFLSEQGRLSL

SEQ ID NO: 11841 - DNA, 450 bp, Unknown
  Obtained from environmental sample
  misc_feature (1)..(450): n is a, c, g, or t
atgggcgttgtcttgccaaaagaagaattcttgcgcggtttaaaagagttatgtgaaaaatacggagcattgttgatctttgatgaagtaattaccggttttcgtttgggcaaaggcggagctcaggaatattacggtgttgccggcgatttggtcacttatggtaaaatcataggcggcggtttaccggtgggggcttacggaggcaggaaggaaattatggagcttgtttctccaagcggccctgtttatcaggcgggaactctttccggtaatcctgtcgctatggcggcagggcttacacagcttgaaatgcttgaaaagcaggatgtttacacccatatcaatagtttgggagaaaaactcagcgccgggcttaaggaaatagtacgcaataaaggcgttaaagccgtgtgtaaaccgatattggctcccttgtctgtttattag

SEQ ID NO: 11842 - protein, 149 aa, Unknown
  Obtained from environmental sample
  DOMAIN (1)...(141): Aminotransferase class-III
  misc_feature (1)..(149): Xaa is any amino acid
MGVVLPKEEFLRGLKELCEKYGALLIFDEVITGFRLGKGGAQEYYGVAGDLVTYGKIIGGGLPVGAYGGRKEIMELVSPSGPVYQAGTLSGNPVAMAAGLTQLEMLEKQDVYTHINSLGEKLSAGLKEIVRNKGVKAVCKPILAPLSVY

SEQ ID NO: 11843 - DNA, 972 bp, Unknown
  Obtained from environmental sample
  misc_feature (1)..(972): n is a, c, g, or t
atggaaattgtccgcgcgcaagggggcattgcgggcttaacaagccaggtgtccggcaaggcgtatctggacttgttggatgtccgcgagcctgttctgttatgcggcatagacgcggacagctatttcacgcttttccctggaattaatatcgaagaagggcgctttttggtttcgaatgaatacggcgccatgattactgttgaacgcgccgaaagaatcgaaacccaaagcgggcagtatccgcaaataggtatgcctttgttatttacatcaggcggcgcggttggttttaaaatacgggaagtccccttggttgggattttttcttacgccaaccccggacaatttatgaacgagattgttattatagacccgcagaccgtccgtgttcttaattccatacaagtggcaggttctcaaaatgtcgagttaggtgaagatgctcttgctctgttaaatgcaaatgccgatgatatttttaacgatatattttcggcacatgaagatgagacaacttcgggaatattttccgccgagactcttcaggcttatttgtcggaaaataaaacggaagataatgttaacctttcaggcggcgactggaattttatcattcttaaacttgaaaaaaataaaaacacgcgctcttttatttcgtccttaaacaaaaagctggaaccttacggcgttaccgcggtagactggcgtattgccgccggaacttccgcgattttattgctgttaattcaggctttgtttaatatcggagtttttcttgtttgtattgccggcgtaataaccgtaattaatattttgttaatcggggttttccgccgtacccgcgaaataggcacattacgcgcaatcggggcgggcgatttttacattgcgtcccttattcttcaggaaaatcttttgcttacggcctttgccggcgccgcgggaattttcggcggcatttattcataa

SEQ ID NO: 11844 - protein, 323 aa, Unknown
  Obtained from environmental sample
  misc_feature (1)..(323): Xaa is any amino acid
MEIVRAQGGIAGLTSQVSGKAYLDLLDVREPVLLCGIDADSYFTLFPGINIEEGRFLVSNEYGAMITVERAERIETQSGQYPQIGMPLLFTSGGAVGFKIREVPLVGIFSYANPGQFMNEIVIIDPQTVRVLNSIQVAGSQNVELGEDALALLNANADDIFNDIFSAHEDETTSGIFSAETLQAYLSENKTEDNVNLSGGDWNFIILKLEKNKNTRSFISSLNKKLEPYGVTAVDWRIAAGTSAILLLLIQALFNIGVFLVCIAGVITVINILLIGVFRRTREIGTLRAIGAGDFYIASLILQENLLLTAFAGAAGIFGGIYS

SEQ ID NO: 11845 - DNA, 465 bp, Unknown
  Obtained from environmental sample
  misc_feature (1)..(465): n is a, c, g, or t
atgcaaaaaataacaagttttcaggttgatcatatacgtttaaagccaggcgtttttgtttcgcgtaaagacaaatatggagacgtaatacttaccacttttgatattcgttataaagctccgaacagagaaccggttattgatcaaccggcattgcatactattgagcatcttggcgctacgtttctgcgttcccacaacgaatggagtaaaaaggttgtgtacttcggcccaatgggctgccgcacaggtttttacatgattttggaaggcgattataaatctgacgatgttcttcccttgttaattgaaatgtatgattgggtagataaatttgaaggcgacattcctggagcttctcccgccgaatgtggtaactggcgtgaacaaaacattgatatggcaaaatgggaatgtaaaaggctcgctgatattttgcggaatcccttcaagagaaatccttga

SEQ ID NO: 11846 - protein, 154 aa, Unknown
  Obtained from environmental sample
  DOMAIN (2)...(154): S-Ribosylhomocysteinase (LuxS)
  misc_feature (1)..(154): Xaa is any amino acid
MQKITSFQVDHIRLKPGVFVSRKDKYGDVILTTFDIRYKAPNREPVIDQPALHTIEHLGATFLRSHNEWSKKVVYFGPMGCRTGFYMILEGDYKSDDVLPLLIEMYDWVDKFEGDIPGASPAECGNWREQNIDMAKWECKRLADILRNPFKRNP

SEQ ID NO: 11847 - DNA, 702 bp, Unknown
  Obtained from environmental sample
  misc_feature (1)..(702): n is a, c, g, or t
gtgtttttcctgttcccactcaggttcaaaaagggatgtggttatcccgacggtgaagggacagcccttgtaggccccaccgcggacgcggtacttgataaaaataatttttcaactacttccaaacatctggaacagataatagtttcaggaaaaacgatgataccctctttaagtcataacgacgttatcactaatttcgcggggcttcgtccttgtcttggagaggatttttatattgaggcttcaaaaaaagttcccgcttttgtgcaggttgcggggattcaaagtcccggacttacggcatcgcccgcaatagccgagtatgtaaaaaatattttagtcgatatgggattacagctaacggaaaagccgcattgggacccctatgtggaaaatcacccgaaagccagagaacttgactttgaagagcttgatgattatatcgccaaagattctacgtggggcagtattgtctgcagatgtgaaaatgtcagcgaagcggagattattcaggctgtaagattgggacacacgacattggacggggtaaaatattttacccgcgcccaaatgggacgctgtcagggtggcttttgcacttacaagataataaaaataattatgagggaagccaatctttcctgggaagaagttacaaagcatggcggtaaaagcagaatattggacggtgtgttatga

SEQ ID NO: 11848 - protein, 233 aa, Unknown
  Obtained from environmental sample
  DOMAIN (157)...(212): BFD-like [2Fe-2S] binding domain
  misc_feature (1)..(233): Xaa is any amino acid
MFFLFPLRFKKGCGYPDGEGTALVGPTADAVLDKNNFSTTSKHLEQIIVSGKTMIPSLSHNDVITNFAGLRPCLGEDFYIEASKKVPAFVQVAGIQSPGLTASPAIAEYVKNILVDMGLQLTEKPHWDPYVENHPKARELDFEELDDYIAKDSTWGSIVCRCENVSEAEIIQAVRLGHTTLDGVKYFTRAQMGRCQGGFCTYKIIKIIMREANLSWEEVTKHGGKSRILDGVL

SEQ ID NO: 11849 - DNA, 954 bp, Unknown
  Obtained from environmental sample
  misc_feature (1)..(954): n is a, c, g, or t
atgtacggcggtatgcggtatgttttcagcagtcttgggcaagaacttgaaaacggagccattgtactgtcaagaggcagctcctttatcgcttatagagcaaggggcaaacacagggcgtttgatccggcggattatgtaattgcgcaggtaagtaactatgactctatcattagaacatggcaaaccgaaaactttaaccgctggaatcaaacggcggcaagtttacaatatgaggacgatattatcgcatacggcgcacaatcgctttcacgcggcaattatctaaatgccttagggttaatttccgaaaatttcataaacagcccgaaacaaacctacagatccgctgtgtttgtcggaggaaccgcaaatgcgtatcgttcattatcttcttatgagaacgaaaaaaacagtttgattaaccgtttagtcaaggaaaaatctttaaacttcttaaaggaagaacaccttcttgatttccttttcacaagaaacaaccttgtccttgcgaacgaagttatcaatattattaataacgcctctcccgacgcgcttgtttccgatcattgtcccggactgttggaagtttactatgatttaaaacgatggagaaccgacgcaactaaccccatagaacatcttacaagccggatgctttcgctgatttccgataatttaaatcgtgacaccgaaaaaggagccgtttacgctacaagccaggaaagtaataattccgaatacagcatgaggcttggaaaagctcttgttttctgggcgaactcaacacaaaacaccgaatggtcagagataggccgctctttaattttatcggcaatcgcaaacggaaacgccggaagactcccacatatactgaaccccacggattattacccgagagcgtcgtggcttacaaacgaaggcatttgggtatggacagcttctcccacgtaa

SEQ ID NO: 11850 - protein, 317 aa, Unknown
  Obtained from environmental sample
  misc_feature (1)..(317): Xaa is any amino acid
MYGGMRYVFSSLGQELENGAIVLSRGSSFIAYRARGKHRAFDPADYVIAQVSNYDSIIRTWQTENFNRWNQTAASLQYEDDIIAYGAQSLSRGNYLNALGLISENFINSPKQTYRSAVFVGGTANAYRSLSSYENEKNSLINRLVKEKSLNFLKEEHLLDFLFTRNNLVLANEVINIINNASPDALVSDHCPGLLEVYYDLKRWRTDATNPIEHLTSRMLSLISDNLNRDTEKGAVYATSQESNNSEYSMRLGKALVFWANSTQNTEWSEIGRSLILSAIANGNAGRLPHILNPTDYYPRASWLTNEGIWVWTASPT

SEQ ID NO: 11851 - DNA, 600 bp, Unknown
  Obtained from environmental sample
  misc_feature (1)..(600): n is a, c, g, or t
gtgattttttccgtggtcagcaccttaatcacggaagaggtttatttttcctgccttgaggacgccgggttttcaagcaaaaccaaggcaagccttgccgatgatttgatagccttatgggacagcggggtagatttacggggtatccgccacttgtccgcgcttacttccctatggcttgcccgtgaagccgcccctcccagctttggaacaatggacggtaacacggaactattgaggattacgatagacatggatgacgactggcgggattttctgatggtggaagcaagcaataatgaggccagatgggctttggaagaatttcttttcggcctttcatgggaagaaataaaagaagtccgatcaacattaacccgctttggcattaacgccgttaactacgatcaaatacgctcatatctggattccaggccggcctattctgtggtgaatgacgaagatccaagggcgttttacgattttttcatcgaacggagggatgcctgcaccttccgcaagaagatgtcagccccagggcccaggcatacgcttgaagaaatttatctgaaataccggatcattacggaacttcgatga

SEQ ID NO: 11852 - protein, 199 aa, Unknown
  Obtained from environmental sample
  misc_feature (1)..(199): Xaa is any amino acid
MIFSVVSTLITEEVYFSCLEDAGFSSKTKASLADDLIALWDSGVDLRGIRHLSALTSLWLAREAAPPSFGTMDGNTELLRITIDMDDDWRDFLMVEASNNEARWALEEFLFGLSWEEIKEVRSTLTRFGINAVNYDQIRSYLDSRPAYSVVNDEDPRAFYDFFIERRDACTFRKKMSAPGPRHTLEEIYLKYRIITELR

SEQ ID NO: 11853 - DNA, 483 bp, Unknown
  Obtained from environmental sample
  misc_feature (1)..(483): n is a, c, g, or t
ttgagcttttccattattgatattgtttttgtgggactaattgggctttttatgatccgctgttatctgaaaggttttgtcagcgaacttttatccatggcggctgtggtgcttggacttcttgccgcgttatttttccatagaaacggcggtgagtttttaaaaaatcaattctggcatgatacaaatattgtaattttgaaagtcgcggcgtttgtcatcttatttatttttgtttttgtagttgttaaaatagtagaaagaatgttaattaatattattgatgaagtaagccttacaaacgccgacagttatctcgggataattttcggcttggcggaaggtttggcggtggtaagtttgatacttttcttgttaagaatacagccgctttttgattccacagcaatgttaaacgacagtattttcgcgcggtatttattgcctttgattacaggaaaggagaaagttttaggtgtttga

SEQ ID NO: 11854 - protein, 160 aa, Unknown
  Obtained from environmental sample
  DOMAIN (5)...(160): Colicin V production protein
  misc_feature (1)..(160): Xaa is any amino acid
MSFSIIDIVFVGLIGLFMIRCYLKGFVSELLSMAAVVLGLLAALFFHRNGGEFLKNQFWHDTNIVILKVAAFVILFIFVFVVVKIVERMLINIIDEVSLTNADSYLGIIFGLAEGLAVVSLILFLLRIQPLFDSTAMLNDSIFARYLLPLITGKEKVLGV

SEQ ID NO: 11855 - DNA, 519 bp, Unknown
  Obtained from environmental sample
  misc_feature (1)..(519): n is a, c, g, or t
atgttttgtttctccgcccccggcgacgccgaggaaagcgccgaggcatgggcaatggcgatggataacataaaaggtcctacagtcatcgccctttcacgtcagaatatcacggtcttccccaaggccgaccccgactggaaaaacacgatccgcgtcggcgcgtacatcgccaaacaggttgagggggcgcctgacatcgtaatcatcgccacaggctcggaagtaggcatggcgctggaagcctctgcaaaggcatcggacaaaaagatccgcgtagtctctatgatcagcaaggagcttttcgaatcccagcccgcggctatccgcgacgcgatgatcccccccggcgcgcgggtcatagtcagcgaggccggcgtaaaattcggctgggaacgctgggctaaaccggaggacatccaatcaatagaacgcttcggcgagtccggccccgcggcaaaagtcgccgaacacctgggaatgacggtggaggggctggtgaagataattaacaggtaa

SEQ ID NO: 11856 - protein, 172 aa, Unknown
  Obtained from environmental sample
  DOMAIN (55)...(166): Transketolase, C-terminal domain
  misc_feature (1)..(172): Xaa is any amino acid
MFCFSAPGDAEESAEAWAMAMDNIKGPTVIALSRQNITVFPKADPDWKNTIRVGAYIAKQVEGAPDIVIIATGSEVGMALEASAKASDKKIRVVSMISKELFESQPAAIRDAMIPPGARVIVSEAGVKFGWERWAKPEDIQSIERFGESGPAAKVAEHLGMTVEGLVKIINR

SEQ ID NO: 11857 - DNA, 660 bp, Unknown
  Obtained from environmental sample
  misc_feature (1)..(660): n is a, c, g, or t
atgttgctttgcggtttgcaaagccacaaaagnttttttttaagggcaggaattaatttgaaagcagtaaaaacaagccatccgaaggatgaccctccccccagttttaagactgtgtgggcgattttgcaggatgtagcaaaaaagcaaatagaattggtcgaaagccaaaaggaaactgaccgaaaaatgcaggaaactgaccgcataatgaaggaaaacgccaaacatctgggtaaactcgacaaacgaatgggcgatgttgtggaatatacggttgcgcctaatctacaggaaaaattcagggaattgggctataattttccccaaaccaatcaaaattcaaaagttgccgattatgataataatatattccttgaaattgacgtaaaactagaaaacggcgataaagtcatgcttgtcgaagtaaaaaccaaccttaccacccaagatgtgaaagatcatgttaaacgccttgacaaaatgcgtgtatatgccgatttgcacggcgataaacgcgcttttttagggtctgttgcgggggtggtaatgacgaaaaatgcaaaagagtacgcgctaaaacaaggcttttttgttatagaaccttccggggaaacctttaatattatttcgccgggcaataaacccaaagaatggtaa

SEQ ID NO: 11858 - protein, 219 aa, Unknown
  Obtained from environmental sample
  misc_feature (1)..(219): Xaa is any amino acid
MLLCGLQSHKXFFLRAGINLKAVKTSHPKDDPPPSFKTVWAILQDVAKKQIELVESQKETDRKMQETDRIMKENAKHLGKLDKRMGDVVEYTVAPNLQEKFRELGYNFPQTNQNSKVADYDNNIFLEIDVKLENGDKVMLVEVKTNLTTQDVKDHVKRLDKMRVYADLHGDKRAFLGSVAGVVMTKNAKEYALKQGFFVIEPSGETFNIISPGNKPKEW

SEQ ID NO: 11859 - DNA, 882 bp, Unknown
  Obtained from environmental sample
  misc_feature (1)..(882): n is a, c, g, or t
ttgtcacgcttggggcgggaaacaactggccgctcggcgttaaactttttaaatattttagttctaagaatgaggaaaaacatggttagtatgacaggttacgcgtaccgcgaaaaatcaggacaggaattatcggtctctgtggaaattaaaggctgtaacagccgctatctggaaatatccgtaaatcttccgccgtggctttcaatgctggaaatgaaaatccgcgaaaaaatttcatcggactgcggcagggggaaagtcgatatttttgtccgtgtcagggagcataacgcgcctgtcaacataagcgtaaataaaaacgcggcaaaggcttattacaacgcgattaatgagacggcgaaagaactcggcataaaagaaaaacccgccctgtctgcaattttgggaatggaaaatgttttagagatagaaaaaaaccgcgatgaagaacgctactggcgggaaattgaaccgctgttgattgaggctgttaaaattttttgcgaggagagggagagagagggcaagcatacgcaggacgatattatttctcatcttggagcgatagaatcatcgttaaaaaaagtttcctcatttgctcccgtgattgagcaaaccttaaaagaaaacattaaaacgcggtttgcggaattgcttgngaatcagattgatgaaaacaggatacttgccgaaaccgcttcacagcttttaaagtatacaatttccgaggaaatctcccgcctttcatctcaccttgcggaattcagggncggagaccgaaaaaatccgcgacctggtaaaaactggattttcttgtcaggaaataaccgcgaagtcaacacaatcggttcaaaaagcgctatattgaaagtaccatga

SEQ ID NO: 11860 - protein, 293 aa, Unknown
  Obtained from environmental sample
  DOMAIN (228)...(292): Domain of unknown function (DUF1732)
  misc_feature (1)..(293): Xaa is any amino acid
MSRLGRETTGRSALNFLNILVLRMRKNMVSMTGYAYREKSGQELSVSVEIKGCNSRYLEISVNLPPWLSMLEMKIREKISSDCGRGKVDIFVRVREHNAPVNISVNKNAAKAYYNAINETAKELGIKEKPALSAILGMENVLEIEKNRDEERYWREIEPLLIEAVKIFCEEREREGKHTQDDIISHLGAIESSLKKVSSFAPVIEQTLKENIKTRFAELLXNQIDENRILAETASQLLKYTISEEISRLSSHLAEFRXGDRKNPRPGKNWIFLSGNNREVNTIGSKSAILKVP

SEQ ID NO: 11861 - DNA, 768 bp, Unknown
  Obtained from environmental sample
  misc_feature (1)..(768): n is a, c, g, or t
ttgaatttaaacgatttgtcttataaatggctgcgtccgcttgaagacgtattctctacggaattattgaaaataaatgaggaaataaaaaaagaagttcccaaaatagaatattatgcgagaccccaaactaaacattataataataatatcgttaaacctcatgttttgattgctgtttttcccggtatcaacagcgaatacgatcttgcgaaacagttcaatgaggcgggcgccaaaacagatatatttgtatttggaaatttaactccgcaagcaataaaagaatctattgatattttagcggacaaaattaaagagtcgcaaattttaatgcttcccggcggattctccggcggcgacgagccggatggttctgctaaatttattacggcggtatgcagaaatcctaaaataaccgaggcgattcgcgagttgttactcagtaaagacgggctgattatgggaatttgcaacggtttccaggctctcataaaattagggcttctgccttacggagatataaaagaaattatgaacgaaaacgatccgactttaacttttaatagaataggcagacatcagtcgtatattgcgtacacgcgtgttgcttccgtgaaaagtccgtggtttaacggcgtanaagtaggggatatacacgcgattccaatatcccatggcgaaggcagattttatgccggagataataaacttagactcgcggagcttgccgccgacggtcaattgcctcgcaatattgcgatataa

SEQ ID NO: 11862 - protein, 255 aa, Unknown
  Obtained from environmental sample
  misc_feature (1)..(255): Xaa is any amino acid
MNLNDLSYKWLRPLEDVFSTELLKINEEIKKEVPKIEYYARPQTKHYNNNIVKPHVLIAVFPGINSEYDLAKQFNEAGAKTDIFVFGNLTPQAIKESIDILADKIKESQILMLPGGFSGGDEPDGSAKFITAVCRNPKITEAIRELLLSKDGLIMGICNGFQALIKLGLLPYGDIKEIMNENDPTLTFNRIGRHQSYIAYTRVASVKSPWFNGVXVGDIHAIPISHGEGRFYAGDNKLRLAELAADGQLPRNIAI

SEQ ID NO: 11863 - DNA, 987 bp, Unknown
  Obtained from environmental sample
  misc_feature (1)..(987): n is a, c, g, or t
ttgggnnnnnnnnnnnaaatatggcgagttgacgttcttcggggcgacgaactgccgcgtttccgaatacggcttaacatgattggcggaaacagttggcgtgtgtcgggccagtggattgaatgggaattcgatgtgcctgaaaacggcttgtaccgtatttcaatcaaggggcggcaaaattataaccgtggttttgtgtcaaatcgcacggttcttgttaacggcgaaataccatttaaggagcttgctgtagttccgtttaaatacagcaacaaatggaaactgattacacctactgacagtcagggggaaattttagtccccctcaacaaaggcacgaatactatccggcttcaggcaacgcttggcgataccggcggaatgctaaatgtgatggaagaaagcgtgtaccgcctgaacgcgatttaccggaaaatactcatccttacagggcctgaaccggatatgtaccgcgattaccgggttgaagcggtttatcctgaagtaattgaggcaatgaagcttgagagcaagatactctacaagcttgttgacgacttaaccgcttattccggcgagcgcagcgcgcaggcagccacggcgttaacgctggcgcgccaactggagatgtttgtcaggcgtccggataaaattcccagaacgcttgtcaattttaaattaaatatcagcacgcttggcgacagcctgcttgccctttcgcaatcgcaactggatatagactacatatttgtcagcgctgaaggcaggcccttgccggccattaacgataatttctttattgccgcttcgcatgaaatccgttcattcctttcatcgtttgtcgttgactataccagtatcggggatgtgttcggcaagggcgacgatgtagttgaggtatggatgctttcggggcgcgatcaaagcacgattataaaagggatgatagataccatgtttactcccgttacanggatcaggtaa

SEQ ID NO: 11864 - protein, 328 aa, Unknown
  Obtained from environmental sample
  misc_feature (1)..(328): Xaa is any amino acid
MGXXXXIWRVDVLRGDELPRFRIRLNMIGGNSWRVSGQWIEWEFDVPENGLYRISIKGRQNYNRGFVSNRTVLVNGEIPFKELAVVPFKYSNKWKLITPTDSQGEILVPLNKGTNTIRLQATLGDTGGMLNVMEESVYRLNAIYRKILILTGPEPDMYRDYRVEAVYPEVIEAMKLESKILYKLVDDLTAYSGERSAQAATALTLARQLEMFVRRPDKIPRTLVNFKLNISTLGDSLLALSQSQLDIDYIFVSAEGRPLPAINDNFFIAASHEIRSFLSSFVVDYTSIGDVFGKGDDVVEVWMLSGRDQSTIIKGMIDTMFTPVTXIR

SEQ ID NO: 11865 - DNA, 957 bp, Unknown
  Obtained from environmental sample
  misc_feature (1)..(957): n is a, c, g, or t
atgtcgcagggacattggaaaccaacccccancaggcaggcggttttcgaaatgtctttcaggaggcagcccttcggtggcggttacacggtattcgccggcctgggaaccctgattgaaaacctcgccgccctctctttttccgatgacgatatagagtacgtcaggggtcttggcgggtttgacgaacagtttcttgaatacctgaaaaacttccgctttaccggttcgctgtgggccgttgacgaaggaacggtggttttcccccaggagccgctaatcagagtcaaaggcagcctcattgaatgtcagattattgaagcgatgctccttaatacaattaattttcaaaccctggtcgcgaccaagacacggcgcgtctggcttgcttcaggaaaaggctcgataatggaattcgggctgcgccgcgcgcaggggccggacggggcaatgtccgcgtcaagggcggcgtttataggcggcgccatagggacttccaatacccttgcaggaaaagaattcggcattcccgtgatgggaaccatgggccactcctgggtcatgtcattttcagaagaggcggattcttttgacgcttacgcggaactctacccggacagatccgtgttccttatagacacctatgataccctgagatgcggcgtggtaaacgcgataaaagccgggaaaaaactgaatgagcaggggaagaaattcggggtgcgccttgattccggggatatcgagtacctttcatccgaggtaaggaggatgctggataacgcggggtttaacgacgcgagtataaccgtgtccaacgaattggacgaaaccattattgaaaacctggtgaggttaggggccccggttgacacctggggcgtcgggacgaatatggtcacgggcgggcacgacgcgtcgcttacggggtatacaaatgtcggccgtagaggataa

SEQ ID NO: 11866 - protein, 318 aa, Unknown
  Obtained from environmental sample
  DOMAIN (134)...(316): Nicotinate phosphoribosyltransferase (NAPRTase) family
  misc_feature (1)..(318): Xaa is any amino acid
MSQGHWKPTPXRQAVFEMSFRRQPFGGGYTVFAGLGTLIENLAALSFSDDDIEYVRGLGGFDEQFLEYLKNFRFTGSLWAVDEGTVVFPQEPLIRVKGSLIECQIIEAMLLNTINFQTLVATKTRRVWLASGKGSIMEFGLRRAQGPDGAMSASRAAFIGGAIGTSNTLAGKEFGIPVMGTMGHSWVMSFSEEADSFDAYAELYPDRSVFLIDTYDTLRCGVVNAIKAGKKLNEQGKKFGVRLDSGDIEYLSSEVRRMLDNAGFNDASITVSNELDETIIENLVRLGAPVDTWGVGTNMVTGGHDASLTGYTNVGRRG

SEQ ID NO: 11867 - DNA, 507 bp, Unknown
  Obtained from environmental sample
  misc_feature (1)..(507): n is a, c, g, or t
atggaatcaaaatgcagtaccgtgaagcatgggaggagatactgcatggaagggaaacaaattgtactgacccctgaagaacgtgcagaactgaagcggttttgcaaggcaggggtacacagcgtcagactggtcaaccgcgcacggataatacttgcccttgacacgtcgggaaacagaaaagcagagcggcaggaagacatagcagaacatgtcggggtaagccgacaggccgtcaacgacgttaggaatgattttttggcattgcaagacgtgccgctgtttttacagcgaaagaaacgggagacgccgcctgtaccgccgaaaataactggggaattggaagcccgtatcatcgcgttagcgtgcggcaaagttcccaagggttacgcccggtggacgctgcggcttttagcagaaaaatgcgtggaactacgttactgcgacaccatatcccacacgtccataggcacccttttaaaaaaacgcagcttaagcctcatctga

SEQ ID NO: 11868 - protein, 168 aa, Unknown
  Obtained from environmental sample
  misc_feature (1)..(168): Xaa is any amino acid
MESKCSTVKHGRRYCMEGKQIVLTPEERAELKRFCKAGVHSVRLVNRARIILALDTSGNRKAERQEDIAEHVGVSRQAVNDVRNDFLALQDVPLFLQRKKRETPPVPPKITGELEARIIALACGKVPKGYARWTLRLLAEKCVELRYCDTISHTSIGTLLKKRSLSLI

SEQ ID NO: 11869 - DNA, 447 bp, Unknown
  Obtained from environmental sample
  misc_feature (1)..(447): n is a, c, g, or t
gtgcggcaaagttcccaagggttacgcccggtggacgctgcggcttttagcagaaaaatgcgtggaactacgttactgcgacaccatatcccacacgtccataggcacccttttaaaaaaacgcagcttaagcctcatctgaaaacatgctggtgcataccgcctgaacaaaacagcgcgtttgtggcggcaatggaagacgttttagcggtttacgagcgcccttacgatgaaaacacgcctgtggtggacatggacgagaagccgtatcaattactgggcgacacccgcggatcgctgcccgcanaaccagtgtcggcacagctggaagactatgaataccagcggaacgggacatgcagcatttttatattcaccgagcctctttcangctggcgtcatgcacaagcctttccacggcggacaaaaaaaagattgggcgcatag

SEQ ID NO: 11870 - protein, 148 aa, Unknown
  Obtained from environmental sample
  misc_feature (1)..(148): Xaa is any amino acid
MRQSSQGLRPVDAAAFSRKMRGTTLLRHHIPHVHRHPFKKTQLKPHLKTCWCIPPEQNSAFVAAMEDVLAVYERPYDENTPVVDMDEKPYQLLGDTRGSLPAXPVSAQLEDYEYQRNGTCSIFIFTEPLSXWRHAQAFPRRTKKRLGA

SEQ ID NO: 11871 - DNA, 723 bp, Unknown
  Obtained from environmental sample
  misc_feature (1)..(723): n is a, c, g, or t
atgcttgttaaggcggttcccgaggcagcggaaaacccctttgattttctttcggatttttccggggaacagctctccctgcttttcaaggacgaaagcccggccgcctgcgccatggtattttcccggctaccttcaaaactttccgctgccgccctcgcgaccatgagggcggatcggaagctggaaattgtgcggcgtattgcccgcctgaacgagattccaccggatgtgatagaacggactgcggccgccctcagggaaaaagcaaggcatttcggacgcaatgacgaagtaaaggaaattgacggaaaaggcgttctggcggcgattctgaaacactcaggtctgggcttcggcggccgcatccttgaagaactggaagaaggcgatccctccctgggccgggaaatgaaggaccgcctctacacccttgaggacgtatgcggcgcggcggacaggcccattcaggaaaaactcagaaccatgagcgacagggacattgtgctcctgctccgcggccgctccgaagcgttcaccaaaaaaataacggggaacctttccgttgcaagggcagaccgggtcaaagaagaatcagagatcatggggcctgtgcccaaaattgaaagcgaagcggcggcaagggaattccttgcgtggttcaggctgaaccgggaagaaggcaggatactaatgctcagcggcgaggatgtgcttgtatga

SEQ ID NO: 11872 - protein, 240 aa, Unknown
  Obtained from environmental sample
  DOMAIN (124)...(233): FliG C-terminal domain
  misc_feature (1)..(240): Xaa is any amino acid
MLVKAVPEAAENPFDFLSDFSGEQLSLLFKDESPAACAMVFSRLPSKLSAAALATMRADRKLEIVRRIARLNEIPPDVIERTAAALREKARHFGRNDEVKEIDGKGVLAAILKHSGLGFGGRILEELEEGDPSLGREMKDRLYTLEDVCGAADRPIQEKLRTMSDRDIVLLLRGRSEAFTKKITGNLSVARADRVKEESEIMGPVPKIESEAAAREFLAWFRLNREEGRILMLSGEDVLV

SEQ ID NO: 11873 - DNA, 846 bp, Unknown
  Obtained from environmental sample
  misc_feature (1)..(846): n is a, c, g, or t
atgatcgctcttcttctcctgaataattcccaccgctccttggttattgtagaaccccgtgaaggttttcttgaagagaaggatgccgcgctggcccggtgtcttggggaaaagtatgcctccatgggcaaagcggaaaaagaagccgtcaggaaaaaagaagcggaattaagacgctttcaggaagagggggatagtcccgaagcgctggcaacgatcccgcatctttcccggaaagatcttttgccggaaattgaagtaatcaaaagggaatacgcggacgcttcgggcgcgccggttctggttcatcccctctatacaaacgggatcagttatgtggaactcgccttccccgcggatgtatttgccccggaagaatatccctggtttacctttttcgcccgggcgctggtttctatgggtcttcccggcatggactacggggaggtttcaagcctcatggccagaaccgccgggggctttcacggcatgctccacaccgccacgcccgttcccggtgcggcaagggcggcggtcctccccacgggaatccttgaccttataggccgggactggatcatcttccggctcaaagccctggatgaaaagatcggcccttccctggatctggtcctgaaattaatcacgagcgcggacttttcggatcataggcggttgcgtgatttggttttggagatgaagaacgatcttgattccgggcttgcgcctttggggtatcattacgcgtccggccgttccggccgtcttttttcccggccgcgggtcgtggatgaactttggagcggttggatcagattctttttgcgcataaacttgcggagctga

SEQ ID NO: 11874 - protein, 281 aa, Unknown
  Obtained from environmental sample
  DOMAIN (17)...(277): Peptidase M16C associated
  misc_feature (1)..(281): Xaa is any amino acid
MIALLLLNNSHRSLVIVEPREGFLEEKDAALARCLGEKYASMGKAEKEAVRKKEAELRRFQEEGDSPEALATIPHLSRKDLLPEIEVIKREYADASGAPVLVHPLYTNGISYVELAFPADVFAPEEYPWFTFFARALVSMGLPGMDYGEVSSLMARTAGGFHGMLHTATPVPGAARAAVLPTGILDLIGRDWIIFRLKALDEKIGPSLDLVLKLITSADFSDHRRLRDLVLEMKNDLDSGLAPLGYHYASGRSGRLFSRPRVVDELWSGWIRFFLRINLRS

SEQ ID NO: 11875 - DNA, 396 bp, Unknown
  Obtained from environmental sample
  misc_feature (1)..(396): n is a, c, g, or t
atgatacaccgcgcgcttttcggcagtatcgaaagatttttcggcgtgcttatagaacacttcggcggagcgttccccgtttggattgcgccggagcaagcggcggttattcccgtctcggaagtgtttaacgaatacgcgcaaaaagccgccgctgcgcttaaatcgcatgatttgcgcgtaacggcggagttaggcgacgagcgcatgaacgcaaaaatccgcgactgccaaacgcggaaaattccctatatgcttgttgtaggacagcgtgaagccgacgaaggaacagtatcaatccgcctgcgtgacggaaaacagcttgaagcgatgaagatagaagattttgccgaatatgtacataaaaaaatagagagtaaatctttggagttgtaa

SEQ ID NO: 11876 - protein, 131 aa, Unknown
  Obtained from environmental sample
  DOMAIN (33)...(123): Anticodon binding domain
  misc_feature (1)..(131): Xaa is any amino acid
MIHRALFGSIERFFGVLIEHFGGAFPVWIAPEQAAVIPVSEVFNEYAQKAAAALKSHDLRVTAELGDERMNAKIRDCQTRKIPYMLVVGQREADEGTVSIRLRDGKQLEAMKIEDFAEYVHKKIESKSLEL

SEQ ID NO: 11877 - DNA, 480 bp, Unknown
  Obtained from environmental sample
  misc_feature (1)..(480): n is a, c, g, or t
atggacaggcatgtgaagatactggattttttagcaactaacaaaaccgtaaagatttcccttcttgccgaaatacttgatgtctcaaacgtaacactgcgcaaagatttagacaatctcgaaaaacggggcataatccgcaagacgcacgggtacgcaagccttgacggcgcagacgatacaggcaaacgcatggcgtttaaccattcaatcaagcgaagaatagccaaagcctcggcgcagttagttgacgaaggcgagacaataatgctggaatcgggttcatgctgtgcattattcgccgaagagcttgccattgccaaaaaaaatgttacgataattaccaattcgatattcatagccaattatgtttgtaaaatgcaaaacataaaaatcatacttctcggcggatattttcagcctgaaatctcagttttggtaggaacaaataacacaaactgtgcccgatcatttttatag

SEQ ID NO: 11878 - protein, 159 aa, Unknown
  Obtained from environmental sample
  DOMAIN (69)...(157): Bacterial regulatory proteins, deoR family
  misc_feature (1)..(159): Xaa is any amino acid
MDRHVKILDFLATNKTVKISLLAEILDVSNVTLRKDLDNLEKRGIIRKTHGYASLDGADDTGKRMAFNHSIKRRIAKASAQLVDEGETIMLESGSCCALFAEELAIAKKNVTIITNSIFIANYVCKMQNIKIILLGGYFQPEISVLVGTNNTNCARSFL

SEQ ID NO: 11879 - DNA, 480 bp, Unknown
  Obtained from environmental sample
  misc_feature (1)..(480): n is a, c, g, or t
atgaaagccgcaatactttttggttcaaaatctgacgctcagacaatgaagaaggcggcggatgtatttaaggaatttggcgtttcctatgattcatatacagtctcggcacatcgaagtccggaactgcttgccgaaattttatccgttttggactcagggggtacggaagtgataatcgccggagcggggcttgcggcccatcttcccggcgttattgccagccagacgcttataccggttatcggcgtgccaatcggctccggcgggcttggcgggctggacgcgctgctttccatcgtgcagatgcccaaacagattccggtcgcaactgtcggtattgacaacgcggcaaacgcggcatatcttgcctgtgaaattcttgccgtaaaatatcctgaattgaaaaaatcattaatagctttcagaaaaaaaatgaaagaagaccttgctaaagaaagcgggaaagcggaattataa

SEQ ID NO: 11880 - protein, 159 aa, Unknown
  Obtained from environmental sample
  DOMAIN (1)...(157): AIR carboxylase
  misc_feature (1)..(159): Xaa is any amino acid
MKAAILFGSKSDAQTMKKAADVFKEFGVSYDSYTVSAHRSPELLAEILSVLDSGGTEVIIAGAGLAAHLPGVIASQTLIPVIGVPIGSGGLGGLDALLSIVQMPKQIPVATVGIDNAANAAYLACEILAVKYPELKKSLIAFRKKMKEDLAKESGKAEL

SEQ ID NO: 11881 - DNA, 924 bp, Unknown
  Obtained from environmental sample
  misc_feature (1)..(924): n is a, c, g, or t
ttgagtttgatgccgcganacacgccgctcgaaaccagcaatgattggtggaagagcacggacggcagcagctcaaacaattacgctttcaccatgagtttggcatgcgagttcacgatggagccgggtttgatgttcgatttcacgggtgacgacgacgtctgggtcttcataaacggcaagctggctatggatctcggcggcattcacgaggcggtgaccgggacgctgaatttggataacgaaagaactagattaggaactggcggatttgtgaacgagcggttgacggacggtcacaaatatatgctgcacctgttctatgccgagcgccactccgacgattcaaacatcaaaataaccactaacattatagcctcccgcgttggcgacgtaaccataaaggtggacggggacccgatgatcgccggagtgcccaagctcgcggtggctgaggttaaaagggaagacggttcggtcataaaagatttcgccaaaggcagttttatttggacggcgaaggatttgggcggattcaatacaggtaaccagcttaccatcgtcaatgctaaaaacggcgggacgaatacgaccaagacagactcgatacacgtgacggcgcaaaaggcttataccacgatccggatatacggagagtactatgactcggtctccatgtcgcgggctcgcgactccgctgacgtgtgggtgggccccggccccgcctcgcaggttagcgtagaggcctccgacgactctctggcgagtttgagaaatgtcgcccagctggatacggtgcgcattctcgccaacgccacggcggacagtaatttctacgccatcctgcgcgaccagtacggcaactgggtcgggcgggccgcacaggtacggtggctactcaggggcggactatatcgtgggtaa

SEQ ID NO: 11882 - protein, 307 aa, Unknown
  Obtained from environmental sample
  misc_feature (1)..(307): Xaa is any amino acid
MSLMPRXTPLETSNDWWKSTDGSSSNNYAFTMSLACEFTMEPGLMFDFTGDDDVWVFINGKLAMDLGGIHEAVTGTLNLDNERTRLGTGGFVNERLTDGHKYMLHLFYAERHSDDSNIKITTNIIASRVGDVTIKVDGDPMIAGVPKLAVAEVKREDGSVIKDFAKGSFIWTAKDLGGFNTGNQLTIVNAKNGGTNTTKTDSIHVTAQKAYTTIRIYGEYYDSVSMSRARDSADVWVGPGPASQVSVEASDDSLASLRNVAQLDTVRILANATADSNFYAILRDQYGNWVGRAAQVRWLLRGGLYRG

SEQ ID NO: 11883 - DNA, 837 bp, Unknown
  Obtained from environmental sample
  misc_feature (1)..(837): n is a, c, g, or t
atgattaatgagcgtttggcaattcaggctgcggaaaaggataaaattaccgtttctgaaaacgaggtaacccagcagatcaatcagcttaaaaaccagatgtttcaggctatcgggcggcagcccactgacgcggaatttgccgcggcaatcaaaaacgaaaccggtcttgatatgcccgcgttccgggatcaggcgcggcggcagcttctaacgcaaaagtacctcatgtcaaaaaaacagagcagttttgaaaatataaaaacgcctactgaggctgatattacgagcgcctataatttaactaaggcccagtttgtcaggcctgataccgtccgtttttccatgatacagatagaatatggtccggacgccgcttccaagaccaaagccaaggagctggcggacaggctgattagggaaattggttccagcgcgtcgaaatttgacgaggttgttcttaggggtcaggcgcccaattccggttatcaggcaggggacggcggttatctgccccggagcatggaggccgcgcagattgtagggcaggagtttatcaccaccgcttttaacctcaagcagggtgaagtttctaaattgatggaaggcgtgcggggttatcagattattaaagttacagaaacctacgcccagaaaaaccttgaattggatgatatttttcagttgggcagccgtattactgtccgcaattatattggcaactccattctgcaggaacggcagatggagactcttaagaaagctaccgaggaattggtagccgaattgcgggcgggtaagacctttcagatatttgaaagaaatctgtcctggtaa

SEQ ID NO: 11884 - protein, 278 aa, Unknown
  Obtained from environmental sample
  DOMAIN (117)...(214): PPIC-type PPIASE domain
  misc_feature (1)..(278): Xaa is any amino acid
MINERLAIQAAEKDKITVSENEVTQQINQLKNQMFQAIGRQPTDAEFAAAIKNETGLDMPAFRDQARRQLLTQKYLMSKKQSSFENIKTPTEADITSAYNLTKAQFVRPDTVRFSMIQIEYGPDAASKTKAKELADRLIREIGSSASKFDEVVLRGQAPNSGYQAGDGGYLPRSMEAAQIVGQEFITTAFNLKQGEVSKLMEGVRGYQIIKVTETYAQKNLELDDIFQLGSRITVRNYIGNSILQERQMETLKKATEELVAELRAGKTFQIFERNLSW

SEQ ID NO: 11885 - DNA, 927 bp, Unknown
  Obtained from environmental sample
  misc_feature (1)..(927): n is a, c, g, or t
gtgatgctggaacagggcaaaatcgatccgaaggggaaaaagaccttggtgttgggagacggtggagcggcgcggacggtgagggcggtactggacggtctgggcgcgggagagattgtaacgatctcgcgccggggtgagaaccactacggcaatatagcgcggcattatgacgccgagctcatcgtgaataccacgcctgtcggcatgtatcctgacaacaacaatagccccttgagtcttgcggggtttcggcaattagcgggcgtggctgatttgatctacaatcccacgcgaaccaaactgctgcttgaagccgggcgggctggcattccctgcgtgaacggccttgcgatgctggcggcccaggcggagatggcaagccgtctgtttatagacgtacctgcccggcctgaattggtgaataaaattcacgatgcgattctcaaaagaacacaaaacatcgcgctcatcggtatgcccggctgcgggaaaagcaccgttggccggctcttcgccgaaaagatggggcggcttttcgcggatattgatgaacagattgaggcggccgcgggaaagagtatcccgcaaatcttcgccgaaaacggggaagaaacattcaggcgtctggaaacgcgcgtacttgcagaagaagccaaaaaaagcggcatggtaatcgcgacaggcggaggcgtggtgacgcggcctgaaaatctcgatctgctgaggcaaaacagtttgattgtgtatctganacgcgatctaagcgagctcattacagacggccgtccgctttcacagaatatggggattcaggccctcgccgacaagcggctgcctttgtacgaggcgtggagtgattgcgccgtttcagtggaagcgaaagcggaacaaaccgcggcgaggatagaggaagcgattacatga

SEQ ID NO: 11886 - protein, 308 aa, Unknown
  Obtained from environmental sample
  DOMAIN (3)...(103): Shikimate / quinate 5-dehydrogenase
  misc_feature (1)..(308): Xaa is any amino acid
MMLEQGKIDPKGKKTLVLGDGGAARTVRAVLDGLGAGEIVTISRRGENHYGNIARHYDAELIVNTTPVGMYPDNNNSPLSLAGFRQLAGVADLIYNPTRTKLLLEAGRAGIPCVNGLAMLAAQAEMASRLFIDVPARPELVNKIHDAILKRTQNIALIGMPGCGKSTVGRLFAEKMGRLFADIDEQIEAAAGKSIPQIFAENGEETFRRLETRVLAEEAKKSGMVIATGGGVVTRPENLDLLRQNSLIVYLXRDLSELITDGRPLSQNMGIQALADKRLPLYEAWSDCAVSVEAKAEQTAARIEEAIT

SEQ ID NO: 11887 - DNA, 894 bp, Unknown
  Obtained from environmental sample
  misc_feature (1)..(894): n is a, c, g, or t
atgctcgcggatggcacaaaaaaagcggcggaggaatttaacgcttcaggaaaacggctcgccgaagttacggttattgaaggcggagttaatcaggctgaatgggaaacctcgataacaactctggcggcttcgcagtcctatgacctaattgttacttcaaacccgtcgatgccggtaattgtctcttccatattgcaaaaatttccgaatcaaaaattccttcttttggatggagagcttgccggaaatccaagtgtctacacctttcgctacaaccagcgggaacaggcttacatggccgggtacatcgcggctcttgtttcacttgataatagccagagcggttcgaaaatcatcggcctattagcggcgcaggaatatcctgtcatgaacaacataatcttgccagggtatttggaaggcgcaaaggcggttgacccgtcctttaacgttgatttccgcatagtcggcaattggtttgacgccgctaaaggcgccgaacttgccgccggaatgattcgctccggggcaacggtgctgcttcccattgcgggcggcgctgggcagggagctgtccaggcggctttcgaggctggggcaaaggtggtttggtttgataccaacggctacgcgattcggccaggtacgattataggcagcacaattctaaggcaggataaagccgcttacgaaaaaaccatgctatacctgaaaggcgagctgccgttcggtaaggccgaggtagcgggaactgccgatggctttattgattttgtagaagacgatcctctttacatcgcggcagttagccaggcgattcgggataagcaggctcagcttgtttccaggcttcgttccggcgaattaaggcttgatttgaaacctgaatga

SEQ ID NO: 11888 - protein, 297 aa, Unknown
  Obtained from environmental sample
  DOMAIN (1)...(291): Basic membrane protein
  misc_feature (1)..(297): Xaa is any amino acid
MLADGTKKAAEEFNASGKRLAEVTVIEGGVNQAEWETSITTLAASQSYDLIVTSNPSMPVIVSSILQKFPNQKFLLLDGELAGNPSVYTFRYNQREQAYMAGYIAALVSLDNSQSGSKIIGLLAAQEYPVMNNIILPGYLEGAKAVDPSFNVDFRIVGNWFDAAKGAELAAGMIRSGATVLLPIAGGAGQGAVQAAFEAGAKVVWFDTNGYAIRPGTIIGSTILRQDKAAYEKTMLYLKGELPFGKAEVAGTADGFIDFVEDDPLYIAAVSQAIRDKQAQLVSRLRSGELRLDLKPE

SEQ ID NO: 11889 - DNA, 927 bp, Unknown
  Obtained from environmental sample
  misc_feature (1)..(927): n is a, c, g, or t
atgatcgtccacgtcaaggacgaggcgaaaggcctgtcggagataggcagcgaccttgccggcaacatgaccgagacggcctccgcggtgggccaaatcgccgccggcatccaggccaacgccgccatgggacaggttatctccaacatcaacagactcagcagccatgcagaagaccagggcagcactatctccagggcttcgtctgccatcgaggaaatggcagccactgtcggttccgtaacccaaacgctggctaggaacgcggataatgtaaaaacgctggaaaaagcctcggaagcgggccgcaacgggctgcgcgaagtcgctgcggatattcaggaaatagcccacgattccgaaaacctgctgaacattaacgccgtaatgaaattcatagccagccaggccaacctgctttccatgaacgcggcgatagtaatggcccacgccggggaagcgggcaagggcttcgccgttgtcgccgacgggatccgcaaactggcggaaacttcaagcgagcagtccaaggcaatcgatgctgtgcttaaaaaggcaaagggttcaatcgacagggcagcccgttccacggaaagcgcccttggcgagtttgaagcgattgactcaagcgtcaggacggtaggcgagggcaataggcaggtactggacggcgtgagcagcgtgaacgaaattgcccggcaggtaaagggcggttccgctgaaatgctcgaaggcagcagggaagtgataaacgaaagccgcagccttgaggcggcaacgcangaaataaccggcggcatgagcgaggtggcttgcggggcaaaacaggcaagcatagcggtgcgccatgccagcgagatatacgcaaagaaccgcgagagggttgggactttgatgcangaagtgtcgcgctttcaggtagcttaa

SEQ ID NO: 11890 - protein, 308 aa, Unknown
  Obtained from environmental sample
  DOMAIN (44)...(308): Methyl-accepting chemotaxis protein (MCP) signaling domain
  misc_feature (1)..(308): Xaa is any amino acid
MIVHVKDEAKGLSEIGSDLAGNMTETASAVGQIAAGIQANAAMGQVISNINRLSSHAEDQGSTISRASSAIEEMAATVGSVTQTLARNADNVKTLEKASEAGRNGLREVAADIQEIAHDSENLLNINAVMKFIASQANLLSMNAAIVMAHAGEAGKGFAVVADGIRKLAETSSEQSKAIDAVLKKAKGSIDRAARSTESALGEFEAIDSSVRTVGEGNRQVLDGVSSVNEIARQVKGGSAEMLEGSREVINESRSLEAATXEITGGMSEVACGAKQASIAVRHASEIYAKNRERVGTLMXEVSRFQVA

SEQ ID NO: 11891 - DNA, 498 bp, Unknown
  Obtained from environmental sample
  misc_feature (1)..(498): n is a, c, g, or t
atgcttgcctgttttgccccgcaagccacctcgctcatgccgccggttatttcntgcgttgccgcctcaaggctgcggctttcgtttatcacttccctgctgccttcgagcatttcagcggaaccgccctttacctgccgggcaatttcgttcacgctgctcacgccgtccagtacctgcctattgccctcgcctaccgtcctgacgcttgagtcaatcgcttcaaactcgccaagggcgctttccgtggaacgggctgccctgtcgattgaaccctttgcctttttaagcacagcatcgattgccttggactgctcgcttgaagtttccgccagtttgcggatcccgtcggcgacaacggcgaagcccttgcccgcttccccggcgtgggccattactatcgccgcgttcatggaaagcaggttggcctggctggctatgaatttcattacggcgttaatgttcagcaggttttcggaatcgtgggctatttcctga

SEQ ID NO: 11892 - protein, 165 aa, Unknown
  Obtained from environmental sample
  misc_feature (1)..(165): Xaa is any amino acid
MLACFAPQATSLMPPVISCVAASRLRLSFITSLLPSSISAEPPFTCRAISFTLLTPSSTCLLPSPTVLTLESIASNSPRALSVERAALSIEPFAFLSTASIALDCSLEVSASLRIPSATTAKPLPASPAWAITIAAFMESRLAWLAMNFITALMFSRFSESWAIS

SEQ ID NO: 11893 - DNA, 948 bp, Unknown
  Obtained from environmental sample
  misc_feature (1)..(948): n is a, c, g, or t
ttggccgagggaagcaggactggaagattacttccgttgattgacgaaaacggaatccagtccattttaagagaagcgtataagtccatctacctgccatatgttcttgtgcatatgccggaagaaataaagaaattggtttgtcgtaatttgtcattaagaattcacggtagctttgaaaaagaggtaaaggatttggaatccatgtataaaaaggatttcggttatcttgaaaacgaaagggcaaggctaatatcttttatcggagaaaaattatttttgttagaaaagagacattggttacatgaaggctcagatcgccttatctggaaggaaacaaagccaaaagaaaaagctcctaaaaaagaaccgcctaaccctattgaagaattggtaaaaagaattgaagatgcgtgcaattcgggagacctttatttatcagcgcataacaagtcgaaagatgatgtacaaaacgcctttgccgcgtttcaggatcgaaaaagtgaattgaaaaagattcgaagccttacgatagatgcggagatattacctgccaccgcccttctttttgaagcagggggaatcgaaaagctggaacttgacggcgaattttcaggaacatggccggattttctggaaaagtgccatgcagtaacatcaataagtttaggcttgcggaagggattaagcgaattcccgttatggataggcaatgtggtttcattgcgccgtctttgcatcaacggatcagacattacatccatacccgattgggtttgcgatatgcaatccttaacggagcttgtcatatcttcgaataaaaagaatttaaaaatattgcctgacagtataggcaacttaaaaaatcttacaaaactctctatccactattcagatatggaaaaactgcccgaaagtattggcgaaatattttccttaaaggaatag

SEQ ID NO: 11894 - protein, 315 aa, Unknown
  Obtained from environmental sample
  misc_feature (1)..(315): Xaa is any amino acid
MAEGSRTGRLLPLIDENGIQSILREAYKSIYLPYVLVHMPEEIKKLVCRNLSLRIHGSFEKEVKDLESMYKKDFGYLENERARLISFIGEKLFLLEKRHWLHEGSDRLIWKETKPKEKAPKKEPPNPIEELVKRIEDACNSGDLYLSAHNKSKDDVQNAFAAFQDRKSELKKIRSLTIDAEILPATALLFEAGGIEKLELDGEFSGTWPDFLEKCHAVTSISLGLRKGLSEFPLWIGNVVSLRRLCINGSDITSIPDWVCDMQSLTELVISSNKKNLKILPDSIGNLKNLTKLSIHYSDMEKLPESIGEIFSLKE

SEQ ID NO: 11895 - DNA, 666 bp, Unknown
  Obtained from environmental sample
  misc_feature (1)..(666): n is a, c, g, or t
atggacagattcggccgagaagttgcatcgtatattcaggaaattgcccgcgattcggaagggcttttggagatcaatttggtaatggagaacattgccagccaaaccaatttattgtcgatgaacgccgccattgaagcggcccacgccggtgacgcgggcaaaggttttgccgtagttgccggagagatccgcaaacttgccgaatcatctagcaggcaatcgaaaaccataggcacggttttaaaaaagataaaagactccatcgacaaaataagcaaatccaccgacggtgtacttgccaagttcggggcaattgactcaagcgtcaggatcgttgcggaacaggaagataacatacgaagagcgatgcaggaacaggacactggaagcaaacagctccttcaaaacgcaggtaatttgaacgatattacgcggcaggtaagaaccggttccgaggaaatgcttaatggatcaaaggaagtcatacaggaaagccagaacctggaaaagataaccgtggagctaaccgggggcatgaacgagatggcttcgggtgtggaacagatcaacatcgcggtaaaccacgtcaacgagataagcaataagaaccgcgaaggaattgagacgctgttgaaggaggtttcgatgtttaaggttgagtga

SEQ ID NO: 11896 - protein, 221 aa, Unknown
  Obtained from environmental sample
  DOMAIN (1)...(177): Methyl-accepting chemotaxis protein (MCP) signaling domain
  misc_feature (1)..(221): Xaa is any amino acid
MDRFGREVASYIQEIARDSEGLLEINLVMENIASQTNLLSMNAAIEAAHAGDAGKGFAVVAGEIRKLAESSSRQSKTIGTVLKKIKDSIDKISKSTDGVLAKFGAIDSSVRIVAEQEDNIRRAMQEQDTGSKQLLQNAGNLNDITRQVRTGSEEMLNGSKEVIQESQNLEKITVELTGGMNEMASGVEQINIAVNHVNEISNKNREGIETLLKEVSMFKVE

SEQ ID NO: 11897 - DNA, 360 bp, Unknown
  Obtained from environmental sample
  misc_feature (1)..(360): n is a, c, g, or t
ttgcttccagtgtcctgttcctgcatcgctcttcgtatgttatcttcctgttccgcaacgatcctgacgcttgagtcaattgccccgaacttggcaagtacaccgtcggtggatttgcttattttgtcgatggagtcttttatcttttttaaaaccgtgcctatggttttcgattgcctgctagatgattcggcaagtttgcggatctctccggcaactacggcaaaacctttgcccgcgtcaccggcgtgggccgcttcaatggcggcgttcatcgacaataaattggtttggctggcaatgttctccattaccaaattgatctccaaaagcccttccgaatcgcgggcaatttcctga

SEQ ID NO: 11898 - protein, 119 aa, Unknown
  Obtained from environmental sample
  SIGNAL (1)...(19)
  misc_feature (1)..(119): Xaa is any amino acid
MLPVSCSCIALRMLSSCSATILTLESIAPNLASTPSVDLLILSMESFIFFKTVPMVFDCLLDDSASLRISPATTAKPLPASPAWAASMAAFIDNKLVWLAMFSITKLISKSPSESRAIS

SEQ ID NO: 11899 - DNA, 936 bp, Unknown
  Obtained from environmental sample
  misc_feature (1)..(936): n is a, c, g, or t
ttggaatcgcgcacgatactggacgattttgcgcagtcaatacaaaatttagtccggcgcggagacggggccgcagaactgaacgcttataacatagatatatcaaatcatttactctttaaaaaccataacactatcagccctaacggcccatacggctatatcgaaaaatctccggagggcccgtttttctttaacggtaccggctgggaagcgcctgataattggctgccggatgaccgtccctggtacaaaggcgccatcgaggccggcgactgcgttgcgcaaaccgagccgtatttggattcactgacaggtgatattgttttttcgtactcccgctgtatttatgacaacaacgggaatcgtgtaggcgttgtcgctttagatatagaggcagggcatatcggtgaaaaggtcgccaatacctctcttaccaaaggcggttacggaatattgaccagccgggatttaacggtaattggccatataaacacggattttctcggaatgaaaatgtacgacccgagaatccccgtttcatttttaactgatgaattggtacgcacgggaaaaataacaggcgccgagtgggttaactggagaggcgaaaaggtcgttggttttttaaaaacgctttccaacggatggactttaggccttttggcgccaaaatatatatattttaaacctgtatataaaatggcgctgaccctcagcttattgggcggggcgcttgcctcggtgttgataatcgtcctgattcgcgttgacgcggcgaaaaataaatcaaatatggaaagcaggcgcaagagcgcgttccttgccaacatgagccacgagatacgcacgcctatgaacgcgataatcggaatgctcacgataggtaagaccgcttccgaaattgaacgtaaagactactgctttcgaaaatag

SEQ ID NO: 11900 - protein, 311 aa, Unknown
  Obtained from environmental sample
  DOMAIN (96)...(176): Cache domain
  misc_feature (1)..(311): Xaa is any amino acid
MESRTILDDFAQSIQNLVRRGDGAAELNAYNIDISNHLLFKNHNTISPNGPYGYIEKSPEGPFFFNGTGWEAPDNWLPDDRPWYKGAIEAGDCVAQTEPYLDSLTGDIVFSYSRCIYDNNGNRVGVVALDIEAGHIGEKVANTSLTKGGYGILTSRDLTVIGHINTDFLGMKMYDPRIPVSFLTDELVRTGKITGAEWVNWRGEKVVGFLKTLSNGWTLGLLAPKYIYFKPVYKMALTLSLLGGALASVLIIVLIRVDAAKNKSNMESRRKSAFLANMSHEIRTPMNAIIGMLTIGKTASEIERKDYCFRK

SEQ ID NO: 11901 - DNA, 657 bp, Unknown
  Obtained from environmental sample
  misc_feature (1)..(657): n is a, c, g, or t
atgatagataaatccgttttttcaaaaatcttctctaaactgccttcgaaattaaaaagaatacagccggagaaaaagacggaaaaacctaagcaaaaacaaacgccgaaattaaaactggttatttttattgtagactggaaccgcgcgcatactattaccaatgtttgtgaaaatgaaaaagtgcgttttcattttaccagcgtgggaaggggcactgccagttcggaaatactcgaccttctgggcataggttccggtgaaaaggctgtaattctctgtcttgaacaggaaataggcgttcaggttttgatgaaggaagttagaaaggaacttaaggtttacggaccgggagcggggattgcgtttaccgttccgctttccgcaattaacgatccgattttattggtattcaagaaaagtattttaaagagcgaaaaaattcaggaaaaaaatcccggtaaaggagcaaatatgacaaataaattttcacacgatttaatcgtttctattgttaatcacggttacactgacgagttaatgaatacggcaaggagcgcgggagcaagaggcggcacagtactgcacgcccgcggcacggcgcatgaggggcctgtaaaattttcggcatttcccgtacagatgaaaaagaggtaa

SEQ ID NO: 11902 - protein, 218 aa, Unknown
  Obtained from environmental sample
  misc_feature (1)..(218): Xaa is any amino acid
MIDKSVFSKIFSKLPSKLKRIQPEKKTEKPKQKQTPKLKLVIFIVDWNRAHTITNVCENEKVRFHFTSVGRGTASSEILDLLGIGSGEKAVILCLEQEIGVQVLMKEVRKELKVYGPGAGIAFTVPLSAINDPILLVFKKSILKSEKIQEKNPGKGANMTNKFSHDLIVSIVNHGYTDELMNTARSAGARGGTVLHARGTAHEGPVKFSAFPVQMKKR

SEQ ID NO: 11903 - DNA, 837 bp, Unknown
  Obtained from environmental sample
  misc_feature (1)..(837): n is a, c, g, or t
gtggaaatgcctttgcttaaaggttatcagtcggcaagatttctaaaatcccgctccgcagccgggaatattcccataatcatgtttaccaaccttggcgagacaagggataaattctggggggaacaggcgggggccgacgtttacatagaaaaatcccctgaaaatttcggggaactgtcggcgcagatacagcgtcttttaaacgaaaacagagcgattgattttgaggcggttaaaaaagaaggtgaaaaagtaacggataattctcttatagagaccgtaaataacattcttgacaacaagctctttcaggcgacccttatcggaatgttagccgagttatcaagcaaagtcagttctcttgaggaaacagttaagggcgttttcgcgttgttgcgcaatgcgtgcaaggctgatatgtgctccataatgataaaggacgccgacgacgcgctggtggtttataacgccaacaatttagggtatacggaaacgatagccgaagattttaaggctatcacaattgccgattttaacacccgcttttccgattacaaagttgactccaaagaagtgtatgattttttcccggccggggatataaatgaaagaattgaatcttacattttaattccgcttgtaaactcgggagatgaattcgctaccgtgcatataggaacttccgtaaaggaatatttttctccgcttattcttgaaaatctgaatgtttttctatccgcggcttctcctattgtcgctaacgctttgcgtcttaagcagatggaagccctgcaaaagaaaacaaggccgctttcgctcgttatgtccctatag

SEQ ID NO: 11904 - protein, 278 aa, Unknown
  Obtained from environmental sample
  misc_feature (1)..(278): Xaa is any amino acid
MEMPLLKGYQSARFLKSRSAAGNIPIIMFTNLGETRDKFWGEQAGADVYIEKSPENFGELSAQIQRLLNENRAIDFEAVKKEGEKVTDNSLIETVNNILDNKLFQATLIGMLAELSSKVSSLEETVKGVFALLRNACKADMCSIMIKDADDALVVYNANNLGYTETIAEDFKAITIADFNTRFSDYKVDSKEVYDFFPAGDINERIESYILIPLVNSGDEFATVHIGTSVKEYFSPLILENLNVFLSAASPIVANALRLKQMEALQKKTRPLSLVMSL

SEQ ID NO: 11905 - DNA, 498 bp, Unknown
  Obtained from environmental sample
  misc_feature (1)..(498): n is a, c, g, or t
atgaaaaagcgctcggtattngcgggccccgcccttattgacgccgtcgcgctaatgaaaaaactgggcgtaatcgaggattcaggcgcttttgccgacaattacgcgcaaacggactttcccatggcggatggtatcagtgtcattcagaaagatgtgcgcctgtttcagcttgcaaagtccgcgatttattcaggaattacggttctgtgcaaaacggcgggcttaactccggcggctttggacaaggcgtacattgccggagggcttggattctacatcaaccttgaaaacgccgcgtacaccggattgcttccctgcgaaataattcccaaaacggaagtcagcggcaacacaagcttaaaaggcgcagtccttagcctgacggacgaatcttttctgcaccgctgcaaggaaattatcgcccacagtaccgtggtagatttggcgatagataaagaatttgcagaagcctttgcggaaaatatgatgatttaa

SEQ ID NO: 11906 - protein, 165 aa, Unknown
  Obtained from environmental sample
  SIGNAL (1)...(19)
  misc_feature (1)..(165): Xaa is any amino acid
MKKRSVXAGPALIDAVALMKKLGVIEDSGAFADNYAQTDFPMADGISVIQKDVRLFQLAKSAIYSGITVLCKTAGLTPAALDKAYIAGGLGFYINLENAAYTGLLPCEIIPKTEVSGNTSLKGAVLSLTDESFLHRCKEIIAHSTVVDLAIDKEFAEAFAENMMI

SEQ ID NO: 11907 - DNA, 921 bp, Unknown
  Obtained from environmental sample
  misc_feature (1)..(921): n is a, c, g, or t
gtgttcccgtcgttgccgttatttatactctttaaaaacaaaaatggccaaatcataggtttggtcggagttaactttataagcacagttcaggacatagtagatagtttggtaaaagaattatacaacggcaagggaacagcctcgatattcagcgataactctacaattgtagcccattgggacaaagtaagagtcaaggataatttaaaaacaaacgacaaggaaaaagcgctttttggagacgaagttaaccgtttagccgacgcgatccttcgcggacaacgtcttacactggaaaagtattccccttccctgaaaacagacgtatattatattttacagcctattatcactacgggctttgaaacaaccccctgggctctgcgaataggcatccctttatcggaaataaagaggccgattcataccctgatgaatttttccataatatttgccattgtccttctggtattggcggcggttattactttattagtctcaaacaacattgttaaacctattatcgtcgtgaccgacacgttaaaggacatatctgaaggcgagggcgacctgacgcggactgtcgccgtcacttcaaaagacgagataggccatcttgccatgtactttaacaagacgcttgaaaaaatcaaaaacctgattcttattattaaaagacaggcaggcgcgttatcggaaatcggcggggatttgtccagtaacatgacagaaacggcggcgacggtgaacgaaattacctccaatattcagagcatcaaaggcagagtcataaaccaaagcgccagcgttaccgaaacaaacgcgactatggaacaagttgtcacanatatcaacaaaactcacggccatgttgaaaatcaggggcgcaatatttcacaggcgtcttccgccatttga

SEQ ID NO: 11908 - protein, 306 aa, Unknown
  Obtained from environmental sample
  DOMAIN (149)...(220): HAMP domain
  misc_feature (1)..(306): Xaa is any amino acid
MFPSLPLFILFKNKNGQIIGLVGVNFISTVQDIVDSLVKELYNGKGTASIFSDNSTIVAHWDKVRVKDNLKTNDKEKALFGDEVNRLADAILRGQRLTLEKYSPSLKTDVYYILQPIITTGFETTPWALRIGIPLSEIKRPIHTLMNFSIIFAIVLLVLAAVITLLVSNNIVKPIIVVTDTLKDISEGEGDLTRTVAVTSKDEIGHLAMYFNKTLEKIKNLILIIKRQAGALSEIGGDLSSNMTETAATVNEITSNIQSIKGRVINQSASVTETNATMEQVVTXINKTHGHVENQGRNISQASSAI

SEQ ID NO: 11909 - DNA, 405 bp, Unknown
  Obtained from environmental sample
  misc_feature (1)..(405): n is a, c, g, or t
ttgaacaacaaccatcacatcaatcatcgtcatcatcattcatcaatgcgcctgcttctagcttccaccaatttacacaaagcgagagagctgggggaacttttgccatgcgtcgacatagtggcttggtctgggccagacatacctgaaaatggcgctttttttcaggacaacgccatacagaaagctgtctttgcgaggaactggattttgcaacaaggcaataatggcaatgatgacaatgatggcagccggggcattgaaagcatcaatgaaatagacggggtgttggcagatgattctgggctttgcatcgaggcgctatttggaggacctggcgtgctgtccgcccgctttgccccccatctttcctaccccgaaaaaatcggctgctgcttggcatga

SEQ ID NO: 11910 - protein, 134 aa, Unknown
  Obtained from environmental sample
  misc_feature (1)..(134): Xaa is any amino acid
MNNNHHINHRHHHSSMRLLLASTNLHKARELGELLPCVDIVAWSGPDIPENGAFFQDNAIQKAVFARNWILQQGNNGNDDNDGSRGIESINEIDGVLADDSGLCIEALFGGPGVLSARFAPHLSYPEKIGCCLA

SEQ ID NO: 11911 - DNA, 942 bp, Unknown
  Obtained from environmental sample
  misc_feature (1)..(942): n is a, c, g, or t
gtgagactggtcaaacccgggctacaccgcaaatacattttgcacgttctcgccaattggggaaaaacttcagttatccgcattgacgggaaaacggtcgggtttaaggcttcacccaacaagcggcggaaaggagggggcaggaaaccgaaatatacgggcgattttataaccgtcctgcgcgccgtctgggcgttcttctggtaccggtgcggtaaaatactcgcgcctttcatgcgggagcacatgggctttcttgaacgtccgtttcgcataacggaaaaagacagggaactgcttttgtccgtcagcccttccaccattgacagggtgctgaaacaagagaagaaaaaacttgccctcaaaggaaaaagcgggacgaaaccggggaaactgcttaaaaaacagattcccgtccgcacatattacgccgacgccgacaaaaaacccggtttctttgaaattgacacggtccaccactgcggaacgtcggactcaggggagttttgcctcactttaaccgccacggacgtgtattccggatgggttgaactgcgccccacgctcaacaaagcccacaaatgggtttttcaagccctgctggacattaaatcctccctccctttccccctcacgggcatagacagcgacaatggagccgagttcatcaattccgccctgctcaaatggtgccaagatgaacatatccagttcacgcgcgcgagggcgtaccgtanaaacgacaactgtttcgtcgaacaaaaaaactgcacctgcgtcagaaacttcgtgggttattaccgcttctccgccgcggccgaatgcgacgccctggccgcggtctaccgttccctgtgccccctgatgaatttctttatgcccaccatcaagcttataagcaaagaaagagttggttccaaaataaaaaaagtgtatgaataa

SEQ ID NO: 11912 - protein, 313 aa, Unknown
  Obtained from environmental sample
  DOMAIN (145)...(305): Integrase core domain
  misc_feature (1)..(313): Xaa is any amino acid
MRLVKPGLHRKYILHVLANWGKTSVIRIDGKTVGFKASPNKRRKGGGRKPKYTGDFITVLRAVWAFFWYRCGKILAPFMREHMGFLERPFRITEKDRELLLSVSPSTIDRVLKQEKKKLALKGKSGTKPGKLLKKQIPVRTYYADADKKPGFFEIDTVHHCGTSDSGEFCLTLTATDVYSGWVELRPTLNKAHKWVFQALLDIKSSLPFPLTGIDSDNGAEFINSALLKWCQDEHIQFTRARAYRXNDNCFVEQKNCTCVRNFVGYYRFSAAAECDALAAVYRSLCPLMNFFMPTIKLISKERVGSKIKKVYE

SEQ ID NO: 11913 - DNA, 567 bp, Unknown
  Obtained from environmental sample
  misc_feature (1)..(567): n is a, c, g, or t
atgctgggtaatgctgtcattggcttttcaggacaggcaaaaatggagaacgccataaaccgccttgccggatgtttttccgtgataatctacccggggtttttcatgtcatggcttgtaagaatgagcgtatgggaaatttcaggcgctgtcctttttttcctgttaattgtattcggcaacgattccgcggcatggcttgcgggttctctnttcggcgcgaacaacaaaggcatatttccggcaagcccgaataaaagcatagccggctttataggcggaataataggcgcaataataatttccgccggcgcggcattgttaactccttttatttttcccggaaatgataactttgcaaaaataattatccttggcgtcattaccgccgttttcggaaatctgggagatttggcggaatcctctcttaaaagaagcgttaatattaaagattcaggcaatctgatgctcgggcgcggcggaattctggattcaatcgactctgtctcgcttgcggctccggcatactttcttctttttaacatatttttttataacttccaatga

SEQ ID NO: 11914 - protein, 188 aa, Unknown
  Obtained from environmental sample
  DOMAIN (21)...(183): Cytidylyltransferase family
  misc_feature (1)..(188): Xaa is any amino acid
MLGNAVIGFSGQAKMENAINRLAGCFSVIIYPGFFMSWLVRMSVWEISGAVLFFLLIVFGNDSAAWLAGSLFGANNKGIFPASPNKSIAGFIGGIIGAIIISAGAALLTPFIFPGNDNFAKIIILGVITAVFGNLGDLAESSLKRSVNIKDSGNLMLGRGGILDSIDSVSLAAPAYFLLFNIFFYNFQ

SEQ ID NO: 11915 - DNA, 453 bp, Unknown
  Obtained from environmental sample
  misc_feature (1)..(453): n is a, c, g, or t
gtgcttctatattcatcttattatgttcaggttgacaagaactgcatccctacaggccgattgcttcctgttaatgatactgtttttgattttaaaacgcggcggaaaatttgttctgatgattccttttttaagccttttaaagggtatgatcattgttttgtcgtagacggagagcctggcaaactgcgtccctgcgccgaagtttatgaacctgattcaggccgtaccatgaaagtttttacgacacagccgggcgttcaattctatacgggaggccaccttaaaagagttgaaggcaaacaaggttctgtttacacaaaatattccggtctctgcctggaaacgcagcattaccctgattctcccaatcagaacagcttcccctcctgcattgtgggaccggaaaaagattatcacgaaaaggctgtgtttgcgttttcgtgcaactaa

SEQ ID NO: 11916 - protein, 150 aa, Unknown
  Obtained from environmental sample
  misc_feature (1)..(150): Xaa is any amino acid
MLLYSSYYVQVDKNCIPTGRLLPVNDTVFDFKTRRKICSDDSFFKPFKGYDHCFVVDGEPGKLRPCAEVYEPDSGRTMKVFTTQPGVQFYTGGHLKRVEGKQGSVYTKYSGLCLETQHYPDSPNQNSFPSCIVGPEKDYHEKAVFAFSCN

SEQ ID NO: 11917 - DNA, 384 bp, Unknown
  Obtained from environmental sample
  misc_feature (1)..(384): n is a, c, g, or t
ttgtttggttctatcgctatgaccatggaacctgtagcttccgctattgaagcgctggtactgagagaaggaacgcgtacaagcgcggatcagccggacggggcgccggttatttcttttgatcccaacatcaggccttttatgattaaggacaagagtgcatacatacaacgttttgaaaagtggatagccgcttctaccatcgccaagatttcctctgccgattttgactttatctatcccgggctggaactggaacaagccctacaaaaaatgcttggtatggggccgcagcttgcgataagtacgctgggttccaagggcgcccttgctctgctccgcagagatgagggaacggtaaccaagtccaccgcaccgtggtga

SEQ ID NO: 11918 - protein, 127 aa, Unknown
  Obtained from environmental sample
  misc_feature (1)..(127): Xaa is any amino acid
MFGSIAMTMEPVASAIEALVLREGTRTSADQPDGAPVISFDPNIRPFMIKDKSAYIQRFEKWIAASTIAKISSADFDFIYPGLELEQALQKMLGMGPQLAISTLGSKGALALLRRDEGTVTKSTAPW

SEQ ID NO: 11919 - DNA, 486 bp, Unknown
  Obtained from environmental sample
  misc_feature (1)..(486): n is a, c, g, or t
atggtcatagcgatagaaccaaacaaaatacagcgggtatcagcgggaagctttgcgggcagatcaggtatatcaaaggcttcaggatttattattttggttttgtgtctaaaaatgataccggtctcaagtattgctgtacctatttaccagataataatcgggctgggactttatgacacccaaataggcctgataattgtgtacgcggcaataaatatgccttttgtaatatggacaatgaccagtttttatgatggtattcctttttcccttgatgaggctgcctccattgacggggctgataatttaacggcgttttataaggtaatactgccaataagcgcgcccggaattgccacatcggctatttttaccgtgtttctggcatggaatgattttttaatatcattactgttgacaagtatgaacgcaaaaacttttaccgtcagcctgtcccaattcctctccgcatatagcccttga

SEQ ID NO: 11920 - protein, 161 aa, Unknown
  Obtained from environmental sample
  misc_feature (1)..(161): Xaa is any amino acid
MVIAIEPNKIQRVSAGSFAGRSGISKASGFIILVLCLKMIPVSSIAVPIYQIIIGLGLYDTQIGLIIVYAAINMPFVIWTMTSFYDGIPFSLDEAASIDGADNLTAFYKVILPISAPGIATSAIFTVFLAWNDFLISLLLTSMNAKTFTVSLSQFLSAYSP

SEQ ID NO: 11921 - DNA, 459 bp, Unknown
  Obtained from environmental sample
  misc_feature (1)..(459): n is a, c, g, or t
gtggctaatctctttatgatgtttgagccgcttagcggtcagcgtgaggttatggtaaccgaacggcgtaccatgcaagacttcgcccgctgcctgcggtatttggctgaagaacggtatgcgaatgctgaaaaaataattgtggtaatggacaatctgaatacgcactctctggcttcattatacaccgcctttgaaccgcaagaggcgtttcgtcttgcgcagcgctttgaaatccattacacccccaaacacggttcgtggctgaatatggccgagctagaaatcggcgtgatgagtcggcaatgccttaaacggagaattccgactatggaaaagatggcaagcgaagtacaatcctgggttactgaacggaacaatcttaaaactaccgttcactggcagttcaccaccgccgatgcccgtattaaactcatgcatttgtatccgaaattttaa

SEQ ID NO: 11922 - protein, 152 aa, Unknown
  Obtained from environmental sample
  misc_feature (1)..(152): Xaa is any amino acid
MANLFMMFEPLSGQREVMVTERRTMQDFARCLRYLAEERYANAEKIIVVMDNLNTHSLASLYTAFEPQEAFRLAQRFEIHYTPKHGSWLNMAELEIGVMSRQCLKRRIPTMEKMASEVQSWVTERNNLKTTVHWQFTTADARIKLMHLYPKF

SEQ ID NO: 11923 - DNA, 510 bp, Unknown
  Obtained from environmental sample
  misc_feature (1)..(510): n is a, c, g, or t
ttggatagattggccgagcggcacgaggcgacaggcgaatatcagaccaggatttcacaggccaccatttccaacgcaatggacgtgggcgcgcccagcaactttgagcgtatggcggcgcatttttcgttagatgaaatgcggcggctcatacttggcgtttcagtaacggacgctgaaaccagggaaaccatcgttaaagtacacggcgaaacaggctatttcctcgacccgcacagcgccgtcggctggaaaggcgtagacaaactgctcgaaaaaaacgacgcgaacagcaggctcttgtcccaagggccaatcggggtgctttccacggcccatcccgcgaaattcagcgaaaccgtcgagccgctgatcggctccgcgccgctgcccgacacactcgcccgcgcgatgaagcggacagtcaaatcccaaacaattccggcggaagtatccgcgttaattgatattctgagcagggaggatgcgtcctccatggaggacgaatga

SEQ ID NO: 11924 - protein, 169 aa, Unknown
  Obtained from environmental sample
  misc_feature (1)..(169): Xaa is any amino acid
MDRLAERHEATGEYQTRISQATISNAMDVGAPSNFERMAAHFSLDEMRRLILGVSVTDAETRETIVKVHGETGYFLDPHSAVGWKGVDKLLEKNDANSRLLSQGPIGVLSTAHPAKFSETVEPLIGSAPLPDTLARAMKRTVKSQTIPAEVSALIDILSREDASSMEDE

SEQ ID NO: 11925 - DNA, 396 bp, Unknown
  Obtained from environmental sample
  misc_feature (1)..(396): n is a, c, g, or t
atgaattatctgttggatacgcagattttatgtgggtcttttatgcctcgggaaaaatatcctncgacaatttcgcaaatttatttagatgagaataacagcatttattacagtcctgtaaatttatgggaaatatcaatcaaatatgggttaaaaaaattgaatttaaaaggaataacccctcaagatttttataaagaaatcgaaaatagcttttatttatgcaaagaaataaataacgatgatttaataacttgctacaaattgcctatatatcataaagacccatttgacagatttttaatatgggaagcaataagaaataattttattcttatgagttttgataaaaatattaaattatataaaaaagagggcttaaaatttgtctgttag

SEQ ID NO: 11926 - protein, 131 aa, Unknown
  Obtained from environmental sample
  misc_feature (1)..(131): Xaa is any amino acid
MNYLLDTQILCGSFMPREKYPXTISQIYLDENNSIYYSPVNLWEISIKYGLKKLNLKGITPQDFYKEIENSFYLCKEINNDDLITCYKLPIYHKDPFDRFLIWEAIRNNFILMSFDKNIKLYKKEGLKFVC

SEQ ID NO: 11927 - DNA, 870 bp, Unknown
  Obtained from environmental sample
  misc_feature (1)..(870): n is a, c, g, or t
gtgaacaccgactactaccccatgaacttcacgctagacggtattcgtgattcgtacaagtttgacgtatcttgccaaggtacagtgccgcaagcaatcatggcgttcctagaatcaatgtctttcgaagacgccgtccgaaacgccgtctccataggcggcgacagcgacactttagccgcaatcaccggcggcatcgccgaggcctactacggggtcccggcagcgatacgcaaacacgcgctgacgtttttggatgagaggcttttgaaaatcctcacggcttttgaaaatgtctataggccttccttagaaaagaccgtgaaacaggcgacagttaaaattgcccgcaagaataaaaagattaagacaggcgaccgtgccgaaacgatgcagatgtcttttgatatgattgacgaagacttcgccgagacattgacagttcacgaggaaacctccagtgaacagttgttccggcatctatttgaggcctgtaatattctgagagggccgattaaccaagacgaatataaaagttacgttacgccgttgttgttttttaaaagactttcagatgtctacgatgaagaaaccgccaaggcgcttgaagaatccggcggcgatgaagagtacgccgcttttcccgaaaaccaccgattcagcatcccaaacggctgtcactggaatgatgtgcgtgcttgtcacgaaaatgtcggcacggcaatcacagacgcaatgaccggtatcgaacgcgtaaaccccgacactcttttcggtgtcttctccagctttgacgatgcggtgtggacggataaaagcaaactaaccgatacgcggctgaaagaccttgggaacatatgtcaaaaataa

SEQ ID NO: 11928 - protein, 289 aa, Unknown
  Obtained from environmental sample
  misc_feature (1)..(289): Xaa is any amino acid
MNTDYYPMNFTLDGIRDSYKFDVSCQGTVPQAIMAFLESMSFEDAVRNAVSIGGDSDTLAAITGGIAEAYYGVPAAIRKHALTFLDERLLKILTAFENVYRPSLEKTVKQATVKIARKNKKIKTGDRAETMQMSFDMIDEDFAETLTVHEETSSEQLFRHLFEACNILRGPINQDEYKSYVTPLLFFKRLSDVYDEETAKALEESGGDEEYAAFPENHRFSIPNGCHWNDVRACHENVGTAITDAMTGIERVNPDTLFGVFSSFDDAVWTDKSKLTDTRLKDLGNICQK

SEQ ID NO: 11929 - DNA, 300 bp, Unknown
  Obtained from environmental sample
  misc_feature (1)..(300): n is a, c, g, or t
ttgccctttcaccctaaaggcgagggcaacgggtacatattgacaatcggcgacaaaaagatctacgccgccggagatacggagaacgtcccggagatgaaagcgctgaagaatatcgacgtagccttcctgcccatgaacctcccgtacacaatgacgcccgaaatggtcgcggacgcggctaaagggttcaagcctaaagtcctgtacccgtaccactacggcgagaccaaaaccggcgagcttacggaacttcttaaagggactcagggcgttgaagtcaggatacggcgcttttga

SEQ ID NO: 11930 - protein, 99 aa, Unknown
  Obtained from environmental sample
  misc_feature (1)..(99): Xaa is any amino acid
MPFHPKGEGNGYILTIGDKKIYAAGDTENVPEMKALKNIDVAFLPMNLPYTMTPEMVADAAKGFKPKVLYPYHYGETKTGELTELLKGTQGVEVRIRRF

SEQ ID NO: 11931 - DNA, 429 bp, Unknown
  Obtained from environmental sample
  misc_feature (1)..(429): n is a, c, g, or t
atggcggcccaccgcaaagccctgcaccgcaacatggtgacaagcctgttcaggtacgagcgtgtcaaaaccaccaaggcaaaagccctggcggtacgccgtactgcggaaaaaatgatcacgcgcgccaaggttgattccgttcataacagacgcattgtttccggccgtctgtacaatgaaggaattgtggcgaagctgtttaccgttattgcgcccaggatgaaggatcggaacggcggttatacaaggatacttaaagtaggccaacggctcggagacgccgcgcagatggtgatcctggaattggtagactataaacttgacgttgaaggcagcgaaaagaaagccaaaaagaaagaagccaaggcgaaagacaaagccgataaaaaagaagccgacaaaaaagaaaaagaagagaagaaataa

SEQ ID NO: 11932 - protein, 142 aa, Unknown
  Obtained from environmental sample
  DOMAIN (8)...(104): Ribosomal protein L17
  misc_feature (1)..(142): Xaa is any amino acid
MAAHRKALHRNMVTSLFRYERVKTTKAKALAVRRTAEKMITRAKVDSVHNRRIVSGRLYNEGIVAKLFTVIAPRMKDRNGGYTRILKVGQRLGDAAQMVILELVDYKLDVEGSEKKAKKKEAKAKDKADKKEADKKEKEEKK

SEQ ID NO: 11933 - DNA, 705 bp, Unknown
  Obtained from environmental sample
  misc_feature (1)..(705): n is a, c, g, or t
atgagcgatgcttcaccactagatatatatttcacaacttgcgcggntcgggttccgagaaatatcagcaaaaacaatagccgcgggaaaaccgggcagcccttgtgtgaaaggattttgcaaaacaacacggagttcagcgaaacccctgtgtgcaaagcgagccgcttttatcaagaacgcaaattaaagcaaattgaagaaagcgatacgagcgaagagcaaaaagaaaaattgcgaaaagatgtttatgcaaagcagtgtatttgcgaccaccttggcaacagcggtttgattttctttggtgcagaaaaaacagaagatgctccgcaagcaatttgcccaggtccaaacatagcttggttcaaccgaagctacgatatgcaagagatgatagaccacatttacggtcgcatagcagacttaactccaccagaacgcccgcacatgtttgcaaaagaagttgagatgtacggaaattggtttgccttgcaagttgaaaaatttggtggcgataaagatctcgctacttggctgaaaacagccgcaaaaaattttgccgaaggcatggactattgtctggaagtagcaagcacaacgccattccccggcgagaatctcgcaagcattccgccaagggttgaaattgaaaaggaaaggttgaaggagagtttaagcaccttggaaagaaagattgctgcctga

SEQ ID NO: 11934 - protein, 234 aa, Unknown
  Obtained from environmental sample
  misc_feature (1)..(234): Xaa is any amino acid
MSDASPLDIYFTTCAXRVPRNISKNNSRGKTGQPLCERILQNNTEFSETPVCKASRFYQERKLKQIEESDTSEEQKEKLRKDVYAKQCICDHLGNSGLIFFGAEKTEDAPQAICPGPNIAWFNRSYDMQEMIDHIYGRIADLTPPERPHMFAKEVEMYGNWFALQVEKFGGDKDLATWLKTAAKNFAEGMDYCLEVASTTPFPGENLASIPPRVEIEKERLKESLSTLERKIAA

SEQ ID NO: 11935 - DNA, 969 bp, Unknown
  Obtained from environmental sample
  misc_feature (1)..(969): n is a, c, g, or t
atgtacagattccgccgagaccgatggaattcgcaggacgcggacggaatacttttggcgttcagcaaggaagtagacgcccccgatgtaattggaaaggcaatcggcagaggactgcgcgacgctcttgctgcaaagggctgcaagtattcaggccccatcgtattgttaaacgatactgtcgctaccctgctctccggtcttgtttcaatttctcccgacggcgaaccatcgcggacaatagccgacttcagcgtaaaaagcggtcccgttataggatttattttaggaacaggatttaacacagcttacactgaaactgtcatcccaaaaacaggctttaattctccgtcttccccgcaaatcgtagtatgcgagaccggaaatttcaacgtgaattaccgcggcaaacttgataaagaatttgacagcactacaaaaaacccggacggatactttcttgaaaaagcgacagccggcgcgtatcttggtcctttgacattgcatattcttaaacaggcggtaaaagataaagttttatgttttagaaaatccgacgagcttttaaatatgccccatcttgaaacaagaaccttaaatgagtttacccactctcccctttcaaatcagggaccgttaggctcactcttcggcgccgatgaaagcgccgcccttgccgcagtgcaatacattacgtcgataattaccgagcgcggcgcgctgttttccgcggcagtgttagccgcaactattatcaaatcaggcggcggatatgaaccgtactcgcctgtccgcatcgccgtggagggaacgacatacctcatttacaaaggaatgcgccgctctcttgaagcgcatcttcatcaaatacttttcagggaaaaaccgcgtccgtatattgtctctcccgtggaaacagcaagcccttttcggagcagcggtcgccgcaatatcaaaataatttattga

SEQ ID NO: 11936 - protein, 322 aa, Unknown
  Obtained from environmental sample
  DOMAIN (89)...(311): Hexokinase
  misc_feature (1)..(322): Xaa is any amino acid
MYRFRRDRWNSQDADGILLAFSKEVDAPDVIGKAIGRGLRDALAAKGCKYSGPIVLLNDTVATLLSGLVSISPDGEPSRTIADFSVKSGPVIGFILGTGFNTAYTETVIPKTGFNSPSSPQIVVCETGNFNVNYRGKLDKEFDSTTKNPDGYFLEKATAGAYLGPLTLHILKQAVKDKVLCFRKSDELLNMPHLETRTLNEFTHSPLSNQGPLGSLFGADESAALAAVQYITSIITERGALFSAAVLAATIIKSGGGYEPYSPVRIAVEGTTYLIYKGMRRSLEAHLHQILFREKPRPYIVSPVETASPFRSSGRRNIKIIY

SEQ ID NO: 11937 - DNA, 1005 bp, Unknown
  Obtained from environmental sample
  misc_feature (1)..(1005): n is a, c, g, or t
atgacagatcggagagcaggacgctccgagcaactggccctgcttgaaggcatagcgcacgaaaagctgacttcgcctgaaaccgggcgcttattgtccgagttgggttcttctacggaaaaccccagcggcgacgaaaagctgccggagctggagagggattttctcaaagttctgcgccgtaattacgaccgcgctgtgaagctccctggggattttgtctccgcagccgcccgtgccgaggggctttcacaggccgcctgggtaaatgcgcggcgggacaataacttttccgcttttttgcctcatttggtaaagatgatcgatttttctcgtcagcgcgctatttactggggctataaagataacccatacgacggtcttttggatatttatgaaagaggtatgggcgttaaggctattagcgatgtttttacgcctatgggcaaaaggcttggggatctgctaaaaaaaatctcttcaatgccgcggcccgataattcttttttggaccaggaatatgatgttgaaaaacaggccggtttcagcaaggagctactaaaacgccttggttttgaaacaagcagggggcgcatggatatttccgcccatccctttaccaccacgctgggttctgacgatatacgcataaccacccgttatttaaagcggcaggttcaaagcggaatattttccactattcacgaagcgggccacgctttttacgagatgggtttcccggaagaactccgcccttccagtcttgccgacggggcttccatgggcattcacgagtcccaatcgcggctgtgggaaaacgtcattggacgcagtcgcgctttttgggaagcaatgtatccctgtctgcgttccttctttccaggcccactgtcagcgtttacagccgaagatttttacagggcaattaaactgggtgagccttcgcttatccgcattgaagccaacgaaattacttacagcctccacattatcgtcaggttttga

SEQ ID NO: 11938 - protein, 334 aa, Unknown
  Obtained from environmental sample
  DOMAIN (1)...(334): Carboxypeptidase Taq (M32) metallopeptidase
  misc_feature (1)..(334): Xaa is any amino acid
MTDRRAGRSEQLALLEGIAHEKLTSPETGRLLSELGSSTENPSGDEKLPELERDFLKVLRRNYDRAVKLPGDFVSAAARAEGLSQAAWVNARRDNNFSAFLPHLVKMIDFSRQRAIYWGYKDNPYDGLLDIYERGMGVKAISDVFTPMGKRLGDLLKKISSMPRPDNSFLDQEYDVEKQAGFSKELLKRLGFETSRGRMDISAHPFTTTLGSDDIRITTRYLKRQVQSGIFSTIHEAGHAFYEMGFPEELRPSSLADGASMGIHESQSRLWENVIGRSRAFWEAMYPCLRSFFPGPLSAFTAEDFYRAIKLGEPSLIRIEANEITYSLHIIVRF

SEQ ID NO: 11939 - DNA, 783 bp, Unknown
  Obtained from environmental sample
  misc_feature (1)..(783): n is a, c, g, or t
atggcggaagaagcggttaaaatcgcaaaacgggacaatcaggtgattgcggttacggcggcggatttggacggtatttttgaattaacgacaaaaataaaggagggcggttttaacgatttaataatagagtttcaaacacattcacttgctgaaagttttcagacaaactcaatcgcaagaaaagccgcgcttaaaaagagcataaaagccctgggttacgcgacgcttaaatttattaacacaagaaacgcctcggatgacgttgtagccgccgtaacggaaattgataaatttggcggaatgatcgtgcttccaagttttgatcccgcgcaacttatgcctcttcttacgttacgccaaaacatttataccgacccgcaaaaaccaattcaagtggaaccaaaactttacgctataggggagcctgacaggaaatcgccaatttttgtaacgacaaatttctctttaacctactttttggtttcaggagagattgagaacagcggcatctccgcgtggcttgttatacccgaatgcgaaggctttagcgtactgacggcgtgggcggcgggaaaattttcaggctcttcaatcgcaaagtttattaaagaaattaacatcgaaaaccagacggacacaaagcaaattgttattcctggttatgttgcgcaaatatcaggcgagcttgaagaaaatatgccgggttttaaagttcttgtaggtcccggcgaagcgggggatctggaaggctttattaaaaatgtgttgcttaaaaaataa

SEQ ID NO: 11940 - protein, 260 aa, Unknown
  Obtained from environmental sample
  DOMAIN (1)...(253): CO dehydrogenase/acetyl-CoA synthase delta subunit
  misc_feature (1)..(260): Xaa is any amino acid
MAEEAVKIAKRDNQVIAVTAADLDGIFELTTKIKEGGFNDLIIEFQTHSLAESFQTNSIARKAALKKSIKALGYATLKFINTRNASDDVVAAVTEIDKFGGMIVLPSFDPAQLMPLLTLRQNIYTDPQKPIQVEPKLYAIGEPDRKSPIFVTTNFSLTYFLVSGEIENSGISAWLVIPECEGFSVLTAWAAGKFSGSSIAKFIKEINIENQTDTKQIVIPGYVAQISGELEENMPGFKVLVGPGEAGDLEGFIKNVLLKK

SEQ ID NO: 11941 - DNA, 942 bp, Unknown
  Obtained from environmental sample
  misc_feature (1)..(942): n is a, c, g, or t
atgggttcgcttcatatgactatccaaacagccgtactcatagaaaccttaaaaaaattaggcgcggacgtgcgctggtgcagttgcaatattttttcaacccaagaccacgcggcagcggctatagcaaaaacgggaactccggtttttgcgtggaaaggcgaaacgctggaagattattgggaatgtacttttagagcgataagttttcccgacggcaaaggtccgcagttaatcgtggacgacggcggcgacgcgactctgataattcacaaaggatacgaattggaaaacggcgacgactgggtaaattcaaaatccgaaagccacgaagaagacgtaataaaaaatctgctcaaagaagtttacgccaaagataaaaaccactggcataacatagtggcgcaactcaaaggcgtaagcgaagaaaccactaccggcgtacatcgcttgtatcagatgtttgaaaaaggcaaactgcttatccccgcgataaacgtaaacgactcggtgacaaaatccaagttcgacaatctttacggttgccgcgaatcgcttgttgacggaataaaaagagccacagacgttatggtcgcgggaaaagtcgcggtcgtctgcggatacggcgacgtgggtaagggctgtgcaaaatcgcttttgggcttgggcgcaagagtggtagttaccgaaatagacccgatttgcgctttgcaggcggctatggagggctttcaggtgacgaccgtcgaagacactttgggctggggcgatatttatgtcaccactactggaaactgcgatattatccgcatagaacatctggaaanaatgaaaaatcaggcgatagtgtgcaacatcggacatttcgacgacgaaatagaggtcgcaaaattggacgggtataaaggaataagaaactncacattagcctcaggtagataa

SEQ ID NO: 11942 - protein, 313 aa, Unknown
  Obtained from environmental sample
  DOMAIN (2)...(302): S-adenosyl-L-homocysteine hydrolase
  misc_feature (1)..(313): Xaa is any amino acid
MGSLHMTIQTAVLIETLKKLGADVRWCSCNIFSTQDHAAAAIAKTGTPVFAWKGETLEDYWECTFRAISFPDGKGPQLIVDDGGDATLIIHKGYELENGDDWVNSKSESHEEDVIKNLLKEVYAKDKNHWHNIVAQLKGVSEETTTGVHRLYQMFEKGKLLIPAINVNDSVTKSKFDNLYGCRESLVDGIKRATDVMVAGKVAVVCGYGDVGKGCAKSLLGLGARVVVTEIDPICALQAAMEGFQVTTVEDTLGWGDIYVTTTGNCDIIRIEHLEXMKNQAIVCNIGHFDDEIEVAKLDGYKGIRNXTLASGR

SEQ ID NO: 11943 - DNA, 552 bp, Unknown
  Obtained from environmental sample
  misc_feature (1)..(552): n is a, c, g, or t
atgtccgatgttgcacactatcgcctgatttttcattntttccagatgttctatgcggataatatcgcagtttccagtagtggtgacataaatatcgccccagcccaaagtgtcttcgacggtcgtcacctgaaagccctccatagccgcctgcaaagcgcaaatcgggtctatttcggtaactaccactcttgcgcccaagcccaaaagcgattttgcacagcccttacccacgtcgccgtatccgcagacgaccgcgacttttcccgcgaccataacgtctgtggctctttttattccgtcaacaagcgattcgcggcaaccgtaaagattgtcgaacttggattttgtcaccgagtcgtttacgtttatcgcggggataagcagtttgcctttttcaaacatctgatacaagcgatgtacgccggtagtggtttcttcgcttacgcctttgagttgcgccactatgttatgccagtggtttttatctttggcgtaaacttctttgagcagattttttattacgtcttcttcgtggctttcggattttga

SEQ ID NO: 11944 - protein, 183 aa, Unknown
  Obtained from environmental sample
  misc_feature (1)..(183): Xaa is any amino acid
MSDVAHYRLIFHXFQMFYADNIAVSSSGDINIAPAQSVFDGRHLKALHSRLQSANRVYFGNYHSCAQAQKRFCTALTHVAVSADDRDFSRDHNVCGSFYSVNKRFAATVKIVELGFCHRVVYVYRGDKQFAFFKHLIQAMYAGSGFFAYAFELRHYVMPVVFIFGVNFFEQIFYYVFFVAFGF

SEQ ID NO: 11945 - DNA, 825 bp, Unknown
  Obtained from environmental sample
  misc_feature (1)..(825): n is a, c, g, or t
ttgcgcgagataaattcgcgtttgggatttttggtgaacgtcggcttaggatatttgacgcttgacagaatggctcaaacgctttctggcggcgaggcgcagcgtattcggcttgcgacgcaaatcggttcgcggcttacgggcgttacgtatattctggacgagccgagcatcgggcttcatccgcgcgacaacactaaactgctgaacacgcttttttctcttagggatttgggaaacaccgtaatcgtggtcgaacacgacgaggaaacgcttaaatcggctgattacttaatcgatataggacctaaggcggggcggcacggcggtgaagttattgcggcgggaactccgaaagaggttatggaaaatccaaattcgcttacgggcggctatttgtcggggcggctaaaaatcgatattccaaaaaacagacggacgggaaacggaaatttcctaaaaataatcggcgcgtgcggcaacaacctcaaaaacgtaaacgtggaaattcctcttggaacgctttgcgttattacgggcgtttcgggaagcggaaagtcgtcgcttatcaatagaacgctttaccccgcgctgtcgaaatttttctataaaaccaaagaccagccgctgaaatatcaaaaaatcgacggaatgaaatttttggacaaagtgataaatatcgaccagtcgccgataggacgcacgccgcgctcaaatccggcgacatatacgaaattattcgaccagattcgcgatttatacggcggacttcccgaaagtaaaattcgcggctacgacaaaggaagattttctttcaacngttaa

SEQ ID NO: 11946 - protein, 274 aa, Unknown
  Obtained from environmental sample
  DOMAIN (1)...(102): ABC transporter
  misc_feature (1)..(274): Xaa is any amino acid
MREINSRLGFLVNVGLGYLTLDRMAQTLSGGEAQRIRLATQIGSRLTGVTYILDEPSIGLHPRDNTKLLNTLFSLRDLGNTVIVVEHDEETLKSADYLIDIGPKAGRHGGEVIAAGTPKEVMENPNSLTGGYLSGRLKIDIPKNRRTGNGNFLKIIGACGNNLKNVNVEIPLGTLCVITGVSGSGKSSLINRTLYPALSKFFYKTKDQPLKYQKIDGMKFLDKVINIDQSPIGRTPRSNPATYTKLFDQIRDLYGGLPESKIRGYDKGRFSFNX

SEQ ID NO: 11947 - DNA, 828 bp, Unknown
  Obtained from environmental sample
  misc_feature (1)..(828): n is a, c, g, or t
atgccagatatgctaagccagttagacaagaaagcgcaagagatcgccggggtgtcgattagactcgcatctcccgagaccatccgtagttggtctttcggcgaggtcaccaagccggagaccataaactaccgttcgttcaagcctgaaaaggacggtctcttttgcgaaaagatattcggcccggtccgcaactgggagtgtaactgcggtaagtacaagcgcatccgctatcgcggcgttgtttgcgaccgttgcggcgtggaggttatgcactccaaggtgaggcgcgagcgtatggggcacatagagcttgccgagccggtcgtccatatttggttcttaaagagcgttccctcccacatcagttatctgctcggtattacaaacagcaatctggagaggatcatctactacgagtcttacgtggtgatagatccgggcgacacgaatttgcgtaaggatcagcttctcaccgaggagcagtactccgaactcatagatcagggtaagaagtttgacgcgaagatgggcggccaggcggttttggaacttttggcaaaggtcgaggtggagaagttggtgatagagttgcgtcatttggtaaagcgcgagacctccgagcagcgtcgtttggagcatttgaagcgtttgcgcgtcgccgaggcttttaacaggtcgaagaacgacccgcagaatatggtgttgaaagtgttgccggtgttgccgcctgatttacggccgcttgtgccgctggagggcgggcgtttcgccacctctgatttgaatgatctttatcgtcgtgtgataaataggaataatcggtga

SEQ ID NO: 11948 - protein, 275 aa, Unknown
  Obtained from environmental sample
  DOMAIN (12)...(275): RNA polymerase Rpb1, domain 1
  misc_feature (1)..(275): Xaa is any amino acid
MPDMLSQLDKKAQEIAGVSIRLASPETIRSWSFGEVTKPETINYRSFKPEKDGLFCEKIFGPVRNWECNCGKYKRIRYRGVVCDRCGVEVMHSKVRRERMGHIELAEPVVHIWFLKSVPSHISYLLGITNSNLERIIYYESYVVIDPGDTNLRKDQLLTEEQYSELIDQGKKFDAKMGGQAVLELLAKVEVEKLVIELRHLVKRETSEQRRLEHLKRLRVAEAFNRSKNDPQNMVLKVLPVLPPDLRPLVPLEGGRFATSDLNDLYRRVINRNNR

SEQ ID NO: 11949 - DNA, 330 bp, Unknown
  Obtained from environmental sample
  misc_feature (1)..(330): n is a, c, g, or t
ttgagcgacgagtcgcgcacgtcgccggccttctcgccgaatatcgcgcgtagcaatctctcttccggagacaactccgtctcgcccttgggagtcaccttgcctacaagtatatcgccgggctccacctccgtgccgatccttatcacgccgttttcatcgaggttgcgcaccgcgtcgtcgctgacgttggggatctccctcgttagttcctccggcccgcgcttcgtgtcgcgcacctccgtttcaaagacctctatgtgcaccgaagtgaaaacgtcctcggccaccagtttttcggagattatgatggcgtcctcaaagttgtag

SEQ ID NO: 11950 - protein, 109 aa, Unknown
  Obtained from environmental sample
  misc_feature (1)..(109): Xaa is any amino acid
MSDESRTSPAFSPNIARSNLSSGDNSVSPLGVTLPTSISPGSTSVPILITPFSSRLRTASSLTLGISLVSSSGPRFVSRTSVSKTSMCTEVKTSSATSFSEIMMASSKL

SEQ ID NO: 11951 - DNA, 447 bp, Unknown
  Obtained from environmental sample
  misc_feature (1)..(447): n is a, c, g, or t
atgcccgataaaataaccgcaaatgagccttggataagtatgttgaaccacaatattcttattgtctgggaaccttcgtacaatctgggaatacctattgtcgatgaacagcaccgtgggattgtttccaccatcaattccctctgctatgcaatacaaaacaggcatggcaacgagatgcttcgccccgtaatcaacatggttaccgaatatacccgtatccatttcgagattgaagaggattttcttaaaaaatgcggctatcctaacctggaaaaccatcgtatattgcacaaagaattaacaagcgcgctgtcccatacaagtaaggatagtatttggaataaggatcctcaggagttcttaaattttcttaaaaaatggtggatcaatcatatttgtaaagaagatcgggtatttagccaatatatagcanacaagcgataa

SEQ ID NO: 11952 - protein, 148 aa, Unknown
  Obtained from environmental sample
  misc_feature (1)..(148): Xaa is any amino acid
MPDKITANEPWISMLNHNILIVWEPSYNLGIPIVDEQHRGIVSTINSLCYAIQNRHGNEMLRPVINMVTEYTRIHFEIEEDFLKKCGYPNLENHRILHKELTSALSHTSKDSIWNKDPQEFLNFLKKWWINHICKEDRVFSQYIAXKR

SEQ ID NO: 11953 - DNA, 753 bp, Unknown
  Obtained from environmental sample
  misc_feature (1)..(753): n is a, c, g, or t
atgaaaaagacaggtaaatttttgggattgctcgtcattgtcgcggtaatcgggtttgcggccatatcaatgattggctgttcgtcacctggcaatggcggcgaaacaggcggagaagacgggaaaacccttgataagattgaggtaactactccgccgacaaagcttcattacaatttgggtgaagaccttgaccttaccggcattgttataacggcaacctacaccgacggcactgaggaggagattgatgttgacgactgtgaaatcaacggttatgacaaaaccacggcgggacatcaaaccatcaccgtaacttataaagaaaaggacgctgaattcagtgttaatgttattgatccgtcacttccgaccgtagcgacgcctacggcgaatccggcggcgggaacctacgatgaagtgataagtgttgaattaaccacaacgacttccggcgcgacaatctactacactacggacgggtcagaaccttctgaagaaagcgatgtgtatacaactgcgattagtatcagccaaacaacgacaataaaagcctttgcggttttagcgggctataacgacagcgacgaacttgttgcggaatatgtattaatattaccctttacctccgcgcctgtgctttcacttgagccgggtaacgaanaaattatttacacatggaaagactcagatcctgttgctgacagttacgatgtgtattggaaaggcagaaccgggtttgacagcggctga

SEQ ID NO: 11954 - protein, 250 aa, Unknown
  Obtained from environmental sample
  SIGNAL (1)...(20)
  DOMAIN (51)...(118): Bacterial Ig-like domain (group 3)
  misc_feature (1)..(250): Xaa is any amino acid
MKKTGKFLGLLVIVAVIGFAAISMIGCSSPGNGGETGGEDGKTLDKIEVTTPPTKLHYNLGEDLDLTGIVITATYTDGTEEEIDVDDCEINGYDKTTAGHQTITVTYKEKDAEFSVNVIDPSLPTVATPTANPAAGTYDEVISVELTTTTSGATIYYTTDGSEPSEESDVYTTAISISQTTTIKAFAVLAGYNDSDELVAEYVLILPFTSAPVLSLEPGNEXIIYTWKDSDPVADSYDVYWKGRTGFDSG

SEQ ID NO: 11955 - DNA, 660 bp, Unknown
  Obtained from environmental sample
  misc_feature (1)..(660): n is a, c, g, or t
atgcgaaaacttggcccggctgtcatcgcgaacctttctggctccaccgtggaggaatacgctcaaggggcggcgctgttaaatgaaagcgaagttgatatgatcgaactgaatatctcctgccccaatgtcaaagccggcggcatgacattcggccttgatccacaggcggcggcatcggtggttgaccctgtgcgccgcgctttaacaggcaagccccttatggtaaaactttcacctaacgccccggacttgatcgccgtcgcaaacgcctgtatcaactccggggcggacgctctttcgctggtaaatacatttaaggcaatggcgatagacattcaaaaccgcaggccggtctttgacaatatcagcgcgggactttccggcccggcaatcaaaccaatcgccctgcgcatggtgtgggacctacgcgaagctgtcactgtcccggtagtgggtcttggcggcattgcctgcgccgatgacgctttggaattcctgatggcgggcgcaactgcgctgcaggttggttctgcgacattcgctcatcccaatacgatgattgaaattattgaaggcgttgagcgttatatgattaataacaaaatttctactataagcgaattttcactcccaggaagtttcatgaatcgtccttaa

SEQ ID NO: 11956 - protein, 219 aa, Unknown
  Obtained from environmental sample
  DOMAIN (1)...(198): Dihydroorotate dehydrogenase
  misc_feature (1)..(219): Xaa is any amino acid
MRKLGPAVIANLSGSTVEEYAQGAALLNESEVDMIELNISCPNVKAGGMTFGLDPQAAASVVDPVRRALTGKPLMVKLSPNAPDLIAVANACINSGADALSLVNTFKAMAIDIQNRRPVFDNISAGLSGPAIKPIALRMVWDLREAVTVPVVGLGGIACADDALEFLMAGATALQVGSATFAHPNTMIEIIEGVERYMINNKISTISEFSLPGSFMNRP

SEQ ID NO: 11957 - DNA, 981 bp, Unknown
  Obtained from environmental sample
  misc_feature (1)..(981): n is a, c, g, or t
ttgacaacctacaacggccttgatttggaatcaatctcatggcttgaagactttttaattgactttcccaacaccgtaatcgtcgtctcacatgaccgtcactttttaaacgccgtatgcacaaacgtatgtgacattgactttggaaaaatcacaccatattccggcaactacgatttctggtatcagatgagccagatattacagcgtcaggcgcgggatcagttaaaaaaacgggaagataaagcaaaggaattaaaggagtttattcaaagatttgcgtccaacgcaagcaagagcagacaggcgacaagccgtaaaaaggtactggaaaaacttgatcttgaaaatgttcccgtaacaagccgtaaattcccttatgccggttttaaaccagatcgtgaaataggcaataatgtcctgcgggtggaaaaattaaatttttcttttgaaggaacggctcttttaaaaaatttttcgttaacggtaaataaaaacgataaaatagcctttgtcggtcttgaacactcctccaaatcagcgttatttgacattatttcagacgtaaaaaaagcggaaagcggcgagtactcatgggggcagaccacttctttttcctattttccaaaagacaacgcttcttttttcaattctaatttatcaattactgactggttacggcagtattcccctgatcaggacgaaacttatgtccgcagttttttaggccgtatgctcttttcaggggaagatgccctaaagcccgtaaacgtcctttcaggcggcgaaaaagtgcgttgtatgctctccaagatgatgctatccggcgcgaatgttttaatccttgatgagccgacaaaccaccttgaccttgaagcgataaccgcccctcatgacgggcttacggcattccccggcgttatactttttaattctcacgatcacgaatttatcaattcaatcgcgaacagggattattga

SEQ ID NO: 11958 - protein, 326 aa, Unknown
  Obtained from environmental sample
  DOMAIN (166)...(324): ABC transporter
  misc_feature (1)..(326): Xaa is any amino acid
MTTYNGLDLESISWLEDFLIDFPNTVIVVSHDRHFLNAVCTNVCDIDFGKITPYSGNYDFWYQMSQILQRQARDQLKKREDKAKELKEFIQRFASNASKSRQATSRKKVLEKLDLENVPVTSRKFPYAGFKPDREIGNNVLRVEKLNFSFEGTALLKNFSLTVNKNDKIAFVGLEHSSKSALFDIISDVKKAESGEYSWGQTTSFSYFPKDNASFFNSNLSITDWLRQYSPDQDETYVRSFLGRMLFSGEDALKPVNVLSGGEKVRCMLSKMMLSGANVLILDEPTNHLDLEAITAPHDGLTAFPGVILFNSHDHEFINSIANRDY

SEQ ID NO: 11959 - DNA, 723 bp, Unknown
  Obtained from environmental sample
  misc_feature (1)..(723): n is a, c, g, or t
gtgtcggataacggttccggcatggacagggaaaaccttgaaaaatgcgttcttccccacgctacaagcaaaatccgttcacttgacgatttggataccgccgaaactctcggtttccgcggcgaggcccttgcggcggctgctgcggttgcccggcttgaaattatcaccgccactttcagtggcgccaattcaggatcaagcgaagcctggcggcttgaaacgggtcccggcgaatgtaaattgcacataacggcagccaacagaaccaggggcactacggtacgcgccgccaacctgtacgaaagcatacccgcccgaaaaaaatttcttaaacgcgaagggagcgaggccgcgctgtgccgtcagatgtttatcgacaaggcgcttgcctttcctgaaataagcttccgttttacgcaggacggcaagccgaaggatttctttcccgccgcgaactcaaaaaaggaacgctttgcggctgtgatgctggaaaacaatgaaagggaatttatccacgagatcaatgtttcaggcgagggtttttccgttgatatcgtaatcggcggcccggagcttttccgcgccgacaaaaggatgctctacgtctttgccaacggcaggcgcatacaggactattcactcatgcacgcgatggaatacggaacacaaggatggtttcccaacggacccaccccgtgngagccgtgtacctggacatag

SEQ ID NO: 11960 - protein, 240 aa, Unknown
  Obtained from environmental sample
  misc_feature (1)..(240): Xaa is any amino acid
MSDNGSGMDRENLEKCVLPHATSKIRSLDDLDTAETLGFRGEALAAAAAVARLEIITATFSGANSGSSEAWRLETGPGECKLHITAANRTRGTTVRAANLYESIPARKKFLKREGSEAALCRQMFIDKALAFPEISFRFTQDGKPKDFFPAANSKKERFAAVMLENNEREFIHEINVSGEGFSVDIVIGGPELFRADKRMLYVFANGRRIQDYSLMHAMEYGTQGWFPNGPTPXEPCTWT

SEQ ID NO: 11961 - DNA, 411 bp, Unknown
  Obtained from environmental sample
  misc_feature (1)..(411): n is a, c, g, or t
gtgaaagaccataaggcaaagaatattcctgcgcttgacagtgcgctgctggccaaataccgcgcccgttacgatgagattcttgaacagggacgccttgagttctttcaaaaagaaaagaaggataacaacagcgaagacatgaagctattgcggcgtcttaaggaatataaacgagaacacttgaggttcctgtcagatttccaggttccgtttgacaacaatctggcggaacgggatctgaggatgataaaaagcaagacgaaagtgtccggctgtttcaggggcaatgagggcggcaccgtttttgcaaacatcaaaagctacacctcaactttgagaaagaattccaggaatattttcaacggcttaaaatctgcctttttgggcctgcctttttcctgggcttga

SEQ ID NO: 11962 - protein, 136 aa, Unknown
  Obtained from environmental sample
  misc_feature (1)..(136): Xaa is any amino acid
MKDHKAKNIPALDSALLAKYRARYDEILEQGRLEFFQKEKKDNNSEDMKLLRRLKEYKREHLRFLSDFQVPFDNNLAERDLRMIKSKTKVSGCFRGNEGGTVFANIKSYTSTLRKNSRNIFNGLKSAFLGLPFSWA

SEQ ID NO: 11963 - DNA, 786 bp, Unknown
  Obtained from environmental sample
  misc_feature (1)..(786): n is a, c, g, or t
ttgacgacgacccgacattttgaaatatttcctgaaaatatcgcaaatgtttggcctgtcctgcgacacggctttaagcggggagaaagctcttgggctataagccagaagaacggctaccacatctattttatagattggaaaatgccgggcatggacggcatacagcttgtccgcgaaataaaaaagcgcgggcctgagaagtccgttgtaataatgatttccgccgccgaatggagcgcggttgccgaagaagcgaaagcggcaggtgtcgacaaattcctgtccaagcccttgttcccttccaccattgcggaggtcatcaacgaatgtcttggtgtggacaaacagcaggcggaacagtcgcaggccgcggagattgcgggcatctttgcgggaaagcgaatactgctggttgaagacgtggaaataaaccgcgagatagtccaaaccctgctggaaccgacacagatggagatagactgcgcggaaaacggcgcggaagccgtccgaatgtttgccgaagccccgcttaagtacgacgtaattttcatggacgtgcagatgcccgaaatggacggctacgaggccacccagcgcatcagggtactggaatcgtccgcttcgcaaaacatccgcagggtgccgataatagcaatgaccgccaacgtgttcaaagacgacattgaaaaatgtcttgctgccggcatggacagccatgtaggcaagccggtggatttcgaggaagttatgaaaagccttcactcatatttggatagattatga

SEQ ID NO: 11964 - protein, 261 aa, Unknown
  Obtained from environmental sample
  DOMAIN (7)...(109): Response regulator receiver domain
  misc_feature (1)..(261): Xaa is any amino acid
MTTTRHFEIFPENIANVWPVLRHGFKRGESSWAISQKNGYHIYFIDWKMPGMDGIQLVREIKKRGPEKSVVIMISAAEWSAVAEEAKAAGVDKFLSKPLFPSTIAEVINECLGVDKQQAEQSQAAEIAGIFAGKRILLVEDVEINREIVQTLLEPTQMEIDCAENGAEAVRMFAEAPLKYDVIFMDVQMPEMDGYEATQRIRVLESSASQNIRRVPIIAMTANVFKDDIEKCLAAGMDSHVGKPVDFEEVMKSLHSYLDRL

SEQ ID NO: 11965 - DNA, 684 bp, Unknown
  Obtained from environmental sample
  misc_feature (1)..(684): n is a, c, g, or t
gtgtatttcggcccaaggatttttgaggtctcaaccttccgttctcttaaaaacggcttgaccagtaataccttcggatcgataaacgaggacgtgctccgccgcgactttaccatgaacgccctgttttatgatcctttacagcaaacaatcgttgactatgtgggcggcataaaggatatcagggccaaactggtcaggcccattatccccctttcaaaaatttttacggatgatccggtgcgtatgatccgcgcggtcaaatacggggccggcacgggatttaccctgcccttcacgctcaaatggaagatcaaaaaacagtcccatctgctttctacaatttcgccctcgcggcttaccgaggaaattttcaagataatccaatcgccgcaggccgcgcgcattgtcgaagctctggatacaatgggcctgtacgcttatctccagccccaggccgcaaaactgatgagggagccgggttcatttcgcggccgctacctgcgaagtttcgcggccgcgggcaagcccggattcaagaacctgcccggcgaggcgctgggagcgcttataacgaccatcttgaggacattattgattgggaccgcggcattattgaaactacagggcaagctacagcgcggcaagaaatttgtgctgccaaatgatccccccccgttatga

SEQ ID NO: 11966 - protein, 227 aa, Unknown
  Obtained from environmental sample
  DOMAIN (10)...(159): Poly A polymerase family
  misc_feature (1)..(227): Xaa is any amino acid
MYFGPRIFEVSTFRSLKNGLTSNTFGSINEDVLRRDFTMNALFYDPLQQTIVDYVGGIKDIRAKLVRPIIPLSKIFTDDPVRMIRAVKYGAGTGFTLPFTLKWKIKKQSHLLSTISPSRLTEEIFKIIQSPQAARIVEALDTMGLYAYLQPQAAKLMREPGSFRGRYLRSFAAAGKPGFKNLPGEALGALITTILRTLLIGTAALLKLQGKLQRGKKFVLPNDPPPL

SEQ ID NO: 11967 - DNA, 840 bp, Unknown
  Obtained from environmental sample
  misc_feature (1)..(840): n is a, c, g, or t
gtggaactgaaactttacaatgacatacctcatttgctgacgccggtgatcaccgagccgaaaaaagcgtttcaggccttgcagtactgcatttatgaaatggagcggcgctatgcctgccttgattcaatgggggtgcgggacatacgcaattacaacaaacgcataaaagaaaagaacatagcccaggagcacatgccttatatcgttgtagtcattgacgagtttgccgaccttatggcgactaccggcaaagagcttgaggcgactcttgcccgcctcgcagcgatgagccgcgccgtgggcatacacctggttctggcaacgcaacgcccctcaattgacgttatcaccggccttataaaagccaatatcccaagccgcatagcctttatggtcgccaacaagattgacagccgcatcatcatcgacgcggtgggcgcggaaaaacttctgggcaagggcgatatgctctacgcgggaatcacggaccccttccctatccgcatgcagggggcctttgtatccgaagaagaagtcgaggcggtggtcacccatgttaaaacattcggcggaccggattatattgacgacgagatattttttgacgaggaagaggaagaagccgagccgtctcttttttccggcgccgatgatcccctgtacgaaaaggccctggagatcgtgcttcagcagggaaaggccagcgccagctacatacagcgccgcctgaaaatcggctacaaccgctccgcccgcctggtagaagaaatggaacacaggggcgtcgtcggtccggcgcaagggtcaaagccaagggaactgctgaggggagtgtaa

SEQ ID NO: 11968 - protein, 279 aa, Unknown
  Obtained from environmental sample
  DOMAIN (1)...(114): FtsK/SpoIIIE family
  misc_feature (1)..(279): Xaa is any amino acid
MELKLYNDIPHLLTPVITEPKKAFQALQYCIYEMERRYACLDSMGVRDIRNYNKRIKEKNIAQEHMPYIVVVIDEFADLMATTGKELEATLARLAAMSRAVGIHLVLATQRPSIDVITGLIKANIPSRIAFMVANKIDSRIIIDAVGAEKLLGKGDMLYAGITDPFPIRMQGAFVSEEEVEAVVTHVKTFGGPDYIDDEIFFDEEEEEAEPSLFSGADDPLYEKALEIVLQQGKASASYIQRRLKIGYNRSARLVEEMEHRGVVGPAQGSKPRELLRGV

SEQ ID NO: 11969 - DNA, 468 bp, Unknown
  Obtained from environmental sample
  misc_feature (1)..(468): n is a, c, g, or t
ttgcgccggaccgacgacgcccctgtgttccatttcttctaccaggcgggcggagcggttgtagccgattttcaggcggcgctgtatgtagctggcgctggcctttccctgctgaagcacgatctccagggccttttcgtacaggggatcatcggcgccggaaaaaagagacggctcggcttcttcctcttcctcgtcaaaaaatatctcgtcgtcaatataatccggtccgccgaatgttttaacatgggtgaccaccgcctcgacttcttcttcggatacaaaggccccctgcatgcggatagggaaggggtccgtgattcccgcgtagagcatatcgcccttgcccagaagtttttccgcgcccaccgcgtcgatgatgatgcggctgtcaatcttgttggcgaccataaaggctatgcggcttgggatattggcttttataaggccggtgataacgtcaattga

SEQ ID NO: 11970 - protein, 155 aa, Unknown
  Obtained from environmental sample
  misc_feature (1)..(155): Xaa is any amino acid
MRRTDDAPVFHFFYQAGGAVVADFQAALYVAGAGLSLLKHDLQGLFVQGIIGAGKKRRLGFFLFLVKKYLVVNIIRSAECFNMGDHRLDFFFGYKGPLHADREGVRDSRVEHIALAQKFFRAHRVDDDAAVNLVGDHKGYAAWDIGFYKAGDNVN

SEQ ID NO: 11971 - DNA, 726 bp, Unknown
  Obtained from environmental sample
  misc_feature (1)..(726): n is a, c, g, or t
ttgtggggcaaaaacatgcccccccagggcgatgaggatatggttatcgcctggtgcgccgagtcgcttaagcggggtgtttaccaatccgcggcatccataataccgcttggtttcagccgcagccccgggcggacatgggaatccgccgtataccagtttgaccggaggatcggcctctgggaaagggaaatcaggacaatccacgcccttgaacgcgacagggcaaaccgcgtaacacggcagcttgccgagaaagatattggcatttttacagacggccgcattattgaattcattgctatccggggaaaccagcgcctgcttgaagatctcctttccattgttcaggacattaacctttccgccgtaagccttgaaacaaacgccgggattattgaagcctgcgttgatatgggcaaatggtatcccaatatcgccaatccttttgaagcgtttacagacgagattttacagcttgtcgttaacggcctgtacagaaacgaagacagcgtttttattttttcgcccggccatgcggatgtaaaacttaatctgcggcttgggatggctctgcatgaatggggagaaaaatacggccaaaccgtctgggcgggactgggacgctccataacgctttccgttctttctttggcggacggaagcggatgggttccggcattcctggcaatggacgagaacaatgaatataccgccgtcctctga

SEQ ID NO: 11972 - protein, 241 aa, Unknown
  Obtained from environmental sample
  misc_feature (1)..(241): Xaa is any amino acid
MWGKNMPPQGDEDMVIAWCAESLKRGVYQSAASIIPLGFSRSPGRTWESAVYQFDRRIGLWEREIRTIHALERDRANRVTRQLAEKDIGIFTDGRIIEFIAIRGNQRLLEDLLSIVQDINLSAVSLETNAGIIEACVDMGKWYPNIANPFEAFTDEILQLVVNGLYRNEDSVFIFSPGHADVKLNLRLGMALHEWGEKYGQTVWAGLGRSITLSVLSLADGSGWVPAFLAMDENNEYTAVL

SEQ ID NO: 11973 - DNA, 867 bp, Unknown
  Obtained from environmental sample
  misc_feature (1)..(867): n is a, c, g, or t
atggaccatattgtgcagacgaatgaaatcgtatcctacggcaagcgcataactgagcagtacaaagcggttaacaggtcggtacacgaggccagtaccattatccgcgtaggcggagcggtcgtaggcgaagggcattttacagtcatttcgggaccttgttcggtggaaagcaatgagcagatttccgagattgcctgtagcgtgaaagaaagcggggcgaaaatccttagaggcggggcgttcaagcccagaacctcgccttacgcttttcagggcaggcaggaggaagggctggaaatgcttcgcgccgcgaaaaaggaaaccggccttcccgttgtctccgaaattatgaaccagacgcagattgatctgtttgaggatatagacattgtgcaggtgggcgcgaggaacatgcagaactttgatttgctgaaagccgtcggcgcgctgaaaaaaccggttttgttgaaacgcggccttgccaatacaatagaagaacttttgatgagcgccgaatatattgtttccgccggaaacagccaggtaattttgtgcgagcgcggcatacgcacattcgagactatgacgcgcaatactctggatttgtccgccgttgttattttgaaacaaaagtcgcacctgcccgttatcgccgacccaagccacgcgtcgggaattaggagccttgtcgcccccctctcgaaagccgctcttgccgtcngggcggacgggcttatgatagagacgcataacaatcccgcccaggcgctttgcgacggcgcacagtcgcttgatctaaagcagttccgcacgttaatggaagaactgaaaattcgcgcggctgtaaaaaaaaaggaaatgtaa

SEQ ID NO: 11974 - protein, 288 aa, Unknown
  Obtained from environmental sample
  DOMAIN (32)...(283): DAHP synthetase I family
  misc_feature (1)..(288): Xaa is any amino acid
MDHIVQTNEIVSYGKRITEQYKAVNRSVHEASTIIRVGGAVVGEGHFTVISGPCSVESNEQISEIACSVKESGAKILRGGAFKPRTSPYAFQGRQEEGLEMLRAAKKETGLPVVSEIMNQTQIDLFEDIDIVQVGARNMQNFDLLKAVGALKKPVLLKRGLANTIEELLMSAEYIVSAGNSQVILCERGIRTFETMTRNTLDLSAVVILKQKSHLPVIADPSHASGIRSLVAPLSKAALAVXADGLMIETHNNPAQALCDGAQSLDLKQFRTLMEELKIRAAVKKKEM

SEQ ID NO: 11975 - DNA, 543 bp, Unknown
  Obtained from environmental sample
  misc_feature (1)..(543): n is a, c, g, or t
gtgcggaactgctttagatcaagcgactgtgcgccgtcgcaaagcgcctgggcgggattgttatgcgtctctatcataagcccgtccgcccngacggcaagagcggctttcgagaggggggcgacaaggctcctaattcccgacgcgtggcttgggtcggcgataacgggcaggtgcgacttttgtttcaaaataacaacggcggacaaatccagagtattgcgcgtcatagtctcgaatgtgcgtatgccgcgctcgcacaaaattacctggctgtttccggcggaaacaatatattcggcgctcatcaaaagttcttctattgtattggcaaggccgcgtttcaacaaaaccggttttttcagcgcgccgacggctttcagcaaatcaaagttctgcatgttcctcgcgcccacctgcacaatgtctatatcctcaaacagatcaatctgcgtctggttcataatttcggagacaacgggaaggccggtttcctttttcgcggcgcgaagcatttccagcccttcctcctgcctgccctga

SEQ ID NO: 11976 - protein, 180 aa, Unknown
  Obtained from environmental sample
  misc_feature (1)..(180): Xaa is any amino acid
MRNCFRSSDCAPSQSAWAGLLCVSIISPSAXTARAAFERGATRLLIPDAWLGSAITGRCDFCFKITTADKSRVLRVIVSNVRMPRSHKITWLFPAETIYSALIKSSSIVLARPRFNKTGFFSAPTAFSKSKFCMFLAPTCTMSISSNRSICVWFIISETTGRPVSFFAARSISSPSSCLP

SEQ ID NO: 11977 - DNA, 573 bp, Unknown
  Obtained from environmental sample
  misc_feature (1)..(573): n is a, c, g, or t
gtgttcgacttatttgcggcggtgcaaagccgtattccggtgatttttactggggacagaccacgagttttttcgtattttccaaaggaaaacagcgcgtatttcaaatccggcgaatccatcaccgaatggctgcggcaatactctcccgaccaggacgaaacctatgtacgcagtttcctgggacgtatgcttttctccggggacgaggcgctgaagcccgtcaacgtgctttccggcggggaaaaagtccggtgcatgctgtccaggatgatgctgtcgggcgctaatgtgcttgttatggacgagcctaccaaccacctggacctggaagccattaccgcgctgaatgacggcctgaccgctttttccggggtgatccttttcaattcacatgaccacgaattcatcaattcaattgccaaccgtataatcgaaatcattccggggccggacggcgttccgggagccgttatagacagaatgatgccctttgacgattacttaaaggacgattcggtaaaagtcctccgctcggcggcataccaccatgtggagaggctgaggatataa

SEQ ID NO: 11978 - protein, 190 aa, Unknown
  Obtained from environmental sample
  DOMAIN (22)...(150): ABC transporter
  misc_feature (1)..(190): Xaa is any amino acid
MFDLFAAVQSRIPVIFTGDRPRVFSYFPKENSAYFKSGESITEWLRQYSPDQDETYVRSFLGRMLFSGDEALKPVNVLSGGEKVRCMLSRMMLSGANVLVMDEPTNHLDLEAITALNDGLTAFSGVILFNSHDHEFINSIANRIIEIIPGPDGVPGAVIDRMMPFDDYLKDDSVKVLRSAAYHHVERLRI

SEQ ID NO: 11979 - DNA, 384 bp, Unknown
  Obtained from environmental sample
  misc_feature (1)..(384): n is a, c, g, or t
atgcagggcataacgggcgagaacctttttgtattgctggaaaggcggcttgataacgtggtttaccggcttcgctttgcttcgtccagaactcaggcaagacagcttgtattacatggtcatgtgcttgtaaacggcaaaaaaataacaataccttcatacattgtgaaccctgaaaatgaaataagtattgccgaaaaaagcaaaaacatgacggttattaaggattcgctgagagaattcggcaagtcgggcgttatgccatggcttagccttgatcccgacgcgatgaaagggaagttccttgcgtctccgcgcagaagcgatattaccgatctcggggatatcaaggaacaaatgattattgaattatattcaaagtaa

SEQ ID NO: 11980 - protein, 127 aa, Unknown
  Obtained from environmental sample
  DOMAIN (15)...(62): S4 domain
  misc_feature (1)..(127): Xaa is any amino acid
MQGITGENLFVLLERRLDNVVYRLRFASSRTQARQLVLHGHVLVNGKKITIPSYIVNPENEISIAEKSKNMTVIKDSLREFGKSGVMPWLSLDPDAMKGKFLASPRRSDITDLGDIKEQMIIELYSK

SEQ ID NO: 11981 - DNA, 708 bp, Unknown
  Obtained from environmental sample
  misc_feature (1)..(708): n is a, c, g, or t
atgggaggcgttaaattcggttattcgggatacccggctttcaatacgccccagtctttggcgaaaaccattgccgacacgggctttgacatcgtaaatcaggcgaataaccacgcaatggatatggggaaaacaggccttatcgcgacccttgatttgtgggacacaatagaaggaataaccgtaatcggcgcgcggaaagccggagacagcgcccgtataataacaaaaaataatatcagccttggattcctgtcctatacctacggccttaatggcattgctcttccggcggataatccgaatcttgtatcccttatcaacagaagcaaaatggaagcggaaattgacgctttgcgtccgttatgtgattttttaattgtttccatgcactggggcgacgaatacaagacggaaccgggaaaaactcagaccgaccttgccatttttcttgcggaacacggagtagaccttatcatcggtcatcatcctcatgtgctccagcgcgcgcagctcattactcttgaagacggaagaaaaaccgtatgtttttactctctgggaaactttgtctccaaccagagggaaaaagaaaggataataggcggaatgatggntgtaacttttacaaagagggaacaggaaccggaaacaaaggagtttatcaatttccgattacggaatgatacctgttatatgccattttga

SEQ ID NO: 11982 - protein, 235 aa, Unknown
  Obtained from environmental sample
  misc_feature (1)..(235): Xaa is any amino acid
MGGVKFGYSGYPAFNTPQSLAKTIADTGFDIVNQANNHAMDMGKTGLIATLDLWDTIEGITVIGARKAGDSARIITKNNISLGFLSYTYGLNGIALPADNPNLVSLINRSKMEAEIDALRPLCDFLIVSMHWGDEYKTEPGKTQTDLAIFLAEHGVDLIIGHHPHVLQRAQLITLEDGRKTVCFYSLGNFVSNQREKERIIGGMMXVTFTKREQEPETKEFINFRLRNDTCYMPF

SEQ ID NO: 11983 - DNA, 444 bp, Unknown
  Obtained from environmental sample
  misc_feature (1)..(444): n is a, c, g, or t
atgctcctgaaccttgaacatagaaagacgcacaaggatattgaggtatcaattatctacccggaaaaaaataaaactgttgaaaggcttatttcgtttgtcaattcactcagcattaaaatagaaggttatacggaagacagtataaagcagataaacgtaccggatatatattatgttgaaagtgaagacaaaatagcggtaattttctgtgaaaaagaatattacagaaccaaataccgcctgtatcaaatcagtgaaaaattgacggaattgggttttgttcaaatcagcaagtattgcctgattaatataaacaagcttgataaaataataccgctgtccaacaggcgtatggaggcaatcttaaaaaacgggaaacgggtttttattaccagaaaatatctttatgatataaaaagagntgttacaggagaatcttga

SEQ ID NO: 11984 - protein, 147 aa, Unknown
  Obtained from environmental sample
  DOMAIN (47)...(144): LytTr DNA-binding domain
  misc_feature (1)..(147): Xaa is any amino acid
MLLNLEHRKTHKDIEVSIIYPEKNKTVERLISFVNSLSIKIEGYTEDSIKQINVPDIYYVESEDKIAVIFCEKEYYRTKYRLYQISEKLTELGFVQISKYCLININKLDKIIPLSNRRMEAILKNGKRVFITRKYLYDIKRXVTGES

SEQ ID NO: 11985 - DNA, 396 bp, Unknown
  Obtained from environmental sample
  misc_feature (1)..(396): n is a, c, g, or t
atggaaaacatgattaacggaaacaggataaaagttaattatttatatattataaaactgcggttttatgaggggaaacaaaatagtacggcattcgagataataaagaattggtgcgaacgtttcggtgtaatattcggaggaggaatagggcagggcgccggagaaatgttggggcattttaaaaatactcccataaataaaagtccatttgcaaatcttggacaggctttggaagcaatggcggcaaatattgaaataaagaaaccgtttgaaataacgtacttaaacccgtattttccgcggtttttatggaaaattttggcggttcgtaattggcatacccttgcatataaaaatgggttaaagaaaaaagatttaataaggaaattatga

SEQ ID NO: 11986 - protein, 131 aa, Unknown
  Obtained from environmental sample
  misc_feature (1)..(131): Xaa is any amino acid
MENMINGNRIKVNYLYIIKLRFYEGKQNSTAFEIIKNWCERFGVIFGGGIGQGAGEMLGHFKNTPINKSPFANLGQALEAMAANIEIKKPFEITYLNPYFPRFLWKILAVRNWHTLAYKNGLKKKDLIRKL

SEQ ID NO: 11987 - DNA, 798 bp, Unknown
  Obtained from environmental sample
  misc_feature (1)..(798): n is a, c, g, or t
atgaccgagccgggttatgttttttcgcaggtgatcccggaggcgaccgaccccgaccagctggagcgcatactttacggcgtgaacgagcggatcaacagccgcttttacgcttcgtactctaccatcctctccctttacagccagttcggcgacggggcgttcgacatttttcgcaaaagcctccacaacttccgcaagggggtctttgcgatgtccaagatctatcaaaaagaagaggcgcagataaggaataggataaaattcctgcaatcgagcggttttttggacggtacgaagctgacgcccaagggtcagctggcggcggcggtgagcggttacgagatacaagccgccgagctctactacagccgtgatttcgacggcgtgtcggcggcgcagctgccggtgctgttggccgcgctgatcaccgaggaggcgcgcagccgcaaagccccgcccgtaaccaacgtcgcgctcaagttcgaagcccagaagacgatacacaaactgcgccaaaaggagatcaagtacaacatagcgaacccgatccgggagatggacttctctatggccgccccggtcttcgcgtgggcgggcgggtgcgacctcaagcagctggccggcttcggggtgccggagggcgaccttatacgtatactgcggatgacgatccagctgctcaggacgttgcgggacaggataaccgacccggagataagcggcaagatgcacagcgccctggagctggtgaacagggacgtggtggacgctcagacggagctgaatgtggggtag

SEQ ID NO: 11988 - protein, 265 aa, Unknown
  Obtained from environmental sample
  DOMAIN (86)...(260): DSHCT (NUC185) domain
  misc_feature (1)..(265): Xaa is any amino acid
MTEPGYVFSQVIPEATDPDQLERILYGVNERINSRFYASYSTILSLYSQFGDGAFDIFRKSLHNFRKGVFAMSKIYQKEEAQIRNRIKFLQSSGFLDGTKLTPKGQLAAAVSGYEIQAAELYYSRDFDGVSAAQLPVLLAALITEEARSRKAPPVTNVALKFEAQKTIHKLRQKEIKYNIANPIREMDFSMAAPVFAWAGGCDLKQLAGFGVPEGDLIRILRMTIQLLRTLRDRITDPEISGKMHSALELVNRDVVDAQTELNVG

SEQ ID NO: 11989 - DNA, 306 bp, Unknown
  Obtained from environmental sample
  misc_feature (1)..(306): n is a, c, g, or t
atgatgcgctgcatcnngggaagaccacgtggtcaactggggcttgatctcttcaacctngcaatgctttcgagggctggcgacgtctatttcgctgtcgaagtggccgatgttgcatacgatggcctgctgcttcatttctttcatgtgctcgaagagtatcacatgcagtttgccagtggcggtaacaaatatgtcggccaggggcgcggcttcttccatggtcacaacgcggtagccctccatggcggcttggagagcgcatatggggtctatttctgtgacccacacttgggcgcagagtga

SEQ ID NO: 11990 - protein, 101 aa, Unknown
  Obtained from environmental sample
  misc_feature (1)..(101): Xaa is any amino acid
MMRCIXGRPRGQLGLDLFNLAMLSRAGDVYFAVEVADVAYDGLLLHFFHVLEEYHMQFASGGNKYVGQGRGFFHGHNAVALHGGLESAYGVYFCDPHLGAE

SEQ ID NO: 11991 - DNA, 456 bp, Unknown
  Obtained from environmental sample
  misc_feature (1)..(456): n is a, c, g, or t
atgatcatgaatatattagaaggaaaaccacttccggtatacggagacggaaaaaatatcagggactgggtgtatgtagaagatcacaataacgcggtttggactatcatgcaaaaaggcaaggtgggagaaaaatacaatataggcggtgaaaatgaatgggagaacatcagactactcaatgagttaatagaaatagtagcaaaaaaaacaaacaaagataccgataaaataagatcaaccatcacctatgttaaagaccgccccggtcatgacaggcgttatgccatagactgttcaaaaataaaacgcgaactgggctggaaacaaaacgttaatttcaatcaaggtcttgaacgcatggtagactggtatttggctaacagagaatggatagacattattcgtagcggtgattataaacgctggatagaaaagaattacgagaaacggtga

SEQ ID NO: 11992 - protein, 151 aa, Unknown
  Obtained from environmental sample
  misc_feature (1)..(151): Xaa is any amino acid
MIMNILEGKPLPVYGDGKNIRDWVYVEDHNNAVWTIMQKGKVGEKYNIGGENEWENIRLLNELIEIVAKKTNKDTDKIRSTITYVKDRPGHDRRYAIDCSKIKRELGWKQNVNFNQGLERMVDWYLANREWIDIIRSGDYKRWIEKNYEKR

SEQ ID NO: 11993 - DNA, 612 bp, Unknown
  Obtained from environmental sample
  misc_feature (1)..(612): n is a, c, g, or t
atgggtacgacggttttattcaagccaacggcggtacagagaaaagcccttgcgttgttaaagggcggggctaaacacattttgcttttcggcgggagccgaagcggtaaaactacggtgctggttatggcaattatctacagggcgttaaagtttgccgggtccagacatttgatttgccgctaccgcgctaaagatgctcgttcatcggttatgcgggaaaccttgttaccgtggttggataaaactgtaggaaaaatcggctacacctaccttgcccatgaaagcatggttaccctttttaattcttcggagatttggattggcggcttgggggacagggagcaagcggacaaaatactcgggcacgaatacaacacaatttattttaacgagattagccagctttcctatgccgctgtaaccacggcatattcacggctggcaatgagaataaaagattgccggaacctgttttactacgactgcaatccaggttcgccgcttcattgggcttacaagattttcgttttgaaacggacatttcttactggcgatccattggagaaaccagagctatatcaagcaatgctccttnaatccagaggataa

SEQ ID NO: 11994 - protein, 203 aa, Unknown
  Obtained from environmental sample
  misc_feature (1)..(203): Xaa is any amino acid
MGTTVLFKPTAVQRKALALLKGGAKHILLFGGSRSGKTTVLVMAIIYRALKFAGSRHLICRYRAKDARSSVMRETLLPWLDKTVGKIGYTYLAHESMVTLFNSSEIWIGGLGDREQADKILGHEYNTIYFNEISQLSYAAVTTAYSRLAMRIKDCRNLFYYDCNPGSPLHWAYKIFVLKRTFLTGDPLEKPELYQAMLLXSRG

SEQ ID NO: 11995 - DNA, 864 bp, Unknown
  Obtained from environmental sample
  misc_feature (1)..(864): n is a, c, g, or t
ttgaggagtgctagtgatgccttgagggactatcaggcggctagcaagggggagcttgatgtcaaaaagggtgcgattgccactataacttatgtgttcactaaggcaattggtcaatctgattacactgaggtctctggtttcagtgctactactggtatcggttctcttgacagaatcataactcagctaaatgcagcaaagagtgatgctggtggtcctggcggcactgctgggcttgccatattggctggtatctttggcgcaaacgcttctgcacagatgcaagacgaccttaaggctgtaatgggacttgatgccaataaaatggtaccaaataccactgggaagacaaaggaaatagtgcagacttggcagaaagacattgcagatttgcaggcagcctacaaagtctatagcgaaagaaacatcgctactggctctgcggcatctgaagttctgcatgtaggtcctaactactcaagtggtttgggtggagcaacttccaaccagataaaggtaaactatgttgctattgacgtcaaaggtctcggtttgcaagcacagcaaatagaaacccgcgaaggtgcccaaagagctattgataagctccaggaaaccatcaaggttacaagcagcaaccgtgcagccataggtacgtacataaaccgccttgactacacaatcaacaacattgcatctatggagtacaacatccaagacgcagaaagccgcatacgcgacaccgactttgcttcggaaacaacgtccttcaccaggaatcaaattatggtgcaggccgctacgagcatgttggcacaggcgaacagcttgccgcaagcagctttagggttgataggttaa

SEQ ID NO: 11996 - protein, 287 aa, Unknown
  Obtained from environmental sample
  DOMAIN (194)...(265): Bacterial flagellin C-terminus
  misc_feature (1)..(287): Xaa is any amino acid
MRSASDALRDYQAASKGELDVKKGAIATITYVFTKAIGQSDYTEVSGFSATTGIGSLDRIITQLNAAKSDAGGPGGTAGLAILAGIFGANASAQMQDDLKAVMGLDANKMVPNTTGKTKEIVQTWQKDIADLQAAYKVYSERNIATGSAASEVLHVGPNYSSGLGGATSNQIKVNYVAIDVKGLGLQAQQIETREGAQRAIDKLQETIKVTSSNRAAIGTYINRLDYTINNIASMEYNIQDAESRIRDTDFASETTSFTRNQIMVQAATSMLAQANSLPQAALGLIG

SEQ ID NO: 11997 - DNA, 570 bp, Unknown
  Obtained from environmental sample
  misc_feature (1)..(570): n is a, c, g, or t
atgctggttaattgggcaaaatttacagacaagggactgcccataggagagaaaaaagcatctgttactataggtgtttttgacggagtccaccgcggacaccgcgcgttaattgagcgcgtcgtttcacacaacgcggaaaacgtgcctgtggttatcacttttcgggaaaatcataaaacaaaaaaagaaccaaaagacatccaaacctttgagcaaaggctggctgagatggaaaaactgggaatacaaatagttatagttattgattttaccgaatctttcaaacacatggcgggaatcaattttttggagattttaacaaaccgctgtaacattggtttttttgccgtcggcagcgccttccgctgcggctatcagcttgacacggacgcggaagcaattcaaagattcttcgcttcacgaaacattcccgccgaaataataccggaagttctggaagactctctgcccataagctcaagccgcattcgcacggcgattgccgaagggaatatcaaactggcggaaacaatgttggggcgttctgtagaaaacattcgtttttaa

SEQ ID NO: 11998 - protein, 189 aa, Unknown
  Obtained from environmental sample
  DOMAIN (22)...(167): Cytidylyltransferase
  misc_feature (1)..(189): Xaa is any amino acid
MLVNWAKFTDKGLPIGEKKASVTIGVFDGVHRGHRALIERVVSHNAENVPVVITFRENHKTKKEPKDIQTFEQRLAEMEKLGIQIVIVIDFTESFKHMAGINFLEILTNRCNIGFFAVGSAFRCGYQLDTDAEAIQRFFASRNIPAEIIPEVLEDSLPISSSRIRTAIAEGNIKLAETMLGRSVENIRF

SEQ ID NO: 11999 - DNA, 840 bp, Unknown
  Obtained from environmental sample
  misc_feature (1)..(840): n is a, c, g, or t
atggctttcgcggatcaggaagacgttttccaggtggctgaaacggtaatgtacggcgtttttaaatctttctcggataaggcggtaagcactctgcctttcataagaattccctacgccgaagcgatgctcaaatacggaactgacaagcccgatctccggaacccccttgttattgccgaccttaccggatttttcgccgacgtggaattccagccttttaaaaacatacctgtacgtggaatcgtggcgaaaagagccgcgtttcaatcaaaatccttttttgaaaaaatgctggccttcgccatggagattggcatgaagggacttggttacatctctattcaggaagactcaagcctcaaagggcccatcgtcaaattcctttcagcggaaaaacaggacaagctcaaaaaagatctctgccttgaaaaaaacgacaccctgttttttatcgccgacgcacccgacagggtaaacagccttgccggccagattcgcacggccttgggcagccagttgaatcttataaaaaaagacagcttcgagttctgctttatcgtggactttccgatgtacggcatcagcgaagaaacctcggcttccagagaagccgcggcttctgaagaagccgggaaggtagaatttacccacaacccgttctccatgccgcagggcgggcttgaagcccttgaaacaaaatctcccctggacatccttgcctggcagtacgacatcgtatgcaacggcgtggagctatcgtccggtgcggttcgaaaccacctgcctgaggtaatggcaaaagccttgaaattgcgggatacacccaggctgacatga

SEQ ID NO: 12000 - protein, 279 aa, Unknown
  Obtained from environmental sample
  DOMAIN (1)...(278): tRNA synthetases class II (D, K and N)
  misc_feature (1)..(279): Xaa is any amino acid
MAFADQEDVFQVAETVMYGVFKSFSDKAVSTLPFIRIPYAEAMLKYGTDKPDLRNPLVIADLTGFFADVEFQPFKNIPVRGIVAKRAAFQSKSFFEKMLAFAMEIGMKGLGYISIQEDSSLKGPIVKFLSAEKQDKLKKDLCLEKNDTLFFIADAPDRVNSLAGQIRTALGSQLNLIKKDSFEFCFIVDFPMYGISEETSASREAAASEEAGKVEFTHNPFSMPQGGLEALETKSPLDILAWQYDIVCNGVELSSGAVRNHLPEVMAKALKLRDTPRLT

SEQ ID NO: 12001 - DNA, 678 bp, Unknown
  Obtained from environmental sample
  misc_feature (1)..(678): n is a, c, g, or t
ttggttgaggtaaatatgagtacaagaaacattttttcggaagagttaagccggttgcgccacgatattttatcaatggcggcaagggtggaaggaaatcttggcaaggcgctttcggctttaagaacgcgtaacgcggaattggcgaacgaagtgcgcgctgacgattccgccgtggacgccctgcaactgcagattgaggatgatgccgcgattgttatcgctacgcagcagcctgtggcgagcgacttgcgcgagcttgtttcggtttttaaacttacaagcaatatcgagagggtgggggatcatgccgtgcatcttgcgcgcgccgcgaaaaaactcgcgaagacgggagattctttcaacgctcaggagcatcttgaaaaaatggcggagacgggacagattatgcttcgcgccgctatttccgcttttatgtcaaaggacgcgcaagcggcaagggaagcggcggcaatggacaatattatcaacgcggagcataaaatcattacagaggatatattgaaagtgatgaaaaagaatcctgaccttgttaaagaggcgcttcagatacttcatacttccaaccagcttgaacggcttggtgatcatattacaaatatatgcgaagctgttatttatatgatagaaggaaaacatgaggagttaaatgactaa

SEQ ID NO: 12002 - protein, 225 aa, Unknown
  Obtained from environmental sample
  DOMAIN (127)...(212): PhoU family
  misc_feature (1)..(225): Xaa is any amino acid
MVEVNMSTRNIFSEELSRLRHDILSMAARVEGNLGKALSALRTRNAELANEVRADDSAVDALQLQIEDDAAIVIATQQPVASDLRELVSVFKLTSNIERVGDHAVHLARAAKKLAKTGDSFNAQEHLEKMAETGQIMLRAAISAFMSKDAQAAREAAAMDNIINAEHKIITEDILKVMKKNPDLVKEALQILHTSNQLERLGDHITNICEAVIYMIEGKHEELND

SEQ ID NO: 12003 - DNA, 915 bp, Unknown
  Obtained from environmental sample
  misc_feature (1)..(915): n is a, c, g, or t
atgggcgattgcgcgaatagcaatttttccatggcgaggctcctacagggtgatgtcggttccggcaaaacgcttgtttcgtttctggcagctttgcgggcactagacaatagcggccagaccgcgttattggccccgactgaactgcttgcccgccagcacgcggaaaacgccgcccgccttcttgaacccctgggcctgcggatagcatttctgaccggaaacataaaggctgcgggcaggaaagatttattaaaacatttggaagctggagaaatagacattgtcgtaggaacccacgcgcttttctcaaaagacgttacctataaaaatttacagttggtaattattgacgagcagcaccgatttggcgtaacgcagagggcgctcattatggcaaagaacagcgcggcaacgccccacctgttgatgatgagcgccacgccgattccccgcacccttgccatgacagttttcggcgacatggacgtctcggtaataagcgacatgccgccggggagaaagccggtaataacccacctggcaagggaatccaacgagcaaaaggtgtatgactttgtgcgtgataaattgaaagccggttcccaggcttacttcgtatacccgttaatcgaaagtgacgatgaaaaagaaatggttttgaaagacgccgtctttttaaaagacgcggtctccatggcggaacggctggcggcaaaagtcttccccggtttcgccgtggccctgatccattcaaaactcgacgaagaagaaaaacgccaaactatggatcgattccgcaaaggcgaaataagggtgttagtcgccaccagcgtcgtcgaggtgggcgtggacgtgccaaacgccaactgcatggtgatagagcacgccgagcgcttcgcccctcggccataa

SEQ ID NO: 12004 - protein, 304 aa, Unknown
  Obtained from environmental sample
  DOMAIN (239)...(301): Helicase conserved C-terminal domain
  misc_feature (1)..(304): Xaa is any amino acid
MGDCANSNFSMARLLQGDVGSGKTLVSFLAALRALDNSGQTALLAPTELLARQHAENAARLLEPLGLRIAFLTGNIKAAGRKDLLKHLEAGEIDIVVGTHALFSKDVTYKNLQLVIIDEQHRFGVTQRALIMAKNSAATPHLLMMSATPIPRTLAMTVFGDMDVSVISDMPPGRKPVITHLARESNEQKVYDFVRDKLKAGSQAYFVYPLIESDDEKEMVLKDAVFLKDAVSMAERLAAKVFPGFAVALIHSKLDEEEKRQTMDRFRKGEIRVLVATSVVEVGVDVPNANCMVIEHAERFAPRP

SEQ ID NO: 12005 - DNA, 519 bp, Unknown
  Obtained from environmental sample
  misc_feature (1)..(519): n is a, c, g, or t
ttgtacaataaccgcggctacgcaagggcgggaatggcggcaggccgggcgtccgaaataaggctcgcaatagaagattattcgagggcaatttccattaccgccaattacaccgacgcccttatcaaccgttcgcaggccttactggaaatcggcgaatacagaaaggtaattgacgactgtacccgtattatcgccttagagccgaaaaattcctacgcgtggaacaggcgcggcagcgcgtggtacgccctgggagacgacgacaaagcaattaacgacttttccgaggcgataaaaataagaaacaatcacgcgtccgcctggcacaacagaggcaacgcctggtacagcaagggagaccacgaaaaagctctctccgacataaaccgctgtatctcgataaacccgtcctatgccgaagcctacaccagccgcggcaacatacaccgctcccttggaaacaccgaaagcgccgccgcagatttcgcggaagccaagcgtttaaaacaacgctga

SEQ ID NO: 12006 - protein, 172 aa, Unknown
  Obtained from environmental sample
  DOMAIN (72)...(105): Tetratricopeptide repeat
  misc_feature (1)..(172): Xaa is any amino acid
MYNNRGYARAGMAAGRASEIRLAIEDYSRAISITANYTDALINRSQALLEIGEYRKVIDDCTRIIALEPKNSYAWNRRGSAWYALGDDDKAINDFSEAIKIRNNHASAWHNRGNAWYSKGDHEKALSDINRCISINPSYAEAYTSRGNIHRSLGNTESAAADFAEAKRLKQR

SEQ ID NO: 12007 - DNA, 516 bp, Unknown
  Obtained from environmental sample
  misc_feature (1)..(516): n is a, c, g, or t
atggaatcattggaccggctgggatacctggtggagaaaagagaagtagggagtgaggagtcgggaatagggaataaggcgcgttgttcagactccgatagcgcttccgactcatcctccgataattcaaatcgcgattccccactccccactcccaacacccaactccccgttattcccggcgttgatacggtaaaaggtattgccatgctcaggggaaaattggatacttataagaaagtgttatccatgttctgcgcagatgttgatgaacggctgccgcagctgcaaacaatgccacaggcggataccctgccggcatttataatccaggttcactctctgaaaagcgtgtccgcttcaattggcgcacaggaagtatcgtctaatgccgcaggacttgaagccgcgggcaaagccgcagatatggcttttatccgcgagcatttacctgactttacggtacagcttacggaactggtaaaaaaaatacgcgccgcgctatccatcgaatag

SEQ ID NO: 12008 - protein, 171 aa, Unknown
  Obtained from environmental sample
  DOMAIN (80)...(167): Hpt domain
  misc_feature (1)..(171): Xaa is any amino acid
MESLDRLGYLVEKREVGSEESGIGNKARCSDSDSASDSSSDNSNRDSPLPTPNTQLPVIPGVDTVKGIAMLRGKLDTYKKVLSMFCADVDERLPQLQTMPQADTLPAFIIQVHSLKSVSASIGAQEVSSNAAGLEAAGKAADMAFIREHLPDFTVQLTELVKKIRAALSIE

SEQ ID NO: 12009 - DNA, 315 bp, Unknown
  Obtained from environmental sample
  misc_feature (1)..(315): n is a, c, g, or t
atgggcagaacaattatcagcgaagacggacgttttgagtgggatgaaagcaaagaccggttaaataaaaaaagacacgggttttcattcaacgaaattcttgaaatctttgatgatccgacgtttttggaaggttatgatactgaacactctaaacaggaggagaggtattatggtattggatgccttaacggcgttctttatataatcgctttttatacctatagagaacgaataagaataatatccgcgcgtcaggcggataatgacgaacaggaggaatacaatgattacttcaaaaaaattaagtcctga

SEQ ID NO: 12010 - protein, 104 aa, Unknown
  Obtained from environmental sample
  DOMAIN (11)...(98): Protein of unknown function (DUF497)
  misc_feature (1)..(104): Xaa is any amino acid
MGRTIISEDGRFEWDESKDRLNKKRHGFSFNEILEIFDDPTFLEGYDTEHSKQEERYYGIGCLNGVLYIIAFYTYRERIRIISARQADNDEQEEYNDYFKKIKS

SEQ ID NO: 12011 - DNA, 366 bp, Unknown
  Obtained from environmental sample
  misc_feature (1)..(366): n is a, c, g, or t
atgacagatcgacaaacgcttttattccggctgggaggttttgcatttgtccatgcggtgttggcagcggtcgtagaaatagcagcccggcctttgaatgttcggggagggaacgtcccctgtcaggatgatacgtttgcgttgggcttcaaccttggggtcagggatcggggctgccgacaagagcgcctgggtgtaagggtgacgcgggttgttgtagaggtcgtcgttgttgcttatctcgacgatcttgcccaggtacattacagccacgcggtcggaaatatactcgataaccgaaagatcgtgggcgataaaaagataggaaagccccatttctttttgtatatccttgaaaaggtttaa

SEQ ID NO: 12012 - protein, 121 aa, Unknown
  Obtained from environmental sample
  SIGNAL (1)...(22)
  misc_feature (1)..(121): Xaa is any amino acid
MTDRQTLLFRLGGFAFVHAVLAAVVEIAARPLNVRGGNVPCQDDTFALGFNLGVRDRGCRQERLGVRVTRVVVEVVVVAYLDDLAQVHYSHAVGNILDNRKIVGDKKIGKPHFFLYILEKV

SEQ ID NO: 12013 - DNA, 909 bp, Unknown
  Obtained from environmental sample
  misc_feature (1)..(909): n is a, c, g, or t
atgtatttccacacgggaacaaagggaatattgaatcgcgaaaaacgctatacctacgcggtagatggagtttcttttaatataaagaaaggcgaaaccctcggcctcgttggagaatccggctgcggcaaatccacggttgtccgcgctgtatcgcgccttcacacaccgacttctggcgaagtctacctgaacggtaaaaacctaacggcgatgaagagccgcgagcttttggaagcccgcagaaatatgcagctcgtctttcaaaacccttacggctttttaaatccaagaatgaccaccggtgatataatcgccgagccaatgaggatctacaagcagcgcgggcttctggaaataaccgaagaagaaatcattaaacgcgtagaagacctcatggagatggtcgggcttttaaagtactataggaatcgctacccccacgagttttcaggcggtcaaaggcagcgcatcggcattgcccgcgcccttgcccttaaaccccaattgattctcgctgatgagccggtttccgcccttgacgtttccatccaggcgcaaatattaaaccttttcaaggatatacaaaaagaaatggggctttcctatctttttatcgcccacgatctttcggttatcgagtatatttccgaccgcgtggctgtaatgtacctgggcaagatcgtcgagataagcaacaacgacgacctctacaacaacccgcgtcacccttacacccaggcgctcttgtcggcagccccgatccctgaccccaaggttgaagcccaacgcaaacgtatcatcctgacaggggacgttccctccccgaacattcaaaggccgggctgctatttctacgaccgctgccaacaccgcatggacaaatgcaaaacctcccagccggaataa

SEQ ID NO: 12014 - protein, 302 aa, Unknown
  Obtained from environmental sample
  DOMAIN (229)...(296): Oligopeptide/dipeptide transporter, C-terminal region
  misc_feature (1)..(302): Xaa is any amino acid
MYFHTGTKGILNREKRYTYAVDGVSFNIKKGETLGLVGESGCGKSTVVRAVSRLHTPTSGEVYLNGKNLTAMKSRELLEARRNMQLVFQNPYGFLNPRMTTGDIIAEPMRIYKQRGLLEITEEEIIKRVEDLMEMVGLLKYYRNRYPHEFSGGQRQRIGIARALALKPQLILADEPVSALDVSIQAQILNLFKDIQKEMGLSYLFIAHDLSVIEYISDRVAVMYLGKIVEISNNDDLYNNPRHPYTQALLSAAPIPDPKVEAQRKRIILTGDVPSPNIQRPGCYFYDRCQHRMDKCKTSQPE

SEQ ID NO: 12015 - DNA, 672 bp, Unknown
  Obtained from environmental sample
  misc_feature (1)..(672): n is a, c, g, or t
gtgtatgtcccgttttcaagttctgagtttcgccgtccgttaaaaagcctgaagggatttgcccgtcttggtataaaacctggcgaagaacaagttgttcgatttactttgccggtggaagaattggcggtatgggacagttttcataaccacttttgtgtggaaacaggtcattgcatggttttgattggcgcgtcttcggcggacatacggctttcaggcggttttgaggttcacggcaagaatgtatttccccgaaaaattcccgatcatatttacgcacaaagatttgataattattcagattgttttttgcacgaaaagcggggcagcgccatccccgccgtgttcaacaattctgacggcgcttggatacgttttgccgcgctggattttaccgacagccgcggattgatttccgccattgtacagggcgcgcccggcagccgtattgaaattcgtttggacgctccggatgacgcattggtgggtacactggttatcccaaacaccggcggcatatcctttttcccgctgacagaaagaaacagtccccgtctccgtccggtttgggcatacgctgaaacctcaacggaaaaaataagcggcgttcatgatctgtacctggtgttttatggaaaaaccggtctctcgcgaattgatatccattaa

SEQ ID NO: 12016 - protein, 223 aa, Unknown
  Obtained from environmental sample
  DOMAIN (95)...(223): Carbohydrate binding module (family 6)
  misc_feature (1)..(223): Xaa is any amino acid
MYVPFSSSEFRRPLKSLKGFARLGIKPGEEQVVRFTLPVEELAVWDSFHNHFCVETGHCMVLIGASSADIRLSGGFEVHGKNVFPRKIPDHIYAQRFDNYSDCFLHEKRGSAIPAVFNNSDGAWIRFAALDFTDSRGLISAIVQGAPGSRIEIRLDAPDDALVGTLVIPNTGGISFFPLTERNSPRLRPVWAYAETSTEKISGVHDLYLVFYGKTGLSRIDIH

SEQ ID NO: 12017 - DNA, 927 bp, Unknown
  Obtained from environmental sample
  misc_feature (1)..(927): n is a, c, g, or t
ttgatcggcgagggatgccatgcgatggttcttggcagtcccgttgccgaaaagggaagcttttatcctgtcaggaccccccaggggatcgtgatcttcgggcgggatttccattccatcgaagatattatgaagctgtcccgggatccggttttccgctacggccgccgtgatcagggcttcgagcttcccctggagaatgtccgctcttttcttggtccccaggacagccgttccgttacggggtacaaatactgggcctccggggccgatggcttgggaaaggcgctttacaataccggcgaagccctggaaagggcgaaaagtaccgccaaaacgtttcttgatacggttcttatgcggctcaattcagccgcgaattttatggagaacagtcctctgagtctctgcgcgtttgaggcggacagctttggccgtttctggtacgaaggaccgctgttcattgaagctctgttcagagagggggctaaaaacggcggacttcagtttttcaccccttcggaatacctctgcaaggatgatacggggagtttccagacattgaccccggaattctcttcctggggggtaaacggttatgccgaaacctggttggacgcttccaacgactggatgtaccgccatgtcatgcgggcccttgacaggatggtggagctagcggaacgtttacccgacagcagcggtcttaaagagagggcgcttaatcaggctgcccgtgaaatactcctggcgcttgactcggaatggccgaaactgctttacaaacaggaatacgcgggttatgcccggagccagatagagggttccctcaggaatttcacgacaatctatgaaggcctgggaagccattatatcagcacggaatggcttacccagcttgaaagggagcacaatatcttcccctga

SEQ ID NO: 12018 - protein, 308 aa, Unknown
  Obtained from environmental sample
  misc_feature (1)..(308): Xaa is any amino acid
MIGEGCHAMVLGSPVAEKGSFYPVRTPQGIVIFGRDFHSIEDIMKLSRDPVFRYGRRDQGFELPLENVRSFLGPQDSRSVTGYKYWASGADGLGKALYNTGEALERAKSTAKTFLDTVLMRLNSAANFMENSPLSLCAFEADSFGRFWYEGPLFIEALFREGAKNGGLQFFTPSEYLCKDDTGSFQTLTPEFSSWGVNGYAETWLDASNDWMYRHVMRALDRMVELAERLPDSSGLKERALNQAAREILLALDSEWPKLLYKQEYAGYARSQIEGSLRNFTTIYEGLGSHYISTEWLTQLEREHNIFP

SEQ ID NO: 12019 - DNA, 717 bp, Unknown
  Obtained from environmental sample
  misc_feature (1)..(717): n is a, c, g, or t
atggatcgatataagtcactcagagaagaggccttcgaggccaatatggaaatcccccggcggaacctcgccatttatacctggggaaatgtctcggcgtttgatcccgcggggggagtnttcgccatcaagccttcgggggttccctatgacaagctcacggctgattcaatggtgatcgtagacatcgagggcagggtggtggacggcggccttaacccttcatcggacaccgaaacccaccgcgtactctacagggaattttcttcttccggttccccgttaaacggaatcacccacacccactcgccctacgcggtggcatgggcgcaggcgcggcgggacgttcccgtgttcggcacaacccacgcggatcacggggccgaggacattccctgtacggacataatgagcgccgatgctgtcagccgcgactatgagcttgagacgggaaaccttatcgtggagactttcaggaaatggggaaagaaccccgcccacatgcccatggttctggtggcggggcacggcccattcacatgggggaaaaccgccgcccagtcaatttaccacgcggtggttctggaggaggtctgcaagatggccctccttaccctttccctcgatccgcaggcggaagcccttccggaacacctcataagaaagcactgggaacggaaacacgggcccaacgcctattacgggcagcacgcctga

SEQ ID NO: 12020 - protein, 238 aa, Unknown
  Obtained from environmental sample
  DOMAIN (9)...(223): Class II Aldolase and Adducin N-terminal domain
  misc_feature (1)..(238): Xaa is any amino acid
MDRYKSLREEAFEANMEIPRRNLAIYTWGNVSAFDPAGGVFAIKPSGVPYDKLTADSMVIVDIEGRVVDGGLNPSSDTETHRVLYREFSSSGSPLNGITHTHSPYAVAWAQARRDVPVFGTTHADHGAEDIPCTDIMSADAVSRDYELETGNLIVETFRKWGKNPAHMPMVLVAGHGPFTWGKTAAQSIYHAVVLEEVCKMALLTLSLDPQAEALPEHLIRKHWERKHGPNAYYGQHA

SEQ ID NO: 12021 - DNA, 537 bp, Unknown
  Obtained from environmental sample
  misc_feature (1)..(537): n is a, c, g, or t
atgggcgataccaagaatacgcccaccctggatgcgggagccataaatcgctcattagccgccgcctcgggaataaaatccacgtcgcttagaaatacaagcgccgaagctctggaagggactataattatatccaatgtgggagatttgttgctgtccgaaaaggatatgtttatcacctatagcgaaagcacggtttcgtcttccattactgtggttctggacagaaattcggcgccccttcttatttcccggctctctcctgaggtagaagagtacctttctgccctgatggctcctgttgtgctgggcgaatacatgagttccggggaatacctcagccttatatccatggtctatggccgtcctctggccgatgaaattgccgaagccagaatcaaagcgtctattgagtttccccgcccgattacatcagtaagcgggggaagttccagcggaaagcgggcggaattcgatattccgcttctggatattctggttttggagaagcctcttcgatatgagattaagtggtag

SEQ ID NO: 12022 - protein, 178 aa, Unknown
  Obtained from environmental sample
  misc_feature (1)..(178): Xaa is any amino acid
MGDTKNTPTLDAGAINRSLAAASGIKSTSLRNTSAEALEGTIIISNVGDLLLSEKDMFITYSESTVSSSITVVLDRNSAPLLISRLSPEVEEYLSALMAPVVLGEYMSSGEYLSLISMVYGRPLADEIAEARIKASIEFPRPITSVSGGSSSGKRAEFDIPLLDILVLEKPLRYEIKW

SEQ ID NO: 12023 - DNA, 654 bp, Unknown
  Obtained from environmental sample
  misc_feature (1)..(654): n is a, c, g, or t
ttgacgctagtcccccacancgaggaagcaaagcaagtagccgagacaatgcaggatttaatcttggaagagctaaacgtagagcaactccatttcgctggcgatgacaccgagctggcgaaaatctccgccaagcccaacttcgcaggcataaaagcaaaaggaactgactacgccaaaaatatgaaaaccctatccaccgccatcacagcattaaccgccgagcaaatcaagcaaatccaaagcggcacaccgcttgacgttgccggtctccccatagactactcctgcctaatgctagtccgcgaagtagccgaaggcctcgccgttgaagcagacgaaaactacaccatagccttggatttgaaaataacgccagagctacgccaaagctgcatagcgagagagctggtaaatcgcatacaaaaccgccgcaaggaaatggatttgcagattacggataagataaagatagcgttgaaagggctgggtggtgatttacaaactgccgtagaaaaacataaagcctatattttggaagaaacgcaggggttggaagttttgtgtggcggagatgttggcggtgtgtttgtttctgtcaatgttgaaggatatgaaatagaaatttccatttccaccaatttggcacaataa

SEQ ID NO: 12024 - protein, 217 aa, Unknown
  Obtained from environmental sample
  misc_feature (1)..(217): Xaa is any amino acid
MTLVPHXEEAKQVAETMQDLILEELNVEQLHFAGDDTELAKISAKPNFAGIKAKGTDYAKNMKTLSTAITALTAEQIKQIQSGTPLDVAGLPIDYSCLMLVREVAEGLAVEADENYTIALDLKITPELRQSCIARELVNRIQNRRKEMDLQITDKIKIALKGLGGDLQTAVEKHKAYILEETQGLEVLCGGDVGGVFVSVNVEGYEIEISISTNLAQ

SEQ ID NO: 12025 - DNA, 675 bp, Unknown
  Obtained from environmental sample
  misc_feature (1)..(675): n is a, c, g, or t
atgatttctcgcgatagacgcctcctgttcatcctttccgccgccgtctgcagagacagtgattattattacgcgcaaacggaagcgggaatgaaacattctgaacttgttatggaaatgataaataagcaaatggaaaagtctgaaatgaagccggcggacttaaacggtatactttgcatggggggccccggttcgtttaccggccttcgtatcggcttttctatcgccaaggggcttgccttaagccttggtataccttttgtacctgttccgactcttgaatgtatagcgtattccgccataggtttgtctcttccggtaattcaagcaagaaaaggcgcttatttctactcgctttttaatgacggcaggcggataacggaagacaacgacggtacaataagccaagttacggaaataatcgaaaaaaactcgcttgaaaacaaaaatattaacattacaggccctgccgcttttgaaatttacaacactcttggcgaagatttaaaatctttttgtatatgttcatgcaatagtttaggatacgcggttgaattaattaaacttgcaaaaaataaagacttatttgataaagacaataccgcgtatttatattcaggtcctgaatatatcagagaaacagacgcggaaattaatttaaaaagaatttaa

SEQ ID NO: 12026 - protein, 224 aa, Unknown
  Obtained from environmental sample
  DOMAIN (26)...(221): Glycoprotease family
  misc_feature (1)..(224): Xaa is any amino acid
MISRDRRLLFILSAAVCRDSDYYYAQTEAGMKHSELVMEMINKQMEKSEMKPADLNGILCMGGPGSFTGLRIGFSIAKGLALSLGIPFVPVPTLECIAYSAIGLSLPVIQARKGAYFYSLFNDGRRITEDNDGTISQVTEIIEKNSLENKNINITGPAAFEIYNTLGEDLKSFCICSCNSLGYAVELIKLAKNKDLFDKDNTAYLYSGPEYIRETDAEINLKRI

SEQ ID NO: 12027 - DNA, 408 bp, Unknown
  Obtained from environmental sample
  misc_feature (1)..(408): n is a, c, g, or t
ttggacgccgtcgtaagattttttacagcgcaaacgcgcagtattttcccgaaagaagaccagtattacataaaaagggtaattgcccttcccggcgacgaaatttacatgaataattttgtgttcagggtaaaaccggccggcagtccttacaatttaactgaatttgaacttgcgcaaaagccgtatcatccttccattccgaatgttcccgctatctgggatgaatcaattccgttttccggcaacatggacgcgattgttttgggaccggacgaatgttttgtagtctcggatgaccgcggcaacacaaacgattcccgcacatggggccctatatccccgtctttaattaccgcgaaggcgcttttgcgcttctggcctgtgaataagtttgaactttattag

SEQ ID NO: 12028 - protein, 135 aa, Unknown
  Obtained from environmental sample
  misc_feature (1)..(135): Xaa is any amino acid
MDAVVRFFTAQTRSIFPKEDQYYIKRVIALPGDEIYMNNFVFRVKPAGSPYNLTEFELAQKPYHPSIPNVPAIWDESIPFSGNMDAIVLGPDECFVVSDDRGNTNDSRTWGPISPSLITAKALLRFWPVNKFELY

SEQ ID NO: 12029 - DNA, 408 bp, Unknown
  Obtained from environmental sample
  misc_feature (1)..(408): n is a, c, g, or t
atgttaaactctactagtttgtatatacatgttcctttttgtgaaggcggtaagtgcgattattgtgatttttattctgttgttttgaatgaaaaatcggatgttgttatggatttatatataaaggctttaatagaggatgttaagtatcagattgattattttaaaataaaagatttatatactgtttatattgggggcggcacttcttctgtgctgggagcgaaaaggcttcatgttttacttgacgtattaaatgctattccgcacttttctcctgttgaattttcaatagaggctaatccggaatcggtaacggaagaatatttatccgtgtgccgtgaaggcgggataaacaggataagccttggggtgcagacctttaatgaaactcgcgccttgccgtag

SEQ ID NO: 12030 - protein, 135 aa, Unknown
  Obtained from environmental sample
  misc_feature (1)..(135): Xaa is any amino acid
MLNSTSLYIHVPFCEGGKCDYCDFYSVVLNEKSDVVMDLYIKALIEDVKYQIDYFKIKDLYTVYIGGGTSSVLGAKRLHVLLDVLNAIPHFSPVEFSIEANPESVTEEYLSVCREGGINRISLGVQTFNETRALP

SEQ ID NO: 12031 - DNA, 792 bp, Unknown
  Obtained from environmental sample
  misc_feature (1)..(792): n is a, c, g, or t
atgacaaagaatcgtgttaattttgtgaagctgtttttgacagctgttcttgcacttgtaacttttgctatgggcgcaggtgaggcgaaaaaaggtaaagagccgtttacactaaacgtttttgctgctgcaagtttaacagaagcgttgaacgagattgctaccttatacaaggcagctgtgccagaagcaacgcttacttttaattttgactcaagcggcaaactgcaaacgcaaattgaaaacggagccgaagcggatttgtttttgtccgcagggcaaaagcagatggatgcgatagcggagacttatatagacgctgcaactcgcaaggatttgctcgtaaatcaagttgtgttgattgtgccaaaaaacagcaaaaaaaacattaagtcttttgaagactgccttggcgacaaagtgtctctgattgcaatagggaactccagcgtaccagttgggcaatacaccgaggaaatattcaaatttctgaacgcgtgggataaaattaccgccaaagcttctttgggcaccaatgtaaaagaggtgctatcgcaagtggaaagcgggagcgttgatgcaggcatagtttatgccaccgatgcggcaacggcaaagaatgtgaaagtcgtggcgcaagcaccaaaagggagccataaaccggcggtgtatcctgcggcagtgttgaaaaaatcagctcgttcacaggaagcaaaagcgttcttagactttttaagtacgcccaaagccacggctgtgtttaaaaagataggttttgaggttgtgaaataa

SEQ ID NO: 12032 - protein, 263 aa, Unknown
  Obtained from environmental sample
  SIGNAL (1)...(25)
  DOMAIN (10)...(252): Bacterial extracellular solute-binding protein
  misc_feature (1)..(263): Xaa is any amino acid
MTKNRVNFVKLFLTAVLALVTFAMGAGEAKKGKEPFTLNVFAAASLTEALNEIATLYKAAVPEATLTFNFDSSGKLQTQIENGAEADLFLSAGQKQMDAIAETYIDAATRKDLLVNQVVLIVPKNSKKNIKSFEDCLGDKVSLIAIGNSSVPVGQYTEEIFKFLNAWDKITAKASLGTNVKEVLSQVESGSVDAGIVYATDAATAKNVKVVAQAPKGSHKPAVYPAAVLKKSARSQEAKAFLDFLSTPKATAVFKKIGFEVVK

SEQ ID NO: 12033 - DNA, 591 bp, Unknown
  Obtained from environmental sample
  misc_feature (1)..(591): n is a, c, g, or t
gtggcggattcccggcgtaatgtcgccaataccgccctgggcgcggtgcgttccaaactgggtaaagatttaggacttggcgataagggtaatcgttttgaatttgtgtggatcgttgattttcccctgtttgaatttaatgaggaagaaaaccgctgggaggcggcgcatcacctgttcagttggccgcaggaacaataccacgcaaccctggaaagcgaccccggcgcggtaaaaggcgacctgtacgacctggtgttaaacggctatgagcttgcctccggctccattcgtatccatgatccggttttacagcagcggattttcagcattgccggctttgatcccgccgaagcggaaaaacgattcggctttttaaccggcgcgtttaagttcggcgctccgccccacggcggcatcgcgccggggctggaccggctggttatgctcatggccgggcagacttcgataaaagaagttatcgccttcccaaagaattcatttgccgagggcctgatggacgacagccccggcgaaatcgaccaaagacagcttgacgaattgcgaataacgatacggaaggaaaaatag

SEQ ID NO: 12034 - protein, 196 aa, Unknown
  Obtained from environmental sample
  DOMAIN (1)...(168): tRNA synthetases class II (D, K and N)
  misc_feature (1)..(196): Xaa is any amino acid
MADSRRNVANTALGAVRSKLGKDLGLGDKGNRFEFVWIVDFPLFEFNEEENRWEAAHHLFSWPQEQYHATLESDPGAVKGDLYDLVLNGYELASGSIRIHDPVLQQRIFSIAGFDPAEAEKRFGFLTGAFKFGAPPHGGIAPGLDRLVMLMAGQTSIKEVIAFPKNSFAEGLMDDSPGEIDQRQLDELRITIRKEK

SEQ ID NO: 12035 - DNA, 579 bp, Unknown
  Obtained from environmental sample
  misc_feature (1)..(579): n is a, c, g, or t
gtgcagaagaccatatttgtggtggacgacaacgacaccaacctgctgatggcgaaagaggctctgaaggacaggtacagggtgatgacgctgccctcggcggccaggatgttcgcgctgctgatgaaggtgaagccggacctgatactcctggacatcgagatgccggggatggacggcttcgaggcgctggagcatctgaaggacaacggcctgctgcttgacatcccgataatgttcctgacgggcgtgacggacgcggccatcgaggcccgcggcttcgagcttggcgcggttgacttcgtcaccaagccgttctccgcgccagtcctgcggaaccgcataaagacccacctcgaccttgacgagctgatccgcgagcggaccaaccagctacagcgacgaaccacacagctacagaacctgcagaacgccataatcctcggctttcgcgacatggtcgagagccgcgaccaagggacgggcgnacacgtcgagcgcaccgcgatctacataaagctgctgacggacgcgataatggagcgccggggtgtacgccgaagaattccagaagaataa

SEQ ID NO: 12036 - protein, 192 aa, Unknown
  Obtained from environmental sample
  DOMAIN (3)...(116): Response regulator receiver domain
  misc_feature (1)..(192): Xaa is any amino acid
MQKTIFVVDDNDTNLLMAKEALKDRYRVMTLPSAARMFALLMKVKPDLILLDIEMPGMDGFEALEHLKDNGLLLDIPIMFLTGVTDAAIEARGFELGAVDFVTKPFSAPVLRNRIKTHLDLDELIRERTNQLQRRTTQLQNLQNAIILGFRDMVESRDQGTGXHVERTAIYIKLLTDAIMERRGVRRRIPEE

SEQ ID NO: 12037 - DNA, 609 bp, Unknown
  Obtained from environmental sample
  misc_feature (1)..(609): n is a, c, g, or t
atgcattttcttggaattgtaaatctggaaaccgataaccgtgaaaattaccgtaagctttcatcaaagatagtagtcgcgaaccatccgtcacttcttgacgtagttatgcttatttcacttattccaaacgcagactgtattgtgaatacttatttaaaacgtaattttattgtaaagggagttgtacgtcagctctatatactcaattctcttgatcttgataatgttttacaggcctgtgtcgaatcattaaaaaaaggaaacagcttaatcatttttcccgaaggaacaaggactccccgttatgggaaaacgattctcaagaaaggagccgcccgcgttgctctgtattcaggctgtaatattgtcccagtgcatataggaggcacggacaaatatggtttgggcaagaaagacccctggatcggctttaacccgcgcgagcgctatgtttacgatgtcagcatgggaactgaaattaaccccgcgcaatacagggatctccccgcgccaaaagcggtaagggcgattactagggaaattgcggcttttttgtttccggcaaaagaggcatcggctgtaagcgtcgaaggaaaagatgattaa

SEQ ID NO: 12038 - protein, 202 aa, Unknown
  Obtained from environmental sample
  DOMAIN (6)...(129): Acyltransferase
  misc_feature (1)..(202): Xaa is any amino acid
MHFLGIVNLETDNRENYRKLSSKIVVANHPSLLDVVMLISLIPNADCIVNTYLKRNFIVKGVVRQLYILNSLDLDNVLQACVESLKKGNSLIIFPEGTRTPRYGKTILKKGAARVALYSGCNIVPVHIGGTDKYGLGKKDPWIGFNPRERYVYDVSMGTEINPAQYRDLPAPKAVRAITREIAAFLFPAKEASAVSVEGKDD

SEQ ID NO: 12039 - DNA, 759 bp, Unknown
  Obtained from environmental sample
  misc_feature (1)..(759): n is a, c, g, or t
atgaaagaaaaaagcccggtaagacccgaattaattattgaagacccacaggacatggctcttcgtccccgcaatttaaaagaattcttaggacaaaagggaatgaaggaaaacctgtccgtatttatttcagccgcgaaagaacgcggggacagccttgatcatctttttttaatagggcctgcgggacttggaaagactacaatggcgcaggttgtggcgaatgaaatgggaaccggttttgttcaaactacggcgcccgctcttgaaaaaccaaaagaccttgtggggttcttaaccaatttaaaaaaaggcgacgtgttttttattgacgaaatacacagtcttaaacccgccattgaagagcttctttacatcgcgatggaagattacggaattgactgggtaatagggcaggggccaaacgcaagaacaatgcggatcggcattaagccgtttactcttgtgggagcgactactaaagcgggcgttgtttcaagtcctttaataagcaggtttggcattacctgccgtttttcattttatgaacagcaggatttggaagccattgtccgccgttcagcctctcttttaaaagtaaaaattgatgacgacgcggccaccattcttgcaaagtcttcaaggggtactccaagggtggtgaatcaactgttaaagcgcatgagggattttgcccagtatgcgggagagccttccattacttcggccgtcgttcataacggcctgtcacgtctttga

SEQ ID NO: 12040 - protein, 252 aa, Unknown
  Obtained from environmental sample
  DOMAIN (55)...(182): ATPase family associated with various cellular activities (AAA)
  misc_feature (1)..(252): Xaa is any amino acid
MKEKSPVRPELIIEDPQDMALRPRNLKEFLGQKGMKENLSVFISAAKERGDSLDHLFLIGPAGLGKTTMAQVVANEMGTGFVQTTAPALEKPKDLVGFLTNLKKGDVFFIDEIHSLKPAIEELLYIAMEDYGIDWVIGQGPNARTMRIGIKPFTLVGATTKAGVVSSPLISRFGITCRFSFYEQQDLEAIVRRSASLLKVKIDDDAATILAKSSRGTPRVVNQLLKRMRDFAQYAGEPSITSAVVHNGLSRL

SEQ ID NO: 12041 - DNA, 915 bp, Unknown
  Obtained from environmental sample
  misc_feature (1)..(915): n is a, c, g, or t
atggatcagattcggccgaggggaggagatgtaaaagtatattccgaatacggaaaaggcagcatatttaccgttacaataccgcaaaaaatttcttccccggagcctctggcgtctgttaaagaccccgataaaataaaggttattgtatacgaacggcgtgaaatatttgcgaattcgatagcttttaccatagataatctgggcgttgactgcacacttgttacaagtaacatagaattacgtgacgaattgtcggtgaaagaatacaattttatttttatctcattcacgttatatgaaagcaacaaaagtgcaatcatgaaattggggaaacaggcaaaagttgttttgcttacggaatttggcgaggcaattaacgataaaaaactaagcgttatcgccatgccggtttactccatttcaatcgcgaatattttaaacggagtctcggagagctttaaccttaatgaaaatgaagaaactataggccgctttgtcgcgccggaagcaatcgttttggttgttgacgatgtggctacaaacctaaaagtagcccagggccttttggcgccctataaaatgcaggttgatttatgcaagagcggcaaggaagcaatccaggctataacggatataagatacgacctggttttcatggatcataaaatgccaaatatggatggcgttgaagcaaccgagctcatcagaaaaaaggggtacgaagacccgtattacgagaatgtgccgattattgcgctgacagccaacgctgtttcaggggtaaaagagacttttctgaaaagcgggttcaacgactatctgtcaaaacccatagatacgacaaaaatgaacgttatccttggaagatggatctcgaaagaaagcaaagacgcccgtttggggaagaggtaa

SEQ ID NO: 12042 - protein, 304 aa, Unknown
  Obtained from environmental sample
  DOMAIN (171)...(289): Response regulator receiver domain
  misc_feature (1)..(304): Xaa is any amino acid
MDQIRPRGGDVKVYSEYGKGSIFTVTIPQKISSPEPLASVKDPDKIKVIVYERREIFANSIAFTIDNLGVDCTLVTSNIELRDELSVKEYNFIFISFTLYESNKSAIMKLGKQAKVVLLTEFGEAINDKKLSVIAMPVYSISIANILNGVSESFNLNENEETIGRFVAPEAIVLVVDDVATNLKVAQGLLAPYKMQVDLCKSGKEAIQAITDIRYDLVFMDHKMPNMDGVEATELIRKKGYEDPYYENVPIIALTANAVSGVKETFLKSGFNDYLSKPIDTTKMNVILGRWISKESKDARLGKR

SEQ ID NO: 12043 - DNA, 621 bp, Unknown
  Obtained from environmental sample
  misc_feature (1)..(621): n is a, c, g, or t
atgctttccgacggtaaccgggactggctggataaccggatcgtggttcccaaaatcgcctccgcgaaaattaactccgatgtttggaaaaatgttgttttgggattgaaagaaaaccgcgttattgtttttgattacaagggaacatgggacgaagaataccaaaacagacgggtgcgcccctatcagcttttatttgataatgggatatggtatctgtacggtttttccgaggagcgcaaggcaacgcgtattttttccctgtcgcgaataaaaaacatcgcgctgggtcaagacagattcagcctgccgaacaattacagctatgccgatctttccggcgacagctatttcggggtttttatcggccagggaaaaaagaattatgcgatagaatgttatgaagaagcggttatttttgtgtccgagcgtcaatgggctacggatcaaaaaatcactaaaataaaaaatggtataaaaatagaatttaccagcacccaatacgatagggtattgaagtgggttttgtcctgcggttgttatgttgtccctcaaaaaccaaagatactggttgatgactggaaatggcatattcgtgaaatgggcaaattggcgtcataa

SEQ ID NO: 12044 - protein, 206 aa, Unknown
  Obtained from environmental sample
  misc_feature (1)..(206): Xaa is any amino acid
MLSDGNRDWLDNRIVVPKIASAKINSDVWKNVVLGLKENRVIVFDYKGTWDEEYQNRRVRPYQLLFDNGIWYLYGFSEERKATRIFSLSRIKNIALGQDRFSLPNNYSYADLSGDSYFGVFIGQGKKNYAIECYEEAVIFVSERQWATDQKITKIKNGIKIEFTSTQYDRVLKWVLSCGCYVVPQKPKILVDDWKWHIREMGKLAS

SEQ ID NO: 12045 - DNA, 453 bp, Unknown
  Obtained from environmental sample
  misc_feature (1)..(453): n is a, c, g, or t
gtgcccatccccgtgtccatcagcaagtcctggacatcccttaggcggcactcgcgcccattgatcctgtactcgctcccagaatcgcggaacaaccgcctcgacaccgtgacttccctctttgccgcgtccgctggttgctgcgggtgctcctttgcctgcaactgggagtggccctccatctccatgaccagcttcacttctgccatgcccatggcggatctctcacttgtaccggcgaacaccacgtccgccatctccgcgccgcgcagaaggctgacgcgctgctcgccgaggacccacgccaaggcatccgaaatgtttgacttgccgcacccgttggggcccaccacggccgtcatgccgcccgggaagaccagtctctgggagtccgcaaaggacttgaacccatgtatttccagcgagagaaggcgcattgagtctggtgtgtga

SEQ ID NO: 12046 - protein, 150 aa, Unknown
  Obtained from environmental sample
  misc_feature (1)..(150): Xaa is any amino acid
MPIPVSISKSWTSLRRHSRPLILYSLPESRNNRLDTVTSLFAASAGCCGCSFACNWEWPSISMTSFTSAMPMADLSLVPANTTSAISAPRRRLTRCSPRTHAKASEMFDLPHPLGPTTAVMPPGKTSLWESAKDLNPCISSERRRIESGV

SEQ ID NO: 12047 - DNA, 495 bp, Unknown
  Obtained from environmental sample
  misc_feature (1)..(495): n is a, c, g, or t
ttgtcatcaagcagtttgaatcctgttcccaactcaattcatgccgaatcccttctttccctgcaccgcatactttttcttaaccattcaaacaagcgcgacgtacttattgccctggcggaaaatctttccgccgctcctcaaataaagaacgggcaggaactggcggtagaaattctaaaacgcgaggaattgatgagcacggctataggctgcgggatagcgattccccatgtgcgcctttcgtcggttacggatcttgtcgtctccgtaggaatcagcagagcggaaataatagggtttcaccctatggacgacgagcctgtgcggcttgttttcatgattgccgccgcgcaaaaccagcacgcgtattatctgcagaccctctcatggttcagcgcgcgacttaaaaacaaagaactgcgcgactctcttttacaggcgcagactcctcaggaagttttcaatcttttaacggctgttcaaaattcataa

SEQ ID NO: 12048 - protein, 164 aa, Unknown
  Obtained from environmental sample
  DOMAIN (17)...(161): Phosphoenolpyruvate-dependent sugar phosphotransferase system, EIIA 2
  misc_feature (1)..(164): Xaa is any amino acid
MSSSSLNPVPNSIHAESLLSLHRILFLNHSNKRDVLIALAENLSAAPQIKNGQELAVEILKREELMSTAIGCGIAIPHVRLSSVTDLVVSVGISRAEIIGFHPMDDEPVRLVFMIAAAQNQHAYYLQTLSWFSARLKNKELRDSLLQAQTPQEVFNLLTAVQNS

SEQ ID NO: 12049 - DNA, 879 bp, Unknown
  Obtained from environmental sample
  misc_feature (1)..(879): n is a, c, g, or t
ttgatcgcgagtgtcggggtcggcggtccgtatatccagcacttgaggctgccggacagcgcttttcgcgtggtactgcagggcgagtaccggggcaggataaatgaatatgagccgcatggggattattcgctggtaaaagtctccccgcttgatacaggcagtttcagcgatacgccttcctcccaggacatcgccctgcttagaaccgtacaaagagccttcgcgcaatacgccgagctttcaaaaaaaatcgggacggacacgcttttggctgttgagcgcgcggaaagtcctgaacgcgctgcaaacctgatctgtaactcgtctcattttaaaacagaaaaaaaaattgagcttctcgcggtttctgacatcagagagcgtcttgaggcggttcttgaaacgcttgaacgggaaaacgaaatattcggcatacagaaaaatatttcaggaaaggttaaaagccgtattgataaacaccagcgtgagtactacctccatgaacagcttaaggaaattaacaaggaacttggcaatgataaggacagtaaggaagacgaattttcagagttggaaaaacaaatcaaagcgaaggccccgtctgaagaagttgtcgctaaagccgccaaggaacttggcaggctccgcaagctccaacctctttcgcctgaagcgggcgtgctgcgcggctaccttgagtggatttccgatcttccctggagcgagacaagcgccgattcangcgacctggacgcggcgcagactatactggatgaagaccattttaatatgcgaaaagccaaggaccgcatacttgaatttatcgcggtgcgacagttactggcttcgaccgatggggctgaaaaacagggataa

SEQ ID NO: 12050 - protein, 292 aa, Unknown
  Obtained from environmental sample
  misc_feature (1)..(292): Xaa is any amino acid
MIASVGVGGPYIQHLRLPDSAFRVVLQGEYRGRINEYEPHGDYSLVKVSPLDTGSFSDTPSSQDIALLRTVQRAFAQYAELSKKIGTDTLLAVERAESPERAANLICNSSHFKTEKKIELLAVSDIRERLEAVLETLERENEIFGIQKNISGKVKSRIDKHQREYYLHEQLKEINKELGNDKDSKEDEFSELEKQIKAKAPSEEVVAKAAKELGRLRKLQPLSPEAGVLRGYLEWISDLPWSETSADSXDLDAAQTILDEDHFNMRKAKDRILEFIAVRQLLASTDGAEKQG

SEQ ID NO: 12051 - DNA, 681 bp, Unknown
  Obtained from environmental sample
  misc_feature (1)..(681): n is a, c, g, or t
ttggaaagtccaaaaaaaggcttaatgcatatgatcaaggagcttatcaggcagattacaaacgccgaaccggaagaagttatctacaccgtagaatatcttgatcaaaccaaggacatgccggtaaaagaaaaggtaaattttcatcaattaagggatgaattggaaaaaaagataaggtttttagccagtttaatgaaaggaccggcttaccaaaaactggcgcaaatgacagaagaacagattataggctatcttgaaagaaatatcagcgaagtacagaattatcacaaaattctgggcgcgcttgatgactttttcaaagcaaaagttacgccggaaaacagggataagataaagggtataaagcctgaactgacgacgttaaaaaactcttatgtaaaagccaaccagctgcgctatgaatacagcgcccaaaaagaagaagaagaacagttaagacgccttggcgtccacatggaagccgccgcctcggcaacgccgcccgcaggcggcgcacctcccgccgccggagcccctgccgccggtcccgctccggcagccggaaaatctcccgtagccggaaaaacacctgccgccggaaagcctcccgcaggaggaaagcctcccgcagggggaaaacctccggcagggggaaaagtttcaacagcaaaaacttga

SEQ ID NO: 12052 - protein, 226 aa, Unknown
  Obtained from environmental sample
  misc_feature (1)..(226): Xaa is any amino acid
MESPKKGLMHMIKELIRQITNAEPEEVIYTVEYLDQTKDMPVKEKVNFHQLRDELEKKIRFLASLMKGPAYQKLAQMTEEQIIGYLERNISEVQNYHKILGALDDFFKAKVTPENRDKIKGIKPELTTLKNSYVKANQLRYEYSAQKEEEEQLRRLGVHMEAAASATPPAGGAPPAAGAPAAGPAPAAGKSPVAGKTPAAGKPPAGGKPPAGGKPPAGGKVSTAKT

SEQ ID NO: 12053 - DNA, 516 bp, Unknown
  Obtained from environmental sample
  misc_feature (1)..(516): n is a, c, g, or t
gtggtatttgccgtccacaatggctacctcaacgtctacgacagggtactgggccatggtgccgtgcgccatgccttcggcgatacccttttcgacgccggggatgtagttcttcggaaccgccccgccgaagattttgttttcaaacttgtagccttcgccgcggccaagaggtccgatgtccaaaagcactttaccatactggccgtggccgccggtttgcttcttgtgggtgtattctgcggaggccttttttgttattgtctcgcggtaagcgacacgggggatgcgggtttccacttctatcttttggttcacttttattttgtccagaatgatattaatttgaagttcgcccattccggagataacggtttccttggtttccgcgttaaacacatacctgaaagttttgtcttcgtctgcggcgcgaacgaggaactcgccaagcttgtcatcgtcctttttggagaccgcgttgaccgcgacagagtgaacaggttccggcaggcttaa

SEQ ID NO: 12054 - protein, 171 aa, Unknown
  Obtained from environmental sample
  misc_feature (1)..(171): Xaa is any amino acid
MVFAVHNGYLNVYDRVLGHGAVRHAFGDTLFDAGDVVLRNRPAEDFVFKLVAFAAAKRSDVQKHFTILAVAAGLLLVGVFCGGLFCYCLAVSDTGDAGFHFYLLVHFYFVQNDINLKFAHSGDNGFLGFRVKHIPESFVFVCGANEELAKLVIVLFGDRVDRDRVNRFRQA

SEQ ID NO: 12055 - DNA, 651 bp, Unknown
  Obtained from environmental sample
  misc_feature (1)..(651): n is a, c, g, or t
atgccgctcgataaaaatatacaaaagactatggtaatcggctccggcccgattgtcatagggcaggcggcagagtttgattacgcgggaacgcaggcttgccgcgtactgcgccaggatgggattgagattgtcctggttaactccaatccggcgaccattatgaccgataacaacattgctgataaaatttacattgagccgctgactcttgccaccgttaagcgcattatcgaaaaagaacgtcccgacagcatattatcgggactcggcggacagacgggactcacgctgtgtatgcagcttgcccgcgacggttttctggaaaaaatgaacgtgcgtctgctcggttcatcgcccgaaactattgacaaggcggaggaccggctgattttcaagcaaaccatgcagaacatcggccagccggtaattccatcggcagtcgctgtcgatctggaaaccgcggttaaattcgccgcagagataggctatccggtaattgtgcgcccggctttcacgctgggcggttcaggcggcggtattgccgttaacgaagcgcagttccgagaaattgccgctaacggcattgccctttcgcccattcatcanatacttgtggaaaaatccgttgccngctggnaaggaatttga

SEQ ID NO: 12056 - protein, 216 aa, Unknown
  Obtained from environmental sample
  DOMAIN (128)...(216): Carbamoyl-phosphate synthase L chain, ATP binding domain
  misc_feature (1)..(216): Xaa is any amino acid
MPLDKNIQKTMVIGSGPIVIGQAAEFDYAGTQACRVLRQDGIEIVLVNSNPATIMTDNNIADKIYIEPLTLATVKRIIEKERPDSILSGLGGQTGLTLCMQLARDGFLEKMNVRLLGSSPETIDKAEDRLIFKQTMQNIGQPVIPSAVAVDLETAVKFAAEIGYPVIVRPAFTLGGSGGGIAVNEAQFREIAANGIALSPIHXILVEKSVAXWXGI

SEQ ID NO: 12057 - DNA, 846 bp, Unknown
  Obtained from environmental sample
  misc_feature (1)..(846): n is a, c, g, or t
gtgataatcgggtttgcgcttacggacagagatacaaaaaagatttatcaatatgtaactgttacaagcgaaccaacagagactcttgcaaaacagataaatgcgtatcttgttgattttgataatttttctattgagtccagaacatcccctattagtaatgtccctgaaataaaatttggcagtatggccgctgatggcggttttttattgttttcgccggaagaaaaagagaagtttctgaaaaagcaaccggaggcaatgccctggttcaggcgtattgtgggatcagaagaatttataaataataaagaacgctggtgtttatggcttgtggatatagaacctgccgtattaagaaaaatgaaatatattatcgaacttataaacaaagtaaaaagcgtccgagaaaaatccgccaggccgcatcttgctgataccccgcatttgttcgctcaaatagctcagcccaaaaacgggaattacattgttattccacaggtatcatctgagaaaagaaaatatattcctattggttttctatcttcagatattattgcgagtaatttggtttttattgtcccaaacgcaactgcatatcattttggtgtattgacatcgactatgcacatggcatggacgcggtatgtttgcggacggcttgaactgcgttaccgttattcaaaagatattgtgtacaataatttcccctggcctgattcaactgaaaaacaacagaaagtcattgaagaacttgctcaagaagtattgactgttcgagaaaaatttcctaaaagcagcctcgctgctttgtatgaccccttaacaatgcccaaagaactctaa

SEQ ID NO: 12058 - protein, 281 aa, Unknown
  Obtained from environmental sample
  misc_feature (1)..(281): Xaa is any amino acid
MIIGFALTDRDTKKIYQYVTVTSEPTETLAKQINAYLVDFDNFSIESRTSPISNVPEIKFGSMAADGGFLLFSPEEKEKFLKKQPEAMPWFRRIVGSEEFINNKERWCLWLVDIEPAVLRKMKYIIELINKVKSVREKSARPHLADTPHLFAQIAQPKNGNYIVIPQVSSEKRKYIPIGFLSSDIIASNLVFIVPNATAYHFGVLTSTMHMAWTRYVCGRLELRYRYSKDIVYNNFPWPDSTEKQQKVIEELAQEVLTVREKFPKSSLAALYDPLTMPKEL

SEQ ID NO: 12059 - DNA, 816 bp, Unknown
  Obtained from environmental sample
  misc_feature (1)..(816): n is a, c, g, or t
gtggaagaaaccattaaagcgaaagaagaaatagtcgccatgtccatttacaccaacaccgggtttattatcgcgagttatgtgccggaacgtgtaggcaagaacctgcttgatgtagattctatctacggcgaatatattaaggacgcgtatcaggcagttgttgaaggaaaggatttccagtgcgaaagctattcgcaggtgttgaaaacagatgtgtcaattgacttaacgtcttttcagataggcgattctgacgtaaggtggacaataatgattggggcatcggaaggttacattttgcaggatgtaaaggatatgacctattttaccgtcatccttaccgcgatagcccttgtattggcggtgataattgtgtactttacacttaacagcacgacaaaaccaatcgttacagtagccgacaccctcaaggatatttccgaaggagaaggcgaccttacgcggagcattgccgtccgctctaaagacgagattggcgaccttgccaagtacttcaacaaaacccttgaaaaaatcaaaggcctgataattatcatcaagaatgaggcgaaaggcctcagcagcatcggcaatgaccttgccagcaatatgtccgagaccgcggcggcgataaatgaaattaccgcgaacatccagagcatcaagggccgtgttataagccagagcgccagcgttaccgaaaccaacgccaccatggaacaggttgtcgcanacatcaataaactcaacggccatgttgaaacccaagcgacagtatttcccagtcttcatccgcgattgaggaaatggtag

SEQ ID NO: 12060 - protein, 271 aa, Unknown
  Obtained from environmental sample
  DOMAIN (111)...(182): HAMP domain
  misc_feature (1)..(271): Xaa is any amino acid
MEETIKAKEEIVAMSIYTNTGFIIASYVPERVGKNLLDVDSIYGEYIKDAYQAVVEGKDFQCESYSQVLKTDVSIDLTSFQIGDSDVRWTIMIGASEGYILQDVKDMTYFTVILTAIALVLAVIIVYFTLNSTTKPIVTVADTLKDISEGEGDLTRSIAVRSKDEIGDLAKYFNKTLEKIKGLIIIIKNEAKGLSSIGNDLASNMSETAAAINEITANIQSIKGRVISQSASVTETNATMEQVVAXINKLNGHVETQATVFPSLHPRLRKW

SEQ ID NO: 12061 - DNA, 945 bp, Unknown
  Obtained from environmental sample
  misc_feature (1)..(945): n is a, c, g, or t
atggggaaaaaaaaggcacagcgggcgatttctataaattttcctcaaagcgcgtccgtgtttccgattccaagcatgaaaataacgcatcatcacggtactgtagaaattatgcgaggctgtccaaacggctgccgtttctgccacgccggttactggtacaggccatacagacaaaaagatgaagaacttatcaccagtcaggtaaatgaaatggtgacaaaaggaggctggcaggaaattagcctgtcttccctttcttcgggcgattactccggaattacggaattagttcaaaatcttaacggacgattcagcggtttgcacgtttcattccaattgccctcgctcaaagtttccggtttttcactttcaattctggaacagatcgccgtaacaaggaaaagcggattaacatttgccgtagaaacccctaaagaagcatggcagatgtcaatcaacaaagaggtgacaagggattcggtcgtttcgattattcaagaggcaagaaagaacggttggaaaggggcgaagttttattttatgatagggcttcccgtgccaatttttgatcaaaatgaagaagaagaaatagtttcatttatagccgatattggcagaagaaccagaatgcattttaacattaatgtaggagtctttattccaaaacctcataccccctaccaatgggcatcccagcttgacggtgaaaggacaatagaaaaacttaactttatccgctcaaaattaaaaccattggggcataaggtaagcatttcagatactcttatttctcaaattgaaggactgttaagcaggggggatgaaagggcgggattattatgtgagcaggcttggctggcgggaagcnagcttgatccctggagcgaatttattaacaggaggaatggagcaggatcttggaagaaaacccgcatgntgtag

SEQ ID NO: 12062 - protein, 314 aa, Unknown
  Obtained from environmental sample
  DOMAIN (35)...(202): Radical SAM superfamily
  misc_feature (1)..(314): Xaa is any amino acid
MGKKKAQRAISINFPQSASVFPIPSMKITHHHGTVEIMRGCPNGCRFCHAGYWYRPYRQKDEELITSQVNEMVTKGGWQEISLSSLSSGDYSGITELVQNLNGRFSGLHVSFQLPSLKVSGFSLSILEQIAVTRKSGLTFAVETPKEAWQMSINKEVTRDSVVSIIQEARKNGWKGAKFYFMIGLPVPIFDQNEEEEIVSFIADIGRRTRMHFNINVGVFIPKPHTPYQWASQLDGERTIEKLNFIRSKLKPLGHKVSISDTLISQIEGLLSRGDERAGLLCEQAWLAGSXLDPWSEFINRRNGAGSWKKTRMX

SEQ ID NO: 12063 - DNA, 471 bp, Unknown
  Obtained from environmental sample
  misc_feature (1)..(471): n is a, c, g, or t
atgagcgaattttggaacagccgaatcaagagactttctccgtatgttcccggcgaacagccgaaagaccggaaattaattaaacttaataccaacgaaaatccctatccgccttctcccaaagttatagaggccatcaagaatgccgcaggggagagtctgcggttgtatcccgatccggaatgtgcggtattccgcgaagccgccgccgcccgttacggcgtaaagcccgagcaggttttcgcgggtaacggctctgacgaaatcctggcattcgcctttggggccttttttgaaagcggtgaaaaagccgctcagatgctttttcccgacatcacctacagtttttatcctggttatgccattctgtggaaaatcccgaaccgtaccatcgcgctggcgcaagatttttcaattaaaataaacgattacaagatttcctccgggcggggtaatatttcccaatcctaa

SEQ ID NO: 12064 - protein, 156 aa, Unknown
  Obtained from environmental sample
  misc_feature (1)..(156): Xaa is any amino acid
MSEFWNSRIKRLSPYVPGEQPKDRKLIKLNTNENPYPPSPKVIEAIKNAAGESLRLYPDPECAVFREAAAARYGVKPEQVFAGNGSDEILAFAFGAFFESGEKAAQMLFPDITYSFYPGYAILWKIPNRTIALAQDFSIKINDYKISSGRGNISQS

SEQ ID NO: 12065 - DNA, 831 bp, Unknown
  Obtained from environmental sample
  misc_feature (1)..(831): n is a, c, g, or t
atggaaccggggctggtgaccggtcagcgggtaattcccgttgaaagggcggcaatttatgttcccggcggacgtttccccctgttttcatcagttcttatgtgcatgattcccgcattttgcgcgggcgtggaagaagtgatattttcatcaccgccgatgcatgacggcctgcccgataaaaaaatactcgccgccgccgcaatagccgctaaaattgcgaataacaacaatgttcgtatttttgccattggcggcgctcaggcaatcgccgctcttgcgctgggtacggaatctgttccgcgtgttgatgttattaccggacccggcaataaatttgtcgccgctgccaaacggcaactgttcggcgaagtggggatagattttatcgccggtcccaccgatgtgctggtaatcgctgacggacagactgtggacggcggcattgaaaaagccgccgatcttgtcgttgcggatatgctggggcaggcggagcatgacccggatgcccgctcacgggcgctggttcccaacagggaacttgccgaaaaaattcttattgctattgaacggcgtataaaattattgccaacggaaaaaaccgcccgcgcttctttggatgcaggcggccttattatcgtctatgaaacaccggaagaggcgatccgtatcgccaacatcatcgcgccggaacatcttgagcttcaaaccgccgatgcggacaactggattccccggttaaaaaattatggctcgctttttatcggcagtctttgcgcagaagttcttggcgattattcggcgggaataaaccctcgtgccgaattctga

SEQ ID NO: 12066 - protein, 276 aa, Unknown
  Obtained from environmental sample
  DOMAIN (1)...(275): Histidinol dehydrogenase
  misc_feature (1)..(276): Xaa is any amino acid
MEPGLVTGQRVIPVERAAIYVPGGRFPLFSSVLMCMIPAFCAGVEEVIFSSPPMHDGLPDKKILAAAAIAAKIANNNNVRIFAIGGAQAIAALALGTESVPRVDVITGPGNKFVAAAKRQLFGEVGIDFIAGPTDVLVIADGQTVDGGIEKAADLVVADMLGQAEHDPDARSRALVPNRELAEKILIAIERRIKLLPTEKTARASLDAGGLIIVYETPEEAIRIANIIAPEHLELQTADADNWIPRLKNYGSLFIGSLCAEVLGDYSAGINPRAEF

SEQ ID NO: 12067 - DNA, 678 bp, Unknown
  Obtained from environmental sample
  misc_feature (1)..(678): n is a, c, g, or t
atgccgggtatgaacggcattgaaaccgccgccaggatcagggaaatgagcgccgttaagcagccttcagtagtcttaatgatctccgaggacgagtggaaggaaacgatagaggaagatgccaatgatgcgggcgttgaatattatttacagaagcccctgttccgttccgatattatcgactgcctttacaacttcttcggccctgagatgaaggaagaagcgcgggcgcaggataaacaggataaaaaagataactttgaaggtttccgtatcctgtttgttgaagacacggagataaaccgtgaaattgtgattgcccatttggaaccgacaaaactgaccatagactgcgccgaaaacggcaaggccgccctaaaaatggttacgatggcggaaaaaccctacgatattattttcatggatttgcaaatgcccgagatggatggttatgaagctgccttaaaaatcaggcaattcgaggacggccgttatggaagaagcgccggcggggctgtgaaacaaactccgattatcgccatgaccgcaagcgtatcccgcgaggaaagggaaaaatgccttgaaacaggaatgaacgatctcattgatctgcccatggatattgaagaggtgctgaaaaaactgcgttcttacctgaagccggccgacaatccctaa

SEQ ID NO: 12068 - protein, 225 aa, Unknown
  Obtained from environmental sample
  DOMAIN (90)...(216): Response regulator receiver domain
  misc_feature (1)..(225): Xaa is any amino acid
MPGMNGIETAARIREMSAVKQPSVVLMISEDEWKETIEEDANDAGVEYYLQKPLFRSDIIDCLYNFFGPEMKEEARAQDKQDKKDNFEGFRILFVEDTEINREIVIAHLEPTKLTIDCAENGKAALKMVTMAEKPYDIIFMDLQMPEMDGYEAALKIRQFEDGRYGRSAGGAVKQTPIIAMTASVSREEREKCLETGMNDLIDLPMDIEEVLKKLRSYLKPADNP

SEQ ID NO: 12069 - DNA, 852 bp, Unknown
  Obtained from environmental sample
  misc_feature (1)..(852): n is a, c, g, or t
atggacaggtattcgcgcgacccccgcccgctccgtattttttttgaatatgcgcgtaacacaaggcctgtagagtcggagcttgcgcaaagcgatcataatctgcttgagcttgccgtaaagaggcttccctttttactggaggccgacccggagcttgcgtggcttgcggcgccttttatgcgcgataccgaacaggccaaaagatatgtttcaacataccgcgccggcggcatcccctccgtttttaacagggattttatgccaagcccgccttcaatcgccgtcgcccttaacatgggcttattggacgacgagcgcgccgtggaagaattgttttcaggcgcaaggggaattaatagcgctgttccgccaggaatcgcgtttgacaataatcccgttcttgacgcgggcgtaatgaatgaagttttcagtcttttacgcggcgatgaagggcgcgatcttttcatgcaaaaattactttctttttcaggaacgataatttcagatgacgacaatgacggtttctttgacagtaaggcgctttaccgttccggaattgtcagggatttcgcgtatgatataaatcaaacgaatgaatttaattggaacgttatgttttcatctgacggcgttcctatttcggcgtggattcccgccgagggaaacaaaagggcgcaagttcaatgggaacgttatccttccgtaaagcaaataacaattttaaatgagatttttttcttccgtccggcggattttcaatacgcgccggttgaccttattatttttgccggcagtaaaaaatacgccggttccgcgtatcctgttttaatcccccatatttgggaatga

SEQ ID NO: 12070 - protein, 283 aa, Unknown
  Obtained from environmental sample
  misc_feature (1)..(283): Xaa is any amino acid
MDRYSRDPRPLRIFFEYARNTRPVESELAQSDHNLLELAVKRLPFLLEADPELAWLAAPFMRDTEQAKRYVSTYRAGGIPSVFNRDFMPSPPSIAVALNMGLLDDERAVEELFSGARGINSAVPPGIAFDNNPVLDAGVMNEVFSLLRGDEGRDLFMQKLLSFSGTIISDDDNDGFFDSKALYRSGIVRDFAYDINQTNEFNWNVMFSSDGVPISAWIPAEGNKRAQVQWERYPSVKQITILNEIFFFRPADFQYAPVDLIIFAGSKKYAGSAYPVLIPHIWE

SEQ ID NO: 12071 - DNA, 879 bp, Unknown
  Obtained from environmental sample
  misc_feature (1)..(879): n is a, c, g, or t
ttgcgagcaaatacgacgtacaaagcgncatcgtttttctggagaatacgattttggccatggcccataccttacctccggagcggatctctggctgatacccccagaagacccatggaggcttcggggaccagcggaatgaaggccgcgatgaacggtgtattgaactgttcaattttagacggttggtgggacgaggcctataaccccgaagtagggtgggctattggtcagggagaagaataccaggacaccaatcttcaggatgatgtggaaagcaaggccctttacgatcttctggaaagggagataattcccctgttctaccagcgcggccgtgacgggctgcccagagaatggatacgccggatgaaagtctgtatgaaggaaatcggtcaatccatgtccagccatagaatgttgatggattactgcaataagttctacttcccggccttaaagaattaccgccgcattgtcaaggatgattatgccgaatccaaggccctggccgcgtatctttcaaagctccgccaggtctgggatagtcttaagatcctcaaaatcgaatccaacgcgaaaccggtaatgcatcggggagatttcatgaccgtgaacgctaaaattgaactgggtacccttagccctgatgaggtattgatagaactctaccacggctcggtttccagcctaaccaatgaaatcgaaaaggctcagcgctccgagatgaaggctgtgggaaaggaagggactgtctttacttaccaggtgaagattgagtgtactgatacaggtatgcagggccatacggtcagaatccttcccaaacatcctgccctggttcatccgtaccggaccaatttcattaagtgggcatag

SEQ ID NO: 12072 - protein, 292 aa, Unknown
  Obtained from environmental sample
  misc_feature (1)..(292): Xaa is any amino acid
MRANTTYKAXSFFWRIRFWPWPIPYLRSGSLADTPRRPMEASGTSGMKAAMNGVLNCSILDGWWDEAYNPEVGWAIGQGEEYQDTNLQDDVESKALYDLLEREIIPLFYQRGRDGLPREWIRRMKVCMKEIGQSMSSHRMLMDYCNKFYFPALKNYRRIVKDDYAESKALAAYLSKLRQVWDSLKILKIESNAKPVMHRGDFMTVNAKIELGTLSPDEVLIELYHGSVSSLTNEIEKAQRSEMKAVGKEGTVFTYQVKIECTDTGMQGHTVRILPKHPALVHPYRTNFIKWA

SEQ ID NO: 12073 - DNA, 351 bp, Unknown
  Obtained from environmental sample
  misc_feature (1)..(351): n is a, c, g, or t
ttgcgtccgcaaggctacgtggtgttgcttgacggtatttatgacagagacgcggcggaggcggttcagggcctaaacctttatgtcggcgaggatcggcttcctaaattggccgacggcgaggattatcactttcacctcaaggggatgaaagtagtatcatcgtcaacaggggcggaaataggaacggtgcgcgacaccgtcaacctgccgtcaacggacgctttggaagtggtgttgacaaacgggcgcgatatagtgataccgtacaataaacaagcggtggttaaggttgacaaagaggtaaaaacgataacggtggacgattcatatatagaggaactattataa

SEQ ID NO: 12074 - protein, 116 aa, Unknown
  Obtained from environmental sample
  DOMAIN (39)...(114): PRC-barrel domain
  misc_feature (1)..(116): Xaa is any amino acid
MRPQGYVVLLDGIYDRDAAEAVQGLNLYVGEDRLPKLADGEDYHFHLKGMKVVSSSTGAEIGTVRDTVNLPSTDALEVVLTNGRDIVIPYNKQAVVKVDKEVKTITVDDSYIEELL

SEQ ID NO: 12075 - DNA, 663 bp, Unknown
  Obtained from environmental sample
  misc_feature (1)..(663): n is a, c, g, or t
atggcacggagcaaaaaccagacagttctgctcttaataataatcatcccgttctggaccaatttcnttatccgcgtcttcgcctggatgaacatccttgggaataacggctttataaatgaatttctcatgcaccttaatattatttccgagtacattccctttatgtacaaccagaaggcggtgacgctggtgctaatttatatgtacctgccttacgcgatacttcccctgttctccaccatagacaaatttgatttttcgcttttggaagccgcaagggatctgggggccggcaagctcacttcaatagttctggttctcttgcccaacataaaaagcggcctttttacagcagtgctgtttactttcattccgatttttggcgcatacgcagtgccacagctggttggcggaaaagattcctatatgctgggaaatgtcattgcggatcaaatacttaaatccagaaactggcctttggcttcggcgatttccatggttcttacggtagtaaccactgtgggcgtgctagtgatgatgaacatacagcgccgcgaggcgttgcgtatcgcggattcgggagccgctgccgaagatcgcgtcgcagatcgcgccgcagatcgcgccgcagatcgcgccgccacgggggcaaagccatga

SEQ ID NO: 12076 - protein, 220 aa, Unknown
  Obtained from environmental sample
  DOMAIN (5)...(193): Binding-protein-dependent transport system inner membrane component
  misc_feature (1)..(220): Xaa is any amino acid
MARSKNQTVLLLIIIIPFWTNFXIRVFAWMNILGNNGFINEFLMHLNIISEYIPFMYNQKAVTLVLIYMYLPYAILPLFSTIDKFDFSLLEAARDLGAGKLTSIVLVLLPNIKSGLFTAVLFTFIPIFGAYAVPQLVGGKDSYMLGNVIADQILKSRNWPLASAISMVLTVVTTVGVLVMMNIQRREALRIADSGAAAEDRVADRAADRAADRAATGAKP

SEQ ID NO: 12077 - DNA, 399 bp, Unknown
  Obtained from environmental sample
  misc_feature (1)..(399): n is a, c, g, or t
gtgcgggggcagaaagtagaagacatcaaaacgggaagccgttttgaacgggtaaatgttatcggcgctctttgcaacaatgggcatatagccgttgaatgctacaggcattcgacggatagcgcttatttcgaagactggtttgaaaatcatttgctgaaggaaattcctaaaggctgcacggcaataacggacaatgcaaggttccacccaaaggaacggctgcgcaagctggcaagaggaaaggtgagactattgtttctacctccatattcaccggactacaacccgatagaaaaatcatgggcaaatatgaaacgctatcttcgcgatagtatacataactatcaatttgttgattccgctatctatgaatattttggctattcagttatttaa

SEQ ID NO: 12078 - protein, 132 aa, Unknown
  Obtained from environmental sample
  misc_feature (1)..(132): Xaa is any amino acid
MRGQKVEDIKTGSRFERVNVIGALCNNGHIAVECYRHSTDSAYFEDWFENHLLKEIPKGCTAITDNARFHPKERLRKLARGKVRLLFLPPYSPDYNPIEKSWANMKRYLRDSIHNYQFVDSAIYEYFGYSVI

SEQ ID NO: 12079 - DNA, 927 bp, Unknown
  Obtained from environmental sample
  misc_feature (1)..(927): n is a, c, g, or t
ttgatggacgaggattccgcaataatggcgaatgccgcaaatctttccgtcagcgaagaagcggcgtcgataataagaaattcatctcccgtatacgacgattcaatcgagaaaataaaatcaatggtacacgcgatttttacattgcttaaaacgcgcaatgacgagccgcgtttgggactgccctctatcggcttcctgattccgaagattgaaacagagggcgcggttctggctcttgacgaagttttagccgtcgggctttttgttgagcgcgcggacgaatttacaaaatggataaataaggaaaagaacgaaaacaaagaacagccgacagagggcaaagaagcgcttttttctctgctggaaaatttacccgcctgcggcgctgttgctgcggaaatttttaaaataatcgacagagaaggcaatttgcgcgatcttcccgcgttacgcgccatcaagaagcggataaacactttggaaaaagaacttgataaagcggtttccggttatatcgctaacgatgattacaagcgtatgctacaatcgccgctgccgtcgcaaagggacggaagggctgtgcttgcggtaaaggtgaattttcgcggaagaattcccggcattttgcatgaagtgtcgtccagcgggcagacagtctttgtggagccgcttgatgttgtagataaaaataatgagatattagtggaaaaaagaaacttggacgcggaagtgcaaaaactcttgcgtgagcttacggaaaatatttccgttcacgcggatagcctaaaaatttttcaccgaacaattatcgagcttgagtgtttaagagctaagngcaggtattcggcggaaaccaaaggacacttcgctcttatacggacgcgaggcaagtctttttgtaaacaggcgcgccacctantgtaa

SEQ ID NO: 12080 - protein, 308 aa, Unknown
  Obtained from environmental sample
  misc_feature (1)..(308): Xaa is any amino acid
MMDEDSAIMANAANLSVSEEAASIIRNSSPVYDDSIEKIKSMVHAIFTLLKTRNDEPRLGLPSIGFLIPKIETEGAVLALDEVLAVGLFVERADEFTKWINKEKNENKEQPTEGKEALFSLLENLPACGAVAAEIFKIIDREGNLRDLPALRAIKKRINTLEKELDKAVSGYIANDDYKRMLQSPLPSQRDGRAVLAVKVNFRGRIPGILHEVSSSGQTVFVEPLDVVDKNNEILVEKRNLDAEVQKLLRELTENISVHADSLKIFHRTIIELECLRAKXRYSAETKGHFALIRTRGKSFCKQARHLX

SEQ ID NO: 12081 - DNA, 861 bp, Unknown
  Obtained from environmental sample
  misc_feature (1)..(861): n is a, c, g, or t
atggaagattatacatttgttaccctgaacatgaaagagaccagggtatttatccttaacagggccatacgcccgccccatatattcagatcagtgctgcccctgccgtccatgaccgaaccggatcaacccgacttttccggccttccgcctcccttttttgtcccttccatcctgatcattagtttcattgttttgctgattgtatttgccatttgcatgtccatcgttatcgcccggactattgcccgttcgatgcaggttctggaagacagtacccggcgtatcgccggaggggaactcgacctgaatgttgacgttaaagggaacaacgagattacctcactcgcgaattcccttaacaaaatgcgtaaagccctgaaagaaaaagagcttggccgttcacgttttattatgggaatttcccatgatctcaagacgccattggccttaatcaaaggttacgccgaggcgatagaggacggcgtcgcagaagaccctgtttcccgttcaggcgccacggaaattattattgaaaaaacggaccagcttgaaggcatgataaacgatcttatcaattttgtgcggatggaaacaggggaatggcgtgaacagttacacgaaattaacttaacccttttcctgaaaaattttattaagacattaagcgtggacgttgaattgttacaccacaaatttatatcagacatcagcctgccggagaatctgcctgtctcaatggatgaaagactcgcgcaaagggcccttgaaaatttaataagcaacgccgtccgctattcgccctccgggtcgcttatccgggttaccggcgtttctgttgaaaaacgccgtgggaaataa

SEQ ID NO: 12082 - protein, 286 aa, Unknown
  Obtained from environmental sample
  DOMAIN (60)...(129): HAMP domain
  misc_feature (1)..(286): Xaa is any amino acid
MEDYTFVTLNMKETRVFILNRAIRPPHIFRSVLPLPSMTEPDQPDFSGLPPPFFVPSILIISFIVLLIVFAICMSIVIARTIARSMQVLEDSTRRIAGGELDLNVDVKGNNEITSLANSLNKMRKALKEKELGRSRFIMGISHDLKTPLALIKGYAEAIEDGVAEDPVSRSGATEIIIEKTDQLEGMINDLINFVRMETGEWREQLHEINLTLFLKNFIKTLSVDVELLHHKFISDISLPENLPVSMDERLAQRALENLISNAVRYSPSGSLIRVTGVSVEKRRGK

SEQ ID NO: 12083 - DNA, 894 bp, Unknown
  Obtained from environmental sample
  misc_feature (1)..(894): n is a, c, g, or t
atggagtacaaactcaggatgacgcctgagcaggtgctggaacaggcggtttctcgggtgaagtacgcgaaaaaattctgcaatgatattgagttttccgcggaagacgctttccgcagcgaccctgattttgtctgcaaagttttcggcgcggtaattgaggccggggcgcttaccgtaaattttcccgacacagtcggttacgcgatgcccgccgaattcggcgagcgcgtccgctacataaaagaacataccccgcaaattgataaagcttgtctgtccgtgcattgccacaacgacctggggctggccgtggcgaacagcatcgccgccatcgcaaacggcgcggatcaggttgagtgtacgattaacggaatcggcgaacgcgcaggaaacgcgtctctggaagaagtggtcatgggcctgcgcgtccgcggcgactttttttccgccgacacggggatcgacagcagccagatatacgcggcaagccgcctcgtgtcacaggtgaccggggtgaaggttcagccgaacaaggccattgtcggcgacaacgcgttcgcgcatgaagcggggattcaccagcacgggattttggcgaaaagggaaacctacgagatcatgactccgcagtcaatcggcattccacaaaaccgcatggtgctgggcaaacattcgggccgccacgcttttgaggagcgccttaaagatctgggcctgagcgttacgccggaaacgttagaaaaagtatttgcggacttcaaagaccttgccgacaaaaagaaagtggtcaatgaccgcgacattgaagcccttgtaatggacaaggcggtctccgttcccgaaacatggaagctggatcattgggcgggaacacgggtccctctgcgataa

SEQ ID NO: 12084 - protein, 297 aa, Unknown
  Obtained from environmental sample
  DOMAIN (1)...(173): HMGL-like
  misc_feature (1)..(297): Xaa is any amino acid
MEYKLRMTPEQVLEQAVSRVKYAKKFCNDIEFSAEDAFRSDPDFVCKVFGAVIEAGALTVNFPDTVGYAMPAEFGERVRYIKEHTPQIDKACLSVHCHNDLGLAVANSIAAIANGADQVECTINGIGERAGNASLEEVVMGLRVRGDFFSADTGIDSSQIYAASRLVSQVTGVKVQPNKAIVGDNAFAHEAGIHQHGILAKRETYEIMTPQSIGIPQNRMVLGKHSGRHAFEERLKDLGLSVTPETLEKVFADFKDLADKKKVVNDRDIEALVMDKAVSVPETWKLDHWAGTRVPLR

SEQ ID NO: 12085 - DNA, 879 bp, Unknown
  Obtained from environmental sample
  misc_feature (1)..(879): n is a, c, g, or t
gtgggaatactgaaaggcgtctgcgccttccgcaagcctgaaactttacggatcaatctattgggggaattgccccccggcgttttcccgaaagacgtaatcctcgcaatcatcgccaaaatcagcgtttcgggcgcgtcgggaaaagtgatggaactgcgcgggccggtgatttcttccatgggcatggaaggcagaatgacaatctgcaatatggcggtcgaggccggagccaccagcggcgtatgtatgcccgatatgacaaccgttaattacctgtggccctttatcggcccaaatggcgaaaaaacttattcaagcaaagaagaagcgctaaaggatttttcaaaatggacaagcgatggcgacgcggagttttccggcgttgttgatattgattgctcaaaactggaaccgcttgcgacagtcggctataagccggacgaggtaaaacctgtgcgcgagcttgccgggacaaaaatcgatcaggcatacattggctcttgcaccaacggcagaatcgaagaccttcgcgcggcggcggcggtattgcgcggcaaaaaaatcgccgactcggtacgcgcgattgtcgcgccggctaccacggacatttacgctcaggccctcaaagagggactgatacagatttttcttgacagtggctgctgcgtaacaaacgccacctgcggcgcctgcctgggaatgtccaacggcgtgcttgccgaaggggaggtttgcgcttccaccacgaaccgcaatttttacgggcgcatgggcaagggcggcatggttcaccttgtcagccccgccgtggctgcggcatcggcaatagcgggcgcgattactgctacggcagtagccgacgcaggggggcagtaa

SEQ ID NO: 12086 - protein, 292 aa, Unknown
  Obtained from environmental sample
  DOMAIN (2)...(279): Aconitase family (aconitate hydratase)
  misc_feature (1)..(292): Xaa is any amino acid
MGILKGVCAFRKPETLRINLLGELPPGVFPKDVILAIIAKISVSGASGKVMELRGPVISSMGMEGRMTICNMAVEAGATSGVCMPDMTTVNYLWPFIGPNGEKTYSSKEEALKDFSKWTSDGDAEFSGVVDIDCSKLEPLATVGYKPDEVKPVRELAGTKIDQAYIGSCTNGRIEDLRAAAAVLRGKKIADSVRAIVAPATTDIYAQALKEGLIQIFLDSGCCVTNATCGACLGMSNGVLAEGEVCASTTNRNFYGRMGKGGMVHLVSPAVAAASAIAGAITATAVADAGGQ

SEQ ID NO: 12087 - DNA, 729 bp, Unknown
  Obtained from environmental sample
  misc_feature (1)..(729): n is a, c, g, or t
atgagccttatttcaaaacatacaattcaggaaattaataaccgactggacgcaatagcgataataggggattataccaagcttgaaaagaaaagcgggcgctggtgggggagatgcccgtttcactcaggcggtcaggaaaaaactccttcgtttaaagtcgagcccgatttaaaaatgtactattgttttgggtgcggcaagggcggcagcgtaattggttttgtcatggaaattgaaaaccttagctaccctgaagcgcttaaaaacattgcggataaaatgggaattgaaattgtttatgaagagggtagtggagtagaagcggaatacaattccttaaaaaacgggctttttgagttatacgcgagaactacaaaaacatttcaacattttttacatgaaaaaccggaaggtcagaacgcgcttaaatacctttcagaaagaggtattaacagggaaatgacagaatgttttaaacttggttttgcgcctgccaacaaggaatttttatataaatttttaaaacaaaagagctattcagatgattttctggagaaatcagggttgttttcttncaggtataaaacaatttctcttttttcaggcaggcttatatttccgataacagacaggcagggaagaattgtagctttcggcggaagagcattaccngggtgtccggcanntatgacgcaacgaaccctcaaaatatataaattcccctga

SEQ ID NO: 12088 - protein, 242 aa, Unknown
  Obtained from environmental sample
  DOMAIN (129)...(230): DNA primase catalytic core, N-terminal domain
  misc_feature (1)..(242): Xaa is any amino acid
MSLISKHTIQEINNRLDAIAIIGDYTKLEKKSGRWWGRCPFHSGGQEKTPSFKVEPDLKMYYCFGCGKGGSVIGFVMEIENLSYPEALKNIADKMGIEIVYEEGSGVEAEYNSLKNGLFELYARTTKTFQHFLHEKPEGQNALKYLSERGINREMTECFKLGFAPANKEFLYKFLKQKSYSDDFLEKSGLFSXRYKTISLFSGRLIFPITDRQGRIVAFGGRALPGCPAXMTQRTLKIYKFP

SEQ ID NO: 12089 - DNA, 804 bp, Unknown
  Obtained from environmental sample
  misc_feature (1)..(804): n is a, c, g, or t
gtggaagaggaagaaaacgcatctgaagaagatgagagtgatgcccgtaaagatcaggatacatccaaaaaaagagccacagcggcaaatgacaaagattcgtcaaatgttgatgatccgataaggctgtaccttcgcgaaatagggcgtgagcatcttttgacagcaaatcaggaaattgaactttccaaacaaatggaagaaggtgaaaacattgtaaaggacgaaattaaaaaatcaggtatggtaattacccaatttaatttaatcatgcagaaagcgttttcaaaaaaagatctacgtgaacttaatctttcaaaaaaagaaataaccgaacaaataacagaacaccgtaggttaaatcagttttataaagaaccgttacgtataatccagagtgacctgaaaaattacatggataataaaaacaaacttatttcaaaggatattgatgattataaagaaaacaaggaatgctctgttataagaaaaaaaatcatgaaagttattaagaatacgcagatacatcccgatgaaatacaggcgttttctgataaatttattaatgatgcagaggaaattaagcgttacacaaaggaaaatgaacggtatgaaaaacacttgaaagtgagttctcgtaaagagcttagtactttggggcggtaccttacaataaaagaagaacgtgaaaaactggaaaaagaacttggtctttcatcagaagaaataaaggaaaaaattaagcttatacaggtaaaccagaaaaaattaagagagctgaagatgaatatgaagaaccaatag

SEQ ID NO: 12090 - protein, 267 aa, Unknown
  Obtained from environmental sample
  DOMAIN (38)...(74): Sigma-70 factor, region 1.2
  misc_feature (1)..(267): Xaa is any amino acid
MEEEENASEEDESDARKDQDTSKKRATAANDKDSSNVDDPIRLYLREIGREHLLTANQEIELSKQMEEGENIVKDEIKKSGMVITQFNLIMQKAFSKKDLRELNLSKKEITEQITEHRRLNQFYKEPLRIIQSDLKNYMDNKNKLISKDIDDYKENKECSVIRKKIMKVIKNTQIHPDEIQAFSDKFINDAEEIKRYTKENERYEKHLKVSSRKELSTLGRYLTIKEEREKLEKELGLSSEEIKEKIKLIQVNQKKLRELKMNMKNQ

SEQ ID NO: 12091 - DNA, 840 bp, Unknown
  Obtained from environmental sample
  misc_feature (1)..(840): n is a, c, g, or t
gtgttttttaacaagagattattcaaagaagccggtcttgacggcaatctgctctatgatcttcaaaaagccggaacatggacatgggataaattccttgaaatatccaaaatacttacaagagacacaaacaatgacggaattcccgatacatacgcaatgccggcggatctttctacggaaattctggacgcttttgtttcaggtaacggagcaatgtatgttgacaaagacaggaatggaatgcttgttaacgtttcaaacaaacctgaatttatccaggctgttcagttttacatgcagttaagagatgcaaagattatgaaaccaaaaccgccgggagacaatactccctggaattggcatattcctgaatttaatgacggaaaagttgcaatgcgtattgaccagcattatatagcaggcggtcttcgtaatatgaaggatgattggggcatggttcttccgccaaaaggacccaaagcaaagcactatgttgtgtttaacgatgaaaacgtaagggtaattcccgccaagggatatacgcctgctcaggttgacgctattatttgggcttatcaggcttatgtaactcctcctgatgataattggaaacttgcggaatatcccaattacagggacagaagggctgttgatgaaacagttgcaatgatccgcgatcagaaactgtggcaatggaaatatcaccttcatgttccgggacttaaccgcggcggcatcgcctgggaaatttggtggcatgacggcgaacctgcgcagttagttgaaaaggtttcacagaactggaatgcgctgattgcccgacgcaacggtttgtga

SEQ ID NO: 12092 - protein, 279 aa, Unknown
  Obtained from environmental sample
  misc_feature (1)..(279): Xaa is any amino acid
MFFNKRLFKEAGLDGNLLYDLQKAGTWTWDKFLEISKILTRDTNNDGIPDTYAMPADLSTEILDAFVSGNGAMYVDKDRNGMLVNVSNKPEFIQAVQFYMQLRDAKIMKPKPPGDNTPWNWHIPEFNDGKVAMRIDQHYIAGGLRNMKDDWGMVLPPKGPKAKHYVVFNDENVRVIPAKGYTPAQVDAIIWAYQAYVTPPDDNWKLAEYPNYRDRRAVDETVAMIRDQKLWQWKYHLHVPGLNRGGIAWEIWWHDGEPAQLVEKVSQNWNALIARRNGL

SEQ ID NO: 12093 - DNA, 489 bp, Unknown
  Obtained from environmental sample
  misc_feature (1)..(489): n is a, c, g, or t
atgataactgcaatgagtagaattgtggttgctgccacagaagcaagcaaggagaaaacgctaaatagcctccgagaatggggtttattgcacgttttgcctctgcaagccccagaaggcgaaaaagtggtggctgccaaaaccgctttggcaaacgcccaaagggtttttgaagccatctcttatagaaagagcaataccaccgaaaatgcaatagaagagcaagatttgctcgctcagataaacgaagtgatgcaaagcagaaaagaagcggaagaagccttggctataagctcggcagaattgaaaagagttgaggcttttggcgaatttgaccctcacaaagtgagaaaactcataaaacacgacataaacgtaaaactttacagcgcaagcgaaaaaacattcaaagatacagacgataatattgtgattaaagtattcaaaagggaaggcggcaaagtttttcgcaagcctcggccgatctga

SEQ ID NO: 12094 - protein, 162 aa, Unknown
  Obtained from environmental sample
  misc_feature (1)..(162): Xaa is any amino acid
MITAMSRIVVAATEASKEKTLNSLREWGLLHVLPLQAPEGEKVVAAKTALANAQRVFEAISYRKSNTTENAIEEQDLLAQINEVMQSRKEAEEALAISSAELKRVEAFGEFDPHKVRKLIKHDINVKLYSASEKTFKDTDDNIVIKVFKREGGKVFRKPRPI

SEQ ID NO: 12095 - DNA, 750 bp, Unknown
  Obtained from environmental sample
  misc_feature (1)..(750): n is a, c, g, or t
gtgggcaattcggcaacccttatcgcgacagtctcgcccagcaacgcgacaaacaaaaacgtagcatggtcttccagcaatcccaatgtggcgactgtaacctacggcacggttaccgctcttgcggcaggttcggcgacaattatcgttaccacggcagacggaagcagaaccgctacttgttccgttaccgtcacaagcccttacgtacccgttacaggagtaacgcttaataaaaccagtctttccctgactgtgggcaatacggaaacccttatcgcgacagttttgcccagcaacgcgacaaacaaaaacgtagcatggtcttccagcaatcccaatgtggcgactgtaacctacggcacagttaacgctcttgcgactggttcggcgacaattaccgttaccacggcagacggaagcagaaccgccacttgttccgttaccgttacaaacggcggaggcggaggcggcagtaacgtacccgttacaggagttacgcttaatcaaaccagtctttccctggtcgtgggcaatacggaaacccttatcccgacagtcttgcccagcaatgcgacaaacaaaacagtgggttggagttccagcaatcccaatgtggcgactgtaacctacggcacggttactgctcttacggcaggttcggcgacaattatcgttaccacggcagacggaggcaaaaccgccactgttccgtaccgtacagaggcaagtcggggcgtgcctccataa

SEQ ID NO: 12096 - protein, 249 aa, Unknown
  Obtained from environmental sample
  SIGNAL (1)...(16)
  DOMAIN (2)...(63): Bacterial Ig-like domain (group 2)
  misc_feature (1)..(249): Xaa is any amino acid
MGNSATLIATVSPSNATNKNVAWSSSNPNVATVTYGTVTALAAGSATIIVTTADGSRTATCSVTVTSPYVPVTGVTLNKTSLSLTVGNTETLIATVLPSNATNKNVAWSSSNPNVATVTYGTVNALATGSATITVTTADGSRTATCSVTVTNGGGGGGSNVPVTGVTLNQTSLSLVVGNTETLIPTVLPSNATNKTVGWSSSNPNVATVTYGTVTALTAGSATIIVTTADGGKTATVPYRTEASRGVPP

SEQ ID NO: 12097 - DNA, 576 bp, Unknown
  Obtained from environmental sample
  misc_feature (1)..(576): n is a, c, g, or t
atgggcgtattaaccgaactgaaaaaccgcggcgttcaggacatactcatcgcttgcatggacgggcttacgggttttcccgaggcggtgcggtcaatatatcctaacacccgagtccaactgtgcattgtccacatggtgcgtaattcgacaaagtttgtttcttacaaggacttaaaaaaagtatgcgctgatttgaaaacaatctattcagctaacagcgaggaagccggacatgacgctttggaagatttcggcaaaaaatggaatgacaaatatccgatgatatataaatcatgggagcagcactggggagatttgagcgagttttttaagtacccgcctgagatccgccgcgctatttatacaactaacgccattgagtctatgaactaccagcttcgtaaagttactaaaaaccgctcgtcattttcaacagacgatgctataattaagttactgtatttggcgattaggaacgcttcagaaaagtggacaatgccgatacgggaatgggggcaggctcttaaccagtttgccattgagttcgggaaagaacgagtttcgttcttatga

SEQ ID NO: 12098 - protein, 191 aa, Unknown
  Obtained from environmental sample
  DOMAIN (1)...(168): Transposase, Mutator family
  misc_feature (1)..(191): Xaa is any amino acid
MGVLTELKNRGVQDILIACMDGLTGFPEAVRSIYPNTRVQLCIVHMVRNSTKFVSYKDLKKVCADLKTIYSANSEEAGHDALEDFGKKWNDKYPMIYKSWEQHWGDLSEFFKYPPEIRRAIYTTNAIESMNYQLRKVTKNRSSFSTDDAIIKLLYLAIRNASEKWTMPIREWGQALNQFAIEFGKERVSFL

SEQ ID NO: 12099 - DNA, 489 bp, Unknown
  Obtained from environmental sample
  misc_feature (1)..(489): n is a, c, g, or t
ttgactttatttgtacattgtacattgtacattgtaaattcccaaaaggctggtaccctgatgcctgactttttcgacgacctggtcttctcaccggacgacgtgatcacgttccccggcggaatacccgggtttgagaagcataagcgctttgttatagtcccggtgccgcagtgcgagccgttttcgtggctcgtctgcgtggacggcgcgcagttacgcttcgccataatcaacccgctgatattcatcccggactacagccccaaactcagcaaggagcaactcgccgacctgcgtatagacgacctgcacgacttggtgctctacacaatcgtgacgatggggcagaacccgatagactcgacggcgaatctggccgggccggtgatcatcaacaaaaactccaaactcggcaagcaggtgctgatcgatgacgaccgttactccacccaagaccctatcatcaggaggagcggccaatgctag

SEQ ID NO: 12100 - protein, 162 aa, Unknown
  Obtained from environmental sample
  DOMAIN (34)...(158): Uncharacterized BCR, COG1699
  misc_feature (1)..(162): Xaa is any amino acid
MTLFVHCTLYIVNSQKAGTLMPDFFDDLVFSPDDVITFPGGIPGFEKHKRFVIVPVPQCEPFSWLVCVDGAQLRFAIINPLIFIPDYSPKLSKEQLADLRIDDLHDLVLYTIVTMGQNPIDSTANLAGPVIINKNSKLGKQVLIDDDRYSTQDPIIRRSGQC

SEQ ID NO: 12101 - DNA, 510 bp, Unknown
  Obtained from environmental sample
  misc_feature (1)..(510): n is a, c, g, or t
atgatcggcgagagttgtatacttgtcattgttttctttttgggattcttcgccatcttcgcggaacccgggcttgcggttaccgccgtaaccgtagaggagatgaccaccggtacttttaagcgttctaaattgataaagatcgcggctatgggcgtaggcggcggcatggtgataggtttcgcgcgggtgttgttcagtaatatgctgccctcaggcggaatacatctttcgtggatactggctccttgctatgttcttgctctgatcctgacgattttcgcgccggaagatttttcctcgatagcgtgggacgtcgccggtatagcgacaggccccatcacagttccaatcattataacttcgggacttggactcggacgcgattcgcttcgggctgacggcgctttcggcattgtggcgacggccagcgtttttccgattatcgtaatattaatatccggcattgttgataaagcgagatcgaagcgcgtgttaagcaggatgtag

SEQ ID NO: 12102 - protein, 169 aa, Unknown
  Obtained from environmental sample
  SIGNAL (1)...(21)
  DOMAIN (2)...(159): Protein of unknown function (DUF1538)
  misc_feature (1)..(169): Xaa is any amino acid
MIGESCILVIVFFLGFFAIFAEPGLAVTAVTVEEMTTGTFKRSKLIKIAAMGVGGGMVIGFARVLFSNMLPSGGIHLSWILAPCYVLALILTIFAPEDFSSIAWDVAGIATGPITVPIIITSGLGLGRDSLRADGAFGIVATASVFPIIVILISGIVDKARSKRVLSRM

SEQ ID NO: 12103 - DNA, 369 bp, Unknown
  Obtained from environmental sample
  misc_feature (1)..(369): n is a, c, g, or t
ttgtataaaacatttgtttatgttatgtccgcgtgtctggcgggaattgcgggagcagtctttgttaatttcaacggcagtatttccccgtcccaaatgaccatcgcgttttccattaacatgattatctgggtggcgataggcggcaggggtacgattatcggggcggtaatcggcgcgctccttgtgaatctgtgcgaatataattttagctccggaagtatagttgaaatctggcagtatattatcgggtcgatattctgcattacgatactttttttcaagggcggaattattgggctgttcacgcatcaaatcccggagttgattgaaaaactaaaaggaaggatacgcaatgccgcaggttga

SEQ ID NO: 12104 - protein, 122 aa, Unknown
  Obtained from environmental sample
  SIGNAL (1)...(22)
  misc_feature (1)..(122): Xaa is any amino acid
MYKTFVYVMSACLAGIAGAVFVNFNGSISPSQMTIAFSINMIIWVAIGGRGTIIGAVIGALLVNLCEYNFSSGSIVEIWQYIIGSIFCITILFFKGGIIGLFTHQIPELIEKLKGRIRNAAG

SEQ ID NO: 12105 - DNA, 453 bp, Unknown
  Obtained from environmental sample
  misc_feature (1)..(453): n is a, c, g, or t
atgccgcaggttgatgaaaacacaattcttaccattaacagcgtatcggtttgctttgacggtttttacgcccttaccgaagtagacgtttccgtaaaacgcaacaccgttcacttttttatcggtccgaacggagcgggcaaaacaacgctgttggatattatctgcgcgaaaacccgccctactctcggtaacgttgtattttttcccaaagaaaaagagaagatacgccttacaggaatgaaagaatacgagatagtgcgcagcggagtgggcagaaagtttcaagtgccgtctgtgtttgtaaatcttacggttctggataacatgattctttcattaaagaggcataaaagtattttagattcgatattcctaaatccgtccgccgaagaaatcgcgcaaataggcgagattcttgaaaagtgggattgtcggaacgaagggatgtaa

SEQ ID NO: 12106 - protein, 150 aa, Unknown
  Obtained from environmental sample
  DOMAIN (35)...(148): ABC transporter
  misc_feature (1)..(150): Xaa is any amino acid
MPQVDENTILTINSVSVCFDGFYALTEVDVSVKRNTVHFFIGPNGAGKTTLLDIICAKTRPTLGNVVFFPKEKEKIRLTGMKEYEIVRSGVGRKFQVPSVFVNLTVLDNMILSLKRHKSILDSIFLNPSAEEIAQIGEILEKWDCRNEGM

SEQ ID NO: 12107 - DNA, 747 bp, Unknown
  Obtained from environmental sample
  misc_feature (1)..(747): n is a, c, g, or t
atgacagaaaaactgacacttgcaaacggcgaaacctacgaaggcaattttattgacggagtattgcaaggcaaaggcaaatatacaaacagaatgggcgatatttacgaaggcgattttgttgacggtaaattccacggcaaaggaaaattcacaatgccggacgaccatgaatacgaaggcgacttcgttgctaacttgccgcacggaaaaggaaaatggacaagtttaagatacgacgaatattacgaaggtgattttttcaaaggcagaaaatccggcaaaggaaaaatgacctattacgacaacagagtttacgaaggcgattttgccaaagacagaagaaacggcaaaggcaagatgacctatcccaacggcagaattgaagaaggcgaatggaaaaacggcgaattcttgggggaacaaatgaacaatgaacaaaccgaacaggaaatcttaaaccaactcaacacgctaatcgaacttgatcctaacagggacaaaaattattataatcggggactgctctacaaagaccaaaaactttgggaaaaagccgaagccgatttcgctaaagcgttctctctctggaaagacccgctttacctaagcgaatggcggcaagccgcaatggaaagacaggcactgcaaacagttgaagaacgaatgaccccctatgaggaaattatcaagaataaaactgaatcatcccgtcccgcgaaatatagcggcgatagctttatttga

SEQ ID NO: 12108 - protein, 248 aa, Unknown
  Obtained from environmental sample
  DOMAIN (83)...(105): MORN repeat
  misc_feature (1)..(248): Xaa is any amino acid
MTEKLTLANGETYEGNFIDGVLQGKGKYTNRMGDIYEGDFVDGKFHGKGKFTMPDDHEYEGDFVANLPHGKGKWTSLRYDEYYEGDFFKGRKSGKGKMTYYDNRVYEGDFAKDRRNGKGKMTYPNGRIEEGEWKNGEFLGEQMNNEQTEQEILNQLNTLIELDPNRDKNYYNRGLLYKDQKLWEKAEADFAKAFSLWKDPLYLSEWRQAAMERQALQTVEERMTPYEEIIKNKTESSRPAKYSGDSFI

SEQ ID NO: 12109 - DNA, 801 bp, Unknown
  Obtained from environmental sample
  misc_feature (1)..(801): n is a, c, g, or t
atggccacgatgacggattctatatccgcctcggctacctggttgaacagcgcggaaaactcaattactcagctctcagagaactttctgaaacttctctcaaagaaactcaataccgtttattttaggaggaaatgtatgcttattcttaccgaaaaaccgtcggtcgcaaaggctttcgcggacgccctgggcgttacgcgcaaagacaattattacgaaaacggcgaacattgtatcgtcaacgccctgggacatctgctggaagattatcttccggaagattacgatcccaccctcaaaaagtggtccctcgatgggctgccgattatcccggaccaggtaaaatacaaaccggtcgaaaaaacaaaggcgcagctcgccgtgatcaaaagctgttttgcccggcataaaaacgcgccgtttctgctggccacggatgcggaacgtgaaggggaactcatcggcgcggagattcttgattatgtcggctttaccaattacgccggcgcaaaacgattctgggtctccgaggcgctcactccggacgtgataaaaaaaggcatcgcaaacgccaaaccgcttgcggaatataaatcctaccgcgaccagggctttgcccggcaatgcgccgattggctgatcggcatgaaccttacccgcctggttacgctgaaaacaaataaactgctgcatttcgggcgcgtacagacagccgtcctgggcgcggtttttgaacgcgagaaagctatacagaattttgcttcggagaaatattacgaagttatagcggccccttga

SEQ ID NO: 12110 - protein, 266 aa, Unknown
  Obtained from environmental sample
  DOMAIN (48)...(178): Toprim domain
  misc_feature (1)..(266): Xaa is any amino acid
MATMTDSISASATWLNSAENSITQLSENFLKLLSKKLNTVYFRRKCMLILTEKPSVAKAFADALGVTRKDNYYENGEHCIVNALGHLLEDYLPEDYDPTLKKWSLDGLPIIPDQVKYKPVEKTKAQLAVIKSCFARHKNAPFLLATDAEREGELIGAEILDYVGFTNYAGAKRFWVSEALTPDVIKKGIANAKPLAEYKSYRDQGFARQCADWLIGMNLTRLVTLKTNKLLHFGRVQTAVLGAVFEREKAIQNFASEKYYEVIAAP

SEQ ID NO: 12111 - DNA, 423 bp, Unknown
  Obtained from environmental sample
  misc_feature (1)..(423): n is a, c, g, or t
ttggccgcatttattccgtttccggagactacccgctgggaagaacagctccacaataataccaccgccttcatcgaaagcattaaaaactttgtgcgcggcgcggtaaaaatcaccggcatggacgaataccggcacgaaaaaaaatcactcggtaaatgccccctttgccacagcggggatgtatacgaaggcaataataactattattgcggtaattataaggcggaacctccgtgtatatttgtaatctggaagaagatttgccaggcatccgttacccatgctgacgtacaagccctacttgccggcaagcagaccaaagttaaaaaatgcgtcagccccaaaacagggaaagaattcaacgctaaatttgagcttgttgccggcaaagttgaattccgatttgatgagaaaaaataa

SEQ ID NO: 12112 - protein, 140 aa, Unknown
  Obtained from environmental sample
  misc_feature (1)..(140): Xaa is any amino acid
MAAFIPFPETTRWEEQLHNNTTAFIESIKNFVRGAVKITGMDEYRHEKKSLGKCPLCHSGDVYEGNNNYYCGNYKAEPPCIFVIWKKICQASVTHADVQALLAGKQTKVKKCVSPKTGKEFNAKFELVAGKVEFRFDEKK

SEQ ID NO: 12113 - DNA, 921 bp, Unknown
  Obtained from environmental sample
  misc_feature (1)..(921): n is a, c, g, or t
atggaagaagttnttcttctcaatggacgggaaatagtcccctcgggggcaggaaaactcaaaacagacgcagaccggcaatcggcgaagcatggcaccattacccacagcgtcctggccgcccacgatgagggccgggcggaaggggaggccctccgcctgcgtttcgatgttttggcttcccatgacattacctacgttggaatcatccagacagccaaagtgtccggtcttaccagctttcccgtcccctatatccttaccaactgccacaattccctctgcgccgtggggggaaccattaatggggacgatcacgcctttggcctttcggcggcccggaagtacggcggaatctatgtccccccccatctggcggttatccactcctatatgcgggaagcgtgggcaggctgcggcaaaatgatccttggcagcgacagccatacccgctacggcgctctgggaaccctggccgtaggggaaggagggggagagctggtcaagcagcttctttcacagccttacgaaacagcctaccccagggtgattgcagtctacctggaagggacacccaaaccatgggtcggccccatggatgtggccctggcccttatcggcgcggtattcaggaacggttttgccaaaaatgccgttctggagtttaccggccccggcgtcgcgtcgttaagcgcggaataccgtaacggcattgacgtgatgaccacagagactgcctgctggtcttcgatctgggaaaccggcgaaactgtccggtcgtaccttgcctcccacggaaggagcggcgattaccgggaactaaagcccgcttcttccgcctgttatgacgggatgatcaggatcatgctggacaaagtaaaaccccatgatcgccctgcccttccatcccagcaagtatag

SEQ ID NO: 12114 - protein, 306 aa, Unknown
  Obtained from environmental sample
  DOMAIN (33)...(306): Aconitase family (aconitate hydratase)
  misc_feature (1)..(306): Xaa is any amino acid
MEEVXLLNGREIVPSGAGKLKTDADRQSAKHGTITHSVLAAHDEGRAEGEALRLRFDVLASHDITYVGIIQTAKVSGLTSFPVPYILTNCHNSLCAVGGTINGDDHAFGLSAARKYGGIYVPPHLAVIHSYMREAWAGCGKMILGSDSHTRYGALGTLAVGEGGGELVKQLLSQPYETAYPRVIAVYLEGTPKPWVGPMDVALALIGAVFRNGFAKNAVLEFTGPGVASLSAEYRNGIDVMTTETACWSSIWETGETVRSYLASHGRSGDYRELKPASSACYDGMIRIMLDKVKPHDRPALPSQQV

SEQ ID NO: 12115 - DNA, 669 bp, Unknown
  Obtained from environmental sample
  misc_feature (1)..(669): n is a, c, g, or t
ttgcnnccggacgancttggcaaggtggtatttttcaatatttccgccttnggaacgccgattaaaaccgcgattttcttgggagggcaggaatttgaaacatggtcgctnttcttcaacaaactgcacgggaggacggatatccccgattgggatgaaaggttgtaccgccgcatattgaaagaaaaacggctttttctgttacctgaattaacgcccggtacaggacagttccccgcttccagggcgcgtatcgttgaggatgggaagatttattatttcaatgccgcggattcgcataactgccctgtggggtatgaggaattattcgtcgcgctgcgcatatcgcttgttatgcaaaccatcaccgcgctggaacgcgccggtattgaaaagggttacgaagtgtataccgagggcggtttccgcaaagacaaatcctacaaccgcctgctcgcatccgcgcttgcggataaccgggtgtatgtgactaatattgccgaggccacggctctgggagcggctatgaccgctaaaatggcgctgaccggaaaatccctgaaagatctggcgggggattttgaaattgactaccaggaaatggaaaaaagttatataccggagctttttgcctacagggaggcgtggattgctgaaattgaaaaatga

SEQ ID NO: 12116 - protein, 222 aa, Unknown
  Obtained from environmental sample
  misc_feature (1)..(222): Xaa is any amino acid
MXPDXLGKVVFFNISAXGTPIKTAIFLGGQEFETWSLFFNKLHGRTDIPDWDERLYRRILKEKRLFLLPELTPGTGQFPASRARIVEDGKIYYFNAADSHNCPVGYEELFVALRISLVMQTITALERAGIEKGYEVYTEGGFRKDKSYNRLLASALADNRVYVTNIAEATALGAAMTAKMALTGKSLKDLAGDFEIDYQEMEKSYIPELFAYREAWIAEIEK

SEQ ID NO: 12117 - DNA, 774 bp, Unknown
  Obtained from environmental sample
  misc_feature (1)..(774): n is a, c, g, or t
atgatcagatggccgagttgccgccaatttatgtttatttcatccgcgtcggcgtatcaaaagccgctgtcatcatatctgattaccgaaagcacccctctcgcaaatccgtactgggaatattcgcggaataaaattgcctgcgaggaataccttacgcaaaaataccgcgaatgcggctttcctgttaccattatccgtccaagccatacttatgacgatagaagcgtcccgctcggcgtccacggcaagaacggaagctggcaggtcttaaaacgcatgattgacggcaagccggttatcatccacggcgacggctcaagcctgtggactttgacgcacaacagcgactttgcgcgcgcctttgtgccgttaatggcgaatattcacgcgataggcgaggcggttcaaataaccacggacgaaagcgtaacatggaaccaagtttaccaaataatcgcagacgcgctgaatgtaaaacttaacgccgtgcatgtagcgacagattttctcgcggctgcttcgcaaggcctttacgattttaccggcggtcttacaggcgataaatccaacacggtagtttttaacaacacaaaactaaaacgcctggtaccaggtttttaccaacaggtatcaataagcgaaggaataaggtccaccgtagtcaatgtgctcgcaaaccccgaattgcaaaaagaagaccgggaatttgatgaatggtgcgacaaagtaatagcggcgcangaagacgcgcttagggctttgaaacaataa

SEQ ID NO: 12118 - protein, 257 aa, Unknown
  Obtained from environmental sample
  SIGNAL (1)...(20)
  misc_feature (1)..(257): Xaa is any amino acid
MIRWPSCRQFMFISSASAYQKPLSSYLITESTPLANPYWEYSRNKIACEEYLTQKYRECGFPVTIIRPSHTYDDRSVPLGVHGKNGSWQVLKRMIDGKPVIIHGDGSSLWTLTHNSDFARAFVPLMANIHAIGEAVQITTDESVTWNQVYQIIADALNVKLNAVHVATDFLAAASQGLYDFTGGLTGDKSNTVVFNNTKLKRLVPGFYQQVSISEGIRSTVVNVLANPELQKEDREFDEWCDKVIAAXEDALRALKQ

SEQ ID NO: 12119 - DNA, 693 bp, Unknown
  Obtained from environmental sample
  misc_feature (1)..(693): n is a, c, g, or t
atgctcataacccttgacaaaaccatttttcatctgcacggaattttagaaccttatttttccgtgcaatatttggattcaaatgatatttccaaagagagccttaaagattcagtcgctttggtaattcgctcaacgagaaaatacggagcagaaactttggatggcacgggagtgaaattcataggaacgattacatcggggtttgagcatatagataccgaattttgcgaaaagagcggtattttctgggcaactgctcatggtagcaacgccgaatctgttgcggaatatgtatccgctgctttaacagaaatctcaaaaaagacgggcaagtcgttaagcgagttctcgctggggatagtaggtgttggcgcggttggcggttgtgtgaaaagaaatgcggaaaaatttggtatgaaacttttgctatgcgacccgcctaagaatttaaacgacaatatttttgaagcggatataataacgctccacacgccgcttgaaaaacgaggaaaatatcccacttatcacttggcaaacgaagatttttttaaaaagatgaaaaaaggcgcgtggttcataaacaccgctcgtggtgcggtgtgcgatagcaaggctttgcgaaacgctttgcaaaataaacacttgggaggtgctattgttgatgtgtgggaaaacgaacccctaacatag

SEQ ID NO: 12120 - protein, 230 aa, Unknown
  Obtained from environmental sample
  DOMAIN (7)...(141): D-isomer specific 2-hydroxyacid dehydrogenase, catalytic domain
  misc_feature (1)..(230): Xaa is any amino acid
MLITLDKTIFHLHGILEPYFSVQYLDSNDISKESLKDSVALVIRSTRKYGAETLDGTGVKFIGTITSGFEHIDTEFCEKSGIFWATAHGSNAESVAEYVSAALTEISKKTGKSLSEFSLGIVGVGAVGGCVKRNAEKFGMKLLLCDPPKNLNDNIFEADIITLHTPLEKRGKYPTYHLANEDFFKKMKKGAWFINTARGAVCDSKALRNALQNKHLGGAIVDVWENEPLT

SEQ ID NO: 12121 - DNA, 435 bp, Unknown
  Obtained from environmental sample
  misc_feature (1)..(435): n is a, c, g, or t
atgcttaacattgaaaagattaaaaagggaattgtaattgatcatataaaggcaggccaggggatacgcatattcaactggctgggtttggacaaagcgccttataccgtggcttttgttgtaaatgccacctccagcaaaatggggaaaaaagacattatcaagatcgatgaaatcatttccatcgacgttgatcttctgggccttattgatcccaatatcaccgtgaaaatcatcgaggatgaaaagatcaccaagagaataaaacttaagcttcctaatgaagtgaaaaatgtgatcatttgcaaaaatccccgctgcatcacttccacggaaaaatatattcctcatatttttcatctggaggatcctgaacacaggacttaccgctgcgaatactgcgacgaaatacgttacgcgggggattttaggtaa

SEQ ID NO: 12122 - protein, 144 aa, Unknown
  Obtained from environmental sample
  DOMAIN (2)...(92): Aspartate carbamoyltransferase regulatory chain, allosteric domain
  misc_feature (1)..(144): Xaa is any amino acid
MLNIEKIKKGIVIDHIKAGQGIRIFNWLGLDKAPYTVAFVVNATSSKMGKKDIIKIDEIISIDVDLLGLIDPNITVKIIEDEKITKRIKLKLPNEVKNVIICKNPRCITSTEKYIPHIFHLEDPEHRTYRCEYCDEIRYAGDFR

SEQ ID NO: 12123 - DNA, 858 bp, Unknown
  Obtained from environmental sample
  misc_feature (1)..(858): n is a, c, g, or t
atgaagtacggcgattttgtcgacgaggcacgggagtacgtcataaccaaccctaagacccccgtgaaatggatcaactatatcggaaacctggctttcggcgggtttgtggaccacaccggcggtgcgctagtctgtaagggcgacccgtcgctcaaccgcatcaccaagtacatacagcagatgccctcctccgactttaagggcgagacgctctatataaggataaagacagagggcggctacaaggtcttttcgcccttctttgtgcccacgctcgacggttacgactccttcgagtgccgcgtggggctgggatacaacaagatcgtctccgtcttctacggcgtcaaaaccgagtgtacgatcttcatcccgcaggacgcccaagtagagatacgcgatattcgcgtgacgaacgtctcaggctcgcccctcgaaatcgacgtcgtacctgtgctcgaatacacgcacccggacgcggtcaagcagttcacaaacgccgactgggtgccgcagaccatgcaatcccgctgcttcaccaacagcgacggagtgcggacgctcgtccaatacccgttcatgttccgcgatataaagatcaactacttcacctccaacgccgccgccacttcatttgagaccgaccgccgggtgtttttgggggacaacgagtacggcacgtgggcggcaccgtgcgcgctgaangccgacgaactcgggaacaacgaaatccacaggggcgacaacatcgccgctctgatgcaccgcttgggcgcgctcaaaccgggcgagagcaggcgaatcatcancccactgggccaganagacagcttggccgtcgcccacccgagataa

SEQ ID NO: 12124 - protein, 285 aa, Unknown
  Obtained from environmental sample
  DOMAIN (186)...(281): Glycosyltransferase 36 associated family
  misc_feature (1)..(285): Xaa is any amino acid
MKYGDFVDEAREYVITNPKTPVKWINYIGNLAFGGFVDHTGGALVCKGDPSLNRITKYIQQMPSSDFKGETLYIRIKTEGGYKVFSPFFVPTLDGYDSFECRVGLGYNKIVSVFYGVKTECTIFIPQDAQVEIRDIRVTNVSGSPLEIDVVPVLEYTHPDAVKQFTNADWVPQTMQSRCFTNSDGVRTLVQYPFMFRDIKINYFTSNAAATSFETDRRVFLGDNEYGTWAAPCALXADELGNNEIHRGDNIAALMHRLGALKPGESRRIIXPLGQXDSLAVAHPR

SEQ ID NO: 12125 - DNA, 600 bp, Unknown
  Obtained from environmental sample
  misc_feature (1)..(600): n is a, c, g, or t
atgctcaacacgagaagggggcttaaactctccacgccgggcttcaacggctacgatccgtcaaagggcggcataaccacctacccgccgggggccaaggaaaacggcggcatattcctccacaccaatccgtgggtgatgatagccgaagcgattatgggcgacggcaaccgcgcctacgagtactacaaccagatcaatccggccaccaaaaacgatattatagacgagtacgagtgcgaaccttacgtctacccgcagaacatcttgggcgacgaacacccgctcttcggcctcgcccgtaacagctggctgtcgggaacgtcgtcgtggacgtatcaggcggcgagccgctacataatgggtctgcgcccgcagatggacggtctcttggtagatccgtgcgtcccttccgattggaagaagttctccgtggagcgcaatttccgcggatgccgctacgtgataaacgttgagaatccggggcgcgtatgcaagggcgtaaaatcaatctccgttgacggaaaggcgctcgacaaacccgtcgtccccgcctttactgacgggaaaacacacgaagtcaacgttgtgatgggctga

SEQ ID NO: 12126 - protein, 199 aa, Unknown
  Obtained from environmental sample
  misc_feature (1)..(199): Xaa is any amino acid
MLNTRRGLKLSTPGFNGYDPSKGGITTYPPGAKENGGIFLHTNPWVMIAEAIMGDGNRAYEYYNQINPATKNDIIDEYECEPYVYPQNILGDEHPLFGLARNSWLSGTSSWTYQAASRYIMGLRPQMDGLLVDPCVPSDWKKFSVERNFRGCRYVINVENPGRVCKGVKSISVDGKALDKPVVPAFTDGKTHEVNVVMG

SEQ ID NO: 12127 - DNA, 786 bp, Unknown
  Obtained from environmental sample
  misc_feature (1)..(786): n is a, c, g, or t
atgaagggcgctaaatttgacgcccttattcatctggcggcgtccaaagccgcgggtgaatcaatgttaaaccctgaaaaatattcccgcaataatatcatggggacgcttaatattttaaacgccgcctgtgagacgggcattaaaaacatcgttttttcatcaagcgccgccgtttacggtgagccccaatacttgcctattgatgaaaaacatccaacaagccctgaaaattattacggttttacaaaactggaaattgaacgttttttaggctggtatgaaaaattaaaaaatatccgttacgcgagcctccgctattttaatgccgcaggctacgacgtaaaaggccgaataaaaggacttgaacaaaaccccgcgaatcttctccccgtcatcatggaaaccgcctgcggcattaggaaggaaatgcaggtctttggtaacgattacgataccccggacggtacctgcatacgcgattatattcatgtaagcgatctcgctaccgggcacttcatggcgcttgattacatcataaaaaacaataaaagtattacagttaatcttgggagtgaaaaagggttttccgtaactgaagttcttgaaaccgcgcgtaaggtaacgggaaaaccgatatccgcaaaaatcacaggcagaagagcgggagacccagcctcgcttaccgcgtccgcttcccttgcgaaggaattattgggctggcaggcgcgttattctgatatggaaacattaattaaaacaagctggggcgcgtattcaaaatga

SEQ ID NO: 12128 - protein, 261 aa, Unknown
  Obtained from environmental sample
  DOMAIN (1)...(191): NAD dependent epimerase/dehydratase family
  misc_feature (1)..(261): Xaa is any amino acid
MKGAKFDALIHLAASKAAGESMLNPEKYSRNNIMGTLNILNAACETGIKNIVFSSSAAVYGEPQYLPIDEKHPTSPENYYGFTKLEIERFLGWYEKLKNIRYASLRYFNAAGYDVKGRIKGLEQNPANLLPVIMETACGIRKEMQVFGNDYDTPDGTCIRDYIHVSDLATGHFMALDYIIKNNKSITVNLGSEKGFSVTEVLETARKVTGKPISAKITGRRAGDPASLTASASLAKELLGWQARYSDMETLIKTSWGAYSK

SEQ ID NO: 12129 - DNA, 780 bp, Unknown
  Obtained from environmental sample
  misc_feature (1)..(780): n is a, c, g, or t
atgtatacagagggatggggcgccggcgatacccgtgcgtggtgggatgtttccaatgcccagatgtacgctccgtggttcggttatatggcaggcggcgcggaagaagaatactggaactacactaacgaccgcattgatgaacttaccaagaaaggctatttcggtcagtacctgaccgaggatgattactggaagggaaatctcgaagctgcggaactcggtctttacgatgcggccagaatattccttgtaacccagtatgataattttatcgcgaataaaactcgtttcaacaaccggtttgcctatggattgggagaagggccgaatcactggtccgtgcgtaccgcagatgtaaaacccgatgctgacggccagttcaaagggcagaaggtgctgagggtcgtacagtactccgcacgcggctctctcttcatgaatgcctgggatcctgtcggtaccgagggcttcaacgatgtttacgcttccggcatcatggccgcttgctgcgatccatctacttttaacgcgccgaacagcgccgctccaactccgtttagttcaaagtacgacccggcaagccttaagaccgcgccgcagatcaatgaagacggcgaaatgagcggcacgataccggttcctgcgaacgcggtaaaatggtcgcctgaaaccaataaatgggaggctgtgggtaacggcactactgccgctgcgacaggaaccggctcaatcgttcctgccaaatggcagcatgggggaagacgtcagcctcattga

SEQ ID NO: 12130 - protein, 259 aa, Unknown
  Obtained from environmental sample
  misc_feature (1)..(259): Xaa is any amino acid
MYTEGWGAGDTRAWWDVSNAQMYAPWFGYMAGGAEEEYWNYTNDRIDELTKKGYFGQYLTEDDYWKGNLEAAELGLYDAARIFLVTQYDNFIANKTRFNNRFAYGLGEGPNHWSVRTADVKPDADGQFKGQKVLRVVQYSARGSLFMNAWDPVGTEGFNDVYASGIMAACCDPSTFNAPNSAAPTPFSSKYDPASLKTAPQINEDGEMSGTIPVPANAVKWSPETNKWEAVGNGTTAAATGTGSIVPAKWQHGGRRQPH

SEQ ID NO: 12131 - DNA, 912 bp, Unknown
  Obtained from environmental sample
  misc_feature (1)..(912): n is a, c, g, or t
atgtacaagtggtatgcgcttaagcgtattcttcgcggagtggtcatgtacgcccttctgatcctccttttttccgtgctattcaattcagtcaatgaggcaacccagagatcgcagataaacgaacaggttaaaatggaatccatgcgtttatccaatatgcgccctgaacagttaatagcgtggagagccgagagagaggcgcagttgatacgcctgtataaactcgacaggccgtttggcgaacgtattattttccgcacggtaaatgtgctgaccttcaatttcggaaaatccacgcatattaaatcggcaaaaggcgagcaggatgttctgaccatcattctggaagctctgcccaaaacaatgctgctgtttaccacctctacaatatttgagcttgccatagggataacgctgggcttgttaaaagccagaaaacccggcggcaagctggacaagtctaccagctttgtaaccatgatagtatacggaatgccggcctggtggctgggcatgatgctcatacttttattcgtttacatttttaagatattcccctcaggcggtgttgtatcaacccctacgcctacaggctttgccggttttcttgacaggatttggcacatgattctgcctgtaacaacgcttgttattatttccttctggagcctgtcgttcgttatacgcaatatcgtgcttggggtgctgcaggaagattacatcatgagcgctagggcgcgcggcattggcgaaaagtccatcctgttcgggcatacccttcgcacatcagccccaccaatcgtaacaatggccctgttatcgcttttggtttccttttccggggcgattattttcgagggaatattttcatggcctggtctcggcaaccgtactgctcggccgatctga

SEQ ID NO: 12132 - protein, 303 aa, Unknown
  Obtained from environmental sample
  SIGNAL (1)...(29)
  DOMAIN (119)...(301): Binding-protein-dependent transport system inner membrane component
  misc_feature (1)..(303): Xaa is any amino acid
MYKWYALKRILRGVVMYALLILLFSVLFNSVNEATQRSQINEQVKMESMRLSNMRPEQLIAWRAEREAQLIRLYKLDRPFGERIIFRTVNVLTFNFGKSTHIKSAKGEQDVLTIILEALPKTMLLFTTSTIFELAIGITLGLLKARKPGGKLDKSTSFVTMIVYGMPAWWLGMMLILLFVYIFKIFPSGGVVSTPTPTGFAGFLDRIWHMILPVTTLVIISFWSLSFVIRNIVLGVLQEDYIMSARARGIGEKSILFGHTLRTSAPPIVTMALLSLLVSFSGAIIFEGIFSWPGLGNRTARPI

SEQ ID NO: 12133 - DNA, 810 bp, Unknown
  Obtained from environmental sample
  misc_feature (1)..(810): n is a, c, g, or t
gtggcctaccccatctgcaacntgcgcggtcaaagcgtctcgaaatgggtcaacggcctagagcaggcgatgatcgagaccgccaagggcttcggtgtccatgccgaaagattggatggccacccggggatatgggtcgagactgcgcggggctgggaaaagctgggggccataggtctgcacctaaagaaatgggtctcgacgcacgggctggccttcaacctagcgcccaggatggagcactaccagtggatcaccgcctgcggcatagccgacaagggcgtgtgcagcctgcggacgctccttggtgacgcctgcccctcctggcttgaagcgtcagccagcctggagcggcacctgctggaggcactggctttggagccactgcccacgaccgagccccccagaagcgtgtccatcactatatggaggcgcggggcaaagggcttagagatactgatgctgccgtgccacccgcatgacgaccagtggcagtccggcgtgacggacatggtggagcctggcgaaacagtcgacgccgccgctagggagaccgtggaagagacgggcctgcacggaaggctggtcaacctggacttttcgcacacgcgctgcctaggccccgcgccagttttgggccacgagccgtttttcaacacggaggcctgcttccacctggaagtcctgcccgacgccgccgtgaggctggacaaggcggagcgcgtccgctggtgcccgctggaagaggccatgtcgctgatggcccatgagggagacagggagtcaataagactattgatgcttcattag

SEQ ID NO: 12134 - protein, 269 aa, Unknown
  Obtained from environmental sample
  DOMAIN (134)...(269): NUDIX domain
  misc_feature (1)..(269): Xaa is any amino acid
MAYPICNXRGQSVSKWVNGLEQAMIETAKGFGVHAERLDGHPGIWVETARGWEKLGAIGLHLKKWVSTHGLAFNLAPRMEHYQWITACGIADKGVCSLRTLLGDACPSWLEASASLERHLLEALALEPLPTTEPPRSVSITIWRRGAKGLEILMLPCHPHDDQWQSGVTDMVEPGETVDAAARETVEETGLHGRLVNLDFSHTRCLGPAPVLGHEPFFNTEACFHLEVLPDAAVRLDKAERVRWCPLEEAMSLMAHEGDRESIRLLMLH

SEQ ID NO: 12135 - DNA, 513 bp, Unknown
  Obtained from environmental sample
  misc_feature (1)..(513): n is a, c, g, or t
ttgatcagatggccgagccgagcacgtcgccacatttgtcatagacaggatgacggacaggcactagtattgcgtccgcgaagaccggtgccccgtgcggtcgactgctacgcggccaacttcgggcacccggtcttccgcgaggatctgtcaaacaccgagaaggcaatagggataatcgcgccgctcagtccagaggtcatcatcggcgggtcaccctgccaggacttctcccacgctgggaagcgcgtcgaagacagcagggccgcgctcacggaaaagttcgccgaaatcgtcgcggcggtcggcacaaggtggttcgtcatggaaaacgtcgaccgcgcccaagccagcggggcttacagggcggcccgcacggtcttcaaggaggccggctacggcctcacggaggtggtgctgaacgcaggtttgtgcgggtgccgcagcgccgcaagcgctttttctgcatcggggctctgggcgcggaggacggcttcttggaagaacacataa

SEQ ID NO: 12136 - protein, 170 aa, Unknown
  Obtained from environmental sample
  misc_feature (1)..(170): Xaa is any amino acid
MIRWPSRARRHICHRQDDGQALVLRPRRPVPRAVDCYAANFGHPVFREDLSNTEKAIGIIAPLSPEVIIGGSPCQDFSHAGKRVEDSRAALTEKFAEIVAAVGTRWFVMENVDRAQASGAYRAARTVFKEAGYGLTEVVLNAGLCGCRSAASAFSASGLWARRTASWKNT

SEQ ID NO: 12137 - DNA, 300 bp, Unknown
  Obtained from environmental sample
  misc_feature (1)..(300): n is a, c, g, or t
gtggttcgtcatggaaaacgtcgaccgcgcccaagccagcggggcttacagggcggcccgcacggtcttcaaggaggccggctacggcctcacggaggtggtgctgaacgcaggtttgtgcgggtgccgcagcgccgcaagcgctttttctgcatcggggctctgggcgcggaggacggcttcttggaagaacacataattggccagttgagcgaaagggagaccacgctgagggactacttcggcgcttcccttggcttcgagcactattattccaattccagatggaatgcgtggtaa

SEQ ID NO: 12138 - protein, 99 aa, Unknown
  Obtained from environmental sample
  misc_feature (1)..(99): Xaa is any amino acid
MVRHGKRRPRPSQRGLQGGPHGLQGGRLRPHGGGAERRFVRVPQRRKRFFCIGALGAEDGFLEEHIIGQLSERETTLRDYFGASLGFEHYYSNSRWNAW

SEQ ID NO: 12139 - DNA, 807 bp, Unknown
  Obtained from environmental sample
  misc_feature (1)..(807): n is a, c, g, or t
atgtatatcctggtgattttgtttacaattcttgccatttatcccatcttctgggtaatagtgaattccttcaaaacaacgcaggattatatgcttcacagcaagctcgcctttccggaagcgtggttctataaaaattatcctctggcatggagcaatagcactccgaattttacaatacttacatttaacagtgtattctatacggccataacggtgatgaccataattatcttaagctttatggcgggttttgcgtttgccaagattccgtcgaaattaacgccggtacttcatggcagttttattataggaatactcataacccttcaatgcataatgattcctctttttttagtaattaaaggggtagggttgattaatacgaggctgggggtactcgtcccctatatcggcgttgggcttcccatggcggtttacctttccaccgaatatatcaagtcaatacctaatgaggtagtcgagtccgcccgtattgacggcgcgaagtatctgggtattttcagaatcattattttgcctatggcggcgccggtagccacaacggtcgcgatactcactgttaccggaacatggaacgagttcatgctcattaatatccttgtcgccgccgataatctcaaaaccatacccgtcggaatgaggcagtttgccggtgccttggcaacggattacggcaagcagtttgccgccctggtaatcggcatgatgcctatgattatcttttacgccatcttcagaaaacaaataacaaaaggcgtatcagccggcgccgtgaagggataa

SEQ ID NO: 12140 - protein, 268 aa, Unknown
  Obtained from environmental sample
  DOMAIN (62)...(263): Binding-protein-dependent transport system inner membrane component
  misc_feature (1)..(268): Xaa is any amino acid
MYILVILFTILAIYPIFWVIVNSFKTTQDYMLHSKLAFPEAWFYKNYPLAWSNSTPNFTILTFNSVFYTAITVMTIIILSFMAGFAFAKIPSKLTPVLHGSFIIGILITLQCIMIPLFLVIKGVGLINTRLGVLVPYIGVGLPMAVYLSTEYIKSIPNEVVESARIDGAKYLGIFRIIILPMAAPVATTVAILTVTGTWNEFMLINILVAADNLKTIPVGMRQFAGALATDYGKQFAALVIGMMPMIIFYAIFRKQITKGVSAGAVKG

SEQ ID NO: 12141 - DNA, 930 bp, Unknown
  Obtained from environmental sample
  misc_feature (1)..(930): n is a, c, g, or t
atggtcagattcggccgagatgtccaaataggcatggaagggggcgagcctatttaccatccctggctgaataaaagcattgagaacgcccagaagaaagtcgaggaacggaacttcgagattcgcaaacatcttttggattacgatgacgtgctgaaccagcagcgcaaatttatatacgaacagcgcgacgcgatactgcttgataacgatttgaaaaacagggtgaatgacgccactgccggccttgttggagccatgattgacgaattcaacagggaacaaaagcaggatatgaccgcggctttaaaaaatctgaacgagcagcttcgttccaaattcggttatcagctaacgtttgagcaaaacgaagttaaaaatgtcgaattgcttgaaaagaaaatcgtcaccgatcttgaaaaagatattaatgacaaggaagcccttatcggtccggattaccttaacatgattatcagggacagctaccttcacgccattgacaacaaatggctagatcatctggaaaacatggaggcgctgcgcgaagcagtttacctgcgccattacgcccagaaaaatcccctgacggaatacaaggtggagggctttcagatttttgacagtatggtcgatgacatacgccaggaaatagcgtcacgcctgcacctcgtgaggatcaatatcgcgccctcagacggtgcccgcaggcccggccgcacaataacttcgcaatcggcgagccacagcagcatggcctctttcagctccgccgcaggcgctgcttccggcggagccaagggttcgcctatagacggtgcgagccgtcccgacggcgcgacagtagtacgcaaccagcccaaagtgggccgcaacgacccatgcccctgcggtagcggcaggaagtataaacactgccacgggaagtaa

SEQ ID NO: 12142 - protein, 309 aa, Unknown
  Obtained from environmental sample
  DOMAIN (291)...(309): SEC-C motif
  misc_feature (1)..(309): Xaa is any amino acid
MVRFGRDVQIGMEGGEPIYHPWLNKSIENAQKKVEERNFEIRKHLLDYDDVLNQQRKFIYEQRDAILLDNDLKNRVNDATAGLVGAMIDEFNREQKQDMTAALKNLNEQLRSKFGYQLTFEQNEVKNVELLEKKIVTDLEKDINDKEALIGPDYLNMIIRDSYLHAIDNKWLDHLENMEALREAVYLRHYAQKNPLTEYKVEGFQIFDSMVDDIRQEIASRLHLVRINIAPSDGARRPGRTITSQSASHSSMASFSSAAGAASGGAKGSPIDGASRPDGATVVRNQPKVGRNDPCPCGSGRKYKHCHGK

SEQ ID NO: 12143 - DNA, 747 bp, Unknown
  Obtained from environmental sample
  misc_feature (1)..(747): n is a, c, g, or t
atgacagaagtgtatgttcccaacagcaacgccaacagtgcggacaattggcccgaggctttggacgtggcacagcacgtacacaatgcaatggtagaggcagagttccaaatgtatgtgtggtggtatatccgtaggtcatacagcccgctgaaagaagatgggactataagcaaacgtggctatatgatgtcgcatttctccaaatttgttcgcccaggctatattagagttgaagcaaccaaaacccctgcgacaaatgtatatgtgtctgcatacaaaagtgccgacagcgttgttattgttgctatcaacaaaactacatcggctgtgagccagcaatttaccataagcaacggcacagtggcaacagtgacgggcaaaagaaccacttcatcaggaaatatggcaaatgttgcagcgattaatctttcaaacggcagtttcaccgcagagcttcccgcgcagagcgttacaacatttgtaggcgcaagaacaggagttgcgcgaagcagttccagcgcggcagtttcatctagcagcagggcggcaagcagttccagcagagcagtttcatctagcagcatggcagtttcttctagcagtgccataacatacactgtaacgtgcaatgtgagtaacctgcaacctagttatgtagcgggtagcgaggttccaagacccaatgtaagttgcggagctggagttacagttggagacgcttcatttagtgctggtaatccataa

SEQ ID NO: 12144 - protein, 248 aa, Unknown
  Obtained from environmental sample
  misc_feature (1)..(248): Xaa is any amino acid
MTEVYVPNSNANSADNWPEALDVAQHVHNAMVEAEFQMYVWWYIRRSYSPLKEDGTISKRGYMMSHFSKFVRPGYIRVEATKTPATNVYVSAYKSADSVVIVAINKTTSAVSQQFTISNGTVATVTGKRTTSSGNMANVAAINLSNGSFTAELPAQSVTTFVGARTGVARSSSSAAVSSSSRAASSSSRAVSSSSMAVSSSSAITYTVTCNVSNLQPSYVAGSEVPRPNVSCGAGVTVGDASFSAGNP

SEQ ID NO: 12145 - DNA, 492 bp, Unknown
  Obtained from environmental sample
  misc_feature (1)..(492): n is a, c, g, or t
atgtcccggcaggaaatgaaagaagaaatgaaaatgtacgagggagacccgcagatacgcaacaggatacgcagccgcttccgcgatctcctcaagcagaatatagccgaggcggttccccgcgccgacgtggtaatcacaaacccgacccactatgcggtcgcgcttgagtaccatcaggaaactatgcccgacggtcccatggtcacggcaaaaggcgcggacgaggccgccgcacggattcggaagctggcgcaggaaaacggcgtcccgatggtggaaaacagacatctcgcccggactttgtaccaggaagtggaggttggggactatgtcccccaggcgtacttaacagtggtagcgacgatattggtgaaagtgatgcatattaacgaattgcggcgcaaggcaaaagctcaggaggcggctcaagctgcccaggcggcccaagctgccgcggaagcggctgaaatctatggagccggcgcatga

SEQ ID NO: 12146 - protein, 163 aa, Unknown
  Obtained from environmental sample
  DOMAIN (1)...(128): FlhB HrpN YscU SpaS Family
  misc_feature (1)..(163): Xaa is any amino acid
MSRQEMKEEMKMYEGDPQIRNRIRSRFRDLLKQNIAEAVPRADVVITNPTHYAVALEYHQETMPDGPMVTAKGADEAAARIRKLAQENGVPMVENRHLARTLYQEVEVGDYVPQAYLTVVATILVKVMHINELRRKAKAQEAAQAAQAAQAAAEAAEIYGAGA

SEQ ID NO: 12147 - DNA, 774 bp, Unknown
  Obtained from environmental sample
  misc_feature (1)..(774): n is a, c, g, or t
atgttaggcagcttgcgnagacgaagacgctttaagttcgggcttaaaggacggcgcagcggagagataatcacggtcagggaatgtcctgtcgcggaaaggggaataggagagcttctgcgttcaggagggaaagacttcccaatgcctcccgaaaaagacaggtttacggttttttcatacagcgggcttcttttaagtgaagggggaacagaaaagggaaaaatcagcctttttggaaaagacattgttctttcagcaggccttttttttcaaagtaacgtaacaatgctggagaaattgataaattatctgcgtaaaatagccgtaaacaccggtaaaaacacgtctatggcggatttatactgcggagtcggaacttatgccgtctttcttggcgatttatttggaaaaatcgtccttatggaggaaaataaaaaggcagtttcccttgcaagggagaatttaaagggaacaaacgttgaatttttcgctttgcgggacacagaatgggtaaaatctttcctgcgccaaaaagacagttttgattttgttatcgcggacccgcccagagccggactgtcccccgcgctggcatcggctctggcgcaaaacggaccgcccgttttcgcatacgtttcctgcgatgcggcatcccttgcgcgtgattcanaaatactgacaaacggcggctataaaattaaaaatcttgtcttttttgatttttacccgcaaaccgctcatattgaaagcctttgcgttttcataaaatga

SEQ ID NO: 12148 - protein, 257 aa, Unknown
  Obtained from environmental sample
  DOMAIN (80)...(236): Methyltransferase small domain
  misc_feature (1)..(257): Xaa is any amino acid
MLGSLRRRRRFKFGLKGRRSGEIITVRECPVAERGIGELLRSGGKDFPMPPEKDRFTVFSYSGLLLSEGGTEKGKISLFGKDIVLSAGLFFQSNVTMLEKLINYLRKIAVNTGKNTSMADLYCGVGTYAVFLGDLFGKIVLMEENKKAVSLARENLKGTNVEFFALRDTEWVKSFLRQKDSFDFVIADPPRAGLSPALASALAQNGPPVFAYVSCDAASLARDSXILTNGGYKIKNLVFFDFYPQTAHIESLCVFIK

SEQ ID NO: 12149 - DNA, 369 bp, Unknown
  Obtained from environmental sample
  misc_feature (1)..(369): n is a, c, g, or t
ttgaatgtcagtgtaaataacaataaaaaaaggattgcagataatatgcctacatacgaatacgaatgccaaaagtgcggacacatattcgacgagtttcagagcataaccgccccgccggtcgcctattgcccgcaagaaggttgcggcggcgaggccaagcggaagttttcgccgggggcagggtttatcttcaagggaagcggattctacagcacggactaccgctcggagtcctacaaaaaagccgccaaagccgacacttccgcgccgtcgccatcgtcatcgccgtcatcgggcgcttcctcttcggggacggacaagggcggaggatcttcggcgacaccggcggcttcatcgccgtcgtag

SEQ ID NO: 12150 - protein, 122 aa, Unknown
  Obtained from environmental sample
  misc_feature (1)..(122): Xaa is any amino acid
MNVSVNNNKKRIADNMPTYEYECQKCGHIFDEFQSITAPPVAYCPQEGCGGEAKRKFSPGAGFIFKGSGFYSTDYRSESYKKAAKADTSAPSPSSSPSSGASSSGTDKGGGSSATPAASSPS

SEQ ID NO: 12151 - DNA, 888 bp, Unknown
  Obtained from environmental sample
  misc_feature (1)..(888): n is a, c, g, or t
gtgaatgtatcgtttctggtaaaacaggtgcctgacacccagaatatcagcggggaggcaatgacgccggagggcacagtaaaccgggcggcccttccggctatttttaaccccgacgacctctatgccctggaagcggccctacaaataaaagacgccaaccctgataccagggtgaccgtgataaccatgggcccgccgtcggcttcgacagtgctaaaggaatgcctttaccggggagcggattttactgcgctggtttccgaccggggttttgccggagcggatacccttgccacttcctatgcgcttaaatgcgcgataaacaaggccggggcttttgaccttgtgctatgcggacggcaggcgatagacggggacaccgcgcaggtaggcccccagactgcggaaaagctgggcgtcaaccagataacctgtgtctccaaaatcgaagccctggactctgttaagaaagaaattattgctgttcgttcaatagaaggcggctgggaaagggtgaaggcgaaactgcctgttctcgttaccttcaacgccgaaggcgaaatgccccggcccgcgtcggccattaagagcatgacctacaagcgcgcagttccggtttcagataccggttcgccgagcaacccggctggctttgtagaaaaaccggatgcggaggaaaacggcgtggcaaacccgatggccctttggaacattcctgccatcaacgccgacccgcttcagtgcggccttgccggttctcccaccaaggtaaagcatatcaattccgtggtgctaaccgccgcggacatcaggtacatcgatcccggcgaagcgggaattgcggagctgatccacggcctcatcgcggatcatactttcggataa

SEQ ID NO: 12152 - protein, 295 aa, Unknown
  Obtained from environmental sample
  DOMAIN (24)...(221): Electron transfer flavoprotein domain
  misc_feature (1)..(295): Xaa is any amino acid
MNVSFLVKQVPDTQNISGEAMTPEGTVNRAALPAIFNPDDLYALEAALQIKDANPDTRVTVITMGPPSASTVLKECLYRGADFTALVSDRGFAGADTLATSYALKCAINKAGAFDLVLCGRQAIDGDTAQVGPQTAEKLGVNQITCVSKIEALDSVKKEIIAVRSIEGGWERVKAKLPVLVTFNAEGEMPRPASAIKSMTYKRAVPVSDTGSPSNPAGFVEKPDAEENGVANPMALWNIPAINADPLQCGLAGSPTKVKHINSVVLTAADIRYIDPGEAGIAELIHGLIADHTFG

SEQ ID NO: 12153 - DNA, 471 bp, Unknown
  Obtained from environmental sample
  misc_feature (1)..(471): n is a, c, g, or t
atgacnnagancaagggaatatgcagagcgttaatgccacccgatttttcccgccttgccttaacagacctttttattcaactatgcgccgattttgaaaaaagaatgtcagtagaatgcagacctataatcgacaaagatttttccgccgaaaaactatcccctcaaatgcagttacaaatctaccgcatagtacaggaagcgttatccaatgttgaaaaacactccgaagcaaaagaagtaacattaacagcgcaaaacaaagacaaaaaaaccttgttaatatacatcaccgatgacggaaaaggaaacatggcaaacatacaaagctcgcaatccggcggagacggactaggaataaaaggaatgtaccaaagggcggcaatacttggagcgtccctatctttcattgaaggagcgggatcggggcttacggtgaggcttgaagtaccaataccaatgaggaattag

SEQ ID NO: 12154 - protein, 156 aa, Unknown
  Obtained from environmental sample
  DOMAIN (56)...(153): Histidine kinase-, DNA gyrase B-, and HSP90-like ATPase
  misc_feature (1)..(156): Xaa is any amino acid
MTXXKGICRALMPPDFSRLALTDLFIQLCADFEKRMSVECRPIIDKDFSAEKLSPQMQLQIYRIVQEALSNVEKHSEAKEVTLTAQNKDKKTLLIYITDDGKGNMANIQSSQSGGDGLGIKGMYQRAAILGASLSFIEGAGSGLTVRLEVPIPMRN

SEQ ID NO: 12155 - DNA, 336 bp, Unknown
  Obtained from environmental sample
  misc_feature (1)..(336): n is a, c, g, or t
ttgagtgtcgccttaatacgggaattaagttttgggaggttcaaaatgaacttggaaattaaagcagtacatttatcactgcacgacgacgcaaaagagtaccttaataaaaaaattgaaaggcttaaaaacgccgaaaatatgattgttgatttgataattaccataaaaaaagaaaaggattttaacgttgagtccacggtaaatttccgatggggcgtttccattcatgtcgccgaagaagattttgaactaaccaaagccattgacaagatgatcgacaaacttgaaacgaaagtaaccaaagaaaaagaaaaagtgaaagaaaaaagatag

SEQ ID NO: 12156 - protein, 111 aa, Unknown
  Obtained from environmental sample
  DOMAIN (17)...(110): Sigma 54 modulation protein / S30EA ribosomal protein
  misc_feature (1)..(111): Xaa is any amino acid
MSVALIRELSFGRFKMNLEIKAVHLSLHDDAKEYLNKKIERLKNAENMIVDLIITIKKEKDFNVESTVNFRWGVSIHVAEEDFELTKAIDKMIDKLETKVTKEKEKVKEKR

SEQ ID NO: 12157 - DNA, 804 bp, Unknown
  Obtained from environmental sample
  misc_feature (1)..(804): n is a, c, g, or t
gtgctttcagtggacttataccgggacggtaagctgctccagagctttgcctnttgtacgggcttcagaactctgaaaatcgcgcatcgggaattccttatcaacggcaagatggtgtatattaaaggcgcaaaccgccatgagcatgatgaaaaaaccggcaaaaccctttctgtagaggccatggtgcgggacataaagatccttaaatcccataactttaacgccatcaggaccagccattatcctgatgatgaacgctggtatgatctctgcgaccgctatggcatttacctctgggatgaggcgaatgtggaaagccactgtttctgtaatcagctctgctcagatacccgttggacttatgccttcgtgatccgaatgcagcgcatggtggaacgagataaaaaccacccttcggttgtggtgtggtctttggggaacgaaagcggttatggcagcagccacgaggcaggagccggctggatacgcttttacgattcctcaaggccccttcattatgaaggggctatgcgcggaagatccggcatccatgacggttggacatcgggaaataccgtatcggatattgtatgccccatgtacccggctatagaaagaatcattaatttcgcccggtatagggacgattgccgccccatgattttgtgtgaatattcccatgccatgggtaattccaacggaagccttgcggactactggaaggcttttgaaacccaccatgggctccaggggggctttatatgggaatggagggatcacggattgaagcctatacgctga

SEQ ID NO: 12158 - protein, 267 aa, Unknown
  Obtained from environmental sample
  DOMAIN (25)...(266): Glycosyl hydrolases family 2, TIM barrel domain
  misc_feature (1)..(267): Xaa is any amino acid
MLSVDLYRDGKLLQSFAXCTGFRTLKIAHREFLINGKMVYIKGANRHEHDEKTGKTLSVEAMVRDIKILKSHNFNAIRTSHYPDDERWYDLCDRYGIYLWDEANVESHCFCNQLCSDTRWTYAFVIRMQRMVERDKNHPSVVVWSLGNESGYGSSHEAGAGWIRFYDSSRPLHYEGAMRGRSGIHDGWTSGNTVSDIVCPMYPAIERIINFARYRDDCRPMILCEYSHAMGNSNGSLADYWKAFETHHGLQGGFIWEWRDHGLKPIR

SEQ ID NO: 12159 - DNA, 954 bp, Unknown
  Obtained from environmental sample
  misc_feature (1)..(954): n is a, c, g, or t
atggtagacaagtatttaaaaataattgagtgtaaccaggaaattgttagaatgttcgggctgaaggttaagcaggaatttatgaatagaatgtatgacctttatcctaaatatcaaccttcgggaaaattgtcaaaagatatgctaaacgcttattttgacgaggcgtttgaggaaggtcattgccgttttgaatggatgcatcaaaaacttgacggagaacaaatacctacggaagtttcattggttcgcgttaagttcaggggcgagtacgccgtcgcgggttttataagggatttaagagaaataaagaaaatgttcgccgaaatgcacagggcggaaatcgcggaagagagcagtaaggcgaagagcgattttctcgcgaggatgagccatgaaatccgcacgccgatgaatgcgattctcggcattactgaaattcagcttcaggataaaacgcttccgcttaccgcgcaggaagctctggaaaggatttacaattcaggcgatttattactcggtattataaatgacatactcgatctatccaaaatagaagcaggaaaactggagctttttatatcgcaatacgatttcgccagtcttattcatgataccgtaaaacttaatattttacgctgtgaaacaaaaccgatagattttaaattaattattaataaaaatatgccgtcaactttgaacggggatgaacttagaataaaacaaattttaaacaacctcctttccaatgcgtttaaatatacgcaggagggacggatagaatttgaactgtncaccgaacctcatgaagacggttcaaaggttataatagttttccgcgtcaacgataccggacagggaatgacggcggaacaggtaaaaaaacttggagatnaattcagccgctttaacatggaggccaaccgtaaaacggaaggcaccggtctggcctga

SEQ ID NO: 12160 - protein, 317 aa, Unknown
  Obtained from environmental sample
  DOMAIN (235)...(317): Histidine kinase-, DNA gyrase B-, and HSP90-like ATPase
  misc_feature (1)..(317): Xaa is any amino acid
MVDKYLKIIECNQEIVRMFGLKVKQEFMNRMYDLYPKYQPSGKLSKDMLNAYFDEAFEEGHCRFEWMHQKLDGEQIPTEVSLVRVKFRGEYAVAGFIRDLREIKKMFAEMHRAEIAEESSKAKSDFLARMSHEIRTPMNAILGITEIQLQDKTLPLTAQEALERIYNSGDLLLGIINDILDLSKIEAGKLELFISQYDFASLIHDTVKLNILRCETKPIDFKLIINKNMPSTLNGDELRIKQILNNLLSNAFKYTQEGRIEFELXTEPHEDGSKVIIVFRVNDTGQGMTAEQVKKLGDXFSRFNMEANRKTEGTGLA

SEQ ID NO: 12161 - DNA, 417 bp, Unknown
  Obtained from environmental sample
  misc_feature (1)..(417): n is a, c, g, or t
ttgatccttcacaggaggtataaattgggaacagatatgtcgcaggcaattcgtcagttaaatcaagatcgcggtattcctgaggatctgatactgcgaaccattgaagatacgctaatcgccgcatataaacatcgttttggcaacgctgacaacgcggttgttcagtttaatgaagataatcttgaagtctctattttcgccaggaaaaaaattgtggaacaggacggcgtttacgatcctgtaacggaaatagatttggaagaagcgagagaattaaatccggacgcggaagtcggcgatgaaatacttgtggatatagatccaaaacaattcgaccgggttacggttcaaagcgctaaacaaaaggcacaccagtcaatcagggatatcaaaaggacagctcggccgatctga

SEQ ID NO: 12162 - protein, 138 aa, Unknown
  Obtained from environmental sample
  DOMAIN (12)...(135): NusA N-terminal domain
  misc_feature (1)..(138): Xaa is any amino acid
MILHRRYKLGTDMSQAIRQLNQDRGIPEDLILRTIEDTLIAAYKHRFGNADNAVVQFNEDNLEVSIFARKKIVEQDGVYDPVTEIDLEEARELNPDAEVGDEILVDIDPKQFDRVTVQSAKQKAHQSIRDIKRTARPI

SEQ ID NO: 12163 - DNA, 474 bp, Unknown
  Obtained from environmental sample
  misc_feature (1)..(474): n is a, c, g, or t
atgaagtataccggcaaagccatagaaaactcggaaatagaagccgtaaggcagcctattgaagccgttctaaatgggcttggtntgcgccttattgagcttacggtttcccggcgtaaggagagcgcgcaaatcagggctgtgatttacaacgggggaagcatcggtactgatgactgttcaaaagcccatcgctccatcatgcctcggctggaattggcatttgaagggcaggacatctaccttgaagtgtcgtctccggggatagacaggttgattaaggacggcgctgaatttgccaattataagggaaggggagtgcggtgttaccgcgcggatatttcagattggacggcgggggttttggaatccgccgatgaagaaggaattatcataaagacaaaagaagggaacgtcagaatagattttgacattatagccaaagcaaggcttgatccttcacaggaggtataa

SEQ ID NO: 12164 - protein, 157 aa, Unknown
  Obtained from environmental sample
  DOMAIN (19)...(151): Uncharacterised BCR, YhbC family COG0779
  misc_feature (1)..(157): Xaa is any amino acid
MKYTGKAIENSEIEAVRQPIEAVLNGLGXRLIELTVSRRKESAQIRAVIYNGGSIGTDDCSKAHRSIMPRLELAFEGQDIYLEVSSPGIDRLIKDGAEFANYKGRGVRCYRADISDWTAGVLESADEEGIIIKTKEGNVRIDFDIIAKARLDPSQEV

SEQ ID NO: 12165 - DNA, 651 bp, Unknown
  Obtained from environmental sample
  misc_feature (1)..(651): n is a, c, g, or t
ttgggctttggaaaggctggaaacactgggaatggagtagcacgcaccagggataggatgttgacctttgatttattcttacaaatttggggcggtattggttatcttcttgcaaaaatattgcttgctttagctgaaggcacgaataacggtaaaagagtacgcatcattggttggctttcttatcttgttggcgtacccgcatgggttattttattggcaagcaaaaataattgggttgttgccgccattgaatttggcagcatcccttcattgattcttggtcttgtaaccacatggaagcaaaatattcaagttaataaaatttttgatatgtttgttaaattttttaccctttttatgattatattgggaacactctacagtatcttttactttcatggaattacaacattttctcaaatattagagattttagtcaccttcgggttcctattgggtagttatttacttgcaaaaaataatcctgccggatggcttttattcgcgcttatgtgtacttgcatgggaacattaatgttaatacaggataaagtgttgctggtttttcaacaaggtatttcacttattgttgtaatagctggatacatacgagcgataaaaaaaagtagtgcccaaagaacgagatag

SEQ ID NO: 12166 - protein, 216 aa, Unknown
  Obtained from environmental sample
  misc_feature (1)..(216): Xaa is any amino acid
MGFGKAGNTGNGVARTRDRMLTFDLFLQIWGGIGYLLAKILLALAEGTNNGKRVRIIGWLSYLVGVPAWVILLASKNNWVVAAIEFGSIPSLILGLVTTWKQNIQVNKIFDMFVKFFTLFMIILGTLYSIFYFHGITTFSQILEILVTFGFLLGSYLLAKNNPAGWLLFALMCTCMGTLMLIQDKVLLVFQQGISLIVVIAGYIRAIKKSSAQRTR

SEQ ID NO: 12167 - DNA, 447 bp, Unknown
  Obtained from environmental sample
  misc_feature (1)..(447): n is a, c, g, or t
atgacaatccgcaatttaggaatagattttgtaaaaaatgtcattatattaaataaaacccctattcattcaccgcgtaccgttgagttacgggactttgttaagatggaaaaagcaagcggtaaacattcaattatcaccgttcttgaggaatcacagcgattcatggcttcccttctctttgaatttcatgcggcgcttgactgccccgtttggataattggttacagtgaaatgcgtaagggcggcatttttgaagtctacacaaatgaaataaaagaactgtacgcagataacgaaaaaatgtataaaaagttatttttattccgacatttttcaatgaatcaattcactattgatttgaaacaacaggcaaaaccgggggagagtgtaattaaaagtcttgaacgtattggagaggggtatagggtaaggatacttggataa

SEQ ID NO: 12168 - protein, 148 aa, Unknown
  Obtained from environmental sample
  misc_feature (1)..(148): Xaa is any amino acid
MTIRNLGIDFVKNVIILNKTPIHSPRTVELRDFVKMEKASGKHSIITVLEESQRFMASLLFEFHAALDCPVWIIGYSEMRKGGIFEVYTNEIKELYADNEKMYKKLFLFRHFSMNQFTIDLKQQAKPGESVIKSLERIGEGYRVRILG

SEQ ID NO: 12169 - DNA, 786 bp, Unknown
  Obtained from environmental sample
  misc_feature (1)..(786): n is a, c, g, or t
atgcaggaagccatatctagagttaaaagtgattttaccgcttttgaaaaagaatccgccgttagcagagatactgtcgccgcggcgtttaacgcccagactcagtccttgcgtaaggaaattgacgaaacaaacaaggaacttgagggcttaaagaaacaagctcatgacaatttatccgaaaaacttacagcttttgaaaatgaatttaccgtcgaacttggaaaacgcacttccgaaatcggcaggcaaatcgctgattggcagacgggtcttgagaaccgcattgaaagctcaggtgataaaatcgcgaataaatggaaactgattgaagaaaaaattatttccgaacacaaaaaggacatcgccgcattgagcgagcgtcttacatcggatatggaaaggctcaaatctgaagaaaccgcttttgaagaagacataagaaaggacatgaacaatattgatgaaacccgttcatcctttaatgaacagattaaaaaagaccttgaagaaatgcgcatttccgcgganagcgaagttaaagtacaggtcggccagtatcaacttttaatgcanganacactacggcaaaaacagagggaactggaaaaagaattgatgaaatatccgaaacatccanaaattcatactccaaccttgaagacatggtacgtgaggcgaaacanngagtggacgaatggcaggncccaatatatacaaaagacgcgaaatggacgccgcgctttgagaccttcacggcacagcagggaaaccgaagtgatatga

SEQ ID NO: 12170 - protein, 261 aa, Unknown
  Obtained from environmental sample
  misc_feature (1)..(261): Xaa is any amino acid
MQEAISRVKSDFTAFEKESAVSRDTVAAAFNAQTQSLRKEIDETNKELEGLKKQAHDNLSEKLTAFENEFTVELGKRTSEIGRQIADWQTGLENRIESSGDKIANKWKLIEEKIISEHKKDIAALSERLTSDMERLKSEETAFEEDIRKDMNNIDETRSSFNEQIKKDLEEMRISAXSEVKVQVGQYQLLMXXTLRQKQRELEKELMKYPKHPXIHTPTLKTWYVRRNXEWTNGRXQYIQKTRNGRRALRPSRHSRETEVI

SEQ ID NO: 12171 - DNA, 606 bp, Unknown
  Obtained from environmental sample
  misc_feature (1)..(606): n is a, c, g, or t
ttgatggccgagtttttcaccacctcgcagcaccttgagcggatactcgtttcgggaaagaccatgataccgtccttaagccagaacgatgttataacttcttttgcgggccttcgtccatatttgggtgaagatttttatattgaggcttcggcgaaagttcccgcatttgttcaggtggcgggaattcaaagcccggggcttaccgcctcccccgccataggcgaatatgtaaaaaatattttacttgaaatcgggcttgttctgacggaaaaacctcattgggatccttatgttgaagaccgtccctgtgcgcgggaacttaactttaatcaactggacagccttatcgcaaaaaattccaaatggggcaatattgtctgccgatgtgaaaatgtaagcgaggcggaaataatcgaggctgttaaacttgggcacacaactttagacggagtaaaatactttacgcgtgcgcagatgggacgctgtcagggcggcttttgcacctacaagatcattaaaatcattatgagggaaaccggcctttcatgggatcagataacaaaacacggcggaaagagccgacttttggaggccgcgctgtga

SEQ ID NO: 12172 - protein, 201 aa, Unknown
  Obtained from environmental sample
  DOMAIN (125)...(180): BFD-like [2Fe-2S] binding domain
  misc_feature (1)..(201): Xaa is any amino acid
MMAEFFTTSQHLERILVSGKTMIPSLSQNDVITSFAGLRPYLGEDFYIEASAKVPAFVQVAGIQSPGLTASPAIGEYVKNILLEIGLVLTEKPHWDPYVEDRPCARELNFNQLDSLIAKNSKWGNIVCRCENVSEAEIIEAVKLGHTTLDGVKYFTRAQMGRCQGGFCTYKIIKIIMRETGLSWDQITKHGGKSRLLEAAL

SEQ ID NO: 12173 - DNA, 792 bp, Unknown
  Obtained from environmental sample
  misc_feature (1)..(792): n is a, c, g, or t
atgaaggaacggcttcccaaggatgtgtttaaggcattaaaaaagacaatgtcgcagggtacgcatttagagcttgatatcgccaatgttgtcgccaatgccatgaaaagctgggcggttgaaaacggtgcgacgcattttacccattggttccagcccatgaccggcacgacggcggagaagcacgacagctttatttcaccgacgagcgacgggaaagttatcatggagttttcggggaaagagcttgtccggggagagccggacgcttccagtttcccgtccggcggcttacgcgccacctttgaagcgagaggctacaccgtttgggatataacttcgtatgcctttattaaagacggaaccctgtgtatccccaccgcgttctgttcgtactcaggcgaagcgcttgataaaaagacgccgctgctccgctcaatggaagcaatcgacaaacaggcaatccgcatactcaggcttttcggcgacaaaacagcgaagcgcgttttgacaacggttggtcctgagcaggaatatttccttattgacaaagagatgttccttgaacgtcccgatctgatctacaccggcagaactttgttcggcgcccgcccgcccaaagggcaggagcttgaggatcattatttcggcgctatcaaaccccgtgtgtccgcttttatgaaggagcttgatgaagaactctggaaacttggcgtatgcgcaaaaaccaaacacaatgaagtagctcccgcgcagcacggaatggcgccgattttttcacaacccatatag

SEQ ID NO: 12174 - protein, 263 aa, Unknown
  Obtained from environmental sample
  misc_feature (1)..(263): Xaa is any amino acid
MKERLPKDVFKALKKTMSQGTHLELDIANVVANAMKSWAVENGATHFTHWFQPMTGTTAEKHDSFISPTSDGKVIMEFSGKELVRGEPDASSFPSGGLRATFEARGYTVWDITSYAFIKDGTLCIPTAFCSYSGEALDKKTPLLRSMEAIDKQAIRILRLFGDKTAKRVLTTVGPEQEYFLIDKEMFLERPDLIYTGRTLFGARPPKGQELEDHYFGAIKPRVSAFMKELDEELWKLGVCAKTKHNEVAPAQHGMAPIFSQPI

SEQ ID NO: 12175 - DNA, 459 bp, Unknown
  Obtained from environmental sample
  misc_feature (1)..(459): n is a, c, g, or t
atgataagccttgagcaagtccaacttctggaaacaagagtctccaaggcgcttgaatatgtgcaaaagataactgcggaaaacgcggcgctggtttctcaaagggaagaattacaggaaaaacttgaagccaatcagaaacgaattgacgagcttgaagttttggttgtgcgctttaaaaaagatcaggcgcgtattgaagacggaattgtcgccgcccttgaccgccttagccagtttgaagaggcgtttgagaacagtctgaaagaagataaaactgtaaaaaaaccggcggcaaaacagcgcgtaaaaccggaagagtcggcaacatcggcagcgcaagcagcgtcatcggtttcaccgggcgtgttttttgaaattccggagaaagagacaaacgaagtttccgcttcgctggaagaggagctttcttctaaaggtgaactggacattttttag

SEQ ID NO: 12176 - protein, 152 aa, Unknown
  Obtained from environmental sample
  misc_feature (1)..(152): Xaa is any amino acid
MISLEQVQLLETRVSKALEYVQKITAENAALVSQREELQEKLEANQKRIDELEVLVVRFKKDQARIEDGIVAALDRLSQFEEAFENSLKEDKTVKKPAAKQRVKPEESATSAAQAASSVSPGVFFEIPEKETNEVSASLEEELSSKGELDIF

SEQ ID NO: 12177 - DNA, 447 bp, Unknown
  Obtained from environmental sample
  misc_feature (1)..(447): n is a, c, g, or t
atgaaaattcttgtagacgcggattcctgtccaaagcctgcaagggatcttgttctccgcagggcggtaaaattgggtgtccgcgtaatatttgccgctaaccgtcagattcctgacgcggcgggggcacaaatggaaatttgcccccaaaacgaaaatgccgctgacgaccgtatagtggaattggctgaaaacggcgacgttgcggtaacaagggacgtgccacttgccaagcggcttgtagaaaaagacataaatgtccttgacgatcgcggccgtgtctttacaaaaaataacattaacgaatttctgtctctgcgtaattttacggtaggtcttgcagaaaacggcatggaatttgaaagaacggcgaattacggcaaaaaagaatttaaaaccttcgccgacagtctggatcgaatattaacttccctgcgtgtcaggtaa

SEQ ID NO: 12178 - protein, 148 aa, Unknown
  Obtained from environmental sample
  DOMAIN (1)...(144): Uncharacterized BCR, YaiI/YqxD family COG1671
  misc_feature (1)..(148): Xaa is any amino acid
MKILVDADSCPKPARDLVLRRAVKLGVRVIFAANRQIPDAAGAQMEICPQNENAADDRIVELAENGDVAVTRDVPLAKRLVEKDINVLDDRGRVFTKNNINEFLSLRNFTVGLAENGMEFERTANYGKKEFKTFADSLDRILTSLRVR

SEQ ID NO: 12179 - DNA, 642 bp, Unknown
  Obtained from environmental sample
  misc_feature (1)..(642): n is a, c, g, or t
gtgcaggatttgaaggcggagaacgcccgtcttcgcgagcatagcaaggatcttgagatatcgtctcagaagatagtcggtatagacagcatgacggcgtatttgcgccgtctggcgagtattgcggatattaaggagagcgtctcgcccgccgcggcggcgtccgcggtcggtcggtctgaaccgccggcgattcagcagggcgcggagcgcgccgacggtcaagttgcgcgtaccggcgcttcgacggagtttgcggcctcggttccgaacataatgccggctacggggtggattacaaagctatataccaccgaccaagcgtcgacgcaccttggcgtggacattgcggcgaccagcggtacgccgatacggtcgacggcgccgggagttgtggaagaggttcgcaacgacaagtactacggccaagtggtggaggttcgtcacgagaacggctttttgacgcggtacggccactgttcgcagatactcgcgtcggtcggcgatagggtgaatagggggcagacgatagcgttggtcggcaacaccggccgctccaccgcgccccacgtgcattatgaggtaatgaaatacggaaaatacgttgatccgatggatttcatcggtgcgcataaacagtaa

SEQ ID NO: 12180 - protein, 213 aa, Unknown
  Obtained from environmental sample
  DOMAIN (109)...(204): Peptidase family M23
  misc_feature (1)..(213): Xaa is any amino acid
MQDLKAENARLREHSKDLEISSQKIVGIDSMTAYLRRLASIADIKESVSPAAAASAVGRSEPPAIQQGAERADGQVARTGASTEFAASVPNIMPATGWITKLYTTDQASTHLGVDIAATSGTPIRSTAPGVVEEVRNDKYYGQVVEVRHENGFLTRYGHCSQILASVGDRVNRGQTIALVGNTGRSTAPHVHYEVMKYGKYVDPMDFIGAHKQ

SEQ ID NO: 12181 - DNA, 864 bp, Unknown
  Obtained from environmental sample
  misc_feature (1)..(864): n is a, c, g, or t
atgaccgcaaataccaaagagtcacaaacggcggcaccgtatcggatgatcgcggacgacgggtcgtctcttaacctctacctcaaagagataagcaggtacaagacgctgccgatagaggaggaggccgatctcgcgaggcgcatacgcgacggcgaccgtctggcgctcgacaagcttgtaaaatccaacctgcgctttgtggtcagcgtgagccgcaactatcaaaaccaggggcttccgttggttgaccttataaacgaggggaacttggggctcatacgggcggcaaagcggttcgacgaaaaaaagaacttccggttcatctcttacgccgtgtggtggatacggcaggcaatccttcaggcattggcggagcagtcgcgcatcgtgaagctgccgctcaaccgcgtcagcgcaatccataagatagggatggtgcagagccgtctagagcagaaactcagccgcatcccgaacgtatacgagatcgccgaggagttgcgcatagagccgcacgacgtgcaggaagcggttaagatcggaaacagccacttctcgctcgacgccccgctgcagagcggcgacgactcgaagctcttggacctcctgccggacgagcatgcggagagcccggacaacggcgtgttgaacatatccctgcactccgaggtcgataccgtcctcgagacgctctctgagagggagcgcgaagtcgtgaggctctacttcgggatcggcgaggagaccgcatacacgctagaggagatcggaatccgctttgaactgacccgggagcgggtcaggcagatcagggaaaggcccataaaaagctcaagcacagttcgcggacgcggaaactga

SEQ ID NO: 12182 - protein, 287 aa, Unknown
  Obtained from environmental sample
  DOMAIN (21)...(57): Sigma-70 factor, region 1.2
  misc_feature (1)..(287): Xaa is any amino acid
MTANTKESQTAAPYRMIADDGSSLNLYLKEISRYKTLPIEEEADLARRIRDGDRLALDKLVKSNLRFVVSVSRNYQNQGLPLVDLINEGNLGLIRAAKRFDEKKNFRFISYAVWWIRQAILQALAEQSRIVKLPLNRVSAIHKIGMVQSRLEQKLSRIPNVYEIAEELRIEPHDVQEAVKIGNSHFSLDAPLQSGDDSKLLDLLPDEHAESPDNGVLNISLHSEVDTVLETLSEREREVVRLYFGIGEETAYTLEEIGIRFELTRERVRQIRERPIKSSSTVRGRGN

SEQ ID NO: 12183 - DNA, 777 bp, Unknown
  Obtained from environmental sample
  misc_feature (1)..(777): n is a, c, g, or t
gtgatggaaacaatctttgttgttgacgactgtgatgtggatttggacatggtcaagcaagcgctggacgcgagctatcgggtcttcgcgcttacttcggcggaggcgatgtttgagctggtcgacactgtcacccccgatttggtgctcctggatatccgaatgccggagatggacggtttcgccgccttgagcaggctcgcgtccgacccgcgcacggcgtctgttccggttatcttcatgacctcctacggagacgccgagaccgaggcgcacgcgtttgaggcgggaatcgtggacttcatcaacaagcccttctctcaagcggtgctgctccggcgggtggaggcccacctgcgtatagacgacctgataaagaggcgtaccgcgaggcttttgcgccttaagaacgggatcgtctccgtcctagccgatatcgtcgagtgccgggacgagaccaccggcgggcacattgaccggacctcaaggtgtataagggtactcatagaggcgcttaaggaaaacggcgtctacgcgaatgagatggcggactgggacatagacacgatggtcgcctcggcgcggttgcacgacatagggaagatagccgtctccgacgtgatactgaacaagcccggcaagctcactccggaggagttcgccatagttaagagccacgtaagggagggcgagcggattatagacaagatagtaaccaagaccggcgacgaggagttttgcaatgcgcgcgcctcggccgaatctgtcattgggtaa

SEQ ID NO: 12184 - protein, 258 aa, Unknown
  Obtained from environmental sample
  DOMAIN (168)...(257): HD domain
  misc_feature (1)..(258): Xaa is any amino acid
MMETIFVVDDCDVDLDMVKQALDASYRVFALTSAEAMFELVDTVTPDLVLLDIRMPEMDGFAALSRLASDPRTASVPVIFMTSYGDAETEAHAFEAGIVDFINKPFSQAVLLRRVEAHLRIDDLIKRRTARLLRLKNGIVSVLADIVECRDETTGGHIDRTSRCIRVLIEALKENGVYANEMADWDIDTMVASARLHDIGKIAVSDVILNKPGKLTPEEFAIVKSHVREGERIIDKIVTKTGDEEFCNARASAESVIG

SEQ ID NO: 12185 - DNA, 690 bp, Unknown
  Obtained from environmental sample
  misc_feature (1)..(690): n is a, c, g, or t
ttgcgtatttccagattgtttgagttttttcaagaaactgcgcttacttatttgagggaacaaggttttgactatttgtctatgattaaaaaagataaattcaccttggtaatctctaggataaaactacgtatttcgcatttgccgctttggggggaagaaatttctgttagcacttggctaaagggttttaaccccgaaaaagttgcttggggcgattacgatgttcgcgattctcagggaaattccattatgcaggcaacttcttcttggcttttgatagatttgaaagacggaaaggcaaagccttttgctgaaggtccttatcgctttaatgtttcgccggaactcagtgccttgccagaaaccatagagttgctggagccaaaaggaatgcccaaaaccgcattggtaaaagcggttagatatagcgatatagatttgaactatcatgtgaataattgcagatattcggactgggttttagatgccgtgagcatggatgaattgaaggagcgtagaattcgttccattcagttgaattatatgcagcaagttccctataatgcaaatgtttctttaatgcgttttcccaatactcgctatcacgttgtgatttttggggttaatgaggaacatccagagcaggtgcattttcaggcaagggtgggttttgacaagnccgtttga

SEQ ID NO: 12186 - protein, 229 aa, Unknown
  Obtained from environmental sample
  DOMAIN (1)...(227): Acyl-ACP thioesterase
  misc_feature (1)..(229): Xaa is any amino acid
MRISRLFEFFQETALTYLREQGFDYLSMIKKDKFTLVISRIKLRISHLPLWGEEISVSTWLKGFNPEKVAWGDYDVRDSQGNSIMQATSSWLLIDLKDGKAKPFAEGPYRFNVSPELSALPETIELLEPKGMPKTALVKAVRYSDIDLNYHVNNCRYSDWVLDAVSMDELKERRIRSIQLNYMQQVPYNANVSLMRFPNTRYHVVIFGVNEEHPEQVHFQARVGFDKXV

SEQ ID NO: 12187 - DNA, 555 bp, Unknown
  Obtained from environmental sample
  misc_feature (1)..(555): n is a, c, g, or t
atgtttagcgtatcggggcaaagcgccaaccgcattatccgcgcctgccatatcgcgcagtggaggcgggattcccgtttctgcggaacttgcggctcaaaaaacgacgacgttcccatgcaggcgcagagaatatgtcctaagtgcggacgcatggagttcccaagaatctgccccgccgttatcactcttattaccgatgatgaaaacagaatcctgcttgcgcataacaaaagattcaaaaccggggtttacagccatatttccggttttaatgaagcgggagaaacactggaagaaaccgtagtacgggaaatccgtgaagaagtaagcatcgaagtaaaagacattgtatatattaaatcccaaccctggcctttcccaagttcgttgatgctgggttttaaagcgcgttattcatcaggaacgattaagcccgatggagaagaaatagaagacgcaaaatggttcaccaaggacaacctgcctgttttaccaagcgagggttccttgtcacgttatctcatcaatagttggattgatgaaacgttttaa

SEQ ID NO: 12188 - protein, 184 aa, Unknown
  Obtained from environmental sample
  DOMAIN (57)...(178): NUDIX domain
  misc_feature (1)..(184): Xaa is any amino acid
MFSVSGQSANRIIRACHIAQWRRDSRFCGTCGSKNDDVPMQAQRICPKCGRMEFPRICPAVITLITDDENRILLAHNKRFKTGVYSHISGFNEAGETLEETVVREIREEVSIEVKDIVYIKSQPWPFPSSLMLGFKARYSSGTIKPDGEEIEDAKWFTKDNLPVLPSEGSLSRYLINSWIDETF

SEQ ID NO: 12189 - DNA, 558 bp, Unknown
  Obtained from environmental sample
  misc_feature (1)..(558): n is a, c, g, or t
atgacggatcaggaattgaaggatttggtggcgagccttgccgaggatcgcaagaaatctcgcgaggaattcgagaaatctcgcgaggaattcgagaaatctcgcgaggaattcgaccggcggatggaggaatctagcaagaaattcgaccgggagatggaagagttcaaacaacggcaggaagagatcagccgacagatcggcggtatcggcagtaacaacgggcactactccgaaacgttctttcaggacgtgtttgcgagaaaaaaggaatttggcgggataaagtacgatgacatggtcgccaatttcggaatcaaagatcgaactcgaaaaatggagatcgacatcgcgctgattaacggagactccgtggcgctgatagaggctaaatacagaatacacccggacttcataaatgagttcgcggaaaagcgcgttgagaaattcagaacgtactttcccgaatacaaagattacaaaatataccttggcgtcgctggcttctcttttgacgaagaagcggcgaaaagagccaaagaatacggcgtaggatag

SEQ ID NO: 12190 - protein, 185 aa, Unknown
  Obtained from environmental sample
  misc_feature (1)..(185): Xaa is any amino acid
MTDQELKDLVASLAEDRKKSREEFEKSREEFEKSREEFDRRMEESSKKFDREMEEFKQRQEEISRQIGGIGSNNGHYSETFFQDVFARKKEFGGIKYDDMVANFGIKDRTRKMEIDIALINGDSVALIEAKYRIHPDFINEFAEKRVEKFRTYFPEYKDYKIYLGVAGFSFDEEAAKRAKEYGVG

SEQ ID NO: 12191 - DNA, 336 bp, Unknown
  Obtained from environmental sample
  misc_feature (1)..(336): n is a, c, g, or t
ttgttaaaaaaggcagnagcatggggtgattatttgatagttgcgctgtctacgatgaaatttagtttaaatgaaaaccagaaaaaaacatattttnattatcaaattcgtaaagaatttctggaatctatacgttatgttgatttagtgataccggaaaattcatgggaacaaaaagaaaatgatattaaaaaatacgatattaattgttttgtaatcggaaatgactggaaagggaaattcgattttttaaaaacattatgtgaagttatttattttgagcgtactcccaatatttcaacgaccctaataaaggaaaatatcaataaagaataa

SEQ ID NO: 12192 - protein, 111 aa, Unknown
  Obtained from environmental sample
  DOMAIN (1)...(107): Cytidylyltransferase
  misc_feature (1)..(111): Xaa is any amino acid
MLKKAXAWGDYLIVALSTMKFSLNENQKKTYFXYQIRKEFLESIRYVDLVIPENSWEQKENDIKKYDINCFVIGNDWKGKFDFLKTLCEVIYFERTPNISTTLIKENINKE

SEQ ID NO: 12193 - DNA, 849 bp, Unknown
  Obtained from environmental sample
  misc_feature (1)..(849): n is a, c, g, or t
gtgtcgcaaggggctaaagagcttgtcgccctacttgcggagtttgataaggtaagcgaagcgtttggagagcctgatgcggattacgacaaacttggagcaaaacaggcggaattacaggaaaaaatcgaagccgccgacggttggaatttggacagccgtctggaacttgcgatggaagctcttcgctgtccgcccggcgacgaggttgtcgatcacctctcaggtggagagaggcggcgggtcgctctttgccgtttactcctgcaaaaacccgacatcctgttactcgacgagccaaccaaccatttggacgctgaaactgtggcatggctggaacgccatctgcgggattatgccggaaccgtaatcgccgtaacacacgatcgatattttttggacaatgtagcgggctggatactggagcttgaccgaggagagggaatcccttggaaaggcaattattcaggctggctggaacaaaaagagaaacgcatggagcaggaggaaaagggcgaaagcgacaggcgcaaaactttacagcgcgaacttgaatggatacgcatgagtccaaaaggacggcacgcaaaaagcaaggcgcgtatcacacagtacgaaaaactttttcaagacgatgagagggaacgctcacggggagccgtatcaaacaataaaatcacgattccggcaggacctcatcttggtaaacttgtaatcgaagcggaaggactatccaaatctttcggagacaaacttttattcgacaatatgagttttactgtgccgccgggagcgtgcgtgggcataatcggaccgaacggcgcgggaaagaccacgctttttaattga

SEQ ID NO: 12194 - protein, 282 aa, Unknown
  Obtained from environmental sample
  DOMAIN (6)...(146): ABC transporter
  misc_feature (1)..(282): Xaa is any amino acid
MSQGAKELVALLAEFDKVSEAFGEPDADYDKLGAKQAELQEKIEAADGWNLDSRLELAMEALRCPPGDEVVDHLSGGERRRVALCRLLLQKPDILLLDEPTNHLDAETVAWLERHLRDYAGTVIAVTHDRYFLDNVAGWILELDRGEGIPWKGNYSGWLEQKEKRMEQEEKGESDRRKTLQRELEWIRMSPKGRHAKSKARITQYEKLFQDDERERSRGAVSNNKITIPAGPHLGKLVIEAEGLSKSFGDKLLFDNMSFTVPPGACVGIIGPNGAGKTTLFN

SEQ ID NO: 12195 - DNA, 480 bp, Unknown
  Obtained from environmental sample
  misc_feature (1)..(480): n is a, c, g, or t
ttgctattcgagggcttggtttttggcgttgggttatttttaatctgctatcgcgggtatgacgtaaaagaccgggtgtcaacaattctcgcgggaagcggtgctattgcgctgacattgtttccgtgcgctttggacggcgcggaaacaagaaattttttaatgctctcccaaagcgtaaccaacacaattcatttggcaagcgcagggttattttttggctccctgatttttttaatagggttccagtttgtcaaaaccggcgaaggaaacacgatatcgcctaaaagccggaagtggcgcaggaatattctttataggacttgcgctgtgataatgctcggcgccctcgcaatcggcttcggcggcaaagccgcctttgcgtggcggtactccgtaattgcgggtgaagggattgggctttgggctttcagcctgtcatggctgaccaaaggcggtcttgtcttgccagacgtgtaa

SEQ ID NO: 12196 - protein, 159 aa, Unknown
  Obtained from environmental sample
  misc_feature (1)..(159): Xaa is any amino acid
MLFEGLVFGVGLFLICYRGYDVKDRVSTILAGSGAIALTLFPCALDGAETRNFLMLSQSVTNTIHLASAGLFFGSLIFLIGFQFVKTGEGNTISPKSRKWRRNILYRTCAVIMLGALAIGFGGKAAFAWRYSVIAGEGIGLWAFSLSWLTKGGLVLPDV

SEQ ID NO: 12197 - DNA, 621 bp, Unknown
  Obtained from environmental sample
  misc_feature (1)..(621): n is a, c, g, or t
atgccgctttcgttgcggcttctgatcgtccaggttgaaatatcctttcctttaaggaaaatctttcctgccttaaccggcagaagcccggcgattgccgcgacaagctcagactgcccgttgccgtcaattcccgcgacgcccaccacctcgcctgcgcgcacatccagcgagagatccctgaccattggaatccctcgtgagccaagcaccgtaagattcctgatgctcagtaccgtattgccgagtttggccggccccttgtcgatcttgaaattcaccgcgcggcctaccattttttcagccaggtcttcttcattcgcttcgtcgactttaactgtgtcgatgcacttgcccctccgtaaaaccgtgcaacgatccgcagcggctttaatttcctttaatttatgggtgataaagactatcgtttttccttcggctttaaggcggcggaaaatggaaagaagctcgtcaatttcctgcggagtaagaaccgcagtcggctcgtcaaagatcagtatgtccgcgtcccggtacagtattttaagaatctccacccgctgctgcattcccacagatatgttttcaatcttggcttttggatcaacggcaaggccgtaa

SEQ ID NO: 12198 - protein, 206 aa, Unknown
  Obtained from environmental sample
  misc_feature (1)..(206): Xaa is any amino acid
MPLSLRLLIVQVEISFPLRKIFPALTGRSPAIAATSSDCPLPSIPATPTTSPARTSSERSLTIGIPREPSTVRFLMLSTVLPSLAGPLSILKFTARPTIFSARSSSFASSTLTVSMHLPLRKTVQRSAAALISFNLWVIKTIVFPSALRRRKMERSSSISCGVRTAVGSSKISMSASRYSILRISTRCCIPTDMFSILAFGSTARP

SEQ ID NO: 12199 - DNA, 714 bp, Unknown
  Obtained from environmental sample
  misc_feature (1)..(714): n is a, c, g, or t
gtgttaaacgccgtatctttattttggtttgattatacaaaaaacatatttcccaatcatattatttccggcgacttaaaagatatgcccgaattttttcagaaggatgaattcgaggggcgcacggttttagttaaaaaacttaaaatactgccgtttgaatttatcattcggggatatgtgtttggcaatatgtgggaagcgtactccaaaggaaaagaattctgcggtcaaaagattgaaggcaattacaagttggctgaaaaacttgccactcccctctttaccccctcgacaaaagcgcgtgaaggacacgatgaatatatttctgttcagtatcttgctgataatatcggcgctgatttggcgaagaaaatagaaaaactgtgctttgatatttacacaacctgttacgattacgcgtacaaaaaaaacatcattatagccgacacaaaatttgaattcggtcttgacgagaacaacaacctctttatcgccgatgaagtgcttactcccgattcaagcagattctggagtcttgccgattaccaaattgggacttctccgaaaagttacgataaacaatttgtgcgggactggcttcagaacaacaaaaaagacggagaaatgcaatttgacaatgtgccggacgatgtgttaagcaaaacatcggaaatttacgccgaatgtttgcggaggctggttaatgcctga

SEQ ID NO: 12200 - protein, 237 aa, Unknown
  Obtained from environmental sample
  DOMAIN (1)...(219): SAICAR synthetase
  misc_feature (1)..(237): Xaa is any amino acid
MLNAVSLFWFDYTKNIFPNHIISGDLKDMPEFFQKDEFEGRTVLVKKLKILPFEFIIRGYVFGNMWEAYSKGKEFCGQKIEGNYKLAEKLATPLFTPSTKAREGHDEYISVQYLADNIGADLAKKIEKLCFDIYTTCYDYAYKKNIIIADTKFEFGLDENNNLFIADEVLTPDSSRFWSLADYQIGTSPKSYDKQFVRDWLQNNKKDGEMQFDNVPDDVLSKTSEIYAECLRRLVNA

SEQ ID NO: 12201 - DNA, 798 bp, Unknown
  Obtained from environmental sample
  misc_feature (1)..(798): n is a, c, g, or t
atgaaaaaggttattttacacgcaggtgaacttgacaattatttaactgacgaagataaggcaagtcttaaaagtatggacgctctttttaacgagactcttgaaattttccctaaaatgcaggaaaagaacgaagaggcgaaaaacacacttatttccctttacaataaaatggggattttaatgcaggaaatatgccaaaaaaacccaaggcttcacgtttattcatttatttcccctcaggaggaccattcagaaggttccagactgatcgccaaattacgggatattaataccgctaacaacgaatttgtctactatatccaacgcgcttatgagatgctttttaagacggcgtggctaagtccaggttctcagaaaaattatctgattgttaaaactcccgtaacaaatccagtgcaaaattacgcggttcataaaatagccaatattgacaataaaatcggcaataccgtaatgtgcgtattgcttcgaggcgcgcttttaccatcaatgattatgagcaaggaaattgaagaatattcttcaaccggttatataacgcctttcgcgctttttaaaatttaccgtgatgacagcaagagtgaaaacgacatggaatatatccttgaccttgagaaatctttttttaatcctgaatcccttgacggcaaggatttgatatttgcggatcctatgaacgccaccggcggaagccttgttaccgtaataaaatatttaaaggacatcggggtaaaaccgcgttcaattaccctctttaacgttatagccgcgtaa

SEQ ID NO: 12202 - protein, 265 aa, Unknown
  Obtained from environmental sample
  misc_feature (1)..(265): Xaa is any amino acid
MKKVILHAGELDNYLTDEDKASLKSMDALFNETLEIFPKMQEKNEEAKNTLISLYNKMGILMQEICQKNPRLHVYSFISPQEDHSEGSRLIAKLRDINTANNEFVYYIQRAYEMLFKTAWLSPGSQKNYLIVKTPVTNPVQNYAVHKIANIDNKIGNTVMCVLLRGALLPSMIMSKEIEEYSSTGYITPFALFKIYRDDSKSENDMEYILDLEKSFFNPESLDGKDLIFADPMNATGGSLVTVIKYLKDIGVKPRSITLFNVIAA

SEQ ID NO: 12203 - DNA, 756 bp, Unknown
  Obtained from environmental sample
  misc_feature (1)..(756): n is a, c, g, or t
ttggacagggctatagctgacttcacccaagccgttgccttaaaccctaagtacgcgggaacttataacaaccgcggagccgtgtattacaataaaggcgaattggaaagggccatagccgactttacccaggccattgccttaaaccctaagttcgagcaggcctataccaatcgcggaaccgtgtatgccgataaagacgaaccggacaaggccatagccgactatacccaggtcattgccttaaatccaaagaatgactatgcctattacaatcgtggaatcgcatatacccaaaaaggcgaaccggacagggcaatcgctgactacactcaggccgtccttgtcgcgaatggtaatgccaacatcctcaatatctttcaccgatcctgggaattcgcggggtatttctacaaaaactatcctttcctcggcgctgccctggacgcaaacacctttgaccggaagcgggccggtgtcgcccgcgaggccttggccttaagcatcgcgaaagcggaaagagcccgcgccggcttgggcagccggggcgcggctctcatggcaggcctggtctatcaatactacgcctccctggactttgaatcccgcttcggttccgccgaacgcgccttcgccgtttccgagggccttcgcagcaggggcttcctggagcagatgggcacggaggccgccctgcgactgcctggcattgcgccggcagacgcccagcgcgtgcgggagcttaccgaaacatag

SEQ ID NO: 12204 - protein, 251 aa, Unknown
  Obtained from environmental sample
  DOMAIN (87)...(120): Tetratricopeptide repeat
  misc_feature (1)..(251): Xaa is any amino acid
MDRAIADFTQAVALNPKYAGTYNNRGAVYYNKGELERAIADFTQAIALNPKFEQAYTNRGTVYADKDEPDKAIADYTQVIALNPKNDYAYYNRGIAYTQKGEPDRAIADYTQAVLVANGNANILNIFHRSWEFAGYFYKNYPFLGAALDANTFDRKRAGVAREALALSIAKAERARAGLGSRGAALMAGLVYQYYASLDFESRFGSAERAFAVSEGLRSRGFLEQMGTEAALRLPGIAPADAQRVRELTET

SEQ ID NO: 12205 - DNA, 306 bp, Unknown
  Obtained from environmental sample
  misc_feature (1)..(306): n is a, c, g, or t
atgcgggaaagaataatcattctgggggccggagtcatgcaggggccggcgatcagaatagcgaaagaattggggttgtttaccgtggtggccgacggcaattccctggctccctgcgttacaatggccgacagggtcgaacaaattgacctncaggacaaggaaaacatagagggcctggcccgatcgctgcaaagatcaggcggtctttccggtattatgaacgccgaaaccgatttttcgctacggtcgcctgggcagccgaaaagcttgggctcccgggcatcccctacgaggcggctctga

SEQ ID NO: 12206 - protein, 101 aa, Unknown
  Obtained from environmental sample
  misc_feature (1)..(101): Xaa is any amino acid
MRERIIILGAGVMQGPAIRIAKELGLFTVVADGNSLAPCVTMADRVEQIDLQDKENIEGLARSLQRSGGLSGIMNAETDFSLRSPGQPKSLGSRASPTRRL

SEQ ID NO: 12207 - DNA, 324 bp, Unknown
  Obtained from environmental sample
  misc_feature (1)..(324): n is a, c, g, or t
atgggaacgcggcttgcgattatcacgctgggtccccagggagcgatggcaatgctgcgaagaaataacggaacgacaatcaatatctccgcgccggggattaaaattccatcccttgttgatacagtaggagccggagatacttttcacggggcgtttctttcctggctggaaaaaagaagcaaattatcgcataacgcgatagctgatttagacgaaaacgatttacttaacgcccttgtttttgcgaacaaggcgtccgcttttgtatgcggcaggaacggctgtcagcctccgtacttccatgaaatagaccagaattga

SEQ ID NO: 12208 - protein, 107 aa, Unknown
  Obtained from environmental sample
  misc_feature (1)..(107): Xaa is any amino acid
MGTRLAIITLGPQGAMAMLRRNNGTTINISAPGIKIPSLVDTVGAGDTFHGAFLSWLEKRSKLSHNAIADLDENDLLNALVFANKASAFVCGRNGCQPPYFHEIDQN

SEQ ID NO: 12209 - DNA, 438 bp, Unknown
  Obtained from environmental sample
  misc_feature (1)..(438): n is a, c, g, or t
ttgcaccagaagggcggaagctccaacgtgatagaagtccacggttctcccaaagttcattactgctttcgctgccccgggattcgtatggggtttgaagaagccgcagccattgtgcgctcaggcggtatgcctcaatgtccgaagtgcggcaaagtgttaaaaccggctattactttttacggcgaaagcctgccgatagaggcgttgaaagaagcgacagtacaagcccataaagccgaccttatgcttgtgcttggaacaaccttggtcgtttacccggcggccgccatgcccgaatatacattgcgctccggcggccgcatagttattgtaaacaacatgtcaacccatctggacaggcaggcgtcaatgcactttgacgaactgggcccggtgtttgaggaactgcataaattaatgggcaatgaacaatga

SEQ ID NO: 12210 - protein, 145 aa, Unknown
  Obtained from environmental sample
  DOMAIN (1)...(94): Sir2 family
  misc_feature (1)..(145): Xaa is any amino acid
MHQKGGSSNVIEVHGSPKVHYCFRCPGIRMGFEEAAAIVRSGGMPQCPKCGKVLKPAITFYGESLPIEALKEATVQAHKADLMLVLGTTLVVYPAAAMPEYTLRSGGRIVIVNNMSTHLDRQASMHFDELGPVFEELHKLMGNEQ

SEQ ID NO: 12211 - DNA, 696 bp, Unknown
  Obtained from environmental sample
  misc_feature (1)..(696): n is a, c, g, or t
atggatcagatcggccgagtcgaggagtgcctgccgctcgtcaagtacatcgccctgcggatagccaaccgcgtgccgaagagcgtggaactggacgacctgataggtgatgggataatgggtctgctgtctgcggctaggcacttcgaccccacgaggggcgcgaagttcaagaccttcgcggagccaaggatacggggggcaatcttggacagcctccgcaacctggactgggtgccgcgctcgctgaggcagaagcagaaggacatcgaggacgcttaccatgtgctgtccatgcgccatggaagggccgcggaggacgaggaggtggcgctgcacttgggcgtgccgctcgaggacttgcacaagtcgctggacgacctgaagggggtctcgctcggctccatcgaggacagcactggggaaggcgaggggctgttggcattcattgccgaccccgacgcggaggacccgcaccaggccctgcacgggaaggagatgaaggacttgctggccaaaatggtggacgagctgcccgaaaaagagaagcaggtcatggactattactacaaagacgagatgaacatgaaggagataggattgaccatgaaaatcacggagagccgggtctcacagttgcacaccaaagccatactgaggctgagggcgaaacttaggcgggctagggccgcgtag

SEQ ID NO: 12212 - protein, 231 aa, Unknown
  Obtained from environmental sample
  DOMAIN (168)...(221): Sigma-70, region 4
  misc_feature (1)..(231): Xaa is any amino acid
MDQIGRVEECLPLVKYIALRIANRVPKSVELDDLIGDGIMGLLSAARHFDPTRGAKFKTFAEPRIRGAILDSLRNLDWVPRSLRQKQKDIEDAYHVLSMRHGRAAEDEEVALHLGVPLEDLHKSLDDLKGVSLGSIEDSTGEGEGLLAFIADPDAEDPHQALHGKEMKDLLAKMVDELPEKEKQVMDYYYKDEMNMKEIGLTMKITESRVSQLHTKAILRLRAKLRRARAA

SEQ ID NO: 12213 - DNA, 972 bp, Unknown
  Obtained from environmental sample
  misc_feature (1)..(972): n is a, c, g, or t
ttgatcaaagctgaaggaaacannggaccggaaaaagaaaaaataaccccaaaaattgcagttacggcaaaacttctgtttttggtttacagcgtcttaacatttttactttttgttctttatcttatcggaggaatgaactggtttgaagccgtctgccaaagtttgacagcccttgcaacaggcggaataaatgtcagaaacaagggaatcgaagcgtggaattcgccgtttatcgacggcgttactacggtattcctgctccttgccgggattaacttcaacctttactgccgcgttttacagagaaaatttacggaaataaaaaataatatcgagcttaaagcctaccttggcattttcgccgctgccgcgataattattactgtttcgcttgttccttattacggttctgtttcaagcgcgttccgtcacgcgtcatttcaaagcgcgtctgttctttccaccgccggtaatacaaccgtaaactatgagcaatggccttcattggcaagaatggttctttttattttgatgtttgtcggcggctgttccggctccacggcggggggcattaaagttatacgccatgtcattctttggaaacagattaagaatgaaacgcagcgtatgctttaccctcagggaattttcaggatacagataaacaaccgcgtagggcgcaacgacatagtatacggggtatcgggttttatcttcatgtatttattcgtaattatgattgtaacgctcattaccgcagcttcgggaatcgaccttttttcttcgttaagcgccgctctttcaattaccgganatataggggtaggcttcggggcaataggccccggacacaattacggtttttttgccgatcatatcaagtggcttttttcatttgtaatgctcgccggacgtcttgagatgtggaccgtgtttatttgtttacacgagtatattggcggaaagtag

SEQ ID NO: 12214 - protein, 323 aa, Unknown
  Obtained from environmental sample
  DOMAIN (5)...(318): Cation transport protein
  misc_feature (1)..(323): Xaa is any amino acid
MIKAEGNXGPEKEKITPKIAVTAKLLFLVYSVLTFLLFVLYLIGGMNWFEAVCQSLTALATGGINVRNKGIEAWNSPFIDGVTTVFLLLAGINFNLYCRVLQRKFTEIKNNIELKAYLGIFAAAAIIITVSLVPYYGSVSSAFRHASFQSASVLSTAGNTTVNYEQWPSLARMVLFILMFVGGCSGSTAGGIKVIRHVILWKQIKNETQRMLYPQGIFRIQINNRVGRNDIVYGVSGFIFMYLFVIMIVTLITAASGIDLFSSLSAALSITGXIGVGFGAIGPGHNYGFFADHIKWLFSFVMLAGRLEMWTVFICLHEYIGGK

SEQ ID NO: 12215 - DNA, 900 bp, Unknown
  Obtained from environmental sample
  misc_feature (1)..(900): n is a, c, g, or t
atgatagcgatgaacaagatagcgataggggaaggcctggaagacatgcaggaatttcggcaggacactacggtaatagagacggatatccattacccgaccaacaacagccttgtatgggactgcataaaagaatgcgaaaggctattaaagcaccttaaggaagagatagaaacccttgagtatgagaaataccagaggaaggcgaagaagatttattttaaaataaacgtggagaaagacgaagaaaaacggacaaaactgttcaaaaagcagcttgaaatgttcacaagctgcataaaacaggcatcaagcgtggtaaaaaaaaagagcgaatacggagcaacggcaaaagcggaaagcatcataaccgcgatggaggggctgataccggtaatggagaaagtattcaggatgaccgaacgcagggagataatgaaagagaaagtgcctgttgaggagaagatattttctatatacgagcggcatacggacataataatgaaagggcagagggaagcgcagtttgggcataaagtaaaccttggcagcgggagaagcaatttaatattaacctgccagatagtggaaggaaatcctaaagacagcgaattgtatgaggggacgataaagaagcttaaaaaggattacggcaaaacgccgcaatcaagcgttgctgacggcgggtatgcgagcaaggcgaacatagaatattcacagaatgcagggataataaatatagtgttcaacaagatacgtgggagcatgcaaaacatagcgaacagcaaatgggtggaaaacaaactaaagcgctggaggagcgggatagaggcaataatatcaaacttgaaacgtggttttcatatacgccgttgcattggaaagtctgccttcgcataa

SEQ ID NO: 12216 - protein, 299 aa, Unknown
  Obtained from environmental sample
  misc_feature (1)..(299): Xaa is any amino acid
MIAMNKIAIGEGLEDMQEFRQDTTVIETDIHYPTNNSLVWDCIKECERLLKHLKEEIETLEYEKYQRKAKKIYFKINVEKDEEKRTKLFKKQLEMFTSCIKQASSVVKKKSEYGATAKAESIITAMEGLIPVMEKVFRMTERREIMKEKVPVEEKIFSIYERHTDIIMKGQREAQFGHKVNLGSGRSNLILTCQIVEGNPKDSELYEGTIKKLKKDYGKTPQSSVADGGYASKANIEYSQNAGIINIVFNKIRGSMQNIANSKWVENKLKRWRSGIEAIISNLKRGFHIRRCIGKSAFA

SEQ ID NO: 12217 - DNA, 876 bp, Unknown
  Obtained from environmental sample
  misc_feature (1)..(876): n is a, c, g, or t
ttgaaaaaccacctgctgccgttcttcggcaatatgcccatgaacaaaatcacaaaaatcgaagtcgaagactttttcgatgcgcttatcgaaaaagaatatcaaaacacatccatcaacggcttttacggcacgctgaaaaccatgctcattgaagcggtagagcgaaacataattccaaaagacccgacagacaaaatggggcgtttggtaaacgacaggcgggccattaagattataacgccggaagaattcaagaaactgtttgtaggcgattggcggcgggtgtgggaaaatgacaggctttcgtacacggctaacaagctggcggctttgacaggcatgagggcatccgaggtggtagggctgaaaggaagttttgtatatgacgagcatatttatttgtgcatgcagtatgacgattacggataccgccctacaaaaacaaaagacaagcacaatatacccctgacttccgacatgataaacgagctaaaagaactcaagcgcatgaatggggacggctttgtgttttcgcttgacggcggcgctacgccaatttgccggaacaccgtgtataagcatttccatcgggcattgcggaatatagggattacggaggacgagatttccgagcgccatctgcatttgcacgcatggaggcatttctttaataccgaaatgctaaaaggcggccttaccgttacgcaagcccaggccgtaaccgggcataagagcgagcggatgacggaatggtattgccattttgacccgaccaatttgcaaggcaaaggaagtgcaggaagccttgctgcgccctgcccagaanaaaagcgccaaagaanggaaggcaggggcaaaaactgcccggcataa

SEQ ID NO: 12218 - protein, 291 aa, Unknown
  Obtained from environmental sample
  DOMAIN (90)...(263): Phage integrase family
  misc_feature (1)..(291): Xaa is any amino acid
MKNHLLPFFGNMPMNKITKIEVEDFFDALIEKEYQNTSINGFYGTLKTMLIEAVERNIIPKDPTDKMGRLVNDRRAIKIITPEEFKKLFVGDWRRVWENDRLSYTANKLAALTGMRASEVVGLKGSFVYDEHIYLCMQYDDYGYRPTKTKDKHNIPLTSDMINELKELKRMNGDGFVFSLDGGATPICRNTVYKHFHRALRNIGITEDEISERHLHLHAWRHFFNTEMLKGGLTVTQAQAVTGHKSERMTEWYCHFDPTNLQGKGSAGSLAAPCPEXKRQRXEGRGKNCPA

SEQ ID NO: 12219 - DNA, 495 bp, Unknown
  Obtained from environmental sample
  misc_feature (1)..(495): n is a, c, g, or t
gtgctgaaccgggccgccgaacggcttggccttgatcgacttggagagaaacaaaaaaaccgtatcgccctgtttcaaagctcgcttttttgcagggataaacgtttcaagaattacgatgccgccgctatagtagaagtaattgaacacctggatgaaaaccgcctatcttcttttgcctcggttgttttcggcgatacggcattttccattgttattatcaccacgccaaatgccgactacaacgtaaactacccgtggctcacagccggtaattttcgccacggcgaccaccgctttgaatggaaccggtcccagttccgcgcctgggcagatgccgtcgccgcccgctacggttacactgtccgttatgaggacataggcgaacaggacgaagagcatagaacgccgagtcaaatggcagtgttcagaaaaaacgcgtcccaaaaggcaaatccgtccgagcgggatgcagcgaccggggccgcccaatga

SEQ ID NO: 12220 - protein, 164 aa, Unknown
  Obtained from environmental sample
  misc_feature (1)..(164): Xaa is any amino acid
MLNRAAERLGLDRLGEKQKNRIALFQSSLFCRDKRFKNYDAAAIVEVIEHLDENRLSSFASVVFGDTAFSIVIITTPNADYNVNYPWLTAGNFRHGDHRFEWNRSQFRAWADAVAARYGYTVRYEDIGEQDEEHRTPSQMAVFRKNASQKANPSERDAATGAAQ

SEQ ID NO: 12221 - DNA, 357 bp, Unknown
  Obtained from environmental sample
  misc_feature (1)..(357): n is a, c, g, or t
atgaaaatagaaattccggatctgtgcctggtagccctggtaggcgcgtcgggcagcggcaaatccactttcgcgaaaaaacatttcaaggctaccgaagtcctaagctcggactactttcggggccttgtctccgacgatgaaagcgatcagagcgccaccgaagcggctttcgatagcctttactacctcgccgtcaaacggctggaacggggcaggctcacggtaattgacgccaccagtgtccagccctttgcccgaaagaaaattatcgaattggcccgctctcaggatgtgcttgcggttgccatcgtatttgatatgccggaagagttatgtcttgagcgtaaccgctga

SEQ ID NO: 12222 - protein, 118 aa, Unknown
  Obtained from environmental sample
  misc_feature (1)..(118): Xaa is any amino acid
MKIEIPDLCLVALVGASGSGKSTFAKKHFKATEVLSSDYFRGLVSDDESDQSATEAAFDSLYYLAVKRLERGRLTVIDATSVQPFARKKIIELARSQDVLAVAIVFDMPEELCLERNR

SEQ ID NO: 12223 - DNA, 354 bp, Unknown
  Obtained from environmental sample
  misc_feature (1)..(354): n is a, c, g, or t
ttggattgtaccagacttgccaacataaccatacccaacagtgttaccagcattggagatggcgcttttgcacgttgttctagccttaccagcgtaaccataccaaacagcgttgaagatattggtagtcaggcttttgtcggttgtaccagccttaccagcgtaacgtttcaaggagtgattgtttcggatagttttggatctttcgattattggagcgggtcatggtcttcaccattccacggcgacttgcgcgataagtaccttgccgggaaaataggaacgtataaaacaaacacgccagtgccagaatggtggggggattggaatccggtgtggatgaaacaggagtaa

SEQ ID NO: 12224 - protein, 117 aa, Unknown
  Obtained from environmental sample
  misc_feature (1)..(117): Xaa is any amino acid
MDCTRLANITIPNSVTSIGDGAFARCSSLTSVTIPNSVEDIGSQAFVGCTSLTSVTFQGVIVSDSFGSFDYWSGSWSSPFHGDLRDKYLAGKIGTYKTNTPVPEWWGDWNPVWMKQE

SEQ ID NO: 12225 - DNA, 519 bp, Unknown
  Obtained from environmental sample
  misc_feature (1)..(519): n is a, c, g, or t
ttggcggcgatatttgacataaacggtctttttaacgatttcctcaaggccatagggatcaacaaccccataagctggatcgggagatccagtacagccttgggggttattatggttctcgcggtttggcagtttggttcttccatgctcatttttctggcgggcctaaggcagattccaaaaacttattacgaggctgcgtccattgacggggcaggctggttcagccaattcttccgcatcactctgcctcagatgacgccgataatcttttttaatcttataatgcaattaatcaacgggttcaccgtttttagccaggcttttattatttcaggaggaaagggagagccccaggacagtaccctggtttatgcgttatacctgtacctccagtctttttcgtactaccgaatgggttatggttccgcgctggcgtgggtgcttgtgcttatcatagcggttttgaccgccctcatcttcaagacccaggaccgctgggtttattatgaatcatag

SEQ ID NO: 12226 - protein, 172 aa, Unknown
  Obtained from environmental sample
  misc_feature (1)..(172): Xaa is any amino acid
MAAIFDINGLFNDFLKAIGINNPISWIGRSSTALGVIMVLAVWQFGSSMLIFLAGLRQIPKTYYEAASIDGAGWFSQFFRITLPQMTPIIFFNLIMQLINGFTVFSQAFIISGGKGEPQDSTLVYALYLYLQSFSYYRMGYGSALAWVLVLIIAVLTALIFKTQDRWVYYES

SEQ ID NO: 12227 - DNA, 432 bp, Unknown
  Obtained from environmental sample
  misc_feature (1)..(432): n is a, c, g, or t
atgaccaggatacaggcacgccgtttaaagaatgtcagggatactgtaatttttcatgcagttgtagtcgcgttaggcttttttatgctctatcccctgttctggatggtctttggctcctttaagcctacggcggagatcttcggtacaatttccctgataccaaaaaattttactctggataatttcgccagaggctggcgctataacggttcaaccagtttttccactttctataaaaattcttttatcgttaccggattctctaccgtaggcgctgtgcttatgtcttccctggtggcctatggtttttcccgatacacttccgggggaataaattttggtatagctgtatgttcgttaccctcatgttgccataccaggtggtcatggttccccagttcatcctctttcgcaaactgggtgggttaa

SEQ ID NO: 12228 - protein, 143 aa, Unknown
  Obtained from environmental sample
  misc_feature (1)..(143): Xaa is any amino acid
MTRIQARRLKNVRDTVIFHAVVVALGFFMLYPLFWMVFGSFKPTAEIFGTISLIPKNFTLDNFARGWRYNGSTSFSTFYKNSFIVTGFSTVGAVLMSSLVAYGFSRYTSGGINFGIAVCSLPSCCHTRWSWFPSSSSFANWVG

SEQ ID NO: 12229 - DNA, 687 bp, Unknown
  Obtained from environmental sample
  misc_feature (1)..(687): n is a, c, g, or t
atggaagaacaggaagtaggcggaaagcaaatacttgagtcgataggccgcctgagggacataaccgcctcggttaaaaagggctccaatgaaatggctgaatcgggccagactctggttaaggaaacagaccagtttatcaagataagccaggaagctgtaggaggcatgaacgagatactgaaaggcataaaccagataaaagtttcggtaaaccaggtaaacgatatgagcatagaaaacaaccggaactttgagtcattaaaacaggaaacggaaaaattcaagaatactgccggaaacgagaagcaaaaaatccttgtagtggacgacgacgatatccttctttcaatggctgaaacggtcttaaaagatgattacgatgtagttaccgcgcaatcgggcaaggaggcgttgggcttatttttccagggcctggttccccaattaattttattggacttaataatgcctgaaatggacgggtggaatacgtacagcagaataaaagcgattggaggtttgcacgataccccgatagcgattctcacggcttcaagcgatccgaaagacctgcagcacgcgcgtgaattgggcgcggttgattatatcaaaaagccttttagtaaagacgatttgcaaaacaggattgaaaagatcttcgacaaacggacaggaagggcataa

SEQ ID NO: 12230 - protein, 228 aa, Unknown
  Obtained from environmental sample
  DOMAIN (104)...(218): Response regulator receiver domain
  misc_feature (1)..(228): Xaa is any amino acid
MEEQEVGGKQILESIGRLRDITASVKKGSNEMAESGQTLVKETDQFIKISQEAVGGMNEILKGINQIKVSVNQVNDMSIENNRNFESLKQETEKFKNTAGNEKQKILVVDDDDILLSMAETVLKDDYDVVTAQSGKEALGLFFQGLVPQLILLDLIMPEMDGWNTYSRIKAIGGLHDTPIAILTASSDPKDLQHARELGAVDYIKKPFSKDDLQNRIEKIFDKRTGRA

SEQ ID NO: 12231 - DNA, 633 bp, Unknown
  Obtained from environmental sample
  misc_feature (1)..(633): n is a, c, g, or t
ttgacgctaacagagataaaggcgacatcggaaagcgaaaccgtgaaccttagcctccaagccgggagggtgcgggtggacgtgaacccgccagcagggtcaaaagcttcccttggaatagcaagcccaaccgctaccgcatcggtgcgcggcacgagctttgagtttgatacccggaacctctatgtaattagcgggaacgttgtattcgagggggtaaggggagagtctacggttataacggctgggtacaacaccacaacggatcagaaagggagcgcggtaaacccgcttgcctttggctccgccgcctacaagccgcagatgccgatagggacacaggcaaacgcatctcccgccccggctactacaatgaacagcaaagaaccaacgcctaccgagccgacaaacccgactaatcctactactccaacaaccccgaccaaaccaggcaacggcggtggcagtggtggttccggcggtagtggcggctctggaggcggaggctctggtggaggcggaggctctggtggaggctcaggcggcagtggtggttccggtggcagtggcggctctggcggtagtggcggcggcggtggcaacaccgaagttgatatggggctttcgtattag

SEQ ID NO: 12232 - protein, 210 aa, Unknown
  Obtained from environmental sample
  misc_feature (1)..(210): Xaa is any amino acid
MTLTEIKATSESETVNLSLQAGRVRVDVNPPAGSKASLGIASPTATASVRGTSFEFDTRNLYVISGNVVFEGVRGESTVITAGYNTTTDQKGSAVNPLAFGSAAYKPQMPIGTQANASPAPATTMNSKEPTPTEPTNPTNPTTPTTPTKPGNGGGSGGSGGSGGSGGGGSGGGGGSGGGSGGSGGSGGSGGSGGSGGGGGNTEVDMGLSY

SEQ ID NO: 12233 - DNA, 726 bp, Unknown
  Obtained from environmental sample
  misc_feature (1)..(726): n is a, c, g, or t
atgcccctgcctttagacgcctcatcgcgcgcaataatatttctctcattgtccggaataatcggctttgttattaccgatatgtttcttttttcggcttacggcgctatcggccccagaatcaccatgctctttatggcgctttcccctccggtaacggcgggaatctctttcttttttttcggcgagcggcttggcactatgggcgccctcggtatgggccttgtcataatcgggatctgcatgacggtattcggcaaacaaaacagcgtttcaatttcaaaaatagacaaagttgacaagcgcggctacatattcgcttttatagcttccattggccaatcaataggcatgatcctgacgaaagccggccttggcgattacgatccggtttcgggaacgcagattcgggtaatcgcagccatcacgggcttcgcgctcctggcgttggttcacgacaggggaaaggggctaataaaagcgacaaagaatttcgatgggttaaaatttaccgcggcgggttctgtcttcggcccttatatcggcgttgtgctatcgcttttcgcgattcagcgtattagtgcgggcatagtaagcacccttatcggccttaccccagtgataattattctgccagaaattctgattttcaggaaaaagataaaacttttggagattgctggagcagtggtcgctgttattggaacggcaattttctttatgtaa

SEQ ID NO: 12234 - protein, 241 aa, Unknown
  Obtained from environmental sample
  DOMAIN (112)...(241): Integral membrane protein DUF6
  misc_feature (1)..(241): Xaa is any amino acid
MPLPLDASSRAIIFLSLSGIIGFVITDMFLFSAYGAIGPRITMLFMALSPPVTAGISFFFFGERLGTMGALGMGLVIIGICMTVFGKQNSVSISKIDKVDKRGYIFAFIASIGQSIGMILTKAGLGDYDPVSGTQIRVIAAITGFALLALVHDRGKGLIKATKNFDGLKFTAAGSVFGPYIGVVLSLFAIQRISAGIVSTLIGLTPVIIILPEILIFRKKIKLLEIAGAVVAVIGTAIFFM

SEQ ID NO: 12235 - DNA, 420 bp, Unknown
  Obtained from environmental sample
  misc_feature (1)..(420): n is a, c, g, or t
atggtggctatgctcctgtgcctagtggtggcgacgacgataatgggcgtgccatttcgcggctctatcatcgtcctgtgcctaatatctacccttttcatgggctgttcgcttgggttggggctgtttttgtcaaccgtcatgcgaaaccaatcngacgcagcgactgctacgcttttggcagcgttcctgccctccatgctgctgggtggagtggtgtttgaaatagtctccatgccactgccgataaggataatcacccaattcatccctgcccgctattacgcaaactctctccaaacgatattccaagctggctcggtgccatcgctgctgtggaaaaattccatattcttatttgcgctgatgctgctgtggctggcactgacggccaaaaagacaaagcggacgctggagtag

SEQ ID NO: 12236 - protein, 139 aa, Unknown
  Obtained from environmental sample
  misc_feature (1)..(139): Xaa is any amino acid
MVAMLLCLVVATTIMGVPFRGSIIVLCLISTLFMGCSLGLGLFLSTVMRNQSDAATATLLAAFLPSMLLGGVVFEIVSMPLPIRIITQFIPARYYANSLQTIFQAGSVPSLLWKNSIFLFALMLLWLALTAKKTKRTLE

SEQ ID NO: 12237 - DNA, 939 bp, Unknown
  Obtained from environmental sample
  misc_feature (1)..(939): n is a, c, g, or t
atgcgtggcaggtgcctaaacataacaaacatcgagggcgaccgccgcaacctgctgatgcgggccatgcgcacgccagaagtcattgacggcgtaatacaaggggcaaacgtgcgcctggtgactatggaggcaaacaaacacccagatttaggcacactgggcgcagggccagaggccagattgattgaagtggagccaaggctggaggacgcatttattagcatgctgggcgggtcgactggctccgaatcggccctagccgcatccatttctgacgtgatcctgccaaagggcgttgaccctgcttctgtgattgaagccagaaaactgactaagcgattcggcgatttcaccgccacggactgcgtgaacttcagcgtaaaaaagggggagatatttggcctgcttggcccaaatggcgcaggcaagtcaaccacgttcaagatgaagtgcgggcttttgaagcccaccagcggccaagcgctggtgatgggcattgacctcacaaaaagcccctcaagggccaggcagcgtcttgggtacatggcgcaaaagttttcgctgtactcccatttaacggttgaaaagaatttggcctttttttcgggcatctatggcttaaagggcgcaaagcaaaaaaccaaaattcagcagatggtggatgtcttcgacctaggccagtacttgaagagaccatcaagccaactgccccttggcatcaaacagcgcttggccctagcctgcgccataatgcatgggcctgagctactattcctcgatgaacccacgtctggcgttgatccagtggccaggcgcgaattctggtcgcacatcaacgggcttgcaaacaagggcgtaactgtgatggtgacgactcacttcatgaatgaggccgagtactgcgacaggataggcttggtgtacgcggcaaattga

SEQ ID NO: 12238 - protein, 312 aa, Unknown
  Obtained from environmental sample
  DOMAIN (131)...(312): ABC transporter
  misc_feature (1)..(312): Xaa is any amino acid
MRGRCLNITNIEGDRRNLLMRAMRTPEVIDGVIQGANVRLVTMEANKHPDLGTLGAGPEARLIEVEPRLEDAFISMLGGSTGSESALAASISDVILPKGVDPASVIEARKLTKRFGDFTATDCVNFSVKKGEIFGLLGPNGAGKSTTFKMKCGLLKPTSGQALVMGIDLTKSPSRARQRLGYMAQKFSLYSHLTVEKNLAFFSGIYGLKGAKQKTKIQQMVDVFDLGQYLKRPSSQLPLGIKQRLALACAIMHGPELLFLDEPTSGVDPVARREFWSHINGLANKGVTVMVTTHFMNEAEYCDRIGLVYAAN

SEQ ID NO: 12239 - DNA, 513 bp, Unknown
  Obtained from environmental sample
  misc_feature (1)..(513): n is a, c, g, or t
atgaaaaagctgccgatcgggcgtcagattttcgaggagatacggcgagagggtcttctctacgtcgataagacgcgctatatatatgaccttaccattagcggcgcaaaacagtttttcctttcccgtccccggcgtttcggcaagacgcttatgtgttggacgctcaacgcgctgttcagcgggaagcgtgagttgtttgatgggttggccatatcgaagaccgactgggattgggagagttatccggtgcttcatttggatatgagcagggtgaacacctcttccggtatcgacggcgttatggagtcgctccgcctatgcacaaaaaaactcgctcgcgcgtacgatatagacgtcagcgatattaccctgcccggaatgatgttagaccgtataatcggagacgtctcggaaaaacgcggcaagccggcggccgtcattgtggacgagtacgacaaaccgttcattgatttttatacaaaaccngcatatagcgcaagaagtgcgtga

SEQ ID NO: 12240 - protein, 170 aa, Unknown
  Obtained from environmental sample
  misc_feature (1)..(170): Xaa is any amino acid
MKKLPIGRQIFEEIRREGLLYVDKTRYIYDLTISGAKQFFLSRPRRFGKTLMCWTLNALFSGKRELFDGLAISKTDWDWESYPVLHLDMSRVNTSSGIDGVMESLRLCTKKLARAYDIDVSDITLPGMMLDRIIGDVSEKRGKPAAVIVDEYDKPFIDFYTKPAYSARSA

SEQ ID NO: 12241 - DNA, 867 bp, Unknown
  Obtained from environmental sample
  misc_feature (1)..(867): n is a, c, g, or t
atggattcaattccgatggtagccattacaggcaacgtccncacgggaatattgggcaaggacagttttcaggaagttgacattacaggcatttccatgccgatagtaaaacacaactggattgtaaaaaatgttgacgaccttgcggaagttatccgcgaatcgtttgagcttgcctcatcaggtcgtcccggacccgtactcatcgacatcccaaaagatattaccgcgctgactgccgaatggagtccgtcaaagaaaaagaaaggcgatttaaaagacgaaactctttccgcgcgggcaaagcgtcttgacgagcgcacctcaagagtcagatttaccgacgaagaagtggaaaccgccgccgcgatgattaaagaagcgaagcgtcctctgctctacgcgggcggcggagtcatcagcgcagcggcggaagaagaacttatcgctctcgccgaaaaattaaacgctcctgtggcgttaagcctcatgggaataggatcgataccgaaagatcaccgtctctgcacgggtcttgtcggaatgcacggaacagtggcaagcaacaaggcaactcagaagacagacttgcttatcgcaatcggcgcgcgtttttccgacagagttacaagcaaggcggatatgttcgccaagacagcgaaggttattcactttgatattgacccggcggaaattagcaaaaacattgaaacccacgcgtgggtgataggaaatttaaaagacactcttaaatgtttgttgtcaaaacttcccgcccgtctaaaaccgaatggggcggcgaaattgacaaatggaaaactcatctgccgcaaactacacccacgaggtacgtcgtactcgcgataa

SEQ ID NO: 12242 - protein, 288 aa, Unknown
  Obtained from environmental sample
  DOMAIN (1)...(84): Thiamine pyrophosphate enzyme, N-terminal TPP binding domain
  misc_feature (1)..(288): Xaa is any amino acid
MDSIPMVAITGNVXTGILGKDSFQEVDITGISMPIVKHNWIVKNVDDLAEVIRESFELASSGRPGPVLIDIPKDITALTAEWSPSKKKKGDLKDETLSARAKRLDERTSRVRFTDEEVETAAAMIKEAKRPLLYAGGGVISAAAEEELIALAEKLNAPVALSLMGIGSIPKDHRLCTGLVGMHGTVASNKATQKTDLLIAIGARFSDRVTSKADMFAKTAKVIHFDIDPAEISKNIETHAWVIGNLKDTLKCLLSKLPARLKPNGAAKLTNGKLICRKLHPRGTSYSR

SEQ ID NO: 12243 - DNA, 462 bp, Unknown
  Obtained from environmental sample
  misc_feature (1)..(462): n is a, c, g, or t
ttgacattaatgaaaggaatattttttattaatgtaggaataatttggttattattggcaagcatatcagttagtatttacaatttattgcaaagaaaaataaccaaaaagtattctgcaattcaaactgctataatcagtatatggtttggtacagtaattttattattatttttacccggttcaattgaagaagttaaaaatgcgtcatttatacaaataatatatgtaattattttgggaatattccccagcgctgttgcgtatgtaacatggacatatgcgtttagtaaagcaaaaactacatcttccgtaactaattatatgtttttaacgccgtttttaactgctatattaggcattatattggcaaaagaaatacctgatctatctacaataattggcgggacgataataataattggaatgatcgtatataatttttgcaaaagtgaattatga

SEQ ID NO: 12244 - protein, 153 aa, Unknown
  Obtained from environmental sample
  DOMAIN (22)...(148): Integral membrane protein DUF6
  misc_feature (1)..(153): Xaa is any amino acid
MTLMKGIFFINVGIIWLLLASISVSIYNLLQRKITKKYSAIQTAIISIWFGTVILLLFLPGSIEEVKNASFIQIIYVIILGIFPSAVAYVTWTYAFSKAKTTSSVTNYMFLTPFLTAILGIILAKEIPDLSTIIGGTIIIIGMIVYNFCKSEL

SEQ ID NO: 12245 - DNA, 879 bp, Unknown
  Obtained from environmental sample
  misc_feature (1)..(879): n is a, c, g, or t
atgatattgaataccttaaaangtttatcggtttttgacagcgcatttttggattttcttaaaacttttcgttttaacggctctttatgggcaatggacgaaggaaccgtagtctttccgcaggagccgcttatcagggtggaaggcagccttattgagtgccagataatcgagggcatgctgcttaacaccgtaaattttcaaagtttaatcgcgacaaaaacctgccgtatatggcttgccagcggaaaaggcaaattgatggagttcggtatgcgccgcgcccagggctttaacggcgcgatttcggcgtcaagggcggcgtacataggcggagcgaacggaaccagcaatacgctcgccggtaaaatcttcggcatacccgtaatggggactatggctcactcatgggttatgtcgtataacaacgaagaagaggcttttgacgcttatgccgccatgtatccggacaggtctgtctttctaatcgacacttacgacacattgaggagcggcatacagagcgcgattaaatcgggaaaaaaacttgccgaaaaaggcaagagtttcggggtgcgccttgattcaggggacattcagtatctttctacagaagtaagaaagcgtcttgacgaagcaggactgcaaaaagcgtttattacggtatccaacgatttggacgagaatattatcgaaaatcttgtaaaagacggcgctcccgtagacagttggggtgttggaaccagaatggtaacaggcggaaatgtcgcggcttttaccggcgtttacaagttaaccgccatgttggaaaaagacaaagctgtcccggtaatgaaattctccgacaacccagaagaaaccacaaaccccggcgtttag

SEQ ID NO: 12246 - protein, 292 aa, Unknown
  Obtained from environmental sample
  DOMAIN (85)...(291): Nicotinate phosphoribosyltransferase (NAPRTase) family
  misc_feature (1)..(292): Xaa is any amino acid
MILNTLKXLSVFDSAFLDFLKTFRFNGSLWAMDEGTVVFPQEPLIRVEGSLIECQIIEGMLLNTVNFQSLIATKTCRIWLASGKGKLMEFGMRRAQGFNGAISASRAAYIGGANGTSNTLAGKIFGIPVMGTMAHSWVMSYNNEEEAFDAYAAMYPDRSVFLIDTYDTLRSGIQSAIKSGKKLAEKGKSFGVRLDSGDIQYLSTEVRKRLDEAGLQKAFITVSNDLDENIIENLVKDGAPVDSWGVGTRMVTGGNVAAFTGVYKLTAMLEKDKAVPVMKFSDNPEETTNPGV

SEQ ID NO: 12247 - DNA, 675 bp, Unknown
  Obtained from environmental sample
  misc_feature (1)..(675): n is a, c, g, or t
gtgctgtatgcggcgcgaatcatggcccctgccggcacgccgattcttcccattcatttgggaactctgggttttcttgccggcgtggaatggcacgaatggcttgcggtatatgagcaatgggaaaccaaaacggcgcgaatttcaccccgatgtatgctcagcctttccgtagaccgcggagggatcaacgtttacgataatgcctgcctgaacgatatggtgatttcctcatcgggaaaagcaaaactgatacggctgcgggttaccacggaacctgcccccggcgaatatgccgatctgggctgttaccgttctgacgggctggtcatagctacgccgaccggttcaaccgcatactctatggcggcgggcgggccgatacttgatcctgaaatggaggccgtgattgtcagcccggtctgtccctttaccttaagcaaccgcccgctggtgcttccctcgcggcaaaacctgctggtcacggtggaaaaagaacagcgcagcggcatagtgttaaccgttgacggacaggataccttcgacctggaaccggaagatacgatcaccgtaactcattttccctattatgcccggctgataaccgcggggcgttcctcgtatttctccgctcttaaagacaaattgtcatggggaggactccctcatgcttga

SEQ ID NO: 12248 - protein, 224 aa, Unknown
  Obtained from environmental sample
  DOMAIN (1)...(203): ATP-NAD kinase
  misc_feature (1)..(224): Xaa is any amino acid
MLYAARIMAPAGTPILPIHLGTLGFLAGVEWHEWLAVYEQWETKTARISPRCMLSLSVDRGGINVYDNACLNDMVISSSGKAKLIRLRVTTEPAPGEYADLGCYRSDGLVIATPTGSTAYSMAAGGPILDPEMEAVIVSPVCPFTLSNRPLVLPSRQNLLVTVEKEQRSGIVLTVDGQDTFDLEPEDTITVTHFPYYARLITAGRSSYFSALKDKLSWGGLPHA

SEQ ID NO: 12249 - DNA, 558 bp, Unknown
  Obtained from environmental sample
  misc_feature (1)..(558): n is a, c, g, or t
atgaataatcgtattcttatttcttcgcataatggattaaatttattttattttgagaaacttaaagcaacaagttcgttagatggattttgttgttctgtactagaatataatgaatatttaactaccgatgccgttcgttcaaaaaacgaccatatagctttaacctggttattgcgagacaaagaacaaaaaagaatagtttcatatatgtcattgataacagattcaataaaaatttccatagcagagaaggaatttcattctttaaattatccatttaaaatgatgccttctataaaaattgcaaaactagctgtagatgaaaattttttaggaaaatacaaaggaattggaacatatatgataaaattcgcagtatctagagcttatttttgtgataaattccacgctgcttgccgttttctaactgtagatgcagatattgaacataatgcanaggttttggatttttacaaaaagaacggatttttagtaaatgaagaattatttcacaaaaatcgcanaactgtaagtatgcgaaaggatatttactga

SEQ ID NO: 12250 - protein, 185 aa, Unknown
  Obtained from environmental sample
  misc_feature (1)..(185): Xaa is any amino acid
MNNRILISSHNGLNLFYFEKLKATSSLDGFCCSVLEYNEYLTTDAVRSKNDHIALTWLLRDKEQKRIVSYMSLITDSIKISIAEKEFHSLNYPFKMMPSIKIAKLAVDENFLGKYKGIGTYMIKFAVSRAYFCDKFHAACRFLTVDADIEHNAXVLDFYKKNGFLVNEELFHKNRXTVSMRKDIY

SEQ ID NO: 12251 - DNA, 450 bp, Unknown
  Obtained from environmental sample
  misc_feature (1)..(450): n is a, c, g, or t
atgcaaaagatactcaacttcaacgcttatggttttgattacagaaatattcactggcaaattggcgaccctgttatgcaacttaaaaacaactatgaaaaagatattttcaacggagatttgggacgcataattcgtgttatgccaactgcaaaaaaaatagaagcggattttgaaggcaaaaccataaccatagaaggcgatgaatttgagcatttaaccctagcctatgcctgcaccgttcacaaaagccaaggcagcgaatataaatccgtagcggttgtactggactacacccactccattatgctgcaaagaaatttactatacacagctgtgaccagagcaaaggaaaatatttggattttggcaagccaaggttctttggaaactgcggttcgcaacaacagagagcggcacaggtggactgcacttgcggagtttatataa

SEQ ID NO: 12252 - protein, 149 aa, Unknown
  Obtained from environmental sample
  misc_feature (1)..(149): Xaa is any amino acid
MQKILNFNAYGFDYRNIHWQIGDPVMQLKNNYEKDIFNGDLGRIIRVMPTAKKIEADFEGKTITIEGDEFEHLTLAYACTVHKSQGSEYKSVAVVLDYTHSIMLQRNLLYTAVTRAKENIWILASQGSLETAVRNNRERHRWTALAEFI

SEQ ID NO: 12253 - DNA, 366 bp, Unknown
  Obtained from environmental sample
  misc_feature (1)..(366): n is a, c, g, or t
atgtatagcatagattatatacggggtgcggtagcctacaaagatgaagggcataccttcagggaattgaaagatgcgtttagtatcccggcagaaacgtattatcaatggaaagaaaagctcgaaaacggatacgatgggaaaaagatctttcgagaaaggtcgcgaaagatagacaaagagaaacttaaaaaagccgtagaggaaaaaccggatatgtatctttatgaactggcacagttgtttgattgtactccccaagccgttttcctcatgcttgaaaaactcaatataacgcgaaaaaaaagtccttcacttattatgaaaggtccgaagaaaaacgtgcagaatttattgcacggctaa

SEQ ID NO: 12254 - protein, 121 aa, Unknown
  Obtained from environmental sample
  DOMAIN (1)...(120): Transposase
  misc_feature (1)..(121): Xaa is any amino acid
MYSIDYIRGAVAYKDEGHTFRELKDAFSIPAETYYQWKEKLENGYDGKKIFRERSRKIDKEKLKKAVEEKPDMYLYELAQLFDCTPQAVFLMLEKLNITRKKSPSLIMKGPKKNVQNLLHG

SEQ ID NO: 12255 - DNA, 627 bp, Unknown
  Obtained from environmental sample
  misc_feature (1)..(627): n is a, c, g, or t
gtgctcacgcagatgatcaagggcatgtccgtggcggacgcgcgaaaaataaccaatcgggatatcgtggctaaactgggcggtctgcccatggaaaaaatgcactgctccgtcatggggcaggaagcgctggaagccgcgttgcgcgcctggcgcgatgagccgctcccgccgcatgccgaggacgatgatccggtggtgtgcaaatgcttcggcgtgtccgcaggccgaatccgccgcacggtgcgcgaaaacggcctgcgcacggcggaggagatcgtcaacttcaccaaggcgggcggcggctgcggcgagtgccgcgcggctattgaagccatcatcgccaacgaactgggcgtgaaaccgctggaagagctgaaaagtccgcgcctgaccaatgtgcagcgcattcgcctcatctccagggcgctggatgaggaaatacggccccggctcgtccaggacggcggcgatgtggagcttatggaagtggaaggcccgctggttacggttgccctgcgcggcaaatgcggcaactgccgttccaggagcctgaccctgcaacatgtggaaaaagccctgcgcgaacatgtgagcgcggacattctggtgcgggaagccgtatga

SEQ ID NO: 12256 - protein, 208 aa, Unknown
  Obtained from environmental sample
  DOMAIN (1)...(58): NifU-like N terminal domain
  misc_feature (1)..(208): Xaa is any amino acid
MLTQMIKGMSVADARKITNRDIVAKLGGLPMEKMHCSVMGQEALEAALRAWRDEPLPPHAEDDDPVVCKCFGVSAGRIRRTVRENGLRTAEEIVNFTKAGGGCGECRAAIEAIIANELGVKPLEELKSPRLTNVQRIRLISRALDEEIRPRLVQDGGDVELMEVEGPLVTVALRGKCGNCRSRSLTLQHVEKALREHVSADILVREAV

SEQ ID NO: 12257 - DNA, 882 bp, Unknown
  Obtained from environmental sample
  misc_feature (1)..(882): n is a, c, g, or t
atggaaaaaaatccttctgtctttaccgcgcggctggaaaaaatttataactggatggccgctgaaggcatatcactgttgatgctggaagatacagaatcaaggcgcgatcaaaatatccgctggctcaccggccttccggcggacgctcttctttttctatcagtagaaaaaaaggctattcttacagcatgggatatcaatcttgccaaactctacgcttcacattcgcctgtcatgcttgcgtcttacaatgattttgatcgcaacccggtaaaagcaatcgcccttatcgctaaaaaattgggtattctccccggagcaaaagtcgagattccgcctgtaacgccctaccccgctttccttgactatgtaggcgaacttgcggattatgacattctttgcagggagaacggcgccgccgcggaaatcaggaaattgcgcgccgtcaaagatgaggaagaaatcgctgttatccgtaaagccgcggagattacaaacgaattaattgatcaactggaaaaaaacgtaatatcgggaaaaatagaaacagaagcggacgcggcgttgtttatagaggtggaggcgcgaagacgcggctgtgagggaacaagttttgggactcttgccgcgggaccggatcggagttttgcgattcacgctttcccaaactggacatgcgctccctttggcggtaaagggctttcaattcttgactttggcgtaaaattcggcggatactgcacggacgtaaccctcacttttacccgcgatttggatcaaagcaggaaaagcttgtcagtcttacggaaaaagcgtnctaactcgctatctcaatggcacataacggatgcatggcaaaagacattgccgagacggtag

SEQ ID NO: 12258 - protein, 293 aa, Unknown
  Obtained from environmental sample
  misc_feature (1)..(293): Xaa is any amino acid
MEKNPSVFTARLEKIYNWMAAEGISLLMLEDTESRRDQNIRWLTGLPADALLFLSVEKKAILTAWDINLAKLYASHSPVMLASYNDFDRNPVKAIALIAKKLGILPGAKVEIPPVTPYPAFLDYVGELADYDILCRENGAAAEIRKLRAVKDEEEIAVIRKAAEITNELIDQLEKNVISGKIETEADAALFIEVEARRRGCEGTSFGTLAAGPDRSFAIHAFPNWTCAPFGGKGLSILDFGVKFGGYCTDVTLTFTRDLDQSRKSLSVLRKKRXNSLSQWHITDAWQKTLPRR

SEQ ID NO: 12259 - DNA, 825 bp, Unknown
  Obtained from environmental sample
  misc_feature (1)..(825): n is a, c, g, or t
gtggagcaaacaatccgcccgaaatacgcctgccggcaatgcgaagggacggaagacgaggataagccgaccgtccgcatagcggctgtggagcccgcgatcatccctaaaagcatagcaagcccgagcctgttaagcatgattattacgcaaaagtttgaaacgcatctgccgtattaccggcaggagaaacaattcgcgcagatagatgcaataataagccgtcaggacatggcgaactggcagcagcaggtatatgcctttctaaaattgttattcgatttattgaaagtaatgataaaaacgggcccggtgatgcggatggacgagaccccggtgcaggtaatatcggacataaagcccgaaggggaagggcagaaagaaaggcagaccagttatatgtggcttgccctcggcgggccgcctgataaaaaagtggcatggtatgagtaccatccgacacacgccgcgtataacgcgcgggaatttcttcaagggtattcgggttatctgcaaacggacggctatgaagcatatgactgcgcggtgaaagacatgcccggaataattcacgctggctgtttcgctcacgtcaggcgtaagttctttgaggcggccaaaataaataagaaaccgcaatccgccgaggaggggataaaatatatacgcaggctctaccagcttgaggatgcgatgcgcagcaaatggaaagacagcattgaaaaattccaggaagaacgaaaaaagaagctgtccccatactggctgaatttaaagagtggctttttaaacgtgcgggtgaggtgccgccaaaaacgctgttag

SEQ ID NO: 12260 - protein, 274 aa, Unknown
  Obtained from environmental sample
  DOMAIN (3)...(188): Transposase IS66 family
  misc_feature (1)..(274): Xaa is any amino acid
MEQTIRPKYACRQCEGTEDEDKPTVRIAAVEPAIIPKSIASPSLLSMIITQKFETHLPYYRQEKQFAQIDAIISRQDMANWQQQVYAFLKLLFDLLKVMIKTGPVMRMDETPVQVISDIKPEGEGQKERQTSYMWLALGGPPDKKVAWYEYHPTHAAYNAREFLQGYSGYLQTDGYEAYDCAVKDMPGIIHAGCFAHVRRKFFEAAKINKKPQSAEEGIKYIRRLYQLEDAMRSKWKDSIEKFQEERKKKLSPYWLNLKSGFLNVRVRCRQKRC

SEQ ID NO: 12261 - DNA, 975 bp, Unknown
  Obtained from environmental sample
  misc_feature (1)..(975): n is a, c, g, or t
gtgcccggggtgctcctctccggcgggggcaggcgcaatgactcaagttttaccgttagaggctacggggcggacagcgttccgatctatgttgacggcgttccggtagccagcccttttcggggcgaaggggacagcgcccggattttaaccggggacctggacagcgtagaaatcaaaaaaggctacagctcgcagcttctgggggccaatgccctggggggtgcggtactcctgcggattgccaaacccaaaaaagcgctggaactgctgtccagaacaaccgttgatctggacggccttttcagctacggaggaatcagtacaatagccagggcaggaacaaaacagaattttttttactccatgggcacgtttcaataccggaatacggatcatttccgcctgtcggaaaaattcgagccgtacacgggcagtatccagggaaagggaaagcgtctctggtcggattcaaaagacatgaaaataaccctcctggcggggttgatccccctgccggatctggatatatggacgacgtatatctaccaggacgcggataagggggtttctcctcccgataccggggcatcatacgacatctggaaatggcccttctggcggcggcataccgcatccctgaacactacctacaccatggaaaaactttctctaagcgggcttttttatttcgacaagtacgataaccgactggaggaatactacaataaaaaggcctttgaactgggaatccacgctccctggtcggattatgatgaatactcgctgggtggacgctttaccggagagtataatttttccggggatcacagcctggcctccgcttttacctggaaactcgacgatcaccgcggcctgcggggtactatcctcaaatacgatacgcatgaagtggtacacgcaaagcgaaattattctttcggggggcatttgaatatcggggcagccatttaa

SEQ ID NO: 12262 - protein, 324 aa, Unknown
  Obtained from environmental sample
  misc_feature (1)..(324): Xaa is any amino acid
MPGVLLSGGGRRNDSSFTVRGYGADSVPIYVDGVPVASPFRGEGDSARILTGDLDSVEIKKGYSSQLLGANALGGAVLLRIAKPKKALELLSRTTVDLDGLFSYGGISTIARAGTKQNFFYSMGTFQYRNTDHFRLSEKFEPYTGSIQGKGKRLWSDSKDMKITLLAGLIPLPDLDIWTTYIYQDADKGVSPPDTGASYDIWKWPFWRRHTASLNTTYTMEKLSLSGLFYFDKYDNRLEEYYNKKAFELGIHAPWSDYDEYSLGGRFTGEYNFSGDHSLASAFTWKLDDHRGLRGTILKYDTHEVVHAKRNYSFGGHLNIGAAI

SEQ ID NO: 12263 - DNA, 624 bp, Unknown
  Obtained from environmental sample
  misc_feature (1)..(624): n is a, c, g, or t
atgcttcacacggcgttaggggaagagaaaggcgaggccctgctccaaaaaacaattaacagcctgccacaaaatatttttggttttttggaagaattcaccccggaacaaattgttttcctgcttaaagacgaaagtcctataacatcggcccttgttctggcaaggcttcctccggaaatttccgcaaagacgctggcgaaattcccgcctgccctcaagccggaaattctcaaaaaaatcgcgcatcagagcgaagtaatgccggaagttctggaacaagtcgcgggtgcaatgagggaaagagccaggaatcttggaagcagcgggaaagatgatattgaaattgacgggatgcagacccttacggcgattctaaaacagggagattattcctttggcgaccggatcataagcgaactggaaacggacagccccgaaatcagtaaaagcctgaaagacaagctgttcaccttggacgacgtgattgaggctttcgacaaacctcttgctgaaaaactcggaaccatgaccgaacaggatatcgccattctgctgaaaggaaggagccccgaattctgtgaaaaaatactttcaaatgtttcctcacggcggcgcgcttaa

SEQ ID NO: 12264 - protein, 207 aa, Unknown
  Obtained from environmental sample
  misc_feature (1)..(207): Xaa is any amino acid
MLHTALGEEKGEALLQKTINSLPQNIFGFLEEFTPEQIVFLLKDESPITSALVLARLPPEISAKTLAKFPPALKPEILKKIAHQSEVMPEVLEQVAGAMRERARNLGSSGKDDIEIDGMQTLTAILKQGDYSFGDRIISELETDSPEISKSLKDKLFTLDDVIEAFDKPLAEKLGTMTEQDIAILLKGRSPEFCEKILSNVSSRRRA

SEQ ID NO: 12265 - DNA, 303 bp, Unknown
  Obtained from environmental sample
  misc_feature (1)..(303): n is a, c, g, or t
atggcgcatgaaaacatagctcctacaaaaagcaacctcataaaagtcaaggaaaggctgaatatagcccgggaaggctatgatcttttggaacaaaagagggaaattcttgtcgcggagcttatgcgcaaggtggaacaggtaaaaatactggaacgcgacctggacaagagcgtggaaacggcctatccctgccttaaacggatgcttgtggtcgtcgggagggagcgggccaggaaattagcgcaaaatgtctcctattcttttgaattaacggaaaaacaggaatcgccgccggaatga

SEQ ID NO: 12266 - protein, 100 aa, Unknown
  Obtained from environmental sample
  misc_feature (1)..(100): Xaa is any amino acid
MAHENIAPTKSNLIKVKERLNIAREGYDLLEQKREILVAELMRKVEQVKILERDLDKSVETAYPCLKRMLVVVGRERARKLAQNVSYSFELTEKQESPPE

SEQ ID NO: 12267 - DNA, 369 bp, Unknown
  Obtained from environmental sample
  misc_feature (1)..(369): n is a, c, g, or t
atggcatatagcattgattttattgaaagggcagtggcttacaggcaagaaggccatacgtttgcgcaattgcgcgaggcatttgacatcccatccgcgacatattacgactgggaagaaaagcgtgctaacgggtattatgatataattgtcaagcgcgagcgccgtcggaaaatagacaaagaagcgcttaaacaggcggttgcggaaaaaccagacgctttccttaaggaatttgcggaacaattcaattgcacggcaaccgccgccttctacgcccttgaaaagctcaatataacacgaaaaaaaaagcctttacctattctgaaaaatccgagcagaagcgggcggagtttgccgaaaggctaa

SEQ ID NO: 12268 - protein, 122 aa, Unknown
  Obtained from environmental sample
  DOMAIN (1)...(122): Transposase
  misc_feature (1)..(122): Xaa is any amino acid
MAYSIDFIERAVAYRQEGHTFAQLREAFDIPSATYYDWEEKRANGYYDIIVKRERRRKIDKEALKQAVAEKPDAFLKEFAEQFNCTATAAFYALEKLNITRKKKPLPILKNPSRSGRSLPKG

SEQ ID NO: 12269 - DNA, 942 bp, Unknown
  Obtained from environmental sample
  misc_feature (1)..(942): n is a, c, g, or t
ttgcggcttgaggattcattttatggctgtgagaatccctcttttttattgcgttcgggagattttctgtatgccgccaatgaaaccggaagggcggggaaaatttccgctttctcggtaggggctgggaacacgctgacgttggtaaacagcagggaggtgccaggcgcgggtacgtgccatgtggccaaaatggacaactttctttacgcggcgaattatgaaagcggcagtatttttggcgttgaaattctgcgcgacggctctctcggcggcattgcagccgaaatacagcacaccggttccggcccgaatcaggtccgccagaaaggcccccacgcacattcagtcaatccaattccgcgctataatcttctgattgccgccgaccttggggcggatagcctgttttgctataaccaggaaaagaacggtacacttgtgccggacagtgcaaatcctgctgtcaaagcgccgccgggcggcgggccaaggcatttagccattcaccctggcggtgaatttgtgtatgccgttatggaaatgggcgtaagcctggtatgctatagaatgacagatacaggtttgaaacaggaggccgagtatccccttattgaaggagctttcacccaggcggatactgccgccgacatccattttacggaaagcggggcaaggctgtatgcttctgtaaggggaaaaaaccttatttcggcctttaatgtgtgcgaaggttcttcgctacagtttataggctcttacccgacctttggggacagtcccagaaatttttgtctctcccccggtgaggagtttgtcgttattgcccatcaggcttccggcagtgtaactgtctgtcccgtggactcccaaaccggggcagtgggaaacgcgctgacttccgtggttttatccggggcttcatgcgttattaagggttaa

SEQ ID NO: 12270 - protein, 313 aa, Unknown
  Obtained from environmental sample
  misc_feature (1)..(313): Xaa is any amino acid
MRLEDSFYGCENPSFLLRSGDFLYAANETGRAGKISAFSVGAGNTLTLVNSREVPGAGTCHVAKMDNFLYAANYESGSIFGVEILRDGSLGGIAAEIQHTGSGPNQVRQKGPHAHSVNPIPRYNLLIAADLGADSLFCYNQEKNGTLVPDSANPAVKAPPGGGPRHLAIHPGGEFVYAVMEMGVSLVCYRMTDTGLKQEAEYPLIEGAFTQADTAADIHFTESGARLYASVRGKNLISAFNVCEGSSLQFIGSYPTFGDSPRNFCLSPGEEFVVIAHQASGSVTVCPVDSQTGAVGNALTSVVLSGASCVIKG

SEQ ID NO: 12271 - DNA, 465 bp, Unknown
  Obtained from environmental sample
  misc_feature (1)..(465): n is a, c, g, or t
atggaaataaatcatttgattgcaaaaaatgcaaatttgaatatatcgaaaattgacaaaggcttgataataaacattcccattgatattcgcgttgttataaactggaatatgaacaacacagatattgacttgcacgtgaaagacccaaatggcgaagaatgttattttgggaacaaagaaactaaaattggcgggcgtataagcacagatattacaggcggctatggccctgagcaattccttttgaaaaaggctataaagggtaaatatggagtttatgtcaattattttggagatcgccaatttactacggaagggccgtcaaccgttatggcagaaattttcacaaaatatgccgaccaaaccgagcagcgcaaagttgtatctctgcaaatgtccaacgtaaagagaagggatgccagagacagggcaaaagtagaggtggctgaatttgagttttaa

SEQ ID NO: 12272 - protein, 154 aa, Unknown
  Obtained from environmental sample
  misc_feature (1)..(154): Xaa is any amino acid
MEINHLIAKNANLNISKIDKGLIINIPIDIRVVINWNMNNTDIDLHVKDPNGEECYFGNKETKIGGRISTDITGGYGPEQFLLKKAIKGKYGVYVNYFGDRQFTTEGPSTVMAEIFTKYADQTEQRKVVSLQMSNVKRRDARDRAKVEVAEFEF

SEQ ID NO: 12273 - DNA, 480 bp, Unknown
  Obtained from environmental sample
  misc_feature (1)..(480): n is a, c, g, or t
gtggaatttaacgctgacgaacggcaaaaacttcttgaagccggcattgcaacctaccgcttggataccaccggccatgtgctgattgaacggctcgtaaccagttacacggaaaactccgacggcgggcgtgatacaagttatcttgacgtacaggttaccgaaacggtagacgcgattcgcacgttcatcaacgccgaagcgaagaaacggttcaaaacatggaaacttgcaagcactgatgaaaattttggttcaggcgcgagggtaatgactgcgggcgtgttccgctcgttccttgcggaactgtatcaggaagtgttcatcaaggaaaaacaatggagtcaggattttgacggttataaaaaatcgatcattgtcgagatcaaagcgggaagtaaaacccggcttgaatattcccaccagcccaatctgataggccagttctatatcggcgcgggtctgacgcaattcaaatag

SEQ ID NO: 12274 - protein, 159 aa, Unknown
  Obtained from environmental sample
  misc_feature (1)..(159): Xaa is any amino acid
MEFNADERQKLLEAGIATYRLDTTGHVLIERLVTSYTENSDGGRDTSYLDVQVTETVDAIRTFINAEAKKRFKTWKLASTDENFGSGARVMTAGVFRSFLAELYQEVFIKEKQWSQDFDGYKKSIIVEIKAGSKTRLEYSHQPNLIGQFYIGAGLTQFK

SEQ ID NO: 12275 - DNA, 876 bp, Unknown
  Obtained from environmental sample
  misc_feature (1)..(876): n is a, c, g, or t
atgaaagcccgctgggaagctgaaaaagttgatattcagggtatccgcgaattaaagctgaggattgaagaattaaaaatagaagaaactcgttacgagcgcgaggggaatcttttaaaagccgccgaggtaaagcatgggaaaattcccgaagcccagaaacaacttgccgcgctcgcggctcttatggaaaagaagcgaaacgaaaccggaggttcaggaggagcggccctgctgagggaagaggttagcgaagaggacattgccgccgtggtatccgcgtggacggggattcccgtttcaaaaatgctctcaggcgaaatgcagaagtaccttgacctggaaaaagtgctggagcagcgggtagtcgggcagcaccaggcgcttgccgcggttgcggacgcaatcaggcggaacaaggcgggtctctccgatgccgcaaagcctttgggttctttccttttcctggggcctaccggcgtaggcaaaaccgaattggctaagaccctggcggactttttattcaacgacgagaaagcccttgccagaatcgacatgagcgaatacggcgagaaacattcggtgagccgccttataggcgctccgccgggttatgtaggctacgagcagggcggccagctcaccgaggttgtgcgcaggcggccctatagtgttgtcctttttgacgaaatagaaaaagcccattcggaagtgtttaatgtttttttgcagattctcgacgacgggcggcttacggacggacagggcaggattgttgattttaaaaatgttataataattatgacaagcaatataggttctgacctgattcttgaggaggaaaacaccgcgtcaataagggctcggccgatctga

SEQ ID NO: 12276 - protein, 291 aa, Unknown
  Obtained from environmental sample
  DOMAIN (152)...(291): ATPase family associated with various cellular activities (AAA)
  misc_feature (1)..(291): Xaa is any amino acid
MKARWEAEKVDIQGIRELKLRIEELKIEETRYEREGNLLKAAEVKHGKIPEAQKQLAALAALMEKKRNETGGSGGAALLREEVSEEDIAAVVSAWTGIPVSKMLSGEMQKYLDLEKVLEQRVVGQHQALAAVADAIRRNKAGLSDAAKPLGSFLFLGPTGVGKTELAKTLADFLFNDEKALARIDMSEYGEKHSVSRLIGAPPGYVGYEQGGQLTEVVRRRPYSVVLFDEIEKAHSEVFNVFLQILDDGRLTDGQGRIVDFKNVIIIMTSNIGSDLILEEENTASIRARPI

SEQ ID NO: 12277 - DNA, 432 bp, Unknown
  Obtained from environmental sample
  misc_feature (1)..(432): n is a, c, g, or t
gtgcaggcggtacggacggctggggcggaagacgacatagaaaaattttatcgatcatggaaagaaattacccctaacacatcaaacataattatacaaaaatatgacgatttttgcggctttatgcccaggaagcaggcttctgacctttccccggtacagaggcagccatgctggcatcttatgcgggatatgccggtgctgattgacggcgctgtgcctttgtgccgggagcagattgccggcaatggcggcgttctgcttggaaacgtttttatggaagagggggctggggcgggggcaaatgcccttgaagttatatgggaaaggggccagcgattttatacggaacaggcgggtcaaatacctggtgggaaaaaatttgattctctgtgcgcagggtgtgatgagtactatacctacaacttttaa

SEQ ID NO: 12278 - protein, 143 aa, Unknown
  Obtained from environmental sample
  misc_feature (1)..(143): Xaa is any amino acid
MQAVRTAGAEDDIEKFYRSWKEITPNTSNIIIQKYDDFCGFMPRKQASDLSPVQRQPCWHLMRDMPVLIDGAVPLCREQIAGNGGVLLGNVFMEEGAGAGANALEVIWERGQRFYTEQAGQIPGGKKFDSLCAGCDEYYTYNF

SEQ ID NO: 12279 - DNA, 723 bp, Unknown
  Obtained from environmental sample
  misc_feature (1)..(723): n is a, c, g, or t
ttgtcgcgccttgaagcatgggcagcgcggcacaacgtaaacccgcttgatctgacaccggcgcaagcagacgattttatttattcactccggggcgacataagcgaaaagacaggcaaggcaaacagccccgcgaccgtccgtctgacaaccgccgccgtttccagtttctacacgttcctacaccggcggcactccgctattgataacccattccgaggcacgaaagcgcggccaaaagaaaccgccgtccggggccttgccgttcccacggacaaggaagtaaaaaccatgcttaaagaattgccgcttccggaagccgccgccgtttccattatggccgggaagggcttgcgggcaggggcgctgccaacgctggacaggaagggggagcgctaccgagtaaccagcaagggaaaggattttttcgttgacctgacccctgacatggtaaagcgcatcgaggccgccgggcttccgatccgcgcccctttcgcagataaaaccgccaacgcaatagagctgtccgttgcataccacataaagaagcttcaccaggccgggaaacttgccgccgcttattcttgccacgacttgcggcactacgcagcggcgcgggaatacggcaaagaccatgacataaaaagggtaagggattttttgaaccacagcagcgtgtctaccactgaaaggtacttgcggagcataggagtaaaaatataa

SEQ ID NO: 12280 - protein, 240 aa, Unknown
  Obtained from environmental sample
  misc_feature (1)..(240): Xaa is any amino acid
MSRLEAWAARHNVNPLDLTPAQADDFIYSLRGDISEKTGKANSPATVRLTTAAVSSFYTFLHRRHSAIDNPFRGTKARPKETAVRGLAVPTDKEVKTMLKELPLPEAAAVSIMAGKGLRAGALPTLDRKGERYRVTSKGKDFFVDLTPDMVKRIEAAGLPIRAPFADKTANAIELSVAYHIKKLHQAGKLAAAYSCHDLRHYAAAREYGKDHDIKRVRDFLNHSSVSTTERYLRSIGVKI

SEQ ID NO: 12281 - DNA, 492 bp, Unknown
  Obtained from environmental sample
  misc_feature (1)..(492): n is a, c, g, or t
ttgccgagaggagaagccggcgcaagctggattatcattaatctgcagggccgggaatttatgacccccattgactgcccattccgctgttttgacgctattattgccgaattggcctcacccggagcgtttcccattaccatggtggattttcatgctgaatcaagccgtgaaaaagaagccctgggccactaccttgacggacgggcggcgctgcttgccggtacgcatacccatgtccaaaccgccgatgagcgcatcctgccccagggaaccgcctacattaccgatttgggcatgaccggcattaccgacagcgttattggcatggacgccaaaatctgccttgaccggacacgcaagcaggttatgtaccgcatggaacccgcggccaataaccagaccgacggtaaaagcggcgctgaagtacagggcgttattgcggaaattgacgcagaatcaggaaaagcggtctccatcaggcgaatttaa

SEQ ID NO: 12282 - protein, 163 aa, Unknown
  Obtained from environmental sample
  misc_feature (1)..(163): Xaa is any amino acid
MPRGEAGASWIIINLQGREFMTPIDCPFRCFDAIIAELASPGAFPITMVDFHAESSREKEALGHYLDGRAALLAGTHTHVQTADERILPQGTAYITDLGMTGITDSVIGMDAKICLDRTRKQVMYRMEPAANNQTDGKSGAEVQGVIAEIDAESGKAVSIRRI

SEQ ID NO: 12283 - DNA, 918 bp, Unknown
  Obtained from environmental sample
  misc_feature (1)..(918): n is a, c, g, or t
atgtannaaggttncacaagcagacgctttaaatcaatcagtgatatgctcaaaggaaagcagggacgttcagggcagaccttcttcgggaagcgtgtgatttattcgggacgctcggttattacagtcggccctgatcttaaaatgtggcaatgcggtattccgacaaagatggcgcttgagcttttcaaaccgtttatcatgaaaaaacttgtcgataaagatgttgttttcaatattaaaaaagccaagatgctcgtagaacaggaaacccctgaagttttcgcaatacttgatgaggttgtaaaagaacatccggtacttcttaaccgcgctccaactctgcacaggcttggtattcaggcatttgaacctgtacttgtagaggggaaatcaatcaaactgcacccgcttgtctgtcatgcttttaacgctgacttcgacggggatcaaatggcagttcatgttccgttgacccaggctgcgcaaatggagtgttggacgcttatgttaagtgcgcgtaaccttcttaaccctgctaacggaaaaacaattgtattcccgtcacaggatatggttttgggtattaacttccttacaaggatcaagaagaatgcgaaacgtcccggttcgctaaagcctgaaacaaaagacaaaataccgtattattcctgcgcggaagaagttttaatggcagtggacagaaaagcgctggattgggaagccgcaattcgtattaaacccacgaaattcccggtatgggataaagccggtaatgaagcagaaataaaatctgacggaactattattacctcggcgggaaggcttgtttttaacgaagaactgccggaaagtattccgtttatcaattatgaactgaaagacaaggaattgcgcgcgcttatgagcaaatattaa

SEQ ID NO: 12284 - protein, 305 aa, Unknown
  Obtained from environmental sample
  DOMAIN (175)...(304): RNA polymerase Rpb1, domain 3
  misc_feature (1)..(305): Xaa is any amino acid
MXXGXTSRRFKSISDMLKGKQGRSGQTFFGKRVIYSGRSVITVGPDLKMWQCGIPTKMALELFKPFIMKKLVDKDVVFNIKKAKMLVEQETPEVFAILDEVVKEHPVLLNRAPTLHRLGIQAFEPVLVEGKSIKLHPLVCHAFNADFDGDQMAVHVPLTQAAQMECWTLMLSARNLLNPANGKTIVFPSQDMVLGINFLTRIKKNAKRPGSLKPETKDKIPYYSCAEEVLMAVDRKALDWEAAIRIKPTKFPVWDKAGNEAEIKSDGTIITSAGRLVFNEELPESIPFINYELKDKELRALMSKY

SEQ ID NO: 12285 - DNA, 915 bp, Unknown
  Obtained from environmental sample
  misc_feature (1)..(915): n is a, c, g, or t
ttggaaaaaacccacgcggaagaattacagaagctttctctcgtatcagcgggcacgaaaaaacaactggaagaattttcatcctacgttaacgctgaagtttcttcccaggaagccatgctccttaaagccgtcgaggatatgaagcagaaatcccttgaagccagcgaggcgaaacttgaagaataccggcatgcccaggacgcggaattcaagcgccttgaagccctggcagatgacgtgaagaaccttgacgccgagctccgcagcagcatgcaggaagtaacaaatcggcttagggaagacttcaatagatttgaacaagaagcggcgcttatgcggaaaactgaaacggagaaattctccgcccttgcatcggacttcaggaaagaactctcaggaatggagcgggatcttgagtcactcaaatccgaagcgcatgaaaacgtttcaggcgagcttaacgcctttgaggacaaattcttctccgatctcgcaaagcgctcagacggcattgatcagcggcttatggactggcaggacaagcttgaaactaggctcacaaagatgagcgagaaaaccgaggccgagcggcaggaattggaaaagaaccacgcggaagaattacagaagctttctcttgtatccgagggcactaaaaagcaactggaagaattctcgtcctacgttaacgctgaagtttcttcccgggaagccatgctccttaaagccgtcgaggagatgaaacaaaaggctcttgaagccagcgaagcgaaacttgaagaatacaggcatgcgcaggacgcggaattcaagcgccttgaagccctggcagatgacgcgaagaaactggacgtggaactccgcagcagcatgcaagaagtaacaaaatcgcttaggnaagacttttcatag

SEQ ID NO: 12286 - protein, 304 aa, Unknown
  Obtained from environmental sample
  misc_feature (1)..(304): Xaa is any amino acid
MEKTHAEELQKLSLVSAGTKKQLEEFSSYVNAEVSSQEAMLLKAVEDMKQKSLEASEAKLEEYRHAQDAEFKRLEALADDVKNLDAELRSSMQEVTNRLREDFNRFEQEAALMRKTETEKFSALASDFRKELSGMERDLESLKSEAHENVSGELNAFEDKFFSDLAKRSDGIDQRLMDWQDKLETRLTKMSEKTEAERQELEKNHAEELQKLSLVSEGTKKQLEEFSSYVNAEVSSREAMLLKAVEEMKQKALEASEAKLEEYRHAQDAEFKRLEALADDAKKLDVELRSSMQEVTKSLRXDFS

SEQ ID NO: 12287 - DNA, 306 bp, Unknown
  Obtained from environmental sample
  misc_feature (1)..(306): n is a, c, g, or t
gtgggcagcgcaatggcacagcctgtcgcggacagcatactggcgaagcgggttgccatcgcggaagcggcaaatacagccagaggcggaggaggcagcagaattttattcgccgcaggccaaatgcaaacgaatgacaacgcggcggggtatgtgcctgaaagcgaaattcaagtgagtttaagcgcggatgttcttgcgcagatcattatccttacgcttggcctggcaacgctgtccggcattgtcggggttgtccttatcacgcaatacgaacccctgaaaattctcagggaaattaattag

SEQ ID NO: 12288 - protein, 101 aa, Unknown
  Obtained from environmental sample
  misc_feature (1)..(101): Xaa is any amino acid
MGSAMAQPVADSILAKRVAIAEAANTARGGGGSRILFAAGQMQTNDNAAGYVPESEIQVSLSADVLAQIIILTLGLATLSGIVGVVLITQYEPLKILREIN

SEQ ID NO: 12289 - DNA, 741 bp, Unknown
  Obtained from environmental sample
  misc_feature (1)..(741): n is a, c, g, or t
ttgattaatgatgtctttttctatcgtgagaaaaagtatctgtccctccaggacattcaagacaaaaacagcgccatcggcgccaacggctccgccgctgactgggactatgatgaagaagttaaaaaaatctgttcctttatacaggttattgataataaaatgatacaatcgttctttaatgaattgaaaaatattttttattattcaggaaaaacaccgtttacaataaggcaggaatgtctggaattgatgatagatatccgtagcgaaatgataaaaaagtttcccgctctgaaggaaaaactgggaaccggaagggaaacccttgacgcgattatgagggagcgctatctgggagttattatagataccatgacagaaacttgtctgtatataagcggatgtttacccctgctgtcggctgattcgagtttccagcgcatcataagttatgtgaaaaacaattataatgaggatctcaggctggaaacccttggacagcttttttattacaactgcgcttacctgggaaaacggtttaaggaatacacggggatgaattttcatacctatctggatatactaagaatagacgcggcaaaaaagatgttacaggacaccgatatgaaggtttatgaaatatccgcctcggtaggttacgcgaataccgattatttttacagcaagtttaaaaaacatacaggcgaaagcccgcttgttttcaggagaaaagaatga

SEQ ID NO: 12290 - protein, 246 aa, Unknown
  Obtained from environmental sample
  DOMAIN (200)...(244): Bacterial regulatory helix-turn-helix proteins, AraC family
  misc_feature (1)..(246): Xaa is any amino acid
MINDVFFYREKKYLSLQDIQDKNSAIGANGSAADWDYDEEVKKICSFIQVIDNKMIQSFFNELKNIFYYSGKTPFTIRQECLELMIDIRSEMIKKFPALKEKLGTGRETLDAIMRERYLGVIIDTMTETCLYISGCLPLLSADSSFQRIISYVKNNYNEDLRLETLGQLFYYNCAYLGKRFKEYTGMNFHTYLDILRIDAAKKMLQDTDMKVYEISASVGYANTDYFYSKFKKHTGESPLVFRRKE

SEQ ID NO: 12291 - DNA, 552 bp, Unknown
  Obtained from environmental sample
  misc_feature (1)..(552): n is a, c, g, or t
atgatgccgcagaaaaagaatccagatagcatggaactcataaggggaaaagctgggcggttaataggcaattataccgcgatgttcaccctcgtaaaaggagcaccgctaacttacagccgcgatttgcaagaagacaaagcccctgtttttgatagcacaaaaacaattttaatttgcctgcaagttttcaaagaggctttggaaagtgcaaaatggaattttgatgctatggaaaaaaagatgcttccagcactacttgccacagacctcgcagacttgctcgttgaaaacggagttccctttagagatgctcatcacattgttggaaacttggttggaattgccgcaaaacaaggtgtaaatttcacagaacttccagacgaattttggaaagacgttccaaaagcgaaaaaattgcgtgaaaaattaacttacgccttttccgtctcgcgccgcaacatagagggtggaactggagaaaaggctttgaaggagcagttgaggaaggcttccaattctttcaatattcctttgtttcccattaaatga

SEQ ID NO: 12292 - protein, 183 aa, Unknown
  Obtained from environmental sample
  misc_feature (1)..(183): Xaa is any amino acid
MMPQKKNPDSMELIRGKAGRLIGNYTAMFTLVKGAPLTYSRDLQEDKAPVFDSTKTILICLQVFKEALESAKWNFDAMEKKMLPALLATDLADLLVENGVPFRDAHHIVGNLVGIAAKQGVNFTELPDEFWKDVPKAKKLREKLTYAFSVSRRNIEGGTGEKALKEQLRKASNSFNIPLFPIK

SEQ ID NO: 12293 - DNA, 879 bp, Unknown
  Obtained from environmental sample
  misc_feature (1)..(879): n is a, c, g, or t
atggaagcgattggcaatcttggctggatgtattttaaagttcaccggcttgcggacggtgaaagactgcttgcttcggcagttgagcgcttcggctataattcggacttttcaatgacgcttggaaccatttactccgacatgtaccgttatgatgacagtaaatattggtataacaaatctatcgaattagggcagggttacagagataatgaatacactgcaatagcgtggtataacctttcaattttggaagcgcgtttttaccgttacgatctctgcatggacgcaaccaattcttcattaagaatgtataaccgcgcttcaggtcaccttgcccgcggagaacttttaaaacgtcagttaaaattgatagaaacccaaaaagagtgcgagacagcttatgaaaccgacacttctccgcttgcaaaattgtttctggcgcaagtctatcaaatatccgggcggctggaagaagcgcggctttacgcgcaagactgccttaaagacagtaataactcatggatgttgaatttcggcatagaccctgaccgttataaaaaagatattcatctgacgcttgcaaaaacatataacggacttctgaataccgaacgatttttgccgtgggtaacgccaaaagaaaaaatactatcgttgttcagaactatctcgtatatccttaaaaaagaaataaaccttaaactctacagaaaatactgccttgccgcggcaaatgcgtacgggaaaactttttcaaacagcggcgcagcaaacagcggcgcagcaagcagcggcgacgttcatttggattcgctttacccatattacaacgctttccatgactacccgcgccgtgcaattacatatctgaaataa

SEQ ID NO: 12294 - protein, 292 aa, Unknown
  Obtained from environmental sample
  misc_feature (1)..(292): Xaa is any amino acid
MEAIGNLGWMYFKVHRLADGERLLASAVERFGYNSDFSMTLGTIYSDMYRYDDSKYWYNKSIELGQGYRDNEYTAIAWYNLSILEARFYRYDLCMDATNSSLRMYNRASGHLARGELLKRQLKLIETQKECETAYETDTSPLAKLFLAQVYQISGRLEEARLYAQDCLKDSNNSWMLNFGIDPDRYKKDIHLTLAKTYNGLLNTERFLPWVTPKEKILSLFRTISYILKKEINLKLYRKYCLAAANAYGKTFSNSGAANSGAASSGDVHLDSLYPYYNAFHDYPRRAITYLK

SEQ ID NO: 12295 - DNA, 459 bp, Unknown
  Obtained from environmental sample
  misc_feature (1)..(459): n is a, c, g, or t
atgacggagaatttgaattgcaaagttgctggtagcgagtgctatgataaaaatgaaagcaactgcaatacctacggcaggctttacacttgggaagcggcaaagaaagcctgttccggtggttggcgtttgccaagcgatgccgaatgggatgcattggtggcagcggttggaggtgcatctaccgcagggactaaattaaaggctagagacggttggaattcatatagcggagttccctctggcacggacgactttggcttttccgcccttccgggtggcttcggcaattcggatggcagtttctacgatgtcggcgacggcggcctctggtggagttccacaaagtacgatagccactacgcttacagcaggtatatgtactactacgacgagtacgtaagcaggttcaacggcgataaggacttcttgtttagtgtccgttgcttgcaggactga

SEQ ID NO: 12296 - protein, 152 aa, Unknown
  Obtained from environmental sample
  misc_feature (1)..(152): Xaa is any amino acid
MTENLNCKVAGSECYDKNESNCNTYGRLYTWEAAKKACSGGWRLPSDAEWDALVAAVGGASTAGTKLKARDGWNSYSGVPSGTDDFGFSALPGGFGNSDGSFYDVGDGGLWWSSTKYDSHYAYSRYMYYYDEYVSRFNGDKDFLFSVRCLQD

SEQ ID NO: 12297 - DNA, 621 bp, Unknown
  Obtained from environmental sample
  misc_feature (1)..(621): n is a, c, g, or t
atgaaacacactcttgttttagcaatagacataggcaacagccaaacggcaataggcatttatcgagatgtgaaaattgaagcgagttatcgcttaacaacaaacgaaaaaacaaccagcgatgagattttttttagaataagcgatttgataaaacacttcggttgcaaaacaaaagattttacccacattggtttgagcaatgttgttccgcagcttgaacgcccttggattaaagcacttgtcgcttatttcaataaacccgtgcaaattgtgagttcaaaaaattgccttgatttgccaatagcctaccctcgccctgggagtgttggaccagaccgtttgtgcaatatgattgcactgcgctcgcgaggaattcaaaatggaattgttgttgatatgggaaccgccacaacatttgatgttttgcacaatggcggttttgcgggtggtttaattataccgggcattagcgcatctatggatgctttaacagaaaaggctgcaatgcttttgcccgtttcaataaaatggacaaataaattcgtggcaaaaatacgggcgatgccatgcgctccggtattcnttcacgttttttgggacaactggattttttggtaa

SEQ ID NO: 12298 - protein, 206 aa, Unknown
  Obtained from environmental sample
  DOMAIN (6)...(192): Bordetella pertussis Bvg accessory factor family
  misc_feature (1)..(206): Xaa is any amino acid
MKHTLVLAIDIGNSQTAIGIYRDVKIEASYRLTTNEKTTSDEIFFRISDLIKHFGCKTKDFTHIGLSNVVPQLERPWIKALVAYFNKPVQIVSSKNCLDLPIAYPRPGSVGPDRLCNMIALRSRGIQNGIVVDMGTATTFDVLHNGGFAGGLIIPGISASMDALTEKAAMLLPVSIKWTNKFVAKIRAMPCAPVFXHVFWDNWIFW

SEQ ID NO: 12299 - DNA, 669 bp, Unknown
  Obtained from environmental sample
  misc_feature (1)..(669): n is a, c, g, or t
atgaacataatcaaacggcctttcagatacactaacgaaggtgtcgtattttggcttataggaattaatattctcatttttttatttatgaggtatttaggaaatcaaatcagggtaactctgaatattgatatggaaaaaatacccgtgtccctttcgaatgcgctggcaatgataccaataacggttttgcatggatgggtttggagttttattacttatatgttcatgcacggcagtgttactcacattttatttaatatgctcgggctttttatttttggagttcatgttgaaagacagatgggcagccgcgagtttttgctttattaccttcttacaggcgcgttggcgggtgtcttttcctttggtgtgtatttgtttacatctccctacgttccgcttgttggagcctccggcgccatatttgcggttgaacttgcgtatgcggtatttttccccgattcaattatttacatttgggggattcttccccttcgcgcccccgtgatggttctaggttttaccgctctggaattgtttttttcgataacaggacgcaatagcagtgtcgcccatcttacccaccttgccggcttcggtatcggatggctttatttccagattcgcttcggagtgaatccctggcggcggcttacggggcggtaa

SEQ ID NO: 12300 - protein, 222 aa, Unknown
  Obtained from environmental sample
  DOMAIN (62)...(215): Rhomboid family
  misc_feature (1)..(222): Xaa is any amino acid
MNIIKRPFRYTNEGVVFWLIGINILIFLFMRYLGNQIRVTLNIDMEKIPVSLSNALAMIPITVLHGWVWSFITYMFMHGSVTHILFNMLGLFIFGVHVERQMGSREFLLYYLLTGALAGVFSFGVYLFTSPYVPLVGASGAIFAVELAYAVFFPDSIIYIWGILPLRAPVMVLGFTALELFFSITGRNSSVAHLTHLAGFGIGWLYFQIRFGVNPWRRLTGR

SEQ ID NO: 12301 - DNA, 756 bp, Unknown
  Obtained from environmental sample
  misc_feature (1)..(756): n is a, c, g, or t
ttgaaggtttttcagtaccattccattttaataggccttatttttggatatatattcacatatgtaatggggttattttttccggcttacgcaattattgattttaatgcggtaaaagaagccaaatggcttatgtttccggctttccatactccaaaattcagtttagtgcctgttttaacatttattattatttcatttgccacaatctgtgaacacttaggcgacgtgcttgttacaagcaaaattgtcgggcaggatttctataaaaaccccggacttcaccgcactttattgggcgacggtcttgcgactgcatggtcttccttattcggcggtcctcccaacacaacttacggggaaaatatcggcgttatggctattacgcgcgtttactcagtttgggttatcggcggagcggcggtaatatcgatatttatttcattctttgcaaaaataggagcgataattcaaacaattccctctcctgttctcggcggcatctgcatgcttctctttggaataatcgcatccagcggcctgcgtacaattgtggaaagcggcgtagatttcaaggataaacgaaatttaacgattaattcggtaattttagtaatcggcataggcggcggagagcttatttttcatattaccaaagacctgcaatttagactttcagcggtagcccttgccacggtagttggaattatcctcaatttggtaattcccaaggcccaacaggagaaaacagagtaa

SEQ ID NO: 12302 - protein, 251 aa, Unknown
  Obtained from environmental sample
  DOMAIN (1)...(216): Permease family
  misc_feature (1)..(251): Xaa is any amino acid
MKVFQYHSILIGLIFGYIFTYVMGLFFPAYAIIDFNAVKEAKWLMFPAFHTPKFSLVPVLTFIIISFATICEHLGDVLVTSKIVGQDFYKNPGLHRTLLGDGLATAWSSLFGGPPNTTYGENIGVMAITRVYSVWVIGGAAVISIFISFFAKIGAIIQTIPSPVLGGICMLLFGIIASSGLRTIVESGVDFKDKRNLTINSVILVIGIGGGELIFHITKDLQFRLSAVALATVVGIILNLVIPKAQQEKTE

SEQ ID NO: 12303 - DNA, 831 bp, Unknown
  Obtained from environmental sample
  misc_feature (1)..(831): n is a, c, g, or t
gtgatagtantcggcacgaatacgaatagggtttcattgcgaaacaagcgatataaattcgtattttacagtatctgtaaaaacaaaacaaaattaagcgacgcccagctgctggcgcaggcaaggcctgtaatgtctgaggcgctggcggttcaaacggttatttattacaatgaatatgccaaggcgaaaatacatatacatcacataacgtccggtaacgggcttttgcttgcatcggaagccaaacagaaaaaaatggatataacaactgaaacctgccctcactatcttttatttgacgatactcaaaccgcgcgcagggtatacccgcctattcgcggcattgaacacaataatagtctttggcaggctttaaaaaaaggcgaaattaatttaatagcgagcgaccacgccccgcataccgccgcagaaaaggctcttccgctttgggaagcgcctgccggcctttgcggtgttgaaactgccgttccccttatgcttaacgaggttaacaaaggaaaattgactcttaacgactatgtgcgcttttcaagcgaagcgcccgccagagtatgggatatatacccacaaaagggaaatcttcgcgatggcgcggacgccgatattaccattgttgacatggacatgaaaaaggtaataagagcaagcgaacttcactcaaagagcaaaacaaccccttatgagggaatggaagtgcagggctgtccagttgcgacaatggtgaggggaaaatttgtaatgaaggacggaaagctcacgggcgttaaaggatatggaatgcacgttaaaccaaaagacctgcgttaa

SEQ ID NO: 12304 - protein, 276 aa, Unknown
  Obtained from environmental sample
  misc_feature (1)..(276): Xaa is any amino acid
MIVXGTNTNRVSLRNKRYKFVFYSICKNKTKLSDAQLLAQARPVMSEALAVQTVIYYNEYAKAKIHIHHITSGNGLLLASEAKQKKMDITTETCPHYLLFDDTQTARRVYPPIRGIEHNNSLWQALKKGEINLIASDHAPHTAAEKALPLWEAPAGLCGVETAVPLMLNEVNKGKLTLNDYVRFSSEAPARVWDIYPQKGNLRDGADADITIVDMDMKKVIRASELHSKSKTTPYEGMEVQGCPVATMVRGKFVMKDGKLTGVKGYGMHVKPKDLR

SEQ ID NO: 12305 - DNA, 834 bp, Unknown
  Obtained from environmental sample
  misc_feature (1)..(834): n is a, c, g, or t
ttggagcctgtattagacacaatcgttgcgggagaaccggataaacttgccggaaagctacttattttacaggcgtacggttcctcagacgttgccgatggagcaagccattcttttgtggaattgtataacaacacgtattcggctttgaacctaaacggaattacactgtactatgccgacggaacccaaaatacaaccgcaaccgaggatgaaccctggaaaacaatttccctgagcggcacgatacctgctaaaacatcatttctcattttaggaaataagaaaaactcaacggcacgtctccaaataacggaaaactccggggacattaacgacacagctttctctctgagccatcgggcatttaaggcggcgcttatacgaagcaaaaagatattagcggagcaaaacccttttgacatgggcgaaggaaatacggcggccggttatatagatatgattggctctgcaaattcgtatcaaacggaagatttaatattcggcttcgaaacgcatccggcacgccattcggcatcaacggctgttcgtcgaaagacccttatggatagcgacaacaatagtgaggactttgctagtattgattatcaagcatggtctgaatctgaaccggatagaaccacggatgagcaactggaattgtacaggcncaaaaatgtgacattcggcgcttggtatcctatgagtgatgccaacgagccaaccggttatgcgcaagaaatagtaagtttcaagttctcgcaccaaaataggggatgggagaaagagaaattttggtgcattcagcaagtacatacttacctattgggatga

SEQ ID NO: 12306 - protein, 277 aa, Unknown
  Obtained from environmental sample
  misc_feature (1)..(277): Xaa is any amino acid
MEPVLDTIVAGEPDKLAGKLLILQAYGSSDVADGASHSFVELYNNTYSALNLNGITLYYADGTQNTTATEDEPWKTISLSGTIPAKTSFLILGNKKNSTARLQITENSGDINDTAFSLSHRAFKAALIRSKKILAEQNPFDMGEGNTAAGYIDMIGSANSYQTEDLIFGFETHPARHSASTAVRRKTLMDSDNNSEDFASIDYQAWSESEPDRTTDEQLELYRXKNVTFGAWYPMSDANEPTGYAQEIVSFKFSHQNRGWEKEKFWCIQQVHTYLLG

SEQ ID NO: 12307 - DNA, 333 bp, Unknown
  Obtained from environmental sample
  misc_feature (1)..(333): n is a, c, g, or t
gtgacctcggcctgcagctcctcgcggtctttgtctgtgttggtgtcgttggccgactgcaccgacagttcgcgcattctctgcaatatggagtgcgtttcggcgagtgcgccttccgcagtctgtatcagggagattgtgtctgaggagtttttggaagccatgttcagtcctctgacttggcctctcattttttcggaaatcgccaaacccgcggcgtcgtcgccggctctgttgatgcggaatccgctggacagtttttccatcgacttcgagcccgtcagctcgctgattccccattggcgatgggtgttgatggcggtgaagttgtga

SEQ ID NO: 12308 - protein, 110 aa, Unknown
  Obtained from environmental sample
  misc_feature (1)..(110): Xaa is any amino acid
MTSACSSSRSLSVLVSLADCTDSSRILCNMECVSASAPSAVCIREIVSEEFLEAMFSPLTWPLIFSEIAKPAASSPALLMRNPLDSFSIDFEPVSSLIPHWRWVLMAVKL

SEQ ID NO: 12309 - DNA, 795 bp, Unknown
  Obtained from environmental sample
  misc_feature (1)..(795): n is a, c, g, or t
atgaaaaaagtcgtcttttgtctgctgtcgatcacctcttttacaattatgctattcttactgcatggatgttactcaacgcgtgttcaaccaggcgacaaaagcattgctatggaagaaacaaaaaatatcacagacgaggaagaggagtttccggaagagtttgttctgcccgaatttgaactgcctccaccggataaaaatcttcctgtttcaaatttcagggagatatgggcttatctgaccacgggcagagaatgggcgctgaatttaaattaccccattacagatctggtttacacaggcgccgaagtggattcttacggcaaacttgttgatatgcctaatttcagaaatataacttcctttcgcggcagaaaacactttatggcggcctgcaacggcagggctttgactcactttgttcttatggaagggagcgatgaacgtaaagcactaatcagggatctattggaagccgcaaaaccatacgacggccttcatatcgattttgaaaacgtacctgccagggacggagaagcctttctttcgtttttaaaagagctgcgctccggcctgggtggcaagatgtttactatcgccctcgccgccagaacaagaaccttaaatgatgatgtatacgattacaataaaattaaacccattgttgaccgcatactgatcatggcctatgacgagcattggtcaaccagcgagcccggccccatcgcttcaatggcctggtgccagcggatagcccgctatgcgctcgatacaattggagttgaaaactaa

SEQ ID NO: 12310 - protein, 264 aa, Unknown
  Obtained from environmental sample
  SIGNAL (1)...(23)
  DOMAIN (75)...(260): Glycosyl hydrolases family 18
  misc_feature (1)..(264): Xaa is any amino acid
MKKVVFCLLSITSFTIMLFLLHGCYSTRVQPGDKSIAMEETKNITDEEEEFPEEFVLPEFELPPPDKNLPVSNFREIWAYLTTGREWALNLNYPITDLVYTGAEVDSYGKLVDMPNFRNITSFRGRKHFMAACNGRALTHFVLMEGSDERKALIRDLLEAAKPYDGLHIDFENVPARDGEAFLSFLKELRSGLGGKMFTIALAARTRTLNDDVYDYNKIKPIVDRILIMAYDEHWSTSEPGPIASMAWCQRIARYALDTIGVEN

SEQ ID NO: 12311 - DNA, 432 bp, Unknown
  Obtained from environmental sample
  misc_feature (1)..(432): n is a, c, g, or t
ttgtttctgttcacggcggatgatactgtttccctggggaaagtgcttgcccggttgcttaaaaaaggtgatgttgtagccttaaaggggcccttgggagccggaaagacctgccttacaaagggcatagccatggctctgggcgtaaaagaaccggttaccagccccagttacacccttgtttctgagtacgaaggggttttacagggtaattccataaaaattttccatattgacgcctaccgccttgccggaaatgatgatttttcagcaatcggaggagaagaaatgatctttggagacggtatttccataattgaatggtgcgaacgcattccggattttatccagaaggacgctttaagggtggatatacaaataatagacggcgaaaagcggcattttcatatttacctggaaaatggaaagtga

SEQ ID NO: 12312 - protein, 143 aa, Unknown
  Obtained from environmental sample
  DOMAIN (9)...(135): Uncharacterised P-loop hydrolase UPF0079
  misc_feature (1)..(143): Xaa is any amino acid
MFLFTADDTVSLGKVLARLLKKGDVVALKGPLGAGKTCLTKGIAMALGVKEPVTSPSYTLVSEYEGVLQGNSIKIFHIDAYRLAGNDDFSAIGGEEMIFGDGISIIEWCERIPDFIQKDALRVDIQIIDGEKRHFHIYLENGK

SEQ ID NO: 12313 - DNA, 591 bp, Unknown
  Obtained from environmental sample
  misc_feature (1)..(591): n is a, c, g, or t
gtggacggttacgaaataccggtaagagcgggcgatactcttcccgctattgtcgcaaaaataaacgaatcaggcgcggccgttaaagcgtcaattgatcctgaaacaaggggattgatgctcacaggtactaacccccatcttatcaggatggaagacaaacaaggctcaaggacgcttgaagagcttgggataattcagttcaataacgatccttcggcgccaaattggtccccggcggcaagagtctcggggggctctgtttttgatatggtgataagactcagaaacgcgctttacagggcggatcagacgtttgtcggaggccttggaatcagtggaatagatatggctatgcaaaacatgacaagccgccttaccgatataggtagtcggcaggaaagagtcatggctacctggaacaggctaaaccaggaaattccgaatgttacatcaatgctggccagagagtcgtcggttgacatgatcaacgccgcgacggatttggcaatgatggattttgcacacaaggcggccctgcaaacggcggcaaaaatagttccacctaccttgcttgactttttacgataa

SEQ ID NO: 12314 - protein, 196 aa, Unknown
  Obtained from environmental sample
  DOMAIN (1)...(45): Flagellin hook IN motif
  misc_feature (1)..(196): Xaa is any amino acid
MDGYEIPVRAGDTLPAIVAKINESGAAVKASIDPETRGLMLTGTNPHLIRMEDKQGSRTLEELGIIQFNNDPSAPNWSPAARVSGGSVFDMVIRLRNALYRADQTFVGGLGISGIDMAMQNMTSRLTDIGSRQERVMATWNRLNQEIPNVTSMLARESSVDMINAATDLAMMDFAHKAALQTAAKIVPPTLLDFLR

SEQ ID NO: 12315 - DNA, 531 bp, Unknown
  Obtained from environmental sample
  misc_feature (1)..(531): n is a, c, g, or t
atgggatcctcggtaggcgtaagcaaggttaagaaacaaagccagtaccttccggctttaagggatgcttttgaatacgacacaaaggcagttatcgaggaatttattcctggcagggaactggaatgttctgttcttggaggaagcgagatcattgcttccattccgggagaggtgaaatccaggcatgagttttattcatacaacgcgaaatatctggacaaaaaaggcgcggagctaatcatccccgcgaaagtttctattgaaattatccagcgtgttcaggaactggctattgccgtttttaaaagcctttgctgcgaaggtcttgcaagggtggactttttccttaaaaaagacggcagcgtcatcataaacgaaatcaatacaatgcctggttttacaaagatcagcatgtacccaaaactgtgggaagcttccggcatatcatacacccaattgatcgataagctgattggttttgccctggaacgttttgaaaaagaaaaacaattaaagacaagtttgtag

SEQ ID NO: 12316 - protein, 176 aa, Unknown
  Obtained from environmental sample
  DOMAIN (1)...(160): D-ala D-ala ligase C-terminus
  misc_feature (1)..(176): Xaa is any amino acid
MGSSVGVSKVKKQSQYLPALRDAFEYDTKAVIEEFIPGRELECSVLGGSEIIASIPGEVKSRHEFYSYNAKYLDKKGAELIIPAKVSIEIIQRVQELAIAVFKSLCCEGLARVDFFLKKDGSVIINEINTMPGFTKISMYPKLWEASGISYTQLIDKLIGFALERFEKEKQLKTSL

SEQ ID NO: 12317 - DNA, 462 bp, Unknown
  Obtained from environmental sample
  misc_feature (1)..(462): n is a, c, g, or t
ttggactatacggtcatcggcgatgcggtcaatctcgcgtcgaggctggagggcgttacgaagtattaccatcagcatatcatcgtttccgaaaatgcctatggcgcggcaaggaatgatttcattttcaggaaggccgacagcgttcgcgtcaagggcaaggatcagccggtcgggctctacacggtctacgccgcgtggcgggacgaagcggcgggcgaaatgccggagtctctgatcatcgatcgcgaggctctcgacaattataataagggattaaagctctacgcgatgcgcgagtgggagaccgcaaaacagtactttcagaaaacactgttgatattcgaaaaaacaggcggcgaggattatctctccnagctgtacctgacgcggatatcggagtatcaggtcaatccgccgccgcccgactgggacgcgacgatcaccatgacggaaaagtag

SEQ ID NO: 12318 - protein, 153 aa, Unknown
  Obtained from environmental sample
  misc_feature (1)..(153): Xaa is any amino acid
MDYTVIGDAVNLASRLEGVTKYYHQHIIVSENAYGAARNDFIFRKADSVRVKGKDQPVGLYTVYAAWRDEAAGEMPESLIIDREALDNYNKGLKLYAMREWETAKQYFQKTLLIFEKTGGEDYLSXLYLTRISEYQVNPPPPDWDATITMTEK

SEQ ID NO: 12319 - DNA, 321 bp, Unknown
  Obtained from environmental sample
  misc_feature (1)..(321): n is a, c, g, or t
gtggcgatcgtcatcaatgacaacgatcaggacggacgcgacgtctcgtggctgtgggacgttgattttgagcgcctgggcggtatcccaaatctcatcgtcagcggcctgcgcgcgcatgatatgctggtacgcatgaaatacgcaaactacgatatgacaagagcgcggattctcccgaaaatcaaggaagcgcttcgggcagcgcttgcctgcgactgcgaagtcgtgtacgcgctcgtgaattacaccgcgctcttttatacgcacgatctgttacagaaattatcaaagtcaggccggagtccgaagcgcttataa

SEQ ID NO: 12320 - protein, 106 aa, Unknown
  Obtained from environmental sample
  DOMAIN (1)...(86): Domain of unknown function (DUF1727)
  misc_feature (1)..(106): Xaa is any amino acid
MAIVINDNDQDGRDVSWLWDVDFERLGGIPNLIVSGLRAHDMLVRMKYANYDMTRARILPKIKEALRAALACDCEVVYALVNYTALFYTHDLLQKLSKSGRSPKRL

SEQ ID NO: 12321 - DNA, 678 bp, Unknown
  Obtained from environmental sample
  misc_feature (1)..(678): n is a, c, g, or t
atggacaaggacgtgatgaagcgccttctgagggacgccgggattcccatcgggaagtttcgtgttctttgcgcggatgacgatgtcccgtcttacgaagaagtcagctcggagcttggtacgccgctttttgtaaaaccagccaacatgggatcttcggtaggcgtaagcaaagttaaaaaacaaagccaatattttcctgctttaagggatgcttttgaatacgacaccaaggcagtgattgaagaatttattccgggcagggaactggagtgttctgttcttggcggcagcgagatcatggcttccattccgggagaggtaaaatccaggcatgagttttattcatacaacgcaaaatacctggacaggaaaggcgcggagctaataatccctgcgaaagtttctgttgaaactatccagcgtgtccaggaactggctattactgtttttaaaaccctttgctgcgagggccttgcaagggtggactttttccttaaaaaagacggcaatgtcattgttaatgagatcaacacaatgcctggctttacaaaaataagtatgtacccaaaattgtgggaagcttcgggcatatcttacactcaactgatcgataagctgattagctttgccctggagcgttttgaaaaagaaaagcaattgaagacaagtctgtaa

SEQ ID NO: 12322 - protein, 225 aa, Unknown
  Obtained from environmental sample
  DOMAIN (2)...(207): RimK-like ATP-grasp domain
  misc_feature (1)..(225): Xaa is any amino acid
MDKDVMKRLLRDAGIPIGKFRVLCADDDVPSYEEVSSELGTPLFVKPANMGSSVGVSKVKKQSQYFPALRDAFEYDTKAVIEEFIPGRELECSVLGGSEIMASIPGEVKSRHEFYSYNAKYLDRKGAELIIPAKVSVETIQRVQELAITVFKTLCCEGLARVDFFLKKDGNVIVNEINTMPGFTKISMYPKLWEASGISYTQLIDKLISFALERFEKEKQLKTSL

SEQ ID NO: 12323 - DNA, 519 bp, Unknown
  Obtained from environmental sample
  misc_feature (1)..(519): n is a, c, g, or t
ttgaaagaaatcggcggcgcgaaggacggctatcgcgataacacggtggaagttcttttgccgatggcgcattattttttcccaaaggcgaatttactgtggctgcgtcttcccgccgagatagattcttttgaaaacggaaagaccctgtcgcgaatagcggcgaaactaaaccgtaaaatagcggtcttcggttccacggatttaacccactacggccgtaattacggcttttcgccgcagggtagcggagaagcggcccttcgctgggtttgcgaagtaaacgacgcggcctttataaaggcggtggaatcaggcgacagcaaggaagttttgcgccgcgccggggaggattcttcttcatgctctgttggcgcggtgttgggagcgatgggttttgccgaggcggaaggtcttaaaaaagcgcggcttttagcgtatgccacaagcgccgatgtggatataagcgaagttcccgattcatttgtggggtatgcggcgttcgcgtttgatgtttga

SEQ ID NO: 12324 - protein, 172 aa, Unknown
  Obtained from environmental sample
  misc_feature (1)..(172): Xaa is any amino acid
MKEIGGAKDGYRDNTVEVLLPMAHYFFPKANLLWLRLPAEIDSFENGKTLSRIAAKLNRKIAVFGSTDLTHYGRNYGFSPQGSGEAALRWVCEVNDAAFIKAVESGDSKEVLRRAGEDSSSCSVGAVLGAMGFAEAEGLKKARLLAYATSADVDISEVPDSFVGYAAFAFDV

SEQ ID NO: 12325 - DNA, 813 bp, Unknown
  Obtained from environmental sample
  misc_feature (1)..(813): n is a, c, g, or t
gtgttagcaagtcccgccacccggtttgggaaggttgctaacgtgttagcaagttccgccaatcagtttgggaaggttgctaacgtgttagcaagtcccgccaatcggtttgggaaagttgctaacgtgttagcaagtcccgccaatcggtttgggaaggtttccgcaactgcggaaagtcccgccaatcggtttgggaaggttgctaacgtgttagcaagtcccgccaatcggtttgggaaggctgctaacgtgttagcaagtcccgccaatcggtttgggaaagttgctaacgtgttagcaagtcccgccaatcggtttgggaaggctgctaacgtgttagcaagtcccgccaatcggtttgctaccatattggtggacccaaggggactcgaacccctgacctacgcattgcgaacgcgtcgcgctaccaactgcgccatgagcccatggacaaaaacagaggactgtttttatacacaaattactttttcacccctaaatcccctaaaggggactttggttatggcgaaccgaccgtttgcattgggaaagtcccctttaggggatttaggggtgaaagactatcgaactcttatccatggaatttacctcatccgcaacgttgcaaagatagcgatttatacacaaatcaacaattataaagcaaaaggacgtttccaaataacggaatccgagattatggaaacatcctttttttataaaaagaaagatttatttaacaatcgaaacttttgttctgtttacagaacttcctgttttcacttctacaatgtaaacacccggatttaa

SEQ ID NO: 12326 - protein, 270 aa, Unknown
  Obtained from environmental sample
  misc_feature (1)..(270): Xaa is any amino acid
MLASPATRFGKVANVLASSANQFGKVANVLASPANRFGKVANVLASPANRFGKVSATAESPANRFGKVANVLASPANRFGKAANVLASPANRFGKVANVLASPANRFGKAANVLASPANRFATILVDPRGLEPLTYALRTRRATNCAMSPWTKTEDCFYTQITFSPLNPLKGTLVMANRPFALGKSPLGDLGVKDYRTLIHGIYLIRNVAKIAIYTQINNYKAKGRFQITESEIMETSFFYKKKDLFNNRNFCSVYRTSCFHFYNVNTRI

SEQ ID NO: 12327 - DNA, 309 bp, Unknown
  Obtained from environmental sample
  misc_feature (1)..(309): n is a, c, g, or t
atggtagcaaaccgattggcgggacttgctaacacgttagcagccttcccaaaccgattggcgggacttgctaacacgttagcaactttcccaaaccgattggcgggacttgctaacacgttagcagccttcccaaaccgattggcgggacttgctaacacgttagcaaccttcccaaaccgattggcgggactttccgcagttgcggaaaccttcccaaaccgattggcgggacttgctaacacgttagcaactttcccaaaccgattggcgggacttgctaacacgttagcaaccttcccaaactga

SEQ ID NO: 12328 - protein, 102 aa, Unknown
  Obtained from environmental sample
  SIGNAL (1)...(21)
  misc_feature (1)..(102): Xaa is any amino acid
MVANRLAGLANTLAAFPNRLAGLANTLATFPNRLAGLANTLAAFPNRLAGLANTLATFPNRLAGLSAVAETFPNRLAGLANTLATFPNRLAGLANTLATFPN

SEQ ID NO: 12329 - DNA, 822 bp, Unknown
  Obtained from environmental sample
  misc_feature (1)..(822): n is a, c, g, or t
ttggcaaagaaccccctcattaaaccatacttaaaatgggccggaggcaaaaggcaattattgcctgagataatgaaatacctccctgaaaatattaataactatacctattatgaaccatttgtcggagccggagcggttttctttgaattgcagccccaaaaagccgttattaatgactgtaacggacagttaatccttacctatactattataaaagaaaacgtggaagaccttattacattgttaaaaaaacacagggaaaaagataataaagaatatttttataaaataagaaatatggatcgtgaccggacaaaatttaatacgttaaccgacatcgaaaaggccgctcgcctgatttttcttaataaaacctgttttaacggcttatatcgcgtaaatgcggagggactcttcaatgttccttatggcagatataaaaacccgtcaatatgcgaagatgttttattgcgtcaaatcaacggttatcttaattcaaatgaaataaacattttaaataatgatttcgaacacgcggtatcaacggcggataaaaaatcttttgtatattttgacccgccttaccacagtccggataaaaataattttaccggataccaggcaaacggttttgacgataatgaacaggaacggctttgcaatgttatgagaaaaatgaccaagcggggtgttaaatgcctgttaaagcattctgacacggaatatatccgacagttatacgaccacgatatttttgatattatatcggtacaggcaaaaaaggtaattaattcaaatcctgccggaacgacgccctga

SEQ ID NO: 12330 - protein, 273 aa, Unknown
  Obtained from environmental sample
  DOMAIN (13)...(264): D12 class N6 adenine-specific DNA methyltransferase
  misc_feature (1)..(273): Xaa is any amino acid
MAKNPLIKPYLKWAGGKRQLLPEIMKYLPENINNYTYYEPFVGAGAVFFELQPQKAVINDCNGQLILTYTIIKENVEDLITLLKKHREKDNKEYFYKIRNMDRDRTKFNTLTDIEKAARLIFLNKTCFNGLYRVNAEGLFNVPYGRYKNPSICEDVLLRQINGYLNSNEINILNNDFEHAVSTADKKSFVYFDPPYHSPDKNNFTGYQANGFDDNEQERLCNVMRKMTKRGVKCLLKHSDTEYIRQLYDHDIFDIISVQAKKVINSNPAGTTP

SEQ ID NO: 12331 - DNA, 456 bp, Unknown
  Obtained from environmental sample
  misc_feature (1)..(456): n is a, c, g, or t
atgatggatatcggtcttatccaccggagagaatacgagctagaaaacgaccgatccgtaccgattgttatcgccgaggcgcccggacgcattcattatctgggtgaacatggggagccaaaggcaggattatttctatcttccgcaatagaccggtatatgagggtggcggttagcggacgaaaagacaattcccttcgttttttcgcgtcggatctgggcgaaaggaagcgtaccacccttgcaaacctganatataagcgggaagatcgttgggcaaactacataaaggttgcgattcacatattcgcggggttgggttatcccgtanagggtcttaactttaccctggccggcgatgttccccagcatgtggggctcgcctcgtcttcggccatagaagcgggcgcgacggttgccctgaaaggattttttaaagccaatatttcccgataa

SEQ ID NO: 12332 - protein, 151 aa, Unknown
  Obtained from environmental sample
  misc_feature (1)..(151): Xaa is any amino acid
MMDIGLIHRREYELENDRSVPIVIAEAPGRIHYLGEHGEPKAGLFLSSAIDRYMRVAVSGRKDNSLRFFASDLGERKRTTLANLXYKREDRWANYIKVAIHIFAGLGYPVXGLNFTLAGDVPQHVGLASSSAIEAGATVALKGFFKANISR

SEQ ID NO: 12333 - DNA, 501 bp, Unknown
  Obtained from environmental sample
  misc_feature (1)..(501): n is a, c, g, or t
gtgccatatataattttcccgcagtacaaaaagaactttgtccgggagcgccggattacgcctctgtgtcaaaacgggaagccggccgggggtaggagaatggcggaaattacgggaatcagcggtcttcatggaaaaggttcttcggaaacaaaaggttcgcagaaacctgcggcccccaaaggcaaaggttcgcttcaggaggggataaggctctaccggctgaagcgttgggatatggccctggcggagttgctcagtataaacaccgaccaattcagtccggaagaaaacacggaatacgcctattatttgggcctgtcttacacaaaactggagcgttacgatgacgcccttttgtatcttgaacaggtggtgacaaccggtcaggatgcgttgcggagttaccagtgcaggatgacccttgcctatatttacgtgatcaccaaacgttccaaaatggcggaattcgagcttaagcgtcttctcggccgattctga

SEQ ID NO: 12334 - protein, 166 aa, Unknown
  Obtained from environmental sample
  misc_feature (1)..(166): Xaa is any amino acid
MPYIIFPQYKKNFVRERRITPLCQNGKPAGGRRMAEITGISGLHGKGSSETKGSQKPAAPKGKGSLQEGIRLYRLKRWDMALAELLSINTDQFSPEENTEYAYYLGLSYTKLERYDDALLYLEQVVTTGQDALRSYQCRMTLAYIYVITKRSKMAEFELKRLLGRF

SEQ ID NO: 12335 - DNA, 555 bp, Unknown
  Obtained from environmental sample
  misc_feature (1)..(555): n is a, c, g, or t
atgcgtaatcgtggtatgatgggacgcttccgaaaaaccggatatggtgtgtcgggatttaaccggggggcaaatttgggaaccgatattgtctattcgggaacagccgccgccgccaggcaggccgggttcatggcaattcccgcagtcgctctttccctggctgcctcggaagggtattgctgggacatggcggcttcctgggctgcggatcatctggaagaacttgccggtttttggcgggaaaatacctttgtgaacgttaatattcccaaccgtcccgaaggtccgctgggaatcattccggcctggcccgcgataaaaaactaccatgacaccctgacggttatgtccgccccggacggcaggcgtttctgtttcttaattaccggaaaggaaaccgcggtttacgaggccggttccgattgcgatgtagtgtccaggaatttcacgtcaatcagtgccatatataattttcccgcagtacaaaaagaactttgtccgggagcgccggattacgcctctgtgtcaaaacgggaagccggccgggggtag

SEQ ID NO: 12336 - protein, 184 aa, Unknown
  Obtained from environmental sample
  DOMAIN (1)...(116): Survival protein SurE
  misc_feature (1)..(184): Xaa is any amino acid
MRNRGMMGRFRKTGYGVSGFNRGANLGTDIVYSGTAAAARQAGFMAIPAVALSLAASEGYCWDMAASWAADHLEELAGFWRENTFVNVNIPNRPEGPLGIIPAWPAIKNYHDTLTVMSAPDGRRFCFLITGKETAVYEAGSDCDVVSRNFTSISAIYNFPAVQKELCPGAPDYASVSKREAGRG

SEQ ID NO: 12337 - DNA, 321 bp, Unknown
  Obtained from environmental sample
  misc_feature (1)..(321): n is a, c, g, or t
atgcgggaagtccgccctgcgtccctgattgtcggtaagagtggcgtaatccataatttgcagaagtatattgaagatatcgctgtgggctttttcaatttcatcgagcaggactacggcgtgcggctgtntgcgaaccgcatcggtaagctgaccgccgtcttcgtagccgacatagccgggcgaagaaccgataaggcgcgagattgtatatttctcttggtactcgctcatgtcaaaacggagcatggaaatgcccaatgtttccgccaactgacgagccaactctgtctttcctacgcctgtgggtccgacaaataa

SEQ ID NO: 12338 - protein, 106 aa, Unknown
  Obtained from environmental sample
  misc_feature (1)..(106): Xaa is any amino acid
MREVRPASLIVGKSGVIHNLQKYIEDIAVGFFNFIEQDYGVRLXANRIGKLTAVFVADIAGRRTDKARDCIFLLVLAHVKTEHGNAQCFRQLTSQLCLSYACGSDK

SEQ ID NO: 12339 - DNA, 672 bp, Unknown
  Obtained from environmental sample
  misc_feature (1)..(672): n is a, c, g, or t
ttgaacgcgctgggagccgcaaacatcgccgctgttgcaaacaacagcgctatttccaatagcgacgggattcgggctgattcatatttccaccgattatgttttgacggaaacgggaaccgtccctaccgcgaagacgacgcaacggcgccaacaggcgtttacggactgacaaaaagagacggggaaattgtggttcttgaaaaaaacccgcgctcgtacataatccgtaccgcgtggttatacggcaagcatggcaataattttgtacataccatgctaaggcttatgaacgagcggaacgaagttaaagttgtgaacgaccagcgcggcagtcccacatggacttttgatctggcttccgcgatattaacgattattaatacagcagattccggcaaagacattccctttggcatttaccactttacaaatgagggaaacataacctggtttgactttgccaaagaaatttataagcagggaagagagtatggcaggattaccaaagactgcgccgttaacccctgcacaagtgttgaatatccggcaaaggtcaaacgcccagcatattcggttctggacaaaagcaagataaaaaccgcgcttggaattaatatccccgcgtgggatgaaagtttgaaagagtttattaaaaagtgcgcaaattaa

SEQ ID NO: 12340 - protein, 223 aa, Unknown
  Obtained from environmental sample
  DOMAIN (3)...(223): RmlD substrate binding domain
  misc_feature (1)..(223): Xaa is any amino acid
MNALGAANIAAVANNSAISNSDGIRADSYFHRLCFDGNGNRPYREDDATAPTGVYGLTKRDGEIVVLEKNPRSYIIRTAWLYGKHGNNFVHTMLRLMNERNEVKVVNDQRGSPTWTFDLASAILTIINTADSGKDIPFGIYHFTNEGNITWFDFAKEIYKQGREYGRITKDCAVNPCTSVEYPAKVKRPAYSVLDKSKIKTALGINIPAWDESLKEFIKKCAN

SEQ ID NO: 12341 - DNA, 660 bp, Unknown
  Obtained from environmental sample
  misc_feature (1)..(660): n is a, c, g, or t
atgcgttttgaatacaaggtacaggaaagcccgcgcggactggccgacgcgtttattttaggcgcggattttatcggagctgctccatccgcccttgtgttaggcgacaatgttttttacggcagaggcttcagccaaaccctgcaaaacaccgccaaacagattaatgaaaaaggcggcggcgcgattttcggctattatgtaaaagatccggcgtcttacggcgtcgttgaatttaacgcgcagggcaaggcgctttctattgaggagaagcccgcaagtccaaaatcccattacgcggtaccgggtctttatttttacgataacgaagttgtacagattgcgaaaaacatcaagccgagcgcccgcggcgagattgaaattaccgaggtaaacaacgcctaccttaataaaggccgcctttccgttgaagttcttggccggggcatggcgtggctggataccggaacctacgacgggcttttggaagcggcgaattttattgaaacaatacaaaaacgccagggaatgtatgtttcctgcattgaggaaattgcgtataacaacggttggatttcgcgggacgacttgttaaagctggccggcgaatacaaaaccgaatacggtaattacctaaaatacatatcggaggaaagataa

SEQ ID NO: 12342 - protein, 219 aa, Unknown
  Obtained from environmental sample
  DOMAIN (1)...(171): Nucleotidyl transferase
  misc_feature (1)..(219): Xaa is any amino acid
MRFEYKVQESPRGLADAFILGADFIGAAPSALVLGDNVFYGRGFSQTLQNTAKQINEKGGGAIFGYYVKDPASYGVVEFNAQGKALSIEEKPASPKSHYAVPGLYFYDNEVVQIAKNIKPSARGEIEITEVNNAYLNKGRLSVEVLGRGMAWLDTGTYDGLLEAANFIETIQKRQGMYVSCIEEIAYNNGWISRDDLLKLAGEYKTEYGNYLKYISEER

SEQ ID NO: 12343 - DNA, 801 bp, Unknown
  Obtained from environmental sample
  misc_feature (1)..(801): n is a, c, g, or t
ttgggcctgttggattacgaagaccttattgccggaaccgtgcggcttctcggccttgaccaatctgtactcgatgaataccggcggcgtttccgtcacatttttgttgatgagtaccaggacatcaacctgagccaatacgcgcttttgcggcttttgaccggtacggatacggaaccgcaatcggcaaaaccgcagacaacagaaccgcaggtagcggagctacaggcggtagaaccgccatccctctgggccattggtgatcccaaccaggcgatctacgggttccggggttcggacaagcgctttatcgaccgcttcatcattgattatcccgatgcccgctgttttgaacttacccggagtttccgctgcgccgacccgattatcagcgccgccggacagttgaccggctccggtctgcggggcatcgaaaagccggtggacctgttccgttttgagtatccaaccgccggggccgaggccgaaggtgtcagccgcgtaatatcccggctaattggcggagcaagtttctttgccaaagattcaagcgacagcgaccagcgcctttccgcttacgcggacagcgcggcccccgaagactgcgcagtcttgctccgcgccgctcccctggccggtccggtagccaccgcgttaaccaatcacggcatcccctttaagctgaccgggcagcagtgctggtgggatgaggaacctttcaaatcatttctggcaaggctgagggaaagcgcctcgcccgaagaagaatttcanaaagaaaaaggaaactccggcctntaa

SEQ ID NO: 12344 - protein, 266 aa, Unknown
  Obtained from environmental sample
  misc_feature (1)..(266): Xaa is any amino acid
MGLLDYEDLIAGTVRLLGLDQSVLDEYRRRFRHIFVDEYQDINLSQYALLRLLTGTDTEPQSAKPQTTEPQVAELQAVEPPSLWAIGDPNQAIYGFRGSDKRFIDRFIIDYPDARCFELTRSFRCADPIISAAGQLTGSGLRGIEKPVDLFRFEYPTAGAEAEGVSRVISRLIGGASFFAKDSSDSDQRLSAYADSAAPEDCAVLLRAAPLAGPVATALTNHGIPFKLTGQQCWWDEEPFKSFLARLRESASPEEEFXKEKGNSGL

SEQ ID NO: 12345 - DNA, 789 bp, Unknown
  Obtained from environmental sample
  misc_feature (1)..(789): n is a, c, g, or t
atggcgatggataccgagggttgggattcgcctgaaaccgggaaaattgaaaaaagattaaattccattaccacctcgctgaatctgacaaagtggggagtctcggccgcgtttaccgcttcccgtatggcgggctatgaatatattgccggtacgggctggcgcctgcgtacaggggaagagaattatattctgcgcccaaaggacttttctctttccgtatcggaaaatatagccatgaaagatatttttaaaaaaattactaataaccccaataatatagatttttccattaacataaaatccggtctgtttatcaatctgcagcaatatacaagttccaattttactttttcccttggatttacccttgggataaacaaatttcttaacttaagcattgccgccgagtcgggaaattcacgtatttaccagtactttcatgactggcccgtattccgcgacgcgcctattgaattgtcttccaatacccagacaaacctgttcctggacctttttgattctttccgttttgacaatgatgatttaaggaaaagatctggctttaagatgaaaagtttcagaataaccgcaacccaccatttgggcgactggaacgccatacttgactggtcaatgacgccttaccggacaacaggcattccctcaaagtttgaaattaacaacgaaatagccttcctgatccaatggatacccgtcaacgagataaagagcgatatttcatataacaaacgcaattcgcctgagtgggtgattaaaggactgtaa

SEQ ID NO: 12346 - protein, 262 aa, Unknown
  Obtained from environmental sample
  misc_feature (1)..(262): Xaa is any amino acid
MAMDTEGWDSPETGKIEKRLNSITTSLNLTKWGVSAAFTASRMAGYEYIAGTGWRLRTGEENYILRPKDFSLSVSENIAMKDIFKKITNNPNNIDFSINIKSGLFINLQQYTSSNFTFSLGFTLGINKFLNLSIAAESGNSRIYQYFHDWPVFRDAPIELSSNTQTNLFLDLFDSFRFDNDDLRKRSGFKMKSFRITATHHLGDWNAILDWSMTPYRTTGIPSKFEINNEIAFLIQWIPVNEIKSDISYNKRNSPEWVIKGL

SEQ ID NO: 12347 - DNA, 846 bp, Unknown
  Obtained from environmental sample
  misc_feature (1)..(846): n is a, c, g, or t
ttgatggccgagcggctgaacgatccggtggtgcggaaggccattaacctgtctctggattatcccaccatggcgaataacgcggccagcggttattccgccgccgttgttccttctttcatgatccctattccctcggagcaggcgctggttgactgggatcaactgaagccctaccagtggagcgacaaccgggccgaccgtattgcccaagccaacagagagttagatgcggcgggctgggtccgcggcgcggacggcgtccgggcgaaaggcggggttcggcttgcttttacggcaatatgccccacaggctggtcggatttccaggctacccttgaagttgtcgcccagtccacaaaggacgtagggatttcagtcgttaccgagttccccacatcgcagacagtaacaacgagaagggaagagggggattttgacataaacctcaacaataccggcagtagcggtactggcctctacagcccttggggcaggtggaaccaggcgatgtcctcaaatgaaatacctcctgtcggtacgaggaacagtgtcgggaactggggccgttgggaaaacacagagttcaaccggattctcgaacagctttcccgtgaaacggatgcggcaaagaagaaggagatgtacacccggcttaacataatcttcctgcaggaaaacccggtaggggtcgcgtggtacaggccgcagaatttccatacggtcaatacgacagtttggacaggcttcccgaggctcggcgacggttccaacattccgccggatctttgctccgaaggatacggattcatggctatctttaatctcaaaccaaaggcaaagtaa

SEQ ID NO: 12348 - protein, 281 aa, Unknown
  Obtained from environmental sample
  misc_feature (1)..(281): Xaa is any amino acid
MMAERLNDPVVRKAINLSLDYPTMANNAASGYSAAVVPSFMIPIPSEQALVDWDQLKPYQWSDNRADRIAQANRELDAAGWVRGADGVRAKGGVRLAFTAICPTGWSDFQATLEVVAQSTKDVGISVVTEFPTSQTVTTRREEGDFDINLNNTGSSGTGLYSPWGRWNQAMSSNEIPPVGTRNSVGNWGRWENTEFNRILEQLSRETDAAKKKEMYTRLNIIFLQENPVGVAWYRPQNFHTVNTTVWTGFPRLGDGSNIPPDLCSEGYGFMAIFNLKPKAK

SEQ ID NO: 12349 - DNA, 558 bp, Unknown
  Obtained from environmental sample
  misc_feature (1)..(558): n is a, c, g, or t
atgggccttgtatccggatatatgggaggaaatgttgataacgtcctgcgtcccatcgtcaatatgtannntgtcattccttccatcgtgattcttattctgatatccgtcagcttagaaacccgcagctttattaccatcgccttcatcattggtattacgtcctggccctggaccgcaaggtcggtacgcgcccaaactacgagtctccgtaatcgggaccatgtgaatctttccaagctttctggccactccatgcccaggatcattgtaaaggacatactcccctatgtggcttcttatgttctaatggctttcattttgcagatggcttcgggaattctggcggaggcgagcctttccatgctgggtctgggccctcacaatgtggcgagccttggcctcatgatgtcatgggccatgaatttcaacgctcttgccaacggcgcgtggtgggcctttctgccggtgatcgcggtgatcgccctgattacattctccctgaaccttatcaattccggactggatcaggtattcaatccccagataaggagctga

SEQ ID NO: 12350 - protein, 185 aa, Unknown
  Obtained from environmental sample
  DOMAIN (1)...(185): Binding-protein-dependent transport system inner membrane component
  misc_feature (1)..(185): Xaa is any amino acid
MGLVSGYMGGNVDNVLRPIVNMXXVIPSIVILILISVSLETRSFITIAFIIGITSWPWTARSVRAQTTSLRNRDHVNLSKLSGHSMPRIIVKDILPYVASYVLMAFILQMASGILAEASLSMLGLGPHNVASLGLMMSWAMNFNALANGAWWAFLPVIAVIALITFSLNLINSGLDQVFNPQIRS

SEQ ID NO: 12351 - DNA, 798 bp, Unknown
  Obtained from environmental sample
  misc_feature (1)..(798): n is a, c, g, or t
ttgctcaagtttctggaattaacaggaatatttttactttttttcagcgcggccggcccttcaatgaagaccgcggaaattgtctggctgaaccgcggcgcggatattatttttatactggatgtcagtccaagcatggcggcaattgacatggacggaaaaaaccgcttcgacatcggcaagtcattgcttgtccaattcgcgcaaaagcgtcccacagacagcatagggctggtcgcattcggcgaagacgccgcgctgcttaccccgccgacttcagacaggtacgcgcttgaattgcgtcttgaacagcttcgcataggtgagttgggagacggcaccgctgtcggcatgggaatcgcaatcgccgcgtatcaccttgataaatccgccgccaggcgaaagatcgcggttttaattacagacggagaaaacaacgccggttcaattcatcctgaaacagcggcggatttgttacgtgaacttggcatttcattctgggttatcgccgtaggctcaatgggagaagtgccgatagattatgtcgatccgtacacaaaaatacggcggaaaggcatttttgattcccgttatgacattgaaagcctaagacgcctgtgcgcagcgggaggcggcacttttttaaccgccgtgaatgcggacgctttcgccgccgctttttcgcagttagacgactctgaaataacagtacagaggtcgcgcgtcgtaaaccgcatgacttccgtatcttttcaatttttacttgccgccgtcattttattgctgcttgaaaaataa

SEQ ID NO: 12352 - protein, 265 aa, Unknown
  Obtained from environmental sample
  SIGNAL (1)...(23)
  DOMAIN (35)...(230): von Willebrand factor type A domain
  misc_feature (1)..(265): Xaa is any amino acid
MLKFLELTGIFLLFFSAAGPSMKTAEIVWLNRGADIIFILDVSPSMAAIDMDGKNRFDIGKSLLVQFAQKRPTDSIGLVAFGEDAALLTPPTSDRYALELRLEQLRIGELGDGTAVGMGIAIAAYHLDKSAARRKIAVLITDGENNAGSIHPETAADLLRELGISFWVIAVGSMGEVPIDYVDPYTKIRRKGIFDSRYDIESLRRLCAAGGGTFLTAVNADAFAAAFSQLDDSEITVQRSRVVNRMTSVSFQFLLAAVILLLLEK

SEQ ID NO: 12353 - DNA, 999 bp, Unknown
  Obtained from environmental sample
  misc_feature (1)..(999): n is a, c, g, or t
atggccgagaggaatgtatctgcattatataggaaaagcgaaggctttgacgagttcttcggtaaaaacaccgaggacaggcagcgcgttacacaagattttaattttcaggatctttcgcttgaagatctttccattatcctgatgaaaaaactcagggagcgcggactgctctttgatcccgcgttgaaaaagaattttttagcttacatccgggagcgtaaaagcgatccgtcatgcgaatataaaaacggctggcttattgaaaaagacgttattccctcgattgacaagaaccagcaggccagattggaacgtcttgacggcgcgtctgttacggacgaagactttaagaccatcaaggccgaagacctgccgcttaagaacaagcccaagacagttgacgaaattctcgctgaacttgacgcgatgatagggcttgcgaaagttaagaacgcgatacgcgagatagcccagactatcaaaatgcaaaaagaacttgaagaaaaaggcggagctaaagcgcagcgtcttgccatacaccttgtgttttacggaaaccccggcacgggcaaaaccacagtcgcccgcaaactcggagccttgtttcaggcaatggaactccttccaagcgatcatattatcgaaactgaccgcaccggcctcgtcgcgggctatatcgggcagactgcctctatggtaaaggacaagtgcgacaaggctatgggcggcatcctctttatcgacgaggcttatactctaagctctggcggcggcggtgatttcggcaaagaggcgatagacgcgcttcttanacgtatggaagacgaccggggcaattttgtggtaatcgccgcangatataaaaacgaaatgcagaattttatccagtcgaatccgggccttaaaagccgttttacccatgagcttgaacttganngatatagccctgatgagttaaacgcatatttatgtccatggcaaagacaggggcaataa

SEQ ID NO: 12354 - protein, 332 aa, Unknown
  Obtained from environmental sample
  DOMAIN (167)...(320): Magnesium chelatase, subunit ChlI
  misc_feature (1)..(332): Xaa is any amino acid
MAERNVSALYRKSEGFDEFFGKNTEDRQRVTQDFNFQDLSLEDLSIILMKKLRERGLLFDPALKKNFLAYIRERKSDPSCEYKNGWLIEKDVIPSIDKNQQARLERLDGASVTDEDFKTIKAEDLPLKNKPKTVDEILAELDAMIGLAKVKNAIREIAQTIKMQKELEEKGGAKAQRLAIHLVFYGNPGTGKTTVARKLGALFQAMELLPSDHIIETDRTGLVAGYIGQTASMVKDKCDKAMGGILFIDEAYTLSSGGGGDFGKEAIDALLXRMEDDRGNFVVIAAXYKNEMQNFIQSNPGLKSRFTHELELXXYSPDELNAYLCPWQRQGQ

SEQ ID NO: 12355 - DNA, 813 bp, Unknown
  Obtained from environmental sample
  misc_feature (1)..(813): n is a, c, g, or t
gtgatggcgagggccgaggcaaacgaaaatgttgagatgatagcagcaggtttgctggattcagaagctataaaaaaagggttggaaggctgcgaggcttgcgttcatattgcgcttggctggggggatacccctctctctatgctcgcaaacgacaccgccgctaccgttcagctcttggaatttgctgcacagagcggctgcaaaaaattcatatacacatccagcacggcggcttttggcaaaattcgcaacaacgcaagcgaaaatatggtttgcatgccacaagatttatatggctcaacaaaactcgctggcgaggcttatgttctgggattttcaaaaggctatggggaaaattttccgagcgttgaaatgaaacgcaatgtaattcgccctggttatacttttgggcatttggctttcccggatggtatagcccaacccgaccgcaggttttttaacatagctaaagcggtgaaagaaaacctgactgtgcgtttaacaaaacacgatggcactcagtttatacacgcttcccagttggcaaagctctacgccgctgttttgaaaagcgaccttaatgaggaggtattctttgggcttggcacggaatggataagctggaagagcatagcggagcgcgctatagcgatgcgccctgggacaaaagccgttattgaagaagaagacaaaggctggggcaaggaaccctgcctattctctttggaaaaaatggaaaaacattttgggttaaaattcaatggtaacgattttataggcgagcatataaagtggaatttacagcaataa

SEQ ID NO: 12356 - protein, 270 aa, Unknown
  Obtained from environmental sample
  DOMAIN (2)...(201): NAD dependent epimerase/dehydratase family
  misc_feature (1)..(270): Xaa is any amino acid
MMARAEANENVEMIAAGLLDSEAIKKGLEGCEACVHIALGWGDTPLSMLANDTAATVQLLEFAAQSGCKKFIYTSSTAAFGKIRNNASENMVCMPQDLYGSTKLAGEAYVLGFSKGYGENFPSVEMKRNVIRPGYTFGHLAFPDGIAQPDRRFFNIAKAVKENLTVRLTKHDGTQFIHASQLAKLYAAVLKSDLNEEVFFGLGTEWISWKSIAERAIAMRPGTKAVIEEEDKGWGKEPCLFSLEKMEKHFGLKFNGNDFIGEHIKWNLQQ

SEQ ID NO: 12357 - DNA, 837 bp, Unknown
  Obtained from environmental sample
  misc_feature (1)..(837): n is a, c, g, or t
ttgattcaggggaaatttttggcacgcaaagggtcggaagtgagtgagtacagaatagaatccgggcttaactgtggggggcatgctttctcaagccaggggcagttgctcccaaccatattaaaggaaattcattcccagcgcgggcttttgcatcaattcagagagacagttgtaaatttttacaaatccaaaggttggaatacagatgctgcaagagaggcaccaccgccaaaggtaactgtgcagggcggcattggcaactatgcggaagatttgagaatgcgggaatattacggcatagacggtacaggctggggcagcccatttttgcttgtgccggaagtttctcccattgatgaagaaacaagggaacagctcgttaaagccacaccagaagacttgtatatgagcgatgcatctcctctggatataattttcaacaatttgcgcagctcaggctctgagatatggcataaaaaacaagcggaaaaaggaacgccaggcagcccgtgcagaaagggctttttgcagaacaacacggaatttagcgaaactcctgtttgcaaagcgagcctattttatcaagaacgcaaattgaaacagatagaagagagcgatgtaagcgaagagcgaaaagagacgatgcgaaaaagagttcatgcaaaacagtgcatttgcgaccatcttgggaacagcggcttgatttttttaggcgcagaaaaaccggaaaatgctccgcaggcaatttgcccaggccccaacgtggcttggtttaatcgccgttatgaattgcaagagatgatagaccatatctacgggcgtagagcggattaa

SEQ ID NO: 12358 - protein, 278 aa, Unknown
  Obtained from environmental sample
  misc_feature (1)..(278): Xaa is any amino acid
MIQGKFLARKGSEVSEYRIESGLNCGGHAFSSQGQLLPTILKEIHSQRGLLHQFRETVVNFYKSKGWNTDAAREAPPPKVTVQGGIGNYAEDLRMREYYGIDGTGWGSPFLLVPEVSPIDEETREQLVKATPEDLYMSDASPLDIIFNNLRSSGSEIWHKKQAEKGTPGSPCRKGFLQNNTEFSETPVCKASLFYQERKLKQIEESDVSEERKETMRKRVHAKQCICDHLGNSGLIFLGAEKPENAPQAICPGPNVAWFNRRYELQEMIDHIYGRRAD

SEQ ID NO: 12359 - DNA, 798 bp, Unknown
  Obtained from environmental sample
  misc_feature (1)..(798): n is a, c, g, or t
atggacgccgtaagactcatgggttgcgtgattaagcagacagcggaaaagactgcgtcccgcgacggtatcggctgcgcgaagctcgtggtgttctgtaacgctcccgaggacaaccccttcatggcgggcgcttttcacggcgtcggcgagggggaaagctgccttaacgtgggggtatcaggcccgggcgtggttaaggccgcactggaaaacctgcgaggggcgagctttgacgaacttgccgacgcaattaaaaaaaccgccttcaaaataacccgcatgggacagcttgttggaatggaagccgccaaacggctaaacgtacctttcggcatattggatctttcccttgcgcctacccctgaggtaggtgattcggtcgcccgtatcctggaggagatgggtcttgaaactgcgggaactcacggcacaacggcggcccttgccatgctaaccgacatgataaaaaaaggcggcatcatggcatccacccatgtgggcggtttttccggggcttttatccccgtctccgaggacgaaggcatggtaaacgcggtgaggaaaggcgcgatcagccttgataaacttgaagcgatgacctcggtttgttctgtcggtctggacatgattgcactgcccggcgacacaagcgccgccactatctcggcgatcattgccgatgaaatggcgattggcatggtgaacacaagaccacagcagtgcggattattcctgtgccaggcaaaaaagcaggcgactgggcggaattcggcggcctcctgggaggcgctctga

SEQ ID NO: 12360 - protein, 265 aa, Unknown
  Obtained from environmental sample
  DOMAIN (1)...(264): Uncharacterized ACR (DUF711)
  misc_feature (1)..(265): Xaa is any amino acid
MDAVRLMGCVIKQTAEKTASRDGIGCAKLVVFCNAPEDNPFMAGAFHGVGEGESCLNVGVSGPGVVKAALENLRGASFDELADAIKKTAFKITRMGQLVGMEAAKRLNVPFGILDLSLAPTPEVGDSVARILEEMGLETAGTHGTTAALAMLTDMIKKGGIMASTHVGGFSGAFIPVSEDEGMVNAVRKGAISLDKLEAMTSVCSVGLDMIALPGDTSAATISAIIADEMAIGMVNTRPQQCGLFLCQAKKQATGRNSAASWEAL

SEQ ID NO: 12361 - DNA, 402 bp, Unknown
  Obtained from environmental sample
  misc_feature (1)..(402): n is a, c, g, or t
ttggcatgggcgttagaccgagggaacttaccggaaggcttgaatgtttacagtgacggctctatttcgggaacgccaagcaaggtgggaacgttcatgtttacagtgcttgctgtaaactgcgcgggaagcagcacaaagcagctaacccttaccattgccgcaagccctaacacatctgctgccaccactgccgtcgccaacccgctcaaggcgtggtcaagcaacggcacgctgcacgtaagcggcttaacggtaggcaagcagtggagcgtgtacagcgtttcaggtgcggtagtgtatcaaggcgtggcaggaagcgaggaggaggaagtgcagctacccatgcagggcgtgtacattgtggtgcaggggaagcatagcgtgaaggtggtgaattga

SEQ ID NO: 12362 - protein, 133 aa, Unknown
  Obtained from environmental sample
  misc_feature (1)..(133): Xaa is any amino acid
MAWALDRGNLPEGLNVYSDGSISGTPSKVGTFMFTVLAVNCAGSSTKQLTLTIAASPNTSAATTAVANPLKAWSSNGTLHVSGLTVGKQWSVYSVSGAVVYQGVAGSEEEEVQLPMQGVYIVVQGKHSVKVVN

SEQ ID NO: 12363 - DNA, 306 bp, Unknown
  Obtained from environmental sample
  misc_feature (1)..(306): n is a, c, g, or t
atgtctgttgagcaagtccgcgtttatttgaaccgctggggcaggggaaaagatgtcgttgagatggatctctccaccgccacggttgaactggcggcggcggcccttggggtgatacccgcaaggatcgcgaaaagcatttccctaagagattcaggcgacagcgccatgattgttgtcgccgccggggatgtgaaagttgacaaccgcaagtttcgcgatcgctttggctttaaacccagngatgctaagctccgaggaagcgctggagtttaccggccacgcaatcggactcggccgatctga

SEQ ID NO: 12364 - protein, 101 aa, Unknown
  Obtained from environmental sample
  misc_feature (1)..(101): Xaa is any amino acid
MSVEQVRVYLNRWGRGKDVVEMDLSTATVELAAAALGVIPARIAKSISLRDSGDSAMIVVAAGDVKVDNRKFRDRFGFKPXDAKLRGSAGVYRPRNRTRPI

SEQ ID NO: 12365 - DNA, 771 bp, Unknown
  Obtained from environmental sample
  misc_feature (1)..(771): n is a, c, g, or t
ttggaaaaattgcccgatagcatagataattttatttctttaaatgagttatatatgtacaataataagaacttaacatctttaccggacagtatcggcaatttacagaatcttgtcaaaataagtattgatcattgcgctattgaagaattacccgatagtataggtaatttattgtccttaaaggaattatctctgtacggtaattataatttaacaacattacctgacagcattggaaatctgaaaaacctggcggaattctatcttcgattttcacccataaaaacattgccagactgtattgggtatttacaaaatctgaccaaactttcattgcttggaacagaaatagaaaaattacccgatagcattggaagccttggtaatttggataaactttctctggagaactgtaaaaaaataaaataccttcccgacagtattggtaacctaaaaaaccttaccatgcttgatctttgcggttcgggtatagataaactgcaggatacaatagcgggttgttcttcccttgaatgtcttgatatacgcaaaacaaatattaagtcattccctgattttatctcttcaattaaaatactaaaaagaaaaatagaagtaataccgaaaaagcgcagtatttcttatctttctttctgtaattattattacattctggcagatacaataataatgttaagcgctaaagcaaggcgcgaaggcctcctggcgcttgaagaagaatatacactgtatcagacggctttttaa

SEQ ID NO: 12366 - protein, 256 aa, Unknown
  Obtained from environmental sample
  misc_feature (1)..(256): Xaa is any amino acid
MEKLPDSIDNFISLNELYMYNNKNLTSLPDSIGNLQNLVKISIDHCAIEELPDSIGNLLSLKELSLYGNYNLTTLPDSIGNLKNLAEFYLRFSPIKTLPDCIGYLQNLTKLSLLGTEIEKLPDSIGSLGNLDKLSLENCKKIKYLPDSIGNLKNLTMLDLCGSGIDKLQDTIAGCSSLECLDIRKTNIKSFPDFISSIKILKRKIEVIPKKRSISYLSFCNYYYILADTIIMLSAKARREGLLALEEEYTLYQTAF

SEQ ID NO: 12367 - DNA, 309 bp, Unknown
  Obtained from environmental sample
  misc_feature (1)..(309): n is a, c, g, or t
gtgaaagtaatttcgattcccggtcattcagccgattccgtgttttaccagattgaaagtctgctttttaccggtgatgtgctgacaacgggcatggtaggttctactgccagcgcctacagcgcggcaactcaaattaacaaactgcgaagccgcatcctgtcgctgcccggcgactatacagtccttcccggccacggccccccttcaactttagaggcggaacggcgctataatgtgagtattaccaattacaatgaaatacgaacccgcaaaccttctttcaggctcaacattttaaaagattaa

SEQ ID NO: 12368 - protein, 102 aa, Unknown
  Obtained from environmental sample
  misc_feature (1)..(102): Xaa is any amino acid
MKVISIPGHSADSVFYQIESLLFTGDVLTTGMVGSTASAYSAATQINKLRSRILSLPGDYTVLPGHGPPSTLEAERRYNVSITNYNEIRTRKPSFRLNILKD

SEQ ID NO: 12369 - DNA, 747 bp, Unknown
  Obtained from environmental sample
  misc_feature (1)..(747): n is a, c, g, or t
atgatataccttacgggttttcacgctattgagaaaagaataaaatcaggacggccatgcggcccgcttctggttgcaaagcccggcccaagggcccgcacactgtcagtcctggcaaatgaaaaaaaaatacgcacagagagggtcggtactgcagaccttgatcacctggctccgcttcacaggggaatagcccttgccgttgacgaaggcggtttcagcgcggaaatttcccttgataaatttcttgaagacctcgaaaatgaaagcgaaaaaggcgatgttctggttattatattggacgagataactgaccctcacaattacggcgctatactgcgctcctgcgatcagttcggcgttgatcttgtgataaccagacacaggcgcatagcaaaacacgcggaaataatatctcaaacttcagcgggggcatcggcctgggttccgcaggcggagaccgcaaacttgccgcgggccgtggaagaactgaaagaagcgggtttttggatatacggggccgatatggaaggagaaagcctttacagccgtaacctccgcggcaaaaccaccattattctgggcggcgaaggctccggcatctcacggcttcttaaagaaaattgcgacgccatgatctctattccttctttgggccgcattgattccctcaacgtgtccgtggctgcgggggtgcttttttacgaagtaatgcggcaaagaagctgcgaaccgcagcagaagtaa

SEQ ID NO: 12370 - protein, 248 aa, Unknown
  Obtained from environmental sample
  DOMAIN (3)...(74): RNA 2'-O ribose methyltransferase substrate binding
  misc_feature (1)..(248): Xaa is any amino acid
MIYLTGFHAIEKRIKSGRPCGPLLVAKPGPRARTLSVLANEKKIRTERVGTADLDHLAPLHRGIALAVDEGGFSAEISLDKFLEDLENESEKGDVLVIILDEITDPHNYGAILRSCDQFGVDLVITRHRRIAKHAEIISQTSAGASAWVPQAETANLPRAVEELKEAGFWIYGADMEGESLYSRNLRGKTTIILGGEGSGISRLLKENCDAMISIPSLGRIDSLNVSVAAGVLFYEVMRQRSCEPQQK

SEQ ID NO: 12371 - DNA, 525 bp, Unknown
  Obtained from environmental sample
  misc_feature (1)..(525): n is a, c, g, or t
gtgcacggcaacgcgcaggacgcggttggcgatacaatgaacgacggaaaaataattattcacggcaacgccggcgatgcgctcggctatgccatgcggggcggctgtatttttgttaagggagatgcgggatacagaacgggtattcacatgaaggaatacaaagaaaaaaaaccggtaatagtcataggcggcaaagcgggcagttttttgggcgaatatcttgccggcgggctgattgtggtgctgggtatagattcagaggatgttccggtgtggtattttaccggaaccggcatgcacggcggaaaaatctttataaggacagataaagaactttcaggattaccggcacaggtttccgaaaaagtagcggacaatgacgaacttcaggaaattgcgccttatgtttccgagtttgcgggtttttttggcatggacgcgaagaagcttatgaaagaccggtattatgtattaaagcctaacgcgaaaaacccgtataagcaactctacaccgcaaactag

SEQ ID NO: 12372 - protein, 174 aa, Unknown
  Obtained from environmental sample
  DOMAIN (1)...(146): GXGXG motif
  misc_feature (1)..(174): Xaa is any amino acid
MHGNAQDAVGDTMNDGKIIIHGNAGDALGYAMRGGCIFVKGDAGYRTGIHMKEYKEKKPVIVIGGKAGSFLGEYLAGGLIVVLGIDSEDVPVWYFTGTGMHGGKIFIRTDKELSGLPAQVSEKVADNDELQEIAPYVSEFAGFFGMDAKKLMKDRYYVLKPNAKNPYKQLYTAN

SEQ ID NO: 12373 - DNA, 873 bp, Unknown
  Obtained from environmental sample
  misc_feature (1)..(873): n is a, c, g, or t
atgggctccatgctcaaagggcacaagctgtccgatctattgtgcctgagcaatcctgaattaatcgcttctgtacatgatgcctaccttgaggcgggagcggatattatcagcacatgcagctttaacgctaacgccgtttcgttggcggaatatggtatggccgataaagcttacgaaattagcagggcagcggggactattgccaggcagtcggcggacaaattttcagcctccggaaagaggcgttttgccgccgggagtatggggccgatgacaaaaagcgcgagcatcgcttcggacttaagcgatcccggcaagcgcagcattagctgggacgagcttgaggcagcctactacgacaatgcctgcgggcttctggacggcggagtcgacattctgcttttggaaacgattttcgataccctcaacgcaaaggccgccattgccgcaataatccggctcagggaagaacgaaaggtttgtatccccatgataatctcggcgacagtttccggcgcagggggccggcttttgtcaggccagaccatcgaagctttcgcggtttctgtatcccacgcggagcctttagctcttgggttgaactgttcgtttggggcggagaatatccttcctcaccttgccaggctttcggcttttacgcaattcccggtgatctgctatcctaacgcggggcttccggacagctctggtgcgtacagcgatggtccgaaagaaatggccggctttatgaaaacgtttttcgagcaacgcctggtaaatattgccggaggttgttgtgggactaccccggctcacattgccccgatagcggagctggcaaaaaactatactccaaagccgccttcctga

SEQ ID NO: 12374 - protein, 290 aa, Unknown
  Obtained from environmental sample
  DOMAIN (1)...(283): Homocysteine S-methyltransferase
  misc_feature (1)..(290): Xaa is any amino acid
MGSMLKGHKLSDLLCLSNPELIASVHDAYLEAGADIISTCSFNANAVSLAEYGMADKAYEISRAAGTIARQSADKFSASGKRRFAAGSMGPMTKSASIASDLSDPGKRSISWDELEAAYYDNACGLLDGGVDILLLETIFDTLNAKAAIAAIIRLREERKVCIPMIISATVSGAGGRLLSGQTIEAFAVSVSHAEPLALGLNCSFGAENILPHLARLSAFTQFPVICYPNAGLPDSSGAYSDGPKEMAGFMKTFFEQRLVNIAGGCCGTTPAHIAPIAELAKNYTPKPPS

SEQ ID NO: 12375 - DNA, 588 bp, Unknown
  Obtained from environmental sample
  misc_feature (1)..(588): n is a, c, g, or t
atgaaaggcgctgacgttctcatcgccctttccacccccggcccggacacggtaaaacgggaatggatacgcagcatggcgaaaaaggcaattgttttcgcttgcgctaatccggtgcccgaaatctggccctacgcggcgaaggaagaaggggctttcattgtggcaactggccggggcgattttcctaatcaggttaataattcagtctgctttcctggcatacttaaaggcgcgcttttagttcgggcaaaaaaaataacagacggtatggcaattcgttgcgcccattcaatcgctgaattctccgaaaagcgcggaatcagtcccgacaacattatagcgaatatggacgaaaccgatgttttcgcccaggaagccgcggatgtggccgaacaggcaatctccgaaggagtggcaagggtcaaattatcccgggaagaagtatacagccggacaaaagcggatatagccaccgtccacgccattgtagaagatatgaagaagatgggctatattaaggagcctcccgttgaattaatggaagcggccctggcaaacgctattgaggcaattcgtaaaaagtaa

SEQ ID NO: 12376 - protein, 195 aa, Unknown
  Obtained from environmental sample
  DOMAIN (1)...(135): Malic enzyme, NAD binding domain
  misc_feature (1)..(195): Xaa is any amino acid
MKGADVLIALSTPGPDTVKREWIRSMAKKAIVFACANPVPEIWPYAAKEEGAFIVATGRGDFPNQVNNSVCFPGILKGALLVRAKKITDGMAIRCAHSIAEFSEKRGISPDNIIANMDETDVFAQEAADVAEQAISEGVARVKLSREEVYSRTKADIATVHAIVEDMKKMGYIKEPPVELMEAALANAIEAIRKK

SEQ ID NO: 12377 - DNA, 774 bp, Unknown
  Obtained from environmental sample
  misc_feature (1)..(774): n is a, c, g, or t
atggattggggcaggcggaacaattactttgacggcgaagaagacgagaaggcgttttatgacgaaacctgttacatgctggctcatcagtttgccgcgcctaatagtccgcagtggtttaacaccggcttgtacgccgtttacgggatcgacgggccggcgcaggggcatttttattttgatcctgaaaagaacgaagttgtaaaatccgagagcgcgtacaagcggccccagccgcacgcctgctttattctttccatagatgacgatctcgtgaacgagggcggtatcatggatttgatgacccgtgaggcaaggctcttcaagtacggctccgggacgggttccaatttttcgcgcattcgggggttgaacgaaaaactttcaggcggcggttattcgtcggggcttttgtcgtttttgaaagtgggagaccgctctgcatcggcgattaagtcgggggggactacccgcagggcggcgaagatggttacccttgatatcgatcatcccgacgttgagacttacatcaactggaaatcgggagaagaacacaaagtcgcctcaatggttaccggctcccttgtattgaagaagcatattgacgggattaaaaaagccctgacaggctcccgcggtcctgaagaagataaattcaacgccgaaaaaaaacatgagctggcggcggttctgcgcgccgcgttaggcgataaaatcccgcgtcgtatctttaccagcagcttcgccgtcttngagcaggcgatgagaaggtga

SEQ ID NO: 12378 - protein, 257 aa, Unknown
  Obtained from environmental sample
  misc_feature (1)..(257): Xaa is any amino acid
MDWGRRNNYFDGEEDEKAFYDETCYMLAHQFAAPNSPQWFNTGLYAVYGIDGPAQGHFYFDPEKNEVVKSESAYKRPQPHACFILSIDDDLVNEGGIMDLMTREARLFKYGSGTGSNFSRIRGLNEKLSGGGYSSGLLSFLKVGDRSASAIKSGGTTRRAAKMVTLDIDHPDVETYINWKSGEEHKVASMVTGSLVLKKHIDGIKKALTGSRGPEEDKFNAEKKHELAAVLRAALGDKIPRRIFTSSFAVXEQAMRR

SEQ ID NO: 12379 - DNA, 624 bp, Unknown
  Obtained from environmental sample
  misc_feature (1)..(624): n is a, c, g, or t
ttgtatatccgccgcaatggtgttttatgctgttttaggggcaaattagcaatgagcaggataaaactgatcctcggatctcatgcccatgtgccatacggctcgaataccgccgagtttgaaaatgtttacatgaaccttctgcggccttttgtcaccagcctgtacagataccccggtatccaggcggttctccattattcaggcgtactgctgcattgggttgagcgctcgcatcccgagttgttcatgctgattaatgatatgattgcccgcaaacaggcggaaatactcggaggcgggttttacgagcccatgctgccgattatacctttgcaggataaaatagggcagattgagatgttaaccacctacatccgtaaacagtttgggaagcggccccagggctgctggataccgggctttgcctgggagcagggcctggtaagcccccttgtaagctgcggcatgggttttacttttctcggcaagcgccagtttaccctggcgggcggcaatgacgccccctgcatctgcgaagaccagggaaagctcattaccgttttcccggtgtcccagtccattcaggaagacttaaccagaaagaatcttctccctatataa

SEQ ID NO: 12380 - protein, 207 aa, Unknown
  Obtained from environmental sample
  DOMAIN (24)...(205): Glycosyl hydrolase family 57
  misc_feature (1)..(207): Xaa is any amino acid
MYIRRNGVLCCFRGKLAMSRIKLILGSHAHVPYGSNTAEFENVYMNLLRPFVTSLYRYPGIQAVLHYSGVLLHWVERSHPELFMLINDMIARKQAEILGGGFYEPMLPIIPLQDKIGQIEMLTTYIRKQFGKRPQGCWIPGFAWEQGLVSPLVSCGMGFTFLGKRQFTLAGGNDAPCICEDQGKLITVFPVSQSIQEDLTRKNLLPI

SEQ ID NO: 12381 - DNA, 909 bp, Unknown
  Obtained from environmental sample
  misc_feature (1)..(909): n is a, c, g, or t
atggacagccgttacataggccgcgtcggctcaactgaaacagggcagttcgcttttgcgttaggaaaggaaaccggtgaaatagtgcctcaagtcagcacccaggttcagtcgataaatgaattctttagaaccgctaccccggcgtccaaagaggaggtaagccatcccaccaccgcgatgctcctggggaaagaaatcaatcagatcagactgatagttcccgttttaaatggtaaacgcactgaagtagtcggagtcgtaggcgctcaagtaaatctggatataatacagccccggattacgaccactatcaaagagttcgatgaaatttccgcgatgtctatttactccagcaacgggtttgttatggcgagctacgtccccgaacggatagggaaacagatggttgacgcggaagtacaattcggcagctatataaacgaagctttcgatgctgttaaagccgcgaaagaatttgcgtgctacagttgggctcctacgatgaaaacaaacatacaaatcgccgttgtccctgttactctggggcaatcgaacacaacctggtcaataatggccggtacagaagaatggtacataatgaaggatattaatccgatgattatgtttgccattattatcgcagcggtagcgatagtagtgtcggcgataattatattcgttgttctggacagaacaaccaagccaatcactgtggtagccaacaccttaaaaattgtagccgaaggcgattttacaaagagtgtcgaagtcaaatcgaaagacgaaataggcggacttgcccatgactttaattatacaatcggtaaaatcaaagacctggtgcttttgattaanaaacaagcgagcctgntgtcggacatcggcaatgaactgtcagtaatatga

SEQ ID NO: 12382 - protein, 302 aa, Unknown
  Obtained from environmental sample
  DOMAIN (211)...(280): HAMP domain
  misc_feature (1)..(302): Xaa is any amino acid
MDSRYIGRVGSTETGQFAFALGKETGEIVPQVSTQVQSINEFFRTATPASKEEVSHPTTAMLLGKEINQIRLIVPVLNGKRTEVVGVVGAQVNLDIIQPRITTTIKEFDEISAMSIYSSNGFVMASYVPERIGKQMVDAEVQFGSYINEAFDAVKAAKEFACYSWAPTMKTNIQIAVVPVTLGQSNTTWSIMAGTEEWYIMKDINPMIMFAIIIAAVAIVVSAIIIFVVLDRTTKPITVVANTLKIVAEGDFTKSVEVKSKDEIGGLAHDFNYTIGKIKDLVLLIXKQASLXSDIGNELSVI

SEQ ID NO: 12383 - DNA, 426 bp, Unknown
  Obtained from environmental sample
  misc_feature (1)..(426): n is a, c, g, or t
atggaaatcgcggaatttaaaaaaatagtattttcaaattaccaacaacatggaagaaaattcccctggcattacgcggaaccctggggcgtgatggtctcggagttcatgctgcagcaaacgcaggtcgagagggttatcccctattgggaaaactggctcaagctctggccgcagccaaaagcccttgcggaggccccgatggaaaccgccctgcgcgaatggtcgggccttggctacaaccgccgctgccgttaccttaaagaaagcgccgcgatcatagcgaacaagcatgacggcaaggtgccggaaacgccccaggctttgcttgagcttcccggcgtcggcccctacatgtccgccgccattgcctgttttgcgtataactatccggcggtctttatcgagacantcgtgccgatctga

SEQ ID NO: 12384 - protein, 141 aa, Unknown
  Obtained from environmental sample
  DOMAIN (97)...(126): Helix-hairpin-helix motif
  misc_feature (1)..(141): Xaa is any amino acid
MEIAEFKKIVFSNYQQHGRKFPWHYAEPWGVMVSEFMLQQTQVERVIPYWENWLKLWPQPKALAEAPMETALREWSGLGYNRRCRYLKESAAIIANKHDGKVPETPQALLELPGVGPYMSAAIACFAYNYPAVFIETXVPI

SEQ ID NO: 12385 - DNA, 498 bp, Unknown
  Obtained from environmental sample
  misc_feature (1)..(498): n is a, c, g, or t
atgagcggctgcggaaacacgacggtcagcaanatagtcgcggatcgcctgggcttaaaatttattaattttacctttcgcacgctggcgcaggagaaaggcattgattttaacaaagtgctggagcttgcggcaaaggacgattcatgggacagggaggtggacagccgtcaggtacagcttgcccgtgaaagcggaggctgcgtaatcggttcgcgcctcgcgatctggatgctggaggaagccgacctgaaggtgtacctccgggcgaagcctgaaaccagggccgcgcgaattgttaaacgcgagggaggcaatctcaaagaagttgccgcttttaccgccgaacgggacaagcatgataaccagcgttatatccgcatatacaatattgataactataaatatgatttcgccaatcttatcattgacgcggacaacattacgcctgacgagatagccgacaaaataattgaagccgctgaaaaaatcgtttaa

SEQ ID NO: 12386 - protein, 165 aa, Unknown
  Obtained from environmental sample
  DOMAIN (2)...(162): Shikimate kinase
  misc_feature (1)..(165): Xaa is any amino acid
MSGCGNTTVSXIVADRLGLKFINFTFRTLAQEKGIDFNKVLELAAKDDSWDREVDSRQVQLARESGGCVIGSRLAIWMLEEADLKVYLRAKPETRAARIVKREGGNLKEVAAFTAERDKHDNQRYIRIYNIDNYKYDFANLIIDADNITPDEIADKIIEAAEKIV

SEQ ID NO: 12387 - DNA, 591 bp, Unknown
  Obtained from environmental sample
  misc_feature (1)..(591): n is a, c, g, or t
gtggcgctgatttccggagacctggacgccaacttttcncagcatcttccctatctgatggaacccaacgcggaatggccggaaaagctggttttcgcttttggggtgcatattgaaccattcgggctatattctgcaaagcacaagaacatcaacgatctgcccaacggcgctaccatttccatacccaacgatccgaccaacgggggccgcgccctgcttctgctacagtccaacgggcttatcacccttagggccggggttggcctgactgctactccccgcgacattaccggcaatccaaaaaacttccgctttcaggaactcgaggccgcccagcttccccgctctgtattggatgtggacgccgctaccatcaacggtaattatgcccttgaggctggctttaaccccgtgagggactccctcatcattgaaggcgcggattccccctatgtaaacatcgtggtagtgcaaaagggcaaagaaaacgatccccgcatcgttgcccttaaaaacgctctccttagccagaaggtaaaagatttcatcgccggccattacaacagcggcgttgtagcggtcttttaa

SEQ ID NO: 12388 - protein, 196 aa, Unknown
  Obtained from environmental sample
  DOMAIN (1)...(196): NLPA lipoprotein
  misc_feature (1)..(196): Xaa is any amino acid
MALISGDLDANFSQHLPYLMEPNAEWPEKLVFAFGVHIEPFGLYSAKHKNINDLPNGATISIPNDPTNGGRALLLLQSNGLITLRAGVGLTATPRDITGNPKNFRFQELEAAQLPRSVLDVDAATINGNYALEAGFNPVRDSLIIEGADSPYVNIVVVQKGKENDPRIVALKNALLSQKVKDFIAGHYNSGVVAVF

SEQ ID NO: 12389 - DNA, 591 bp, Unknown
  Obtained from environmental sample
  misc_feature (1)..(591): n is a, c, g, or t
gtggtgcttttccagggattttactatgccccgcatcatctgcgtccccttatcgtcatccggctcttcgataaggatgttctggaagcgccgcgccagagcagggtctttttcaaaatacttgatgtactcctgatacgtggtagcggcaatacagcgcagcttgccccgcgcaagggcgggtttaaggaggttggcggcgtcgttctgtccggcctggccgccggcgccgatcatcgtatgggcctcgtcgatgaagaggatgattggggtatcagaactctgcacctcctcaataacctgcttcaaacggttttcaaattcgcccttcatgctggctccggcctgcagcaggcccatatccagggaaagcaattttgtacctttaaaggacggcggcacgtcgccggacgccaggcgccgggcaaaaccttccaccacggcggtctttcccactcccgcgtccccggtaaggatcgggttgttctgccgcctgcgcagaaggatatcaatgacctggcggatttccgcgtccctgcccactatctggtcaatctttcccgcctcggcttcggcggtcagtccaggtaa

SEQ ID NO: 12390 - protein, 196 aa, Unknown
  Obtained from environmental sample
  misc_feature (1)..(196): Xaa is any amino acid
MVLFQGFYYAPHHLRPLIVIRLFDKDVLEAPRQSRVFFKILDVLLIRGSGNTAQLAPRKGGFKEVGGVVLSGLAAGADHRMGLVDEEDDWGIRTLHLLNNLLQTVFKFALHAGSGLQQAHIQGKQFCTFKGRRHVAGRQAPGKTFHHGGLSHSRVPGKDRVVLPPAQKDINDLADFRVPAHYLVNLSRLGFGGQSR

SEQ ID NO: 12391 - DNA, 882 bp, Unknown
  Obtained from environmental sample
  misc_feature (1)..(882): n is a, c, g, or t
gtgggcagggacgcggaaatccgccaggtcattgatatccttctgcgcaggcggcagaacaacccgatccttaccggggacgcgggagtgggaaagaccgccgtggtggaaggttttgcccggcgcctggcgtccggcgacgtgccgccgtcctttaaaggtacaaaattgctttccctggatatgggcctgctgcaggccggagccagcatgaagggcgaatttgaaaaccgtttgaagcaggttattgaggaggtgcagagttctgataccccaatcatcctcttcatcgacgaggcccatacgatgatcggcgccggcggccaggccggacagaacgacgccgccaacctccttaaacccgcccttgcgcggggcaagctgcgctgtattgccgctaccacgtatcaggagtacatcaagtattttgaaaaagaccctgctctggcgcggcgcttccagaacatccttatcgaagagccggatgacgataaggggacgcagatgatgcggggcatagtaaaatccctggaaaagcaccacggcgttgttgtgctggatgaggctcttgactctgctgtaaaactttcacggcgttaccttccctcccgccagcttcccgacaaatcggtgagcatccttgacacggcctgcgccaaggtgaacctgagtcaaaacgcgcagcccgccgaactggaatattcccgtcggcgcattgaggccctggaactggaaatagaaattctcaaacgtgaagaaacaggcggaatgaatcatgcggaaaaaatagcagtcttaaacgatgaacttaaaaaagaagaaaaaaacgtgacgaaatacaaaaacgttttgacagggaaaaacccctggccgccgaaatag

SEQ ID NO: 12392 - protein, 293 aa, Unknown
  Obtained from environmental sample
  DOMAIN (21)...(212): ATPase family associated with various cellular activities (AAA)
  misc_feature (1)..(293): Xaa is any amino acid
MGRDAEIRQVIDILLRRRQNNPILTGDAGVGKTAVVEGFARRLASGDVPPSFKGTKLLSLDMGLLQAGASMKGEFENRLKQVIEEVQSSDTPIILFIDEAHTMIGAGGQAGQNDAANLLKPALARGKLRCIAATTYQEYIKYFEKDPALARRFQNILIEEPDDDKGTQMMRGIVKSLEKHHGVVVLDEALDSAVKLSRRYLPSRQLPDKSVSILDTACAKVNLSQNAQPAELEYSRRRIEALELEIEILKREETGGMNHAEKIAVLNDELKKEEKNVTKYKNVLTGKNPWPPK

SEQ ID NO: 12393 - DNA, 510 bp, Unknown
  Obtained from environmental sample
  misc_feature (1)..(510): n is a, c, g, or t
gtggagatcgggtgcatggaggtcgcacccgctaccggcaaggtggtggtgccggcaaactacaacgccgcgggccaggtggtgatagccggccacgttgaggccgttgaggccgccatcgtggcgctgaaggccaagggtggacgcaagatagtgaaactgccagtcagcgcacccttccacagccccttgatggaacctgcgcggaagaccatggaacctgtgctgaacgcgcttgggttcaggccccctgcctgccctctggtcaacaatgttgacgcgcttcccgtgacagacccggaggcattgcggcagggactgatccgccagatcacgggcgcggtgctgtgggaggacaccatgaaataccttcttggccaggacgtcaccatgttcatagaactggggcctgggaaagtcctcagcggcatagcctccagaatggcgaaggacgcggggcgggaagtcagcgtggtttccatcgggaaccccggcgacttgcatccgtag

SEQ ID NO: 12394 - protein, 169 aa, Unknown
  Obtained from environmental sample
  misc_feature (1)..(169): Xaa is any amino acid
MEIGCMEVAPATGKVVVPANYNAAGQVVIAGHVEAVEAAIVALKAKGGRKIVKLPVSAPFHSPLMEPARKTMEPVLNALGFRPPACPLVNNVDALPVTDPEALRQGLIRQITGAVLWEDTMKYLLGQDVTMFIELGPGKVLSGIASRMAKDAGREVSVVSIGNPGDLHP

SEQ ID NO: 12395 - DNA, 423 bp, Unknown
  Obtained from environmental sample
  misc_feature (1)..(423): n is a, c, g, or t
atggaaaccacgctgacttcccgccccgcgtccttcgccattctggaggctatgccgctgaggactttcccaggccccagttctatgaacatggtgacgtcctggccaagaaggtatttcatggtgtcctcccacagcaccgcgcccgtgatctggcggatcagtccctgccgcaatgcctccgggtctgtcacgggaagcgcgtcaacattgttgaccagagggcaggcagggggcctgaacccaagcgcgttcagcacaggttccatggtcttccgcgcaggttccatcaaggggctgtggaagggtgcgctgactggcagtttcactatcttgcgtccacccttggccttcagcgccacgatggcggcctcaacggcctcaacgtggccggctatcaccacctggcccgcggcgttgtag

SEQ ID NO: 12396 - protein, 140 aa, Unknown
  Obtained from environmental sample
  misc_feature (1)..(140): Xaa is any amino acid
METTLTSRPASFAILEAMPLRTFPGPSSMNMVTSWPRRYFMVSSHSTAPVIWRISPCRNASGSVTGSASTLLTRGQAGGLNPSAFSTGSMVFRAGSIKGLWKGALTGSFTILRPPLAFSATMAASTASTWPAITTWPAAL

SEQ ID NO: 12397 - DNA, 360 bp, Unknown
  Obtained from environmental sample
  misc_feature (1)..(360): n is a, c, g, or t
atgtcaagagcagttgacggttcaaaaagaagaaaccatcgaaagaaaatattaaagcaggctaaaggctattggggaaggcgcggcaccaattataaaaccgcgaaagacgccgtagccatagcgttaaattatgcgtaccgcgacagaaaagacaggaaagctcagttccgccgcctgtggattgtaagaattaacgcggcttgcagggaaaacgggctttcctattcccggcttatcgcgggtcttaataaagcgggcgtgattatcgaccgtaaagcgcttgcctggcttgcttctgaagatgcggcggcgttcaaggctgttgcagaaaaagccaaagcggcgcttggagcgtaa

SEQ ID NO: 12398 - protein, 119 aa, Unknown
  Obtained from environmental sample
  DOMAIN (2)...(109): Ribosomal protein L20
  misc_feature (1)..(119): Xaa is any amino acid
MSRAVDGSKRRNHRKKILKQAKGYWGRRGTNYKTAKDAVAIALNYAYRDRKDRKAQFRRLWIVRINAACRENGLSYSRLIAGLNKAGVIIDRKALAWLASEDAAAFKAVAEKAKAALGA

SEQ ID NO: 12399 - DNA, 663 bp, Unknown
  Obtained from environmental sample
  misc_feature (1)..(663): n is a, c, g, or t
ttgcaaggcaatttgccatttatcgtggatccgccgcagggacaaaagaccgggttttttcttgatcagcgggaaaatcatctgcttgcggctcaatacgccgccatgctgagaaaagaatatggaacctcaggtgcggaattgcgtattcttgacgcctgctcgtatacgggcggattcggccttcacgcgctgggtcagtcgggaaaccttaccctgcttgatacatcgctgcctgcgcttgagattgccaaaaagaacgctgcgctttccggctctgttgatcttgtaactataattgaggccaatgtttttgacgaactgcggaatttagtaaagcgcaaagagcaatttgacatggtgatacttgatcctccggcgttcgcaaagtcgcgcaattccttagatgaggctttgcgcggctacaaggaaataaatcttcgggcgataaagcttgtccgtcccggcggtatttttatcagttgttcatgcagtcaggcggtagacgaaattctctttaagcgtatgattgccgaagccgccgcggacgcagagcgccgcattgtgcagattgattttcgttttcaggcgcaggatcatcccatacttgcaggatatgacgaatcgctgtacttaaagtgcgggtttttccgcgtgctgtaa

SEQ ID NO: 12400 - protein, 220 aa, Unknown
  Obtained from environmental sample
  misc_feature (1)..(220): Xaa is any amino acid
MQGNLPFIVDPPQGQKTGFFLDQRENHLLAAQYAAMLRKEYGTSGAELRILDACSYTGGFGLHALGQSGNLTLLDTSLPALEIAKKNAALSGSVDLVTIIEANVFDELRNLVKRKEQFDMVILDPPAFAKSRNSLDEALRGYKEINLRAIKLVRPGGIFISCSCSQAVDEILFKRMIAEAAADAERRIVQIDFRFQAQDHPILAGYDESLYLKCGFFRVL

SEQ ID NO: 12401 - DNA, 420 bp, Unknown
  Obtained from environmental sample
  misc_feature (1)..(420): n is a, c, g, or t
gtgcgggaacttgcgggaataaaagttgaccaagtgtacatcggctcctgcaccaacggcagaatcgaagacctgcgcgccgcggcggacgttctgcgcggcaaaagaattgccgataccgtccgcgcaatcatagcgcccgccaccacagacgtttacgcgcaggcgctaaaagaggggctgattcagaccttccttgactcaggctgctgcgtaacaaacgccacttgcggcgcgtgccttgggatgtccaacggcgtacttgccgagggagaggtttgcgcttccaccactaaccgcaatttttacggacgtatgggaaagggcggtatggttcacctaatgagtcccgtgtcggctgcggttgcggctgtcgccggcgcgattgtcgtgacaggcagtaccgggaggcagtcatga

SEQ ID NO: 12402 - protein, 139 aa, Unknown
  Obtained from environmental sample
  misc_feature (1)..(139): Xaa is any amino acid
MRELAGIKVDQVYIGSCTNGRIEDLRAAADVLRGKRIADTVRAIIAPATTDVYAQALKEGLIQTFLDSGCCVTNATCGACLGMSNGVLAEGEVCASTTNRNFYGRMGKGGMVHLMSPVSAAVAAVAGAIVVTGSTGRQS

SEQ ID NO: 12403 - DNA, 390 bp, Unknown
  Obtained from environmental sample
  misc_feature (1)..(390): n is a, c, g, or t
atgaaaatatttggcggagaagttttatttcttgatcgaaacgatattaataccgatgaaattatccctgcgaaatatttaaccgaggacacaagattagcgttaaaaccccatcttcttgaagacttaaaaataaatggttttgatccaacaaaagatattgtcgggaagggagcggtgctggcacgggcaaacttcggctgtggctcatcgcgtgaacacgctccgtgggcgcttgaagtgaacggcatcaacattgtcatcgcggaaagttttgcccgtatcttcaggcagaatatgtacaactgcggcatgattgcctgcgaacttccgcccgcgctctgggagactgttcaggaattcccaatgtcaaaacaatattactgntga

SEQ ID NO: 12404 - protein, 129 aa, Unknown
  Obtained from environmental sample
  DOMAIN (1)...(113): Aconitase C-terminal domain
  misc_feature (1)..(129): Xaa is any amino acid
MKIFGGEVLFLDRNDINTDEIIPAKYLTEDTRLALKPHLLEDLKINGFDPTKDIVGKGAVLARANFGCGSSREHAPWALEVNGINIVIAESFARIFRQNMYNCGMIACELPPALWETVQEFPMSKQYYX

SEQ ID NO: 12405 - DNA, 909 bp, Unknown
  Obtained from environmental sample
  misc_feature (1)..(909): n is a, c, g, or t
atgcgtatcaatcacaatgttgctgcaatgaatacccatcgccagatgggcataagcgagggagacggttcgaagtcgatggagaagctctccagcgggttcaggatcaacagggcgggcgacgatgctgccggattggcgatctccgaaaaaatgagagcgcagataaagggtctcaatatggcgtccaagaactcttcggacaccatatccctgatacagacggcggaaggcgcgctcggcgagacgcactccatattgcagaggattcgcgagttggcggtgcagtcggccaacgacacgaacaccgacgccgaccgcgacgagctgcaatccgaggtcaggcagctgaaggccgagattgacaggatcggaaatactacggagttcaacactaaaaaattgctcgaaggcagcgctaagggcgtctccgacgagatagtggggacgtcgcgtatcaataataacagcagcctgctgctcgacgccgggaagatgtcgaagatgggggagaatatctccaacgataagagctgggcgtttgacggggcctatatgctcgtgaggacgggtaagagcggtaacggtgagtacaacgccagcgattttatgttggtggggccggacgggtcgcagtataagtttaaggcttacacgccggggacgaagactacggttagcgacttggaggcggggactattattgcggaggggggggagtcgaagcattatactgttgccggaggaggttcaacaacagcggtagctttgggtactttggatgcgagattcgacgtggatcatccggcggttatcggtgcgacgttggacgagaagacgttggagagcgctggcgcgggtagcgttttggcagccggttctagttttacgatagcggggtccgattaa

SEQ ID NO: 12406 - protein, 302 aa, Unknown
  Obtained from environmental sample
  DOMAIN (27)...(167): Bacterial flagellin N-terminus
  misc_feature (1)..(302): Xaa is any amino acid
MRINHNVAAMNTHRQMGISEGDGSKSMEKLSSGFRINRAGDDAAGLAISEKMRAQIKGLNMASKNSSDTISLIQTAEGALGETHSILQRIRELAVQSANDTNTDADRDELQSEVRQLKAEIDRIGNTTEFNTKKLLEGSAKGVSDEIVGTSRINNNSSLLLDAGKMSKMGENISNDKSWAFDGAYMLVRTGKSGNGEYNASDFMLVGPDGSQYKFKAYTPGTKTTVSDLEAGTIIAEGGESKHYTVAGGGSTTAVALGTLDARFDVDHPAVIGATLDEKTLESAGAGSVLAAGSSFTIAGSD

SEQ ID NO: 12407 - DNA, 513 bp, Unknown
  Obtained from environmental sample
  misc_feature (1)..(513): n is a, c, g, or t
ttggagatattctcccccatcttcgacatcttcccggcgtcgagcagcaggctgctgttattattgatacgcgacgtccccactatctcgtcggagacgcccttagcgctgccttcgagcaattttttagtgttgaactccgtagtatttccgatcctgtcaatctcggccttcagctgcctgacctcggattgcagctcgtcgcggtcggcgtcggtgttcgtgtcgttggccgactgcaccgccaactcgcgaatcctctgcaatatggagtgcgtctcgccgagcgcgccttccgccgtctgtatcagggatatggtgtccgaagagttcttggacgccatattgagaccctttatctgcgctctcattttttcggagatcgccaatccggcagcatcgtcgcccgccctgttgatcctgaacccgctggagagcttctccatcgacttcgaaccgtctccctcgcttatgcccatctggcgatgggtattcattgcagcaacattgtga

SEQ ID NO: 12408 - protein, 170 aa, Unknown
  Obtained from environmental sample
  misc_feature (1)..(170): Xaa is any amino acid
MEIFSPIFDIFPASSSRLLLLLIRDVPTISSETPLALPSSNFLVLNSVVFPILSISAFSCLTSDCSSSRSASVFVSLADCTANSRILCNMECVSPSAPSAVCIRDMVSEEFLDAILRPFICALIFSEIANPAASSPALLILNPLESFSIDFEPSPSLMPIWRWVFIAATL

SEQ ID NO: 12409 - DNA, 387 bp, Unknown
  Obtained from environmental sample
  misc_feature (1)..(387): n is a, c, g, or t
gtgatggcgcagatcggcgcgaacagcggtcagacggctttcgtgtctatcggcgacatgcgcgccaaagcgctcggtgtcgccgatgttgacgtcagcacgaagtggggcgcggcgacggcgatagagacggtgaacaacgcgttgcagaaggtttcgcatcagcgtagctcgttgggtgcgattcagaaccgtttggagcacacgatcaagaatctcgacacggctgccgagaacttgcaagccgccgagagccgtattcgcgacgtggacatggcgaaggagatcatggagttcacgaagaacaacattctccagcaggcgtcgcaggcgatgttggcgcaggcgaattcgcagccgcagagcgtgttggcgttgttgaggtaa

SEQ ID NO: 12410 - protein, 128 aa, Unknown
  Obtained from environmental sample
  DOMAIN (35)...(106): Bacterial flagellin C-terminus
  misc_feature (1)..(128): Xaa is any amino acid
MMAQIGANSGQTAFVSIGDMRAKALGVADVDVSTKWGAATAIETVNNALQKVSHQRSSLGAIQNRLEHTIKNLDTAAENLQAAESRIRDVDMAKEIMEFTKNNILQQASQAMLAQANSQPQSVLALLR

SEQ ID NO: 12411 - DNA, 501 bp, Unknown
  Obtained from environmental sample
  misc_feature (1)..(501): n is a, c, g, or t
atggcaattcaggaactaaaagacatcctgcacaaaatcagggtaaagctgtaccctaactacctgcccaaggcggaaggcagctacatcgcctgcacgaacaacgaagccaccctgtccgtttcggatatttgcactaccagcatcaaccgcgggggcttcaccgataaatacgacgattatgtagaccacgtaaaccagttctttgaggaactcgtgtaccaactcctcgacggctatgcggtcaatacagggtacttttccctccatcccaacatcggcgggacattcaattccgaaaaggaagtccacgaccacaaaaagcaccctataaccttccgtttccgtcccctttccaaacttcgcgtactcgctaataaaatcaacgtcgagattgaaggaatagccgacaccaacggctatatcatggattttaccgatgtaggtaccggcgcggtcaacgaaacctacacttcgggggaagagttcgtaataacctga

SEQ ID NO: 12412 - protein, 166 aa, Unknown
  Obtained from environmental sample
  misc_feature (1)..(166): Xaa is any amino acid
MAIQELKDILHKIRVKLYPNYLPKAEGSYIACTNNEATLSVSDICTTSINRGGFTDKYDDYVDHVNQFFEELVYQLLDGYAVNTGYFSLHPNIGGTFNSEKEVHDHKKHPITFRFRPLSKLRVLANKINVEIEGIADTNGYIMDFTDVGTGAVNETYTSGEEFVIT

SEQ ID NO: 12413 - DNA, 954 bp, Unknown
  Obtained from environmental sample
  misc_feature (1)..(954): n is a, c, g, or t
gtgatagctcaaaagaatacaggaaagcagaaaattgactctccgccggatttgccgagtgattctactgacgaagactgttcaaaattgataaaactaggctggaagcggtgcgtttttaaaacgctaaagagagagattgacgcgccctcgccatttaaaaaatccgcccttccttacgctctgcctgttcttgtcccgtatttggcgggaagggagttgccaaaaactgaggactttctcttttttgacttggaaacatcggggctntacggcggatcggctggaacaatcgcgtttcttgccgcttttggaaaaccgctctcaaatggaaaaatgcgcataacgcaatatctgctcttggactatccgggtgagaatgattttttacaaaatgtaattgcggaattgaataaggaaggacagataatcgtatcatataacggaaaatgttttgattcgcagatcataaaagcaaggtgtcttataaacagaataaaaccgcctgaatattggcatgttgacctgcttcatcctgcaaggcggctttggaaaaatattattcaagactgctcgcaaaagtctgttgaaattaatattatttgccttgatcgtacaaatgatattcccggctcccttgcgcctgaaatctggtttgagtttctaaaaacaggtgaaacagaccgtttaatgggcatttgcgatcacaatctgtctgatataaaggggcttgcttcaatttttaccgcaataatttcgatagccgaagatccttttaacgcaaaatacaattatgacataggaaggctcgcccttttctggcgcattttttgcagacgctatgaatacgaagatttaaaggaaacaggttcaaaacttttacgctattccgcaaataaagatattcaatgccctccaaacataaaagccgcaatattaaacgcactggtatga

SEQ ID NO: 12414 - protein, 317 aa, Unknown
  Obtained from environmental sample
  misc_feature (1)..(317): Xaa is any amino acid
MIAQKNTGKQKIDSPPDLPSDSTDEDCSKLIKLGWKRCVFKTLKREIDAPSPFKKSALPYALPVLVPYLAGRELPKTEDFLFFDLETSGLYGGSAGTIAFLAAFGKPLSNGKMRITQYLLLDYPGENDFLQNVIAELNKEGQIIVSYNGKCFDSQIIKARCLINRIKPPEYWHVDLLHPARRLWKNIIQDCSQKSVEINIICLDRTNDIPGSLAPEIWFEFLKTGETDRLMGICDHNLSDIKGLASIFTAIISIAEDPFNAKYNYDIGRLALFWRIFCRRYEYEDLKETGSKLLRYSANKDIQCPPNIKAAILNALV

SEQ ID NO: 12415 - DNA, 678 bp, Unknown
  Obtained from environmental sample
  misc_feature (1)..(678): n is a, c, g, or t
ttgcagcaatcgtccgggtttccaaaactgccacccatgccggatctatacggcaagcctgaaccgaggggcgatcaggataacgggaaattgcggcttacgattaacgaacttttccagcttaacattatgggattgcgggaacttgccgcctgttacaatatttcccacgatgacatggtttcccagaaaagggattcgcttgtttttgccattttaagggcgcacacggagcggggcgggattatctacgctttcggctcgcttgaaattttgcccgacagtttcggctttctgcgcagcccgcagaattcctatttgcccggccccgatgacatatatatcagccccagccagattcggctgtttgcccttaaaaccggcgacaccgtttacgggcagatccgcagccccaaggagggggagcgttatttcggcatgttgagggtggaaacggtcaattacaatgatcccactgtcgcgcagaaccgcataccctttgacgaccttacctcgttgtacccggaacaaaaactggacctggaaaccagcccgggcggcataagcgagaggatcatcaacctgttctgccccatcggcaagggccagcgcgcgctgattgtcgcgccgccccgcaccggcaaaacgatcatgatgcaaaaaatcgccaacgcataa

SEQ ID NO: 12416 - protein, 225 aa, Unknown
  Obtained from environmental sample
  DOMAIN (37)...(81): Rho termination factor, N-terminal domain
  misc_feature (1)..(225): Xaa is any amino acid
MQQSSGFPKLPPMPDLYGKPEPRGDQDNGKLRLTINELFQLNIMGLRELAACYNISHDDMVSQKRDSLVFAILRAHTERGGIIYAFGSLEILPDSFGFLRSPQNSYLPGPDDIYISPSQIRLFALKTGDTVYGQIRSPKEGERYFGMLRVETVNYNDPTVAQNRIPFDDLTSLYPEQKLDLETSPGGISERIINLFCPIGKGQRALIVAPPRTGKTIMMQKIANA

SEQ ID NO: 12417 - DNA, 444 bp, Unknown
  Obtained from environmental sample
  misc_feature (1)..(444): n is a, c, g, or t
ttgcatcatgatcgttttgccggtgcggggcggcgcgacaatcagcgcgcgctggcccttgccgatggggcagaacaggttgatgatcctctcgcttatgccgcccgggctggtttccaggtccagtttttgttccgggtacaacgaggtaaggtcgtcaaagggtatgcggttctgcgcgacagtgggatcattgtaattgaccgtttccaccctcaacatgccgaaataacgctccccctccttggggctgcggatctgcccgtaaacggtgtcgccggttttaagggcaaacagccgaatctggctggggctgatatatatgtcatcggggccgggcaaataggaattctgcgggctgcgcagaaagccgaaactgtcgggcaaaatttcaagcgagccgaaagcgtagataatcccgccccgctccgtgtgcgcccttaa

SEQ ID NO: 12418 - protein, 147 aa, Unknown
  Obtained from environmental sample
  misc_feature (1)..(147): Xaa is any amino acid
MHHDRFAGAGRRDNQRALALADGAEQVDDPLAYAARAGFQVQFLFRVQRGKVVKGYAVLRDSGIIVIDRFHPQHAEITLPLLGAADLPVNGVAGFKGKQPNLAGADIYVIGAGQIGILRAAQKAETVGQNFKRAESVDNPAPLRVRP

SEQ ID NO: 12419 - DNA, 855 bp, Unknown
  Obtained from environmental sample
  misc_feature (1)..(855): n is a, c, g, or t
gtgagccatacgacagaccagatacgaaatgttactatcgccggacacggacaaaccggtaaaacgaccctgtttgaacatgtgctgtttgccggaggggcgattcctcgtgcggaagcggtggaatccggtaaaactaccagcgattccagttctgaggagattgaacggaaaatttcgatacatgccgctatgggtcatgtggagcgaaacgggacaaaaatcaacttttttgacactcccggttcctcagactttaccggggacgtaattttaagttttagggcttcggaattggcccttttgatggtggatggacgctccggcgtacagattgagactatcaagctgtggagaaacctggacgaccgcaaaaaaccacggggcgtttttatcgccaaactggataatgatcaggctgattttaacaaaacccttgccgatataaaagaaaaattcaaaattgagccgacgccgataacgctgcccatgggttcgggcggctcgtttaagggcgttattgacgtactgcacgaaaaggcgtattttgcttccgccgacgcggttgaaaaagaaggccccatccccgatgaatacaaagacacggtaacggcggcgcgggaaaaattaatcgaagccgccgccgagggcgatgacaccctcatggaacattacattgataagggttccctttcaccggaagaaatgaaaaaagggttgattgaagccctggcggaaaacaagtacattcccgcctttgccggagccgcgctgaaaaattccggcatagtgccgctcattgattttatcgccgatgtgggtcccaatcccggacagcgaaagacaccatactga

SEQ ID NO: 12420 - protein, 284 aa, Unknown
  Obtained from environmental sample
  DOMAIN (9)...(136): GTPase of unknown function
  misc_feature (1)..(284): Xaa is any amino acid
MSHTTDQIRNVTIAGHGQTGKTTLFEHVLFAGGAIPRAEAVESGKTTSDSSSEEIERKISIHAAMGHVERNGTKINFFDTPGSSDFTGDVILSFRASELALLMVDGRSGVQIETIKLWRNLDDRKKPRGVFIAKLDNDQADFNKTLADIKEKFKIEPTPITLPMGSGGSFKGVIDVLHEKAYFASADAVEKEGPIPDEYKDTVTAAREKLIEAAAEGDDTLMEHYIDKGSLSPEEMKKGLIEALAENKYIPAFAGAALKNSGIVPLIDFIADVGPNPGQRKTPY

SEQ ID NO: 12421 - DNA, 930 bp, Unknown
  Obtained from environmental sample
  misc_feature (1)..(930): n is a, c, g, or t
gtgctctcaaccccgaattcttgccgagggcacggctattgccgacctgaacacccccgaacgtgtgctcataggctcgcagctcacgccgaagggataaaggcgcgggatcaagtcgtggagatatacgccaattgggtgcctcgcgaacggatagtcacaagcaacgtctggagcgcggaattgtctaagctcgtagccaatgccttcttagcgcaacgcatatcctccataaacagcatctccgaactatgcgaaaagacggaagccgacgtgaccgaagtgtcgcggacgattggaatggacagccgcatcggcagccgcttcttggtgtcgagcgtgggcttcggcgggtcttgctttaagaaggatattctcaacttagtatacatctgccggagttacggactaaccgaagtggccgattactgggagagcgtggttgagatgaacgaacaccaaaaacgccgcttcgtgaagaacatgctccgagcgatgttcaacacggttgccggcaagagaatagcgctcttcggcttcgctttcaaagccgacaccggcgacacaagagaatccccggcgatagacgtgtccatgcaactcatcaaagaacaagcaaaggtggtaatatccgatcccaaagccattgacaacgcgaaaatcgacttagcgtcatgtattgacaatgtggaatttataaacgacccctacgaagccgccaaaggcgcccacgccatcgccgtaatgacggagtggaaagagtatcgcgaacttgactacaaaaaaatatacgcaggaatggaacgccccgcgttcatcttcgacgggagaaacgtgctgaaccacaaagcgctgtttgagatgggcttcaacgttttccctctggggcagccggcgttgaagcatcttaaaacagttgaaaagccttaa

SEQ ID NO: 12422 - protein, 309 aa, Unknown
  Obtained from environmental sample
  DOMAIN (176)...(282): UDP-glucose/GDP-mannose dehydrogenase family, UDP binding domain
  misc_feature (1)..(309): Xaa is any amino acid
MLSTPNSCRGHGYCRPEHPRTCAHRLAAHAEGIKARDQVVEIYANWVPRERIVTSNVWSAELSKLVANAFLAQRISSINSISELCEKTEADVTEVSRTIGMDSRIGSRFLVSSVGFGGSCFKKDILNLVYICRSYGLTEVADYWESVVEMNEHQKRRFVKNMLRAMFNTVAGKRIALFGFAFKADTGDTRESPAIDVSMQLIKEQAKVVISDPKAIDNAKIDLASCIDNVEFINDPYEAAKGAHAIAVMTEWKEYRELDYKKIYAGMERPAFIFDGRNVLNHKALFEMGFNVFPLGQPALKHLKTVEKP

SEQ ID NO: 12423 - DNA, 894 bp, Unknown
  Obtained from environmental sample
  misc_feature (1)..(894): n is a, c, g, or t
gtgaaaatggcggcttttgacgtagctagcaaatttatgacatcctttaccgcagcaaaggttgaggctatattcggcaactttgtgcgggcaagaggacttggcgtacaaaacggcgttgatacggaacacgccggtattgtggacaagatttncaaggattctctggagagggtgttgaatctgggcatggtccccattcttccctgcataggctggagtccgtccggaaagccctacaatgtgccaagcgcggaaatagcccttgccgcggcatccgccttgaaagcggaaaaattgttcttcctttccgtacacgacaggctgcagataaaagacctcaatataaaggaagatttagaaacaaggccggacggaagccttttaagacttaccccccagcaagcggaaaagctgattgcttccggctcaaattcgagctctgtccccgcaccattcctgcgggagctgaatctcgcattaagcgccagccgggcgggtgttaacagggtacatttattggacgcaagggaagaaggcgccgtattgaaagagctcttttccaacctcggtgtgggaacaatggtttataatgacgagtacgactctatccgggcgttccattcaagggatttgcccgatattctgcggatgatggagccgttaatgcaaaaaggcgtccttatcaggcggaatcccgagcaaattcaggaaaaaaaggccgattacgccgtacttgagattgacggctctgtccgcgcatgcggcgctctgcacgattggggcgagtctcaaggcgaaattgccgccgtcgccacagatcccgattacaaagacatgggtttaggcagcaaaatcgtcggctatctgtcgaaaaagccccgtgcgatctga

SEQ ID NO: 12424 - protein, 297 aa, Unknown
  Obtained from environmental sample
  misc_feature (1)..(297): Xaa is any amino acid
MKMAAFDVASKFMTSFTAAKVEAIFGNFVRARGLGVQNGVDTEHAGIVDKIXKDSLERVLNLGMVPILPCIGWSPSGKPYNVPSAEIALAAASALKAEKLFFLSVHDRLQIKDLNIKEDLETRPDGSLLRLTPQQAEKLIASGSNSSSVPAPFLRELNLALSASRAGVNRVHLLDAREEGAVLKELFSNLGVGTMVYNDEYDSIRAFHSRDLPDILRMMEPLMQKGVLIRRNPEQIQEKKADYAVLEIDGSVRACGALHDWGESQGEIAAVATDPDYKDMGLGSKIVGYLSKKPRAI

SEQ ID NO: 12425 - DNA, 555 bp, Unknown
  Obtained from environmental sample
  misc_feature (1)..(555): n is a, c, g, or t
atgcggaacggacaacgttctgtttgtcgggcttgggcctgtcggccttgcaacattaatgcttgtaaagccatgggcgctcaaaagctaatcggtgtagaaagtaaccagtaccgcatagatttaataaaaaagctggggttggcggataaggtgctcaaagcaggggtggacaacgtgaaagagattcgtgactatacagacggcaagggagttgaaagagcatttgacgcatcggcaagcgatccagggcggcaaaccgcaatcagggcaacacgccaatggggaagaatcgcctttgtaggcgagggaaatacagttaacttcaacccaagcccggatattatccacgaccaaaagactatatacggaagctgggtgacgagcatctggctaatggaaaatttggttgaagaattggtacgctggaaactgcatccggacactttggtaacacaccgtttcccattggaaagggctgatgaagcctatcggctcatggatgaaggtaattgcggcaaagtagctgtctgctcagatgaagagctgaaatga

SEQ ID NO: 12426 - protein, 184 aa, Unknown
  Obtained from environmental sample
  DOMAIN (12)...(142): Zinc-binding dehydrogenase
  misc_feature (1)..(184): Xaa is any amino acid
MRNGQRSVCRAWACRPCNINACKAMGAQKLIGVESNQYRIDLIKKLGLADKVLKAGVDNVKEIRDYTDGKGVERAFDASASDPGRQTAIRATRQWGRIAFVGEGNTVNFNPSPDIIHDQKTIYGSWVTSIWLMENLVEELVRWKLHPDTLVTHRFPLERADEAYRLMDEGNCGKVAVCSDEELK

SEQ ID NO: 12427 - DNA, 711 bp, Unknown
  Obtained from environmental sample
  misc_feature (1)..(711): n is a, c, g, or t
atgcgggaatacgcgcgggacatctgcacggcgcagatcgggagccggacgcgggaagagattgcccttgagaaagagcatgaactatccgcggggcggtacacccggcttgacgggcggattaaggagatgtgcggcgaagggctgcggatcaaccccaagctgatcaaggccgaccgggaacgcatgctggcccgcctggaaagcttgaggaaaatgaacttatgcttgtacaaagacggcgcctaccagctttcgccccaatgggaagaagaccttcgggccaacgggcggtacaacgccttcctgaaagccagagaagaactgcaatataccgatccggcgaagctgaaagttttttcaggcgagcacgggacgatcaccggaaaggcaaccaagatataccggaccgacggcgacgcgagcgacagccacgctgtggtcatcgaggccctggacggcaacgcatggtttgtgccgctgttcaagattcctgaaatgcacgacggcaaagaaaaaacgaaactgaaggaaggcgatctggtgagcgtaaaaacctatgagagccagcggggccgcctgactcccattatattcaagcgcgacgcgccccaggcgctcagggagatacggaataacgggcacgcgggcagccttgctgcggagataagcaagccaaggacaggaggaggccgggatggaagccgataa

SEQ ID NO: 12428 - protein, 236 aa, Unknown
  Obtained from environmental sample
  misc_feature (1)..(236): Xaa is any amino acid
MREYARDICTAQIGSRTREEIALEKEHELSAGRYTRLDGRIKEMCGEGLRINPKLIKADRERMLARLESLRKMNLCLYKDGAYQLSPQWEEDLRANGRYNAFLKAREELQYTDPAKLKVFSGEHGTITGKATKIYRTDGDASDSHAVVIEALDGNAWFVPLFKIPEMHDGKEKTKLKEGDLVSVKTYESQRGRLTPIIFKRDAPQALREIRNNGHAGSLAAEISKPRTGGGRDGSR

SEQ ID NO: 12429 - DNA, 576 bp, Unknown
  Obtained from environmental sample
  misc_feature (1)..(576): n is a, c, g, or t
atgttcaagtggtcgagcaacttcgtcgctgagatgctcttcaaaacgatgggcgccgagaagcagggcgatcccgggacttggcccaagggcgcggcgacggtcagcgcgtggtgggagtatagggggctgccgggcaagccgcagataataaacggctcgggcatgagcggcgagcggccgacgccgcgcggcgccgcagacgacagttccggcgtgccgatgaagaacgagaacaagataagcccggggcagatcgtcgagctattgtcctacgtgtccaagcagaagagctatttcccagactacgtggcctccatgtcctcggcgggcgtggacggcacgctgcgctcgcgcttccagcggtcgaagctcagggggatcgtgagggctaagaccgggacgctcaactcggtgaaagtcagcacgttggccgggtatatgttcttggacggcaagacctacgcgttcgcggtgttctgcaagaacgtagggccgaatcagtacgacaattggataatgcaggagcaaattttggaggcggtggcaagaaacacggattggagcggcaggtag

SEQ ID NO: 12430 - protein, 191 aa, Unknown
  Obtained from environmental sample
  misc_feature (1)..(191): Xaa is any amino acid
MFKWSSNFVAEMLFKTMGAEKQGDPGTWPKGAATVSAWWEYRGLPGKPQIINGSGMSGERPTPRGAADDSSGVPMKNENKISPGQIVELLSYVSKQKSYFPDYVASMSSAGVDGTLRSRFQRSKLRGIVRAKTGTLNSVKVSTLAGYMFLDGKTYAFAVFCKNVGPNQYDNWIMQEQILEAVARNTDWSGR

SEQ ID NO: 12431 - DNA, 579 bp, Unknown
  Obtained from environmental sample
  misc_feature (1)..(579): n is a, c, g, or t
ttgggggcgtttgagcggtatcatgcttggcttgtgtctgaaaacggcaaaatcaacctattttcgcggcagaccgacgcggacgatatatggaccgtgcattttttggactcgctcctatcaaccaagtacgtggagttcggcgggcgcggcgtgctggacttcgggacgggcggggggttgccggggattcctttggccattgtctttggggacgccagggttacactgctcgactcgaagaaaaagaagatcgcggcgataaggggtgcggcggaggcgcttgggcttgggaattgcgagttttcggatcaacggattgaggatatcgccgataggtgccgtttcgacataatcgtttcccgctctgttaagattgagccggtatataaaccgatattgctgcggctgctcaaaccgggaggtaaaattgtgctttacaagagtaagattcttgacgatgtgtatcaatttgacgatgcggagatatttaacgcggaggcggcggggctggggcttggggagcggaggattgcggtgatacggccgctaccgcccggaaaaaatcttcccaagtga

SEQ ID NO: 12432 - protein, 192 aa, Unknown
  Obtained from environmental sample
  DOMAIN (53)...(144): Methyltransferase domain
  misc_feature (1)..(192): Xaa is any amino acid
MGAFERYHAWLVSENGKINLFSRQTDADDIWTVHFLDSLLSTKYVEFGGRGVLDFGTGGGLPGIPLAIVFGDARVTLLDSKKKKIAAIRGAAEALGLGNCEFSDQRIEDIADRCRFDIIVSRSVKIEPVYKPILLRLLKPGGKIVLYKSKILDDVYQFDDAEIFNAEAAGLGLGERRIAVIRPLPPGKNLPK

SEQ ID NO: 12433 - DNA, 825 bp, Unknown
  Obtained from environmental sample
  misc_feature (1)..(825): n is a, c, g, or t
atgaaaggcctcatggtcaagcaggaaaacagcacaggcgaagccaacaaagcggtaacggaaattaaggagaacattgacaaccttaaagaaatgatcgcggcgcagaccgacagcgtaaacgtgtcgtcttcggctattgaacagatgacggcaaatataaactcggtaaccaaaaccctttctgaaaacagcaaaaatgttaccgccttaaccgaagcgtctgaaaacggcaaatcgggcgttcagacagtggcgcagatgatacaggaaatatcgaaagactccgagggattgttggaaataaacgccgtaatggacaatatagccagccagaccaacctgctttcgatgaacgccgcgattgaggcggcgcacgccggagaagcgggcaagggctttgccgtagtcgccgatgaaatccgcaaacttgccgaatcatcaagcgagcagtcaaaaacaaccgcgtctatgcttaaaaaaataaaagggtcaatagacagcatcaccaaatcatccgacgaagtactggagcgtttcggggcgatagactcaggcgtaaaaacagtttccgaacatgagcaaaacatattaaacgcgatggaagagcaggaagtgggcggaaaacaaatactggaatccataggccgcctgcgggacataacctcctctgttaagaacgggtctgatcacatggcgaaatcgggagagacccttgtcagggaaacaaaccagcttatagataacagncaagaaacagtagaaggcatgaacgagatacttatcggcattaatcagataagcacttcgatggttcgtgtttaa

SEQ ID NO: 12434 - protein, 274 aa, Unknown
  Obtained from environmental sample
  DOMAIN (34)...(252): Methyl-accepting chemotaxis protein (MCP) signaling domain
  misc_feature (1)..(274): Xaa is any amino acid
MKGLMVKQENSTGEANKAVTEIKENIDNLKEMIAAQTDSVNVSSSAIEQMTANINSVTKTLSENSKNVTALTEASENGKSGVQTVAQMIQEISKDSEGLLEINAVMDNIASQTNLLSMNAAIEAAHAGEAGKGFAVVADEIRKLAESSSEQSKTTASMLKKIKGSIDSITKSSDEVLERFGAIDSGVKTVSEHEQNILNAMEEQEVGGKQILESIGRLRDITSSVKNGSDHMAKSGETLVRETNQLIDNXQETVEGMNEILIGINQISTSMVRV

SEQ ID NO: 12435 - DNA, 417 bp, Unknown
  Obtained from environmental sample
  misc_feature (1)..(417): n is a, c, g, or t
atgtcccgcaggcggcctatggattccagtatttgttttccgcccacttcctgctcttccatcgcgtttaatatgttttgctcatgttcggaaactgtttttacgcctgagtctatcgccccgaaacgctccagtacttcgtcggatgatttggtgatgctgtctattgacccttttatttttttaagcatagacgcggttgtttttgactgctcgcttgatgattcggcaagtttgcggatttcatcggcgactacggcaaagcccttgcccgcttctccggcgtgcgccgcctcaatcgcggcgttcatcgaaagcaggttggtctggctggctatattgtccattacggcgtttatttccaacaatccctcggagtctttcgatatttcctgtatcatctgcgccactgtctga

SEQ ID NO: 12436 - protein, 138 aa, Unknown
  Obtained from environmental sample
  misc_feature (1)..(138): Xaa is any amino acid
MSRRRPMDSSICFPPTSCSSIAFNMFCSCSETVFTPESIAPKRSSTSSDDLVMLSIDPFIFLSIDAVVFDCSLDDSASLRISSATTAKPLPASPACAASIAAFIESRLVWLAILSITAFISNNPSESFDISCIICATV

SEQ ID NO: 12437 - DNA, 882 bp, Unknown
  Obtained from environmental sample
  misc_feature (1)..(882): n is a, c, g, or t
atgcaaattttactctccagctcttttcatacngggcagagcgatttttatggcagttatgcaaccgagccnaactacaaagaactggttttgtacgccaaagaaaattctgtgcccttttntgccctgttccctccaataccttggagcncaataaaatcgcaattaaccgcagatggcgcgccaccttatgcaccgtctgccgctcactggcttgggacagatgcccacgggagagatgttttgtctaggctaattcacgggtttagaatttgcatgagctttagccttttgctctctttgataggaacctttatgggcatagtgataggcggaattcagggatattttggcggaaaattggatattgtttttcagaggctaattgaaatttgggctgcgctcccttttttatatgtggttattttgctcggcagcatttatgggcaggggttttggcttttggctgtgattatggcggcatttagctggatagggctcagctattatatgagagcggaatttttcaaaataaaaaatatgcaatttgtgaaagccgcaaccgtgcttggcatggggcacgtgagaatttttttcaaggaaattttgccaaacgctttaacgcctgtaataacgcttttccccttttccataataggcggaatttctgggcttacctcgcttgattttttgggttttggcttgcaggctccaacgccttcctggggcgatttgctctctcagggtctagcaaatctctacgctccttggattaccattttcacaatactagcactcttcataactcttatgcttgcctcttttataggagagggaataagagatgcctttgaccctaagtcaggggatagatttgaatag

SEQ ID NO: 12438 - protein, 293 aa, Unknown
  Obtained from environmental sample
  DOMAIN (89)...(290): Binding-protein-dependent transport system inner membrane component
  misc_feature (1)..(293): Xaa is any amino acid
MQILLSSSFHTGQSDFYGSYATEPNYKELVLYAKENSVPFXALFPPIPWSXIKSQLTADGAPPYAPSAAHWLGTDAHGRDVLSRLIHGFRICMSFSLLLSLIGTFMGIVIGGIQGYFGGKLDIVFQRLIEIWAALPFLYVVILLGSIYGQGFWLLAVIMAAFSWIGLSYYMRAEFFKIKNMQFVKAATVLGMGHVRIFFKEILPNALTPVITLFPFSIIGGISGLTSLDFLGFGLQAPTPSWGDLLSQGLANLYAPWITIFTILALFITLMLASFIGEGIRDAFDPKSGDRFE

SEQ ID NO: 12439 - DNA, 486 bp, Unknown
  Obtained from environmental sample
  misc_feature (1)..(486): n is a, c, g, or t
atggcggagaatctcaattatgatactgcggacggtactctatcttggtgttacagggacagcccagacagttgcgcgaaattcggcaggttgtaccagtggaaagcggcgaagacggcgtgcccaagcgggtatcatttgccgactaacgcggattgggataagttagtgagggcggtgagcgattattctgctggttatagttattctatatctggttctaggctgaaaacgaagagtggttgggaatattttagaggttacgacggtagtggtactgatgactacggcttttcggccctgccgggcggcacccgcatcgaaagtggcaacttccgccatgccggctcctacggcttttggtggacgtccacggagtacgagagcgacgtctactactactgggaaattgcatacgaccgatcatatgtggaaaataggtataatttcagttacctcgggtactctgttcgttgcgttaagtaa

SEQ ID NO: 12440 - protein, 161 aa, Unknown
  Obtained from environmental sample
  misc_feature (1)..(161): Xaa is any amino acid
MAENLNYDTADGTLSWCYRDSPDSCAKFGRLYQWKAAKTACPSGYHLPTNADWDKLVRAVSDYSAGYSYSISGSRLKTKSGWEYFRGYDGSGTDDYGFSALPGGTRIESGNFRHAGSYGFWWTSTEYESDVYYYWEIAYDRSYVENRYNFSYLGYSVRCVK

SEQ ID NO: 12441 - DNA, 660 bp, Unknown
  Obtained from environmental sample
  misc_feature (1)..(660): n is a, c, g, or t
ttgatacgcgccggcttgtgcggcgcggtcattgccggaggcgcggatattgtttcacaaaccgggtttgcggggttccattccctggaagcgatttcgaacagcatcaccaacccgttcagcaagaatcggaaaggcatcaacctcggtgaaggagcggctttttttctccttgattcaaaggcaaattccgccgttgaacttttaggcgccggagaaagcgccgacgcttaccacatgacggctccggaaactgacggaacaggggccgcaaaggcgatgcgcaccgcgcttctggacgcggggctgaacccaaaacacatcggctatttaaaccttcatggcacgggcaccgaacttaacgatcaagccgaagctctggctgtgagggcggtatttgatgagccgcttcccgcaagttcaaccaaacccgttaccggccatactcagggcgccgcaggcgcattggaagcggcgatctgctggatggtattgtctgaaaaaagaggccttccggtacattgctgggacggcgtaggagatgagggaatcccgttcctccccgtagaaagcaacaatataaataccccttcggtatgcatgagtaacagcttcgcttttggtggatgcaatgtcagtttaattttaagaagggaataa

SEQ ID NO: 12442 - protein, 219 aa, Unknown
  Obtained from environmental sample
  DOMAIN (65)...(219): Beta-ketoacyl synthase, C-terminal domain
  misc_feature (1)..(219): Xaa is any amino acid
MIRAGLCGAVIAGGADIVSQTGFAGFHSLEAISNSITNPFSKNRKGINLGEGAAFFLLDSKANSAVELLGAGESADAYHMTAPETDGTGAAKAMRTALLDAGLNPKHIGYLNLHGTGTELNDQAEALAVRAVFDEPLPASSTKPVTGHTQGAAGALEAAICWMVLSEKRGLPVHCWDGVGDEGIPFLPVESNNINTPSVCMSNSFAFGGCNVSLILRRE

SEQ ID NO: 12443 - DNA, 438 bp, Unknown
  Obtained from environmental sample
  misc_feature (1)..(438): n is a, c, g, or t
atgacctttgttgacgcggacggacagcacaagcgtccctacatggttcaccgcgccctccttggcagccttgagcgttttttcggcgttttaatagaacactttggcggagcctttcccccgtggatcgcgccggaacaaatcgccgtgattcccgtcgcggaaggctttaacgagtacgcgaaaaaagttaccgctgaactaaaggcgcacgacctgcgggtctcagttgagttaggcgatgacaggcttaacgccaagatacgcgactgtcagaaccgcaagattccctacatgcttgtggccggccagcgcgaagctgatgaaggcacagtatcaatacgcctgcgtgacggtaaacagcttccggctatgaaggtcgccgacttcgccaaatacgcgctggaaaaaatcgagggacgctcaattgaactataa

SEQ ID NO: 12444 - protein, 145 aa, Unknown
  Obtained from environmental sample
  DOMAIN (47)...(137): Anticodon binding domain
  misc_feature (1)..(145): Xaa is any amino acid
MTFVDADGQHKRPYMVHRALLGSLERFFGVLIEHFGGAFPPWIAPEQIAVIPVAEGFNEYAKKVTAELKAHDLRVSVELGDDRLNAKIRDCQNRKIPYMLVAGQREADEGTVSIRLRDGKQLPAMKVADFAKYALEKIEGRSIEL

SEQ ID NO: 12445 - DNA, 396 bp, Unknown
  Obtained from environmental sample
  misc_feature (1)..(396): n is a, c, g, or t
ttgttgatatatggttgcgcccaccttagggagaaattcagggaattaggatatgattttccaaaagctaataccaattccaatgtttcagatcgtacaaataaaatttaccttgaaattgatgttatgcttgaaaacggcgaaaaagccatgcttgtcgaagtaaaaaccaaacttaccaccgaagatgtgcaggaacatattaaacgcattgaaaaaatgcgtgtatatgccgatttacacggtgacaaacgcacgttcttgggttcagttgctggggttgtagtaacagccaacgtaaaagaatatgcgttaggaaaaggattatatgttatagagccttccggagaaacttttaacattactcccccaaacggtcaaccgaaagaatggtaa

SEQ ID NO: 12446 - protein, 131 aa, Unknown
  Obtained from environmental sample
  misc_feature (1)..(131): Xaa is any amino acid
MLIYGCAHLREKFRELGYDFPKANTNSNVSDRTNKIYLEIDVMLENGEKAMLVEVKTKLTTEDVQEHIKRIEKMRVYADLHGDKRTFLGSVAGVVVTANVKEYALGKGLYVIEPSGETFNITPPNGQPKEW

SEQ ID NO: 12447 - DNA, 729 bp, Unknown
  Obtained from environmental sample
  misc_feature (1)..(729): n is a, c, g, or t
gtgtacagccactccgctaaaaatccggacgcggctttgggagtgggtattataagccgtctcccgcttattgagcctaaaacccactcaataacaataggcagcgaaacaacgccgcggcctgtgctggaaacaaggattcaggcggaaaaggaatttgttatttttgtctgccattggaaatcaaaactaggcggggatgataataccgaaaaaacccgcagggcttccgcaagggttattctgcggcggattcgggaattgtgggaagaagagccggatctcggcgtaattgtcgcgggcgatttgaacgagaaccacaatgaatttttcaggcggaacgcgaaagttatctgcgccttgcttcccgatgatccttattgcgcccagctggcggatggtatgcaaaaggactttatcgttattggcaaaaacaagccgccggaacctgttaattttccgcgggagactatcgttcttttttcggcatggatgcgcgatgttgaaaaaggctcgtattattacaagaatgaatgggaaacaatcgatcactttttggtatcggaacaattttttaataataccggatggagttttgaaaaagcacagcccgcggattttgctccgtttacaaacgcgtacggggttcctgtttcatacaacataagaacaggcgcgggccttagcgatcatctgcctttactaatgacattgaagatgacgaattga

SEQ ID NO: 12448 - protein, 242 aa, Unknown
  Obtained from environmental sample
  misc_feature (1)..(242): Xaa is any amino acid
MYSHSAKNPDAALGVGIISRLPLIEPKTHSITIGSETTPRPVLETRIQAEKEFVIFVCHWKSKLGGDDNTEKTRRASARVILRRIRELWEEEPDLGVIVAGDLNENHNEFFRRNAKVICALLPDDPYCAQLADGMQKDFIVIGKNKPPEPVNFPRETIVLFSAWMRDVEKGSYYYKNEWETIDHFLVSEQFFNNTGWSFEKAQPADFAPFTNAYGVPVSYNIRTGAGLSDHLPLLMTLKMTN

SEQ ID NO: 12449 - DNA, 375 bp, Unknown
  Obtained from environmental sample
  misc_feature (1)..(375): n is a, c, g, or t
atgttattcaatgaagaactctatcgggatgacaaaaacttacttgatttcaaaaacagtaaaataatagttcggaacgcagttagggcaattataataaaagaaaataaaattctaatggttcttttagaaaaaacaaatgaatataaattccccggcggcggtgttgaaaaaaacgaagcgtttgaagacgccttaaaaagagaagtattggaagaaaccggatgcaatgtaaaaaaaatagtcgaaaaagtcggaacaataaccgaatacgcggttgcaaaggaaggcaataataatatatttaaaatgatttctgaatactacaacgtaaatattgacgataagcaatttgaacaaaaacttgacaattag

SEQ ID NO: 12450 - protein, 124 aa, Unknown
  Obtained from environmental sample
  DOMAIN (24)...(124): NUDIX domain
  misc_feature (1)..(124): Xaa is any amino acid
MLFNEELYRDDKNLLDFKNSKIIVRNAVRAIIIKENKILMVLLEKTNEYKFPGGGVEKNEAFEDALKREVLEETGCNVKKIVEKVGTITEYAVAKEGNNNIFKMISEYYNVNIDDKQFEQKLDN

SEQ ID NO: 12451 - DNA, 498 bp, Unknown
  Obtained from environmental sample
  misc_feature (1)..(498): n is a, c, g, or t
atggggaagggattgaaaatgagaggaaaagacagagaaataccaggtatagatgaaaaactggaaattatcgaaaaatgcaaagtntgcaggattggattatctgataataattttccgtatattgttccgttaaactatggtttttcctatgataacggaaaattatcattatattttcattgcgcgccggaaggtaaaaaaatagatattatcaagaaaaacaacaacgcgtgttttgaaattgactgcgattcaaagttgatagagggaataaaagcttgtgattacagttatgaattcagaagcataatcggctttggaaaaattgtttttcttgatacaaaagaagaaaaaacaaacggcttaaattatttaatgaaacaacaaaccggaaaagatataaaacatgattataatgaaaaagaattaaataatattgttgttttaaggatgctggttgatgaattttcggggaaacagaaggtgttaaaataa

SEQ ID NO: 12452 - protein, 165 aa, Unknown
  Obtained from environmental sample
  misc_feature (1)..(165): Xaa is any amino acid
MGKGLKMRGKDREIPGIDEKLEIIEKCKVCRIGLSDNNFPYIVPLNYGFSYDNGKLSLYFHCAPEGKKIDIIKKNNNACFEIDCDSKLIEGIKACDYSYEFRSIIGFGKIVFLDTKEEKTNGLNYLMKQQTGKDIKHDYNEKELNNIVVLRMLVDEFSGKQKVLK

SEQ ID NO: 12453 - DNA, 765 bp, Unknown
  Obtained from environmental sample
  misc_feature (1)..(765): n is a, c, g, or t
ttgaccacggcggcccagatggggtcgaacatagacacggtgatcagcgcggtggaggagatgtacgagggtttcaatagggtgaccgccaacacgcgcgagtctaagaccgtctccggcgaggccatagagaaagccgcgaacgcaatgaacgtcatggacgcgctcggggcgtcggttaaggaggtcgggcagtttacagacgtcatcaaaaccatcgccaagaaaacgaacatgctcgccctcaacgcctcggtggaggcgtcgcgcgccggagaggccggcaagggcttcgcggtggtggccggcgaggtcaaacagctggcgaaccagagcgcctcaagcgccaacgacatctcgcggcgcatagaaaatatccaaacctgcaccgcggacgccattaacgtcatacgggagatctccgccatcatcaaaaagataagcgagtccgcgaactcgatatccgagagcgtggagcggcagatgaaagttagcgagggcatgatgaacatggccaagcagacaaacgccggcgcgcgccaagtggtacaagcggtaggcggcgtggccgcgtccatacaaacctccgccaaacacgcgaacatagccgccgacggcacgaaagaggtctccgacagcatagacgtaatccacgaagacgcggaaaaaacgaacgcctactcaacggaactgaaagaagcggcaaactcgctcaaaaatatggcggcggaactggattcggtagtctgccggttcagaacgtag

SEQ ID NO: 12454 - protein, 254 aa, Unknown
  Obtained from environmental sample
  DOMAIN (5)...(254): Methyl-accepting chemotaxis protein (MCP) signaling domain
  misc_feature (1)..(254): Xaa is any amino acid
MTTAAQMGSNIDTVISAVEEMYEGFNRVTANTRESKTVSGEAIEKAANAMNVMDALGASVKEVGQFTDVIKTIAKKTNMLALNASVEASRAGEAGKGFAVVAGEVKQLANQSASSANDISRRIENIQTCTADAINVIREISAIIKKISESANSISESVERQMKVSEGMMNMAKQTNAGARQVVQAVGGVAASIQTSAKHANIAADGTKEVSDSIDVIHEDAEKTNAYSTELKEAANSLKNMAAELDSVVCRFRT

SEQ ID NO: 12455 - DNA, 972 bp, Unknown
  Obtained from environmental sample
  misc_feature (1)..(972): n is a, c, g, or t
atgaagggacgcaggttggacgagctcggtattccgctcatggtttcggccaatacgtcgcgtttcgagacggcgttcaccgttccgtttgaggctcgtgaggggactaccaccggcatctcgtttcacgacagggctgccacggtgttaaagctcgttgacccaaaaagcgttccgggcgattttgtcatgccggggcacatgttcccgataagggcgcgggagggcggcgtgctggtccgtagcgggcagacggaggcatcggtcgatttggcgaggcttgccgggctcaccccgtcgggggtgatatgcgaggtgatgaacgaggacgggactatggctcggatgccgcagcttattgagatagggaagcggcacggtattaagataatatcggtggttgacataatccgttaccgtacggcgcacgagcggtttgtcaagagggccgcgcagacgcggctgcccacgcgccacggcgagtttagtatgattgcttacgaggacgggttgaccggcgcggtgcatgtcgcgttgcaggcgggcgagattgactccgagaagccggtgctgacccgcgttcactccgagtgctttaccggcgacattttgggttcgttgcgctgcgactgcggcgagcagctgcataccgccatgctcagggtggcaagcgagggcggggtcgtcctctatctgcgtcaggaggggcgcggtatcgggcttgtcaataaaatacgcgcctacgcgttgcaggacggcggcatggacaccgtggaagccaacgagcatttgggcttcgcgccggatttacgcgattacggcataggggcgcagatattggttgacttggggataagaaagctgcgtttaatgaccaacaacccgcgaaagatcgttgggcttgaggggtacgggctggaggtaacggagagggtgccgatagagataaatccgggctcgtgccgantctga

SEQ ID NO: 12456 - protein, 323 aa, Unknown
  Obtained from environmental sample
  DOMAIN (1)...(142): 3,4-dihydroxy-2-butanone 4-phosphate synthase
  misc_feature (1)..(323): Xaa is any amino acid
MKGRRLDELGIPLMVSANTSRFETAFTVPFEAREGTTTGISFHDRAATVLKLVDPKSVPGDFVMPGHMFPIRAREGGVLVRSGQTEASVDLARLAGLTPSGVICEVMNEDGTMARMPQLIEIGKRHGIKIISVVDIIRYRTAHERFVKRAAQTRLPTRHGEFSMIAYEDGLTGAVHVALQAGEIDSEKPVLTRVHSECFTGDILGSLRCDCGEQLHTAMLRVASEGGVVLYLRQEGRGIGLVNKIRAYALQDGGMDTVEANEHLGFAPDLRDYGIGAQILVDLGIRKLRLMTNNPRKIVGLEGYGLEVTERVPIEINPGSCRX

SEQ ID NO: 12457 - DNA, 642 bp, Unknown
  Obtained from environmental sample
  misc_feature (1)..(642): n is a, c, g, or t
atgctcgttggcttccacggtgtccatgccgccgtcctgcaacgcgtaggcgcgtattttattgacaagcccgataccgcgcccctcctgacgcagatagaggacgaccccgccctcgcttgccaccctgagcatggcggtatgcagctgctcgccgcagtcgcagcgcaacgaacccaaaatgtcgccggtaaagcactcggagtgaacgcgggtcagcaccggcttctcggagtcaatctcgcccgcctgcaacgcgacatgcaccgcgccggtcaacccgtcctcgtaagcaatcatactaaactcgccgtggcgcgtgggcagccgcgtctgcgcggccctcttgacaaaccgctcgtgcgccgtacggtaacggattatgtcaaccaccgatattatcttaataccgtgccgcttccctatctcaataagctgcggcatccgagccatagtcccgtcctcgttcatcacctcgcatatcacccccgacggggtgagcccggcaagcctcgccaaatcgaccgatgcctccgtctgcccgctacggaccagcacgccgccctcccgcgcccttatcgggaacatgtgccccggcatgacaaaatcgcccggaacgctttttgggtcaacgagctttaa

SEQ ID NO: 12458 - protein, 213 aa, Unknown
  Obtained from environmental sample
  misc_feature (1)..(213): Xaa is any amino acid
MLVGFHGVHAAVLQRVGAYFIDKPDTAPLLTQIEDDPALACHPEHGGMQLLAAVAAQRTQNVAGKALGVNAGQHRLLGVNLARLQRDMHRAGQPVLVSNHTKLAVARGQPRLRGPLDKPLVRRTVTDYVNHRYYLNTVPLPYLNKLRHPSHSPVLVHHLAYHPRRGEPGKPRQIDRCLRLPATDQHAALPRPYREHVPRHDKIARNAFWVNEL

SEQ ID NO: 12459 - DNA, 495 bp, Unknown
  Obtained from environmental sample
  misc_feature (1)..(495): n is a, c, g, or t
atgatggccgagattggattggcatgcgccatggtgttggttatggccgcgtttggctgcgcccccccgaaatctccggtcgacgaagcggcgcagcaggcgcagggtgcggcaacgacggccgctgccagcttgggcgatttggatcgcgccatcaaaaccatcactgaaggcatcgtttactttgaatatgacaaatacgacattcagccccagttcaacgacatgctgaagcaaaaggccgaactgctcaagctgttcccgatgttgcgcatccgtattgaaggcaactgcgacgaacgcggaacgaacgagtacaacttggcgctcggcggccgccgcgcccgcgctgcgcatgactacctggtgcggcttggcgtgaatcccaagcagatcgaaaccatcagctacggcaaggaacgtccggctgtgacgggcagcacccaggaagcatgggccaaaaaccgccgggatgagttccaggttctgcgctga

SEQ ID NO: 12460 - protein, 164 aa, Unknown
  Obtained from environmental sample
  SIGNAL (1)...(19)
  DOMAIN (61)...(156): OmpA family
  misc_feature (1)..(164): Xaa is any amino acid
MMAEIGLACAMVLVMAAFGCAPPKSPVDEAAQQAQGAATTAAASLGDLDRAIKTITEGIVYFEYDKYDIQPQFNDMLKQKAELLKLFPMLRIRIEGNCDERGTNEYNLALGGRRARAAHDYLVRLGVNPKQIETISYGKERPAVTGSTQEAWAKNRRDEFQVLR

SEQ ID NO: 12461 - DNA, 597 bp, Unknown
  Obtained from environmental sample
  misc_feature (1)..(597): n is a, c, g, or t
atggattttattattagtaacggcaatatcgtaacgccggaagggacttactgcgccgatttgtttatcaaaaacggcgtgattgccgaaatcggaaccggacttaccgcatcgggagttcaaacggttgacgcgaagggaaaatatgttttacccggcggcatagacgtgcatactcaccttgctatgcccttcggcggcacggtttccgcggacgattacgagtcgggtacgcgggcgggcgtttgcggcggcgtaacgacggtgttcgattacgctattcagcgcaaaggacgcggtatagtggaaacggttaaagaacgccgcgctatggcggaaaagggcgcctgcgcggatatcgccttccattgcgcgattaccgaccttaatggcggcgctatcctggaagaatttgacgcggccgccgattacggcgttacaagctttaagtgctttatggtgtaccgcaaggaaaacatgatggtagacgacggcacattatgcgaaattctggaaagaaccaagaacgccggtatactgcttaacgtccatgctgaaaatcccgacgttatagacgcgcgggtggcaaattcttaa

SEQ ID NO: 12462 - protein, 198 aa, Unknown
  Obtained from environmental sample
  misc_feature (1)..(198): Xaa is any amino acid
MDFIISNGNIVTPEGTYCADLFIKNGVIAEIGTGLTASGVQTVDAKGKYVLPGGIDVHTHLAMPFGGTVSADDYESGTRAGVCGGVTTVFDYAIQRKGRGIVETVKERRAMAEKGACADIAFHCAITDLNGGAILEEFDAAADYGVTSFKCFMVYRKENMMVDDGTLCEILERTKNAGILLNVHAENPDVIDARVANS

SEQ ID NO: 12463 - DNA, 783 bp, Unknown
  Obtained from environmental sample
  misc_feature (1)..(783): n is a, c, g, or t
gtgtatactcttctttttggccgtatggcttacggcacgcgctggctgaggataggcgcctttgggttacaggcgtccgaattcgcgaaaatcactaccataatctttctggcccgctaccttaccgataccaggctgagcgaaaattcctttgtccggtttatcatatcctgcttaattgtgtttgtgccgatggggatcgtgtttatacagcccgatcttggcaccgcgcttgtgtttatcccgattcttctttccatgacgtatatagccggtatatcaatgcgttatatagtttttttggcgtcctgcattttcctgaccggtattctgacggttctgcccctttggcagacgtatattttacgcaggtccttgtctaccctgcagttactgaccaatccgcggctcattgtgattgttgttcttgccttaagccttattattggcattgcgctttttggttttcttaaatacaagaagcggtattttttctggatggtgtacgcttttacgattattgttttttcgttaggcgcttcttatgccgcccgcatactgctgaagaattaccagatcatgaggcttattgtatttctcgatccgaatatagatccgcgtggagcgggctggcatattatacaatccgtcacggccattggctcgggagggcttgcggggcagggttatttaaagggaacccagagtcattaccgcttccttcccgaacagagcaccgacttttcttctcgatttctccgagaaacggctcggccgatctga

SEQ ID NO: 12464 - protein, 260 aa, Unknown
  Obtained from environmental sample
  misc_feature (1)..(260): Xaa is any amino acid
MYTLLFGRMAYGTRWLRIGAFGLQASEFAKITTIIFLARYLTDTRLSENSFVRFIISCLIVFVPMGIVFIQPDLGTALVFIPILLSMTYIAGISMRYIVFLASCIFLTGILTVLPLWQTYILRRSLSTLQLLTNPRLIVIVVLALSLIIGIALFGFLKYKKRYFFWMVYAFTIIVFSLGASYAARILLKNYQIMRLIVFLDPNIDPRGAGWHIIQSVTAIGSGGLAGQGYLKGTQSHYRFLPEQSTDFSSRFLRETARPI

SEQ ID NO: 12465 - DNA, 897 bp, Unknown
  Obtained from environmental sample
  misc_feature (1)..(897): n is a, c, g, or t
atgagctgcgcgagctccaaaattgcaggcggctacacagaagcttgcccaaatggtatcgcctatacaaaccgcatacacacaaccttttgcttggggcacagccacaggcaggctttccagcgtgaccccaaatttgcagaatattccggtgaggagcgaagagggcaagaaaataagggcggcattgttccaagccaaaagaactggaaaataatttctgttgattattcgcaaatagaacttagaatgttagctcatttgagcggtgacccagagttaaaaaacgcttttttaaaaggagaggatgtccatagcataacggctgcgaaaatttttgggacaagcgaggttagccacgaaatgagggctaccgcaaaggttgtgaattttgggataatttatggaatgagcgcattcaggcttgcaaaagatttgcacatagctcgttccaaagctgtggaattcataaatgggtatttcagtttttacagcaaggtgaaagaatattttgaggaagttgtgaaatctgcaaaagaaaacggctttgtagaaacaatggcaaaaagacggcgttatttgcccgaattgaacgcgagcgaccatcaggagcgagcggcagcagagcgcgtagccatgaacacgcctattcagggcagcgcggcagatttgattatggaggcaatgcttcgtttacagagcaaaataaaaaccgaaaacttgccgctgagaatgcttttgcaagttcacgatgaacttgtttttgaatgccctgaagaaaaggcagttgaattttcgcaaatgattaagagcgaaatggagaatgctttgcctttggatgttccgattgttgccaatgctggtgtggggaataactggctggaagctgggaaatag

SEQ ID NO: 12466 - protein, 298 aa, Unknown
  Obtained from environmental sample
  DOMAIN (2)...(296): DNA polymerase family A
  misc_feature (1)..(298): Xaa is any amino acid
MSCASSKIAGGYTEACPNGIAYTNRIHTTFCLGHSHRQAFQRDPKFAEYSGEERRGQENKGGIVPSQKNWKIISVDYSQIELRMLAHLSGDPELKNAFLKGEDVHSITAAKIFGTSEVSHEMRATAKVVNFGIIYGMSAFRLAKDLHIARSKAVEFINGYFSFYSKVKEYFEEVVKSAKENGFVETMAKRRRYLPELNASDHQERAAAERVAMNTPIQGSAADLIMEAMLRLQSKIKTENLPLRMLLQVHDELVFECPEEKAVEFSQMIKSEMENALPLDVPIVANAGVGNNWLEAGK

SEQ ID NO: 12467 - DNA, 882 bp, Unknown
  Obtained from environmental sample
  misc_feature (1)..(882): n is a, c, g, or t
atgatcagatcggccgaggatccctgcttatcactgtgggaaatcgccaaccgcgccagaaccagaactatgaactgggaaggggtagtaaaagcaaactttgcccccgatgtagaccgaattgaaagccttgatatagggcttgtattgccggacggaacaacttattatgtgcgcgacgacgcttccgccaacctgggcgacagggcttatgtcaaacaggcttttgccggaaaaagtacggtttcggacgtgcttataagccgcgctaccaataagcccgtcgtgatgctcgccgccccgatttttaaagacgacagcaagaacgcccctgttttaggcgtagtggtcgcgcgtaaggacggtcctacattcctcacaggccttgtaaacgatatacaagccaattacaaaacagagtacggttttttggttaacagcgatggaacaatcatagcccaccctgacacgaaacttgtaaacaatcaatttaaccctataaaagaagctgaaaaagacctttcccaaaaaccattggcggatatgatagcgaaaatcataaaagaaaaaacaggcagcgcccaatatgttaataacgggaaagagatggtctgcgcttttacgccgcttcccggctacgattggatatttgtccaaaatgtagagaaaaacgaagtgcttgcccctgtaatatatatccgcaatatcatgctgttaatcgggttaatttgcgcggcgctgggcgttattgtcgcaattattgccggacgttccataacaaaacctttaaccggtataacaaaaatagttaaacatacaggcagcggagatttaccatgcgcgtcaatgtcaattcaacgacgagattggcgaaatggctaa

SEQ ID NO: 12468 - protein, 293 aa, Unknown
  Obtained from environmental sample
  DOMAIN (82)...(167): Cache domain
  misc_feature (1)..(293): Xaa is any amino acid
MIRSAEDPCLSLWEIANRARTRTMNWEGVVKANFAPDVDRIESLDIGLVLPDGTTYYVRDDASANLGDRAYVKQAFAGKSTVSDVLISRATNKPVVMLAAPIFKDDSKNAPVLGVVVARKDGPTFLTGLVNDIQANYKTEYGFLVNSDGTIIAHPDTKLVNNQFNPIKEAEKDLSQKPLADMIAKIIKEKTGSAQYVNNGKEMVCAFTPLPGYDWIFVQNVEKNEVLAPVIYIRNIMLLIGLICAALGVIVAIIAGRSITKPLTGITKIVKHTGSGDLPCASMSIQRRDWRNG

SEQ ID NO: 12469 - DNA, 636 bp, Unknown
  Obtained from environmental sample
  misc_feature (1)..(636): n is a, c, g, or t
atgaaagaaaaaccgattattttcaagccggaaatggtaaaggcgattttggaaggcgtgaaaacgcagacaagaagaattattaatccgcagccggaatattacactggcgaaggaaaaagaacgctttacagcttcaaagacggattgttcgccatgaatttctatcctgaaacttccctgcttgtcgaacatagcccttataagcccggcgacattctttgggtgagggaaaaacattgtaacgtgaacagaccgggagtagaacccgaatactattattttgccgatacgctttttgtcgaatgtgaggattacgacccgaaagaatggacgtggaagtcgccgcggtatatgaagcgtgaagccgcccgcctgtttttagaagtcaagtccgtaagatatgagcggatacagagtataagcccagaggattgcgtcgccgaaggagccgtagaaaaaccccattatatgaaatggggcggcgaaaaatgccttgctatacataaaagatataaaaaagattatgcgacattgtgggataagatcaacgccaagcgcggttatccgtgggaaagtaatccgtgggtttgggttatcgagtttataaaaattgaaaacggaggggtaaaatga

SEQ ID NO: 12470 - protein, 211 aa, Unknown
  Obtained from environmental sample
  misc_feature (1)..(211): Xaa is any amino acid
MKEKPIIFKPEMVKAILEGVKTQTRRIINPQPEYYTGEGKRTLYSFKDGLFAMNFYPETSLLVEHSPYKPGDILWVREKHCNVNRPGVEPEYYYFADTLFVECEDYDPKEWTWKSPRYMKREAARLFLEVKSVRYERIQSISPEDCVAEGAVEKPHYMKWGGEKCLAIHKRYKKDYATLWDKINAKRGYPWESNPWVWVIEFIKIENGGVK

SEQ ID NO: 12471 - DNA, 729 bp, Unknown
  Obtained from environmental sample
  misc_feature (1)..(729): n is a, c, g, or t
atggcaaaacgtacgctgatttctttcgactacgcggtgaaatacctgctgcgcgaacaagaagactatgtgattctaagcggtttcctcaccgaactcatgggcaggaagatcgaagttatcgaccttatccccgaagaaaccgtcaaatccgatcccgacgaaaaaactaaccgcgttgacctgaaagcgcatatagacggcggcgaaatcgccgtatttgaaatacagttccatcaagaatatgacttcttcggcagggtgctgttcggcgtaagccatgcgataacagaccaagtccgcagcgggaaactgtacaacataaagaaagtctactcgataaacatagcgtattacaacctgaccgcaaaacgcgagtacctattcttcgggaagttcagcggctttcaaggcattcatttccatgaagaatctatcccgtttgcccaaacagcggcccaagactcgaaagaactcattgatattcacccggaatactatttgatactgccgaatatgtttgacgagacgctgcgcggcaagttcgacgaatggatttacatgctgaagaactccgcagtccgcgatgacttcaccgccgcaggtataaaagaggctaaggaaaaactaaacgaactgaccctgccgccaaaagaacttgcggcatatcataagtacatggaaaacatccgaagcataaacagccaagcgatgcctcggccgatctga

SEQ ID NO: 12472 - protein, 242 aa, Unknown
  Obtained from environmental sample
  misc_feature (1)..(242): Xaa is any amino acid
MAKRTLISFDYAVKYLLREQEDYVILSGFLTELMGRKIEVIDLIPEETVKSDPDEKTNRVDLKAHIDGGEIAVFEIQFHQEYDFFGRVLFGVSHAITDQVRSGKLYNIKKVYSINIAYYNLTAKREYLFFGKFSGFQGIHFHEESIPFAQTAAQDSKELIDIHPEYYLILPNMFDETLRGKFDEWIYMLKNSAVRDDFTAAGIKEAKEKLNELTLPPKELAAYHKYMENIRSINSQAMPRPI

SEQ ID NO: 12473 - DNA, 555 bp, Unknown
  Obtained from environmental sample
  misc_feature (1)..(555): n is a, c, g, or t
ttgattatcggcgagcggccgagtgtcttaccattactctgcgccctggtgttggccgtcactttgtatctgctgcccggccttcgtgactggttcatggttccgggtcggggacaattttcgccgacaagactgcggtgctgggtaacgctgctgtcccatgttatgggccatacgggctgggctcaccttgtcagcaatttttccattatcctccttgtcggaccgatgttggaggagaattacggatcgctcgccctgcttgtgatgatcgccattaccgccctggttaccggcatccttaacgtttttttcttcccgaacgccctctggggcgcttccggcgtggtctttatgatgatactgctttcctcatttaccaatttttctcatggggaaatccccctgacctttattcttgtattaacgctgtacatcggcgaccagttgtttaaatcctttggcggcactggcaatatctcacactttgcccacatcgccggcggtttctgcggcagcctttttggtttcttcatctcgccaaaacagtattag

SEQ ID NO: 12474 - protein, 184 aa, Unknown
  Obtained from environmental sample
  SIGNAL (1)...(19)
  DOMAIN (42)...(184): Rhomboid family
  misc_feature (1)..(184): Xaa is any amino acid
MIIGERPSVLPLLCALVLAVTLYLLPGLRDWFMVPGRGQFSPTRLRCWVTLLSHVMGHTGWAHLVSNFSIILLVGPMLEENYGSLALLVMIAITALVTGILNVFFFPNALWGASGVVFMMILLSSFTNFSHGEIPLTFILVLTLYIGDQLFKSFGGTGNISHFAHIAGGFCGSLFGFFISPKQY

SEQ ID NO: 12475 - DNA, 924 bp, Unknown
  Obtained from environmental sample
  misc_feature (1)..(924): n is a, c, g, or t
atgacagatcggccgagcatttcggttatttttttcagagggagtaaggatccaaaatacatcttcttttcgcttttatccctatcatttgcccttgcttattccaatatcggtttttcatttgactccgattattataccacacttgtaaaaacaacacgctgtttccaactgctctcttttggcttttattcgctgttcattattgaatcggtaggactgttcgccaagcaaaaaaaatatattgtaacaggaattattgtttacagtattgtatgcgcctcatatatcgctgttcaaaaagataagtatgcggtgagcgttgctttcactgttattaccgatatttatgtactaccggtattgttgttttgtattgttatttcagctgtttctatcatactaaaaaagaattattcaattgttttgctgttgtttattacgctgacagtcgccgcggcaagtcttcgcgatatgctgttgttaagcgccgccgtccagccgctgttttggttcgcgccttatgcttttctgcttcttgtaattgttatttatggaattcttgtatacgaggaaagcagtctttttaaaaatttcaaacgttatgttcccgccgatcttgtaatccagcttatcaaccaaaacataactgcggatttaggcggcaaacagcaggaactgacagtttttttcagtgatattaggaaattcacttctattgttgaaaagatggaacccgaaagactgattcaggatctttgtgtttactttgagagtatttccaaaaccattctcgcgaacaacggaactattgataaatatatcggagacgcggtaatggctttctggggcgctccggttccgaatgaagacatgcgaaaaaaagctgcaatgccgcaatcactatcaacacaatctgcataa

SEQ ID NO: 12476 - protein, 307 aa, Unknown
  Obtained from environmental sample
  misc_feature (1)..(307): Xaa is any amino acid
MTDRPSISVIFFRGSKDPKYIFFSLLSLSFALAYSNIGFSFDSDYYTTLVKTTRCFQLLSFGFYSLFIIESVGLFAKQKKYIVTGIIVYSIVCASYIAVQKDKYAVSVAFTVITDIYVLPVLLFCIVISAVSIILKKNYSIVLLLFITLTVAAASLRDMLLLSAAVQPLFWFAPYAFLLLVIVIYGILVYEESSLFKNFKRYVPADLVIQLINQNITADLGGKQQELTVFFSDIRKFTSIVEKMEPERLIQDLCVYFESISKTILANNGTIDKYIGDAVMAFWGAPVPNEDMRKKAAMPQSLSTQSA

SEQ ID NO: 12477 - DNA, 399 bp, Unknown
  Obtained from environmental sample
  misc_feature (1)..(399): n is a, c, g, or t
atgtctgatgttttttgtttattaaaccacgaacttacgcccaaacaaaaagaagaattatattcctctttcggcgcaaaaaacattatttaccctccctcgtcaatttcggctctatggggcgcgatcccgaccgaaaaagaattaacaaaaacccatcttgaacatttcaccgcatggctgcgggaagccaagcccggagatacggtggtattgcagggcgagcacagcgccacattcgccttggcggatttcgctcttcaaaacggccttatccccgtatgcgcggtatcagaacggacaacgcaggaagttcaggaaggcgagaaagtcattaaaaaaaacatttttgagcatatttgtttcaggcgctatagacattacaaggacttgatataa

SEQ ID NO: 12478 - protein, 132 aa, Unknown
  Obtained from environmental sample
  misc_feature (1)..(132): Xaa is any amino acid
MSDVFCLLNHELTPKQKEELYSSFGAKNIIYPPSSISALWGAIPTEKELTKTHLEHFTAWLREAKPGDTVVLQGEHSATFALADFALQNGLIPVCAVSERTTQEVQEGEKVIKKNIFEHICFRRYRHYKDLI

SEQ ID NO: 12479 - DNA, 849 bp, Unknown
  Obtained from environmental sample
  misc_feature (1)..(849): n is a, c, g, or t
atggacgaattggggcttaaagaaagccgtaactatacgcgttttgtgaaacttgacaggaattaccttgccgctgttgtttccgcctcggataaagattcattccgccgccacgagtggaattttccggtcgtaggacgcatgccatacaagggttttttcaatattgaggacgcgcgcaaagagcgggcaaaactggaaaaaaaagaccttgatgtctggattcgcggggtagacgctttcagcactctgggctggttcaaagaccccatttattcctatatgctggattactcaccatcaagaatggcggatctgattatccacgaacttgttcacgcaacgatattcataaaaggacaggttaagtttaatgaggaattggcggaattcatcggcagtgagggagcaaaacttttcatagtaaagcgatacggggaaaattcggacgaataccggcaaatatttacgtccgacaaagacagccaaaattatgtcgcgtttattcaggaattgatcgcggaacttgacgttctttacacaagtgaaaccggcagggaagaaaaattagcggaaaaagagcggataattaacgccgcgaaagagcggtttaaagccgagtacgacaagcgtttttccaatgataattacaaaggttttgcggaattaccggtaaacaacgcgtatctggaacttttcaggctataccacacagaggataatttttacacggaactctatgagcgttccggaaagaaccttcccgcttttatttccgcgcanaaaaaattacaaaaaaaggcaatccccgtcttcaacttgaaaacgctctttttcagcgataattaa

SEQ ID NO: 12480 - protein, 282 aa, Unknown
  Obtained from environmental sample
  misc_feature (1)..(282): Xaa is any amino acid
MDELGLKESRNYTRFVKLDRNYLAAVVSASDKDSFRRHEWNFPVVGRMPYKGFFNIEDARKERAKLEKKDLDVWIRGVDAFSTLGWFKDPIYSYMLDYSPSRMADLIIHELVHATIFIKGQVKFNEELAEFIGSEGAKLFIVKRYGENSDEYRQIFTSDKDSQNYVAFIQELIAELDVLYTSETGREEKLAEKERIINAAKERFKAEYDKRFSNDNYKGFAELPVNNAYLELFRLYHTEDNFYTELYERSGKNLPAFISAXKKLQKKAIPVFNLKTLFFSDN

SEQ ID NO: 12481 - DNA, 891 bp, Unknown
  Obtained from environmental sample
  misc_feature (1)..(891): n is a, c, g, or t
gtgaagaaaaaagaagaacatatttcttatttcattctggtgtttcccgccttatttttgtatcttgcggtgatggctttccctacggttttttccgtagttttaagtttaaccaattattcgggcggcaaggtttttggcaacccgaatgtcggtttcgcgggcgtgaaggcctacaaggaaattcttaccgatacatacttctatatgtcgctcaagaacaatatctggatagtgctcatatcggttttcgggcagatcccgctgggcttttttctcgcctacatactgtccagaaaacttatccggggaacggatttttttcaatcaatggtataccttccaaatgttatttccaccgttatcatcggcattctgttcagcaaattctttttaagttccaacagcgtgtggctggagattcagcgtatctttaatccggccgcggaatttgtacccggcaaaaacgcgatgctgccggtgcttgcggtgatactctggatgtataccggaacttatgtgatcatttttctggctaatctacagaagatagacgtatcaattattgaagcctccaagattgacggcgcgaccgaaatgcagactttgcgttatattattctgccggctttgtccggggtgattgttaccaccgcgatcctggcgatctcgggctcgcttaaatcctttgacttgatttttgtaatgacacagggggggcctgcccaccgtaccagcgtccttgccctgtatatgtacgaaaaggcgttccggggggcgccgaattatccggtggcaaacgccatttcgacggtgatggttattatcagctttatactgatcgcaatcaccagaagcgctgaaaacgcttatcttcggagtatggtatga

SEQ ID NO: 12482 - protein, 296 aa, Unknown
  Obtained from environmental sample
  SIGNAL (1)...(26)
  DOMAIN (68)...(293): Binding-protein-dependent transport system inner membrane component
  misc_feature (1)..(296): Xaa is any amino acid
MKKKEEHISYFILVFPALFLYLAVMAFPTVFSVVLSLTNYSGGKVFGNPNVGFAGVKAYKEILTDTYFYMSLKNNIWIVLISVFGQIPLGFFLAYILSRKLIRGTDFFQSMVYLPNVISTVIIGILFSKFFLSSNSVWLEIQRIFNPAAEFVPGKNAMLPVLAVILWMYTGTYVIIFLANLQKIDVSIIEASKIDGATEMQTLRYIILPALSGVIVTTAILAISGSLKSFDLIFVMTQGGPAHRTSVLALYMYEKAFRGAPNYPVANAISTVMVIISFILIAITRSAENAYLRSMV

SEQ ID NO: 12483 - DNA, 681 bp, Unknown
  Obtained from environmental sample
  misc_feature (1)..(681): n is a, c, g, or t
atggcagacctgttgaaaaacgagtcatggcgcacgccaaccctgaataatgttaatatcaagtacgagatcaaggacggagagcttacgattgaaccggtacgtatgaacatcgcgcagaccgcgcttgaactttccggcggtcagaaccttgatatgtcattgaattacaaagtaaacgcgacagtgcccgcttcagtggtcggttcgggcgcgaccgatattttaagcaaaatacccggcggcgcaaaaatcaacgaatttaaattgacaggattgataggcggcacggcaaccaagcctgtcgtaactctcggtgtcgccgatatggcaagcagtattgccggagccgttaaagacgcggtagtcggacaagtgaaagaagaggcagagaaacaaataaaagccatcttggcagaagccgaaaaacagtctcaaaacatccgtaatacggcaaaacaagccgccgacaagatacgcaaagaagcaaacgatgccgcccaaaaaatcgaaaatgaggcaaaaaaccctatccaaaaggtagcggctaaaacagcggccgacgcgctccgtaaagaaggtgaaactaacgccgtaaaggtagaacaggaagctganagacagattaagaccattatggataacgccaacaagaaagctgacgatttaaggaaaagctga

SEQ ID NO: 12484 - protein, 226 aa, Unknown
  Obtained from environmental sample
  misc_feature (1)..(226): Xaa is any amino acid
MADLLKNESWRTPTLNNVNIKYEIKDGELTIEPVRMNIAQTALELSGGQNLDMSLNYKVNATVPASVVGSGATDILSKIPGGAKINEFKLTGLIGGTATKPVVTLGVADMASSIAGAVKDAVVGQVKEEAEKQIKAILAEAEKQSQNIRNTAKQAADKIRKEANDAAQKIENEAKNPIQKVAAKTAADALRKEGETNAVKVEQEAXRQIKTIMDNANKKADDLRKS

SEQ ID NO: 12485 - DNA, 909 bp, Unknown
  Obtained from environmental sample
  misc_feature (1)..(909): n is a, c, g, or t
atgaaaagaaatcaaaaacctaaaacaacacagaacgatgtagcccgtcatgccggtgtaacccgaagcatggtatcttatgtaattaacggcagcgaccgctctgtctcgcccgttacaaaacaaaaaattcttgacgccataagcgagcttgaatacagcccgaataaattcgcccaggctttgagcgttgggaaaaacagagttttggcggatcaaaatatcggcattgtgctgtgcagcgccgatatgttcctgcgtccgtattatgcggaaatattgactggaatacatcaggctgctcacgaaaaagattttcacataaggtttatccgtttttttgatgatttaaaagatccgattctctttaatcagcttattcattctgaagaaatctgcggacttctgatgatagcccttgatcaatgtatagaaacccgtgaaaacaacgagcttattgaacgaataaaaccaaaaattgatcagattgtctgtgtggattggcagacacccggtttatcttctgtttcatttgacagacgttcagcggcttttcaggctgtaagttatctctttgatcagggctattcagatatcgcgtatatcggcgaaccggatcagcgtgttatcggattcaagcaggcttttttggaacatggtgcggaagaaatatccgggctttacattggagtcgcggcggatatggcgtccggacatgacgttgtacaacaaatgcaccanagccgcggcgctttacccaaagccatttgcgccggttccgacgaagtggctgttggaattctccattatctgcatgaacatggaattgcagtccctgaagatatcgcccttatcagcattgataacattgaaatggccgaatacactaatccccaacttacactgtga

SEQ ID NO: 12486 - protein, 302 aa, Unknown
  Obtained from environmental sample
  DOMAIN (9)...(34): Bacterial regulatory proteins, lacI family
  misc_feature (1)..(302): Xaa is any amino acid
MKRNQKPKTTQNDVARHAGVTRSMVSYVINGSDRSVSPVTKQKILDAISELEYSPNKFAQALSVGKNRVLADQNIGIVLCSADMFLRPYYAEILTGIHQAAHEKDFHIRFIRFFDDLKDPILFNQLIHSEEICGLLMIALDQCIETRENNELIERIKPKIDQIVCVDWQTPGLSSVSFDRRSAAFQAVSYLFDQGYSDIAYIGEPDQRVIGFKQAFLEHGAEEISGLYIGVAADMASGHDVVQQMHXSRGALPKAICAGSDEVAVGILHYLHEHGIAVPEDIALISIDNIEMAEYTNPQLTL

SEQ ID NO: 12487 - DNA, 762 bp, Unknown
  Obtained from environmental sample
  misc_feature (1)..(762): n is a, c, g, or t
gtgatctccaaccacaaggcacaccgctggactcccgacgtgcccgtactggtggccgaggtgaatcatcagcatatcgacattattccggcccagcgaaaagcgcgcggatgggacaagggtttcatcgtggttaaacccaactgctccatccagagctacaccaccccgctgtacgcgctcatcagggcgggttacgatatcaagcgccttattgttaccacccttcaggccgtcagcggtgcgggctatcccggcgtgccgagcctcgacatgatcgacaacatcgtcccctacatcggcggggaggaagaaaaatcggaaatggagccgttaaagattctgggcactatggaaggaaacattcttaaaaacgccgaattgccgaaaatctccgcccactgcaaccgggttccggtcagcgacggacacactgcctgcgtcagcgtggagttcggcgagaaaaagccttccattgaggaaatcaaaaaaatctggtcggaattcagaagcctgccccaggagctaaagctccccctggccccggagcggcccattatcgtcagggaagaaaacgaccgcccccaaccccgcaaagaccgcgacacggacaaggccatggccgtaactgtcggccgcatccggccctgcaacgtctttgatatacgctttaccggcctttcccacaacacggtccgcggcgcggcaggcggcggcgttctcaacgcggagttgttgaagcacaaggggtttcttgggtag

SEQ ID NO: 12488 - protein, 253 aa, Unknown
  Obtained from environmental sample
  DOMAIN (58)...(233): Semialdehyde dehydrogenase, dimerisation domain
  misc_feature (1)..(253): Xaa is any amino acid
MISNHKAHRWTPDVPVLVAEVNHQHIDIIPAQRKARGWDKGFIVVKPNCSIQSYTTPLYALIRAGYDIKRLIVTTLQAVSGAGYPGVPSLDMIDNIVPYIGGEEEKSEMEPLKILGTMEGNILKNAELPKISAHCNRVPVSDGHTACVSVEFGEKKPSIEEIKKIWSEFRSLPQELKLPLAPERPIIVREENDRPQPRKDRDTDKAMAVTVGRIRPCNVFDIRFTGLSHNTVRGAAGGGVLNAELLKHKGFLG

SEQ ID NO: 12489 - DNA, 645 bp, Unknown
  Obtained from environmental sample
  misc_feature (1)..(645): n is a, c, g, or t
atgatagtgtcaaaagtaatgacagaaaatccggtttttatccgccccgacatttccctctccgacacccgctctcttatggacagggagaaaataagccatctgccggtgttggataagcataatacccttgtgggcattatcacccggaaagacctgttaaaggccggtccctcgcccgcgacgagtcttgatatgtacgagataagctatcttctttcaaaactcaccgttgaaaaaataatggaaaaaaaagtgattaccgttgaggaaaacgaagtggtagaggaagccgcccggatcatggccgatcagggcattggctgcctgccggttatgaacgcgtccctgctggtgggcattatcacagataccgaccttttccatgtgtttatcaacgcgtttggcgccaggcacgaggggatcagagtcaccgtgaacatggacgaaaaaccgggccaactggcgaaattttcccaggcggtagcggagagggggggcaattttgccgcctttatgtcctcggaaggggacgatctgtcccatcgcagggcaaccctgaaaataacaggcattagccgcgccgatatcgaagcggcagtaaaaacccttgacggtgctgaaattgaagatatacgggaatag

SEQ ID NO: 12490 - protein, 214 aa, Unknown
  Obtained from environmental sample
  DOMAIN (142)...(214): ACT domain
  misc_feature (1)..(214): Xaa is any amino acid
MIVSKVMTENPVFIRPDISLSDTRSLMDREKISHLPVLDKHNTLVGIITRKDLLKAGPSPATSLDMYEISYLLSKLTVEKIMEKKVITVEENEVVEEAARIMADQGIGCLPVMNASLLVGIITDTDLFHVFINAFGARHEGIRVTVNMDEKPGQLAKFSQAVAERGGNFAAFMSSEGDDLSHRRATLKITGISRADIEAAVKTLDGAEIEDIRE

SEQ ID NO: 12491 - DNA, 534 bp, Unknown
  Obtained from environmental sample
  misc_feature (1)..(534): n is a, c, g, or t
atgaaactcaacggagagctggcctttgccgtggtaattgcgattctgattgtcacactggcgctattgcagaattttttgcgttcgacatacggccgggcaatcatggcctgccgtgaggatgaaatcgccgccggcgcgagcggcatagacaccttccgctataaaatgatcggttttgtaattgccgcctttatcgcgggacttggcggaagcctgtatgttatggttgtggggcttgtccagccggaggctgccagatttctcaaatcaatagattttcttatttatgtggtcctgggcggcatgggttccatgaccggatcgatactgtcggcttttgtacttacctaccttcaggagttcctgcgtttcctgcaagactaccgtttgcttatatacccgctgatacttattttggtaatgttcttccgtccccagggtcttttgggcatgaaggagttttcttttgtgcgcctgtttgacaggattgccgctcttatcggaaagcggaaacagggggagggcgcgtga

SEQ ID NO: 12492 - protein, 177 aa, Unknown
  Obtained from environmental sample
  SIGNAL (1)...(23)
  misc_feature (1)..(177): Xaa is any amino acid
MKLNGELAFAVVIAILIVTLALLQNFLRSTYGRAIMACREDEIAAGASGIDTFRYKMIGFVIAAFIAGLGGSLYVMVVGLVQPEAARFLKSIDFLIYVVLGGMGSMTGSILSAFVLTYLQEFLRFLQDYRLLIYPLILILVMFFRPQGLLGMKEFSFVRLFDRIAALIGKRKQGEGA

SEQ ID NO: 12493 - DNA, 852 bp, Unknown
  Obtained from environmental sample
  misc_feature (1)..(852): n is a, c, g, or t
atgagtctgcctgaaactcctgccgccggcgaattgagcaatgccaaagctcttgcctacaaacgtccgttgtttgaattctcaggcgcttgcggcggctgcggtgaaacgccatacgttaaacttatgtcccagcttttcggcgacagggcgcttatcggcaacgccacaggttgttcatcaatctacggtggaaaccttcccactactcccttctgccaacgcgctgacggacgcggtcccgtatggtcaaacagcctctttgaagacacggctgaatttgcgttgggcttcagacttacaagcgacaagcttgcagtccacgcccgcgaaatggccgctaaggcaaagagcgaaggtatcgccgcaggaatcatcgacaaacttcttgcgaatacgcaagctgacgatgccgcgattgacgaacagcgtaaaaatgttgacgaattaaaagccgcccttaaaggcaattccagttccacggcaaaattactgctctcgcttgcagaccacttcattaaaaggtctgtatggggtttcggcggcgacggttgggcttatgacatcggtttcggcggtcttgaccacgtactcgcatccggcaagaacgtaaacctgctctgcttggataccgaagtttactccaacaccggcggtcagatgtcaaaatccactcctgtaggagctatcgcgaagtttgccgcctcaggaaaagagattgtcaaaaaagaccttggcgcaatcgccatgagctacggctatgtctatgtagcgaggatttcgttaggcgctaacatgacccaagttataaagctttccgcgaagctgaatcctacgacggtccgtctttga

SEQ ID NO: 12494 - protein, 283 aa, Unknown
  Obtained from environmental sample
  DOMAIN (156)...(283): Thiamine pyrophosphate enzyme, C-terminal TPP binding domain
  misc_feature (1)..(283): Xaa is any amino acid
MSLPETPAAGELSNAKALAYKRPLFEFSGACGGCGETPYVKLMSQLFGDRALIGNATGCSSIYGGNLPTTPFCQRADGRGPVWSNSLFEDTAEFALGFRLTSDKLAVHAREMAAKAKSEGIAAGIIDKLLANTQADDAAIDEQRKNVDELKAALKGNSSSTAKLLLSLADHFIKRSVWGFGGDGWAYDIGFGGLDHVLASGKNVNLLCLDTEVYSNTGGQMSKSTPVGAIAKFAASGKEIVKKDLGAIAMSYGYVYVARISLGANMTQVIKLSAKLNPTTVRL

SEQ ID NO: 12495 - DNA, 357 bp, Unknown
  Obtained from environmental sample
  misc_feature (1)..(357): n is a, c, g, or t
atgaaaacgatttttgttgtagacgacagtgatactaacctgtcaatggctgaggaggcgctggataggttatatcgggttatgacaatgccctcagcggctaaaatgttctctcttttagcgaaaatgacgcctgatctcattcttttagacatagaaatgcccgaaatggacggatttgaagctcttaacaggttaaaatccgaaagtttatgggcaaatattcctgtcgtgtttttaacgggccgtaccgatgccgcagtggaggtacacgggtttgaaatgggagccgttgattttataacaaaaccgttttccgcgcccgtactgataaatcgtattaaaacgcattcttga

SEQ ID NO: 12496 - protein, 118 aa, Unknown
  Obtained from environmental sample
  DOMAIN (2)...(115): Response regulator receiver domain
  misc_feature (1)..(118): Xaa is any amino acid
MKTIFVVDDSDTNLSMAEEALDRLYRVMTMPSAAKMFSLLAKMTPDLILLDIEMPEMDGFEALNRLKSESLWANIPVVFLTGRTDAAVEVHGFEMGAVDFITKPFSAPVLINRIKTHS

SEQ ID NO: 12497 - DNA, 300 bp, Unknown
  Obtained from environmental sample
  misc_feature (1)..(300): n is a, c, g, or t
gtgcgaggtatgataaccgtccgtctgaaacaaaccgactatgacgacatcgtcgctcacgccataaggtgtctgccgagcgaagcttgcgggttgatcgccggaaacgcggataacgatgttaaaaccgtggagaaggtctacctgttgtccaatccggacgatagccctgtgcacttctctatcgaccctaaagttcagtttactgcaattaaggatatgagagcgaacggacttattcctctcggcaattttcactcccatccggcaactccggcgcgcccgtcggaagaggagtaa

SEQ ID NO: 12498 - protein, 99 aa, Unknown
  Obtained from environmental sample
  misc_feature (1)..(99): Xaa is any amino acid
MRGMITVRLKQTDYDDIVAHAIRCLPSEACGLIAGNADNDVKTVEKVYLLSNPDDSPVHFSIDPKVQFTAIKDMRANGLIPLGNFHSHPATPARPSEEE

SEQ ID NO: 12499 - DNA, 642 bp, Unknown
  Obtained from environmental sample
  misc_feature (1)..(642): n is a, c, g, or t
gtgggcaccatcggcatcgccgacgcggacaatgtcgatttatccaatttacagcggcaggtcattcacgccacggccgacgtcgcaaaggccaaggcgctctccgccaaggaaacgatgaacgctatcaatccggacgttacggtaaacgttcaccgcatctttgtcgcctcagacaatataatgaaactgattgccgattatgattttatcattgacggaaccgacaattttccggcgaagttccttataaacgacgcgtgcgtattgtcgaagaaacccttttcccacgccggcatattacgctttaagggacagctgatgacctacgttcccaacgccggaccgtgctatcgctgcatattcaaagaaatgccgcccgcatccgccataccgacctgccgacaggccggagtcataggagcgctcggcggcataataggttcactgcaggctatggaagcgattaaattcatcatcggcaaggggaaactgctgacaagttcgctgcttacatacgacgcgttggaaatggatttccgtaaaataaaacttccgaccgtgaaaacctgcgccgtatgcggggagaatcccagcatactgagcccgtttgactacgaacaagcggtgtgcgaggtatga

SEQ ID NO: 12500 - protein, 213 aa, Unknown
  Obtained from environmental sample
  DOMAIN (2)...(110): ThiF family
  misc_feature (1)..(213): Xaa is any amino acid
MGTIGIADADNVDLSNLQRQVIHATADVAKAKALSAKETMNAINPDVTVNVHRIFVASDNIMKLIADYDFIIDGTDNFPAKFLINDACVLSKKPFSHAGILRFKGQLMTYVPNAGPCYRCIFKEMPPASAIPTCRQAGVIGALGGIIGSLQAMEAIKFIIGKGKLLTSSLLTYDALEMDFRKIKLPTVKTCAVCGENPSILSPFDYEQAVCEV

SEQ ID NO: 12501 - DNA, 873 bp, Unknown
  Obtained from environmental sample
  misc_feature (1)..(873): n is a, c, g, or t
atgacggtcgattataaggcgctgaagtgcggcgggttcatgcaacaagtacagagagacgctttctccctgcggttgaaggtcgtaggcgggaatttgacggcggatcaactgcgaaccattgccgaaatcagtaaaaagtacggcgacggacatatccacctgacctctcggcaaggggtggaaattccgttcatcaaattggcggatgtggaacaggtcaaggccgaattggaaaacgacggcgtgaataccggcgtttgcggtccgagagtacgcacggtgacggcttgccagggcgctgaaatatgtccgtcaggctgtattgacacatacccgttggcgcggcaaatatccgataggtatttcgggcgcgagttggcgcacaagttcaagttcggcgttaccggatgtatgaacaactgcctgaaagcggaggagaacgatctgggcgttaaaggcggttacgtcgtagaatggctgaaagaggcgtgtacattttgcggcgtatgcgtaaaagtatgccgcgaaggggctatcacgcaacacgcgacgaatggcgttgatgagattttgcttgatgaatcaaaatgcaacaactgcgggcgttgcgtaaaatcttgcccgatggacgcgtggatgggagattcaggatacattctctctttcggcggaacgtttggaaaccttatcgcgaagggcgagcagtttttgccggtgatcaaggacaaggagaccctattccgagtggcggacgcggcgttggacttttttgacaaacacgcaaagaagagcgaacgctttcgtgtcgccattgatagagtaggctgggataaatttaaaacagaaatggaggaggcctatcgtggatga

SEQ ID NO: 12502 - protein, 290 aa, Unknown
  Obtained from environmental sample
  DOMAIN (158)...(181): 4Fe-4S binding domain
  misc_feature (1)..(290): Xaa is any amino acid
MTVDYKALKCGGFMQQVQRDAFSLRLKVVGGNLTADQLRTIAEISKKYGDGHIHLTSRQGVEIPFIKLADVEQVKAELENDGVNTGVCGPRVRTVTACQGAEICPSGCIDTYPLARQISDRYFGRELAHKFKFGVTGCMNNCLKAEENDLGVKGGYVVEWLKEACTFCGVCVKVCREGAITQHATNGVDEILLDESKCNNCGRCVKSCPMDAWMGDSGYILSFGGTFGNLIAKGEQFLPVIKDKETLFRVADAALDFFDKHAKKSERFRVAIDRVGWDKFKTEMEEAYRG

SEQ ID NO: 12503 - DNA, 447 bp, Unknown
  Obtained from environmental sample
  misc_feature (1)..(447): n is a, c, g, or t
gtgcgcctcggctgggcagtggttccgtccgatcttaaatatgaaggcggcgaaagcgtcaacgctgactggagccgcgtctgctccacaatattcaacggggcttccaatatcgcgcaggccggcgggattgccgccctggacgatgagggcatgaaagaaatccggggccttaccgatttttacctcggcaacgcccggctgatacgcgaggccctgaaaggcttaggtattgaatccgcaggcggtgacaattcgccgtatatatgggcttactttccgggcagggacagttgggaagttttttcacagatacttgaaaaatgccaggtagtaacgacgcccggagccggctttggccccgctgggaacggctacgtccgtttctccgcctttggccaccgcgccgacgtggaagaagcatgccttaggctgaaaaaattataa

SEQ ID NO: 12504 - protein, 148 aa, Unknown
  Obtained from environmental sample
  misc_feature (1)..(148): Xaa is any amino acid
MRLGWAVVPSDLKYEGGESVNADWSRVCSTIFNGASNIAQAGGIAALDDEGMKEIRGLTDFYLGNARLIREALKGLGIESAGGDNSPYIWAYFPGRDSWEVFSQILEKCQVVTTPGAGFGPAGNGYVRFSAFGHRADVEEACLRLKKL

SEQ ID NO: 12505 - DNA, 390 bp, Unknown
  Obtained from environmental sample
  misc_feature (1)..(390): n is a, c, g, or t
atgtcagacatatatgttcccggtttaagcagcaggttcaacagcggaaaagttatcgaagacctcatgcgccttgagcgcattcccagagatcgcgctgtaagcaatattgagaaaattcaaaaggaaaaaaggtactggcaggatctcagcaataccaccaagaccttgcgcgaaagcgcgactcagctattctcttaccaaaaccccttcaatgaccgcagtgtaaagtccagcgacgaatccgtcctgaccggcaccgccatgagggactcaatgcagcaggacatgtcattcacggttaagcaaatcgcacaggcggatcgttttctttcttcccctctgtcaaacgatttcaaggttgaaggcggaacctacgttttttcatag

SEQ ID NO: 12506 - protein, 129 aa, Unknown
  Obtained from environmental sample
  DOMAIN (10)...(109): Flagellar hook-associated protein 2 C-terminus
  misc_feature (1)..(129): Xaa is any amino acid
MSDIYVPGLSSRFNSGKVIEDLMRLERIPRDRAVSNIEKIQKEKRYWQDLSNTTKTLRESATQLFSYQNPFNDRSVKSSDESVLTGTAMRDSMQQDMSFTVKQIAQADRFLSSPLSNDFKVEGGTYVFS

SEQ ID NO: 12507 - DNA, 702 bp, Unknown
  Obtained from environmental sample
  misc_feature (1)..(702): n is a, c, g, or t
gtgcgcggaaaacgcgttttagtaacaggcgcgggcggttcaatcggcagtgaattatgccgccagttattgtcgggcggagtgtcgcgcctgtacctgctgggacacggcgagaactccatctacctgatcgacaaggaactgcggcttttacaagacgaaggggtcggagaaaaggcggcaatagtgcctgttatcggggacttaaaggacacagattttgttgattacattttaagccatttaaaagccgacgctattttccacacagcggcatacaagcacgtccccatgatggaagaaaaccccgtagccgcgatagaaaacaatgttcttggaaccgagaacctgattaattccgccgtgaaacacggtgtgaaacactttgtacatatttcgacagataaggcagttgatcccgtatctgtttacggcgcgtcaaaacgtatctgcgaacagttggttctttccgcaagcgctcagtcccagaaaagcggcactaactttgtagtcgtccgctttggaaacgtccttggctctcgcggctcgattgtaccgcttttccagcagcaaatcgaaaaaggcggacctgtaaccgtaacccaccccgacgcaagacgctttttcatgaccatcagcgaagcgtgttcgcttgttttaaaaccggcggcgtcggcgagaacggctgtttgtacctgttag

SEQ ID NO: 12508 - protein, 233 aa, Unknown
  Obtained from environmental sample
  DOMAIN (4)...(163): short chain dehydrogenase
  misc_feature (1)..(233): Xaa is any amino acid
MRGKRVLVTGAGGSIGSELCRQLLSGGVSRLYLLGHGENSIYLIDKELRLLQDEGVGEKAAIVPVIGDLKDTDFVDYILSHLKADAIFHTAAYKHVPMMEENPVAAIENNVLGTENLINSAVKHGVKHFVHISTDKAVDPVSVYGASKRICEQLVLSASAQSQKSGTNFVVVRFGNVLGSRGSIVPLFQQQIEKGGPVTVTHPDARRFFMTISEACSLVLKPAASARTAVCTC

SEQ ID NO: 12509 - DNA, 510 bp, Unknown
  Obtained from environmental sample
  misc_feature (1)..(510): n is a, c, g, or t
ttgaatatgaaaaagaagcggttttttttctttctttttgtcatcctgttttttgcatcgctcttcaatgcctggtcccagacaactgctgatgccggaatgacatctacccaattcgatatgtcagggttccccctctggacaaaggatctgcgccgcggtgaaattattgctttcggatcgtttcccttcatgtattttttctctaatttcgggtatgatacttaccgctgggcaaacaacggcaatgatatgcgttacgcgccgtggccgtttaattccgccgggacagtaggaaaaaccaaggatgaaaaaatcatcacgcttggaatagcggcgggcggatctattttaatagcccttgttgattacggcattatgcgctataaaagataccgcgttgaaaaagaaaagagaaacattccaatcgggagccctgtgattatccgaacgccaatgtttgatgcagaggaagattcttctgctgaagcggtcgccgaaacaaagtaa

SEQ ID NO: 12510 - protein, 169 aa, Unknown
  Obtained from environmental sample
  SIGNAL (1)...(26)
  misc_feature (1)..(169): Xaa is any amino acid
MNMKKKRFFFFLFVILFFASLFNAWSQTTADAGMTSTQFDMSGFPLWTKDLRRGEIIAFGSFPFMYFFSNFGYDTYRWANNGNDMRYAPWPFNSAGTVGKTKDEKIITLGIAAGGSILIALVDYGIMRYKRYRVEKEKRNIPIGSPVIIRTPMFDAEEDSSAEAVAETK

SEQ ID NO: 12511 - DNA, 501 bp, Unknown
  Obtained from environmental sample
  misc_feature (1)..(501): n is a, c, g, or t
atgccatctctttatattcacgttcccttttgtgcttctatatgcggctactgcgatttttgcgcaatgcctgcaccggagaggctgcacagcgaatacgtggatttggtattgagggaattggaattgagagcaagagatggatttgagactgtatatttaggtggtggatcgccttctgttttgagtgcggcaaatttgcgaaaattgcttgcggggttgcaaaagcaaggtttgcaaaaaaacgaactaaaagaattttcaatggaatggaatccagaacaggttagcgaagaaaaaataaatatagcattggagtttggaataaaccgctttagccttggaattcaaagtttgaatgatgatttattgaaaatgcttggaaggaagcatacggcagaaaatgctttggcagcttttgaaaagctaaattccgcttttggcacccggaactgcgatttgatgttttgcctgcccaaccaagcacagaaaattttttga

SEQ ID NO: 12512 - protein, 166 aa, Unknown
  Obtained from environmental sample
  DOMAIN (5)...(166): Radical SAM superfamily
  misc_feature (1)..(166): Xaa is any amino acid
MPSLYIHVPFCASICGYCDFCAMPAPERLHSEYVDLVLRELELRARDGFETVYLGGGSPSVLSAANLRKLLAGLQKQGLQKNELKEFSMEWNPEQVSEEKINIALEFGINRFSLGIQSLNDDLLKMLGRKHTAENALAAFEKLNSAFGTRNCDLMFCLPNQAQKIF

SEQ ID NO: 12513 - DNA, 840 bp, Unknown
  Obtained from environmental sample
  misc_feature (1)..(840): n is a, c, g, or t
atgataagcccgggtgaagaaatccccgaaacagtgcccgccattatcgcgcttgacggcgttgaaagttttgatgaaaccaccctgtaccggattgacagttttatccaaaacggcggaaaggccctctttaccgttaaaggcgttcatataaatacagacagcgaccttagtgcgcggcctgtgaacgatggggggcttttggaaatgttttcctcttacggtgtaacagtgctgcctgaaatcgtaatggacaagacggcccttacaatgcaataccagacccgcgccccttcaggagccattcagataagaataacccgctatccgcaatggattagggtgttaggcgaaaacggaaacccaatacatccggtaagcgccaaattcagcggtctggatatgtattgggcaaacccccttgaattgcgtgaagtaggtggtattgacgcggtacaactgttcaccaccacagatgaggcatggtcaatgagggagccattttatacaaaccctgaaatgcccatgatgttaaacaaggatgcggcgaataccacgggtacaaaaatactcggcgtaagcctgacggggattttcccctcatggttcgccggcaggccaaagcctgaagggcccgagcttcctgatataagttccgaagccaaaccttcgcggctggtaattatcggcgatactgattttgccacgtctttcatgaacgtcacaaacgctcagcgtaataccgactttcttatccaggccgccgactggattagcaatgatgatgacatcataggaatacgctcaagggaatcgcgatccaacaggctgacaggataa

SEQ ID NO: 12514 - protein, 279 aa, Unknown
  Obtained from environmental sample
  misc_feature (1)..(279): Xaa is any amino acid
MISPGEEIPETVPAIIALDGVESFDETTLYRIDSFIQNGGKALFTVKGVHINTDSDLSARPVNDGGLLEMFSSYGVTVLPEIVMDKTALTMQYQTRAPSGAIQIRITRYPQWIRVLGENGNPIHPVSAKFSGLDMYWANPLELREVGGIDAVQLFTTTDEAWSMREPFYTNPEMPMMLNKDAANTTGTKILGVSLTGIFPSWFAGRPKPEGPELPDISSEAKPSRLVIIGDTDFATSFMNVTNAQRNTDFLIQAADWISNDDDIIGIRSRESRSNRLTG

SEQ ID NO: 12515 - DNA, 429 bp, Unknown
  Obtained from environmental sample
  misc_feature (1)..(429): n is a, c, g, or t
atgaaaaaattattgtttgtaacaatttttattttaacaggtatttatgtatccgcccaggacgcgtttattgaggagcttacggggacggtggaaattaagcgggcgaaagaaaccgcgtttatagccgccaaaaaaggggatataatatttcaggataccgtcatatcgacaaaatttaagagttacgccattgtcaaaatcggcggcacaaccatatcggtgcgcccgttaacaattatgtcgctggcggagattcaaaaattggaaaatagcgagaccgtaaatgtaaatttacaaatgggaagggtccgcgttgacgttaagccgcccgcgggaacaaaggcgattatgacggtaagctctcctacggcgacggcgtctgtccgtggaacccaacttgatttgatctncataacctttatgtaa

SEQ ID NO: 12516 - protein, 142 aa, Unknown
  Obtained from environmental sample
  SIGNAL (1)...(19)
  misc_feature (1)..(142): Xaa is any amino acid
MKKLLFVTIFILTGIYVSAQDAFIEELTGTVEIKRAKETAFIAAKKGDIIFQDTVISTKFKSYAIVKIGGTTISVRPLTIMSLAEIQKLENSETVNVNLQMGRVRVDVKPPAGTKAIMTVSSPTATASVRGTQLDLIXITFM

SEQ ID NO: 12517 - DNA, 762 bp, Unknown
  Obtained from environmental sample
  misc_feature (1)..(762): n is a, c, g, or t
atgtccgtaaaattcagaccttataaattattagccgattttgataaagtcaataaatacctgactgatgttttcaatatggaaacattaaacggttatttgcttcctcaatattttgaatatgcccatactcacccgttatttaatttcaaactggcacataggtttggcttatgggaagatgaaaatgagcttattggaattgcttgttatgatatgtatcccggagagtgttttatcagcgtaaataacaattttaaatcattattgccggagatgataagttattcagaagaatatttatctgaaaaaaataacgggaaaacgtctttagcaatatctgttattgataaagaaattgataaaaaagatttattgaaaaaatccggctatgaaaaaacgcactctgaaccggtaactgtattttcgtatgacaaaccgttcccgcatcaaattattcccaaaggtttttcagttatatcattggaagatgaaaatgattttaaaaaaatacacgattgtttatggtatgggtttgatcacggcccggaacctgatcccgacaatgatattgacagccggatattagcgcanagcggaccanatttccgcanagacttaactacgataataaaagctccaaatggcgaatatgcttgttttgccggaatgtggctggacaagcaaaataactatgcgtatctggaaccattggcgacagtacctaaatacaggcgcatgggattggcaaggctgcgctga

SEQ ID NO: 12518 - protein, 253 aa, Unknown
  Obtained from environmental sample
  misc_feature (1)..(253): Xaa is any amino acid
MSVKFRPYKLLADFDKVNKYLTDVFNMETLNGYLLPQYFEYAHTHPLFNFKLAHRFGLWEDENELIGIACYDMYPGECFISVNNNFKSLLPEMISYSEEYLSEKNNGKTSLAISVIDKEIDKKDLLKKSGYEKTHSEPVTVFSYDKPFPHQIIPKGFSVISLEDENDFKKIHDCLWYGFDHGPEPDPDNDIDSRILAXSGPXFRXDLTTIIKAPNGEYACFAGMWLDKQNNYAYLEPLATVPKYRRMGLARLR

SEQ ID NO: 12519 - DNA, 459 bp, Unknown
  Obtained from environmental sample
  misc_feature (1)..(459): n is a, c, g, or t
atgaatcttgaaggcaaggcgcgctggcttccgttttccctccccatcacctcaaaagaatttttcaatgccaagatagcaatgtgtatgactatgcacattcccgcgatactcatctccgcccctctctttgcgcttgcgttgcagacggattttgcttctactctgcttctttttgccttgcctctntgcggttcgttttttattgcagtacttgggcttgccgttaacctcaaattcccgcgctatgactggacgagcgagtatcatgcggtgaagcagagcgcctcggcgctgattacgcttgcgtttgcctttgttttcgtgtgcgttccggtggtatgtatttttctgctcggttcgacgattctcacaacgacgattatttttgctgttgccatgctcgttatcgcccgcattctgcatcggcgtcttatggatgtgcgcttgtatctgtag

SEQ ID NO: 12520 - protein, 152 aa, Unknown
  Obtained from environmental sample
  misc_feature (1)..(152): Xaa is any amino acid
MNLEGKARWLPFSLPITSKEFFNAKIAMCMTMHIPAILISAPLFALALQTDFASTLLLFALPLCGSFFIAVLGLAVNLKFPRYDWTSEYHAVKQSASALITLAFAFVFVCVPVVCIFLLGSTILTTTIIFAVAMLVIARILHRRLMDVRLYL

SEQ ID NO: 12521 - DNA, 654 bp, Unknown
  Obtained from environmental sample
  misc_feature (1)..(654): n is a, c, g, or t
ttgaacatgggtcaggaggtattttgcatgagcagcgaactctttgaaaagctgtcgcagattcagtggctgcttcacaagcagcacatccgctggcacgcggcaggcggaccgatggcggacacgacgcgcggtcagggccggattctcgccgtgctgaagctgaaggacggcatcagcaccaaggacctggcctacttgctcggtgtgcgggtctcgtcgctgaacgggcttctggccaaacttgagaagtctggccacgtcacacgggtgccttccccacaggacaagcgcgtgatgctcgtcaagctgacagaagatgggaaaaacctggaagagcctgacgcgcctgtccacggcgacatctttgcttgcctgtccgaggacgaacaacgggagcttggcgagtaccttgaccgcataatcgccgcgctggcggaaaaactgggctacgacgaagacgaggaactggagcgcatggcggcagcgcgtgagcacttcgcggaaatgatcggagaccactggggcgggcacgacttccgcaggctgttcggcggcctgggaaggttcttccacagggatttagacccccgccacggccacgcattcgaaggcagacaccacgaaaggagagaccaccatgaacatgattga

SEQ ID NO: 12522 - protein, 217 aa, Unknown
  Obtained from environmental sample
  DOMAIN (42)...(111): MarR family
  misc_feature (1)..(217): Xaa is any amino acid
MNMGQEVFCMSSELFEKLSQIQWLLHKQHIRWHAAGGPMADTTRGQGRILAVLKLKDGISTKDLAYLLGVRVSSLNGLLAKLEKSGHVTRVPSPQDKRVMLVKLTEDGKNLEEPDAPVHGDIFACLSEDEQRELGEYLDRIIAALAEKLGYDEDEELERMAAAREHFAEMIGDHWGGHDFRRLFGGLGRFFHRDLDPRHGHAFEGRHHERRDHHEHD

SEQ ID NO: 12523 - DNA, 729 bp, Unknown
  Obtained from environmental sample
  misc_feature (1)..(729): n is a, c, g, or t
ttgancaaagaaaaagtgttaaacgccgtatctttattttggtttgattatacaaaaaacattattcccaatcatataatttcaagcgacttaaaagatatgcccgaattttttcagaaagacgaattcgaggggcgcacggtnttagttaaaaaacttaaaatactgccgtttgaatttatcattagagggtatgtgttcgggaatatgtgggaagcgtactccaaaggaaaagaattctgcggtcaaaagattgaaggcaattataaacttgccgaaaaacttgccactcccctctttaccccctcgacaaaagcgcgtgaaggacacgacgaatatatttccgttcagtatcttgctgataatatcggcgctgatttggcgaagaaaatagaaaaactgtgctttgatatttacacaacttgttacgattacgcgtacaaaaaaaacatcatcatagccgacacaaagtttgaattcggtcttgacgagaacaacaaactctttatcgccgatgaagtgcttactcccgattcaagcagattctggagtcttgccgattaccaaatcggaacttcgccgaaaagttacgacaaacaattcgtgcgggactggcttcagaacaacaaaaaagacggagaaatgcaatttgacaatgtgccggacgatgtgttaagcaaaacatcggaaatttacgccgaatgtttgcggaggctggttaatgcctga

SEQ ID NO: 12524 - protein, 242 aa, Unknown
  Obtained from environmental sample
  DOMAIN (3)...(224): SAICAR synthetase
  misc_feature (1)..(242): Xaa is any amino acid
MXKEKVLNAVSLFWFDYTKNIIPNHIISSDLKDMPEFFQKDEFEGRTVLVKKLKILPFEFIIRGYVFGNMWEAYSKGKEFCGQKIEGNYKLAEKLATPLFTPSTKAREGHDEYISVQYLADNIGADLAKKIEKLCFDIYTTCYDYAYKKNIIIADTKFEFGLDENNKLFIADEVLTPDSSRFWSLADYQIGTSPKSYDKQFVRDWLQNNKKDGEMQFDNVPDDVLSKTSEIYAECLRRLVNA

SEQ ID NO: 12525 - DNA, 816 bp, Unknown
  Obtained from environmental sample
  misc_feature (1)..(816): n is a, c, g, or t
ttgccgcagcgcaagatcacgactttggcggcgcatggatacagctcctacggcaaccagatcggcatagccacaggcatagtctccgaggtgtaccacaagggttacgtggccaagcgtatggagataggcgcggtggtgggcgcggttcccaaatcgcacgtggttcggcgcgttcccgagcccggcgacgtcgtggtgcttctgggcggcaggacggggcgcgacggttgcggcggggcgaccggttcgtccaaggagcataccgaggagtccatacaaacgtgcggcgcggaggtgcagaagggcaacgcccccaccgagcgtaagatacagcgcctcttccgcgacccggaggtgggcaggatgatccgccgctgcaacgacttcggcgcgggcggtgtggcggttgccataggcgaattagccgcggggctggacatatacctggacgccgtccccaaaaagtacgaggggcttgacggaacggaactcgccatctccgagtcgcaggagcgcatggcggtggtgatcgctcagtcggatttgaaggcgtttcaggagaaggcggagggggagaatttggagaccgccgccgtggccgcggtgacggacgcgcggcgcctcaagatgttttggagggggaaggcgatagtcgacatcagccgcgacttcatagacacaaacggagttttgcaggaggcggagatatttgtcaagtcgccgcgggcgttatacctgcccaacgttctctccatggcgtcgaagtgcagggatgagtacggcgacgccgtaggcgcgtttttgagacgatga

SEQ ID NO: 12526 - protein, 271 aa, Unknown
  Obtained from environmental sample
  DOMAIN (61)...(214): AIR synthase related protein, C-terminal domain
  misc_feature (1)..(271): Xaa is any amino acid
MPQRKITTLAAHGYSSYGNQIGIATGIVSEVYHKGYVAKRMEIGAVVGAVPKSHVVRRVPEPGDVVVLLGGRTGRDGCGGATGSSKEHTEESIQTCGAEVQKGNAPTERKIQRLFRDPEVGRMIRRCNDFGAGGVAVAIGELAAGLDIYLDAVPKKYEGLDGTELAISESQERMAVVIAQSDLKAFQEKAEGENLETAAVAAVTDARRLKMFWRGKAIVDISRDFIDTNGVLQEAEIFVKSPRALYLPNVLSMASKCRDEYGDAVGAFLRR

SEQ ID NO: 12527 - DNA, 447 bp, Unknown
  Obtained from environmental sample
  misc_feature (1)..(447): n is a, c, g, or t
gtggcggaaagccttgacggcgagccgccgccgggtgtccagcgtaaccgccccgccgtgggccgacagctccccctcaatcagcgcgtaatccgccggatcgacgaccaccgccacaaaagcgtggttcttggccgcgctgcgcaccatggccggcccgccgatgtcgatgttctcgacgcactcctcaatccccgccccgcccgcgaccgtcttttcgaaggggtacaggttcaccaccaccatgtctataccgcctatcccgcacttccccatctccttaacatgagtaggattgtcccgaaccgcgagtatccccccgtgcaccttggggtgcagcgtcttcacccgcccgtccatgatctcaggatgcccggtatacgcctccacggcgatcaccggcaccccgctctcggagagcagctgtggtcccctcgtccgatctga

SEQ ID NO: 12528 - protein, 148 aa, Unknown
  Obtained from environmental sample
  misc_feature (1)..(148): Xaa is any amino acid
MAESLDGEPPPGVQRNRPAVGRQLPLNQRVIRRIDDHRHKSVVLGRAAHHGRPADVDVLDALLNPRPARDRLFEGVQVHHHHVYTAYPALPHLLNMSRIVPNREYPPVHLGVQRLHPPVHDLRMPGIRLHGDHRHPALGEQLWSPRPI

SEQ ID NO: 12529 - DNA, 651 bp, Unknown
  Obtained from environmental sample
  misc_feature (1)..(651): n is a, c, g, or t
atggacagcgcaatcggacgtcctttacatcaatacgaacagtcgcttatgctcggatacctagcgggacttataaccgtaagtaaaatgccgaatgccaataaccaaaaacgtatcggctttattgccgcgcaggaatatcctctgttaacaaagcaaatggtacccggttttcttgatggagcccgtcttgttgaccccgcgattgaaattgaccgccgtatagtcggcaattggggggacgcgagtaaggcggcggaacttgccggagccatgatggatgcgggagttgacgtgtttacggctattgcaggcggcgcggcgcaaggcatgataaaaacagcgtctgaaagaggggcgtacattgtttggtataacattaacgcctacaatcaggctccaggcgtaattgtaggctgtggcataatggaacagaaaaaattaataatggagatattaggcgatgtcctttcaggtaaagtacaatatggaatttcacaaacgcttggagtaagggaaggttatattaattttatattggatgatccgggttataaggacaatattccgtctgatgttcgggaaaaatttgagaaattcttaaatgatttcaaatccgggcttataaactatactattccgtcactttga

SEQ ID NO: 12530 - protein, 216 aa, Unknown
  Obtained from environmental sample
  DOMAIN (1)...(215): Basic membrane protein
  misc_feature (1)..(216): Xaa is any amino acid
MDSAIGRPLHQYEQSLMLGYLAGLITVSKMPNANNQKRIGFIAAQEYPLLTKQMVPGFLDGARLVDPAIEIDRRIVGNWGDASKAAELAGAMMDAGVDVFTAIAGGAAQGMIKTASERGAYIVWYNINAYNQAPGVIVGCGIMEQKKLIMEILGDVLSGKVQYGISQTLGVREGYINFILDDPGYKDNIPSDVREKFEKFLNDFKSGLINYTIPSL

SEQ ID NO: 12531 - DNA, 534 bp, Unknown
  Obtained from environmental sample
  misc_feature (1)..(534): n is a, c, g, or t
ttgcgaaaacaggggcttgcctatgttcccgctgacagagtacgcgttgcaagcgcagaagatgcgacaatcgaagagaatataattataacgcggcgaaattattttaagaaaggtatatttttggacaaaaaagcaatatttgaatatttaattgaacttatacaaaagtataatatagttggagcgcgttcaaaagaaaaatgttcagttctttcaggtggtaatttacagaaattaattttagcgcgtgaaataaactgcattaaagactatattgttttttcggaaccttcatggggactggatgtagcttcaagcggctttattaaaagtgaaatattgtcgcttcgaaaaagaaatgccgcaattattcttttatctacaaatcttgatgaaacgcttgagcttgcggatcgtataattgttatgtataaaggaacaattgcgggaatttttgataacaaaaaagataattcagtcagggaaaaaatcggtggttgtatgcagggaattttaaaggaagcaggatga

SEQ ID NO: 12532 - protein, 177 aa, Unknown
  Obtained from environmental sample
  DOMAIN (4)...(147): ABC transporter
  misc_feature (1)..(177): Xaa is any amino acid
MRKQGLAYVPADRVRVASAEDATIEENIIITRRNYFKKGIFLDKKAIFEYLIELIQKYNIVGARSKEKCSVLSGGNLQKLILAREINCIKDYIVFSEPSWGLDVASSGFIKSEILSLRKRNAAIILLSTNLDETLELADRIIVMYKGTIAGIFDNKKDNSVREKIGGCMQGILKEAG

SEQ ID NO: 12533 - DNA, 900 bp, Unknown
  Obtained from environmental sample
  misc_feature (1)..(900): n is a, c, g, or t
gtgatccggggcgaaggcgaagagagttttcgttccctttgttttgaactgttaggcgaaagccagagtacgaaaaaaacgaaaaacgaagaaacagtttttataggcaacggcgataccattgtaaatgtaaacgaaatttcctccccttaccgtctttacacagatgaagacctaacgcgaaaactcatttatgtagaagcatcccggggatgtccttttaattgcgaattttgtttgggctcgtcaagaaaccaaccagccgcgcagaaggtacgcgaattcccgctggagccttttttagcggacatggatacccttattaaaagaggcggcaaaacctttaaatttttggatcgtacctttaacctggacattgatcgcgcacagaggataattgaatttttccttgacaagataaatgacaagcccttttgcgtccatttcgaaatggttccttcccgctttcccgaaccgctcaaagaactgctttgccgtttccctgccggaaccctgcgcctggaacttggaatccagaccctcaacacggagactagagcgcttcttcaaatgtcagggaacgtagatgaagagctaaagacactggaattcctcagggaaaaaacaaacgcgatagtccatgttgatctaatagccggacttccgggtgaaggccttgcttcctttagaaatggctttgatatggtgtcctatggaccgaaggtagtcgccaattttgaaattcagctcggcattttaaaatgccttcccgggactcccattgcgcgccataatgaagcgtacaaaatgaaatattccaccgctcctccctacgaagtgattgaaacaggcgcgctctccgcagccgagctggacagaataaaaactcggccgatctga

SEQ ID NO: 12534 - protein, 299 aa, Unknown
  Obtained from environmental sample
  DOMAIN (66)...(236): Radical SAM superfamily
  misc_feature (1)..(299): Xaa is any amino acid
MIRGEGEESFRSLCFELLGESQSTKKTKNEETVFIGNGDTIVNVNEISSPYRLYTDEDLTRKLIYVEASRGCPFNCEFCLGSSRNQPAAQKVREFPLEPFLADMDTLIKRGGKTFKFLDRTFNLDIDRAQRIIEFFLDKINDKPFCVHFEMVPSRFPEPLKELLCRFPAGTLRLELGIQTLNTETRALLQMSGNVDEELKTLEFLREKTNAIVHVDLIAGLPGEGLASFRNGFDMVSYGPKVVANFEIQLGILKCLPGTPIARHNEAYKMKYSTAPPYEVIETGALSAAELDRIKTRPI

SEQ ID NO: 12535 - DNA, 354 bp, Unknown
  Obtained from environmental sample
  misc_feature (1)..(354): n is a, c, g, or t
atgacaatgagcctgaaggaggctaggcaattcgggttggaagtggcagaagacaagacccgggtacttccatttgggcgatacaaaggtacagatgagaactttgattttctggggttcacattcttcaacacgcaaacacgagcgggaaaataccggctgggagtgcgtacaagtaagaagaaattgaagacgaaaaagcaggaagccaaagcgtggatgagaacacggctgacaaagccagtggcagaaacgatgaaactcatgcaacgatataaacgagcaatatcaactacttacgaggattattttaatttacccaacataaaacaccacattattttcgtgttctaa

SEQ ID NO: 12536 - protein, 117 aa, Unknown
  Obtained from environmental sample
  misc_feature (1)..(117): Xaa is any amino acid
MTMSLKEARQFGLEVAEDKTRVLPFGRYKGTDENFDFLGFTFFNTQTRAGKYRLGVRTSKKKLKTKKQEAKAWMRTRLTKPVAETMKLMQRYKRAISTTYEDYFNLPNIKHHIIFVF

SEQ ID NO: 12537 - DNA, 378 bp, Unknown
  Obtained from environmental sample
  misc_feature (1)..(378): n is a, c, g, or t
atgtttaccgtattaatcacgttagccgccgccgcggctacggctaaggataccttgacgttcgccgccgtgggcgacatcatgatggggctcaactatccggacaacgccccggttctcccgccgcaggacggggcgctcacattcgggagcgtgatcgggatattgcgcgacgccgacatcaccgtcggcaaccttgagggggtgctgctcgacgccggggggacggccaagaggtgcgccaatccaagcgtctgctatgttttcaggtcgccggaagcgtacgcgaagcaccttgttgacgccggctttgaccctctgtcccgtggccacaaacactccngcgactttcgtgacgncgggcgggccgcacggtga

SEQ ID NO: 12538 - protein, 125 aa, Unknown
  Obtained from environmental sample
  SIGNAL (1)...(15)
  misc_feature (1)..(125): Xaa is any amino acid
MFTVLITLAAAAATAKDTLTFAAVGDIMMGLNYPDNAPVLPPQDGALTFGSVIGILRDADITVGNLEGVLLDAGGTAKRCANPSVCYVFRSPEAYAKHLVDAGFDPLSRGHKHSXDFRDXGRAAR

SEQ ID NO: 12539 - DNA, 669 bp, Unknown
  Obtained from environmental sample
  misc_feature (1)..(669): n is a, c, g, or t
atgaagcatgtatttgtatttgatcctaaatcttttcccaaccagcaatggaaaatggaaaatatgcttgaccatataggggaatttttcagaaagcaggaaaaatccgatttttccatacagatgtcccaccaccgccgcgacgcgattgtgattatccagaaagaagtggaaacggccaaagaggatgatatagtgcgggtttacgctatcggaggggacgaggtactgtatgactgcataaacggcgtcgccgaactgcctaataccgaacttgcggcggttccatacggggaaacaagcgattttttatatctcttcggagaagggaaagacacgttgttcaagaacgttctgacccttgtacagaagggcgaggctattcccacggatttaattaattgggacgtaaattacgcgttgaattcatgttatatagggctgaagaccgccgcggcgggcagattaagggcgtataaggcggcgctgaacaagagcaactttgtcctttttcccagaattgcgtattttataaataacatctcgacggcattcgacaaacagatagccagccagcactacaatataaccatagacggcaatgattacagcgggaattacagcctgatccatattgccaacgggccgtattacgcgggcaagatttag

SEQ ID NO: 12540 - protein, 222 aa, Unknown
  Obtained from environmental sample
  DOMAIN (2)...(135): Diacylglycerol kinase catalytic domain (presumed)
  misc_feature (1)..(222): Xaa is any amino acid
MKHVFVFDPKSFPNQQWKMENMLDHIGEFFRKQEKSDFSIQMSHHRRDAIVIIQKEVETAKEDDIVRVYAIGGDEVLYDCINGVAELPNTELAAVPYGETSDFLYLFGEGKDTLFKNVLTLVQKGEAIPTDLINWDVNYALNSCYIGLKTAAAGRLRAYKAALNKSNFVLFPRIAYFINNISTAFDKQIASQHYNITIDGNDYSGNYSLIHIANGPYYAGKI

SEQ ID NO: 12541 - DNA, 744 bp, Unknown
  Obtained from environmental sample
  misc_feature (1)..(744): n is a, c, g, or t
gtgatgggacatggacgggcgtcaaggaagccaggggccgaaccaggctgtgggtattcaggaaccgcagccgggaagatatcggggatccctaaaagaactggaagccggtataaagaagcccaaatcgtcgccttttccggtgggttcagcgcgggggatgaaccggacggttcgggtaaatttatcgccaatgtaatccgttcgcaggccatcaaggcggcgctcatggagttttacgagggccgcgacggcctcatccttgggatatgcaacggctttcaggccctcatcaaggtggggcttctccccaatggccgtatacaaagcagccgcccgacgctgacctttaattccctgggccgtcatgtttcccgcatggtcagaacccgggtaatgtccacctcttcaccctggctcagtctggaagaagccggggcgcttcacgtgattcctgtaagtcacggagaaggcagggtggtcattgataaagcggaggcagaagctcttttccgcgccgggcaagtccctttctgttacgccgacagccaaggaagacctgcgctttctgagccggataaccccaatggttccagttttggcattgaaggcctctgcagccctgacggccgcatcttagggaagatgggtcattccgaaagggccggggattttgtacacgttaatatcccgggaaacaaaacccagcgtatttttgaggccggaatcaagtatttcgcgtag

SEQ ID NO: 12542 - protein, 247 aa, Unknown
  Obtained from environmental sample
  misc_feature (1)..(247): Xaa is any amino acid
MMGHGRASRKPGAEPGCGYSGTAAGKISGIPKRTGSRYKEAQIVAFSGGFSAGDEPDGSGKFIANVIRSQAIKAALMEFYEGRDGLILGICNGFQALIKVGLLPNGRIQSSRPTLTFNSLGRHVSRMVRTRVMSTSSPWLSLEEAGALHVIPVSHGEGRVVIDKAEAEALFRAGQVPFCYADSQGRPALSEPDNPNGSSFGIEGLCSPDGRILGKMGHSERAGDFVHVNIPGNKTQRIFEAGIKYFA

SEQ ID NO: 12543 - DNA, 879 bp, Unknown
  Obtained from environmental sample
  misc_feature (1)..(879): n is a, c, g, or t
gtggagcggttcggggcggaagtgcaaaagggaaacgccgtggaggaacgaaaactccagcgcctgttcagaaagcccgaagtatgcggactcataaaacgctgcaacgactttggggccggcggtgtttccgtggcggtgggggaacttgcctcagggctggacatcaacctggactcagtccccaaaaaatactcgggccttgacggcacggagctggcgatctccgaatcccaggaaaggatggccgtcgtggttgccaatgaggatgcgcctgcttttataaaggaggccgcggcggaaaaccttgaagcaacggtcattgccgccgtaactgcctctgctcaggatgacgcggcaaggcttcgcatgaagtggcagggaaagaccattgtcgatctgtcccgagaattcttaaactccgccggggcgccccgttcagcgaaggtttcccttaacggggacacacaccgatggggggctgataacgggagccccggcagggacacacaccgatgggactccccaggggtacttttggacaagctggaaagacagttggccggtctgggttcaggaagccgccgggggcttcaggagcgctttgacgggtcaataggcgcgggctcggtgcttttcccctgggggggaagcgagcaagggactcccgaatgcggcatggccgcccttttgccttcgcttgatatgaaaaagaagagcttgagcgccagtttgatgtgttttggttatgatccggaactcttatccatagacccttaccanggggcaaagggttctgtacgggaagccctggcaaaatacgcctgtttaggcggagactacagaaaagccccggctttcctttcaggaatactttga

SEQ ID NO: 12544 - protein, 292 aa, Unknown
  Obtained from environmental sample
  DOMAIN (1)...(122): AIR synthase related protein, C-terminal domain
  misc_feature (1)..(292): Xaa is any amino acid
MERFGAEVQKGNAVEERKLQRLFRKPEVCGLIKRCNDFGAGGVSVAVGELASGLDINLDSVPKKYSGLDGTELAISESQERMAVVVANEDAPAFIKEAAAENLEATVIAAVTASAQDDAARLRMKWQGKTIVDLSREFLNSAGAPRSAKVSLNGDTHRWGADNGSPGRDTHRWDSPGVLLDKLERQLAGLGSGSRRGLQERFDGSIGAGSVLFPWGGSEQGTPECGMAALLPSLDMKKKSLSASLMCFGYDPELLSIDPYXGAKGSVREALAKYACLGGDYRKAPAFLSGIL

SEQ ID NO: 12545 - DNA, 738 bp, Unknown
  Obtained from environmental sample
  misc_feature (1)..(738): n is a, c, g, or t
atgatggccgagcttcattttgacgcggatggccgctttatcacgtaccttgggcagggcgggcagggaggcgtgccgttcccccgcataacggggctgtactgcggggcgcaggatgaaatcgccgtaatctgccgtctgccgtcaggctggaatatccactggtttaactcccatggtcagcagctttacctcatccagctaaaaaacaacgccgtccctacccctccgctctggcaggatttttccgcttccgttgactcgattattccttcccccgatgcccgcaagctgtacattaaagttgattattaccgggatgttcttgacgagtcgacaaacacgcgctcaagcacggaacccgcaagttcgttaatctggatattaaatgtggaagacgggacttatgaaaattctttggaagtgcctttttacgaatataatttttccgaaaggggcaaaacggttaccgtgcggcttttatattccatgatggggcttgtccggggcggggggatacttttttatttccccattgaaaccggttttgccgttctgaggatggattcaagcgggcacggccagcgcaggggaacggttgatattgagccggatgaattgaggttcaacgatttccacctttccccggagggtatattatccgccatactaaccgatgaatggaaaatcaaaattgtctggtggcgtatggatcactttatgagagacgtaccatga

SEQ ID NO: 12546 - protein, 245 aa, Unknown
  Obtained from environmental sample
  misc_feature (1)..(245): Xaa is any amino acid
MMAELHFDADGRFITYLGQGGQGGVPFPRITGLYCGAQDEIAVICRLPSGWNIHWFNSHGQQLYLIQLKNNAVPTPPLWQDFSASVDSIIPSPDARKLYIKVDYYRDVLDESTNTRSSTEPASSLIWILNVEDGTYENSLEVPFYEYNFSERGKTVTVRLLYSMMGLVRGGGILFYFPIETGFAVLRMDSSGHGQRRGTVDIEPDELRFNDFHLSPEGILSAILTDEWKIKIVWWRMDHFMRDVP

SEQ ID NO: 12547 - DNA, 909 bp, Unknown
  Obtained from environmental sample
  misc_feature (1)..(909): n is a, c, g, or t
gtggtgcagggagtgttcttcccgcccaagaaacctgtacagcagaacattcagccgcctgtaacggcggtcaatccggagccggatttgacgcaggatgctcaagaggctgatacacggcaaacagcgttgttgcaagcgcaggaacaacaggcgcgggaacagcaggcaacaacgcagcaagctgcgacgcagcaggcagcgtcgctccccgattcggatgcgggtcccaacgacttacagtacataatagtcgaaacggaattaatgaccgtaactcttaccaacgccggcggcaatattatttcgtggaaacttaagctgcacaacgacaaagaagaaaacgtcgatatgatccttgcgggcgacaaggaagcgcaggccttttccgtagcgttcggcggtatagacgcccagcctgttacatctttgttttatgtgaataaaatatcagattacgttatagaattttaccgcgacttcagcagcgcggacggaaaattccgccttgtcaaacgctacgaatttaaacccggtgattatatgtttgagctgaccctgacccttgacggcggatattctatgtccggctttaactttgcgggcagcgcgtacactctctcgttcggaccgcagataggccccaagtttgtaaaactggataaccgttacgattaccggcattatctgacatttacaaacggaaaaagaaaaaacgcgaaacttaacgatattatagacacccatccgtcctgggcggcaatttccggaaaatattttgcttttatcgcaattcctttttttgcgccgtacaatgtaattttttcagacaagccccgaacaggggcttttctcccgcttcagactcagcattatccgccccgccatacccgcgtccaaagcctctga

SEQ ID NO: 12548 - protein, 302 aa, Unknown
  Obtained from environmental sample
  misc_feature (1)..(302): Xaa is any amino acid
MVQGVFFPPKKPVQQNIQPPVTAVNPEPDLTQDAQEADTRQTALLQAQEQQAREQQATTQQAATQQAASLPDSDAGPNDLQYIIVETELMTVTLTNAGGNIISWKLKLHNDKEENVDMILAGDKEAQAFSVAFGGIDAQPVTSLFYVNKISDYVIEFYRDFSSADGKFRLVKRYEFKPGDYMFELTLTLDGGYSMSGFNFAGSAYTLSFGPQIGPKFVKLDNRYDYRHYLTFTNGKRKNAKLNDIIDTHPSWAAISGKYFAFIAIPFFAPYNVIFSDKPRTGAFLPLQTQHYPPRHTRVQSL

SEQ ID NO: 12549 - DNA, 939 bp, Unknown
  Obtained from environmental sample
  misc_feature (1)..(939): n is a, c, g, or t
atgatggccgagaatgtccgaacattatcgcggttattgaataatttgttaagaattttaccacgaaccacacgaatcgtaccttcggtacgcacacgaaatggaataaacatggtacgtggtatattcttctcttttttctttgttctttgttcttttttatttttctcctgttcaaaacttggatacggtgttttactgtggtctacggaagatccggttattttgtcgggaaccgtgctgccggtttatatcaagtcaaacattgatcaggtttgggttgtcggcgttccggaatcgtccagggttgataaaaaagccaataccaaaattgaaatcccgctttctcagcttaatttcgcgggcagcagaaagaaagcaagggctcttgcggatgaattcgcgtattacgctccggcctacgccgagaatttacaggacggtcttccgattcgggataatcccgataacggagcgcggcgcgtatacaagttaagaacaggggaaataataaaaattctggacaaggttgatggaaacccgcctataagcatgaccggggaccctttgccgggcgactggtacaaagtattaacccaaaacggttatacaggttattgtttttcatacaggttaaaaatctttaatcattatgagggaccgattcaagctgttcacgccacacggattgaagccccgcccgatcccgatcttgatatggttttatcaaaaaagtggtcgcccgaatcatatttgcagatggtaaatacaaatcggataaatatcaacgaacttaaaaaagattaccgctttgatcccggacaggataccggcatagctaaaattatactgcccgaactggaaatagaatttatttatgaaggaataattcccgacggggaaaaggcgtggcgttttgagggaacagtctgcaaatga

SEQ ID NO: 12550 - protein, 312 aa, Unknown
  Obtained from environmental sample
  misc_feature (1)..(312): Xaa is any amino acid
MMAENVRTLSRLLNNLLRILPRTTRIVPSVRTRNGINMVRGIFFSFFFVLCSFLFFSCSKLGYGVLLWSTEDPVILSGTVLPVYIKSNIDQVWVVGVPESSRVDKKANTKIEIPLSQLNFAGSRKKARALADEFAYYAPAYAENLQDGLPIRDNPDNGARRVYKLRTGEIIKILDKVDGNPPISMTGDPLPGDWYKVLTQNGYTGYCFSYRLKIFNHYEGPIQAVHATRIEAPPDPDLDMVLSKKWSPESYLQMVNTNRININELKKDYRFDPGQDTGIAKIILPELEIEFIYEGIIPDGEKAWRFEGTVCK

SEQ ID NO: 12551 - DNA, 711 bp, Unknown
  Obtained from environmental sample
  misc_feature (1)..(711): n is a, c, g, or t
atggaccccctgaagggcaacgcgattttagagatagatcctgccgttaccttttccattattgaccgccttttcgggggctcgggagaaggaacgaaagcccagcatgaacttacggatattgaaagcgcggtaatggaaggaatcattgtccgcatactgggaaatatgcgcgaagcctggactcaggtaattgacctcaggccccggcttggacagatcgacacgaacccgcagttcgcgcaaattgtgcctccgactgacatggtggtgcttgtaacccttgaaaccaaagtcggggacgtggaagggatgataaacttctgtattccttaccttaccattgagcccataatcggcaaactttccacccagttctggttttctacggtgcaccgtggtaccactaccgagaatcttaccgtgctaaaggataaattggcaacgatagacgttaatgtagttgccgagataggaaagattaatattcctgtaagagaagtcctttcgctccatgtaggggatgtggtcaggctttacaatacgcggataggggatccatattccctgaatataggtaataaaagaaaatttttgtgcagaccaggtgttatcggaaaaaaaatagcggtacaggtactaaagaaaactgcggagcttgagcaggaagaatttgaagagcttgcaactganaaggaggaacttttatga

SEQ ID NO: 12552 - protein, 236 aa, Unknown
  Obtained from environmental sample
  DOMAIN (143)...(220): Surface presentation of antigens (SPOA) protein
  misc_feature (1)..(236): Xaa is any amino acid
MDPLKGNAILEIDPAVTFSIIDRLFGGSGEGTKAQHELTDIESAVMEGIIVRILGNMREAWTQVIDLRPRLGQIDTNPQFAQIVPPTDMVVLVTLETKVGDVEGMINFCIPYLTIEPIIGKLSTQFWFSTVHRGTTTENLTVLKDKLATIDVNVVAEIGKINIPVREVLSLHVGDVVRLYNTRIGDPYSLNIGNKRKFLCRPGVIGKKIAVQVLKKTAELEQEEFEELATXKEELL

SEQ ID NO: 12553 - DNA, 843 bp, Unknown
  Obtained from environmental sample
  misc_feature (1)..(843): n is a, c, g, or t
ttgctcttttccctcgcaacaacagttttcgccgcggccaacgacgacgaggacttcaaatggcaggaggcctccagagaacttgacgctttcccattcacccaagcgttcgtcgactccgcaagaaaagcgcacgtcggcgcgctctcgaaacaaagcggcctgcgcgccgtggaatccgcacgcttcgccaacagcgagacgctggtcttcgaggtcggctggacggtcttcaaggccggctacctcatcctatccaccgcgcatctgcgcagccgcggcctgctgcgcataagcgccaaagccatgaccggcaacaaagtaagcgcgatctataaggtacgcaaccacgaaatatcatggatcgacgccgacggcctctaccccgtctttttcgagcaacacgtccgcgaaggcaaaaagtacaaagccgacaattacatagtatacgacaatgtcgccgacaaactcttcctcaaaaaaagcgatctcaaagtattcgacacaccgaagttcacgcacgactacatatccgtgatgtactacgtgcgcacaatgcccttaaacccgggcgacgagtttgaggcgttcctattctcaagacccaaaacatacccgcttaagttcaaagtgcacgcaaaacgcgaaaccgtaaacgtaggcggaaaaagctacaactgcgtaaaggtcgaacccgctttagtcggcgaggggcgcgtattcacaaagaaagacaagatggaagtatgggtcacggacgatgaaaaccactatccgggtatgctcaaatcaaaggccaaaatcgggtcgctcaacgcgaaattgattcaggtcatcaaataa

SEQ ID NO: 12554 - protein, 280 aa, Unknown
  Obtained from environmental sample
  misc_feature (1)..(280): Xaa is any amino acid
MLFSLATTVFAAANDDEDFKWQEASRELDAFPFTQAFVDSARKAHVGALSKQSGLRAVESARFANSETLVFEVGWTVFKAGYLILSTAHLRSRGLLRISAKAMTGNKVSAIYKVRNHEISWIDADGLYPVFFEQHVREGKKYKADNYIVYDNVADKLFLKKSDLKVFDTPKFTHDYISVMYYVRTMPLNPGDEFEAFLFSRPKTYPLKFKVHAKRETVNVGGKSYNCVKVEPALVGEGRVFTKKDKMEVWVTDDENHYPGMLKSKAKIGSLNAKLIQVIK

SEQ ID NO: 12555 - DNA, 801 bp, Unknown
  Obtained from environmental sample
  misc_feature (1)..(801): n is a, c, g, or t
atgaaaaaggcaatcttcgcggcgattgtactgacgtttaccgtatcctgtacggcaccttctagcatggtcctcatacaaggcgggacattcaccatgggaagcccggcggatgaggttgaccgtgacaatgacgaagtccagcgcagcgtaacggtaagctccttttacatgggaaggactgaggtaacccagaaggagtacagggaagtgatggggaccaatccgagcagtttcaaggaagacaatctgccggtggagggggtaagctggtttaacgcggtagagttctgcaaccgcctgagcctgcgggagggcctgacccccgcgtatacggtgaagggaacggatgtaacgtggaaccggagcgccaacggctaccgtctgcccaccgaggcggaatgggagtacgcctgcagagccgggacccagacgcctttcagcacaggggacaacattaccacgaaacaggcgaattacgacgggtttccttacaaaaacaacgcgaaggggactttcagggacaggacggtgaaggtgaatagttttgcgccgaatgcctggggtttgtataacatgcacggaaacgtatgggaatggtgctgggatttgtatggggattacgcgggcggcgcgcagaccgaccctgtgggcgcatcctcgggatctgaccgcgttgtacgcggcggtagttggcgtgttcacgcgcagtacctgcgttccgcgaacaggtacgaaaacgtctccccgtctcacgcaagcaacgctcttggcttccggctggttctgcccgtggtataa

SEQ ID NO: 12556 - protein, 266 aa, Unknown
  Obtained from environmental sample
  SIGNAL (1)...(24)
  DOMAIN (19)...(263): Domain of unknown function (DUF323)
  misc_feature (1)..(266): Xaa is any amino acid
MKKAIFAAIVLTFTVSCTAPSSMVLIQGGTFTMGSPADEVDRDNDEVQRSVTVSSFYMGRTEVTQKEYREVMGTNPSSFKEDNLPVEGVSWFNAVEFCNRLSLREGLTPAYTVKGTDVTWNRSANGYRLPTEAEWEYACRAGTQTPFSTGDNITTKQANYDGFPYKNNAKGTFRDRTVKVNSFAPNAWGLYNMHGNVWEWCWDLYGDYAGGAQTDPVGASSGSDRVVRGGSWRVHAQYLRSANRYENVSPSHASNALGFRLVLPVV

SEQ ID NO: 12557 - DNA, 489 bp, Unknown
  Obtained from environmental sample
  misc_feature (1)..(489): n is a, c, g, or t
ttgtttttttgccgtttcatgaatctgggacagtccattattgccggcgggcttactttaagcattatgattcttccggtaattatcagaaccacggaagaggcccttaaaacggtgcccgtttctttccgcgaaggctcgctttccctgggggcgaccaaattccagacgatactccacgtggttctgcccccggccctgcccggcatcctcaccgcggcgatcctggccgtgggccgggtggtcggcgaatccgccccggtcctccttaccgtagggcttgcccgcaaccttcccaaaacaatttttgaacccggacgcaccctgacaatacacctttattaccttaccaaagaggctattgaagccgatgattttgcccaggcattcaccgccgccgcggtgctgatcattgtggtactattaatcaatacagtagtgaagatcataggcagaagctttggcggaagcgcttccgtggaggaataa

SEQ ID NO: 12558 - protein, 162 aa, Unknown
  Obtained from environmental sample
  misc_feature (1)..(162): Xaa is any amino acid
MFFCRFMNLGQSIIAGGLTLSIMILPVIIRTTEEALKTVPVSFREGSLSLGATKFQTILHVVLPPALPGILTAAILAVGRVVGESAPVLLTVGLARNLPKTIFEPGRTLTIHLYYLTKEAIEADDFAQAFTAAAVLIIVVLLINTVVKIIGRSFGGSASVEE

SEQ ID NO: 12559 - DNA, 309 bp, Unknown
  Obtained from environmental sample
  misc_feature (1)..(309): n is a, c, g, or t
atgggcggggaaaaactgctggtacgaaatcttgacctcttttacggcgaatttcaggcgcttaaaactatttttttcgatttaaacaattatgaggccgccgcccttatcggcccgtccggatgcggaaaatcaacctttatccgggtgatcaacaggatgaacgaccttattcctttatgtcgcataacaggcgatgtcatccttgacggcgaggacatttacggccctatggacgtgagcgctttaagaacgcggatagggatggtgtttcagaggccgaatccgtttaacatgagcgtcttttga

SEQ ID NO: 12560 - protein, 102 aa, Unknown
  Obtained from environmental sample
  misc_feature (1)..(102): Xaa is any amino acid
MGGEKLLVRNLDLFYGEFQALKTIFFDLNNYEAAALIGPSGCGKSTFIRVINRMNDLIPLCRITGDVILDGEDIYGPMDVSALRTRIGMVFQRPNPFNMSVF

SEQ ID NO: 12561 - DNA, 816 bp, Unknown
  Obtained from environmental sample
  misc_feature (1)..(816): n is a, c, g, or t
atgacagccgctgcggaaggcggtgtaaactatttcgacaccgcgccgggttatttcgaaaccaaaagcgaaacggttttcggcaagggctttgccgaactaaggcggcgcggcctaccctattattccgctaccaagaccttcgcttccggccctgatgagattcgccgcgagatagaggcccagcttaaacgcatggatattcccgctattgatttctaccatatatggtgcatcaccagcctggaaaactggcggagccgcaaacaaaacggcatactgcagactttcaggaaactcaaggaagaggggcttatccgccacatctgcatatccagccaccttatcagggacgagataaaggaactccttatggagcaggatgcctttgagggggtgctcttcggctattcggcgtataacttccagacaaggcaggccgcctttgacgcgatacgcaaaaacaaacttggcgcggttgttatgaaccccctgggcggcggcgttatcccccagcacccggaaaaattcggctatttgtgcagatcaggcgaaaacgttgtaacggcggctttgcgcttcctgtgggatcacccggatataacttccacacttgtcggctttgaaaatgtcgcgcaggtgaaagaagcccttgccgcaatggaaacttacaagccccggacagaggcggaactggaggcggtaaagtccagcgccatttcttccattgaagggatatgcacaggctgcgcctattgtgacgactgcccacagggcattcccatcnnccatgtcatggatgcctacnacccatag

SEQ ID NO: 12562 - protein, 271 aa, Unknown
  Obtained from environmental sample
  DOMAIN (1)...(240): Aldo/keto reductase family
  misc_feature (1)..(271): Xaa is any amino acid
MTAAAEGGVNYFDTAPGYFETKSETVFGKGFAELRRRGLPYYSATKTFASGPDEIRREIEAQLKRMDIPAIDFYHIWCITSLENWRSRKQNGILQTFRKLKEEGLIRHICISSHLIRDEIKELLMEQDAFEGVLFGYSAYNFQTRQAAFDAIRKNKLGAVVMNPLGGGVIPQHPEKFGYLCRSGENVVTAALRFLWDHPDITSTLVGFENVAQVKEALAAMETYKPRTEAELEAVKSSAISSIEGICTGCAYCDDCPQGIPIXHVMDAYXP

SEQ ID NO: 12563 - DNA, 585 bp, Unknown
  Obtained from environmental sample
  misc_feature (1)..(585): n is a, c, g, or t
ttggcgaaggtaaacaacctcgcggggcagattcgcgcggaattgggcaatcagttgaatcttgtcaacaagggcagattcgagttntgctttatcgtagattttcccatgtacggcaaaaacgaagaaacctcggcttctaaagaagccggcgcggttgaatttacccacaaccccttctccatgccgcagggcgggcttgaggcacttgaaacaaaacaacccctcgacatccttgcctggcagtacgacattgtatgcaacggcgtggagctttcctcgggcgcggtacgcaatcacttgcccgaagtaatggtaaaagcctttgatctggcgggatacacccaggctgatattgaaaataaatttcccgccctctacaacgccttccactacggcgccccgccccacgcgggcatggctcccggtattgacaggattgtcatgctgctggcggaagaagaaaacatccgcgaagtagtgtccttccccatgaacagctccgcccaggatctgctcatgaacgccccctgcgaggttacggaacaacagctccgcgaggtgcatattaaaattaggaattag

SEQ ID NO: 12564 - protein, 194 aa, Unknown
  Obtained from environmental sample
  DOMAIN (1)...(168): tRNA synthetases class II (D, K and N)
  misc_feature (1)..(194): Xaa is any amino acid
MAKVNNLAGQIRAELGNQLNLVNKGRFEXCFIVDFPMYGKNEETSASKEAGAVEFTHNPFSMPQGGLEALETKQPLDILAWQYDIVCNGVELSSGAVRNHLPEVMVKAFDLAGYTQADIENKFPALYNAFHYGAPPHAGMAPGIDRIVMLLAEEENIREVVSFPMNSSAQDLLMNAPCEVTEQQLREVHIKIRN

SEQ ID NO: 12565 - DNA, 747 bp, Unknown
  Obtained from environmental sample
  misc_feature (1)..(747): n is a, c, g, or t
gtgaatatgtccggccatagtaaatgggctacgattaaacatgccaagggcgctgccgatgcaaaacggggccaaatgtttacaaaactaattaaagagatttccattgccgccaggatgggcggaggaaatccggaaggaaatccccggctgcgaaccgccattattaaagcccgcggcgccaatatgcccaaggacaacattgaccgggccattaaaaagggaacaggtgaactggaaggggttacctacgaagagttgacctatgaagcctatgccggcggaggggttggtttgctgattgaggtgctcaccgataacaagaaccgggctgcggcagacgtacggaacatccttacccgtggtggcggggaactagccaaggccggatcggtgacccggctttttaaacgccaggggataatcaacctggacggggaaaagtataccgaggatcaggtaatggaagcggcccttgaagggggagccgaggatgtgtcttccgacggcggaattatcgaagtaagtaccgctccggaagattttgaggcagtaatggaagccttacagtccaaaaattttgagaccctgagcgcggaaataagcatggtggccgacgcggaagtgcctttggataatgaggctaccgccaaggcgttacggctggtagacaggctggaagaaaacgatgatgtccagaatgtgtatcacaatatggccattccggaaaggttttccctggaatga

SEQ ID NO: 12566 - protein, 248 aa, Unknown
  Obtained from environmental sample
  DOMAIN (7)...(240): Domain of unknown function DUF28
  misc_feature (1)..(248): Xaa is any amino acid
MNMSGHSKWATIKHAKGAADAKRGQMFTKLIKEISIAARMGGGNPEGNPRLRTAIIKARGANMPKDNIDRAIKKGTGELEGVTYEELTYEAYAGGGVGLLIEVLTDNKNRAAADVRNILTRGGGELAKAGSVTRLFKRQGIINLDGEKYTEDQVMEAALEGGAEDVSSDGGIIEVSTAPEDFEAVMEALQSKNFETLSAEISMVADAEVPLDNEATAKALRLVDRLEENDDVQNVYHNMAIPERFSLE

SEQ ID NO: 12567 - DNA, 729 bp, Unknown
  Obtained from environmental sample
  misc_feature (1)..(729): n is a, c, g, or t
ttgttggaggaatgccataccgtttcgcttatacgagtcactgccaacgggaatttgattatgaatgacggtgcgaagatcaacgggaatactcactcaaccatcaccaccacctactcctatggtggcggtgtgtatgtgaacggtggaaccttcaccatgaacggtggtgaaatctctggcaatactgcctctggtagcaacggcggtgtcggaggcggggtgtatgtatccaatggaatctttaccatgaatgatggaaaaatcagcggaaatacgacaaaccatggcggcggtggcatttatattcatacaaatggaaccgttaccatgaatggcgggacaatcagtggaaatacggcaggtactgatggaggcggtatttgtattcattcaaatggaaactttattatgaatggtgggataatcagtggaaataccgctggtagtggtggtggaggcatttttgctgtgggtctttctggtgtgtctgaaatttttagaaaacttcctaccagcggaggacaaaacagcggtattatttatgggtctgaggctgttggagtagatgctgatggagtaccattgaaaaataccggaagtaagggaggtcatgctgtttatggctcatctcggcatcgtaataccactgcatggcaaacagaccacattgacaccgcaacgggcaagggtttgagcgcgaacgggaatccgccgtatgggcagtag

SEQ ID NO: 12568 - protein, 242 aa, Unknown
  Obtained from environmental sample
  misc_feature (1)..(242): Xaa is any amino acid
MLEECHTVSLIRVTANGNLIMNDGAKINGNTHSTITTTYSYGGGVYVNGGTFTMNGGEISGNTASGSNGGVGGGVYVSNGIFTMNDGKISGNTTNHGGGGIYIHTNGTVTMNGGTISGNTAGTDGGGICIHSNGNFIMNGGIISGNTAGSGGGGIFAVGLSGVSEIFRKLPTSGGQNSGIIYGSEAVGVDADGVPLKNTGSKGGHAVYGSSRHRNTTAWQTDHIDTATGKGLSANGNPPYGQ

SEQ ID NO: 12569 - DNA, 579 bp, Unknown
  Obtained from environmental sample
  misc_feature (1)..(579): n is a, c, g, or t
ttggcgcgggaaacaactggccgctgggcgttaaattgttcaatcattttgggggaaaccatgattagcatgacagggttcgcttactgcgaaaaaacagggcaggatttgtcggttacggtggaaataaaggggtataacaaccgctatctggaaattattatcaaccttccgccgtggctttccgttttggagccgaaagtccgcgaacaagttgcttcccgctgcggcagggggaaggtggaagtttccatccgtatgcgcgaacaaaacacgccggtaaacatcagcgtaaacgcaaacgcggcaaaggcgtattttaacgcgataaacaaacttgcggaagaattaaaccttgaagaaaagtgcaatctttccgccctgttaagaatggaaaacgtgcttgagatagaaaagaaccgcgacgaggagcgttattggaaggaaatagagcccttattaagcgaggcggttcaggcgtttgaaaaagaaagaaaccgggaagggaagcacacggaggaagatattttttcgaattttgaaataattgtctcctcggtaaaaagtatttcggcgtag

SEQ ID NO: 12570 - protein, 192 aa, Unknown
  Obtained from environmental sample
  DOMAIN (21)...(175): YicC-like family, N-terminal region
  misc_feature (1)..(192): Xaa is any amino acid
MARETTGRWALNCSIILGETMISMTGFAYCEKTGQDLSVTVEIKGYNNRYLEIIINLPPWLSVLEPKVREQVASRCGRGKVEVSIRMREQNTPVNISVNANAAKAYFNAINKLAEELNLEEKCNLSALLRMENVLEIEKNRDEERYWKEIEPLLSEAVQAFEKERNREGKHTEEDIFSNFEIIVSSVKSISA

SEQ ID NO: 12571 - DNA, 408 bp, Unknown
  Obtained from environmental sample
  misc_feature (1)..(408): n is a, c, g, or t
atggatgattacgggcatcaccttacggcgattaaaacancccttgccgtatttaaaaatttttatcnttcacgcaggctgattgtaagttttatgtcgcacacatatacgcgcacttccgcccttcttgacgaattcgcctcggcttttgacgatgcggatattgttttctttcataaaatttacgcgagcgcgagggaaaattacaagggcggcgttaacggcagaacactctacgaaaaagccgtgtggcgcgtgaaagctttttatcaggatgagccggacggcgcttttactccgttatgcgaaatgttaaaacccggcgatatttttattacgcttggcgcgggaaacaactggccgctgggcgttaaattgttcaatcattttgggggaaaccatgattag

SEQ ID NO: 12572 - protein, 135 aa, Unknown
  Obtained from environmental sample
  DOMAIN (1)...(73): Mur ligase family, glutamate ligase domain
  misc_feature (1)..(135): Xaa is any amino acid
MDDYGHHLTAIKTXLAVFKNFYXSRRLIVSFMSHTYTRTSALLDEFASAFDDADIVFFHKIYASARENYKGGVNGRTLYEKAVWRVKAFYQDEPDGAFTPLCEMLKPGDIFITLGAGNNWPLGVKLFNHFGGNHD

SEQ ID NO: 12573 - DNA, 873 bp, Unknown
  Obtained from environmental sample
  misc_feature (1)..(873): n is a, c, g, or t
atgcgctttgttcagggccccgattttcccacaggcgggataattcttggcagacaggggattatagacgcttataagacagggcgcggaaaactccttgtccggggtaaattcaacgtggagaccaccaaacagggcaaggaaaaaatcgtttttaccgaaattccttacaatgtgaataaagccatgctcctggaaagaatcggccaactgatgcgcgacaaggtaattgacagtatcgcaaacgcgaacgacgaatccgaccgcgacggtattcgcatcgttattgagttgaaaaagggcgcaattgttaaaatggttcttaaccaacttttttctaatacgcagcttcaaatttcattcggaatcatcaatttggcgcttgtcggggtcaagccgcagttactcacattgagagaattaatccactactttgtggaacaccgtgtcgaagttgttactcgccgcacacgtttcgatttacgcaaagctgaagaacgcgcccatatcctggaagggctggttatcgcccttgcgaacattgacgaagttgtcgctctcattaaagcaagcaaagatgtggcgacggcgcgtctgaacctgcaggagcgttttaagctgtccgaggctcagtctgaggcaatcgttgaaatgcgccttggccgccttaccggacttgaaattgaaaaaattgagaaagagcttgcggaactaaaagttcaaatcgcttactataaatccctgttggccgatgaaaaaaaactgcgcggcgttatcaagaccgagacaagggagattgccgaaaaatacggcgacnagcgccgtacggaaataatcgccggcgaagtggaaatatncatattgaagacttga

SEQ ID NO: 12574 - protein, 290 aa, Unknown
  Obtained from environmental sample
  DOMAIN (1)...(271): DNA gyrase/topoisomerase IV, subunit A
  misc_feature (1)..(290): Xaa is any amino acid
MRFVQGPDFPTGGIILGRQGIIDAYKTGRGKLLVRGKFNVETTKQGKEKIVFTEIPYNVNKAMLLERIGQLMRDKVIDSIANANDESDRDGIRIVIELKKGAIVKMVLNQLFSNTQLQISFGIINLALVGVKPQLLTLRELIHYFVEHRVEVVTRRTRFDLRKAEERAHILEGLVIALANIDEVVALIKASKDVATARLNLQERFKLSEAQSEAIVEMRLGRLTGLEIEKIEKELAELKVQIAYYKSLLADEKKLRGVIKTETREIAEKYGDXRRTEIIAGEVEIXILKT

SEQ ID NO: 12575 - DNA, 423 bp, Unknown
  Obtained from environmental sample
  misc_feature (1)..(423): n is a, c, g, or t
atgaacgcgatactcctgcgccaatccattcactctttcgctgagacgagcttctcgcgttccggcgggccgggcgggcaaaatgtgaacaaagtcaacactaaggtaaccttgcgtttacgcttagcggaactgaccgggctttcggatgcggagttggagcgggtaaaattaatgctggcaaacagactcacaaaagagggagatattgttattacttctgaggaagagcgctcccagcggacaaatcttgaaagggcgtattttcgcattgaagcgttaattatagcggcagcaaggctgcctaagaagcgaaggccgacaaaaccaagtaaagcggcaaaagaaaagcgcctccttgcaaagaggcgccaatcacaaaaaaaggatgaaaggtcgaaaccggcggattgtttcacgtga

SEQ ID NO: 12576 - protein, 140 aa, Unknown
  Obtained from environmental sample
  DOMAIN (5)...(132): Peptidyl-tRNA hydrolase domain
  misc_feature (1)..(140): Xaa is any amino acid
MNAILLRQSIHSFAETSFSRSGGPGGQNVNKVNTKVTLRLRLAELTGLSDAELERVKLMLANRLTKEGDIVITSEEERSQRTNLERAYFRIEALIIAAARLPKKRRPTKPSKAAKEKRLLAKRRQSQKKDERSKPADCFT

SEQ ID NO: 12577 - DNA, 381 bp, Unknown
  Obtained from environmental sample
  misc_feature (1)..(381): n is a, c, g, or t
atgaaagtagcgatagtccattactggcttgtcaatatgcgcggcggggaaaaagtgcttgaaacgcttctggaaatgtttcccagagcggatatttatacccatgtgtataatcccaaagccatacccgcgactattaacaggcgcaaaatttttacttcaagcataaaccgccttcctttcgcaaaaaaactttaccagctttatatgcctcttatgcctaaagcgctccttgatttcgaccttaggcaatacgatcttatcatatccagcgaatcgggacccgcgaaaggagtagttcccaatccaaacgcgtatcatatttgctattgccatacacccatgcggtatttgtgggatatgtnccctcggccgatctga

SEQ ID NO: 12578 - protein, 126 aa, Unknown
  Obtained from environmental sample
  misc_feature (1)..(126): Xaa is any amino acid
MKVAIVHYWLVNMRGGEKVLETLLEMFPRADIYTHVYNPKAIPATINRRKIFTSSINRLPFAKKLYQLYMPLMPKALLDFDLRQYDLIISSESGPAKGVVPNPNAYHICYCHTPMRYLWDMXPRPI

SEQ ID NO: 12579 - DNA, 615 bp, Unknown
  Obtained from environmental sample
  misc_feature (1)..(615): n is a, c, g, or t
ttgagctcgaatttcgatcttgggccaacggatgcctccgccgcatcccatccctttacctgcctgtttctcctcatggggggcatccgcccctcttatgctttacggagaaaactgctcgaccccctgattgataccggttacacatttattgtaagaccgcatcctcagtcaaaaaaatccgagaacgcgatgctggaaagactcgccttgcgttacaaagaccgaaacataacatgggattatgaaatcgataacattttctcgctcagcaaatcggatattatgatttccgatttttcgagtatcattttggattatgttttcctctatgataaaccggttatttattcaacctgttcatttgatctgcggccttacgacgctgacgaccttgctcatgagccatggtggttcaagacattgaaagagatagggatagaactgaatgagagtgattttgcctcaatcggagatgttattcaaaaagcatctaacagctcctcgttagccgaggcccgcaaaattgccagggataccgcatggcagcatcggggcaaagcgggcgcgctgattgcggattttgtaatagaaacaatcggaaaaaataaataa

SEQ ID NO: 12580 - protein, 204 aa, Unknown
  Obtained from environmental sample
  DOMAIN (18)...(198): CDP-Glycerol:Poly(glycerophosphate) glycerophosphotransferase
  misc_feature (1)..(204): Xaa is any amino acid
MSSNFDLGPTDASAASHPFTCLFLLMGGIRPSYALRRKLLDPLIDTGYTFIVRPHPQSKKSENAMLERLALRYKDRNITWDYEIDNIFSLSKSDIMISDFSSIILDYVFLYDKPVIYSTCSFDLRPYDADDLAHEPWWFKTLKEIGIELNESDFASIGDVIQKASNSSSLAEARKIARDTAWQHRGKAGALIADFVIETIGKNK

SEQ ID NO: 12581 - DNA, 558 bp, Unknown
  Obtained from environmental sample
  misc_feature (1)..(558): n is a, c, g, or t
ttgctgatatgcccgtttctcctgattatagcttttttgatcaagattagctcgcccggaccggtcctgtacgggcacaaacggcttggaatgaacgggaaacattttaccgcttataaattccgttcgatggtaatggattcacatgaaagacttcaaaaactttntgaatcgaatcctgaaattaaaaaagaatgggaaaggaaccacaaacttcagaatgaccccagggtgacttttatcggcagattcatcaggcgtacaagcatagatgaatttccacagcttcttaatattctgaaaggcgagatgagccttgtggggccgcgtccgattgtggatgaggaagtaagcagatacggtgaggattttggctggatattttcggtcaaacccggattgacaggcatgtggcaggtttcaggcagatcggaaacggattattcctccaggatattgtatgatacttattatctgcaaagctggtctgtctggcttgatatctggattctttttatgaccttcggtgctgttttgcgcggaaagggcgcgtattag

SEQ ID NO: 12582 - protein, 185 aa, Unknown
  Obtained from environmental sample
  DOMAIN (1)...(185): Bacterial sugar transferase
  misc_feature (1)..(185): Xaa is any amino acid
MLICPFLLIIAFLIKISSPGPVLYGHKRLGMNGKHFTAYKFRSMVMDSHERLQKLXESNPEIKKEWERNHKLQNDPRVTFIGRFIRRTSIDEFPQLLNILKGEMSLVGPRPIVDEEVSRYGEDFGWIFSVKPGLTGMWQVSGRSETDYSSRILYDTYYLQSWSVWLDIWILFMTFGAVLRGKGAY

SEQ ID NO: 12583 - DNA, 777 bp, Unknown
  Obtained from environmental sample
  misc_feature (1)..(777): n is a, c, g, or t
atgccgaaagaataccgcaacacttgtgacttaatatacattatgcggcaacggcgccgtcaattttttatttcagcgcagattgcgattgccgttgtgagcctatgcgcttttgcggcggcggcgcaaacactgtcggaaggtatgggtacggacagcgcagatgttaacgccggaattgatacaattattgatataggcattaatgcaaatgttgacaccgataccatcaaccctccaaaatataaattcgccctgattttaagcggcggcggttctcgcggcctagctcagatcggcgcgcttttggcccttgaagaggccggactcaaacccgacctcatcgtctccacgagcatgggttccgtcgtcggcggactctacgcgtgcggccacaccgccgcgcagatactatccatcgcgcggtcggtggattggagccgcgtgtcgaccaacgccaattcgcgcccctcgctcttcgtcagccaaaaatcgccgccaaagggatacctctttgatatacggttcggcgacaacttcaaaccggcgttacccaacgctatttcgaacggtcagatcttctacgagctgctcacagcgaggacgctctccgcgttgcacgccgccggatacgacttcaacaaactgcccgtgagcctacgggtggtcgccaccgacctattgacggggaacagggtggtcttctctaacgggagcttgacagcagccatacgggcgtcatgtagcgcgccgcttgcttttcgccgcttgacttga

SEQ ID NO: 12584 - protein, 258 aa, Unknown
  Obtained from environmental sample
  DOMAIN (86)...(258): Patatin-like phospholipase
  misc_feature (1)..(258): Xaa is any amino acid
MPKEYRNTCDLIYIMRQRRRQFFISAQIAIAVVSLCAFAAAAQTLSEGMGTDSADVNAGIDTIIDIGINANVDTDTINPPKYKFALILSGGGSRGLAQIGALLALEEAGLKPDLIVSTSMGSVVGGLYACGHTAAQILSIARSVDWSRVSTNANSRPSLFVSQKSPPKGYLFDIRFGDNFKPALPNAISNGQIFYELLTARTLSALHAAGYDFNKLPVSLRVVATDLLTGNRVVFSNGSLTAAIRASCSAPLAFRRLT

SEQ ID NO: 12585 - DNA, 618 bp, Unknown
  Obtained from environmental sample
  misc_feature (1)..(618): n is a, c, g, or t
gtgttggttaatctaacggatgtaggcgggctttacgacaagaacccccacaaggagagggacgcgaagcacatccccgtagtgagcgccgtattggcggggatacataggatggttagcgagaagaagagcgagatcagcgtgggcggtatgtccacaaagctgaaagccgccgagatggtcacgcgcgccggcataccggcgcttataggcgacggtttcaaccaacgtttgacggcggtgcttaaagacgactcctgcgccacgctatttctgccgtccgacaaaaagataccgtcgcggcggcgttggatagccttcaccggacaaccggcggggagcgtcatcgtggatgccggggcgtccaaggcgataacggaacaaggtaaaagcctgttggccgccggggtcacgactgtgggcggaaagttcaacgccggggacatggtggacatcataagcccgcagggggatgtgatagccaagggattggcgaacttctccgcggacgaggtcgaaaaaatacgcgggtgcaaaacggcggaggtagagaagaagctcggcgccatacggttcaacgaggtcattctgcgggataatatggtcgtgttgcggtga

SEQ ID NO: 12586 - protein, 205 aa, Unknown
  Obtained from environmental sample
  DOMAIN (113)...(187): PUA domain
  misc_feature (1)..(205): Xaa is any amino acid
MLVNLTDVGGLYDKNPHKERDAKHIPVVSAVLAGIHRMVSEKKSEISVGGMSTKLKAAEMVTRAGIPALIGDGFNQRLTAVLKDDSCATLFLPSDKKIPSRRRWIAFTGQPAGSVIVDAGASKAITEQGKSLLAAGVTTVGGKFNAGDMVDIISPQGDVIAKGLANFSADEVEKIRGCKTAEVEKKLGAIRFNEVILRDNMVVLR

SEQ ID NO: 12587 - DNA, 504 bp, Unknown
  Obtained from environmental sample
  misc_feature (1)..(504): n is a, c, g, or t
atgatacatctctataccggagaaggaaaaggaaaaactactgcggctatgggccttgctatccgcgccgcagggcgtggcaaaaaagttgtgattgtccagtttctaaagggaagggataccggggagcttcattccctggcttttattcccaatattacagtaatccgaaacagcgaagccaaaggtttcttttacaacatccctccggaaatccgcttaaaaataacagaagagaataacgaaaaccttcgaaaagctttggccctgccctatgatctgattgtgcttgatgaagtctgtgccgcctacgatcttgaagctattaaccggaaggccgtggacgatctgctgctcggcttcagtccggagaaagaacttgtgctgacaggcagaaatccccctcagcatttctgcgattcggcggattacatttcagagatacacaaggtaaagcatccctttgatcggggtgttcctgcaagagaagggatcgagtattga

SEQ ID NO: 12588 - protein, 167 aa, Unknown
  Obtained from environmental sample
  DOMAIN (1)...(167): ATP:corrinoid adenosyltransferase BtuR/CobO/CobP
  misc_feature (1)..(167): Xaa is any amino acid
MIHLYTGEGKGKTTAAMGLAIRAAGRGKKVVIVQFLKGRDTGELHSLAFIPNITVIRNSEAKGFFYNIPPEIRLKITEENNENLRKALALPYDLIVLDEVCAAYDLEAINRKAVDDLLLGFSPEKELVLTGRNPPQHFCDSADYISEIHKVKHPFDRGVPAREGIEY

SEQ ID NO: 12589 - DNA, 657 bp, Unknown
  Obtained from environmental sample
  misc_feature (1)..(657): n is a, c, g, or t
ttgaatccctttttaaaagcggggcttgacgcggtgaacatcagtattaatacaatggatagagagaaatttttacggttaaccggaatggacagtatggctgacattgtacctgttattgatcatgccatggaaacgggctntgatgtaaaaattaacaccgtgatgatacggggattcaacgaagatgagattgtgaagattgccggacttgccagaactaagaatatagcggcccgttttattgaattaatgcccctgggcgaggctgtggcgttcaagcctttttacgcgcatgaggcggcggctctgatacaaggaacatacggcccactgctgcccgcgtccgtaaaattggggaacgggccggcggagtattataccatagccggctttgccggccatatcggctttatcagcccgatgagccgctgtttctgcaaaagctgtaacaagctacggcttggcgcgtccggttttctgaagctctgcctctcaggtgattcaggtcttgaccttcgcggccttgtccggggcggcgcttctgacgaagaaataaccggcttgatccgtgaacaggttgctttaaaaccggccggacatagtttcgccgaaagaggcggcagcagtgtaaatatgtttcggatcgggggctga

SEQ ID NO: 12590 - protein, 218 aa, Unknown
  Obtained from environmental sample
  DOMAIN (77)...(203): Molybdenum Cofactor Synthesis C
  misc_feature (1)..(218): Xaa is any amino acid
MNPFLKAGLDAVNISINTMDREKFLRLTGMDSMADIVPVIDHAMETGXDVKINTVMIRGFNEDEIVKIAGLARTKNIAARFIELMPLGEAVAFKPFYAHEAAALIQGTYGPLLPASVKLGNGPAEYYTIAGFAGHIGFISPMSRCFCKSCNKLRLGASGFLKLCLSGDSGLDLRGLVRGGASDEEITGLIREQVALKPAGHSFAERGGSSVNMFRIGG

SEQ ID NO: 12591 - DNA, 681 bp, Unknown
  Obtained from environmental sample
  misc_feature (1)..(681): n is a, c, g, or t
atggcctcgttcaacgccgccaacggcatttcctttattcagacagctgaaggttatctccaggaaacagaagacgtattgcagcgcataagagagcttgctgtacagtcagccaacggcatctacaccgaagaagacagaatgtacatccagatcgaagtttccgctctcgtggccgaagttgaccggatcgcaagccatgcccagttcaacggcatgaacatgctcaccggacgtttcgccagggctctgggtcagaacgtccccaccgcttccatgtggttccacatcggcgcgaacatcgatcagaggacacaggtgtacatcggcacaatgaccgcttcaggtcttggcatccgcgatgtcgccgatgcgagcatcatgagccttgcaaccccggaagacgccaacaggcacatcagcactcttgacgaagctctgaaattggtcaacaagcagagggcggatcttggcgcttaccagaaccggctcgaacacgcgattcgcggcattgatattggcgcggaaaacctccaggcagccgagtccagaatccgtgacaccaacatggccaacgaaatggttaagtatgtcactcaccaaatcctttcacagtccggcactgccatgctggcgcaggccaaccaaaggggcacttcggtattgcagctcttgcaatag

SEQ ID NO: 12592 - protein, 226 aa, Unknown
  Obtained from environmental sample
  DOMAIN (133)...(204): Bacterial flagellin C-terminus
  misc_feature (1)..(226): Xaa is any amino acid
MASFNAANGISFIQTAEGYLQETEDVLQRIRELAVQSANGIYTEEDRMYIQIEVSALVAEVDRIASHAQFNGMNMLTGRFARALGQNVPTASMWFHIGANIDQRTQVYIGTMTASGLGIRDVADASIMSLATPEDANRHISTLDEALKLVNKQRADLGAYQNRLEHAIRGIDIGAENLQAAESRIRDTNMANEMVKYVTHQILSQSGTAMLAQANQRGTSVLQLLQ

SEQ ID NO: 12593 - DNA, 615 bp, Unknown
  Obtained from environmental sample
  misc_feature (1)..(615): n is a, c, g, or t
gtgcagattggcggaccgtcgggcggctgtctcacccaggaacatttggacatgcccctcgattatgacaacttgaaaaaggtcggagcgatggtaggttcaggcggtcttgtcgtaatgaaccaaagcacatgtatggttaagattgccaggtactttatgcaatttacgcaaaatgaatcttgcggtaaatgcgtagtatgcagagaaggaacccgtcagatgttggtgcttctggatgaaattatcgaaggccgtgcgacaaaggaaaccctcgacctgcttgaggatttatcacaggtggttcaagtcggctcactgtgcgctctcggtaaatcggctccaaatccggtgttgtcaaccataaaatatttcagggacgaatataacgcccacgtatttgacaaaaagtgtccgaccggaaactgcgaagctcttgccgactacaaaattcttcccgataaatgcaaaggttgttctctttgctctaagaaatgcccggttgaggcaattagcggcgaattaaagaaaccgtatacaatcgatacaaagaaatgtattaagtgcggcgcatgtatacagaactgcaaatttgcagccattgtaaaaggatag

SEQ ID NO: 12594 - protein, 204 aa, Unknown
  Obtained from environmental sample
  DOMAIN (179)...(202): 4Fe-4S binding domain
  misc_feature (1)..(204): Xaa is any amino acid
MQIGGPSGGCLTQEHLDMPLDYDNLKKVGAMVGSGGLVVMNQSTCMVKIARYFMQFTQNESCGKCVVCREGTRQMLVLLDEIIEGRATKETLDLLEDLSQVVQVGSLCALGKSAPNPVLSTIKYFRDEYNAHVFDKKCPTGNCEALADYKILPDKCKGCSLCSKKCPVEAISGELKKPYTIDTKKCIKCGACIQNCKFAAIVKG

SEQ ID NO: 12595 - DNA, 489 bp, Unknown
  Obtained from environmental sample
  misc_feature (1)..(489): n is a, c, g, or t
gtggaagaggccattaaaagcggaaacatcgccgaaacaaaagaatatctggaaaagcatacgcgtcgcagaatgggcgcaaggatacttttagctctggtgaacaacgccgtgcattccgaacacctccttgaaaaggccgtggaagccgaggcgatgagctgcatcgcttcgctggaaaacggctttaactttttaacagcgcttggctccctttcgccccttaccggttttttgggaaccgtatcggggatgattggggcgttcaggtccattgccgaagccgtcgacgtaaacgcccagatcgtggccaacggcatttacgaagccctgataaccaccgtgttcggcttaatcatcgccattatcgccatgtccgcccattccatctttacccacgctgttgacaagtttgcctcggatgtggaaatcgcctgctcggaattgatcatcgacatcggtgaatcccgcgagactgggaagaaatga

SEQ ID NO: 12596 - protein, 162 aa, Unknown
  Obtained from environmental sample
  DOMAIN (1)...(147): MotA/TolQ/ExbB proton channel family
  misc_feature (1)..(162): Xaa is any amino acid
MEEAIKSGNIAETKEYLEKHTRRRMGARILLALVNNAVHSEHLLEKAVEAEAMSCIASLENGFNFLTALGSLSPLTGFLGTVSGMIGAFRSIAEAVDVNAQIVANGIYEALITTVFGLIIAIIAMSAHSIFTHAVDKFASDVEIACSELIIDIGESRETGKK

SEQ ID NO: 12597 - DNA, 531 bp, Unknown
  Obtained from environmental sample
  misc_feature (1)..(531): n is a, c, g, or t
gtgtccgccttcatgttccaggagccaaggcttcttccctggcttacggtcctggaaaatataagcattccgcttgaaaaaattctgggaagggaaggggcaaaaaaaaaggcccgtgattttctttcgctggtatcgcttgaaggaaaagaaaaagtttttccgcctgagctttccggtggcgaggcgcagcgtgtttccatggccagggcttttgcctggaacgcgcccgcgcttttaatggacgagccttttcagtccctggacattcccctcagaaaaaacctgatggatctgaccctctcgcttctggaaaaagaaaaacgttttcttgccatggtaacgcacgatccaagggaggcggtttacctgggcgggcgcattattgttctgggaaggcctggcgaaggaattgtctttgacagggtagttggcaatcatggcgaaaaaagaacatacgccagtggtacggaacttgaaaaagaaattattaactcattgtttaatcttgaaagtgtagttgtaccttag

SEQ ID NO: 12598 - protein, 176 aa, Unknown
  Obtained from environmental sample
  DOMAIN (2)...(135): ABC transporter
  misc_feature (1)..(176): Xaa is any amino acid
MSAFMFQEPRLLPWLTVLENISIPLEKILGREGAKKKARDFLSLVSLEGKEKVFPPELSGGEAQRVSMARAFAWNAPALLMDEPFQSLDIPLRKNLMDLTLSLLEKEKRFLAMVTHDPREAVYLGGRIIVLGRPGEGIVFDRVVGNHGEKRTYASGTELEKEIINSLFNLESVVVP

SEQ ID NO: 12599 - DNA, 393 bp, Unknown
  Obtained from environmental sample
  misc_feature (1)..(393): n is a, c, g, or t
atgatcgaaaccgacgaagccccgccacctccggtgctatataccgaagacgctcccattccgntttctccgcctgaggaaattatttacctccaacagcatcttgtcacttcccttgcggttctgcccgaaagcgagatcatcagcgctacggtttacccacccattgcgttaaggtcgggtatcgaaggaactgtttaccttgagcttttaatcgataaaaacggaaatatccgcgacataatcattcttagggaaaacccgccgaacaggggatttggcgaggcggcactaaacgctttaaagggattaaaggcaaaacctgccgaagctaacggcgctactgtcgcctcgcggctaaggtacaactacactttcaagattaaacaatga

SEQ ID NO: 12600 - protein, 130 aa, Unknown
  Obtained from environmental sample
  DOMAIN (50)...(84): Gram-negative bacterial tonB protein
  misc_feature (1)..(130): Xaa is any amino acid
MIETDEAPPPPVLYTEDAPIPXSPPEEIIYLQQHLVTSLAVLPESEIISATVYPPIALRSGIEGTVYLELLIDKNGNIRDIIILRENPPNRGFGEAALNALKGLKAKPAEANGATVASRLRYNYTFKIKQ

SEQ ID NO: 12601 - DNA, 609 bp, Unknown
  Obtained from environmental sample
  misc_feature (1)..(609): n is a, c, g, or t
ttggaaaatggtaaaggcgcttttctnatctgtccccatctgggaaactcggaattgctgcggggtcttgcgagttttggcgaaacaggagtgtcccgaaaggtgccggttacttccatagtggatgttcaggttaataaaaattttacccgtgtgcttaatgaagtaaattcccaatcaagcctggacattatcagcgttcatgatataggtccccataccgcgattcttatccaggaaagattgagcgcgggtgaagtggttgtaattgccggggacaggacttctgcgggcagcaccgataaacgtcttatgattccttttcttggtgaggaggctccgttctcaatggggccgttttacatggccgctctgatggaagcgcccgtctattttatgtttgccctgcgccggggagatctgtccataaagcctgaatacaatttgcatatacataaatgcccgctctcctttgaatgttccagaaaggagaggtttaaacaaagttcttctcttgcccgttcttttgccgcgctgctggaaagctactgtaaacagaacccttttcaatggtataatttccatgatttctggtcaaaagaggtgtga

SEQ ID NO: 12602 - protein, 202 aa, Unknown
  Obtained from environmental sample
  misc_feature (1)..(202): Xaa is any amino acid
MENGKGAFLICPHLGNSELLRGLASFGETGVSRKVPVTSIVDVQVNKNFTRVLNEVNSQSSLDIISVHDIGPHTAILIQERLSAGEVVVIAGDRTSAGSTDKRLMIPFLGEEAPFSMGPFYMAALMEAPVYFMFALRRGDLSIKPEYNLHIHKCPLSFECSRKERFKQSSSLARSFAALLESYCKQNPFQWYNFHDFWSKEV

SEQ ID NO: 12603 - DNA, 357 bp, Unknown
  Obtained from environmental sample
  misc_feature (1)..(357): n is a, c, g, or t
ttgcgccttgccggcatttccactatcgaacgggccaatgcattcttgctggaaacctacctgccatacatgaacagcaagttcagccgcccgcctcaaaatgctgatgacgctcatgtcaaacccggcacggctgtgctagacgacattttatgcatggaacatgatcgaaaagtgagcaaggattatatcgtccgctttgaatgccgtttgtttcaaattctaccggaagcaaaagtaaagcccaggcctggcgatgctgtccttgtccgcatcaagatggactcttccgtctgcatcttgtggaaaaacaaggcgctgcttgtcaaagaaattaaaactatgtttgacgagtga

SEQ ID NO: 12604 - protein, 118 aa, Unknown
  Obtained from environmental sample
  misc_feature (1)..(118): Xaa is any amino acid
MRLAGISTIERANAFLLETYLPYMNSKFSRPPQNADDAHVKPGTAVLDDILCMEHDRKVSKDYIVRFECRLFQILPEAKVKPRPGDAVLVRIKMDSSVCILWKNKALLVKEIKTMFDE

SEQ ID NO: 12605 - DNA, 867 bp, Unknown
  Obtained from environmental sample
  misc_feature (1)..(867): n is a, c, g, or t
ttgtttgtacctgcttttgagcctctgcgttttgccgaggaaggacgctgggttccggcgcagatggcgcaattaaaccagttatcggagttggcgggtaatctgcccccaggattgtcaggtctattaagacctgattttaaggttgatataaaccgacctgacatatcaacgattgaatacgcgcaggcgggggcaagatttacaactactatcggcccggctgacatcggtttgcagtattactacggacgcataaccagacccgttccaacttttacttataccttgcctcaggctttcattcctccgttggatatatctgcggcaataaatttagattacaatccctatcaccaaattggtgttgattgggcgcagatactttttggctttaatatccgcgccgaatttgcggctaacatcacatatgattcaaaaggcgatgacccatctgtttacaatccatcgcttttatggtccttagggtttgaccgcgatctcttcgccggcattaatctgaattttcagtgcaacgaatcaatccgtctaatgaatgacaaaattaaaaatgacaaactgtcttttccaattcctttgaatattgatctgcctcccctggatattgaagctgataccaatatgacttccacgcaaattattaccgccatttccaaaaagtttttccgtgacgcgctggaaaccaaaattgccgttatgtggggaattgaagacaacgattttttgctcattcccacaaatatctggacgaaagacacaataccgctcgaaatctcagccgggaatttcggccgtgataaagaaaggccaattcggaacaatacaaaaaacaaccgccttttttaa

SEQ ID NO: 12606 - protein, 288 aa, Unknown
  Obtained from environmental sample
  misc_feature (1)..(288): Xaa is any amino acid
MFVPAFEPLRFAEEGRWVPAQMAQLNQLSELAGNLPPGLSGLLRPDFKVDINRPDISTIEYAQAGARFTTTIGPADIGLQYYYGRITRPVPTFTYTLPQAFIPPLDISAAINLDYNPYHQIGVDWAQILFGFNIRAEFAANITYDSKGDDPSVYNPSLLWSLGFDRDLFAGINLNFQCNESIRLMNDKIKNDKLSFPIPLNIDLPPLDIEADTNMTSTQIITAISKKFFRDALETKIAVMWGIEDNDFLLIPTNIWTKDTIPLEISAGNFGRDKERPIRNNTKNNRLF

SEQ ID NO: 12607 - DNA, 471 bp, Unknown
  Obtained from environmental sample
  misc_feature (1)..(471): n is a, c, g, or t
ttggagggcaggcccttttatagccgggaacgcctcaaaataacagcagctcttttacccctgctaactgaaggtatcggcgatacaatcagagtatcgctttccggtnctatggaggacgaaattatcgcgggaagggagattttaagagcggcgtctgaaataaacggaaacggaaggttgaagcgcaagggggtaaaaattgtttcctgcccgcgctgcggaaggcatggttttgatactcatgggtttacaagacgcttagcgaataagctttacgccatggaaaaagatattactgtggcaattatgggctgtgaggtgaacgggcctgaagaagcaaaacatgctgatattggcataacaggagcgggagacaaagttttgatttttaagcagggtaaggtaataaaaacaattacggcagacgaagctgaaaaaacttttgaagaggagcttcaaaaaatatga

SEQ ID NO: 12608 - protein, 156 aa, Unknown
  Obtained from environmental sample
  DOMAIN (4)...(156): GcpE protein
  misc_feature (1)..(156): Xaa is any amino acid
MEGRPFYSRERLKITAALLPLLTEGIGDTIRVSLSGXMEDEIIAGREILRAASEINGNGRLKRKGVKIVSCPRCGRHGFDTHGFTRRLANKLYAMEKDITVAIMGCEVNGPEEAKHADIGITGAGDKVLIFKQGKVIKTITADEAEKTFEEELQKI

SEQ ID NO: 12609 - DNA, 402 bp, Unknown
  Obtained from environmental sample
  misc_feature (1)..(402): n is a, c, g, or t
atgatttcatggcttgaccttgccagggtagtccggggccaggtactgtcgctaaaaaattcagagtttatcgaggcggcaagatcagccggggcaggaacatggcgtattatttggaagcacctgcttcccaacattgtcgggctgataattgtctactcatctttggcgttgcctactttcattataaatgaggcctttctttccttcctgggtctgggcgtttccgctcccatgacttcctggggcgttttgattgatgacggcacgaaggtcatggcgctatacccctggctccttgtgataccggctataaccatgtcgtttttcattttttgcatgaatttcctcggcgacggcctcagggacgctttcgatccccaggcgaagaacaggctgtag

SEQ ID NO: 12610 - protein, 133 aa, Unknown
  Obtained from environmental sample
  DOMAIN (1)...(131): Binding-protein-dependent transport system inner membrane component
  misc_feature (1)..(133): Xaa is any amino acid
MISWLDLARVVRGQVLSLKNSEFIEAARSAGAGTWRIIWKHLLPNIVGLIIVYSSLALPTFIINEAFLSFLGLGVSAPMTSWGVLIDDGTKVMALYPWLLVIPAITMSFFIFCMNFLGDGLRDAFDPQAKNRL

SEQ ID NO: 12611 - DNA, 444 bp, Unknown
  Obtained from environmental sample
  misc_feature (1)..(444): n is a, c, g, or t
gtggaggaaaaacagatgtcaaatgatacgaacaacgaaaaaattcttgaagtaaaaaacctccgcacctatttttatacagacgagggagtcgtaaaagcggtagacgatgtttcattttcccttcacaagggcgaagtgattggcatagttggggaatccggttcgggcaaatcggttgcaaacctttcagtgatgaatctgattctttcgccgcccggaaagatcgtaggtggcgaagttcttttccacggtgaagatattctgaaactgaaggaaaagcagctccagaaaatacgcggggcaaaaatttccatgattttccaggatcctatgacaagcctgaacccgtttttgaggatttctacccagctgatcgagaccataatgctgcaccagaatctggacaaaagcaggccccgcgaaaggccatcgagatgctaa

SEQ ID NO: 12612 - protein, 147 aa, Unknown
  Obtained from environmental sample
  misc_feature (1)..(147): Xaa is any amino acid
MEEKQMSNDTNNEKILEVKNLRTYFYTDEGVVKAVDDVSFSLHKGEVIGIVGESGSGKSVANLSVMNLILSPPGKIVGGEVLFHGEDILKLKEKQLQKIRGAKISMIFQDPMTSLNPFLRISTQLIETIMLHQNLDKSRPRERPSRC

SEQ ID NO: 12613 - DNA, 369 bp, Unknown
  Obtained from environmental sample
  misc_feature (1)..(369): n is a, c, g, or t
atggaggggataagctgcgaatacgcgtactacctttccgtgctgagggatctgtatcccaaaagcgatttcaacaccatgatcgccatcggaggcggcgcgtcctccgagttgtttgtgcggatcaaggccgatgttctgggagtacaggcgatccgcaccgaggtgggggacactgctcttgtgggaagcgcggccattgccggttacggggccggagtgctggacgattacagggccgctattctcaagacaatcgtcaataagcccgcgataacgtttgacgcggaacgccacgcgcggtataaacccgttataaaaaaatacctggaaacaattgaagccatgaacggtttatataaaatctga

SEQ ID NO: 12614 - protein, 122 aa, Unknown
  Obtained from environmental sample
  misc_feature (1)..(122): Xaa is any amino acid
MEGISCEYAYYLSVLRDLYPKSDFNTMIAIGGGASSELFVRIKADVLGVQAIRTEVGDTALVGSAAIAGYGAGVLDDYRAAILKTIVNKPAITFDAERHARYKPVIKKYLETIEAMNGLYKI

SEQ ID NO: 12615 - DNA, 828 bp, Unknown
  Obtained from environmental sample
  misc_feature (1)..(828): n is a, c, g, or t
gtgcatacaatcgaaaagtacgtccaatacgccaaggagcaggtcgcgctcggcatagactcgctttgcgtcaaggatatggccggcatcctctctcctataatggcggagcgcttggtgtccgccctaattaaggagctgaacatccccgtccaattgcactgccacgcgtctagcggcatggccaccgccgcttatgtggagggtgtgcgcgccggcgccggcgccatagactgcgccatatcgtctatggccggaacttcctcccagccgcctgtggagactatggccgcgatattctccgagaccaattactccgccggtttggatgtggaggcgcttgacagggtcgcaaagtatttcgtcgatctggccccgcgccgcagcgccgccccgtcctccgtcatgtccatagacccgggcatcctgatacaccagatccccggtggaatgatctcgaacttccgctcgcaacttcaaatgcagaaggcgctcgacaagttgccgcaggtgcttcaggaggtcagccgcgtacgcgaggatttgggctacccgccgctcgtcacccccacaagccaaatcgtcggcacgcaggcggtaatgaacgtcatatcgggcgagcgctacaagattgtgcccaacgaggtgaaggattatgtaaagggcttgtacggaaggtcgccggtgtctatcgaaaagggtatgataaagaagatattgggagatgagaaacccataagccacaggcccgccgacaagatagccccaatgctccctaaggccaccgacggtgtggaccccgcgcttatcacgccgaggaagacataa

SEQ ID NO: 12616 - protein, 275 aa, Unknown
  Obtained from environmental sample
  DOMAIN (142)...(275): Conserved carboxylase domain
  misc_feature (1)..(275): Xaa is any amino acid
MHTIEKYVQYAKEQVALGIDSLCVKDMAGILSPIMAERLVSALIKELNIPVQLHCHASSGMATAAYVEGVRAGAGAIDCAISSMAGTSSQPPVETMAAIFSETNYSAGLDVEALDRVAKYFVDLAPRRSAAPSSVMSIDPGILIHQIPGGMISNFRSQLQMQKALDKLPQVLQEVSRVREDLGYPPLVTPTSQIVGTQAVMNVISGERYKIVPNEVKDYVKGLYGRSPVSIEKGMIKKILGDEKPISHRPADKIAPMLPKATDGVDPALITPRKT

SEQ ID NO: 12617 - DNA, 804 bp, Unknown
  Obtained from environmental sample
  misc_feature (1)..(804): n is a, c, g, or t
gtgctaatcgcgagtaacagtgaagggaaggccgcttttgatttattgattgtaagagagctgacgggcgggcttactttcggcaaacgcggaagattggaagaagcttcaaacggccacagtcccggttcggcttttgataccgaaacatattcatggatggaaattgagcgcgtgctccgtgcgggttatgaagcggcggctgtacgacggaaaaaactctgcgtggtggacaaggccaatgttcttgagtcttcccgtttctggcgcgaagttgcggctgtggtttcaaaagattatcccgacatcgaaacaagttacctttatgttgacaatgccgctatgcagttgattcgcgctcccggacaattcgacgttatcgtaacgtccaatctctttggagacatactttccgatgaggcatccgtgcttacgggttcaatcggtatgcttgcctcggcaagcttgggcgacaaagtgcagggcgggacaaggccgggaatgtacgagcctattcacggctcggcgccggacatcgcggggaaggacattgccaatcctctcgcgacaattctttcggcggcaatgatgctccgctactcattcggtcttgagaaggaagctgccgctgttgaaaccgctgttaacaatgtgctggatcagggactgaggacaggagacattgcaagccgtagtatcgcagcaagcagcgtcgcagcaagcagcgcggtaaacaataacgaaaaaattgtgggtaccaaagaaatgagcgaagcggtactcaaggcattggagaaattatga

SEQ ID NO: 12618 - protein, 267 aa, Unknown
  Obtained from environmental sample
  DOMAIN (1)...(260): Isocitrate/isopropylmalate dehydrogenase
  misc_feature (1)..(267): Xaa is any amino acid
MLIASNSEGKAAFDLLIVRELTGGLTFGKRGRLEEASNGHSPGSAFDTETYSWMEIERVLRAGYEAAAVRRKKLCVVDKANVLESSRFWREVAAVVSKDYPDIETSYLYVDNAAMQLIRAPGQFDVIVTSNLFGDILSDEASVLTGSIGMLASASLGDKVQGGTRPGMYEPIHGSAPDIAGKDIANPLATILSAAMMLRYSFGLEKEAAAVETAVNNVLDQGLRTGDIASRSIAASSVAASSAVNNNEKIVGTKEMSEAVLKALEKL

SEQ ID NO: 12619 - DNA, 621 bp, Unknown
  Obtained from environmental sample
  misc_feature (1)..(621): n is a, c, g, or t
atgacagattggccgagacatgctgcgtataggcggcgcgatttttggagatcggatttgaaaagggtaaaacgaaaaacgctttttttcctcctgctggcgattcctgtttttcttgtcccggcgcagacaagcagcacaacaactactacaaacaacaattttttcgatttaagcggcgctccccagtgggcgaaggatctgcgccgctttgagatcgtcacgtttggagccatcccctttgccatgtttacggcgacatttggaatggatatgtaccggtggtacaatgccaacggtatggactttagcgaatccggacgcaggtatgccccctggcctttgaaatcagccggcgctatcgcgatggaacccagggagattgagacgaccctcattattgccgccagcctgtgcgtaacagtcgcgttaactgatctggtcataactctaatcaagcggtcaaaggcgcgaaaacggactgaagccctgcctcacaatgccaccacgattaaccggaagcccttgtacgaggatgaagcgcatgcggagcattcggcggaatctcgggatgactccgccggagatttggaaactccttcccccgctccttcgccataa

SEQ ID NO: 12620 - protein, 206 aa, Unknown
  Obtained from environmental sample
  misc_feature (1)..(206): Xaa is any amino acid
MTDWPRHAAYRRRDFWRSDLKRVKRKTLFFLLLAIPVFLVPAQTSSTTTTTNNNFFDLSGAPQWAKDLRRFEIVTFGAIPFAMFTATFGMDMYRWYNANGMDFSESGRRYAPWPLKSAGAIAMEPREIETTLIIAASLCVTVALTDLVITLIKRSKARKRTEALPHNATTINRKPLYEDEAHAEHSAESRDDSAGDLETPSPAPSP

SEQ ID NO: 12621 - DNA, 453 bp, Unknown
  Obtained from environmental sample
  misc_feature (1)..(453): n is a, c, g, or t
atggaaaaaacttttgcaatggtaaaaccaaatgcggtacaggcgggtctggtaggtcgtataatagcgcgctatgaatcagcgaggctttccgttgtggcaattcgctttaaaaagatgactcaagccgatgcggaaggcttttatgcagagcacgttggcaaaccattttttcccgagttggcaaaattcatgacttccgggccttctgttcagttggttcttgcaggtgaagatgccatagcaaaagttcgtgccctcaacggtgcaacaaaccccgcaaaagcggaacccggcaccatccgctacgactgggcaacctcaatgacggaaaacgcggttcattcctcagatgggccagagagcgcagctagggagatttcgttttggtttaagccagaagaaatttttgaatacaccgcgcaagaccagagagctaagtcggtgctttga

SEQ ID NO: 12622 - protein, 150 aa, Unknown
  Obtained from environmental sample
  DOMAIN (2)...(136): Nucleoside diphosphate kinase
  misc_feature (1)..(150): Xaa is any amino acid
MEKTFAMVKPNAVQAGLVGRIIARYESARLSVVAIRFKKMTQADAEGFYAEHVGKPFFPELAKFMTSGPSVQLVLAGEDAIAKVRALNGATNPAKAEPGTIRYDWATSMTENAVHSSDGPESAAREISFWFKPEEIFEYTAQDQRAKSVL

SEQ ID NO: 12623 - DNA, 561 bp, Unknown
  Obtained from environmental sample
  misc_feature (1)..(561): n is a, c, g, or t
gtgatcgccgagttaggatatttccataagatggccgaaaaccaggctctgctggatggtaaaaagaaatccttatgggaaaaaatacaaaagctccttcggcaaatgtttaataaggagcaggaagcggtttattatgaccttgagtacatagaccctacaaaagggacgcctgtcaaggaaagaattaatcttgtcgcgttccataatgacctggatcgtaaaataaaaattcttaccgctatgaacagccggggacctgggatggcaaaactggaagccatgcaggatgaacagatcatctcttttttggaaaagaatatacgggatcttcagaatacccataaaactctttccgctctggatgattttttcaaagctaatgtggatcgtagtgaccgggataaggtaaagggtataaagcctgagctatcgactataaaaaacgccatagttaaagccaattcaaaacgccacgagtatagcttccataaagatgaggaagagcagttaaaacgtcttggggtaagttctgatcaatcaattacctcacctgtctga

SEQ ID NO: 12624 - protein, 186 aa, Unknown
  Obtained from environmental sample
  misc_feature (1)..(186): Xaa is any amino acid
MIAELGYFHKMAENQALLDGKKKSLWEKIQKLLRQMFNKEQEAVYYDLEYIDPTKGTPVKERINLVAFHNDLDRKIKILTAMNSRGPGMAKLEAMQDEQIISFLEKNIRDLQNTHKTLSALDDFFKANVDRSDRDKVKGIKPELSTIKNAIVKANSKRHEYSFHKDEEEQLKRLGVSSDQSITSPV

SEQ ID NO: 12625 - DNA, 357 bp, Unknown
  Obtained from environmental sample
  misc_feature (1)..(357): n is a, c, g, or t
atgactataatggttccggtaaataacgctgaagctctgggaatccggcctattgttgcgaaagatgaggcaatgaaagccctggaactcatgggtgaagattatgagcctatcccttcggactggaaacttcggtaccagatgaatctggatcttctcaaaaaagggagcgtcatggacattgcggctatcgtaaggtccttgtaccacaggagcaaggtaaaggagttaccgattttagaacgaaagctctatgactctgcccttaaattgtttgaagatgaaattgcctattctctgcgaaaaccaaaagatgaagttgaaacaatgatttttacccgccttgaggcccggtaa

SEQ ID NO: 12626 - protein, 118 aa, Unknown
  Obtained from environmental sample
  misc_feature (1)..(118): Xaa is any amino acid
MTIMVPVNNAEALGIRPIVAKDEAMKALELMGEDYEPIPSDWKLRYQMNLDLLKKGSVMDIAAIVRSLYHRSKVKELPILERKLYDSALKLFEDEIAYSLRKPKDEVETMIFTRLEAR

SEQ ID NO: 12627 - DNA, 882 bp, Unknown
  Obtained from environmental sample
  misc_feature (1)..(882): n is a, c, g, or t
atgcagaaactctacgaaacaaaagaaaagcccaaaagagcgtttttggtcagcatattaaacggaaactcaggcgacgatgccatgtgccgtgagtttgaagggcttgcgaaaactcttgaacttgaaatcgcggcgcatgaaaaaataaaagtgcgtgaaaaaagcgccaagttcggcatgggaagcggaaaagcggaagaattgtcaaagaaagcggcggaaatgggagcggatctgttggtttttgattggaatccaaatccttcacagcagagaaattgggaagaactttcgggacttccaacattggacaggcaggaacttataatccgtattttttcgcagagagccgttacaagagaagcggaattgcaggtaaaacttgcggaacttacctatttattgccaaggttgacgcacaagtatatcgatctttcacgtcagaggggaggtcgttacggaacaaaaggatcgggggaaaccaaacttgaaactgaccgcagaaaaatagaaaaacaaattaatcagcttgaaaaagaaattgaacaggtaggcaaacagcgcaggactcaaagaagcatgagggagcgcaacaacctgcccgtatgcgcgatagtagggtatacaaacgcaggcaaatcaagcctgttaaacgtactgacgggagcggatgtacttgcggaagacaaacttttctgcactctggacgccgttacgcggcgtttccagcccgcgcctaacgtaacagtccttcttaccgatacagtcggctttatccgcgctctgccgcattcgctcattaaagcgttccgttcaactttggaagaagcggcattagccgacattcttattcacattttagacgcctctgatccctga

SEQ ID NO: 12628 - protein, 293 aa, Unknown
  Obtained from environmental sample
  DOMAIN (202)...(293): GTPase of unknown function
  misc_feature (1)..(293): Xaa is any amino acid
MQKLYETKEKPKRAFLVSILNGNSGDDAMCREFEGLAKTLELEIAAHEKIKVREKSAKFGMGSGKAEELSKKAAEMGADLLVFDWNPNPSQQRNWEELSGLPTLDRQELIIRIFSQRAVTREAELQVKLAELTYLLPRLTHKYIDLSRQRGGRYGTKGSGETKLETDRRKIEKQINQLEKEIEQVGKQRRTQRSMRERNNLPVCAIVGYTNAGKSSLLNVLTGADVLAEDKLFCTLDAVTRRFQPAPNVTVLLTDTVGFIRALPHSLIKAFRSTLEEAALADILIHILDASDP

SEQ ID NO: 12629 - DNA, 438 bp, Unknown
  Obtained from environmental sample
  misc_feature (1)..(438): n is a, c, g, or t
gtgagccagccgcaaccggaagagacgcaggcggacatcaccggcatcttcgcgggccgccgcatactgcttgtggaggacgtggagatcaaccgcgagattttaatagccctgctcgaacccacgcagctgcaaatagacagcgctgaaaacggcgcgcaagccgtgcagatgttcatggccgccccgaataagtacaacttgattttcatggacatccaaatgccggaaatggacggctacgaggcgacaaaacgcataagagcgcaaaaagatatccccgccgccaaacgcatcccgatcatagcgatgacggcgaacgtcttcaaagaggacatagaaagatgcacggaagccggcatgaacagccacataggaaaaccggtggacatcgcggaggtgctggagaagctcaagactttctttaaggcgaaatga

SEQ ID NO: 12630 - protein, 145 aa, Unknown
  Obtained from environmental sample
  DOMAIN (20)...(139): Response regulator receiver domain
  misc_feature (1)..(145): Xaa is any amino acid
MSQPQPEETQADITGIFAGRRILLVEDVEINREILIALLEPTQLQIDSAENGAQAVQMFMAAPNKYNLIFMDIQMPEMDGYEATKRIRAQKDIPAAKRIPIIAMTANVFKEDIERCTEAGMNSHIGKPVDIAEVLEKLKTFFKAK

SEQ ID NO: 12631 - DNA, 828 bp, Unknown
  Obtained from environmental sample
  misc_feature (1)..(828): n is a, c, g, or t
atgaagagttccgaagaaacgctgttttccatgtcgacattacagacgctggataaggataaaggtgaggcgtatgtcatacacaggcgctttaatccgtacatcgcccatttattggacatagacaaatatccgaatatgtcggcggaagatcaagatgttccgtatcctgaagccaaatgcaaagcgaccgaggtttttgattttgaaggatgctgttttatgatgaccagtccggatgataaacctatatttacaagcgttgttccttcagatgaagaaattcaagagacggctgatgaggaaggaaatgaggagcctccgatagaacggtacgcggcgggagtcggctccggatggtacgggcttcttttgccaatccttgaggaaatcaatctgtataataaaaaaaatcaaggggacaaaatacggatagaccagataaaagaaaaatggggaaccttaaatttttatgcgtcggactgccccgaatatattcaaggcatgattacaatcgcggagaaagaaagcgggcatatctgtgagttctgcggggcgcaaggggagacggtattaattaaccactggtataaaactttatgcccgcatcatagaaaagcgtttaaagcggctggattcgatcataaactctcatccagcctttacaggaaatttatggatacgtatgagcgaagcaggtggaccggcacgtacaaccctgtaataaaaaaatgtttaaagaaaaaccggtttatgacaaaagaaaaagtggacgggatagaaacagtcattaagctggagagggaaaatcaaaaaacctatttctaa

SEQ ID NO: 12632 - protein, 275 aa, Unknown
  Obtained from environmental sample
  misc_feature (1)..(275): Xaa is any amino acid
MKSSEETLFSMSTLQTLDKDKGEAYVIHRRFNPYIAHLLDIDKYPNMSAEDQDVPYPEAKCKATEVFDFEGCCFMMTSPDDKPIFTSVVPSDEEIQETADEEGNEEPPIERYAAGVGSGWYGLLLPILEEINLYNKKNQGDKIRIDQIKEKWGTLNFYASDCPEYIQGMITIAEKESGHICEFCGAQGETVLINHWYKTLCPHHRKAFKAAGFDHKLSSSLYRKFMDTYERSRWTGTYNPVIKKCLKKNRFMTKEKVDGIETVIKLERENQKTYF

SEQ ID NO: 12633 - DNA, 573 bp, Unknown
  Obtained from environmental sample
  misc_feature (1)..(573): n is a, c, g, or t
atgacacgcgaagaagcaatcgaagagattgtctctggccgcggcggaattattgtttccacgacgggtatgatttcacgcgaattgtacgagttacgtgataaggcaggcgcaggccatgcgcgtgattttcttactgtaggttctatgggacacgcgtcttccatagcgctgtcaatcgctcttcaaaaaccggaattgcaggttacctgccttgacggagacggagcggcgcttatgcacatgggttcctttgccgcgataggtactcaaaaaccgcataactactgccatattgttcttaataacgcggctcatgattctgtcggtggccagcctactatcgccccctttattgatatgccggctgtcgcgcgggcgtgcggttatacaaaagtgtatcaggcaaaaacaaaagaagagttaaaaaacattttagcggaaaaacacgaagggcttatgtttatcgaagttaaagtaaagaaaggttctcgcaaagatttgggacgcccaaaatcaacgcctgtagaaaacaaggcggcatttatgaagtacatcagaggtacagaatga

SEQ ID NO: 12634 - protein, 190 aa, Unknown
  Obtained from environmental sample
  DOMAIN (21)...(158): Thiamine pyrophosphate enzyme, C-terminal TPP binding domain
  misc_feature (1)..(190): Xaa is any amino acid
MTREEAIEEIVSGRGGIIVSTTGMISRELYELRDKAGAGHARDFLTVGSMGHASSIALSIALQKPELQVTCLDGDGAALMHMGSFAAIGTQKPHNYCHIVLNNAAHDSVGGQPTIAPFIDMPAVARACGYTKVYQAKTKEELKNILAEKHEGLMFIEVKVKKGSRKDLGRPKSTPVENKAAFMKYIRGTE

SEQ ID NO: 12635 - DNA, 891 bp, Unknown
  Obtained from environmental sample
  misc_feature (1)..(891): n is a, c, g, or t
ttgaacacttcgcgcgttttcatcggaagacggaaccgcttcgtacacttttcttttttattttttcaaactgctcaatctggttgttattccggcgcatttatcccctatgtgttagtgnaagacgggacgcttaaaataatttggcggccgtttgaaaccttgccgccggttcccgatatgctcaatgccgtggcacaattatgtcctgtttcacgtgaaggcagtatgctcgccgtaaaagccaaaagcaaaaccgtcagcgggcggagtgttgttgatctgcttgcctccgcgtttttaaatgaatttgtcaggcgaaaatttttattgtttcgcggaatcggcggcagtttcggcagacaggggacgggggaagaataccgggaattgctgaatttgttttttcagggaataaaaattgatgtttcatctccggcgcggcgcagtctgccgacagccatagaccagtggctttcagtactgcacattgatttttccgcctctcgttacagccttacggtgaagatagcaaacgcaaaacaacattcaacggatgatttacaatttgcgcttttcatggacgcgctcaccgaatcggaagagggaaaattaaaaacgcccctgtataaatgtaaaaaattggaaaccctgcgggcacctaccgcgctgtccaattatctgccggagattcgagaactatttaatcatccaaaagtgctgctcggtgaagcgcggcttgtttcatttcttgactccgccgcttcgctgcttacccgcctcggcattacggtgaaccttcccaaagccctggcgcgggaattaaaacccacggctggtaatcannaaggaaannccctgccctcgtgccgaattctgatccttggttag

SEQ ID NO: 12636 - protein, 296 aa, Unknown
  Obtained from environmental sample
  misc_feature (1)..(296): Xaa is any amino acid
MNTSRVFIGRRNRFVHFSFLFFQTAQSGCYSGAFIPYVLVXDGTLKIIWRPFETLPPVPDMLNAVAQLCPVSREGSMLAVKAKSKTVSGRSVVDLLASAFLNEFVRRKFLLFRGIGGSFGRQGTGEEYRELLNLFFQGIKIDVSSPARRSLPTAIDQWLSVLHIDFSASRYSLTVKIANAKQHSTDDLQFALFMDALTESEEGKLKTPLYKCKKLETLRAPTALSNYLPEIRELFNHPKVLLGEARLVSFLDSAASLLTRLGITVNLPKALARELKPTAGNXXGXXLPSCRILILG

SEQ ID NO: 12637 - DNA, 618 bp, Unknown
  Obtained from environmental sample
  misc_feature (1)..(618): n is a, c, g, or t
atgactacggtaaataccttttggccctttatcggacccgaaggcgataaaacatatacaaccagaaaagacgcgcttgaggatttttcaaaatggacaagcgatgacgacgctgagtattcgggcgttgtcgatattgactgctcaaaacttgaaccgcttgcgactgtaggctacaagccggacgaagtaaaacctgtgcgggatctttcggggacaaaaatcgatcaggtatacataggctcctgcaccaacggcagaattgaggatttgcgcgccgccgcggctgtcctgtacgggaaaaaaatcgccgactcggtacgcgcaatcatttcgcccgccaccactgcaatttacgcggaagctctcaaagaggggctgatacaagtttttcttgacgcgggctgctgcgtaacaaacgccacctgcggcgcatgccttgggatgtccaacggcgtacttgccgagggagaggtttgcgcttccaccaccaaccgcaatttttacggacgcatgggcaagggcggcatggttcacctgatgagccccgcatcggcggcggcatcggcagtagcaggcgttatcacaagcgcgattgccacggagggacagtcatga

SEQ ID NO: 12638 - protein, 205 aa, Unknown
  Obtained from environmental sample
  DOMAIN (1)...(193): Aconitase family (aconitate hydratase)
  misc_feature (1)..(205): Xaa is any amino acid
MTTVNTFWPFIGPEGDKTYTTRKDALEDFSKWTSDDDAEYSGVVDIDCSKLEPLATVGYKPDEVKPVRDLSGTKIDQVYIGSCTNGRIEDLRAAAAVLYGKKIADSVRAIISPATTAIYAEALKEGLIQVFLDAGCCVTNATCGACLGMSNGVLAEGEVCASTTNRNFYGRMGKGGMVHLMSPASAAASAVAGVITSAIATEGQS

SEQ ID NO: 12639 - DNA, 345 bp, Unknown
  Obtained from environmental sample
  misc_feature (1)..(345): n is a, c, g, or t
gtggcggaggcgttgcgagagagcggcatccgcgaggggttgtgccttgtaaacgctatgcacatcaccgcaagcgtttacataaacgacgacgagcgggggctgctcaaagacttcgacgactggcttgaggggctggcgccccacgagccggttgaccgctaccgccacaacgggtctgaggacaacggcgacgcccacctgaagcgccaaatcatgggtcgcgaggtcgtggtcgcggtgactggggggaagctggatttcggtccttgggagcagatattctacggagagtttgacgggcgcagagctaaacgggtgctggttaagatcatcggggaatag

SEQ ID NO: 12640 - protein, 114 aa, Unknown
  Obtained from environmental sample
  DOMAIN (3)...(112): Uncharacterised protein family UPF0047
  misc_feature (1)..(114): Xaa is any amino acid
MAEALRESGIREGLCLVNAMHITASVYINDDERGLLKDFDDWLEGLAPHEPVDRYRHNGSEDNGDAHLKRQIMGREVVVAVTGGKLDFGPWEQIFYGEFDGRRAKRVLVKIIGE

SEQ ID NO: 12641 - DNA, 483 bp, Unknown
  Obtained from environmental sample
  misc_feature (1)..(483): n is a, c, g, or t
ttgcgggacggcaagccgcacgggcttgagaaggagtggtatcccaccggcaacctcaagagcgaggccgtgtatgccgacggcgcgcctgtaggagccgtcaaatcttactatgaggacggcacgttggcgtcggaggttaattacaaggacggcaagaaggacggggaggatatcctgtactacagcgacggcaagaaaaagcgcgtgaggacatacgtggcgggcgaccaggaggggccggaggtcgagtacttcgagaacggcttcattaagaaagagttgatgtactccaagaacgccctcaacggcccgttcaagatgtaccaccaagacgcgaaaggccaaggaaaggttgaggagagcggctcctacataaacggcaagtacgacggcgagagggcccaatacgacaaaaacgggaaaaagacgtcaaaagcgatatacaaggacggagtcatggactttggggagaagtattga

SEQ ID NO: 12642 - protein, 160 aa, Unknown
  Obtained from environmental sample
  misc_feature (1)..(160): Xaa is any amino acid
MRDGKPHGLEKEWYPTGNLKSEAVYADGAPVGAVKSYYEDGTLASEVNYKDGKKDGEDILYYSDGKKKRVRTYVAGDQEGPEVEYFENGFIKKELMYSKNALNGPFKMYHQDAKGQGKVEESGSYINGKYDGERAQYDKNGKKTSKAIYKDGVMDFGEKY

SEQ ID NO: 12643 - DNA, 735 bp, Unknown
  Obtained from environmental sample
  misc_feature (1)..(735): n is a, c, g, or t
ttgattgcaatgtcaagcgggttaattatatcggcgcccgccggaaagatgttgtttttaagtcctcaaataccgctgaggcgatttttgagttggaagaaacatgaaaacgaggctgttatgaaacttttttttcattattgttcatttggtttcagcaattgctatgtgctgggcagggaagacggcccggaatcaatacttgtcgatcccggcaatatggataaacagattcttgaatatattgaaggcaataacttttatccaaaggccatctttataacccatgatcacccgggccatgtgcatgggattaggactttaaagcgcatataccagtctgaagttttcgcgataaaccggattgtccgggatcacaagacaacgcccgtaaaagacggcgacacgatagatattggccccttcgccgtcaaggtaatttccattcccggtcattcggccgattcagccgtataccatattgacaggctgctgtttaccggcgatgttcttacggcgggaatgttaggcacaaccgccagcgcttacggggctgcgacccagttaaacacattgcgaagccgcctcttttcacttcccggcgactatacggttcttcccggccacggccctccctcgtcgcttgaggcggagcgccgctttaatgtaggcatctcccagttcggccgtacacagacacagacccggcgtcgggttttcaggattaatttgtag

SEQ ID NO: 12644 - protein, 244 aa, Unknown
  Obtained from environmental sample
  DOMAIN (52)...(209): Metallo-beta-lactamase superfamily
  misc_feature (1)..(244): Xaa is any amino acid
MIAMSSGLIISAPAGKMLFLSPQIPLRRFLSWKKHENEAVMKLFFHYCSFGFSNCYVLGREDGPESILVDPGNMDKQILEYIEGNNFYPKAIFITHDHPGHVHGIRTLKRIYQSEVFAINRIVRDHKTTPVKDGDTIDIGPFAVKVISIPGHSADSAVYHIDRLLFTGDVLTAGMLGTTASAYGAATQLNTLRSRLFSLPGDYTVLPGHGPPSSLEAERRFNVGISQFGRTQTQTRRRVFRINL

SEQ ID NO: 12645 - DNA, 711 bp, Unknown
  Obtained from environmental sample
  misc_feature (1)..(711): n is a, c, g, or t
ttgacgcctaccaatattgggcgacaggatattcctgggtatcacgcttcgcaccgttattacttctactgtcgctaccattatcactatttaatcgccctgccatgcggttatttcatggccaaaagcaagaaccagaatattctccttttgcttatcatcattcctttctggactaattttttgatccgtgtgttcgcgtggatgaacattttggggaaccacggtttccttaatgaatttctgatccgtatcgggctgattaatgactatatccattttctctacaatcaaaaagtggtgatactggtgctggtgtacatgtacctgccctacgcgatattgccgttgttctccagcatagacaaattcgatttttccctgctggaagcggcgcgggatttgggggcaggcaaactctcggctctgataaaagtgatgctgcccaatatacggggcggcattttcactgcggtgctgtttacgtttattcccatttttggagcttacgcggtgccgcttctggtgggcggcaaggattcctatatgctgggaaatatcatcgccgatcagttgtccaagtcgcgcaactggccccgcgccgcggctatttcgatggtgcttaccgtggtgacgacagtgggcgtattgctgatgatgaatgtccagaagcgggacgcttcaagactggcggaggcgaaaaaaacatga

SEQ ID NO: 12646 - protein, 236 aa, Unknown
  Obtained from environmental sample
  DOMAIN (30)...(232): Binding-protein-dependent transport system inner membrane component
  misc_feature (1)..(236): Xaa is any amino acid
MTPTNIGRQDIPGYHASHRYYFYCRYHYHYLIALPCGYFMAKSKNQNILLLLIIIPFWTNFLIRVFAWMNILGNHGFLNEFLIRIGLINDYIHFLYNQKVVILVLVYMYLPYAILPLFSSIDKFDFSLLEAARDLGAGKLSALIKVMLPNIRGGIFTAVLFTFIPIFGAYAVPLLVGGKDSYMLGNIIADQLSKSRNWPRAAAISMVLTVVTTVGVLLMMNVQKRDASRLAEAKKT

SEQ ID NO: 12647 - DNA, 663 bp, Unknown
  Obtained from environmental sample
  misc_feature (1)..(663): n is a, c, g, or t
atgtacagaattngcacgaggcagaacgacccggacggcgaagcaacgccaagaataaaaggggcgacggggaacagcgccataccaggcgggccgattaccctgtgcgttccctccggcaactttggcaatcttaccgccgggctgtacgcgatgaaaatgggcgctccaatacagcagttcatcgcagccaccaacatcaacaaaaccgttcccgattatcttgagtcgggcgaatacagggccagggcttcgcaggctaccatttccaacgcaatggacgtgggcgcgcccagcaactttgagcgcatggctgcgcatttttcatgggaagaaatgcgccgtcttatcctgggcgcttatgtcccggacgaagaaacccggcagaccatcgcgagcgtgcatgaagaggcgggctattttcttgatccgcacagcgcggttggctggaaggcggtggacaagctccgtgcggagaataaaatcgccgaaggcccggtgggagtgctttccaccgcccaccctgcgaagttttccgaaactgtggaacccctgaccgggcccgtgccggttcctccttcccttgccagcgcaatggaacggatcgtaaacgcgcaaaccattcccgcgcaagttcacgcactgatcgaggcgctaatatga

SEQ ID NO: 12648 - protein, 220 aa, Unknown
  Obtained from environmental sample
  misc_feature (1)..(220): Xaa is any amino acid
MYRIXTRQNDPDGEATPRIKGATGNSAIPGGPITLCVPSGNFGNLTAGLYAMKMGAPIQQFIAATNINKTVPDYLESGEYRARASQATISNAMDVGAPSNFERMAAHFSWEEMRRLILGAYVPDEETRQTIASVHEEAGYFLDPHSAVGWKAVDKLRAENKIAEGPVGVLSTAHPAKFSETVEPLTGPVPVPPSLASAMERIVNAQTIPAQVHALIEALI

SEQ ID NO: 12649 - DNA, 636 bp, Unknown
  Obtained from environmental sample
  misc_feature (1)..(636): n is a, c, g, or t
atgcccaagcctttacagtataaagcaggttcgcttatttatttccagggagatccggcggacaaagtgtttctcttacaggtcggaaaggtaaatctggtatatcaggacattgagaccggggaagatgtgcatgatttggtgtcgcaaggcgaattcttcggggtaaaatccgctatgggccgttaccccagggaagaaaacgccatggcaatgctggacgcgacggcaatggcctttacggttcccgagtttgaagccctggctatggccaataccagaattatcatgaagatgctcaaggttttttccaatcagctgcgaaagatacataaacaggtctcgagtttgatggctaaggaagagcaaaaccctgaagcgggccttttcagcgttggcgaatactactttaaagctaaaaactatggcaaggcaaggtatattttcagccgctatcttactttttacccttctggcaagcatgtggtacaggcggcaaactatttgcagcaggctgaaatgggcgtggtcaagaccggtgccgcagcttctccggcagcctcttcgggatcccgtagatccaggcttcccagttgcgccagctcccaggcgacgctgcagcagaccccgcgctga

SEQ ID NO: 12650 - protein, 211 aa, Unknown
  Obtained from environmental sample
  DOMAIN (4)...(94): Cyclic nucleotide-binding domain
  misc_feature (1)..(211): Xaa is any amino acid
MPKPLQYKAGSLIYFQGDPADKVFLLQVGKVNLVYQDIETGEDVHDLVSQGEFFGVKSAMGRYPREENAMAMLDATAMAFTVPEFEALAMANTRIIMKMLKVFSNQLRKIHKQVSSLMAKEEQNPEAGLFSVGEYYFKAKNYGKARYIFSRYLTFYPSGKHVVQAANYLQQAEMGVVKTGAAASPAASSGSRRSRLPSCASSQATLQQTPR

SEQ ID NO: 12651 - DNA, 636 bp, Unknown
  Obtained from environmental sample
  misc_feature (1)..(636): n is a, c, g, or t
gtggtaattgacgaatatgccgatttgatgacgactaccggaaaggaacttgagtctacggtggcaaggcttgccgcgatgagccgagcagtcgggattcatcttgtacttgcgactcagcgcccttcaatcgacgtaattacggggcttatcaaggcaaatattccaagccgtatcgcgttcatggtcgcaagtaaaacggacagcagaattataatcgacatgattggggctgaaaaacttttaggcaagggcgatatgctttattcgggcgtcgtcgatcctttcccaatacggatgcagggcgcgtttatttccgaagaagaggtggaagctgttgtaggatatgtaaaatcattcggagagccggattacatagacgatgaaattttctatgaagaagaagaggaagaacaaagcgcttccctgttttctgacggcgatgatccgttatatgaaaaagcgctggaaatagtttatcagcagggcaaggcaagcgcaagttacattcaacgcagactgaagataggctttaaccgcgccgcaaggattgttgatgagatggaacataacggggtagtcggtccagcgcatggaagcaagcccagggaattgataagggcaatgggagcttaa

SEQ ID NO: 12652 - protein, 211 aa, Unknown
  Obtained from environmental sample
  misc_feature (1)..(211): Xaa is any amino acid
MVIDEYADLMTTTGKELESTVARLAAMSRAVGIHLVLATQRPSIDVITGLIKANIPSRIAFMVASKTDSRIIIDMIGAEKLLGKGDMLYSGVVDPFPIRMQGAFISEEEVEAVVGYVKSFGEPDYIDDEIFYEEEEEEQSASLFSDGDDPLYEKALEIVYQQGKASASYIQRRLKIGFNRAARIVDEMEHNGVVGPAHGSKPRELIRAMGA

SEQ ID NO: 12653 - DNA, 504 bp, Unknown
  Obtained from environmental sample
  misc_feature (1)..(504): n is a, c, g, or t
gtgcgcgcaacggagataatggcactttacgctcgccatggtgtttctccgttcagcgggctttcgggttgtttgccaatgcttttgcaaatgccaattttcataggcttgtttgtggttttgggcagagccatagaattgagagaggctccgttttttgggtggattagcgatttatcaaaaagcgatgttatatggagcggaataagcattccatatattatgcccgaaggcattgcaattttgcctttcttaatggttgttagcacttggttccaaacaaagcaaaccatcacagatccaaatcaaaaaatgatggtgtggatgatgcccgcgatgatgtttgtgttcagcgcggttatgccaagcggtttggtactttactggactatttcaaatttgtggggaatttcgcaatattttgtgattaaccgcaagccagcggttttaggcaaggcaaaaggcaaagttgtagatgcgaagataattaagggaaagaaatga

SEQ ID NO: 12654 - protein, 167 aa, Unknown
  Obtained from environmental sample
  DOMAIN (1)...(148): 60Kd inner membrane protein
  misc_feature (1)..(167): Xaa is any amino acid
MRATEIMALYARHGVSPFSGLSGCLPMLLQMPIFIGLFVVLGRAIELREAPFFGWISDLSKSDVIWSGISIPYIMPEGIAILPFLMVVSTWFQTKQTITDPNQKMMVWMMPAMMFVFSAVMPSGLVLYWTISNLWGISQYFVINRKPAVLGKAKGKVVDAKIIKGKK

SEQ ID NO: 12655 - DNA, 339 bp, Unknown
  Obtained from environmental sample
  misc_feature (1)..(339): n is a, c, g, or t
atgaaagaaaaaattgcttcgcttgccgaacagacaacctactggactgccgaagaagccttctctttaataagcgttccccctgatacttcttgcggagattggagcctgccttgttttacattggcaaaaaaacttcgcaaggcacccaaagcaatagccgaagaacttgccgcanaatttcccgcaccagaaggttttgcaaaaacagaagcacttaatggctattggaatttttacattgacaaagcatcttttgtgaaaaatattctgaacgaaataaaagaaaaaggtttggaatttggatttgcaaaacaaaaaataaaaccgttgcaatag

SEQ ID NO: 12656 - protein, 112 aa, Unknown
  Obtained from environmental sample
  DOMAIN (1)...(81): Arginyl tRNA synthetase N terminal domain
  misc_feature (1)..(112): Xaa is any amino acid
MKEKIASLAEQTTYWTAEEAFSLISVPPDTSCGDWSLPCFTLAKKLRKAPKAIAEELAAXFPAPEGFAKTEALNGYWNFYIDKASFVKNILNEIKEKGLEFGFAKQKIKPLQ

SEQ ID NO: 12657 - DNA, 552 bp, Unknown
  Obtained from environmental sample
  misc_feature (1)..(552): n is a, c, g, or t
ttgagagatgttatagaggcagcttccgaaaaaatactagcggtgataaatgaaaaaaatcccgctcttgaaaataaagaggatatagccacaaaaataggagttggagcaatagtctttaacgatttgaaaaacagacggttgatggatgtgaaatttgattgggacggagctttaagttttgacggagccacaggtccctatgttcaaaacgcacacgttaggctttgcagtattttgagaaaaagcaataaaaatgcttcggaattagaattcaaaagcgaagaacttttagaccaaaactcttacgatttaataaaagcactttcttgcaaagaagaaaaaataaacatcgcttgtgaaagcagggagccttgcactctagctcaatactctctggagcttgcagaagcagctcacagatttattcacaataatagggttatagggagcagcgaggaaaattccaggctgtttttagtctattgcacccagcaagttctagaaagtctccttgaactgctgggtatagctcccataaaagaaatgtaa

SEQ ID NO: 12658 - protein, 183 aa, Unknown
  Obtained from environmental sample
  DOMAIN (69)...(183): DALR anticodon binding domain
  misc_feature (1)..(183): Xaa is any amino acid
MRDVIEAASEKILAVINEKNPALENKEDIATKIGVGAIVFNDLKNRRLMDVKFDWDGALSFDGATGPYVQNAHVRLCSILRKSNKNASELEFKSEELLDQNSYDLIKALSCKEEKINIACESREPCTLAQYSLELAEAAHRFIHNNRVIGSSEENSRLFLVYCTQQVLESLLELLGIAPIKEM

SEQ ID NO: 12659 - DNA, 339 bp, Unknown
  Obtained from environmental sample
  misc_feature (1)..(339): n is a, c, g, or t
gtggccgttaatggcggtttggtatatgttgccgtatactcaaatgaaaatgattataaagcggaaactacttccgtgaaatttattcttgagccggtaagcagtaaacttacccacagcctcgaattacccgaaggcgaatatgtggtttccgtatttcaggataccgataatgacggagagttgaaaaccggagcttttggaatgccctccgaacctgtcggtaaaacaaactataacctcaagggggcaccgggaggttttaacaaattgaaggcgcctgtaaacaacagttcgacaaaactgattgtaaacatggggaaagttaggctcctgtaa

SEQ ID NO: 12660 - protein, 112 aa, Unknown
  Obtained from environmental sample
  misc_feature (1)..(112): Xaa is any amino acid
MAVNGGLVYVAVYSNENDYKAETTSVKFILEPVSSKLTHSLELPEGEYVVSVFQDTDNDGELKTGAFGMPSEPVGKTNYNLKGAPGGFNKLKAPVNNSSTKLIVNMGKVRLL

SEQ ID NO: 12661 - DNA, 624 bp, Unknown
  Obtained from environmental sample
  misc_feature (1)..(624): n is a, c, g, or t
gtgttggataaaatcggccccttgcttgaagacgggaagcccgtccgtttagcaaatttaaacgaggacgaaaaggcccttatttacgactgccactttatcaccgccaaacccattctgtatgtctgtaatgtggacgaggaagggatgaaaacagttatggctaacggaaaagttctttatgtggaagccgtgcggaaagtcgccgccgctgagggttctccggtagtggttataagcggcaaattcgaggcggaactcatcgccatcgaagacccggtggaaagactcgcctttctggaagagcttggccttaaagagccgggccttgcgccgctgatacgcgctgcttacgggcttttggggctcaggacttttttcaccgccggagaagacgaatgccgcgcatggactatccgcgccggggatcccgcgcccaaagccgccagggcgattcacactgattttgaaaaaggctttatcaaagccgaagtgtatacctgcgatgacattttcaaatacggcaccgaggcgaagatcaaggaggcgggcaagtaccgcattgagggcaaggaatatatcgtgcaggacggcgatgtgatgttcttcaagtttaatgtgtga

SEQ ID NO: 12662 - protein, 207 aa, Unknown
  Obtained from environmental sample
  DOMAIN (123)...(206): Protein of unknown function (DUF933)
  misc_feature (1)..(207): Xaa is any amino acid
MLDKIGPLLEDGKPVRLANLNEDEKALIYDCHFITAKPILYVCNVDEEGMKTVMANGKVLYVEAVRKVAAAEGSPVVVISGKFEAELIAIEDPVERLAFLEELGLKEPGLAPLIRAAYGLLGLRTFFTAGEDECRAWTIRAGDPAPKAARAIHTDFEKGFIKAEVYTCDDIFKYGTEAKIKEAGKYRIEGKEYIVQDGDVMFFKFNV

SEQ ID NO: 12663 - DNA, 594 bp, Unknown
  Obtained from environmental sample
  misc_feature (1)..(594): n is a, c, g, or t
ttgagatcaagagcaagcccggtgacgcttttcgttgcgaccgattatccccggaccggactgatgaaaatcattgtagaagaaaccccggcggctcttgggtttaacatcaggatacctggttttgccgaagattttgcggtcagtctcaataacaaggcggcagccggcgccaggcggaacggttattttcgcctaacaggtatccatggcggcgatgaaataaccgtctcttttactctgaaaccccgtattgtgtactcaaaccccaatgtccgccagaactgcggaaaagcggccattgtccggggtcctgagatttactgttttgaagaaaccgacaatgccgcgaatcttgccgccctttcgctggatacccatgccccccttgaggaatgttggcgggacgacttattgggcggccttatgctgatcaaagccaggggaagaaggcttattgcgcctaatgcccctgaatctttttccgaaaaatttctccccaactttgaggcggtaacgctgaccgctttgccgtatggttactggggcaaccgttcccccggcgaaatgcttgtatggatccgaaccaaataa

SEQ ID NO: 12664 - protein, 197 aa, Unknown
  Obtained from environmental sample
  misc_feature (1)..(197): Xaa is any amino acid
MRSRASPVTLFVATDYPRTGLMKIIVEETPAALGFNIRIPGFAEDFAVSLNNKAAAGARRNGYFRLTGIHGGDEITVSFTLKPRIVYSNPNVRQNCGKAAIVRGPEIYCFEETDNAANLAALSLDTHAPLEECWRDDLLGGLMLIKARGRRLIAPNAPESFSEKFLPNFEAVTLTALPYGYWGNRSPGEMLVWIRTK

SEQ ID NO: 12665 - DNA, 426 bp, Unknown
  Obtained from environmental sample
  misc_feature (1)..(426): n is a, c, g, or t
atggagttaaatttgaaggaaagacaaaaattaaccgcaataacggcaaaaaaataccgtgcggcgggaaaaaaggaaaagaccaaaatactggatactttcataggacaaaccggatatgagcgtaaatacgcgatccatatccttgccaatgaaggcaaaatcaagccggcaggaaaacaaatccaaataaaaataacacataaaaaaacaaaacggcgcacatatcctgttttttatgacaaagcggttcagagcgcactggcgctcatttgggaggcttttaactgccagtgcgggaaattgctcgagcctttcctgcacgcgaacatcgaccttattgtacaagaaccgaagttcaacccgggcgatgaggtaacagccaagctgcggaagattagcgcctcaacaatcgaccgcctgtga

SEQ ID NO: 12666 - protein, 141 aa, Unknown
  Obtained from environmental sample
  misc_feature (1)..(141): Xaa is any amino acid
MELNLKERQKLTAITAKKYRAAGKKEKTKILDTFIGQTGYERKYAIHILANEGKIKPAGKQIQIKITHKKTKRRTYPVFYDKAVQSALALIWEAFNCQCGKLLEPFLHANIDLIVQEPKFNPGDEVTAKLRKISASTIDRL

SEQ ID NO: 12667 - DNA, 477 bp, Unknown
  Obtained from environmental sample
  misc_feature (1)..(477): n is a, c, g, or t
ttggagagcctttcgagcctgaaagcgggcgaaataggagaaatgcaagtgaaatgcctcatcaacggacagtatgagccggtacgtatttgcgccctgcgcaaggatgagggaagcgaaaaagccgggctgcaacggctgaagaaagagaaccagcgcaagcggggcgggaaggaggttaccgaccttcagcgggaaaacaataaatatatcatcgtggcgacttcgctggggaataaggtgtccgcttcccagatattggatttataccgtatgcgctggcagatagagatggcgttcaagcggctgaaatcgttgtttcaatataacgacctgccgatgacggagggggagagtatcaaggcatggttttatgggaagctgctgcttgccgccctgtgtgaaacgttagtgaacacagggcgtttttccccctcgggagggaacaggcggcgcgggcgagcttccgccgcctga

SEQ ID NO: 12668 - protein, 158 aa, Unknown
  Obtained from environmental sample
  misc_feature (1)..(158): Xaa is any amino acid
MESLSSLKAGEIGEMQVKCLINGQYEPVRICALRKDEGSEKAGLQRLKKENQRKRGGKEVTDLQRENNKYIIVATSLGNKVSASQILDLYRMRWQIEMAFKRLKSLFQYNDLPMTEGESIKAWFYGKLLLAALCETLVNTGRFSPSGGNRRRGRASAA

SEQ ID NO: 12669 - DNA, 876 bp, Unknown
  Obtained from environmental sample
  misc_feature (1)..(876): n is a, c, g, or t
ttgcgctgggactggatgggggataccctgaaatgcgttttgacaggcgagagcggaaagcttgtaaaaggcgcatttttttgtggcgacggttgggattcaggatacccggtagttctggcatacccaaacgaaaagagcgagagctggatacaggcgcatgtggaaacattcaagaggcttggcgggctgcctttagttgtagtaccggacaactgcaagactgcagtcagcaaggcaaacttttacgacccccagctaaacaaggcatactacgacctgtcattgtattacaacatcgcggtaataccggcgagggtaagggcgcctcgggacaaggggcaggtagaaagcagcgtgggctggcttgagacctggcttttggaatggcttaagggcagcgggcctttagtccggcagttctcaagtttcgccgaacttaacgccgccataaagagccgccttgccgaacttgtgaagcggccgtttcagaagagggccggcagccgggaaagcgtgtttctggaacttgaccggcctgcccttcgccctctgcctgcccagccttatgaaagcccaagttacgttgaacgcagggtaccgaacaactaccatgttgagtacgcggggttctattactctgtcccccaccaatactataagcagcaggtaactgtaaaagtcacatattcagtcattgaagtgtatgcacaaagacttaacaggatagccatacacgagcggcgctacaccggaagccgttatgttacagagcggagccacatgccgcctgcccaccagtcgcaacaggacgccagccggtttgacggcaagcgattccggaactgggcgtctgcaatcggtgttaatctttag

SEQ ID NO: 12670 - protein, 291 aa, Unknown
  Obtained from environmental sample
  DOMAIN (13)...(175): Integrase core domain
  misc_feature (1)..(291): Xaa is any amino acid
MRWDWMGDTLKCVLTGESGKLVKGAFFCGDGWDSGYPVVLAYPNEKSESWIQAHVETFKRLGGLPLVVVPDNCKTAVSKANFYDPQLNKAYYDLSLYYNIAVIPARVRAPRDKGQVESSVGWLETWLLEWLKGSGPLVRQFSSFAELNAAIKSRLAELVKRPFQKRAGSRESVFLELDRPALRPLPAQPYESPSYVERRVPNNYHVEYAGFYYSVPHQYYKQQVTVKVTYSVIEVYAQRLNRIAIHERRYTGSRYVTERSHMPPAHQSQQDASRFDGKRFRNWASAIGVNL

SEQ ID NO: 12671 - DNA, 810 bp, Unknown
  Obtained from environmental sample
  misc_feature (1)..(810): n is a, c, g, or t
atgggttatctttttgggggacatgcgccgggataccgtgatttgcaaaaagccctgaatgcggtgcatcatatcaatatggcccacggcgttgccgttaagtcttaccgcaaaaccggccttgccgcgcctataggaattacctggaaccccgttaccccgcgcccggccaccaacagtcccgccgataaaaaagctgccaaaattgccagagcgctgcaaaccgaagtttttgtttttccctgtctgggcaaaggctacccggaactggcggccaaagatttcaaagcttctttccccatcaaaagcggcgatttggaaaccattgcccaaccgattgattttattggtatcaattattattttgaaaatccggtatccgccgataaaaaagccccgtttaaatgcggttcccggcccttctggcaggacaccaccaatataggctggccgattgttcccggcggtcttgaacgccaactcaaatggtttgccgaaatttcaaaaggcgttttcggcaaacccggcctccctcttttcgttaccgaaaacggctgcgcttgcaaagacgatgtcggtccggacggcagaatccacgacaaggaaagaattgagtatttaaaacagcacctcgctgtctgcgctgatttaatcaaagccggagttgatattaaaggctactatgtgtggtctttgctggacaattttgaatggggtcacggatacaccatgcgtttcggcattgtccatgttgattaccgcaccctaaacgaaccccccaggacagcgcctacttcttccgcgacgtga

SEQ ID NO: 12672 - protein, 269 aa, Unknown
  Obtained from environmental sample
  DOMAIN (1)...(259): Glycosyl hydrolase family 1
  misc_feature (1)..(269): Xaa is any amino acid
MGYLFGGHAPGYRDLQKALNAVHHINMAHGVAVKSYRKTGLAAPIGITWNPVTPRPATNSPADKKAAKIARALQTEVFVFPCLGKGYPELAAKDFKASFPIKSGDLETIAQPIDFIGINYYFENPVSADKKAPFKCGSRPFWQDTTNIGWPIVPGGLERQLKWFAEISKGVFGKPGLPLFVTENGCACKDDVGPDGRIHDKERIEYLKQHLAVCADLIKAGVDIKGYYVWSLLDNFEWGHGYTMRFGIVHVDYRTLNEPPRTAPTSSAT

SEQ ID NO: 12673 - DNA, 696 bp, Unknown
  Obtained from environmental sample
  misc_feature (1)..(696): n is a, c, g, or t
gtggacaatacgcttgaaaattgtaacgtccggcgcttcaaccttgccggcggcgaacccttattgtacagggatatttcaaaattatcagattatatccgttctaaaggctgcgaagtttcgattattacaaacgggtttaatttatcggaaaagaaaatagaccggcttgcgcaatgtggtatctccatgattgggctgagtatagattccgcgaatccccaaacgctcaaggaattaggacgtaatacggcttccgggaacatacttgaacccgaacgttgtgtcaatctttgccggtatatcaggagaaaaggtataagccttaaaattaataccgttgtttcacttttaaattacacagagaacctcaactcattcatcaaggaagcttctcccgacaggtggaaaatcttaaaaattaaaaaactggagaattgtcattttgacaatacggaatttttaattagcgacgtgcagttcgatagttttgtcaatcgtcacaaaaaagttccccacatcgtcgagcgaagtatggcgaatacctacattatggttgacgctttcgggcatcttattgataccggcagtggcaagaacacccctgtcgctaatcttttatacaccagctttgatgaagctttcgcaaaaatgaatttcgattatgaaaattataagctaagatatgccgcttga

SEQ ID NO: 12674 - protein, 231 aa, Unknown
  Obtained from environmental sample
  misc_feature (1)..(231): Xaa is any amino acid
MDNTLENCNVRRFNLAGGEPLLYRDISKLSDYIRSKGCEVSIITNGFNLSEKKIDRLAQCGISMIGLSIDSANPQTLKELGRNTASGNILEPERCVNLCRYIRRKGISLKINTVVSLLNYTENLNSFIKEASPDRWKILKIKKLENCHFDNTEFLISDVQFDSFVNRHKKVPHIVERSMANTYIMVDAFGHLIDTGSGKNTPVANLLYTSFDEAFAKMNFDYENYKLRYAA

SEQ ID NO: 12675 - DNA, 771 bp, Unknown
  Obtained from environmental sample
  misc_feature (1)..(771): n is a, c, g, or t
atgactacccccggtcttgacgtataccagcttaagcgctcgaaaatggtaaaacattattcacatatccttcacgctcctgtagacgcgacattataccgcctatttagttttgattattttgattctgttcttttaacaggcgattatcaggctgaagacataaggactctggagaaacagcgggaaatccgtgaaaaaaaacttgttactgtaggatgcagttatcttgacgtatacgccgaaaaatttaaaaaccttccggtagaagaaaatcatccttttaccgtcctcgtttctccttcatggggttcatccgcgattttgacacgttacggggaaaaactactcgatccgttagccgcgtcaggctggcgtattattattcgtccgcatccgcagtcaaaaaaatctgaatcgcagatgctggaacgcctttatgcgcgttacaaagaaacaaaaaacattgaatgggattatgaacgggaaaatattttttcccttaataaagcagatataatgatctctgatttttcaggaattatatttgattatatgttcctgcgcgacaggccggtcctttatgtcggtcagaatatcgacttgcgtccctatgacgcggacgatataaatcatgagctgtggcagtttaaaacggtaaaagaggccggcatagaactgcgtgaagatgattttccgcgaattacggaaataataaaaggcgcggcgacagcgataactaaaaactcgtgccgatctgatcattggtaa

SEQ ID NO: 12676 - protein, 256 aa, Unknown
  Obtained from environmental sample
  misc_feature (1)..(256): Xaa is any amino acid
MTTPGLDVYQLKRSKMVKHYSHILHAPVDATLYRLFSFDYFDSVLLTGDYQAEDIRTLEKQREIREKKLVTVGCSYLDVYAEKFKNLPVEENHPFTVLVSPSWGSSAILTRYGEKLLDPLAASGWRIIIRPHPQSKKSESQMLERLYARYKETKNIEWDYERENIFSLNKADIMISDFSGIIFDYMFLRDRPVLYVGQNIDLRPYDADDINHELWQFKTVKEAGIELREDDFPRITEIIKGAATAITKNSCRSDHW

SEQ ID NO: 12677 - DNA, 639 bp, Unknown
  Obtained from environmental sample
  misc_feature (1)..(639): n is a, c, g, or t
ttgggcgatagcattgctcacggcaatagcacagcaaataccgagatcttgagctggtcagccgcttccaaaggccgggaaggctggtacaaacgcctggaatccggccgaagcgccgcgcttttaaacgccagaaacctgatcctggaacaggctggaattgcccgacacgatcgcgtgctagtcgcggcggccaacgatggcttgctcctctgggaaagcttgaggcgctgcccggaagggcttgccgcggctcttgtggacagcgcttcggccagggaaactttgctaaaattcgccgctatacttgacgaaaccgataaacccttaatctctttttttccggaagggaaaattccctcttctaaagaagcggaagaagccttttcatgccctgtttttgaccacattgttgcaagggagccttttaagcgaaaatgtgaagagggtacaatccatgcttttgccactgccgcaaaactactgctttccccaaatgggaacattgttattttgcagtctctgccaaaaatgggtgagcgtatttcgcggataatccgggaagagtgtggtgctgctcccagccttgcgaataacctggctgctgctgaagaattttttttggaaattcagaagtaa

SEQ ID NO: 12678 - protein, 212 aa, Unknown
  Obtained from environmental sample
  misc_feature (1)..(212): Xaa is any amino acid
MGDSIAHGNSTANTEILSWSAASKGREGWYKRLESGRSAALLNARNLILEQAGIARHDRVLVAAANDGLLLWESLRRCPEGLAAALVDSASARETLLKFAAILDETDKPLISFFPEGKIPSSKEAEEAFSCPVFDHIVAREPFKRKCEEGTIHAFATAAKLLLSPNGNIVILQSLPKMGERISRIIREECGAAPSLANNLAAAEEFFLEIQK

SEQ ID NO: 12679 - DNA, 516 bp, Unknown
  Obtained from environmental sample
  misc_feature (1)..(516): n is a, c, g, or t
ttggctgagaaagatttacgtgtaaacgagcagattcgttccagggaagtccgtctaatccgggatgacggggataagggaataatgtctgtttcgcaagcattggaaattgccagagatgcgggtcttgaccttgtggaagtggcgcctcaggcggtaccccccgtcgtcaagattttagattacggtaagttcaggtttgagaacgaaaagaggttgagggattccaagaaaaagcagaaacttttaaaacttaaggaaatccggatgcagcctaagatcgacgatcatgatcttgactttaaatctaagcatattaaagaattcttatccgaaggcaacaaggtaaaagttacgattcgtttccgaggtcgtgaacttgcccacacagaacttggttttgacgtgatgaaggacgttctttcacgtattgagggagagtatgttatggacaaaccgcccgctatggatgggcgtaatatgtccatggtattgagtcctaaaggcaaaaaataa

SEQ ID NO: 12680 - protein, 171 aa, Unknown
  Obtained from environmental sample
  DOMAIN (3)...(77): Translation initiation factor IF-3, N-terminal domain
  misc_feature (1)..(171): Xaa is any amino acid
MAEKDLRVNEQIRSREVRLIRDDGDKGIMSVSQALEIARDAGLDLVEVAPQAVPPVVKILDYGKFRFENEKRLRDSKKKQKLLKLKEIRMQPKIDDHDLDFKSKHIKEFLSEGNKVKVTIRFRGRELAHTELGFDVMKDVLSRIEGEYVMDKPPAMDGRNMSMVLSPKGKK

SEQ ID NO: 12681 - DNA, 438 bp, Unknown
  Obtained from environmental sample
  misc_feature (1)..(438): n is a, c, g, or t
gtgtgcgtagcgcttgcccgtaaaatggcgcgtgacggggaaggcgcgacaaaattggttacggtaacggtaacaaacgccgccagcgaaaacgccgcagaaacgcttgcaaaatctgtcgcttcttccagtcttgtaaaagccgcctgttttggcgcggacgcgaattgggggcgcgttttatgcgcccttggatacgccggggttgatttttcccctgaaaaaaccgatgtaaattttaggagcgcggctggagaaatcgaagtttgcaagaacgggcagaccgttaaattcaacgaagaaaaagctaaggaaattctgtccgaagaagagattgaaatactggtcaatttgcatgacggaagtgaaaaagtatccgtatggggatgcgatcttacttacgattatgtaaaaattaacggagactacaggacatga

SEQ ID NO: 12682 - protein, 145 aa, Unknown
  Obtained from environmental sample
  DOMAIN (1)...(145): ArgJ family
  misc_feature (1)..(145): Xaa is any amino acid
MCVALARKMARDGEGATKLVTVTVTNAASENAAETLAKSVASSSLVKAACFGADANWGRVLCALGYAGVDFSPEKTDVNFRSAAGEIEVCKNGQTVKFNEEKAKEILSEEEIEILVNLHDGSEKVSVWGCDLTYDYVKINGDYRT

SEQ ID NO: 12683 - DNA, 552 bp, Unknown
  Obtained from environmental sample
  misc_feature (1)..(552): n is a, c, g, or t
atggcggattacgtcaagaagatggtggaagaggggcgcaaccaggtgcgtatttggtgcgcggccagttcaagcggcgaggagccgtacacgcttgctatgactttcctggaaaacgcgaagggctttcgcggggagtgcaagatattggccaccgatatatcgacgaagatattgaagatggctatggcggggcagtattccgaggcgaaaatgcagggtgtcaacccgcagttgcggagcaggtattttaccgtgagcgggtcggggtccaacaagctgtacacggtgaacaacacactgtcgagcatgctcacgttcaaaaggctgaacctgtcgaagccgcccttccccatgaaggggccgttcgacctcatcttctgccgcaatgtgatgatatactttgacaatatcgtcaggaagaagcttatggacgagttttcccggttgctacgtccgggcggttacctgatggtgggtcattcggagagcatggcgggtatgctgtgcaacatggagaccgtgcagccgtctgtgtatttgaaggcgtag

SEQ ID NO: 12684 - protein, 183 aa, Unknown
  Obtained from environmental sample
  DOMAIN (2)...(183): CheR methyltransferase, SAM binding domain
  misc_feature (1)..(183): Xaa is any amino acid
MADYVKKMVEEGRNQVRIWCAASSSGEEPYTLAMTFLENAKGFRGECKILATDISTKILKMAMAGQYSEAKMQGVNPQLRSRYFTVSGSGSNKLYTVNNTLSSMLTFKRLNLSKPPFPMKGPFDLIFCRNVMIYFDNIVRKKLMDEFSRLLRPGGYLMVGHSESMAGMLCNMETVQPSVYLKA

SEQ ID NO: 12685 - DNA, 336 bp, Unknown
  Obtained from environmental sample
  misc_feature (1)..(336): n is a, c, g, or t
atggaaaaacttaacatactgtggacaaccgaaggcaaggatacggtgttcaacatgctctcatcgtacgcaacatgctcaaagaaaaacggctggtggagcgaagtcaacatcatgctttggggcgcatcggtcaagctggtgggtactgacgcgcaggtacaggcagaggtgatggaaatgctacagcagggcgtacacgttgaggcttgcgaaacctgctgcgctacctttgccgtagctgacgttatgaaaaaaataggtgttgaggtaaagcccctcggtccctgcatgacggagtacctcaagagcggacaaaaggtgctgacggtgtag

SEQ ID NO: 12686 - protein, 111 aa, Unknown
  Obtained from environmental sample
  DOMAIN (1)...(111): Protein of unknown function (DUF1291)
  misc_feature (1)..(111): Xaa is any amino acid
MEKLNILWTTEGKDTVFNMLSSYATCSKKNGWWSEVNIMLWGASVKLVGTDAQVQAEVMEMLQQGVHVEACETCCATFAVADVMKKIGVEVKPLGPCMTEYLKSGQKVLTV

SEQ ID NO: 12687 - DNA, 699 bp, Unknown
  Obtained from environmental sample
  misc_feature (1)..(699): n is a, c, g, or t
atgcgcgtattgttaatttgtgatgatatttggcatncggggcagatacccattgacggcgttgcgcctcttgccggtcaggattttcaattcgacataatcaaagatgcgaaggatttcacgccaggtatgctttcaaactaccctgtggtcnttctggtcaagtgcgatgaagccagccaacaggacaacacaagttggaaaaccgaagccgtacagcaggcttttattgcgtatatagagaacggcggcgggctgctggttgtccatagcggttctgtgccgggtaagcaaacaaacgcccttgacctgttgattggctgtcgctttatcttccaccctaacgcctgtctggtgactgtccagcctattaagccccatcccgttaccgagggtgtagggatgttttgcgagaccgacgagcactaccggcttgaaattctggcgcaggacgcggacgtcttaatagcgtcatattccccgccccagggggatgcggataaatatcaggaagacccctatcacaatacgccggcctgggtttgccctgccgggtatgtgcgaacccagggcaaggggcggatctgtgtcctgacgccgggacatcttcttcctgtatggcacaatccccaataccaacgtaccatcgccaacgctttgagatggtgccatagagtcgaagcgaacaaaggtaattga

SEQ ID NO: 12688 - protein, 232 aa, Unknown
  Obtained from environmental sample
  misc_feature (1)..(232): Xaa is any amino acid
MRVLLICDDIWHXGQIPIDGVAPLAGQDFQFDIIKDAKDFTPGMLSNYPVVXLVKCDEASQQDNTSWKTEAVQQAFIAYIENGGGLLVVHSGSVPGKQTNALDLLIGCRFIFHPNACLVTVQPIKPHPVTEGVGMFCETDEHYRLEILAQDADVLIASYSPPQGDADKYQEDPYHNTPAWVCPAGYVRTQGKGRICVLTPGHLLPVWHNPQYQRTIANALRWCHRVEANKGN

SEQ ID NO: 12689 - DNA, 537 bp, Unknown
  Obtained from environmental sample
  misc_feature (1)..(537): n is a, c, g, or t
atgaaagcaaagcactttttggtatttgttttagcattaattgctacattcacattgggttgcgcagcgggcagcaacggaggaattggaccgcaaaaccaaagcaccatttctgtttctggaacaggcacggtatcagcacagccggatatgattcagatgagcattactttgagcaaagttgctccaacaactaaaacggctcaagaagaagtaagcaaaatggttaggcaggcgttgaagatattaaaagaagcaaacattgaaaataaaaatataaacaccgcatcgcttaggtttagctcagaatatgactatagcaaacatccgcgtattttaattgggcaaaaagccgaacaaagcataaccttttctattgagggtatcaacaatgatagtgaaaaggcatctggaataatagaccaacttatccaaataaatggaatagaattaaatcaagtaaattttagcgtaaaaaatccaactgaatattttgttaaatcccgtgagcttgcgaaaaaaagcgtctcgcgataa

SEQ ID NO: 12690 - protein, 178 aa, Unknown
  Obtained from environmental sample
  SIGNAL (1)...(23)
  misc_feature (1)..(178): Xaa is any amino acid
MKAKHFLVFVLALIATFTLGCAAGSNGGIGPQNQSTISVSGTGTVSAQPDMIQMSITLSKVAPTTKTAQEEVSKMVRQALKILKEANIENKNINTASLRFSSEYDYSKHPRILIGQKAEQSITFSIEGINNDSEKASGIIDQLIQINGIELNQVNFSVKNPTEYFVKSRELAKKSVSR

SEQ ID NO: 12691 - DNA, 705 bp, Unknown
  Obtained from environmental sample
  misc_feature (1)..(705): n is a, c, g, or t
atgccatctctctatattcacgttcccttttgtgcttctatatgcggctactgcgatttttgcgcaatgcctgcaccggagaggctgcacagcgaatatgtggatttggttttaagggaattggaattgagagcaaactatggatttgaaacggtatatttaggtggtggctcgccttctgttttgagtgcggcaaatttgcgaaaattgcttgctgggttgcaaaaaggcaagctcaaagaattttcaatggaatggaatcccgaacaggttagcgaagaaaaaatagatatagccttggagtttggaataaaccgctttagccttggaatccaaagcttgaatgataatttattgaaaatgcttgggagaaagcatacggcaaaaaatgctttggaggcttttgaaaagttgaattccgcttttgacacaggaaactgcgatttgatgttttgcctgccaaaccaaagcacagaaacctttttgagtgatgttaaaactttggcaagccttggggcaaaacacataagtttttatgggctaactttggaaaaagggaaaaaattccctccccagccagaagacctataccccgaaatgtatttaaaagcggtacaaattttaagcgaagccaaattggatagatacgaagtctcanactttgctttgcctggccacgaaagcaagcataatatggtttattga

SEQ ID NO: 12692 - protein, 234 aa, Unknown
  Obtained from environmental sample
  DOMAIN (5)...(168): Radical SAM superfamily
  misc_feature (1)..(234): Xaa is any amino acid
MPSLYIHVPFCASICGYCDFCAMPAPERLHSEYVDLVLRELELRANYGFETVYLGGGSPSVLSAANLRKLLAGLQKGKLKEFSMEWNPEQVSEEKIDIALEFGINRFSLGIQSLNDNLLKMLGRKHTAKNALEAFEKLNSAFDTGNCDLMFCLPNQSTETFLSDVKTLASLGAKHISFYGLTLEKGKKFPPQPEDLYPEMYLKAVQILSEAKLDRYEVSXFALPGHESKHNMVY

SEQ ID NO: 12693 - DNA, 603 bp, Unknown
  Obtained from environmental sample
  misc_feature (1)..(603): n is a, c, g, or t
atgagcgatttaatagagaaaaaagacggctacacgggagtgcatacaaggcgtgtaagcgagtatgtcgctattttactgcgggaattggtacggcgcgggcatcaatttaccgaatccgatattcaaaggatagcggaatcttctttgttacacgacatgggaaaaatagcaattcctgacagtatccttcttaaaaacggaaaattggacgacgatgaattcggcgtaatgaagagccacagcgcaaaaggcgctgattctttggagaagtcaatgcaatttgccaaggacaacgaatttttaaagaacgcatttgtaatggcgaagcatcatcacgaaaaatggaacggcggcggctaccccgacggtaaaaaagaaaatgagataccccttcttgcccgtgtaattgccatcgccgatgtttatgacgccttgcgttccgaacgctcgtataaaaaaccgttcagccgcgagaaagcgaaagaaattatattggaagaaaacggacgccaattcgaccccgaactggtcgatgttttcttggcggtagagccgcaattcgacgaattctgcaaatccacgcaaaacaattcaaaatga

SEQ ID NO: 12694 - protein, 200 aa, Unknown
  Obtained from environmental sample
  DOMAIN (12)...(146): HD domain
  misc_feature (1)..(200): Xaa is any amino acid
MSDLIEKKDGYTGVHTRRVSEYVAILLRELVRRGHQFTESDIQRIAESSLLHDMGKIAIPDSILLKNGKLDDDEFGVMKSHSAKGADSLEKSMQFAKDNEFLKNAFVMAKHHHEKWNGGGYPDGKKENEIPLLARVIAIADVYDALRSERSYKKPFSREKAKEIILEENGRQFDPELVDVFLAVEPQFDEFCKSTQNNSK

SEQ ID NO: 12695 - DNA, 702 bp, Unknown
  Obtained from environmental sample
  misc_feature (1)..(702): n is a, c, g, or t
atgtccctcttctacccagcctacgtcgcggtatctcaagtcccggcgttcaccgggctctactccgaaaacaagcgcctccgccaagagctggccgagatcagcacgcagctgcaggtcttccgcgaggagacggccgagaatgtgcgcctgcgcgggttggtcggttttgccgagcgcactctctacacgctcatccccgccagggtcgtcgcccgcgatccctcgccgcagtaccgcagcgtgatcgtcaacggcggccgtatgaacggggtggagcagtatatgccggtggttggcgaacgcggcgcggcaggcaaggtcgtgcaggtgttggataacttgtctatggtgcagctgctgcgcgacccgtccagccgcacgagcgtcatggtcagcgggtcgcggactgtgggcatattgcaaaccgaaaacgggcgcgacttcttcgtccgcctgcgcagccatgaggacgtcggggcgggcgacaccatagtcacctccggcctgggcggcatatatcccaaggggctcacggtgggctacgtgaaaaagatcgacgacggcaacccgctcttcaagcgcgcctatatagacttttccgtcaatttcgataagttggaggaggttttcgtaatgcgcctgccgccgctttgggccgcgcagcgcgccgaactcgagacaatggcggtggaaaaatga

SEQ ID NO: 12696 - protein, 233 aa, Unknown
  Obtained from environmental sample
  DOMAIN (68)...(217): rod shape-determining protein MreC
  misc_feature (1)..(233): Xaa is any amino acid
MSLFYPAYVAVSQVPAFTGLYSENKRLRQELAEISTQLQVFREETAENVRLRGLVGFAERTLYTLIPARVVARDPSPQYRSVIVNGGRMNGVEQYMPVVGERGAAGKVVQVLDNLSMVQLLRDPSSRTSVMVSGSRTVGILQTENGRDFFVRLRSHEDVGAGDTIVTSGLGGIYPKGLTVGYVKKIDDGNPLFKRAYIDFSVNFDKLEEVFVMRLPPLWAAQRAELETMAVEK

SEQ ID NO: 12697 - DNA, 669 bp, Unknown
  Obtained from environmental sample
  misc_feature (1)..(669): n is a, c, g, or t
atggataatgcgctggacagcatgatagatacattcaccgacataaaagaattgataaataacgccatggacaatttcagaaggagcaatcttacattgatccacggcgggaaaacatcatcgcaatccaaaaatcaatcatggcgaatgatacagataagcatttccgggcttgaagtttggcggcgcgccattatctctcatagctgtactatggaagaacttcacgagttaattcaaataggtatgaactggaacgggagtatgcgttttcgtttttactatgaaatgcccgacggaaacaaagagtatctgcacgataaaattaaattaggagatattgattttcagggcaagaaagagctgatatatgaatacggatcaaaatggaatgtaaaagtgataataatgtcatcgtaccaacccgccaataacgaggttacccgttttatagccggcgacggagccgctccccccgatcacgttgacggaccgcgccatttcaggaaattgctttattctcttgaggtaggcaataactcggaaaaacagtccgcacagagcgagttgggaacgaattttgtgcccggtatctttgccctggatacaatgaaccagaaattaaaaaatatttttacagaaacggaaaatatacccgatgatatatga

SEQ ID NO: 12698 - protein, 222 aa, Unknown
  Obtained from environmental sample
  DOMAIN (44)...(205): Plasmid pRiA4b ORF-3-like protein
  misc_feature (1)..(222): Xaa is any amino acid
MDNALDSMIDTFTDIKELINNAMDNFRRSNLTLIHGGKTSSQSKNQSWRMIQISISGLEVWRRAIISHSCTMEELHELIQIGMNWNGSMRFRFYYEMPDGNKEYLHDKIKLGDIDFQGKKELIYEYGSKWNVKVIIMSSYQPANNEVTRFIAGDGAAPPDHVDGPRHFRKLLYSLEVGNNSEKQSAQSELGTNFVPGIFALDTMNQKLKNIFTETENIPDDI

SEQ ID NO: 12699 - DNA, 765 bp, Unknown
  Obtained from environmental sample
  misc_feature (1)..(765): n is a, c, g, or t
atgttttctatgcggcagattatacggacaaacgctaaaagcgaattgtcgcagatgcttgagattaagcggataaaattggaaacatacgtcaaaagtgagattaccatcgtcagaaagatgggcgattccccgctaatcagggattatttcatccatcccgccgatgagcacctgaaaatgcaagcctttaaggagatagcgtcctaccgcggggcgttcgagcacaaatcggtgttttgggtcaacgatgtggataagatattccacattgacgacaccgcgccgtacgtggtcaatcctaagtccccggacaattattggtactggctgacgctttacaggaccgaatcgtataatttaaacataaattacaatccggacatagacaagataaggctttgggtcaacgcgccggtttttgacgataacaagaagcctatcgggatagtgggcaccggccttgatctatccgagtttgtgcacgcgcttttcagcgacgtggacaatagaatggttttttattttttcaacaccgcaggggaaatcaccggcgcgagggatattgacctgatttcctcgaagaagaaaatagacgaccaaatagacgctgtgaacggggacgttttggccgtcgcgaaaaaccttacgccgggcgaaacgcgggcgcttgccttaccgcacggaaacatagtgatcggcacgattccgcaactcaaatggtattctatcgtctatatgccggacagcatagacgactantaa

SEQ ID NO: 12700 - protein, 254 aa, Unknown
  Obtained from environmental sample
  misc_feature (1)..(254): Xaa is any amino acid
MFSMRQIIRTNAKSELSQMLEIKRIKLETYVKSEITIVRKMGDSPLIRDYFIHPADEHLKMQAFKEIASYRGAFEHKSVFWVNDVDKIFHIDDTAPYVVNPKSPDNYWYWLTLYRTESYNLNINYNPDIDKIRLWVNAPVFDDNKKPIGIVGTGLDLSEFVHALFSDVDNRMVFYFFNTAGEITGARDIDLISSKKKIDDQIDAVNGDVLAVAKNLTPGETRALALPHGNIVIGTIPQLKWYSIVYMPDSIDDX

SEQ ID NO: 12701 - DNA, 888 bp, Unknown
  Obtained from environmental sample
  misc_feature (1)..(888): n is a, c, g, or t
ttgaacgccgtagcttggtatgtaagcaactccgacaacagaacgcatacggttgggcagaaaactcctaacgaacttggcatatacgatatgagcggaaacgtgttagagagggttagcgattggtggggcgatcttccaagcggttcggtgacagacccaacgggacctactaacggcactttacgtcttgctcgcaactcgggcttttataatggtaatacgaccagttgccgcgttgtcgctcgcggctatgcggattcgccgtcctttcgttccaccgatcttggttttcgtattgtttttgatgctgccggagttagagcgaaccaaacaaaagaaagggttgcttccggcagcgaaacgtggacttctccgaattatcgcgcacaaatagaggtttatgcgcttggcggcggcggcggcggacaaggcgggcatgacgccgacgcattgacgggttggaaaggtagcggaagcggtgccggcggcggcggcggtgcggcggcttatatgaaatttgagcaaacaggacaaatcaactttactatgaacgtaggcggctgcgggtggggcggcgagagaatttatagaaaagtaggacaagattggcgctccggcggctccggcggaaatggcgaccctacatctttaacttggaacagcaatactcttaccgtggctggcggtaagggcggcgctgaaaaccgttcttcgtctaacagttatcgagatcaaaccggcggagcaggcggagcggtaagcgctcgtcccgatgtaatttcacaagccaattggcaaagcgttaagggcggcgatggtaataatggtgtaaaagatgggaatcaaggacagcaggcggaaagcgggaaaactcggccgatctga

SEQ ID NO: 12702 - protein, 295 aa, Unknown
  Obtained from environmental sample
  misc_feature (1)..(295): Xaa is any amino acid
MNAVAWYVSNSDNRTHTVGQKTPNELGIYDMSGNVLERVSDWWGDLPSGSVTDPTGPTNGTLRLARNSGFYNGNTTSCRVVARGYADSPSFRSTDLGFRIVFDAAGVRANQTKERVASGSETWTSPNYRAQIEVYALGGGGGGQGGHDADALTGWKGSGSGAGGGGGAAAYMKFEQTGQINFTMNVGGCGWGGERIYRKVGQDWRSGGSGGNGDPTSLTWNSNTLTVAGGKGGAENRSSSNSYRDQTGGAGGAVSARPDVISQANWQSVKGGDGNNGVKDGNQGQQAESGKTRPI

SEQ ID NO: 12703 - DNA, 708 bp, Unknown
  Obtained from environmental sample
  misc_feature (1)..(708): n is a, c, g, or t
atgtcggcggctttcgcaatgggcgcgcccgtggccgacaaaggcgccgctctatggagcgacaccctgttcgccttggcgacagcgcagctggactggatactcggcaaaaaccccttcaaaatatgcatgatgtacggatacggggagaccaactacccgttctataagggcgacgccggtatagagcacgtcaaaggcggcatctgcaacggcataacggcaaagcactccgacgagaacgacattgattggaaaccgtactccgaaggcctcgacttctatgaaaactggcgctggttggagcagtggatcccgcacaacgcctggtatctgacggccgtatccgccatatcctataggatagataacaagatagtggacgatccggacgacccggatccgggcgaacctgacgactctttggaggtggccgtgaggcacaacgcgtcgggcgaatccggccgcatgaaaatatcggctaccaatggagcgggcataaggatcgcgttgccgttcggggcggacggcgcgacggtggtctcggtctacaacatacggggaaagagggtttacgcgcataaagtgcggcaaggttcgcgcacggtatcaatgcgcctgccgtccgcggcgaaagggacttacatcgtctgtgtgcgtgacggggagaggaaaaacagggcggttggtaaaatactcttcaaatag

SEQ ID NO: 12704 - protein, 235 aa, Unknown
  Obtained from environmental sample
  misc_feature (1)..(235): Xaa is any amino acid
MSAAFAMGAPVADKGAALWSDTLFALATAQLDWILGKNPFKICMMYGYGETNYPFYKGDAGIEHVKGGICNGITAKHSDENDIDWKPYSEGLDFYENWRWLEQWIPHNAWYLTAVSAISYRIDNKIVDDPDDPDPGEPDDSLEVAVRHNASGESGRMKISATNGAGIRIALPFGADGATVVSVYNIRGKRVYAHKVRQGSRTVSMRLPSAAKGTYIVCVRDGERKNRAVGKILFK

SEQ ID NO: 12705 - DNA, 555 bp, Unknown
  Obtained from environmental sample
  misc_feature (1)..(555): n is a, c, g, or t
atgccgataaaaatacccaaagcgctgccagcctatgatgccctgatgcgggaacaagtttttgtaatgactgacgaccgcgccattcatcaggatattcgtccgcttaaggtgggtattgtcaatcttatgccgaccacggtggaaactgaaattcaactgttgcggcttctgggcaacagtcccttacaggtggatattacctttctgcggatgggcagccatgaatcaaaaaacgcccctcccggacatttggaaaaattttacatcagcgcggaggaattaatctctactgatattcgttttgacggccttatcattaccggcgcgccggtagaaaccatgcccttcgaagaagttgattactgggaggagcttgccagagtaattgattgttcggaaagaaaagtattttctactttgcacatttgctggggagcgcaggcggggctgtaccgccgctataatattcccaaaaaaccgctggacaaaaaactgttcggcatttttccccatgcggtaaacgaacagctcgtgccgatctgtcatgcctaa

SEQ ID NO: 12706 - protein, 184 aa, Unknown
  Obtained from environmental sample
  DOMAIN (2)...(184): Homoserine O-succinyltransferase
  misc_feature (1)..(184): Xaa is any amino acid
MPIKIPKALPAYDALMREQVFVMTDDRAIHQDIRPLKVGIVNLMPTTVETEIQLLRLLGNSPLQVDITFLRMGSHESKNAPPGHLEKFYISAEELISTDIRFDGLIITGAPVETMPFEEVDYWEELARVIDCSERKVFSTLHICWGAQAGLYRRYNIPKKPLDKKLFGIFPHAVNEQLVPICHA

SEQ ID NO: 12707 - DNA, 612 bp, Unknown
  Obtained from environmental sample
  misc_feature (1)..(612): n is a, c, g, or t
atggtaagtctgaacaggcttataaggcttggaaaaatagtgcctgaagttatttgctcatgtttaaaaaaaattgccggagtccagttaagaaacattgcgacaatcgggggcaatatatgcagttctccgcgccttcttgatctgcccgcgccccttaccgcccttgacgcccaatatgaattcagaagcgcgtccaacgctaccagatgggtttccgcggcgcgtttccattcggaagaacatacaatgttcgggaaacaggaattgctgacaagaataaggcttcctctgcaccaatgggattacacaatatacaaaaaattctattccgaggattattttaacggcaattcgcttgttttactcgccaaaacgcaaaaaaatatcctttccgacataagagtggtttataaaggaaacacgatcttccgcaataaacaaggcgaggacattcttatcggcaaatatctgccccttaaccgtaaaacaacccatgacttcatcgccaactggctggaatatctgtcaggaaaatcagaaataagcgaattttcaaaaaattctcttttaaacagcatagaagaatacgtttttaacttatcagagtaa

SEQ ID NO: 12708 - protein, 203 aa, Unknown
  Obtained from environmental sample
  DOMAIN (1)...(99): FAD binding domain in molybdopterin dehydrogenase
  misc_feature (1)..(203): Xaa is any amino acid
MVSLNRLIRLGKIVPEVICSCLKKIAGVQLRNIATIGGNICSSPRLLDLPAPLTALDAQYEFRSASNATRWVSAARFHSEEHTMFGKQELLTRIRLPLHQWDYTIYKKFYSEDYFNGNSLVLLAKTQKNILSDIRVVYKGNTIFRNKQGEDILIGKYLPLNRKTTHDFIANWLEYLSGKSEISEFSKNSLLNSIEEYVFNLSE

SEQ ID NO: 12709 - DNA, 903 bp, Unknown
  Obtained from environmental sample
  misc_feature (1)..(903): n is a, c, g, or t
ttgccatttgacttgcgaaaaacaatatcattttttatttttttcgccgtttgtttttcggtttttccccaagaaaacaaatttgaaactgatgaagccaatccggaagaagaaagcgcgtatgacgacatattgcataatgatatttatgatgaagaaacaatatttataataaattcttttaattataacgttaaaggaagaacgcttccttttgtcttaaacacaaaaacagaattaaaaaaaggcgaagaaatagagggaaaaacaaaattaataaaatttataaaagataaacggcagcttctcgtcaatgaacgggtgttaagtgacgacgtaaggattgaatacgcgatagggggacctgcgcaggacggaaagtatcccgtaagtttggaaatatatgtggaagacacgtttaatataatcgcgcttccctatccaaaatacagttcaaattacgggctggaattgactattaaagcccgcgattataattttttcggatcaatgcagccttttagggtggatttaggctacaaatacaatcaggaagggcgcacttatttttccttaatgctggattcaggttttccgtttcaggctttcgggcttaactggttttttgattttgacaactatttcgattaccgccctgattcgcctgaacctttttattataaaaacagaacggcgttttccattgacattccaataaagcgcacgactcttaacttgtggttcgcggaatcgtttttttggaatgaggaaaacgccgattctgacaaaccgctttacggagaattgcaggaagggctttatttgtcgagtaatcctgaaatttcgtggaagattcccacaggtctgaaatcggcgaatacggagaacctcggccgaatctga

SEQ ID NO: 12710 - protein, 300 aa, Unknown
  Obtained from environmental sample
  misc_feature (1)..(300): Xaa is any amino acid
MPFDLRKTISFFIFFAVCFSVFPQENKFETDEANPEEESAYDDILHNDIYDEETIFIINSFNYNVKGRTLPFVLNTKTELKKGEEIEGKTKLIKFIKDKRQLLVNERVLSDDVRIEYAIGGPAQDGKYPVSLEIYVEDTFNIIALPYPKYSSNYGLELTIKARDYNFFGSMQPFRVDLGYKYNQEGRTYFSLMLDSGFPFQAFGLNWFFDFDNYFDYRPDSPEPFYYKNRTAFSIDIPIKRTTLNLWFAESFFWNEENADSDKPLYGELQEGLYLSSNPEISWKIPTGLKSANTENLGRI

SEQ ID NO: 12711 - DNA, 537 bp, Unknown
  Obtained from environmental sample
  misc_feature (1)..(537): n is a, c, g, or t
ttgagggaaggaaagggtctgcgcataacagaaatccagaagatacttcacggtctgttacgcgaaagggtttcgatacgcaatatggtttccatactcgaatccattgcggattacgcgcctgtttccaaaaacatctggtttctcacggaaaaagcaaggcaggccatctcaagccagatttgccatcaatacgccgatgaagaccgcaggctgcgggtgctgacattggacccgtctcttgaacagagaattatcgacagtaaatacgaaaccccctccggaattatctgcgcccttgatccgccgactcaaaagggatggattaaagcggttgtaagggcggtaacagccgtaaaagaaaaaggatggatgcctgttatactgtgttccgaacaggcgcgtttccttgtcaagaattccacagatcgtgaactgccggatttggcggttatttccgttcctgaaatagtaccggagataattccggaagctgtaggaatgataaaaatagaagaaacaccttcggagcaataa

SEQ ID NO: 12712 - protein, 178 aa, Unknown
  Obtained from environmental sample
  misc_feature (1)..(178): Xaa is any amino acid
MREGKGLRITEIQKILHGLLRERVSIRNMVSILESIADYAPVSKNIWFLTEKARQAISSQICHQYADEDRRLRVLTLDPSLEQRIIDSKYETPSGIICALDPPTQKGWIKAVVRAVTAVKEKGWMPVILCSEQARFLVKNSTDRELPDLAVISVPEIVPEIIPEAVGMIKIEETPSEQ

SEQ ID NO: 12713 - DNA, 849 bp, Unknown
  Obtained from environmental sample
  misc_feature (1)..(849): n is a, c, g, or t
ttgaaaaaccttgatgttgatataccaatcggagctatgacaatcatctgcggagtgagcggttcgggcaaaagctcgcttttgtggggagttatagaacctcttgtaaatcgtaaaaaaatcaaaggaatagattctattctggcagcgagaacgggcagagcttttgcgcaaaaacgaagcaccatagcgacagccatcgacattatgcaaattatgaaaaacctttttgcggggctaccggagagcaaagtgcgcggttactcagcggcaaaatttggcacggacaaaccgggcgggcgttgcgagaattgcaaaggtgatggctttttatttgacccaagcggctacgatgagagcgaatgcccaatttgcctaggcaaaagatttagagacgaggttttggaaatacgttttaaacttatgtccatagcggatgttttggatttatccgtttccagagcgttggagatttttgtgaattttgaaaacataacatccaagttaaaaccccttgcagaaacaggcttgcactatttgcggcttgggcagccaaccacacatttgagcggcggtgagttgcagcgtttaaggcttgcgcaggatttggcaaaagccaagttgccccgcaccctctatctatttgacgaacctgggagagggctttccatgaaagacactgccctgctattggatttgcttaaaggcttaactcaaaaagggcacacagtcattgccattgagcacaacgaactgttcagaaagtatgccgactatattttggaattaggtcccggcgcgggagaagatggggggaggatacttgaatactttaatcctcaaatttga

SEQ ID NO: 12714 - protein, 282 aa, Unknown
  Obtained from environmental sample
  DOMAIN (11)...(266): ABC transporter
  misc_feature (1)..(282): Xaa is any amino acid
MKNLDVDIPIGAMTIICGVSGSGKSSLLWGVIEPLVNRKKIKGIDSILAARTGRAFAQKRSTIATAIDIMQIMKNLFAGLPESKVRGYSAAKFGTDKPGGRCENCKGDGFLFDPSGYDESECPICLGKRFRDEVLEIRFKLMSIADVLDLSVSRALEIFVNFENITSKLKPLAETGLHYLRLGQPTTHLSGGELQRLRLAQDLAKAKLPRTLYLFDEPGRGLSMKDTALLLDLLKGLTQKGHTVIAIEHNELFRKYADYILELGPGAGEDGGRILEYFNPQI

SEQ ID NO: 12715 - DNA, 726 bp, Unknown
  Obtained from environmental sample
  misc_feature (1)..(726): n is a, c, g, or t
atgcgtaaactaaatgacgtactggaaggtgtcctggatacaattgaaaacaacctcaaagacggtataaatgccgatgccatcgctgatgaattttccctatcttcagtccatttacaaaggctgtttaagcaaaagtttaaaaagtcgattggaacatatatacgctccagaaagttatcggcaagcatcaaagatttattgtacagcgatttaaatattctgagcattgcccttgaatacggctttagttatgagcaggcgtatatactcagttttaagcatgaatttggatttaccccaggcgatttacgcagaaacaaacagttagtaagaactacgccctcccttcaatcttatgtacatgattcagtatataaaaatgattttcttgtcggtaatattattaatgaaaaatatatggatgacgcttattttgatgttataaaaagtcattttaatattatcactcccgaaaacaatcttaaaccagcttcgctgacatcaaaccatggtggtgcgtacaactggtcgtatgcggatcaaatggtaaaccgtgcgctggaaaacggaatacctgttcatggtcattgtatggtatggcatgattggactcccgaatggatgaccaaaggaacaagagcagaagtggaggacaacctaaaaatttatattaccgacgtattaacgcattatcacggtaagatttattcatgggatgtgtaa

SEQ ID NO: 12716 - protein, 241 aa, Unknown
  Obtained from environmental sample
  DOMAIN (121)...(241): Glycosyl hydrolase family 10
  misc_feature (1)..(241): Xaa is any amino acid
MRKLNDVLEGVLDTIENNLKDGINADAIADEFSLSSVHLQRLFKQKFKKSIGTYIRSRKLSASIKDLLYSDLNILSIALEYGFSYEQAYILSFKHEFGFTPGDLRRNKQLVRTTPSLQSYVHDSVYKNDFLVGNIINEKYMDDAYFDVIKSHFNIITPENNLKPASLTSNHGGAYNWSYADQMVNRALENGIPVHGHCMVWHDWTPEWMTKGTRAEVEDNLKIYITDVLTHYHGKIYSWDV

SEQ ID NO: 12717 - DNA, 480 bp, Unknown
  Obtained from environmental sample
  misc_feature (1)..(480): n is a, c, g, or t
gtgtgggtgaaggggcctgcaacccttatgggaagcctcgccgagcttaataccgagcttattgatctttcagggcgaataaatgatttttccgtaaccgcttcaattttgcacaacgagcctctcattttaatccggggggatggctccgtcaatttttacgcttccatcagccagatcattgcggtcaggaatgtgtccaatgttccgattgccataaccggcctggatgggcaatttagcggagagctgaaaacaaagacggcaaatatccgcattgaaggatacaaccgcgatactgttgaatcgtttgttcctccgagcggattcttaagggttgattgttcgcaaatcagcgagagcggcgattatgttttgaacgttcttgccggaacagtaaccggtttaagcattatagtgacgcccagagaagtaggaattgaaataagcataggcacggcaggagatgaagatcaatga

SEQ ID NO: 12718 - protein, 159 aa, Unknown
  Obtained from environmental sample
  misc_feature (1)..(159): Xaa is any amino acid
MWVKGPATLMGSLAELNTELIDLSGRINDFSVTASILHNEPLILIRGDGSVNFYASISQIIAVRNVSNVPIAITGLDGQFSGELKTKTANIRIEGYNRDTVESFVPPSGFLRVDCSQISESGDYVLNVLAGTVTGLSIIVTPREVGIEISIGTAGDEDQ

SEQ ID NO: 12719 - DNA, 813 bp, Unknown
  Obtained from environmental sample
  misc_feature (1)..(813): n is a, c, g, or t
gtggcgaactcagcgcttgtctttgtcctctttgtgggcggtttcggcacgaagatgagcaggctcaagatggtgttcggcccggctatgatgttggcttcattgggcgtcatcatcaccgctgtggtcaccgcgttttccctatattggttgcttcgggcggtccacattgacatagacgggaagacgtccgcgttgatagggtgcattatagcgtctaccgacgcggcggcggttttttctatactgcggtcgcggtcgctggaccccaagatgtcggcggcggttgaggttgagtcggcgactaacgaccccatggccatcatcctgaccaccatagccgttggcttcgcggtcgcctcctccggtcagtcgttgggcggcgggctcgtttcgtgggacaaggcgctgggcattgtcgggatactattgtggaagggctttggcgggctggggatagggctgctggtaggtttggtcgcttgctggctgagcagatttgtgactaatttggacaagggctacttttacatatacataatcgcgatcatcatgctctcgttcggcgtggctgaggtcgcgcaagccagcggcatcctctcggctttcgccgcgggttttgtcatgggcaacaagaatatcccctacaagtcgacctccacgacgcttctcgacgcgatgtccacaataggcaacgtggtgatcttcgtcttgttggggctattggtcttcccagcaaattcggtcaattcgatgttttcggcggcggcatactgctgtttctcatccttacgctcgtcgcccgcccgatag

SEQ ID NO: 12720 - protein, 270 aa, Unknown
  Obtained from environmental sample
  misc_feature (1)..(270): Xaa is any amino acid
MANSALVFVLFVGGFGTKMSRLKMVFGPAMMLASLGVIITAVVTAFSLYWLLRAVHIDIDGKTSALIGCIIASTDAAAVFSILRSRSLDPKMSAAVEVESATNDPMAIILTTIAVGFAVASSGQSLGGGLVSWDKALGIVGILLWKGFGGLGIGLLVGLVACWLSRFVTNLDKGYFYIYIIAIIMLSFGVAEVAQASGILSAFAAGFVMGNKNIPYKSTSTTLLDAMSTIGNVVIFVLLGLLVFPANSVNSMFSAAAYCCFSSLRSSPAR

SEQ ID NO: 12721 - DNA, 870 bp, Unknown
  Obtained from environmental sample
  misc_feature (1)..(870): n is a, c, g, or t
gtgaataatgccggtaatgccggcattaaggtagtcggtgttttggcttatgacgtatcgtggatacatcntgatcaaaaaacccattattatattcctcctgaaagactacctgattttcttaattacattgaaagaactgtagggcatttcaaaggcagagtaaacgcttggtgtatatggaatgaacctaacaccagacatttttggaaaggaaccgttgatgaatttacagaactaacccggcaaactgcggatattattaagaaaacagacaacgatgtgattgttcttggtggagcttttaaccgtaatattacagggctaccaaaaaaaatgataaacagactttttaaatcaggcgctatggaaaatgttagcgccgtggcttttcatccttatgaaataagcgttaatcgctctataaaactgtacaaacaatttgaagaaatagtaaatcaatacggttataaagataaaatttgggttaccgaaatgggttatcctaccggaggtttttatccaaccagggtttcagaaaaaaattttcctttaagaataataaaaacctttacttttctcgttgccggtggagcaaaaaaaatattgtggtatcaaatgtttgacccttccaatccttcaaaaatcgactccgaagatttttttggtctggtaaggaatgagaatgattatacttctaaaggagccgaagcattccgcttgtgcgcgttatatatccctgattcagtatgttatgcgcttacacagaataacctgcctgcatccctgcgggttttttggtttaaaagnggaaaagtggcgggactttggttttatggaaagatgngatttggttccancncaggttag

SEQ ID NO: 12722 - protein, 289 aa, Unknown
  Obtained from environmental sample
  misc_feature (1)..(289): Xaa is any amino acid
MNNAGNAGIKVVGVLAYDVSWIHXDQKTHYYIPPERLPDFLNYIERTVGHFKGRVNAWCIWNEPNTRHFWKGTVDEFTELTRQTADIIKKTDNDVIVLGGAFNRNITGLPKKMINRLFKSGAMENVSAVAFHPYEISVNRSIKLYKQFEEIVNQYGYKDKIWVTEMGYPTGGFYPTRVSEKNFPLRIIKTFTFLVAGGAKKILWYQMFDPSNPSKIDSEDFFGLVRNENDYTSKGAEAFRLCALYIPDSVCYALTQNNLPASLRVFWFKXGKVAGLWFYGKMXFGSXXG

SEQ ID NO: 12723 - DNA, 492 bp, Unknown
  Obtained from environmental sample
  misc_feature (1)..(492): n is a, c, g, or t
atgctcctgaccataacctataccggacagaacaccaccgaactcgggtacctgctttacaaaaacccgtaccgcccgcaaaagttcgagcttaaccacggaagcgcgtacgttttttatcccgaggtatcggacgaacggacgaccgcggcgcttcttctggatatagaccctatagacctcgcgcggggcaaaacggaggcgaacagaggcgggctgttcgactatgtaaatgaccgcccctatgtctcttcgtcttttttgagcacggcgatttccaatgtctttggaaccgcgatgtcgggccgcgcggacgagcgccaggccctgtccgactctcccctggagttgacggcgagaatcgccatgctgccctgcaggngcgataccggcatgcttaacagggtttttgaacccctgggatacgaggtaagccatgaagaatttgtcaatgacgagcgttttccccgcctggacagaataaatatgtga

SEQ ID NO: 12724 - protein, 163 aa, Unknown
  Obtained from environmental sample
  misc_feature (1)..(163): Xaa is any amino acid
MLLTITYTGQNTTELGYLLYKNPYRPQKFELNHGSAYVFYPEVSDERTTAALLLDIDPIDLARGKTEANRGGLFDYVNDRPYVSSSFLSTAISNVFGTAMSGRADERQALSDSPLELTARIAMLPCRXDTGMLNRVFEPLGYEVSHEEFVNDERFPRLDRINM

SEQ ID NO: 12725 - DNA, 420 bp, Unknown
  Obtained from environmental sample
  misc_feature (1)..(420): n is a, c, g, or t
ttgaaactgacagggacggcgnacagtatgcgggaacgcgtaacgctgtttcaaagttcgctcatgtataaagattccgctttaaagggttatgacgccgcntgcgtcgtagaggtcatcgaacatctggacctgccccgtcttgccgcttttgagcggatcttgtttgaatacgccaaagcgcccgtcgtggttctgaccacgccgaaccgcgagtacaacgtaaaatacgaaaatcttgatgaaagctccttgcggcacagcgatcatcgttttgaatggacaagggcgcagttccgcgaatgggcggcaaagacggccgcccggtacggttatacggttcgaatctccgaaataggagattctgacgaagccctcggcgcgccgactcagatgggggtgtttacggtatgcggatag

SEQ ID NO: 12726 - protein, 139 aa, Unknown
  Obtained from environmental sample
  misc_feature (1)..(139): Xaa is any amino acid
MKLTGTAXSMRERVTLFQSSLMYKDSALKGYDAACVVEVIEHLDLPRLAAFERILFEYAKAPVVVLTTPNREYNVKYENLDESSLRHSDHRFEWTRAQFREWAAKTAARYGYTVRISEIGDSDEALGAPTQMGVFTVCG

SEQ ID NO: 12727 - DNA, 813 bp, Unknown
  Obtained from environmental sample
  misc_feature (1)..(813): n is a, c, g, or t
gtgcataagttagttgttgaggctccccttatagcagaagagaggcttgcggggcagtttataatttngcaaacagatttagaagcaggagagagaattccgctcacaatagcagacgcaaacagagaacaaggcacaataaccctgattgttcaagcggttggcaaaacaacaatggatttatcgcaattaaaagttggcgatgatattcctgttttaacaggtcccctcggttcgcccacgcacatagagaattttgggcacgcggtttgtgtttgcggtggcattggggctgcacctatgtaccccatagcgcaggctcttaaaaaagctggcaacaaagtgagcgttattttgggagctaggcaaaaaaatttgataataatggaaagcgaactgaaaagtgtttgtgatgaaatgctcatttgcacagacgatggctcttatgggcgcaaatgcttggtgacagaacctttaaaagaactctgcgaaaattgcaaaccaaactttgccatagccattggtccccctataatgatgaaattctgcgcagaaactacccgcccttacggcgttaaaacttatgcaagcctcaacagtattatggtggacggcactggaatgtgcggttgctgccgagtgacggttggcggcgaggttaagtttgtgtgcatagatggtcctgaatttgatgcacacaaggttgattgggaaaatatgatgaaaagaatgggtacttataagcaacgcgaagctttggcaagagaaagggcacttgaaaagataaaaaaatgcagatgtgaggacaaatga

SEQ ID NO: 12728 - protein, 270 aa, Unknown
  Obtained from environmental sample
  DOMAIN (90)...(185): Oxidoreductase NAD-binding domain
  misc_feature (1)..(270): Xaa is any amino acid
MHKLVVEAPLIAEERLAGQFIIXQTDLEAGERIPLTIADANREQGTITLIVQAVGKTTMDLSQLKVGDDIPVLTGPLGSPTHIENFGHAVCVCGGIGAAPMYPIAQALKKAGNKVSVILGARQKNLIIMESELKSVCDEMLICTDDGSYGRKCLVTEPLKELCENCKPNFAIAIGPPIMMKFCAETTRPYGVKTYASLNSIMVDGTGMCGCCRVTVGGEVKFVCIDGPEFDAHKVDWENMMKRMGTYKQREALARERALEKIKKCRCEDK

SEQ ID NO: 12729 - DNA, 465 bp, Unknown
  Obtained from environmental sample
  misc_feature (1)..(465): n is a, c, g, or t
atgggcaaaagcgtccatggcctccagggtttctgttttccaataggggataatatcgctggtgtatttatccagcccaaaatggcggcggatatcaatcgagaaatagtatttgtcgccctcatagccaaaaagcgcgttgctctcgcgaagggactcgggatccacaaaatccctgaaacgcgcgagttccctttcctttgtggtgagtccccacgtttccaaatcgagattaaaggtgtaatgatccatgatgtattgtttcaggcgcatggcgcgcttctctggggaaagctcttccataccggagaaccatggcagatcccgccatgcccagagccgcggactcatgatattcgcgagtacaagggcatagagcaactgcgggaaaatgaacacctccatatccgagagggtataggcggaactgtatttttcgagccgcgcggaagcgccggaaggtga

SEQ ID NO: 12730 - protein, 154 aa, Unknown
  Obtained from environmental sample
  misc_feature (1)..(154): Xaa is any amino acid
MGKSVHGLQGFCFPIGDNIAGVFIQPKMAADINREIVFVALIAKKRVALAKGLGIHKIPETREFPFLCGESPRFQIEIKGVMIHDVLFQAHGALLWGKLFHTGEPWQIPPCPEPRTHDIREYKGIEQLRENEHLHIREGIGGTVFFEPRGSAGR

SEQ ID NO: 12731 - DNA, 870 bp, Unknown
  Obtained from environmental sample
  misc_feature (1)..(870): n is a, c, g, or t
atggaaacaatacaaagttttgccagggacgaagactttaatttattttcgcctgtaatggaggcccaccaacgtaaccccggcggaaacgggaaaatcctttattacatttcggaaacttaccgctacccaaaggactttgcttctcttgtttacatctcgcagattttgcagatggagagcatacagtgcggggtggatcactggaggaggaaccggggccgctgcatgggagcaatttactggcagttaaacgactgctggcctgtgtgttcctgggcaagcgttgattattatggccgctggaaggcgcttcactacagggcgcggcgcttttttgcctcgcttcgcgccacgctgttcatcgacgaaaccgtgcgggtatttattcacaacgacacgctaaaggcggcaaagggcaggataaaactgtacctccgtgacaggagttttaacaccctggcggaagaaacgattgacactgagctacctccaatggccgcttcggaaatccttgtccgcgattaccgtaatttagtgaataacattgagcttgagcgttcatgttttgtgacggcggagttttcgataattgcggatgaaccgctgatttcaagagaaaccgtgttgtttgttccgcccaaacatttttcttttagtaaacctgaatacagcgttgaagtagctgaaaaaagcgattgctttgccataaccgtaaaagcgaataccttttgccgttttgtccgcgtaaagataccgggagaggatccggttttttctgataactattttgacattacaggcaaaagaagcgtagaaataaagctttcaaaaagaattaaaaaacacctataccgcagagacnaataa

SEQ ID NO: 12732 - protein, 289 aa, Unknown
  Obtained from environmental sample
  misc_feature (1)..(289): Xaa is any amino acid
METIQSFARDEDFNLFSPVMEAHQRNPGGNGKILYYISETYRYPKDFASLVYISQILQMESIQCGVDHWRRNRGRCMGAIYWQLNDCWPVCSWASVDYYGRWKALHYRARRFFASLRATLFIDETVRVFIHNDTLKAAKGRIKLYLRDRSFNTLAEETIDTELPPMAASEILVRDYRNLVNNIELERSCFVTAEFSIIADEPLISRETVLFVPPKHFSFSKPEYSVEVAEKSDCFAITVKANTFCRFVRVKIPGEDPVFSDNYFDITGKRSVEIKLSKRIKKHLYRRDX

SEQ ID NO: 12733 - DNA, 513 bp, Unknown
  Obtained from environmental sample
  misc_feature (1)..(513): n is a, c, g, or t
atgatcctctaccacggttcaaatattggaataaaaaaaattgaactggataaatgcaggccatttaaggatttcggcaggggcttttatacaacccctctgaaagaacaggcatgggcaatggcaaaacggacggtacggatatttagagaaggaacctcctgtattacagaattcctatttgacgacacagtattaagaaatcctcggttaaccataaaacaatttatgaaaccggatcttgaatgggccaggtttgtagtaaacaaccggaatcaggaatttaatgatcatgctaattctgaaggcaacacagacaacaaataccatatcgtaatcggacctgtggcaaatgatgacattaccgctttaataaatgtttatctggcgggaattttgtcagatgaagcattggtaaaagaattaacctttagggatttgagcgagcagatttcctttcataccgaaaaagcggccgcctttttacaatatgaaggagtacaacatggttaa

SEQ ID NO: 12734 - protein, 170 aa, Unknown
  Obtained from environmental sample
  misc_feature (1)..(170): Xaa is any amino acid
MILYHGSNIGIKKIELDKCRPFKDFGRGFYTTPLKEQAWAMAKRTVRIFREGTSCITEFLFDDTVLRNPRLTIKQFMKPDLEWARFVVNNRNQEFNDHANSEGNTDNKYHIVIGPVANDDITALINVYLAGILSDEALVKELTFRDLSEQISFHTEKAAAFLQYEGVQHG

SEQ ID NO: 12735 - DNA, 342 bp, Unknown
  Obtained from environmental sample
  misc_feature (1)..(342): n is a, c, g, or t
atgctggaccagcttggccagccctacatcacagccctcaggtcgcggggcattgcggaatggcgcgtatatttttcccatgccctgcgcaatacccttaacccctatatcacaggcagcgcgaacctccttgccggccttttttcaggctcgctgattctggaaataatattcgcctatcccggaataggaaggctcatgtacgaggccgttatacagcaggatattaacctcgtgctggcgaacatcatgtttatttcatttttagtactggtgggcatggcattagccgacatattgctcgccctggtcgatccgaggatacggtatgggaaagagtaa

SEQ ID NO: 12736 - protein, 113 aa, Unknown
  Obtained from environmental sample
  misc_feature (1)..(113): Xaa is any amino acid
MLDQLGQPYITALRSRGIAEWRVYFSHALRNTLNPYITGSANLLAGLFSGSLILEIIFAYPGIGRLMYEAVIQQDINLVLANIMFISFLVLVGMALADILLALVDPRIRYGKE

SEQ ID NO: 12737 - DNA, 342 bp, Unknown
  Obtained from environmental sample
  misc_feature (1)..(342): n is a, c, g, or t
atgggacaactgacgtcttcagccgcccaggttatcatttccataatccctattgtgggaattgtaatgggttcggtagttatctttttttatctcctttggaaccataagcgcaggacactgcttatcaaagccgggcagtttcagcggcctgattttgatctgcttaccttcagtcttcttgcggggctgcttttaagcacggtgggccttgccttgaccatttttctggcaatcgccctgaagatcaattttggccttttgggcgggattattcctttggcaatcggcattggcttgttggcttattatgggataaagcgcggtgacaggccttcatga

SEQ ID NO: 12738 - protein, 113 aa, Unknown
  Obtained from environmental sample
  misc_feature (1)..(113): Xaa is any amino acid
MGQLTSSAAQVIISIIPIVGIVMGSVVIFFYLLWNHKRRTLLIKAGQFQRPDFDLLTFSLLAGLLLSTVGLALTIFLAIALKINFGLLGGIIPLAIGIGLLAYYGIKRGDRPS

SEQ ID NO: 12739 - DNA, 663 bp, Unknown
  Obtained from environmental sample
  misc_feature (1)..(663): n is a, c, g, or t
atgacaacgacaggtaaatcaatggcggacaggttaattcacgaggtggagaaaagccttgctttttccgcgcgtatcggagcgttaagctgcggacacggcggatgcagggcggcggccgctcttgtaacagacgatttttttgaagaactgcccagaataagagcttttctggcaaaggaccttgaagccgccgtccgcggcgatcctgccgcgatgagctcggatgaggttattctatcttatcccggatttcaggcaatcaccgttcaccgcatggcgcactttttttggacgcggcaggttccccttattcccaggatgatgaacgagcatgtccacaggagaaccggaattgacattcatcccggcgcgcaaatcggagagtcgttttttattgatcacggaacaggaaccgttatcggagagactacgataataggcgataatgtaaaactttatcagggcgttacccttggcgcattatccgtaaaaaaagatgaaagcggccataaacgccatccaacgatagaagacaatgttacaatttacgcaaacgccacgattctgggcggcgagacggttatcggccgaggcagcattatcgggggcagcgtatggattacccagtctgttccgcctganagcaaagtatacaaataa

SEQ ID NO: 12740 - protein, 220 aa, Unknown
  Obtained from environmental sample
  misc_feature (1)..(220): Xaa is any amino acid
MTTTGKSMADRLIHEVEKSLAFSARIGALSCGHGGCRAAAALVTDDFFEELPRIRAFLAKDLEAAVRGDPAAMSSDEVILSYPGFQAITVHRMAHFFWTRQVPLIPRMMNEHVHRRTGIDIHPGAQIGESFFIDHGTGTVIGETTIIGDNVKLYQGVTLGALSVKKDESGHKRHPTIEDNVTIYANATILGGETVIGRGSIIGGSVWITQSVPPXSKVYK

SEQ ID NO: 12741 - DNA, 558 bp, Unknown
  Obtained from environmental sample
  misc_feature (1)..(558): n is a, c, g, or t
ttgggagacgtacagctcgacaaaggctgcattctttcaagcattaagacaaacggaaagctttctatcgcttcggaaaacggtaagctctcaggcggagtctgccaggcgaggcagggaattgacgccgccgatattggatcggagaaaggttttcgtactgaaatttcctttgggcaggactacttcctcaaggagcagatagtcgccttggaggaagaaattaataaaatcaaaagcgccctttccgagctggaggagaagatcaccggactccgcaataaaaaacagagtctccccgatgatttgaaaatagaaaaaatacggctgatgaaacttttggaacaggaaaacttaaaggtgtttaacctgagggaaaaatttgaggaacactttgattctgagattcgctgccgcggcactgttttttccggtgtggtgatagaaagccacaacaggtattatgaggttcagcagaaacgaagccaggtggttttttattttgaccgcgaatcgggaagaataaaagaaaagcccctggttccggaattccaataa

SEQ ID NO: 12742 - protein, 185 aa, Unknown
  Obtained from environmental sample
  misc_feature (1)..(185): Xaa is any amino acid
MGDVQLDKGCILSSIKTNGKLSIASENGKLSGGVCQARQGIDAADIGSEKGFRTEISFGQDYFLKEQIVALEEEINKIKSALSELEEKITGLRNKKQSLPDDLKIEKIRLMKLLEQENLKVFNLREKFEEHFDSEIRCRGTVFSGVVIESHNRYYEVQQKRSQVVFYFDRESGRIKEKPLVPEFQ

SEQ ID NO: 12743 - DNA, 618 bp, Unknown
  Obtained from environmental sample
  misc_feature (1)..(618): n is a, c, g, or t
atgcaaaaggcggctgtccttttttttatactttttttaggcttttctgtcatgctttttgcacaggatgacagcgaacctgatgtcgaacccgattgggatgattatatatacgaattatatactaaaggcgatcaaactttttctatttcctttggagtaggtttccctctagggtttataaatcaaggtgaaaaaatcgatcttcatatcactccgccaataggcgggacaggcgctctcacctatgcttattatattaattcacgtttgttttcaggcatagaggttagtcttttatttttgccgacaatagcggaaaatacggtatatattacttcgcttgggggaagactgggcactcaattcattctgggaaagtttgaatttcccatttctatggctctcggcatgacaatacaatcatttcttgactttaattattttggttattacatgaaagccggaggctgcgcgcttttcagagcgactcatgaatggtcatttgggctatcgtcaaacttttgctggtatcctcaatggataaaagaggaaccccaaaaaaatgtcgacggactttttgttgatttatctcttgtagcgcggtatcatttttaa

SEQ ID NO: 12744 - protein, 205 aa, Unknown
  Obtained from environmental sample
  SIGNAL (1)...(21)
  misc_feature (1)..(205): Xaa is any amino acid
MQKAAVLFFILFLGFSVMLFAQDDSEPDVEPDWDDYIYELYTKGDQTFSISFGVGFPLGFINQGEKIDLHITPPIGGTGALTYAYYINSRLFSGIEVSLLFLPTIAENTVYITSLGGRLGTQFILGKFEFPISMALGMTIQSFLDFNYFGYYMKAGGCALFRATHEWSFGLSSNFCWYPQWIKEEPQKNVDGLFVDLSLVARYHF

SEQ ID NO: 12745 - DNA, 561 bp, Unknown
  Obtained from environmental sample
  misc_feature (1)..(561): n is a, c, g, or t
ttgttatctgttatttgttatctgttatctaataatatgagtgaatatattcttgaaatcgaaaatctaacaaaagaatttcccggcgtcagagctcttgaaaatgtcagtttgaaagttaaaaaaggggagatccacgcggtatgcggcgagaacggcgcgggaaaatccacgctgatgagttgtatttcgggcgtttaccccaaaggcgactacgaaggcaaggtttttttcaaggggcgcgaaactaattacaatagcgttaaagacagtgaaaaggaagggcttgccattattcatcaggaattggcgcttagcccttatttgtctatttatgaaaatatttttctgggacacatggaaacccgttttggaataataaattgggataaatatataaaagaatcaaaaaaatatctgaataccgtagggctgcacgagccgcccgaaaccgttgtaagcaaactgggggtgggcaaacagcagttgatagaaaatgcccgcgcccctttcaaaaaagacggaactgctcattctggacgaacctacatcttcacttaa

SEQ ID NO: 12746 - protein, 186 aa, Unknown
  Obtained from environmental sample
  DOMAIN (43)...(186): ABC transporter
  misc_feature (1)..(186): Xaa is any amino acid
MLSVICYLLSNNMSEYILEIENLTKEFPGVRALENVSLKVKKGEIHAVCGENGAGKSTLMSCISGVYPKGDYEGKVFFKGRETNYNSVKDSEKEGLAIIHQELALSPYLSIYENIFLGHMETRFGIINWDKYIKESKKYLNTVGLHEPPETVVSKLGVGKQQLIENARAPFKKDGTAHSGRTYIFT

SEQ ID NO: 12747 - DNA, 840 bp, Unknown
  Obtained from environmental sample
  misc_feature (1)..(840): n is a, c, g, or t
atgcgaagatataacaactttttttacgcggggcctgtaaacgacataatgtccgttntacggcttgccgctcatccgctggacagcgcatcttacgcggaaatgctgcgctccccttttgcgggtctttcgcttgagggaacggcagtatgtttatcgatttttaacaacgccgaaaatcccgccgtatttaacgatgagccgcttaatcttctggacgatacggaccgcgaaaaatatttaaacggacaaaagatttattcatctatatgtgaaaaagccgcgacagaaagcgtaagttctttggttacagaattgtggtacaaagaaggctaccgttatgagacggaatggaatccggcgacaagcgtataccgcgagttatacgactatcttttccatcttgcggtccttgccgataccgcaaacgaggggcttgcctcatttacggattcaatgcgtgatctaagggattcaggcggccggcttacggacatagaaattccgcttgaacggccaggcgcggttcatttaatgacaatacataaaagcaagggactggaatttcccgttgtttttctttgctgctgcggaaaagacagccggtcggataccagcgaggacgtatttttctctgaaaaaacaggcgttgttttaagccctccccttcccgactcctgcaattccattgcttgtaactctataggcggcatacgaaaaaactttctttgggaacaatcaatagccgaaaaaaaacttaaaagaacagcggaactgcgccgccttctttatgtcgggatgacaagagctgaaaaagaactgtacctacaggcagtctaa

SEQ ID NO: 12748 - protein, 279 aa, Unknown
  Obtained from environmental sample
  misc_feature (1)..(279): Xaa is any amino acid
MRRYNNFFYAGPVNDIMSVXRLAAHPLDSASYAEMLRSPFAGLSLEGTAVCLSIFNNAENPAVFNDEPLNLLDDTDREKYLNGQKIYSSICEKAATESVSSLVTELWYKEGYRYETEWNPATSVYRELYDYLFHLAVLADTANEGLASFTDSMRDLRDSGGRLTDIEIPLERPGAVHLMTIHKSKGLEFPVVFLCCCGKDSRSDTSEDVFFSEKTGVVLSPPLPDSCNSIACNSIGGIRKNFLWEQSIAEKKLKRTAELRRLLYVGMTRAEKELYLQAV

SEQ ID NO: 12749 - DNA, 333 bp, Unknown
  Obtained from environmental sample
  misc_feature (1)..(333): n is a, c, g, or t
atgaatttcaggacctctggtccaagcatcctggtaagcccaggaaaaggatttttttcaatggccaagaaactgtatgtcgggaacctttcctaccaaaccactgaggacagcttgcgtaatcatttcgccagctttggcaatgtagtctcctcaaagatcatcgtagatcgggagaccggcagctccaagggattcggatttatcgaaatggggtccgatcaagaagcggcggcggcaatcgccggtacaaacggatctgaatttgaaggaaggaacctccgcgtcaacgaagcaatggacaagccgcgcaaagaacgcggtaactggtaa

SEQ ID NO: 12750 - protein, 110 aa, Unknown
  Obtained from environmental sample
  DOMAIN (25)...(96): RNA recognition motif. (a.k.a. RRM, RBD, or RNP domain)
  misc_feature (1)..(110): Xaa is any amino acid
MNFRTSGPSILVSPGKGFFSMAKKLYVGNLSYQTTEDSLRNHFASFGNVVSSKIIVDRETGSSKGFGFIEMGSDQEAAAAIAGTNGSEFEGRNLRVNEAMDKPRKERGNW

SEQ ID NO: 12751 - DNA, 867 bp, Unknown
  Obtained from environmental sample
  misc_feature (1)..(867): n is a, c, g, or t
gtgacaaataatattataaaaaaaattaattattttttaagaatagtaaagaatcatattaatttatttatttattttaagaataacagttctttgttaaaaacaatagatatatttttttctcctttagacccggccaataacgaggttaaagcttatccttccataaaacaatttattattttacatgatttaattcctgttatttttgataaagattctgtcaaatcaaaatatcattggtttaatatactagtagaatcattaaataaacaaacatactatctttgtaattcacattatacaaaaaatgattttttaaaatactatggcaatcaattagacgaaaaaaaaataatagttattcatcacgctacatctcaagaattttaccctgattataacaaaacaaaacttaccattgctcttgataaatacaagattaaatacaaaaataacaaatatatattttctctttgtaatctcgaaccacgtaaaaacttgttatttacagtaaaatgctttattaaatttattacaaaacataatatagaagatttatatttttatattggggggtcgcaatggaataaatttatttatcaattagaaaaagaaatagaaaaatttgacatatacagagataaaatcgcggggtttggttatgttaatgacatagatgtaaatattttatatagcaattcattgttttttacttttatttctaaatatgaaaggttcggcgtccccacgctagaggcaatgcangctggaactccagttgttacttcaaatacttcttctctgccngnaaagtgtagcgacgcagcaataatgattgatcctgacagcgaagacagtgtataa

SEQ ID NO: 12752 - protein, 288 aa, Unknown
  Obtained from environmental sample
  DOMAIN (140)...(288): Glycosyl transferases group 1
  misc_feature (1)..(288): Xaa is any amino acid
MTNNIIKKINYFLRIVKNHINLFIYFKNNSSLLKTIDIFFSPLDPANNEVKAYPSIKQFIILHDLIPVIFDKDSVKSKYHWFNILVESLNKQTYYLCNSHYTKNDFLKYYGNQLDEKKIIVIHHATSQEFYPDYNKTKLTIALDKYKIKYKNNKYIFSLCNLEPRKNLLFTVKCFIKFITKHNIEDLYFYIGGSQWNKFIYQLEKEIEKFDIYRDKIAGFGYVNDIDVNILYSNSLFFTFISKYERFGVPTLEAMXAGTPVVTSNTSSLPXKCSDAAIMIDPDSEDSV

SEQ ID NO: 12753 - DNA, 678 bp, Unknown
  Obtained from environmental sample
  misc_feature (1)..(678): n is a, c, g, or t
atgaaatttactgacggttactggcgtatcagggaaggggtagagtctcattttgccgcttgcgctattgaagcggaacggcggggagacgaattgacggtatacgctcccggaaggcagatccgccacaggacggatactcttaatatgccgcttcttacggtgcgttattccagccccatgcgtaatgttatcagagtgcgtatttcccattttgagggaggagttggcaaatatccgcgattcttgttggaaaacaattccgcagattcggcgtttaagcccgacattcgcataacggagaaagaagccgttcttgaaagcggggagctttcggtaagtgttgaacaggatcagaattggaacaatgtttttcgcggtagcggcaaagttttgaccagaaactccagtaagtccacagggtacatgattgatggtaataaagaaccttttttaaaagaagaactttctctttctgttggggaattggtgtatggacttggcgagcattttggaccgcttgtaaaaaacggacaaactattgacatttggaatgccgacagcggcacagccagtgagcaggcgtataaaaatattcctttttacatgaccaaccgtggatacggcgtgtttatcaatatacgggaaaagttctctgagatggctcggccgatctga

SEQ ID NO: 12754 - protein, 225 aa, Unknown
  Obtained from environmental sample
  misc_feature (1)..(225): Xaa is any amino acid
MKFTDGYWRIREGVESHFAACAIEAERRGDELTVYAPGRQIRHRTDTLNMPLLTVRYSSPMRNVIRVRISHFEGGVGKYPRFLLENNSADSAFKPDIRITEKEAVLESGELSVSVEQDQNWNNVFRGSGKVLTRNSSKSTGYMIDGNKEPFLKEELSLSVGELVYGLGEHFGPLVKNGQTIDIWNADSGTASEQAYKNIPFYMTNRGYGVFINIREKFSEMARPI

SEQ ID NO: 12755 - DNA, 897 bp, Unknown
  Obtained from environmental sample
  misc_feature (1)..(897): n is a, c, g, or t
atgcacagattctgcagaggcgcgtgttgccgaagttgtcagcgcttcgacgggcgtctcagcgcgaagcgcggcgaggcggaagagatcgggcgcaaccaaatagagttaataaagcagctcggcgaggcgaagaacaggcagaacatggcaaacggcgagctaagcgccgccatagacagcatgagccgccacgaacgggagatggcgaaccttaaagagcgcagcgaggagtatcgtgatgccatagaggggtgcagacggaagctggaagaggtaggttccgctaacagcggcctcatggaagcgcgcgaggcgctcctcgagcgcatagaggttgaggaggggcgctacggcgggttggtcgagagtgagaagcgtttggaggcgcgtatcgcgtcgaacgagtcgcagctcaagtttcttgaggggctcgacgcggcgtttgaggggtacggtgcgggggtgaaggctttgcttaccgcacgcctgccggggttgcgcgggatcgtcgccgacttggtgagcgtatccgacgacactatgctgccgcttgtcgagaggttggccggaaacgctgtgcagactgtggtgttcgatgacgacgcccggatggaagcggcgttggagtttttgcgccgcgagggggccggggccgcgcgggtggtgtctctagagcgtctgcgccgccatgcctccggcggccttgcggcaactcgggcgtccgccgggttgcgcgacgttcgttcgcttataaatgttgctgacgccgattgcgccccgcttgtcgatatgttcttcggcaggttcgccattgccgccgactatgcctccgccgccggcgcggcttgggaagctggcgccggctgcgctgtggcctcctcgccgacggtgtga

SEQ ID NO: 12756 - protein, 298 aa, Unknown
  Obtained from environmental sample
  misc_feature (1)..(298): Xaa is any amino acid
MHRFCRGACCRSCQRFDGRLSAKRGEAEEIGRNQIELIKQLGEAKNRQNMANGELSAAIDSMSRHEREMANLKERSEEYRDAIEGCRRKLEEVGSANSGLMEAREALLERIEVEEGRYGGLVESEKRLEARIASNESQLKFLEGLDAAFEGYGAGVKALLTARLPGLRGIVADLVSVSDDTMLPLVERLAGNAVQTVVFDDDARMEAALEFLRREGAGAARVVSLERLRRHASGGLAATRASAGLRDVRSLINVADADCAPLVDMFFGRFAIAADYASAAGAAWEAGAGCAVASSPTV

SEQ ID NO: 12757 - DNA, 840 bp, Unknown
  Obtained from environmental sample
  misc_feature (1)..(840): n is a, c, g, or t
atgaaaaataatagaaattctttagtagcaaccatgggcttcgctttgattttcccaggcggtgggcagttttatacgggacattatgttagaggcggctttttgttcgcgtttgagggagctttgttntacgaaacttttttcaacaaatttaggcagaatagaatttttaaccaaaacataaggggatacagggattcaattgctttttaccgagatttactctcttccgatgaagagccttttacttcttccgattctctcgcttgggaaaataataaaaagaaacatgaaagacttttatcaaaagagcaatctaaaaaaagagcttcaaaggatttatggacatcggagttcgcatggcttgccggcttgcatctctacgggctttttgacgcttacggaatttggagcaacaatcagggacgtagcacggaaactcactccgcggtttctgccctttggcgcgctattgtatttccgggctgggggcaaatttacaaccacgaatacggcaaagctggtttgctctatatgggcttgtttgggagcgcggttagcctttggtcgcggcagcagatggtggaataccatttaaaactgctgaggatagcaagggaagaaggagattctcaagacatttccgcaactaacgaaaacgtcctgtttttcagaaaaaaacgcaatcagtatgtttgggcattagctctgttttacatatattctatggccgatgccgctgttgacgcaatgctccacgattttgatagccctgcgtattttgttatgtacccgacatttaacaagggtttaaatgtagaagcgggatttcatttctaa

SEQ ID NO: 12758 - protein, 279 aa, Unknown
  Obtained from environmental sample
  SIGNAL (1)...(22)
  misc_feature (1)..(279): Xaa is any amino acid
MKNNRNSLVATMGFALIFPGGGQFYTGHYVRGGFLFAFEGALXYETFFNKFRQNRIFNQNIRGYRDSIAFYRDLLSSDEEPFTSSDSLAWENNKKKHERLLSKEQSKKRASKDLWTSEFAWLAGLHLYGLFDAYGIWSNNQGRSTETHSAVSALWRAIVFPGWGQIYNHEYGKAGLLYMGLFGSAVSLWSRQQMVEYHLKLLRIAREEGDSQDISATNENVLFFRKKRNQYVWALALFYIYSMADAAVDAMLHDFDSPAYFVMYPTFNKGLNVEAGFHF

SEQ ID NO: 12759 - DNA, 732 bp, Unknown
  Obtained from environmental sample
  misc_feature (1)..(732): n is a, c, g, or t
gtgctggacggacgggttaagtcccaggcgactattcagtcggcaatccgtgacgcggtacggctgacgggctttggacaggacgaggcaaataacatcgccctgacattgcgaacagcggctttgccggttgaacttgaagttgccaaccagcagagtatcggcgcttcaatgggtgaagatacgatacggcagggtatgtacgccctgctcggcggcattgtggcggtttttatttttatgctcttgtactatcggtctgcgggcgtaaacgctattgtcgcccagttacttaacttctatcttatgttcagtattctttccgcgtttaactttacgatgaccctgccaagtattgccggttttattttgactatcggtatggcggttgacgccagcgtcattatctttgagcgcatgaaagaagagatgcgtttgggcaaaggcagaaaggccgtaattgaagcgggttttgataaggctttctgggcgattatggactccaatatcaccacctttattgccgccctgttcctttcacaacttggttccggccccattcagggatttgccgtaacgcttgccgttggggtcttctcctcggtgtttaccgccctgtttgtgtcgcggctgttatttgatttcagcacagacgtactgcacgctaaaaaagtttcagtaacatggtctcgaatacgggtcgaaggcgacgccgtacagggggcaaaataa

SEQ ID NO: 12760 - protein, 243 aa, Unknown
  Obtained from environmental sample
  DOMAIN (33)...(218): Protein export membrane protein
  misc_feature (1)..(243): Xaa is any amino acid
MLDGRVKSQATIQSAIRDAVRLTGFGQDEANNIALTLRTAALPVELEVANQQSIGASMGEDTIRQGMYALLGGIVAVFIFMLLYYRSAGVNAIVAQLLNFYLMFSILSAFNFTMTLPSIAGFILTIGMAVDASVIIFERMKEEMRLGKGRKAVIEAGFDKAFWAIMDSNITTFIAALFLSQLGSGPIQGFAVTLAVGVFSSVFTALFVSRLLFDFSTDVLHAKKVSVTWSRIRVEGDAVQGAK

SEQ ID NO: 12761 - DNA, 309 bp, Unknown
  Obtained from environmental sample
  misc_feature (1)..(309): n is a, c, g, or t
ttgttatttttgaccgtatcagggaaaaaccgccgtatctaccncgatgaagtgtttgtcaccgtgctgaaccgctccttgaccgaaacattaagcaggacgatcatcactacattaacaactatgctggcgatagtgtccctgtttatttttaccaccggctcgatgaaagactttgcccttgctttgctggttggtatggtctccggcgtatacacttccatcttcatcgcttccggatttgtgtctttctgggagaaacagaaggctaagcggggaaagaacaaacaaataacagctaacaagtaa

SEQ ID NO: 12762 - protein, 102 aa, Unknown
  Obtained from environmental sample
  DOMAIN (1)...(88): Protein export membrane protein
  misc_feature (1)..(102): Xaa is any amino acid
MLFLTVSGKNRRIYXDEVFVTVLNRSLTETLSRTIITTLTTMLAIVSLFIFTTGSMKDFALALLVGMVSGVYTSIFIASGFVSFWEKQKAKRGKNKQITANK

SEQ ID NO: 12763 - DNA, 714 bp, Unknown
  Obtained from environmental sample
  misc_feature (1)..(714): n is a, c, g, or t
gtggacacgtatcagggcaatccggttgtcgcctactttgacgcgcagaatcaaaccctgaggcttgcctatgccaacagcgccactcccaccaacggcaacaactggacacggcgttatgtgcttgcggccaacgatcccctgcgtctgggttccggctcatacgtaagcatgaagattgaccataacaaccggattcatctggccttctacaacagcacctacaaagcggttgtatacgcgaccgcaaccagtccgagcggcacctttaccgccagcgtcattgaccgcgttgttgagggcggccaatggacggatatcgcggtagacagaaacggcaacccctggattgtgtacgcggactcatcccgtatcaaaaaccgcgacggcgtgcgtatcgcgtacaggagctatggcagttccgccgacaccatcggcgccaccggcgccgctcccgccggcgcgtttggcagagcattgaccgatccgattagcaaccagagcataagaggctgggaagccataaccatgccggcgaattacaatgtcaaggacgaccgcctgaacatagaatcctggccgccctccggcggcgccgccggcctggccgccaactgccccatcggcaactggaacgccgcggtcggctacggcagcgacctgttcaggattggctacttctttaagccaggggacagcggggtaacgaggtag

SEQ ID NO: 12764 - protein, 237 aa, Unknown
  Obtained from environmental sample
  misc_feature (1)..(237): Xaa is any amino acid
MDTYQGNPVVAYFDAQNQTLRLAYANSATPTNGNNWTRRYVLAANDPLRLGSGSYVSMKIDHNNRIHLAFYNSTYKAVVYATATSPSGTFTASVIDRVVEGGQWTDIAVDRNGNPWIVYADSSRIKNRDGVRIAYRSYGSSADTIGATGAAPAGAFGRALTDPISNQSIRGWEAITMPANYNVKDDRLNIESWPPSGGAAGLAANCPIGNWNAAVGYGSDLFRIGYFFKPGDSGVTR

SEQ ID NO: 12765 - DNA, 822 bp, Unknown
  Obtained from environmental sample
  misc_feature (1)..(822): n is a, c, g, or t
gtgagcgaccaagagcaaataaaggagctatttccaaatacttatggcgcacctattttaactttcaaaacctcaacaaaaaaacaagccacaggcacaccactaaatgttggcgttgttctctccggtgggcaggctccgggcgggcacaatgttattgctggaatttttgacggaataaaagccgtcaagagcacttcaaaactctacggttttttgggcggccccagcgggcttgttgacggaaaatatattcagatagagcgtgaattaatggcaaaataccgcaacacaggcggctttgacataatccaaagcggcagaacaaagctggaaagcaccgagcaatttgacaagtgcatagaagttgtgaaaaaactcaagctaaacgctattataattataggcggagacgattcaaacacaaatgctgcggttttggcagaatattttgcgaataaaaaagttccttgttccgttataggttgcccaaaaaccatagacggcgacctgaaaaacgaatatatagaagtctcttttggctttgacaccgcggttaaaacctattccgaacttataggcaacattgagcgcgattccaattcagcccaaaaatattggcacttcattaaacttatgggacgttccgcaagccatataggtttagaggctgcgcttcaaacacatccaaacatttgcttgatttctgaagagattaaagaaaagaaaatgactcttcaacaggttgtgaattcaatgaccgatattatcattgctcgttcagaaaagaaaaagaattttgtgagccctatttcgcgataa

SEQ ID NO: 12766 - protein, 273 aa, Unknown
  Obtained from environmental sample
  DOMAIN (36)...(272): Phosphofructokinase
  misc_feature (1)..(273): Xaa is any amino acid
MSDQEQIKELFPNTYGAPILTFKTSTKKQATGTPLNVGVVLSGGQAPGGHNVIAGIFDGIKAVKSTSKLYGFLGGPSGLVDGKYIQIERELMAKYRNTGGFDIIQSGRTKLESTEQFDKCIEVVKKLKLNAIIIIGGDDSNTNAAVLAEYFANKKVPCSVIGCPKTIDGDLKNEYIEVSFGFDTAVKTYSELIGNIERDSNSAQKYWHFIKLMGRSASHIGLEAALQTHPNICLISEEIKEKKMTLQQVVNSMTDIIIARSEKKKNFVSPISR

SEQ ID NO: 12767 - DNA, 747 bp, Unknown
  Obtained from environmental sample
  misc_feature (1)..(747): n is a, c, g, or t
atgtcagaaaaaaaattaattattggggctatcgccggagatattattggctcggtattcgaatggcataatgttaagacagttgaatttgacttattttgccctgactcaaaattcaccgatgatagcgttcttacattggcaacaatggacgctttattgcatcagaaaggttattctgaaacatatcaatcatttggcagaaattatcctcatagaggttatggcggtaattttaaatcatggatatattcggaaaatccaaagccatataacagctatggaaacggttccgcaatgagggtcagtcctgttggatggtatgccgacagccttgatgacgcgatggcggaagcgcagaagagcgcggaagttacccacaatcatccggaggggataaaaggggctaaatctgtcgcctctgcggtttatatggcgcgaaacggcaaaagcaaggatgaaataaagacttttattactgaaactttcggctataatcttgaccggaaaattgatgatataaggcccaaatatgaatttgatgtaagctgtcaaggttcagtcccggaagcaatcattgcctttttggaaagtacggattttgaaaacgccgtacggttggcagtatctttgggcggagacagtgatacaatagcctgtatcaccggcggaattgcagaaagctattatcaggatattccagaaaatattacagaaaatgtccttaatattttaccctatcaatga

SEQ ID NO: 12768 - protein, 248 aa, Unknown
  Obtained from environmental sample
  DOMAIN (3)...(248): ADP-ribosylglycohydrolase
  misc_feature (1)..(248): Xaa is any amino acid
MSEKKLIIGAIAGDIIGSVFEWHNVKTVEFDLFCPDSKFTDDSVLTLATMDALLHQKGYSETYQSFGRNYPHRGYGGNFKSWIYSENPKPYNSYGNGSAMRVSPVGWYADSLDDAMAEAQKSAEVTHNHPEGIKGAKSVASAVYMARNGKSKDEIKTFITETFGYNLDRKIDDIRPKYEFDVSCQGSVPEAIIAFLESTDFENAVRLAVSLGGDSDTIACITGGIAESYYQDIPENITENVLNILPYQ

SEQ ID NO: 12769 - DNA, 534 bp, Unknown
  Obtained from environmental sample
  misc_feature (1)..(534): n is a, c, g, or t
atgacaagtaaaaatcaagagaaattatgcgccgccgcaattttttcggacaacatggttttacaacacggcaaacctgttcctttttggggaacaggcggcgttgaaggctcgtctgtttttgtaatctgggaaagtacaaaaaatacagtaaaaaaagaaacaaaagtccgcgattccaaatggagacttacactccctcctttgaccgtcggcgtatccggtgaaattattattaagaatgaaaccgatgaacttcgttttaccaatgtaataacgggcgatgtatggtttgcaggcggccaaagcaatatggaaatggagcttgtaaactgtaaaaacggaaaagaagaacttgcttcctgcgctaactccaacatacgtttttatcaagttgttaaacgcgctgttgtagatgataaccatctgcgtgaagaatctgaaagctgctggaaggaatgtaaacccgaaacggcggcaatgcttagcgccgccgcgtttttctttgcgcgaaaaattaacgcccgaaattaa

SEQ ID NO: 12770 - protein, 177 aa, Unknown
  Obtained from environmental sample
  misc_feature (1)..(177): Xaa is any amino acid
MTSKNQEKLCAAAIFSDNMVLQHGKPVPFWGTGGVEGSSVFVIWESTKNTVKKETKVRDSKWRLTLPPLTVGVSGEIIIKNETDELRFTNVITGDVWFAGGQSNMEMELVNCKNGKEELASCANSNIRFYQVVKRAVVDDNHLREESESCWKECKPETAAMLSAAAFFFARKINARN

SEQ ID NO: 12771 - DNA, 381 bp, Unknown
  Obtained from environmental sample
  misc_feature (1)..(381): n is a, c, g, or t
ttgaacgggtgtcgttcggcagttgttgattatggggggattatgggtaaaattgataatgataacgatggcgactacaatttcatcgacagcaatgatgacgaagatgatgctgatgacatatcatttgacttcttaacgccgcaagaatcatccaaaccctacaccgtgagcgaaatcaattccggcattgcccaaattattgaagaacgcaataccttggtttgggtagagggcgaattgagcggttggaagcgctacccgagcgggcactgctactttaagttgaaggacgagcgcagccaaattccgggtgtgatgtggaagtcagcggcggtcaagctcaattttaatcctagcgacggtctcggccgattctga

SEQ ID NO: 12772 - protein, 126 aa, Unknown
  Obtained from environmental sample
  misc_feature (1)..(126): Xaa is any amino acid
MNGCRSAVVDYGGIMGKIDNDNDGDYNFIDSNDDEDDADDISFDFLTPQESSKPYTVSEINSGIAQIIEERNTLVWVEGELSGWKRYPSGHCYFKLKDERSQIPGVMWKSAAVKLNFNPSDGLGRF

SEQ ID NO: 12773 - DNA, 561 bp, Unknown
  Obtained from environmental sample
  misc_feature (1)..(561): n is a, c, g, or t
atggacgagccgatctcgctacgcccgctgaattcccttcccgcaaacctcggccacggatggacgctcttcacgctgaccgacgggcggatgatcggcgtggtcaacctgatgggccgcacgttcatgcatgagtcgttggactgcccgttccgcttgggccttgaggcaatcaacaaattacgcgagcagacgccgataatactggtggactttcatgccgaggcgacaagcgaaaaggccgcattagccttctatgtagatggtttagccagtgcggttatcggcacgcatacccacgttcagacagcggatgagcggatattgccgaaagggacggcgttcattacggacgtcggaatgaccgggccggaacattcgattatagggatgaagccggaaggggtaatcaaaaaatatttattgcaaacctacgtgcgatatgaaccgagcgaggacggagcgatgattaacggggtcatcatagaagttgacgatgagagcgggaaggcgttatcgataaagcggttgtttgaacgggtgtcgttcggcagttgttga

SEQ ID NO: 12774 - protein, 186 aa, Unknown
  Obtained from environmental sample
  misc_feature (1)..(186): Xaa is any amino acid
MDEPISLRPLNSLPANLGHGWTLFTLTDGRMIGVVNLMGRTFMHESLDCPFRLGLEAINKLREQTPIILVDFHAEATSEKAALAFYVDGLASAVIGTHTHVQTADERILPKGTAFITDVGMTGPEHSIIGMKPEGVIKKYLLQTYVRYEPSEDGAMINGVIIEVDDESGKALSIKRLFERVSFGSC

SEQ ID NO: 12775 - DNA, 561 bp, Unknown
  Obtained from environmental sample
  misc_feature (1)..(561): n is a, c, g, or t
ttggcggtttctacaagtttccaaacgtcaatcgaatgtgaagaattgggcatcccgctttttactttgaattcgagggagataaacgcaaagctcgatctttgtattgacggcgccgatgaagtggatactgaaaacaggctgataaaaggcggcggcggcgccctgttgcctgaaaagatcgcggcctatgcttcggcttcttacgctatcgtggtagatgaatcaaaaatcgttgaaagcctaggcgttaaatttcctgtgcctgtagaggtggtcagcgaagcaagggtgagcgccgctctggctcttgaaagcttgggcgctaaggtaacccttaggcaggctttgcgcaaggccgggcctgtcattaccgaccacggcaaccttcttttggacatacgcttcgcaaaagcccccgatccggttcttatggaaagggaaatcaaccgcatcgccggcgtggttgaaaacggtttcttcaccggccctcatgacaggcccctacgcccggttgtttttatagcccatgcggatggcacggttgagaaacggtcttaa

SEQ ID NO: 12776 - protein, 186 aa, Unknown
  Obtained from environmental sample
  DOMAIN (1)...(182): Ribose 5-phosphate isomerase A (phosphoriboisomerase A)
  misc_feature (1)..(186): Xaa is any amino acid
MAVSTSFQTSIECEELGIPLFTLNSREINAKLDLCIDGADEVDTENRLIKGGGGALLPEKIAAYASASYAIVVDESKIVESLGVKFPVPVEVVSEARVSAALALESLGAKVTLRQALRKAGPVITDHGNLLLDIRFAKAPDPVLMEREINRIAGVVENGFFTGPHDRPLRPVVFIAHADGTVEKRS

SEQ ID NO: 12777 - DNA, 312 bp, Unknown
  Obtained from environmental sample
  misc_feature (1)..(312): n is a, c, g, or t
atgatggctaaggaaggaattcgcgtaaagttacgcggtttcgatgtggaattgatagaccaaagcgcgaaatcaattgttcaggcagtgcaaaaggccggggcgaaagttaccggcccaatcccgctgcccacccgcatcaacaaaatgacggtgcttcgttcacctcatgtgaataaaaagagccgtgagcagtttgagatgcggacgcataaacggctcatagatattatcaatccgtcggcggaagtgatggattcattgatgaagcttgagcttcccgccggtgtggatgtggaaattaaacaatag

SEQ ID NO: 12778 - protein, 103 aa, Unknown
  Obtained from environmental sample
  DOMAIN (6)...(101): Ribosomal protein S10p/S20e
  misc_feature (1)..(103): Xaa is any amino acid
MMAKEGIRVKLRGFDVELIDQSAKSIVQAVQKAGAKVTGPIPLPTRINKMTVLRSPHVNKKSREQFEMRTHKRLIDIINPSAEVMDSLMKLELPAGVDVEIKQ

SEQ ID NO: 12779 - DNA, 693 bp, Unknown
  Obtained from environmental sample
  misc_feature (1)..(693): n is a, c, g, or t
atggcaattaaaacatataaaccaattacgcccggcatgaggcagtggacaagcctggatttctcggatcttacacctaacacaaaaccggaaaaaaaacttacagcgggcaagccggcgaacgccggccgggattccaacggcaggatcagcgtgcgccacaagggcggcggacacaagcgccgctaccgtgaaattgatttcaagcgcgacaaaaccggcattcccggcaaggtcgcttccattgaatacgatccgaaccgcagcgccaatatcgcacttattttttacaaggacggcgagaagcgctacatcatagcccccaaaggtctggctgtcggcagcacaattgtcagcggaccaaacgccccgattgaaaccggtaacgccctgccccttgagaacatccccctgggttttaccatttgcagtatagagctgacccttggcaaaggggcgcagatggcccgttctgcaggagccggcgcgctaatcgtagccaaagaaggcgactatgtaaccgtaaagctgccttccggggaagtccgcatggtgttcaagaagtgttacgcgacaattgggtccatcggcaacgaggatcacatgaacacctctttgggaaaagccggacgcaaacgctggatgggcgtgcgccctacgtcagggaactcggccaatctgatccatgtntga

SEQ ID NO: 12780 - protein, 230 aa, Unknown
  Obtained from environmental sample
  DOMAIN (125)...(229): Ribosomal Proteins L2, C-terminal domain
  misc_feature (1)..(230): Xaa is any amino acid
MAIKTYKPITPGMRQWTSLDFSDLTPNTKPEKKLTAGKPANAGRDSNGRISVRHKGGGHKRRYREIDFKRDKTGIPGKVASIEYDPNRSANIALIFYKDGEKRYIIAPKGLAVGSTIVSGPNAPIETGNALPLENIPLGFTICSIELTLGKGAQMARSAGAGALIVAKEGDYVTVKLPSGEVRMVFKKCYATIGSIGNEDHMNTSLGKAGRKRWMGVRPTSGNSANLIHV

SEQ ID NO: 12781 - DNA, 441 bp, Unknown
  Obtained from environmental sample
  misc_feature (1)..(441): n is a, c, g, or t
atgaaaagaattggcttttttctaattgttgttttaatgagcgctcctttcgtaaatgccgacgaaacaccgacaaggctcaggttttctgagtttttcgcgtccggaagttccaggggcctggttttctcggaaaaacttaaggagcttaacggaagcagcgtggtcatgtccggttacatggcgcctcccctcaagccgtccctggacttttttgtattgacaatgcagccaatggccatctgcccattctgtgattctgacgcaagctggccgtctaatatcgtagtggtgtacctcaaaagcggaagaaccattaccgcgactactaataccctgcaagttacaggcacattggaaataggaaggcacgtagatgaaactacaggttttataagccaaatcagaatttacgccgatacaatcgaatctataagatag

SEQ ID NO: 12782 - protein, 146 aa, Unknown
  Obtained from environmental sample
  SIGNAL (1)...(20)
  misc_feature (1)..(146): Xaa is any amino acid
MKRIGFFLIVVLMSAPFVNADETPTRLRFSEFFASGSSRGLVFSEKLKELNGSSVVMSGYMAPPLKPSLDFFVLTMQPMAICPFCDSDASWPSNIVVVYLKSGRTITATTNTLQVTGTLEIGRHVDETTGFISQIRIYADTIESIR

SEQ ID NO: 12783 - DNA, 810 bp, Unknown
  Obtained from environmental sample
  misc_feature (1)..(810): n is a, c, g, or t
ttggccganactgacggttacggcgacgggacgctgcctctcagcgtcattgaatcgcaggaggagatcaaccccgacaccttggtctccataatgtgggcgaacaacgagaccggcgtggttttccccatagacgacctcgcccaggcggtcaaggcccggggcgggttcttccatacggacgcggtgcaggcggcggggaaggtcgccatagacgtgaaaaaggttccggtggacatgctggccttctccggccacaagatacatgcgcccaagggagtgggggcgtcatatttcaggaaggggacgcccgtgagggctatcatccacggcgggcaccaggagggcggggttcgcgccgggacggagaacgtcccctacattgtgggcctggggcgcgcctgcgaactggccgcggagcgcatagccgacgagaatacaagggtacgggccctgcgcgacaggctggaaaaggcgctcttggaaaagtgcgccggtgccaagctcaacgggcaccccacggagcgcctgccgaacaccgcgaacatcagcttcgagaacatagagggcgaggcgatcctcctgcacttggacgaggtcggcatagccgccagctccggctccgcctgcacgaccggctctttggagccctcccacgttatgatggccatgggcatcccctacaactacgcccacagctccatccgcttctcgctaagcgtgtacagcaccgacgcggaggtggacagggtgatagagtttatgcccggaatagttgagaagcttaggggattgtcgccgtttgtgtga

SEQ ID NO: 12784 - protein, 269 aa, Unknown
  Obtained from environmental sample
  DOMAIN (1)...(251): Aminotransferase class-V
  misc_feature (1)..(269): Xaa is any amino acid
MAXTDGYGDGTLPLSVIESQEEINPDTLVSIMWANNETGVVFPIDDLAQAVKARGGFFHTDAVQAAGKVAIDVKKVPVDMLAFSGHKIHAPKGVGASYFRKGTPVRAIIHGGHQEGGVRAGTENVPYIVGLGRACELAAERIADENTRVRALRDRLEKALLEKCAGAKLNGHPTERLPNTANISFENIEGEAILLHLDEVGIAASSGSACTTGSLEPSHVMMAMGIPYNYAHSSIRFSLSVYSTDAEVDRVIEFMPGIVEKLRGLSPFV

SEQ ID NO: 12785 - DNA, 684 bp, Unknown
  Obtained from environmental sample
  misc_feature (1)..(684): n is a, c, g, or t
gtgggcgaacaacgagaccggcgtggttttccccatagacgacctcgcccaggcggtcaaggcccggggcgggttcttccatacggacgcggtgcaggcggcggggaaggtcgccatagacgtgaaaaaggttccggtggacatgctggccttctccggccacaagatacatgcgcccaagggagtgggggcgtcatatttcaggaaggggacgcccgtgagggctatcatccacggcgggcaccaggagggcggggttcgcgccgggacggagaacgtcccctacattgtgggcctggggcgcgcctgcgaactggccgcggagcgcatagccgacgagaatacaagggtacgggccctgcgcgacaggctggaaaaggcgctcttggaaaagtgcgccggtgccaagctcaacgggcaccccacggagcgcctgccgaacaccgcgaacatcagcttcgagaacatagagggcgaggcgatcctcctgcacttggacgaggtcggcatagccgccagctccggctccgcctgcacgaccggctctttggagccctcccacgttatgatggccatgggcatcccctacaactacgcccacagctccatccgcttctcgctaagcgtgtacagcaccgacgcggaggtggacagggtgatagagtttatgcccggaatagttga

SEQ ID NO: 12786 - protein, 227 aa, Unknown
  Obtained from environmental sample
  misc_feature (1)..(227): Xaa is any amino acid
MGEQRDRRGFPHRRPRPGGQGPGRVLPYGRGAGGGEGRHRREKGSGGHAGLLRPQDTCAQGSGGVIFQEGDAREGYHPRRAPGGRGSRRDGERPLHCGPGARLRTGRGAHSRREYKGTGPARQAGKGALGKVRRCQAQRAPHGAPAEHREHQLREHRGRGDPPALGRGRHSRQLRLRLHDRLFGALPRYDGHGHPLQLRPQLHPLLAKRVQHRRGGGQGDRVYARNS

SEQ ID NO: 12787 - DNA, 648 bp, Unknown
  Obtained from environmental sample
  misc_feature (1)..(648): n is a, c, g, or t
atggcgcagaaccgcgagaaattcaacaaaataatggaaggtagcaacgcccaaatcgagacggtcaggcagcagcaaatagcgataagttcctcagccgcggagcttgtccgcgtggagaagctgctcgaaaatctcaagcaggagatggatcagatcaatcgccgcacgagcaagatcgaggccatcgacgcgcggataagcagcgtggacacggtcgtctccgacatggaaatacgcatagagtctatagacaagggcagggagcttgtcaacacgacgcagaagaagatagacggcttgaacgacatgcttggcctagcctcctcgcgcatagacgacataagcgagcggtcgaaagacattgacgaggtcgggcgcaaagtcggcgagatgtcgggtatgatggagtcggtggagcgccgcataagggaactcgcgagagagaagcagttgataaaggaggccgagaaccgcatatcgagcctcacaattctcgtggaagacgtaaaggcggcgatgaccaacctctccgcggagcaacaacgcattcaggaagcggtcgaaaaggcgtcggagttgcggttcttgcttggcgaggtggagtacaagctgaatctgttcaagcaacagaaagagcagatgtga

SEQ ID NO: 12788 - protein, 215 aa, Unknown
  Obtained from environmental sample
  misc_feature (1)..(215): Xaa is any amino acid
MAQNREKFNKIMEGSNAQIETVRQQQIAISSSAAELVRVEKLLENLKQEMDQINRRTSKIEAIDARISSVDTVVSDMEIRIESIDKGRELVNTTQKKIDGLNDMLGLASSRIDDISERSKDIDEVGRKVGEMSGMMESVERRIRELAREKQLIKEAENRISSLTILVEDVKAAMTNLSAEQQRIQEAVEKASELRFLLGEVEYKLNLFKQQKEQM

SEQ ID NO: 12789 - DNA, 804 bp, Unknown
  Obtained from environmental sample
  misc_feature (1)..(804): n is a, c, g, or t
ttgccgtggccgtcaagacccgggacctccgagggattcagggacgcgtggtgcgtgcgtgggagcaaccgctacctagtgcgggcgtggatgggcaacgctgacaaccgttcaatgaagcgggtgaccggctacgacggcgcggccccgctggttaagaagatcatgctgcacctccacccgaacgaacgcgacgggctctacgagggcagttttcccgtaccagaggggtggcagccgttttctatttgccgcttgaccggaatgctcgccaacgagaacacgccctacgttacgagcgactactttgccctcggcacggagcccacggaggcgagcgccgtgcagcgcgtgatgttggtagacaaacgcaacggcctgctcgccaatccgcgctgtccaaagcggcaaatggagtataggcaatttttggtgctgtcgccggagtacgagcagtgggggcgcgcctacgggttgcccatagccccgcgcctgtacagcccgctatgcccgggcggcgagagcctgccggtggactacgcgctggagatcacctggccgcggtcgggcgcccgcttcttcattgaccccgagtcgccgcccgaccaagtgttcctgccggtcaactgcgttgtggagccggaagcgcagagccttttgtggtttgtcaacggggaggagcacacggtaacgaatccgccgcacacgctgcggctgccgtttaagagcgggaagtacacagtccaagcggcggtggcggggacgccggtgcgtagcagggttgttcggtttgaggtttattag

SEQ ID NO: 12790 - protein, 267 aa, Unknown
  Obtained from environmental sample
  misc_feature (1)..(267): Xaa is any amino acid
MPWPSRPGTSEGFRDAWCVRGSNRYLVRAWMGNADNRSMKRVTGYDGAAPLVKKIMLHLHPNERDGLYEGSFPVPEGWQPFSICRLTGMLANENTPYVTSDYFALGTEPTEASAVQRVMLVDKRNGLLANPRCPKRQMEYRQFLVLSPEYEQWGRAYGLPIAPRLYSPLCPGGESLPVDYALEITWPRSGARFFIDPESPPDQVFLPVNCVVEPEAQSLLWFVNGEEHTVTNPPHTLRLPFKSGKYTVQAAVAGTPVRSRVVRFEVY

SEQ ID NO: 12791 - DNA, 669 bp, Unknown
  Obtained from environmental sample
  misc_feature (1)..(669): n is a, c, g, or t
gtgccggatcctgtcgagcctgctggaacggattatagcgaggaattttgcattgccaaggattttgacgaagcgtttatcggccgtctcatggcggctggttttttggtcatgtccatggagcttaaagacgaggattccggcgatgaagataaaaacgaagatgcggagcctttttacattctgcttcccaagctccacctgattcgctcggcattgttttttcccgacctgcacataaaaaaaagcatccgccactctctttcgcgttacgagctgcgtgtagacacagatttcgattttattcttgataagtgcgtgcatatccacggttcggactggcttaccccgcctcttgtagaaattatcaaaagcatccaccgcgacagcgaggacgcaaggcccgtctctttcgcggtttaccgtgaaggcgaactaaaagccggcgaaataggcgttgtagtcgggcgggtttacaccagctactcaggctactacgaagaagacaacgccggaaccgttcagatgatcttgatgacccgctggctcgaagaaaacggttttacttttctagatctgggaatgccccttgattacaaaaccggccttggggcgaaagatatttctccggacagatttgtggagctgttcaggggggcacggggttga

SEQ ID NO: 12792 - protein, 222 aa, Unknown
  Obtained from environmental sample
  DOMAIN (56)...(210): Leucyl/phenylalanyl-tRNA protein transferase
  misc_feature (1)..(222): Xaa is any amino acid
MPDPVEPAGTDYSEEFCIAKDFDEAFIGRLMAAGFLVMSMELKDEDSGDEDKNEDAEPFYILLPKLHLIRSALFFPDLHIKKSIRHSLSRYELRVDTDFDFILDKCVHIHGSDWLTPPLVEIIKSIHRDSEDARPVSFAVYREGELKAGEIGVVVGRVYTSYSGYYEEDNAGTVQMILMTRWLEENGFTFLDLGMPLDYKTGLGAKDISPDRFVELFRGARG

SEQ ID NO: 12793 - DNA, 300 bp, Unknown
  Obtained from environmental sample
  misc_feature (1)..(300): n is a, c, g, or t
ttgggaacggacagcgcaccgcattccttggaaaaaaaggaatgtctgtgtggagctgctggggtttattccgctccggttgccattccaattttgatagaggaatttgaaaaagagaataaattggatttgctctcggattttctctccgttttgggttcggatttttatcaaatcccacggcaaacaaaaaaagttgtttacataaaagagaaatggcaggtgccaagcaccatagacggggcagtgccgctcagagcaggagaaactttggaatggcagaggaaaatagatgtttga

SEQ ID NO: 12794 - protein, 99 aa, Unknown
  Obtained from environmental sample
  misc_feature (1)..(99): Xaa is any amino acid
MGTDSAPHSLEKKECLCGAAGVYSAPVAIPILIEEFEKENKLDLLSDFLSVLGSDFYQIPRQTKKVVYIKEKWQVPSTIDGAVPLRAGETLEWQRKIDV

SEQ ID NO: 12795 - DNA, 756 bp, Unknown
  Obtained from environmental sample
  misc_feature (1)..(756): n is a, c, g, or t
gtgcgttatgtgcttggccttaaggaaaagggcgcaatccgcgccataggagcaagctgccacaacagcgaaatagcgggacgcattgccgaaaccggaatagttgaccttatcatgttcagtgtgaatcctgtttttgatatgactccggttaattccgatatttatgaacttcttgataataaaaaacttaaaaagaactacactcttgccattgatccggaacgcttgcgcttttatcagatttgcgaacagaagcaggtttccataacggttatgaaaacactcctggcggggaaattgcttcaggcggaattttcgcccctgggcagggccatgacggcaagccagtgcattcactatgcccttacccgcccggctgttgccagcgttcttttgggctgcaagagcgaaaaggagttgaatgacgctctttattatcttgaggcgggcgaggatgaacgggactatagccagattatcctgaattttaagggaacgtctcaattcggctgtctttactgtaaccattgccagccttgtccttccaatatagacattgcggctgtaacccgctatgccgatatcgctgaactaaatgccgcaaacataccccccgcagtagtgcagcattataaagcccttccgcgccgcggttcagactgtgtttcctgtgctaagtgcgaggggaaatgtccgtttgctgtaccggtaatcaggaatatgaagaaggctgtaacgctttttggtatataa

SEQ ID NO: 12796 - protein, 251 aa, Unknown
  Obtained from environmental sample
  misc_feature (1)..(251): Xaa is any amino acid
MRYVLGLKEKGAIRAIGASCHNSEIAGRIAETGIVDLIMFSVNPVFDMTPVNSDIYELLDNKKLKKNYTLAIDPERLRFYQICEQKQVSITVMKTLLAGKLLQAEFSPLGRAMTASQCIHYALTRPAVASVLLGCKSEKELNDALYYLEAGEDERDYSQIILNFKGTSQFGCLYCNHCQPCPSNIDIAAVTRYADIAELNAANIPPAVVQHYKALPRRGSDCVSCAKCEGKCPFAVPVIRNMKKAVTLFGI

SEQ ID NO: 12797 - DNA, 789 bp, Unknown
  Obtained from environmental sample
  misc_feature (1)..(789): n is a, c, g, or t
atgctggcgatcccggtattcggcatgtttttcgaagctttggggagagggaatactacaagggtaagccggagctatctggcgtgcagctttttactttgcctgacccaaatattattttgcgcccaatacggtgaagaagtcataagaatatgggatataattaccatgatttatgtcacttaccttctcgtgtacgaagttatatattttcatctttggaacaggcaaaagggaaagtttttgggaagcgataccggcgaagcccgattcctgccaatcggcaacattctggtcggcatggtgatatgctacttatgcgggctttttgatactctgtacattttaatttacggcgactctatgtctctttttccatacagtgtatttgtggtttacgtcgggatggtttttgtcctttcccggcggttcagcggaatgtataagcagttagaacaatccaacgtcgtattggaaacaacagtaaaggaacgaaccctggaacttgaggaacagacagccatagcggtgcaggcttcccgcgcaaaaagcgaattcctcgcgaccatgagccacgaaatacgcactcccctgaacgcggtaatcggtctatctgaaattgaactacaaggctatcaagccggctttcaagccaacaggctgcctgactccagcagggaaaatataattcagatacaccagtcaggcgcttcgcttttagggatttatcacgacattcttgacattttcaaaatcgaagctcggaagtttgaacttgtttccggctga

SEQ ID NO: 12798 - protein, 262 aa, Unknown
  Obtained from environmental sample
  DOMAIN (182)...(255): His Kinase A (phosphoacceptor) domain
  misc_feature (1)..(262): Xaa is any amino acid
MLAIPVFGMFFEALGRGNTTRVSRSYLACSFLLCLTQILFCAQYGEEVIRIWDIITMIYVTYLLVYEVIYFHLWNRQKGKFLGSDTGEARFLPIGNILVGMVICYLCGLFDTLYILIYGDSMSLFPYSVFVVYVGMVFVLSRRFSGMYKQLEQSNVVLETTVKERTLELEEQTAIAVQASRAKSEFLATMSHEIRTPLNAVIGLSEIELQGYQAGFQANRLPDSSRENIIQIHQSGASLLGIYHDILDIFKIEARKFELVSG

SEQ ID NO: 12799 - DNA, 687 bp, Unknown
  Obtained from environmental sample
  misc_feature (1)..(687): n is a, c, g, or t
ttgcaggctcacaacctggaactgctaaaacagatgactttttacgccgcgggacacgactgccttcgccgccgcctgcttgcctacttcggggaaaaagctcccgcaaactgcgacaactgttcaaactgcctgacggagttttcagagactgacattaccgtagaagcgcaaaagattgtttcctgcgtataccgtcttaaacagcgcggtcgtaattttgggaagaccatgattattgacatcctgcgcggcagcaaaaacgaaaagcttctccgtctgggttttgataccctcagcacttatgcaattatgactgatacaagcgcgcacaggattcgccttatcattgatcacctgatagacaaaggttttttgctgcttgaagagggagagtatcctgttgtaatgcttggcaacgccgaaagagttttcagggaagaagagcgtgtttttatgaaactgccgcaagaacgcgaaaaggcgtcggataagaaaatgtctcaacaaaagagtataaaattcattgacacgcanaatgcatctgatgaaaaaacgcagaaacaaagcggcgcgaaattttttgaagcgcagaatgtgtttgatgagaaaatgccaaaaacagacgatgcaaaacttttgggaaaagcaaaatttgtctgcggatatggacgatgctttgtttga

SEQ ID NO: 12800 - protein, 228 aa, Unknown
  Obtained from environmental sample
  misc_feature (1)..(228): Xaa is any amino acid
MQAHNLELLKQMTFYAAGHDCLRRRLLAYFGEKAPANCDNCSNCLTEFSETDITVEAQKIVSCVYRLKQRGRNFGKTMIIDILRGSKNEKLLRLGFDTLSTYAIMTDTSAHRIRLIIDHLIDKGFLLLEEGEYPVVMLGNAERVFREEERVFMKLPQEREKASDKKMSQQKSIKFIDTXNASDEKTQKQSGAKFFEAQNVFDEKMPKTDDAKLLGKAKFVCGYGRCFV

SEQ ID NO: 12801 - DNA, 699 bp, Unknown
  Obtained from environmental sample
  misc_feature (1)..(699): n is a, c, g, or t
gtgggaggtttggaagagcgcgccgccgcgataaaaaaagagttgaaggggcttgaggagaggttcggaaagtacgagaaattggagcagataaacgaggtcattaaaagtaaagagggggaatttgaccaaatagaaaagaagaacaagaagctaaaagatcagctggaaagaaacatggaaaaattacaggaggacatcaaaaataccataaacagcgttactccggcgcacgcggcgtttgaaccaattattaccaacgagatattaaaatcggccggccgctatcaacaggaagacgaatcggtgtcttataaaaaaagaagcgagtatatcggtaatttttgcaaaaccgttaaatccaaaccgcccgccgatttggtcgattacttggtcaagagggttcagcgggagagacccgcgtatacgcacaacgaaatagtcaacatatacatatgtatcgtccaagggtttctaaccgtattttcgggaaaacccggcaccggaaagacctctatatgcaatataatagccgatagccttggattgaccgccaaaaaccaaaacatcgacggctcccgctatgtcccgatctccgtggagaggggctggtcgtcaaagagagacttgataggctattaccacccgctcancaggcggtatgacaagagcaatgtggggaatttacgaacgcgctga

SEQ ID NO: 12802 - protein, 232 aa, Unknown
  Obtained from environmental sample
  misc_feature (1)..(232): Xaa is any amino acid
MGGLEERAAAIKKELKGLEERFGKYEKLEQINEVIKSKEGEFDQIEKKNKKLKDQLERNMEKLQEDIKNTINSVTPAHAAFEPIITNEILKSAGRYQQEDESVSYKKRSEYIGNFCKTVKSKPPADLVDYLVKRVQRERPAYTHNEIVNIYICIVQGFLTVFSGKPGTGKTSICNIIADSLGLTAKNQNIDGSRYVPISVERGWSSKRDLIGYYHPLXRRYDKSNVGNLRTR

SEQ ID NO: 12803 - DNA, 672 bp, Unknown
  Obtained from environmental sample
  misc_feature (1)..(672): n is a, c, g, or t
gtgcgccgccttgcccccggtgaatactttcctgcgttgcttcccggcgccgctgacagcgtaagcgtgcgcgtggtggctgtggataagcatgtgctgataggtgaaatatccgatgacaagccagtccgcacggagacatctgtttcacaaaataagcccataatactgtttcagtccctgcccaagggagagaaaatggaccttatcgtaagacaggccgccgaaggaggggtagagcagatagtgccgttcatatcggaattttcggcgcctggaaatataaaaaatacaggcctaaagtttacacgatgggagaggattataaaggaggcaaggcagcaaagcggttcgccggtgccgaccgttatccggcagcctttgtccattgacgggctttttgcgttttgggaggaattaagtacgcgaaatcacaatgttatcggtctgctgtttcatcatttgccgcttgaaaaggccagcctccacggttatctttataaaaggcccgaagttgtcgcgctggcaatagggcctgaaggcggtttttccgattccgaggcgcggcggttcatggccgcggtttncagccccgatacatcggggaaacaatactacgcacggagacggcggcgctgtatgcccaggctgccgtgcgggttcttttattga

SEQ ID NO: 12804 - protein, 223 aa, Unknown
  Obtained from environmental sample
  DOMAIN (1)...(205): Protein of unknown function (DUF558)
  misc_feature (1)..(223): Xaa is any amino acid
MRRLAPGEYFPALLPGAADSVSVRVVAVDKHVLIGEISDDKPVRTETSVSQNKPIILFQSLPKGEKMDLIVRQAAEGGVEQIVPFISEFSAPGNIKNTGLKFTRWERIIKEARQQSGSPVPTVIRQPLSIDGLFAFWEELSTRNHNVIGLLFHHLPLEKASLHGYLYKRPEVVALAIGPEGGFSDSEARRFMAAVXSPDTSGKQYYARRRRRCMPRLPCGFFY

SEQ ID NO: 12805 - DNA, 537 bp, Unknown
  Obtained from environmental sample
  misc_feature (1)..(537): n is a, c, g, or t
gtggtatacgcccccgaaaggaagatcacccgcaggactgacccccttaacatgcccctccttacagtgcgttattccagccccgcgcgtaatgttatcagggtgcggattacccatttcgagggaacagtggacagggggccgcgttttccgttggaaatcgattcttcgttcaaacccgttatacgcataacggagaaagaggccgtcctggaaagcggcgggctttcggtaaacatcgaacaggatcagggctggaacaataccttctccggcggcggtaaattcctgaccgggaacaccgtanaatcaaccggatacatggtggacaaggacaggggcccttttgtaaaagacgagcttatcctttcggtgggcgaactgatatacggcctgngcgagcgtttcgggcctctggtgaaaaacgggcagaccgttgacatttggaacgccgacagcggcacggccagcgaactcgcatacaaaaatattccctttttacatgaccagcaagggttacgggatatttataaatga

SEQ ID NO: 12806 - protein, 178 aa, Unknown
  Obtained from environmental sample
  misc_feature (1)..(178): Xaa is any amino acid
MVYAPERKITRRTDPLNMPLLTVRYSSPARNVIRVRITHFEGTVDRGPRFPLEIDSSFKPVIRITEKEAVLESGGLSVNIEQDQGWNNTFSGGGKFLTGNTVXSTGYMVDKDRGPFVKDELILSVGELIYGLXERFGPLVKNGQTVDIWNADSGTASELAYKNIPFLHDQQGLRDIYK

SEQ ID NO: 12807 - DNA, 573 bp, Unknown
  Obtained from environmental sample
  misc_feature (1)..(573): n is a, c, g, or t
gtgctgtttgattcatcattcaaggaagcgttcccgctcgcgtgggataacgccgcattaaaccgttccatggattttgtcaatgactggacaatcaaaataaacaccgacaatcaggcggaagaagattttacattcaagtactttattgaaccgcaggaaagactgattcaatcgggacgtatacttttttcatacatggaaagcagcgaactttttattttaagcgaggaaagcaagaatattcttgattttcgctggattatggaagatgacaaaattcccatttccgaagacgcggtatttttgggtattccaaaaagagggaaagccccgaaggccgctaacgcttttgttcaatggttttttaagattgaaaaccagcgcctgcttttggaattcagcaaggcaaacaggataagcgaaactgctttcggcatttgcggcggcttttccgccataggggcggttaccgatcaaattttcccgcggtactatcccaacctattgnggcgaataccgccttccgatttcttgccgccccgaacatccttcccggnaaactgggcgtaa

SEQ ID NO: 12808 - protein, 190 aa, Unknown
  Obtained from environmental sample
  misc_feature (1)..(190): Xaa is any amino acid
MLFDSSFKEAFPLAWDNAALNRSMDFVNDWTIKINTDNQAEEDFTFKYFIEPQERLIQSGRILFSYMESSELFILSEESKNILDFRWIMEDDKIPISEDAVFLGIPKRGKAPKAANAFVQWFFKIENQRLLLEFSKANRISETAFGICGGFSAIGAVTDQIFPRYYPNLLXRIPPSDFLPPRTSFPXNWA

SEQ ID NO: 12809 - DNA, 699 bp, Unknown
  Obtained from environmental sample
  misc_feature (1)..(699): n is a, c, g, or t
ttggcggaacaaggggatgccattgcgcagtctaatcttggcactttgtatcacttgggcattaccaaggacgaaaaagtggccgagcaatggtttcgcaacgccgcgcaaggactcccaaagttggcgaagcagggaaatgccagggcgcaggctaaattaggagtcatgtacgcgaccgggcgcggcgttgccaaagacgagcgccaagctgtggaatggttgcggaaggcggcggaacaggggcatgccatagcgcagtatagtttaggaatcatgtacgagaccgggcgcggcgttgccaaagacgagcgccaggctgtggaatggtaccggaaggcggcggaacaagggaatgtcaacgcgcagtctaatttaggagtcatgtacgcaaacgggcgcggcgttgccaaagacgagcgccaagctgtggaatggtaccggaaggcggcggaacagggggtcgcctacgcgcagagtgcgttaggagtcatgtacgcaaacgggcgcggcgttgccaaagacgagcgcccagctgtggaatggtaccggaaagcggcgggacagggggtcgtctacgcgcagagtgcgttaggatacatgtacgcggaagggcgcggtattgccaaagacgagcgtcaggctgtggaatggaaccgcagggcggcggaaccggggcatgccaatcccccattttaa

SEQ ID NO: 12810 - protein, 232 aa, Unknown
  Obtained from environmental sample
  DOMAIN (192)...(227): Sel1 repeat
  misc_feature (1)..(232): Xaa is any amino acid
MAEQGDAIAQSNLGTLYHLGITKDEKVAEQWFRNAAQGLPKLAKQGNARAQAKLGVMYATGRGVAKDERQAVEWLRKAAEQGHAIAQYSLGIMYETGRGVAKDERQAVEWYRKAAEQGNVNAQSNLGVMYANGRGVAKDERQAVEWYRKAAEQGVAYAQSALGVMYANGRGVAKDERPAVEWYRKAAGQGVVYAQSALGYMYAEGRGIAKDERQAVEWNRRAAEPGHANPPF

SEQ ID NO: 12811 - DNA, 552 bp, Unknown
  Obtained from environmental sample
  misc_feature (1)..(552): n is a, c, g, or t
atgaaaaagggggacggcctttacatcggtaaagggataaaggaggtgattttctccgctgccgataaaaacaagccgccgaagttttatcttgccagtaccccggcccatgtttcctttcccccggtccacattcccattgaaaaggccaatccgcgcaaacttggggaaccggcagcggtgaatgtccgtaccatttaccagtatgttcaccctgcggtctgccaaagctgccagcttgttatgggcatgaccgtactggaagaaggctccgtgtggaacaccatgccctgccatacccacgagcggcgcatggaggtgtacctgtactttgacatgaaggacagcgcggcggtattccatctccacggccggccggatgaaacacggcatattgtaatgaacaatgagcaagcggttatttccccttcctggtcaattcattccggggttggaacagccgcttatacctttatctgggccatggccggggaaaaccagaccttgacgacatggatacccttgttaccacgggattgcgctagcaattaa

SEQ ID NO: 12812 - protein, 183 aa, Unknown
  Obtained from environmental sample
  DOMAIN (1)...(181): 5-keto 4-deoxyuronate isomerase
  misc_feature (1)..(183): Xaa is any amino acid
MKKGDGLYIGKGIKEVIFSAADKNKPPKFYLASTPAHVSFPPVHIPIEKANPRKLGEPAAVNVRTIYQYVHPAVCQSCQLVMGMTVLEEGSVWNTMPCHTHERRMEVYLYFDMKDSAAVFHLHGRPDETRHIVMNNEQAVISPSWSIHSGVGTAAYTFIWAMAGENQTLTTWIPLLPRDCASN

SEQ ID NO: 12813 - DNA, 705 bp, Unknown
  Obtained from environmental sample
  misc_feature (1)..(705): n is a, c, g, or t
gtgaatgattcaccaacagctttcgcgctgatggatgaaatcctcacaagcggtgtcgccattgagcaatttgtaattgatcttgcgggcttttaccgcagtttgctgctgttaaaaaatggcgtaacaagagaatcgctcttaggttaccgtccttccctcttttccacaaaagccttggaaacctacgattccatccgtcttgaacaggcgcttgatattctgcttgactgttaccgtaacaatcgctattcagtgtcgcctcgctttgaacttgagaccgccgtttcaaaattgacatggttaaacaaatgggtatctccaacggaacttaaagaagcggttgatgacgcccgcaatgttctgggaatagcgggaaatcacgtcagtcctgaaacataccgtaaacagacttcggcagtttcgcataacgtagcgtctcctaccgcagctcgaggcggcgttaatgcctccggcggtcatgcggcgcagtatcaatcatcaacgggcggtaattcactggtagatgaatttaaccgtatgattgcaaaaaaagacaacgccgccgtgtcagatgccgcgcatggtgccatgtctgaagaagaagacgttcctatgtgggattcggtgcgcaaatctgaaaaacagaatccgcccgaagttgaannaatgtcttcgatgataccgggaactgtcgttccataa

SEQ ID NO: 12814 - protein, 234 aa, Unknown
  Obtained from environmental sample
  misc_feature (1)..(234): Xaa is any amino acid
MNDSPTAFALMDEILTSGVAIEQFVIDLAGFYRSLLLLKNGVTRESLLGYRPSLFSTKALETYDSIRLEQALDILLDCYRNNRYSVSPRFELETAVSKLTWLNKWVSPTELKEAVDDARNVLGIAGNHVSPETYRKQTSAVSHNVASPTAARGGVNASGGHAAQYQSSTGGNSLVDEFNRMIAKKDNAAVSDAAHGAMSEEEDVPMWDSVRKSEKQNPPEVEXMSSMIPGTVVP

SEQ ID NO: 12815 - DNA, 306 bp, Unknown
  Obtained from environmental sample
  misc_feature (1)..(306): n is a, c, g, or t
gtgtttacgtggacagagaaaaagaatcaaatcaacaagaaaaagcacggttttttcctgtcagatattgtggatgtttttagtgatccacatttgatcgactggtatgatacggtccattcatctttggatgaagaccgcttcatcactattgggcgttttcacgacacggttattctttttgtggttactgtggacaaagctgatggcgacacccaaataatcatggcacgggaggcagttcccaaagaacaggaggcatattatgaccactacagaaaaagcacgaatagcggcagaaattaa

SEQ ID NO: 12816 - protein, 101 aa, Unknown
  Obtained from environmental sample
  DOMAIN (2)...(91): Protein of unknown function (DUF497)
  misc_feature (1)..(101): Xaa is any amino acid
MFTWTEKKNQINKKKHGFFLSDIVDVFSDPHLIDWYDTVHSSLDEDRFITIGRFHDTVILFVVTVDKADGDTQIIMAREAVPKEQEAYYDHYRKSTNSGRN

SEQ ID NO: 12817 - DNA, 579 bp, Unknown
  Obtained from environmental sample
  misc_feature (1)..(579): n is a, c, g, or t
ttgagttacttcaccacaggtagcagcttatacaatcttaccacattcataaaatcgccagagttagacgacacttcttttacaaaaaatccaagagattcaactcagcttcgttttgtgaaaaacgacatttttgcgttggtcaataaaatgaaagagagcagttttcccaacaatggctatcgtgacctgattgaccttgacagctgggcaaaatatgtgctaattcaattggttttggataattttgatttcaacagcaaagcacaagatggatatttgccaggttcaaattacgcctacaaaatagagagttgcgatagaattaaggctggtccgctttgggattttgatttggctgctggcttggaaagatcggctcctattggcggtggcggctggggctggggcggcggtgcacaaagctcttttcctgcacattacaaaacttaccaagactctatagtacctacccacccgttttataaaaggctttgggaagaccctgtattcaaagccaaatacaaaaaactctgggataaacacaaaagcgatttccaagctatgagcagtttatag

SEQ ID NO: 12818 - protein, 192 aa, Unknown
  Obtained from environmental sample
  misc_feature (1)..(192): Xaa is any amino acid
MSYFTTGSSLYNLTTFIKSPELDDTSFTKNPRDSTQLRFVKNDIFALVNKMKESSFPNNGYRDLIDLDSWAKYVLIQLVLDNFDFNSKAQDGYLPGSNYAYKIESCDRIKAGPLWDFDLAAGLERSAPIGGGGWGWGGGAQSSFPAHYKTYQDSIVPTHPFYKRLWEDPVFKAKYKKLWDKHKSDFQAMSSL

SEQ ID NO: 12819 - DNA, 309 bp, Unknown
  Obtained from environmental sample
  misc_feature (1)..(309): n is a, c, g, or t
atggaacttttacaaaaactagaaattctagccggtgccgcaaaatacgatgtctcctgctcctctagcggaggctcaaggacaactcaaaaaggaggctttggaaactcatgccctgccggagtgtgccactctttcacggaagatgggcggtgcatttcgctcctcaaaattttactcactaatgtgtgtctttatgattgcgcttattgcgcaaaccgcaaaagcaacgatgttcctagagccacattcaaggtggaagaagttgtgaaattgactattgaattttacaacaaggaactcacatag

SEQ ID NO: 12820 - protein, 102 aa, Unknown
  Obtained from environmental sample
  misc_feature (1)..(102): Xaa is any amino acid
MELLQKLEILAGAAKYDVSCSSSGGSRTTQKGGFGNSCPAGVCHSFTEDGRCISLLKILLTNVCLYDCAYCANRKSNDVPRATFKVEEVVKLTIEFYNKELT

SEQ ID NO: 12821 - DNA, 624 bp, Unknown
  Obtained from environmental sample
  misc_feature (1)..(624): n is a, c, g, or t
atgaatgtacgcgtaaccccgcgccgatttaccggtactgtcagaataccggcttccaagtctcatacaatcaggcagttactgattgcgtctcttgcggacggcgaatctgaaattaaatacccgcttgattcattggatacgcgctcctgcctgtccgcctgcaagtctttcggcgcggaaatagcggaacaacgcgacggagataaaatagtcagttggaaagtacggggcaacggcggttttaaaaaaggggtgaatcccggcgcgaaaattgatgttggcaattccggaacgactctttatctggcgctcgccgtggcgggtcttcaacaacagccgattgattttacaggcgatgaacagattcaaaagcgaagcgccgctccgcttctcgacgcgttggctgggctaggcgttaattcgcaaagcaacaatggctgcgctccaatcacaattaaaggaccgtggaagggagggaaggtgagtcttccgtgtcccacaagccaatacttgtcggcgattttaattgccgccccgttagctcccgccggcgttgttacggaaatcgaagttcccctgcttaacgaaaaaccgtatatcgagatgaccctttcctactaa

SEQ ID NO: 12822 - protein, 207 aa, Unknown
  Obtained from environmental sample
  DOMAIN (5)...(207): EPSP synthase (3-phosphoshikimate 1-carboxyvinyltransferase)
  misc_feature (1)..(207): Xaa is any amino acid
MNVRVTPRRFTGTVRIPASKSHTIRQLLIASLADGESEIKYPLDSLDTRSCLSACKSFGAEIAEQRDGDKIVSWKVRGNGGFKKGVNPGAKIDVGNSGTTLYLALAVAGLQQQPIDFTGDEQIQKRSAAPLLDALAGLGVNSQSNNGCAPITIKGPWKGGKVSLPCPTSQYLSAILIAAPLAPAGVVTEIEVPLLNEKPYIEMTLSY

SEQ ID NO: 12823 - DNA, 774 bp, Unknown
  Obtained from environmental sample
  misc_feature (1)..(774): n is a, c, g, or t
atggggaatatggctgtttccaaaaagattcattttttgataaatcctgtcagcggcggtgggcagggtaaggttgtgtttgaatttttgccagaaattatgcgttccatggattttaaggaagaggaatggcaaagagagttcagcgtttacgaaacttttgaagaacaggttaaagaagccttggcaagctcggaatgtgtaatagcggttggcggggatggcacggcaactgcggtgttcagcgttcttttgtgccatcaggaatttaaggatgtaaaaataggcattattcctctcgggacgggaaacgatttagctagggttctgaatctctacgacgctcttgcaaacaggggtctgctgtatatagtccgtaaattggtatcggcaaggtctagaaattttgatttatggaaggtgaacggaaaattcgcgatgtcaaattatttttctgctggcgtagatgcccgcattgcccacgattttaaccgcgacagggcggaaggaaggataaagggcaattccgtgataaaaaacaagctgcattacgtaaagaggtttttcgcggataaagactatcgcctgaggactggtgaattacgcacaactgataaacagggcgaaacaaaaattttccccctagaaaacaactgctcaatcataataggcaatatcccaagctatgcgagcgggaccaacccgtttggcaagtccgatattgcggacggattactcgaggttttgctggtaaagtccctaaaaggcttttga

SEQ ID NO: 12824 - protein, 257 aa, Unknown
  Obtained from environmental sample
  DOMAIN (146)...(257): Diacylglycerol kinase accessory domain
  misc_feature (1)..(257): Xaa is any amino acid
MGNMAVSKKIHFLINPVSGGGQGKVVFEFLPEIMRSMDFKEEEWQREFSVYETFEEQVKEALASSECVIAVGGDGTATAVFSVLLCHQEFKDVKIGIIPLGTGNDLARVLNLYDALANRGLLYIVRKLVSARSRNFDLWKVNGKFAMSNYFSAGVDARIAHDFNRDRAEGRIKGNSVIKNKLHYVKRFFADKDYRLRTGELRTTDKQGETKIFPLENNCSIIIGNIPSYASGTNPFGKSDIADGLLEVLLVKSLKGF

SEQ ID NO: 12825 - DNA, 432 bp, Unknown
  Obtained from environmental sample
  misc_feature (1)..(432): n is a, c, g, or t
gtgatggcgggccggtctggcgactcgggcatcgcggtgtacaacagggacaccggcacggtaagcattaccggcggcacggtctcggcggcatcgggcgtcgcggtgtacaacaattccactggcaaaataaccgtgtcgggaacggcaaaggttacctcggcaagcacaaccctcgcatggagtacaatttatcttaatgactacggaactgccaccaccacacggctagaaatatctggcggcacggtagaaaacacatcgtccggcaacagctgcgcggtacgcaacgaatctgccggcatggtaagcattaccggcggcacggttaaagccggaagtaacggctatgcggtgtacaatggcggaaccggcacggtgacaatcggatcggaggcaacgattgtggggaataagtacggtgttaattaa

SEQ ID NO: 12826 - protein, 143 aa, Unknown
  Obtained from environmental sample
  misc_feature (1)..(143): Xaa is any amino acid
MMAGRSGDSGIAVYNRDTGTVSITGGTVSAASGVAVYNNSTGKITVSGTAKVTSASTTLAWSTIYLNDYGTATTTRLEISGGTVENTSSGNSCAVRNESAGMVSITGGTVKAGSNGYAVYNGGTGTVTIGSEATIVGNKYGVN

SEQ ID NO: 12827 - DNA, 645 bp, Unknown
  Obtained from environmental sample
  misc_feature (1)..(645): n is a, c, g, or t
gtgtaccgcagtgcaagctcttccggcgatttcagccaggtaggtacgccgacatcaactttgtacatggacaccggtcttaccgaaaacacaacgtattattacaaagtgacctcaaccaacagcgccggagaaagcgcccagtcctcgcctgcttcggcgacaacttcaccatctaacaattttaaccgggccgattatgttatagtaaatgaaaccggcaagcctgattcggctcctgaaatcgcatggctgaaagaacttacttggtttatgtatgcggggaatgagcgcgtaggggactggatggcgaattatatcaagacaaacaaaattaaaactatcctggcaaacggtaattatggctgggcctggatctatccagaccggctggatagactttatttgagtgtggatgaaatttgttacctttatggtaataattacaattatgatttcgatgaagtcccacagagcgggttcttctatcaattcgttacgcatgaaacgatgcatctggttcaatataaaagcaatgctttcagcttaatgaaaggaatgcgccccgatatatgcgcggccgctgagatgctgactgaattcctcgcatggttctataccgagaatcgctttcccgacgcatag

SEQ ID NO: 12828 - protein, 214 aa, Unknown
  Obtained from environmental sample
  misc_feature (1)..(214): Xaa is any amino acid
MYRSASSSGDFSQVGTPTSTLYMDTGLTENTTYYYKVTSTNSAGESAQSSPASATTSPSNNFNRADYVIVNETGKPDSAPEIAWLKELTWFMYAGNERVGDWMANYIKTNKIKTILANGNYGWAWIYPDRLDRLYLSVDEICYLYGNNYNYDFDEVPQSGFFYQFVTHETMHLVQYKSNAFSLMKGMRPDICAAAEMLTEFLAWFYTENRFPDA

SEQ ID NO: 12829 - DNA, 552 bp, Unknown
  Obtained from environmental sample
  misc_feature (1)..(552): n is a, c, g, or t
ttgctccgtcttaaaaaacttgaaaagatggagattgacggaacttttgaaaacctgaccaagaaagaaattgcggctcttggcaaagagcgggcaaagctccagaaaaaccttgggggcatcaaggaaatgaaagagcctcccggaatcctttttattatagatacaagggtggaagccatagccgtggcggaagccaagcgcatgggcattcccatagttgccgtggtagacaccaactgtaatcctgacggcattgactatcccattcccggcaatgacgatgctatacgagcaattaccctttttacacagataatcgccaacgcggtggttgaagctgacaacgaagtaggcctcaagattatcgagaatctggaacaggacgatgaggacatcgaagaaatgatgaccgacgcttccataagggaagaggataaggaaatcgatatagcttcatatacggaaacgcccgccgcgcccaaagaggagccggaaacggaagaagatgatcttccggtggatatagacaaagcctacggcgaagaataa

SEQ ID NO: 12830 - protein, 183 aa, Unknown
  Obtained from environmental sample
  DOMAIN (1)...(115): Ribosomal protein S2
  misc_feature (1)..(183): Xaa is any amino acid
MLRLKKLEKMEIDGTFENLTKKEIAALGKERAKLQKNLGGIKEMKEPPGILFIIDTRVEAIAVAEAKRMGIPIVAVVDTNCNPDGIDYPIPGNDDAIRAITLFTQIIANAVVEADNEVGLKIIENLEQDDEDIEEMMTDASIREEDKEIDIASYTETPAAPKEEPETEEDDLPVDIDKAYGEE

SEQ ID NO: 12831 - DNA, 435 bp, Unknown
  Obtained from environmental sample
  misc_feature (1)..(435): n is a, c, g, or t
atgggcggcctgcataacagctttggggaaatggcggagtatatggtcgctcctggcattgtcgatttgtttaatgatttgggtttccatattacgcaagccgcaatacacggcatgagaatcctggatgagaaaaaaagactcagggcagaaattgacctgtacatgggaaacggggattatataatcgcagttgaagtgaaaaccagtctgggggaaaaagacatagagaagcaccggagacggctggagatattacgcgagcaaaacaacaggacaggagaccgcaggaagatacgtggcgggatggcggtagcgatactggatgatgatggcaggaaagcgatacttgacgcgggcttttatctgctggaaccatcaggcgacatgatgataatggatctgcctgaaggttttatgccgcgggaatggtga

SEQ ID NO: 12832 - protein, 144 aa, Unknown
  Obtained from environmental sample
  misc_feature (1)..(144): Xaa is any amino acid
MGGLHNSFGEMAEYMVAPGIVDLFNDLGFHITQAAIHGMRILDEKKRLRAEIDLYMGNGDYIIAVEVKTSLGEKDIEKHRRRLEILREQNNRTGDRRKIRGGMAVAILDDDGRKAILDAGFYLLEPSGDMMIMDLPEGFMPREW

SEQ ID NO: 12833 - DNA, 528 bp, Unknown
  Obtained from environmental sample
  misc_feature (1)..(528): n is a, c, g, or t
atgaaatgttcgcccggcgcgctttccatagttccggacaaatgtatgctttcgatagaccgcagaaccttaccaggcgagagcgcggcaagcgcattaaaacagatagaggatattattaattcccttaaagctgccgatccggaattccgcgcggaggtaaaagttaaacacgctattgagacgtcttataaaggcgtttcttatgacgcggaaaaggtcatggctccgtggaaaataagcctctcgcacggttttgtcaaggcagccgaaaaggcgctgaaaaatcttggtcaaacagttaattacggctattgggattttgggacggacgcgagcaaaacctgcggcatcgaccgtaaacccacaatagggtattcgcctatgcaagagcagtacgcgcatactccgtacgacaaatgccgcactgattttatgcttacggctttggaaggcaacgccgccatatttttggaagcggttgccggcggtaaagacgtgttcgagcctgtaaaatgggaggtttaa

SEQ ID NO: 12834 - protein, 175 aa, Unknown
  Obtained from environmental sample
  misc_feature (1)..(175): Xaa is any amino acid
MKCSPGALSIVPDKCMLSIDRRTLPGESAASALKQIEDIINSLKAADPEFRAEVKVKHAIETSYKGVSYDAEKVMAPWKISLSHGFVKAAEKALKNLGQTVNYGYWDFGTDASKTCGIDRKPTIGYSPMQEQYAHTPYDKCRTDFMLTALEGNAAIFLEAVAGGKDVFEPVKWEV

SEQ ID NO: 12835 - DNA, 894 bp, Unknown
  Obtained from environmental sample
  misc_feature (1)..(894): n is a, c, g, or t
gtgcacaacggtcctgttgatataaaagtaaagtgctcaggaacagctacgggccgctctacatcgtacacaagagtcgctctcgccaatcccggaaatcntcctgtttactcaggtcctcgtcaatatgaagcagaacactttgataataaaaacattgagacaaatcgcacaaacggggctcgcacagacgtttatcacttcacgggtcaaggctatttgatattcggcacaaacgcaaacgcggcggtgagagatactgtttatgccgtgcaagccggagaacataccctcagcattaagtatatcgttacctctaacgtaaataccgttgacctttatgtaaacggaactaaggtggctactcccgcatttgccagtagccccaacctagggaatttgaccactagcgcttggcgtattcactcgcagaaaattacgttgaaagcgggcgcaaacacggttgagttgagagcaaccgctacattgcctggcaagatgtatcttgataactttgttttggaaggtagcgctaaccctgccgtcaacgtaacgtgtaacgtaagtaacctcgaagcgagctatatttcggggagcaacgttcccagaccgaacgtgatttgtggaaacggaactttagccggaacagcttcatttagcgcgggtagttctatagacggttggagttctccgggtggcacccacgctttatataatcccggaataagaaccgttactttgagcaacgttgtatgcggcgatatggaagtgactcttaatccggccgtatcttgcggcagttttgaaatcgtatcggcgacatccatcgcgaacggtgtcacccgcgcgcgtaaacccttctctatgaacgtgcgcgggaaatcgctgttataa

SEQ ID NO: 12836 - protein, 297 aa, Unknown
  Obtained from environmental sample
  DOMAIN (44)...(176): Carbohydrate binding module (family 6)
  misc_feature (1)..(297): Xaa is any amino acid
MHNGPVDIKVKCSGTATGRSTSYTRVALANPGNXPVYSGPRQYEAEHFDNKNIETNRTNGARTDVYHFTGQGYLIFGTNANAAVRDTVYAVQAGEHTLSIKYIVTSNVNTVDLYVNGTKVATPAFASSPNLGNLTTSAWRIHSQKITLKAGANTVELRATATLPGKMYLDNFVLEGSANPAVNVTCNVSNLEASYISGSNVPRPNVICGNGTLAGTASFSAGSSIDGWSSPGGTHALYNPGIRTVTLSNVVCGDMEVTLNPAVSCGSFEIVSATSIANGVTRARKPFSMNVRGKSLL

SEQ ID NO: 12837 - DNA, 387 bp, Unknown
  Obtained from environmental sample
  misc_feature (1)..(387): n is a, c, g, or t
ttgcgtaaaatggagccgtatgtgtatgcgcaaatggtagccggcaaagacgcggtaaatcacggcgaggcgaaaaattcatggcttacgggaaccgcggcgtggacgtttgtaagtatttcgcagtacattctgggagtgcgccccgtctttgacggtcttttgatagacccgtgcattccttcaaatatgaaaggctttaccgttacccgtcatttccgaaactcggattatcacatcacggtagacaacagcgccggagtggagaagggaataaaatccattacgattgacggcaaaccaatggaaggcgaatggttaaagaacgcggtaatcccgacatttaacgacgagcaagtgcataagattaacgtggtgatgggttag

SEQ ID NO: 12838 - protein, 128 aa, Unknown
  Obtained from environmental sample
  misc_feature (1)..(128): Xaa is any amino acid
MRKMEPYVYAQMVAGKDAVNHGEAKNSWLTGTAAWTFVSISQYILGVRPVFDGLLIDPCIPSNMKGFTVTRHFRNSDYHITVDNSAGVEKGIKSITIDGKPMEGEWLKNAVIPTFNDEQVHKINVVMG

SEQ ID NO: 12839 - DNA, 681 bp, Unknown
  Obtained from environmental sample
  misc_feature (1)..(681): n is a, c, g, or t
atggacgatcagggcgttctgatgctgacgggttatgttgggggacgcggttatgtgaaacacagcctgnaaaaactggggatcggggcgcgcgaatgncgttatctgaaattcaagtccgccgctgaatcttacacgcgggattcaatgtcggaaaccgatcgcgctcaatacggtgaaatactggatgacataatgcggactacccgcgacacggtgaccatggcgcgctcgtggactacagatgaatttgacacaatcattaacaatgaatatatgttctccgcaaagaacgcgctggcgcggggcctggttgaccgcagcggcagaaaagaggccgtgattgaggctgttaaggaaatttcagacggtaagggagccggattttttttcctgtacggggagacggaatcaagcgtaacggggagcaaattcatctataaaccgggcagacagagcggcttgttctcaaggccgcctgtaatagccgtgataaacgccaacggcattaccgatatggaacggggcatagccgcgtgggccttatccaacacaatcagggaactctccgaaaaaaggcgggtcaaggcgattgtactgcggattaactcgccaggcggaagcgccgaagccgccgactatgtagccgaagcggaaaagcggccaactcggccaatctga

SEQ ID NO: 12840 - protein, 226 aa, Unknown
  Obtained from environmental sample
  DOMAIN (2)...(125): Peptidase family S49
  misc_feature (1)..(226): Xaa is any amino acid
MDDQGVLMLTGYVGGRGYVKHSLXKLGIGAREXRYLKFKSAAESYTRDSMSETDRAQYGEILDDIMRTTRDTVTMARSWTTDEFDTIINNEYMFSAKNALARGLVDRSGRKEAVIEAVKEISDGKGAGFFFLYGETESSVTGSKFIYKPGRQSGLFSRPPVIAVINANGITDMERGIAAWALSNTIRELSEKRRVKAIVLRINSPGGSAEAADYVAEAEKRPTRPI

SEQ ID NO: 12841 - DNA, 411 bp, Unknown
  Obtained from environmental sample
  misc_feature (1)..(411): n is a, c, g, or t
ttgccgctgctctacaaagacaatttacataagaaagtgatgacccgctcccttgccctggaatgtatttccggccacatgggaaaccggcctgtttattcgcttgaggcaggcatagtgcaggtcgcggacggctgcgacatgaccaagggccgcgccagaatttccatgtccctttcccacacccccagaacgggaaccatacaccagtattcggccaattcaattgagaaagtcctttttgaaaaaggcaaggaaaaacccatacagataaaagtttcaatgtccagcgaggtcggcatttttcaggtggaggaagtacttttaaccaaaatagccaacagcaccgccaagccttacattgagctttacgcctacgtggaaggggaagagcctaaaaggtatttatag

SEQ ID NO: 12842 - protein, 136 aa, Unknown
  Obtained from environmental sample
  misc_feature (1)..(136): Xaa is any amino acid
MPLLYKDNLHKKVMTRSLALECISGHMGNRPVYSLEAGIVQVADGCDMTKGRARISMSLSHTPRTGTIHQYSANSIEKVLFEKGKEKPIQIKVSMSSEVGIFQVEEVLLTKIANSTAKPYIELYAYVEGEEPKRYL

SEQ ID NO: 12843 - DNA, 693 bp, Unknown
  Obtained from environmental sample
  misc_feature (1)..(693): n is a, c, g, or t
atgttttttgagaattacactgaaaaagtatggggtgtccacccctcaaaactttctgcggcatggggggcacaacgggtaaaagaactttccataacggcaattattaaagaagccttagcaaaactaatcaatcataactataaaacaaatcaaacttcccttattgagcaattttattaccccaagatggggcccggacaattatgggcaattgttgcggacaaaataatagaagcgggcgggtgtgtccatcgtaaacaaaaagtgaccggaattaccattgaaaacgaccaggttaagagcataagaacacaggataataatgaaacaatattctgcgatattttgctttcaaccatgccggtaaaggaccttatcctggcagtaaacacaggcggaggagaaaaagcaccagagcatataacaaaacccgccacagagctgccgtatcgtgattttattaccgtcggcctgcttttgaaaaagctaaaactcaggaacaaaacaaaaggcaaaacatcgcaaaacattattcccgattgctggatttatatacaggaacgggatgtcaggattggacggttacagatatttaataactggtccccttatatggtacgcgatcctgaagacacggtctggatagggttgaaatattttgtaacgaaaggtgatacttatggaatttga

SEQ ID NO: 12844 - protein, 230 aa, Unknown
  Obtained from environmental sample
  misc_feature (1)..(230): Xaa is any amino acid
MFFENYTEKVWGVHPSKLSAAWGAQRVKELSITAIIKEALAKLINHNYKTNQTSLIEQFYYPKMGPGQLWAIVADKIIEAGGCVHRKQKVTGITIENDQVKSIRTQDNNETIFCDILLSTMPVKDLILAVNTGGGEKAPEHITKPATELPYRDFITVGLLLKKLKLRNKTKGKTSQNIIPDCWIYIQERDVRIGRLQIFNNWSPYMVRDPEDTVWIGLKYFVTKGDTYGI

SEQ ID NO: 12845 - DNA, 495 bp, Unknown
  Obtained from environmental sample
  misc_feature (1)..(495): n is a, c, g, or t
atgaataacctcaattcgatcctgattgaaggaaacctggtgagggaccctgaaagccggtctacccccaaaggaaccgccgtatgcaatttttccatagcctcaaaccgctattttaagaataatgacggcttggaaaaagaagtaagcttctttgacgttgagacttgggggaagctcgccgaggcttgctacagcaaagggcataaaggcaaaggcgtgcgcgttgtcggaaggcttaagcaggatcgctggaccgatggcgaaggcaagccgcgctcgcgcattaccatcgtagcagagcatgttgagttccggccggatttncagaaggaaaatacgcaagcggaagatgccgaaacggaagaaaccgaaatggcagtaaacgccgtggaagaagaaagcctggttcccacttttttagatgcttatgtcgcatgctaccatttatttcctacaaaagccgaaagcttgatgatgctgaaatccgcgtag

SEQ ID NO: 12846 - protein, 164 aa, Unknown
  Obtained from environmental sample
  DOMAIN (4)...(106): Single-strand binding protein family
  misc_feature (1)..(164): Xaa is any amino acid
MNNLNSILIEGNLVRDPESRSTPKGTAVCNFSIASNRYFKNNDGLEKEVSFFDVETWGKLAEACYSKGHKGKGVRVVGRLKQDRWTDGEGKPRSRITIVAEHVEFRPDXQKENTQAEDAETEETEMAVNAVEEESLVPTFLDAYVACYHLFPTKAESLMMLKSA

SEQ ID NO: 12847 - DNA, 345 bp, Unknown
  Obtained from environmental sample
  misc_feature (1)..(345): n is a, c, g, or t
ttgctccccccccccccaaaaaagaaaaaaatttttttttttttttttttttccccccgcaaaaaaaagaaaaaaaaaaaaaacaggggggggagaagggggttttttttttttttttatagtggagaaaaaaaacacaccaancccccgccccccgcgggggggggagggccaaaaaaaaattttttttttttttttttttttttaaaaaaaacacaaccccccttctttttttttttttttggggggggaaaaaaaaaaaaaaaaaacacccccccccccctttttttttttaaaaaaaccccccccctcttcccccccccccgaaaagaagagtgtttttaa

SEQ ID NO: 12848 - protein, 114 aa, Unknown
  Obtained from environmental sample
  misc_feature (1)..(114): Xaa is any amino acid
MLPPPPKKKKIFFFFFFSPRKKKKKKKNRGGRRGFFFFFYSGEKKHTXPPPPAGGGGPKKNFFFFFFFLKKTQPPFFFFFFGGGKKKKKNTPPPLFFFKKTPPLFPPPRKEECF

SEQ ID NO: 12849 - DNA, 672 bp, Unknown
  Obtained from environmental sample
  misc_feature (1)..(672): n is a, c, g, or t
gtgcaggtgatgggctccattgtgcttcatcagggaaaaatcgctgagcttaaaacaggcgaaggcaagaccctgatggtcgtggcggcggcgtacctcaacgcgatacccggcaagggcgtccatgtggttaccgttaacgactaccttgccagccgggacgccgactggatgaggccggtattcacttaccttgggcttacggtgggaaccattctctccgacatggacaacgagcgccgcagggacaactacgcctgcgacattacctacggaaccaacaacgagttcggctttgattaccttcgcgacaatatgtgccgcgatatgcgaagtcgtgttcagcggggacataactactgcataatcgacgaaatagattcaatccttatagacgaagccagaacaccgctgattatttcaggcgccgcggaagacgacacatttaagtttgcggaggcaaaccggcttatcggctcgctggaagaaatcaggaaaaaagaaaatggcgattacccggacgaagcccagggcgatgaagtaataggagactacaaacttaacgaanaaaacaagaatgtttctttttcnaacagcgggctgacaaaaatgaggagcttcttaaaagcgcggcttaataaaggctcgggtgtagatgaaggaaacttttga

SEQ ID NO: 12850 - protein, 223 aa, Unknown
  Obtained from environmental sample
  DOMAIN (143)...(220): SecA preprotein cross-linking domain
  misc_feature (1)..(223): Xaa is any amino acid
MQVMGSIVLHQGKIAELKTGEGKTLMVVAAAYLNAIPGKGVHVVTVNDYLASRDADWMRPVFTYLGLTVGTILSDMDNERRRDNYACDITYGTNNEFGFDYLRDNMCRDMRSRVQRGHNYCIIDEIDSILIDEARTPLIISGAAEDDTFKFAEANRLIGSLEEIRKKENGDYPDEAQGDEVIGDYKLNEXNKNVSFSNSGLTKMRSFLKARLNKGSGVDEGNF

SEQ ID NO: 12851 - DNA, 438 bp, Unknown
  Obtained from environmental sample
  misc_feature (1)..(438): n is a, c, g, or t
atgttaaatatagaacagataaaaaacggaattgtaattgaccacataaaagccgggcttgggatcagaatttttaactggcttagtctggacaaggctccctatacagtcgcgtttgtagccaacgcttcatcgtcattatgcggcaggaaggacattattaaaatagacaacaccatctctattaatcttgatgttttgggtctaatcgatccgaacataacggtaaacattatcgaaaatgagcatataacaaaaaaaataaagcttcagcttcccgaaaaagtagaaaacgtgcttaaatgcaaaaatccgcgctgtataagttccacggaaaactatataacacatatttttcaccttgaaaaccgtgagcttcgcacttatcgttgcgaatactgcgatgaaataattcctgctggagatttaaaatggtaa

SEQ ID NO: 12852 - protein, 145 aa, Unknown
  Obtained from environmental sample
  DOMAIN (94)...(145): Aspartate carbamoyltransferase regulatory chain, metal binding domain
  misc_feature (1)..(145): Xaa is any amino acid
MLNIEQIKNGIVIDHIKAGLGIRIFNWLSLDKAPYTVAFVANASSSLCGRKDIIKIDNTISINLDVLGLIDPNITVNIIENEHITKKIKLQLPEKVENVLKCKNPRCISSTENYITHIFHLENRELRTYRCEYCDEIIPAGDLKW

SEQ ID NO: 12853 - DNA, 807 bp, Unknown
  Obtained from environmental sample
  misc_feature (1)..(807): n is a, c, g, or t
ttgcttggttttaatgttaaaggagcgctgcgaatcggggtaggcatggttccgcgcggcgaggttgcgctcatcattgccggtattggattggcaatgggcattcttgacaaccagcttttttcaattgtaattttactgaccttaatttccactatcatagctccgccgcttttaaacgcgtcgttaaaaattaaagggcagggaacaagaaaatttgtcaatgatgaaaatatcacatatttaaaatgggactttggttctcatgatgtcgcaaggcttatgttggacagattattaattgatattcgagctgaaggtttttatgttcaagtaatgaaccttgataataatgtcgctctggcgcgtaaagatgatatttccgtttcgataagccgcgagggaagatccgttatcatagagacatcaagctctgatttgccgtttgtaaataatgttgtttatgaagatataattaatctttcggaagccatgcaaaaattaaaagactcaatgaatacaacggctatgaagaaagaattatttgatcgcagaggaagaacaactaacagtctgctttccgtaattgaagctaactcaattgtccttgatgttaaaggtgaaaacatagaagaagtaataagggaacttgttgaaacgcttaacaagcagaaaaaactgctgaataaagaacttgtttttaatgatgtatttgaacgtgaaaaaataatgagtaccaatatgggctatggaatagtattaccgcatgcgaagagtgaacgagtaaaggagacgttgtcccggtag

SEQ ID NO: 12854 - protein, 268 aa, Unknown
  Obtained from environmental sample
  misc_feature (1)..(268): Xaa is any amino acid
MLGFNVKGALRIGVGMVPRGEVALIIAGIGLAMGILDNQLFSIVILLTLISTIIAPPLLNASLKIKGQGTRKFVNDENITYLKWDFGSHDVARLMLDRLLIDIRAEGFYVQVMNLDNNVALARKDDISVSISREGRSVIIETSSSDLPFVNNVVYEDIINLSEAMQKLKDSMNTTAMKKELFDRRGRTTNSLLSVIEANSIVLDVKGENIEEVIRELVETLNKQKKLLNKELVFNDVFEREKIMSTNMGYGIVLPHAKSERVKETLSR

SEQ ID NO: 12855 - DNA, 834 bp, Unknown
  Obtained from environmental sample
  misc_feature (1)..(834): n is a, c, g, or t
atgagggacagaatgaacgcacccatcgaatatgactatacgcgcaagggctactattatacagaaaaaactttccggcttcccgccgccttcgcctccgccaatgatatgctggcgctgggaatggcgaaaaccctcctttccctttaccaaaacacccctatatatgacgcggcaaaagggcttatggaaagcgttaccgcgcctcttgaaaacgacggaaactcgcggtggtacgaagaacgcgttatcgtgccgcctgttccggctgtgcaattttccccggaaatatggaacattgtctgtgaagctctgcggaaaaaccgcgtcctcaagtttgaataccgcagtacatggaaaagcggcttctctccccgccgtgtccgtccctatcagcttctttttgacaacggcgcgtggtatctctacgcgtattccatacatggcaagggcatgagaatgtactcccttccccgaatacggaatatcaatcttgaggatgagatctttactttaccggccgcctccgattaccgcgcccatgtagacggtagtttccttggcgcgtattcaaccgaaaaaaaacgccgcttccgtatcgcttttttcaacgacggggcgatgaggattaaagaacgcctgtgggcggcggatcaaaagataaaagaaacagccgacggcgtaatcatcagtttttcaagcgcccagtacggcaaagttctggaactggntcttgccacgggcgcgacgcgctcccccttgacctgcggaacttgtcaaggattggggggatatattcgggatatgcaaaaacaggttaaatcgcggggataa

SEQ ID NO: 12856 - protein, 277 aa, Unknown
  Obtained from environmental sample
  misc_feature (1)..(277): Xaa is any amino acid
MRDRMNAPIEYDYTRKGYYYTEKTFRLPAAFASANDMLALGMAKTLLSLYQNTPIYDAAKGLMESVTAPLENDGNSRWYEERVIVPPVPAVQFSPEIWNIVCEALRKNRVLKFEYRSTWKSGFSPRRVRPYQLLFDNGAWYLYAYSIHGKGMRMYSLPRIRNINLEDEIFTLPAASDYRAHVDGSFLGAYSTEKKRRFRIAFFNDGAMRIKERLWAADQKIKETADGVIISFSSAQYGKVLELXLATGATRSPLTCGTCQGLGGYIRDMQKQVKSRG

SEQ ID NO: 12857 - DNA, 507 bp, Unknown
  Obtained from environmental sample
  misc_feature (1)..(507): n is a, c, g, or t
ttgtggggaatgttgtcataccttatcccggaaaaattnatggttaggaaaagtatcaatttttatgatgacggctgtgaaagaattgcaaaccgggagaaaaaattatttatcattaaacaatactttattaattgtttaatgaatttaaaacatttaggggtctatctgcttataggcatatttctgggcgtggctgtagagatgtatataccaaagaacctgatatataccgcttttagggcgggacggatacagtccatacttgcgggagctttattgggcatccccctgtctccctgtggcggagccgcaataccgttggtcagcgctatgataattaacggcatgggcaaaggaaccgcgcttgccttttttattgtcggtcccgccacacgcccaacgcctcttatcgctatggcgacattgtttacccctttgttcttggttgggtattgcctgttccttattgtatcagcggtgttaatgggattggtttatgtgtaa

SEQ ID NO: 12858 - protein, 168 aa, Unknown
  Obtained from environmental sample
  misc_feature (1)..(168): Xaa is any amino acid
MWGMLSYLIPEKXMVRKSINFYDDGCERIANREKKLFIIKQYFINCLMNLKHLGVYLLIGIFLGVAVEMYIPKNLIYTAFRAGRIQSILAGALLGIPLSPCGGAAIPLVSAMIINGMGKGTALAFFIVGPATRPTPLIAMATLFTPLFLVGYCLFLIVSAVLMGLVYV

SEQ ID NO: 12859 - DNA, 618 bp, Unknown
  Obtained from environmental sample
  misc_feature (1)..(618): n is a, c, g, or t
ttgaggaataatatgcaattagaaggtcaaacaagaataccgtccggctgtgccatatctggggttataagtaagtccagaaagcgtatgagcggtgaggctattataaaatccatttctgttatgcacgaccgctcaaatggtttgggtggcgggtttgcggcttatggtatttatccagaatataaaaactattatgccttgcatatattttacgattccattcacgcaaaaagagaatgcgaggaatttttggaacggcattttgatattatcaatctttcaaagataccaaccagaaaagttaaagccattaccgatgaaccgctgatttggcgttattttgttgcacccctgcacaccaaacttgaaagcagccagttagatgaacgcgaatttaccagcaaatgcgtatttcgcatcaataccgggataaatggtgcttatgtgttttccagtggcaaaaatatgggcgtgttcaaagcggttggctttcagaagatgtngggcacttttatcgcttngaagaatacatggctggtgttcactgcgcacgggcgttatcaaccaacaccccaggttggtggggcggggcgcatccattacattgttggataa

SEQ ID NO: 12860 - protein, 205 aa, Unknown
  Obtained from environmental sample
  misc_feature (1)..(205): Xaa is any amino acid
MRNNMQLEGQTRIPSGCAISGVISKSRKRMSGEAIIKSISVMHDRSNGLGGGFAAYGIYPEYKNYYALHIFYDSIHAKRECEEFLERHFDIINLSKIPTRKVKAITDEPLIWRYFVAPLHTKLESSQLDEREFTSKCVFRINTGINGAYVFSSGKNMGVFKAVGFQKMXGTFIAXKNTWLVFTAHGRYQPTPQVGGAGRIHYIVG

SEQ ID NO: 12861 - DNA, 789 bp, Unknown
  Obtained from environmental sample
  misc_feature (1)..(789): n is a, c, g, or t
ttgggggtatgggcaattccccggaaaatttttcccggtttatttggaataggatttggaataaatgctttggccaagttaccaattcccttcaatagacccttttgcgggaaccctagggaaacaaaaggtttttctcgggcacaaaattcaaaagatgttgaacgtgatgcaaatggacgcattatcaacaacctgccacctcagcttttgctttcaatgccagtatgtttctctgctatgagttatggctctataagctacaacgctcacgaaagtcttgcacgtgcagcagaagaattaggcattttgtacaacacgggcgagggcggtttgcacgaggatttttaccgctggggcaagaataccattgtgcaggtagcttctgggcgttttggcgttcatcctcaatatttgaacagcggtgcggcaattgaaattaaaataggtcagggagcaaagcccggcattggcgggcatttgccagggacaaaaattgtgggtgatatttcacgcacaagaatgattcccgaaggcaccgatgctatatcgcccgctccgcaccacgatatttattccattgaagatttgcggcaattggttttctcgctaaaagaagcatccgattacaaaaaaccagtgatagtgaaaattgcagccgttcacaatgttgttgccatagccagcggcattgcaaggagcggagcagatataatagccatagacggcttccgtggcggaacgggagcagctcccacacgcatacgcgaccacgtggcatcccaatga

SEQ ID NO: 12862 - protein, 262 aa, Unknown
  Obtained from environmental sample
  DOMAIN (17)...(262): Conserved region in glutamate synthase
  misc_feature (1)..(262): Xaa is any amino acid
MGVWAIPRKIFPGLFGIGFGINALAKLPIPFNRPFCGNPRETKGFSRAQNSKDVERDANGRIINNLPPQLLLSMPVCFSAMSYGSISYNAHESLARAAEELGILYNTGEGGLHEDFYRWGKNTIVQVASGRFGVHPQYLNSGAAIEIKIGQGAKPGIGGHLPGTKIVGDISRTRMIPEGTDAISPAPHHDIYSIEDLRQLVFSLKEASDYKKPVIVKIAAVHNVVAIASGIARSGADIIAIDGFRGGTGAAPTRIRDHVASQ

SEQ ID NO: 12863 - DNA, 378 bp, Unknown
  Obtained from environmental sample
  misc_feature (1)..(378): n is a, c, g, or t
ttggatcagtttcaaaataatcgggctttgttaataaaaaaaacatgggtggaagaagccgatgaaatccgcaaaggaaaattacacgacgacattccgtcgtttatgaaaactattgagcagccgaattacttaaaggcaatagaagaattcagcgtggttcttgatgagttagcttatctttttttcggcaaacaaagcgaaaaagaggattttgccgagtataccttccgcattgacgcgcaaatgggtcttttctggtggtacggaagcagacttactttattaaaagaattgaaagataaaaatattgaccaaaacgacaaatgcttgtgggcggttttacttcttggtctgtgttatctgacaaatttttaa

SEQ ID NO: 12864 - protein, 125 aa, Unknown
  Obtained from environmental sample
  misc_feature (1)..(125): Xaa is any amino acid
MDQFQNNRALLIKKTWVEEADEIRKGKLHDDIPSFMKTIEQPNYLKAIEEFSVVLDELAYLFFGKQSEKEDFAEYTFRIDAQMGLFWWYGSRLTLLKELKDKNIDQNDKCLWAVLLLGLCYLTNF

SEQ ID NO: 12865 - DNA, 693 bp, Unknown
  Obtained from environmental sample
  misc_feature (1)..(693): n is a, c, g, or t
ttgctccgcgaaaattttatgcaaaccgccataaacggcatccctgtaatttcaacaaccatgtacgctcctgacggcactcttgttatgtatgtttccgttccaataaacgataatcttgttctggctgcgactttgcccggttttcattttaccaatttactgtccaaatttatcttctggacctccggccatttatttattcacgacgctgaaggaaacaccatatccaattaccgcgaagattgggtacaacagagaattaattttttaaaattggcacaaactgacaaggggtatgaaagcgtatccgtagtgataaaacgcgggataaataaagagcgcggcacgggcaggttcacccttgatggtatgcacagattgtacgccatccgccccgtatcaagccagattgaagactggtttataggggttgtcgccccattaaatgaaagtgtattaagagaagttcccggcagtttattgcttatagggctgattacgttgatcatcagtatacccgccgccatagcggcctccattatgctaaggcgtccatacgaagaagctgaccaactgcgcanaactgcggaagcgatgtcatcttcaaagacaaagtttttggcgaccatgagccatgaaatacgcacgccaatgaacagtatcttgggtttttcggagttttgcgcttga

SEQ ID NO: 12866 - protein, 230 aa, Unknown
  Obtained from environmental sample
  misc_feature (1)..(230): Xaa is any amino acid
MLRENFMQTAINGIPVISTTMYAPDGTLVMYVSVPINDNLVLAATLPGFHFTNLLSKFIFWTSGHLFIHDAEGNTISNYREDWVQQRINFLKLAQTDKGYESVSVVIKRGINKERGTGRFTLDGMHRLYAIRPVSSQIEDWFIGVVAPLNESVLREVPGSLLLIGLITLIISIPAAIAASIMLRRPYEEADQLRXTAEAMSSSKTKFLATMSHEIRTPMNSILGFSEFCA

SEQ ID NO: 12867 - DNA, 699 bp, Unknown
  Obtained from environmental sample
  misc_feature (1)..(699): n is a, c, g, or t
ttgatggcgagttatgccagcccgccttcatcgccgtcgcccttaacatgggggttattagacgacgcccgcgccgtggaagaattgttttcaggaaccagggggattaattacccccttccgccgggaatcgcgtttgacaaaaaccctgttcttgacgctaatgtgatgaatgaagttttcaatcttttacgcagtgaggaagggcgcgatcttttcatgcaaaaattactttctttttcaggaacaatagtttctgatgacgaaaatgacggtttctttgacagcaaagtgttttacaaatccggttttgtcagtgatttcgcgtatgatgtaaatcaaacgaatgaatttaattggagcgttaagttttcggctgacggtgttcccgttatggcgtggattcccgccgaaggagacaaaagggcgcaagttcaatgggaacgttatccttccgtaaagcaaataacaatttcaaatgagatttttttcttccgtccggcggattttcaatatgcgccggttgatcttataattttcgccggcagtaaaaaatatgccggtcccgagtaccctgtattaattccccaatatttgggattgacgcgaaaagcgcttgtttcattttgctcaagtataaagcgcctgagtatggagtttgacggcgctgcggaggatttgtccctgaaaaaggnataa

SEQ ID NO: 12868 - protein, 232 aa, Unknown
  Obtained from environmental sample
  misc_feature (1)..(232): Xaa is any amino acid
MMASYASPPSSPSPLTWGLLDDARAVEELFSGTRGINYPLPPGIAFDKNPVLDANVMNEVFNLLRSEEGRDLFMQKLLSFSGTIVSDDENDGFFDSKVFYKSGFVSDFAYDVNQTNEFNWSVKFSADGVPVMAWIPAEGDKRAQVQWERYPSVKQITISNEIFFFRPADFQYAPVDLIIFAGSKKYAGPEYPVLIPQYLGLTRKALVSFCSSIKRLSMEFDGAAEDLSLKKX

SEQ ID NO: 12869 - DNA, 813 bp, Unknown
  Obtained from environmental sample
  misc_feature (1)..(813): n is a, c, g, or t
ttgatcggtgaagcggctttggcgtttaaagattacaccagtgtaaaaaataatatcgttcacatacttacaagtaatgataaattacccgattttaacaattacgatttaataatcgacgcgatgcttggaataggagcgagcggagaacctcgcggattgtacgcggatgtgattaaagctgtaaacgcctgcaatgcttttgtcctggcggttgatactccttcggggcttgattgcgataacgggaaatgtacttctatatgtataaaagccgattgtacagtaaccgccggatttcttaaattgggacaatttttttatcccggcagagctaatgtcggtgaattacaaattgccgatttagggtatccggaaaatattgtggaagagcagtccctcggaatttttttgcctgacattaatttcttcaatagtattctgcccgcgcgtaaggaaacaggatcaaaaattgatcatgggcttgcgctccttgtgtgcggctcgcgcggaatgagcggctccgccgcgcttgcgtccgtggcggcattacgcagcggatgcgggatggttcatctggctgttcctgaatcactaattaatacattgtccgttaaggttacggaacccgttttgcatccgttagcagaaactgcttccggcgcttgcgcgtcatccgcgctgaataaagtgctgtcactctgtgaacgaatggacgcgctttgtattggctccgggttggtcagagatccgcagagcgcgtctcttgtgcgggaacttatcaaaaaaattgataagccccgctgtaattga

SEQ ID NO: 12870 - protein, 270 aa, Unknown
  Obtained from environmental sample
  DOMAIN (1)...(104): YjeF-related protein N-terminus
  misc_feature (1)..(270): Xaa is any amino acid
MIGEAALAFKDYTSVKNNIVHILTSNDKLPDFNNYDLIIDAMLGIGASGEPRGLYADVIKAVNACNAFVLAVDTPSGLDCDNGKCTSICIKADCTVTAGFLKLGQFFYPGRANVGELQIADLGYPENIVEEQSLGIFLPDINFFNSILPARKETGSKIDHGLALLVCGSRGMSGSAALASVAALRSGCGMVHLAVPESLINTLSVKVTEPVLHPLAETASGACASSALNKVLSLCERMDALCIGSGLVRDPQSASLVRELIKKIDKPRCN

SEQ ID NO: 12871 - DNA, 684 bp, Unknown
  Obtained from environmental sample
  misc_feature (1)..(684): n is a, c, g, or t
atggcggcatgggaccgagttgtggtaaatttgcacggagcccacatggtatttgttactaccggcatgggcggcggcaccggcacgggttccgctccggttgtcgctaaaatcgcgaaagatcagggcgctctcacggtcggcgttgtaaccaaaccttttgggtttgaagcgcccaaaaagatgaaaattgccgacgcgggaattaaaaaattacgcgaagcggttgacagtttgattgtgattcccaatgagaatctcttcaaaatggtggatcgcaaaacatcatatcagcaggcgtttgcctacgcgaatgatgttttatgtcaggcggttcagggtatttccgatctgattaccaaaacgggtttggttaataccgattttgccgacgttgaatcaacaatgaaagggcagggtgatgccctcatggggattgggataggcagcggagatgatcgcgcgaaagacgcggcggaaaaagccatcgcgaaccctcttttggaagatgttaacattgaaggggcaagccgccctctgataatatttncgggcctgaagatattccntggttngagtcagcgaantaatggataccataaggcaaaagcggatccggaagttgagattatctacggtattatttccgaaccgaactgggagaagaagtcaagtaacggttaa

SEQ ID NO: 12872 - protein, 227 aa, Unknown
  Obtained from environmental sample
  DOMAIN (5)...(123): Tubulin/FtsZ family, GTPase domain
  misc_feature (1)..(227): Xaa is any amino acid
MAAWDRVVVNLHGAHMVFVTTGMGGGTGTGSAPVVAKIAKDQGALTVGVVTKPFGFEAPKKMKIADAGIKKLREAVDSLIVIPNENLFKMVDRKTSYQQAFAYANDVLCQAVQGISDLITKTGLVNTDFADVESTMKGQGDALMGIGIGSGDDRAKDAAEKAIANPLLEDVNIEGASRPLIIFXGLKIFXGXSQRXNGYHKAKADPEVEIIYGIISEPNWEKKSSNG

SEQ ID NO: 12873 - DNA, 498 bp, Unknown
  Obtained from environmental sample
  misc_feature (1)..(498): n is a, c, g, or t
gtgcaatgcgccgccacgaaagcgcagcacctccgcgacgccgagttcatcgtcgaaatcgtcgacccgcgcagcggccaccccctccccgacggccactggggcgagctggcgcttaccaccctccgcaacgaagccatgcccntgatacgctaccgcacaggcgacataacgcgccgcgtcgtcgcgccctgcccntgcggcggcgtcctcccccgcctcgacacaataaagggccgaatttcatccatggatgagccctacccaacccacgccctcgacgaagcgctcttccgcctccccggattgattgattaccgcgccgccatcctccccgacggcaccctcgacctcaccctcgacagcctccccgcatacaccgaagccgacctccgccacgcactgcaaacccagaacctccacccccccgccttaacattccgccaacaacccctaccagtattctcaggccccgcaaaaagaaatgtttacagataa

SEQ ID NO: 12874 - protein, 165 aa, Unknown
  Obtained from environmental sample
  misc_feature (1)..(165): Xaa is any amino acid
MQCAATKAQHLRDAEFIVEIVDPRSGHPLPDGHWGELALTTLRNEAMPXIRYRTGDITRRVVAPCPCGGVLPRLDTIKGRISSMDEPYPTHALDEALFRLPGLIDYRAAILPDGTLDLTLDSLPAYTEADLRHALQTQNLHPPALTFRQQPLPVFSGPAKRNVYR

SEQ ID NO: 12875 - DNA, 447 bp, Unknown
  Obtained from environmental sample
  misc_feature (1)..(447): n is a, c, g, or t
atgaagtgggaaaaaaaagatatctctcccgaaacagttaaggaaatttccgcaaagtacggctgtgatctgctgactgcctcaatccttgtacgcagaggtttctgcacgggcgacgcgatacgcttctttctggaagacgatcttgcctccctgcgtaatccgttcgcgctggacggcatggaggacgcggttgagcgtattcttgccgcaaaagacgaaggcgagaaagtgctggttttcggggacggcgacgtggacggcattaccggaaccgcgctgctggcgaattaccttgaaagtataggcatggacgtaacatggcgcattcccacaggagacgaatcttacggactttccctggaagcgggtgaaaaatttcgcggcgaaagacggcacgctgataattacggtagactgcggcatttccccctttggaaaaattaa

SEQ ID NO: 12876 - protein, 148 aa, Unknown
  Obtained from environmental sample
  misc_feature (1)..(148): Xaa is any amino acid
MKWEKKDISPETVKEISAKYGCDLLTASILVRRGFCTGDAIRFFLEDDLASLRNPFALDGMEDAVERILAAKDEGEKVLVFGDGDVDGITGTALLANYLESIGMDVTWRIPTGDESYGLSLEAGEKFRGERRHADNYGRLRHFPLWKN

SEQ ID NO: 12877 - DNA, 768 bp, Unknown
  Obtained from environmental sample
  misc_feature (1)..(768): n is a, c, g, or t
ttgtctggaatccgcgcttttgcgatggacgaattggggctcaaagaaagccgtaactatacgcgttttgtgaaacttgacagaaactatcttgccgcggttgtttccgcctcggacaaagattcattccgccgtcacgaatggaattttccggttgtaggacgcatgccctacaagggttttttcaatgttgaggacgcgcgtaaagagcgggcaagactggaaaaaaaagaccttgatgtctggattcgcggggtagacgctttcagtactctgggctggttcaaagaccccctttactcctatatgctggattattctcctgcaagactggcggatttaattatccacgaacttgttcatgccacggtattcataaaaggacaggttaagtttaacgaagagctggcggaattcatcggcagcgagggagccggactttttatagcgaagcgatacggtgaagattcagacgaataccggcaaatattttcatccgacaaagacagccaaaattatgtcgcgtttattcaggaattgatcgcggaacttgacgttctttacgcaagtgaaattaacagagaagaaaaactagcggaaaaagagcggataattaacgccgcgaaagagcggtttaacgccgagtacgacaaacgtttttccagcgataattacagggggtttgcggaactaccgggtaaacacgcgtatctggaacttttcnggctataccacacagaggataattttttacccagaactctatga

SEQ ID NO: 12878 - protein, 255 aa, Unknown
  Obtained from environmental sample
  misc_feature (1)..(255): Xaa is any amino acid
MSGIRAFAMDELGLKESRNYTRFVKLDRNYLAAVVSASDKDSFRRHEWNFPVVGRMPYKGFFNVEDARKERARLEKKDLDVWIRGVDAFSTLGWFKDPLYSYMLDYSPARLADLIIHELVHATVFIKGQVKFNEELAEFIGSEGAGLFIAKRYGEDSDEYRQIFSSDKDSQNYVAFIQELIAELDVLYASEINREEKLAEKERIINAAKERFNAEYDKRFSSDNYRGFAELPGKHAYLELFXLYHTEDNFLPRTL

SEQ ID NO: 12879 - DNA, 843 bp, Unknown
  Obtained from environmental sample
  misc_feature (1)..(843): n is a, c, g, or t
atggaaaccgaacgtgatatggcagggccgtatttaaatgatttaataaaagcagtaaaaacggggaagtccatcacctttaccaattatggtgaagaaataaaagagaacatggaaatttttctcgttcctgtcaatattggaatatcagcaagcccatggagttacgcggttggggttacaacaaaaacagtaatggcctccgtaaatgaaatgctggtcatgaccgtcgtcatcagcgtcatcgtactcgcagtggcaagcgcagcggcgataatcctgtccggaaccatcagcaagcccattgtgaaggtgacagaaacactaaaggatatttccgagggagaaggcgatttgacacgggttattgcctcaggctcaaaagacgagatcggcgatcttgcccgtttcttcaatcagactttggcgaaaatcagaaatcttgtagtaaacataaaaaaggaagcgcttaaactgtccgaaattggtacggatctggccggcaatatgacggagactgccgcggcggtaaacgaaattacagccaatattcagaacattaaaggacaggtgataaaccaaagcgccagcctgaacgaaacgaacgccaccatgaaacaggttgttgtaaatatcaataaactcaacaaacatattgaaaaccagagcgatgacgtaagccaggcctcatctgccattgaggaaatagcggcaaatatcaattcggttacctctacccttatgaacaacgcagacaacgttaaaacattacaggaatcttcagaagttggacggaagggattgcaggaagtcgtatcaaatattatgctcggccgaatctga

SEQ ID NO: 12880 - protein, 280 aa, Unknown
  Obtained from environmental sample
  DOMAIN (76)...(147): HAMP domain
  misc_feature (1)..(280): Xaa is any amino acid
METERDMAGPYLNDLIKAVKTGKSITFTNYGEEIKENMEIFLVPVNIGISASPWSYAVGVTTKTVMASVNEMLVMTVVISVIVLAVASAAAIILSGTISKPIVKVTETLKDISEGEGDLTRVIASGSKDEIGDLARFFNQTLAKIRNLVVNIKKEALKLSEIGTDLAGNMTETAAAVNEITANIQNIKGQVINQSASLNETNATMKQVVVNINKLNKHIENQSDDVSQASSAIEEIAANINSVTSTLMNNADNVKTLQESSEVGRKGLQEVVSNIMLGRI

SEQ ID NO: 12881 - DNA, 609 bp, Unknown
  Obtained from environmental sample
  misc_feature (1)..(609): n is a, c, g, or t
atgccggacgttcatttgggaaaaagcacggtaattggctggacagccacttatgattcacttattatcccttcttatctgggccttgatataggctgcggaatatgcgcctgcaatttaggaaaagagaaactggcgtttgacaaactggacaaatttatcaaaaaacgcgttccatccggccaggatgtccgcgattctctccatgaagatttggaagaaatgaatgaatttatctgttcggttaacggcaatccggctttttccaaaacggaagattttaagaatgagattgagaagctttgtgagaagcagggaaaatattccgagcgtatatttgcttctcttggaaccttgggcggcggaaatcattttatagaaatcgacgttgacgaaaaccgtaaccgctggcttttgatacattccggttctagaatacttggggcttacaccgccgaatatcatgagattcttgcattacgcgaaacttcagcttacagtcctatcaagtatctttccggcgcgtcggcgaaaaattatcttgccgatataaattttgtcagcattatgcctgttttaaccgctctcctatggcaaaaaccattgtaa

SEQ ID NO: 12882 - protein, 202 aa, Unknown
  Obtained from environmental sample
  DOMAIN (1)...(202): Uncharacterized protein family UPF0027
  misc_feature (1)..(202): Xaa is any amino acid
MPDVHLGKSTVIGWTATYDSLIIPSYLGLDIGCGICACNLGKEKLAFDKLDKFIKKRVPSGQDVRDSLHEDLEEMNEFICSVNGNPAFSKTEDFKNEIEKLCEKQGKYSERIFASLGTLGGGNHFIEIDVDENRNRWLLIHSGSRILGAYTAEYHEILALRETSAYSPIKYLSGASAKNYLADINFVSIMPVLTALLWQKPL

SEQ ID NO: 12883 - DNA, 627 bp, Unknown
  Obtained from environmental sample
  misc_feature (1)..(627): n is a, c, g, or t
gtggcgcttacaaagaaagtctgcgagcttgcccattcacaaaaagattatgttacggtagaaggagaacttggagttctcgccggagtggaagacgatgtttcatcggaacacagccattacacccagccttccgaagtcgtggatttcgtaggaaagacaaaggtcgattcattggcgatttccatcgggacaagccacggaagagcgaaattcaaaccggaacaatgcacaagagacgccgacggcattcttatcccccctccgctacgctttgatatccttgaagaagttgaaaaacagatacccggtttcccaatcgttctgcacggctcttcgtcagtacccattgaatatgtgcacatgatagaaaaatacggcggaaagcttacggattcagtcggtatccccgaagaacagcttcgcaaagcggcaaaaagcgcggtctgcaagatcaatatcgattcagatggacgtcttgccatgacggctttaatccgcaaaattttagtcgagaaaccggatgagttcgatcctcgcaaaatactcggaccggcgcgcgatgagcttaaaaaactttattcgcacaagaatcagaatgttcttggctcggcaggacgtgcgtga

SEQ ID NO: 12884 - protein, 208 aa, Unknown
  Obtained from environmental sample
  DOMAIN (1)...(208): Fructose-bisphosphate aldolase class-II
  misc_feature (1)..(208): Xaa is any amino acid
MALTKKVCELAHSQKDYVTVEGELGVLAGVEDDVSSEHSHYTQPSEVVDFVGKTKVDSLAISIGTSHGRAKFKPEQCTRDADGILIPPPLRFDILEEVEKQIPGFPIVLHGSSSVPIEYVHMIEKYGGKLTDSVGIPEEQLRKAAKSAVCKINIDSDGRLAMTALIRKILVEKPDEFDPRKILGPARDELKKLYSHKNQNVLGSAGRA

SEQ ID NO: 12885 - DNA, 870 bp, Unknown
  Obtained from environmental sample
  misc_feature (1)..(870): n is a, c, g, or t
gtggtggatgatattcataccaacctggtcgttacttcgggactgttggcaatatacaagagccatgtcgatacctgtaccagcggggcctccgcaatttcaatggtgcaaaaaaaacattatgatatagtgttcatggatcacatgatgccggaaatggatgggattgaggctgccaggatcattcgcggcatggaaggggaatattacagaaacctgcccatcatcgcgcttacggctaacgcgattatgggaatgaaagaaatgtttctttccaacgggtttaacgattatctcagcaagccgattgaagttttaaaactggacgataccctggcagcatggctccctgctgaaaagcagatacaaaacacggaagcgcaggagccaattgaatccaaagccgttattcccgatggtttcccggtggaaggcattgatatcaaggcaggaaaaacccgttataccgaaaaagcgtacctggatgtgctgcgctcttattaccagcatactccgggtttactggagaaaatcagccatataaaatacagggacctgcccgaagaagccataaaggaatatactattacggttcatggcataaagggcgcgtcttttggcatatgcgccgatacggtagcaaaacaggcggaggctcttgaaaacgcggccaaaagccgggatttgcaattcattgagatgaataatgttcgtttcattgaagaagtcgaaaaaatacttggaaggcttaaagagctttttaccttgcttatgaatcagtcgggggcgaagcccatgtgtgagaagcccgactccnggctcttttggaaaggcttaccgaggccgccaggcgctataacgtcaaggtaa

SEQ ID NO: 12886 - protein, 289 aa, Unknown
  Obtained from environmental sample
  DOMAIN (2)...(113): Response regulator receiver domain
  misc_feature (1)..(289): Xaa is any amino acid
MVDDIHTNLVVTSGLLAIYKSHVDTCTSGASAISMVQKKHYDIVFMDHMMPEMDGIEAARIIRGMEGEYYRNLPIIALTANAIMGMKEMFLSNGFNDYLSKPIEVLKLDDTLAAWLPAEKQIQNTEAQEPIESKAVIPDGFPVEGIDIKAGKTRYTEKAYLDVLRSYYQHTPGLLEKISHIKYRDLPEEAIKEYTITVHGIKGASFGICADTVAKQAEALENAAKSRDLQFIEMNNVRFIEEVEKILGRLKELFTLLMNQSGAKPMCEKPDSXLFWKGLPRPPGAITSR

SEQ ID NO: 12887 - DNA, 816 bp, Unknown
  Obtained from environmental sample
  misc_feature (1)..(816): n is a, c, g, or t
ttgacgatagtaacggacgctgtcgagatgatgattatagacgtacagtgctgtatgcctagccttcccgatgtcgcgaaaaattatcacacggaaattatttctaccgccgacattgctaaaactatcggcgcaagccatgtcagcgtagggcatgacggcgatcctgtaaaacacgcgaaagagcttgtaaaacgcgccgtcgataattttaaaaacagagattcgtcaaaggtaaatattcccgcggacaatgaaaaccttgtcgccggtttttccgtagatgcgataaaatatatgcttggcggtcgataccgcgcttctttccgtccgttgaatgacgcaatcatagcgaacagaattctgggtgtcgtgggaattgtcggctgtaataacacaaagcaaaaaactgacgattatacaaatacgctaaccctcgaacttgttaaacgaaatatactcgtgcttcaaacaggctgttcggctatcggaagcgcgaaggctggtctgttgaaaccggaagttgcgttaaagtatgctggcgcggggcttagggaagtttgcgagaccgtaggcattccgcctatactgcacatgggaagctgtgtggataactcaagaattcttgaagcagcggcggaagttgttttcgagggcggacttggagacgaccttggcggtcttccagccgtaggcgttgcgcctgagtggatgagcgagaaggcggtcgccattggctgttactttgtcgcaagcggcgttgatgtagtgcttggaaatccngttttatgttcccggctcctcggccgattctga

SEQ ID NO: 12888 - protein, 271 aa, Unknown
  Obtained from environmental sample
  DOMAIN (1)...(271): Prismane/CO dehydrogenase family
  misc_feature (1)..(271): Xaa is any amino acid
MTIVTDAVEMMIIDVQCCMPSLPDVAKNYHTEIISTADIAKTIGASHVSVGHDGDPVKHAKELVKRAVDNFKNRDSSKVNIPADNENLVAGFSVDAIKYMLGGRYRASFRPLNDAIIANRILGVVGIVGCNNTKQKTDDYTNTLTLELVKRNILVLQTGCSAIGSAKAGLLKPEVALKYAGAGLREVCETVGIPPILHMGSCVDNSRILEAAAEVVFEGGLGDDLGGLPAVGVAPEWMSEKAVAIGCYFVASGVDVVLGNPVLCSRLLGRF

SEQ ID NO: 12889 - DNA, 657 bp, Unknown
  Obtained from environmental sample
  misc_feature (1)..(657): n is a, c, g, or t
ttgccatcgggggcggcggttatgattttcattggcggcggattccccgttcacgccggaaaatacntatgttgcgatggagccgttcagacatcgctgagtatgctgtcgtcgccggtcaacacagatatgggcagtattcgggcaagtgtcgggattacggcggatggggacatggagagcatcggcaacgctgtggcggtacagacccacgagttgattcaatgctaccagatccacggtctttttatccttgcgccgataaaaaacggcatactgctgatagaccagcacgccgccgacgagcgggtgcgttacgaacaggcgcttagggatcttgagagcggaagcccgatctcgcagcagttgctctttccgatagtgcttgagatgagcccggcggaaaaaaccgtacttgattccggcaaaaagtattttaataacctaggatttgaaatatccgattttggcggcggttcggtttctatctcagccctgccggcttttttgcgggacggggaagcggagggcgcggtgagggagatggtgcgttacctgcttgacgggcgcggtccggagacgttaaaaaaacccgtagaagcgcttcgcggcggcgtttgcctgcggagcggcgataaagtcggggcagaagcttag

SEQ ID NO: 12890 - protein, 218 aa, Unknown
  Obtained from environmental sample
  SIGNAL (1)...(19)
  misc_feature (1)..(218): Xaa is any amino acid
MPSGAAVMIFIGGGFPVHAGKYXCCDGAVQTSLSMLSSPVNTDMGSIRASVGITADGDMESIGNAVAVQTHELIQCYQIHGLFILAPIKNGILLIDQHAADERVRYEQALRDLESGSPISQQLLFPIVLEMSPAEKTVLDSGKKYFNNLGFEISDFGGGSVSISALPAFLRDGEAEGAVREMVRYLLDGRGPETLKKPVEALRGGVCLRSGDKVGAEA

SEQ ID NO: 12891 - DNA, 336 bp, Unknown
  Obtained from environmental sample
  misc_feature (1)..(336): n is a, c, g, or t
gtggccataaagcactcgaagttggcgctagagatattcgacgacaagaagaagatcgaggagcgcgccaagcatatattcaaggtgcaagacgctttggaggaacttcaggtctctctgaacttggacgccggcggggagattgcggcgaacttattcaacctatactcctacatgttcagcacaaccatagacgcgaacatccacaacgacagggccaagatggaggaggtgctgcggtatttggagacgttgcgcgaggcgtgggggcaggcgcatttgaagtcaaaagcggagtcggcgccggacataaatttggaaaatgcggcagtgtaa

SEQ ID NO: 12892 - protein, 111 aa, Unknown
  Obtained from environmental sample
  DOMAIN (1)...(96): Flagellar protein FliS
  misc_feature (1)..(111): Xaa is any amino acid
MAIKHSKLALEIFDDKKKIEERAKHIFKVQDALEELQVSLNLDAGGEIAANLFNLYSYMFSTTIDANIHNDRAKMEEVLRYLETLREAWGQAHLKSKAESAPDINLENAAV

SEQ ID NO: 12893 - DNA, 609 bp, Unknown
  Obtained from environmental sample
  misc_feature (1)..(609): n is a, c, g, or t
atgaatccggagacggcccccctacccatggtcggcggcgacttcgtctcccgcatgaaacaaggcgcggcgctcatcaacacctcgcgcggacggataatagacgagaaaagcttcaaagacgcccgctcgcgcctcggaatggtcgtgctcgacgtttttgaaagagaaccggcgataaacgcggatacgctgagattagccgacatcgccacgccgcacatcgccggatactcgctcgacgggaaattgcgcggcacggacatgatctactgcggcgcggcggcgttcttcttcaaggaagccaagtggaaagcggaatcgtccgacctgcgcctccaaaaacgtagcatagacctgcgaaattcggaagaccccgtcggcgacggcatcaggggcgcatatcccataatggccgacgacgaacaattccggcgcatatactctatcccccaagacgaactggtgaagtttttcgaggggttgcgcgccgactaccccaaacggctggagttcccgcactttaagctgacaatctcggaacgccaaaaagcggcggcggcggccctcaccgaacttcggtttgaggtggaggtaactcctcaatag

SEQ ID NO: 12894 - protein, 202 aa, Unknown
  Obtained from environmental sample
  misc_feature (1)..(202): Xaa is any amino acid
MNPETAPLPMVGGDFVSRMKQGAALINTSRGRIIDEKSFKDARSRLGMVVLDVFEREPAINADTLRLADIATPHIAGYSLDGKLRGTDMIYCGAAAFFFKEAKWKAESSDLRLQKRSIDLRNSEDPVGDGIRGAYPIMADDEQFRRIYSIPQDELVKFFEGLRADYPKRLEFPHFKLTISERQKAAAAALTELRFEVEVTPQ

SEQ ID NO: 12895 - DNA, 720 bp, Unknown
  Obtained from environmental sample
  misc_feature (1)..(720): n is a, c, g, or t
ttgaataatctgaccggcgcctgcggactaaacactgaaaatgcggaggatagttctatggatgaggaattgagtgcctatatgagagagacgtgggccagaatcgacgcggtgatcgcggccaccaacgaacaaatcgcggctaccgacgcccaaatcgcggctaccaacgaacaaatcgcggccaacgacgccaagcttgcggcccaaatcgcggccaacgacgccaagcttgcggcccaattcgccgccaccgacgcccaaatcgccgctgtgaacaaggccgtcggcggcatcactacgagcaacggtatgctcgcggaggaaatgttctacaacaccttgtccgataaaatgaccttcggaggggtaaaatttgacacaatctccaaaaccattaaaatgtcgaaaaccctcccagacggcaaaaaattggaaggcgaattcgacatggccctctttaacggaacggcgctcgtgcttattgacgtcaaataccgtgcgaggaaagaagatgtcgactacctgatcgacaaacaattgcccaaattcagacgcctcttccccgtctaccgaaacttcaaaacatatctatgcctcggcggaatgtcattcgaaaaagacgtggaaaccgtagccgtccaacgcggcataggcgtactcaaagtaaaaggcgaaaccgtggaagtaaacgacggcaacgtgaaaacgtgggactga

SEQ ID NO: 12896 - protein, 239 aa, Unknown
  Obtained from environmental sample
  misc_feature (1)..(239): Xaa is any amino acid
MNNLTGACGLNTENAEDSSMDEELSAYMRETWARIDAVIAATNEQIAATDAQIAATNEQIAANDAKLAAQIAANDAKLAAQFAATDAQIAAVNKAVGGITTSNGMLAEEMFYNTLSDKMTFGGVKFDTISKTIKMSKTLPDGKKLEGEFDMALFNGTALVLIDVKYRARKEDVDYLIDKQLPKFRRLFPVYRNFKTYLCLGGMSFEKDVETVAVQRGIGVLKVKGETVEVNDGNVKTWD

SEQ ID NO: 12897 - DNA, 492 bp, Unknown
  Obtained from environmental sample
  misc_feature (1)..(492): n is a, c, g, or t
ttgactcggcatgacgtcgttgacacccgaggtggactactgggacgaccccgactgacgctcccggtcggaggatttgccgggcattctggacggtgtaaggcagagcggcgagccgcgccgcgaggaactgcggataggcagcgaggcggaagggcggccggtcaacgcaacgatggtcccactctccggcggcggagggctggttgtgttggaggacctcagcctcattgcccaggccgagaagcgcgcggcctggcaggaagtcgcccgcaggatggcccacgaggtgaaaaacccgctcacgccgataaagctgacggcgcagaggctggccaggagggtgcgcgagggtcgtttggagccgcaggccgtttccgagggcgccaccacaatcctcgaagaagtggagagcctcgcccgcctggtggagagcttcacgcgctttgccaagctgccggttccgcagcccgcgctgtgcgacgcatgtga

SEQ ID NO: 12898 - protein, 163 aa, Unknown
  Obtained from environmental sample
  misc_feature (1)..(163): Xaa is any amino acid
MTRHDVVDTRGGLLGRPRLTLPVGGFAGHSGRCKAERRAAPRGTADRQRGGRAAGQRNDGPTLRRRRAGCVGGPQPHCPGREARGLAGSRPQDGPRGEKPAHADKADGAEAGQEGARGSFGAAGRFRGRHHNPRRSGEPRPPGGELHALCQAAGSAARAVRRM

SEQ ID NO: 12899 - DNA, 684 bp, Unknown
  Obtained from environmental sample
  misc_feature (1)..(684): n is a, c, g, or t
atgaagtgggaaaaacgggatatttctcctgaactggtaaaaagcatctcgtccaaatacggctgcgatctcttgacagcgtccattttggcgcgccgcgatatagttacaggcgaggaaattcaatactttctggaggacgacttacgccatctgaaaaacccctttgaactgccgggtatggaagacgcggtggaacgtatccttgccgcaaaagaagagggcgaaaaagtcctggtttcaggcgaccgcgatgtggacggcataaccagcaccgctttggtagcgggtttcttgagctccctgggaatggacgtaagctgccgtctcccgtctggtgatgaaccttacggcctttcgttaaaagcggtcgaagactttgccgccgcctacggaacgctgataattacagtggattgcggtatttccaattttgaagagataaaaagagcggaagaactgggggtgaatgtaatcgtaacagatcatcacaacccgcaggaaaacctgccccctgctctgaccatcgtgaatccgaaactttcatccaaacatttcagggatttggctggctgcgttgtggcctacaaactcgtttccgccctgcgttttgccttaaaagcggactatacgcgcagtccatatgtctttctgacacgcgcccgctcaacgattcctgggtaa

SEQ ID NO: 12900 - protein, 227 aa, Unknown
  Obtained from environmental sample
  DOMAIN (71)...(219): DHH family
  misc_feature (1)..(227): Xaa is any amino acid
MKWEKRDISPELVKSISSKYGCDLLTASILARRDIVTGEEIQYFLEDDLRHLKNPFELPGMEDAVERILAAKEEGEKVLVSGDRDVDGITSTALVAGFLSSLGMDVSCRLPSGDEPYGLSLKAVEDFAAAYGTLIITVDCGISNFEEIKRAEELGVNVIVTDHHNPQENLPPALTIVNPKLSSKHFRDLAGCVVAYKLVSALRFALKADYTRSPYVFLTRARSTIPG

SEQ ID NO: 12901 - DNA, 717 bp, Unknown
  Obtained from environmental sample
  misc_feature (1)..(717): n is a, c, g, or t
atgtgcaataacattagaggaattaaattaatgacagaaaacaagacggcggaagaaaaagcaaacaaacttactccgaaagaaatcgtttctgaactggataaatatatcgtaggccagaaaaaagcgaaaagggcggtagcggtagcgctaagaaaccgcataaggcgcttgaaacttgatcccgagttacgtgaagatatagcgcccaagaacattcttatgatagggcctacaggagttggaaaaactgaaattgcccgccgcctcgctaaactcgcgggctctcctttcttaaaggtagaagcgacaaaatatacggaagtaggctatgtaggcagggatgttgaatccatgatccgcgaccttatggcggcgggttttcagatggtaaagcaggaaatgcaggaagctgttttacaggaagcggaaaaacgcgcggaagaggcgcttcttgatttactgcttccgacaaattcaaaaaaaccgaaagataaaaaaatgaaaccggtcgtaaggccgatgggcgctttttcgataaacccggaaaattcaaacggaagcattatcggaacaactttacaggttggaattccttttattaacaataaagacgacgaanatgaagatgaaaaaaataacatggaaaaagaagaaccgttaaatgacggcgaagatgaaaaatttaaagccacaaggggaaaaattcaggggtaa

SEQ ID NO: 12902 - protein, 238 aa, Unknown
  Obtained from environmental sample
  DOMAIN (69)...(172): ATPase family associated with various cellular activities (AAA)
  misc_feature (1)..(238): Xaa is any amino acid
MCNNIRGIKLMTENKTAEEKANKLTPKEIVSELDKYIVGQKKAKRAVAVALRNRIRRLKLDPELREDIAPKNILMIGPTGVGKTEIARRLAKLAGSPFLKVEATKYTEVGYVGRDVESMIRDLMAAGFQMVKQEMQEAVLQEAEKRAEEALLDLLLPTNSKKPKDKKMKPVVRPMGAFSINPENSNGSIIGTTLQVGIPFINNKDDEXEDEKNNMEKEEPLNDGEDEKFKATRGKIQG

SEQ ID NO: 12903 - DNA, 396 bp, Unknown
  Obtained from environmental sample
  misc_feature (1)..(396): n is a, c, g, or t
atgaaaatattcggtaacgaggcttttataagcgccgccggagcgaaaagttacgccgtgcagatgcggctttcaaatccaaagcacatgatgccgccggacagcccgtatttcggcagcggtaacaaagtaatagcgctggagaaaaaaatagacgccggccacgtaacaagggccggtacttttgaacacgctatgctgcaggcgctggataaagtatcgggcgccgatcaattcgctaaacaccttgaaaaagaggcgattatcaatcccgatacggttgatattcatgatataacaattgcccaggccgaagccggcatggcgcttaacattacaagaaatgttttgaaccgtctggttcagggctggaaggatataattaacacaagataa

SEQ ID NO: 12904 - protein, 131 aa, Unknown
  Obtained from environmental sample
  misc_feature (1)..(131): Xaa is any amino acid
MKIFGNEAFISAAGAKSYAVQMRLSNPKHMMPPDSPYFGSGNKVIALEKKIDAGHVTRAGTFEHAMLQALDKVSGADQFAKHLEKEAIINPDTVDIHDITIAQAEAGMALNITRNVLNRLVQGWKDIINTR

SEQ ID NO: 12905 - DNA, 324 bp, Unknown
  Obtained from environmental sample
  misc_feature (1)..(324): n is a, c, g, or t
atgcggcgaagggtagaaagcccctactggagatctccctttcttcccgactccatggataacggaatagggcgcggggtgagggttgtagaaattcaaaaagacaattcggaaaaaaatccgaaccgtctggtctgggatcctacccacccggacgcgattaaatcaggtccgcaggaaggttatgttgcaatgccgaacgtagatgttgttacggaaatggtggatatgatttccgcttcgcgctcttatgaggcgaacggagcgattatagaaggctcaaaggcgatgtttcagcgcgctttggacataggctcaagataa

SEQ ID NO: 12906 - protein, 107 aa, Unknown
  Obtained from environmental sample
  DOMAIN (66)...(104): Domain of unknown function (DUF1078)
  misc_feature (1)..(107): Xaa is any amino acid
MRRRVESPYWRSPFLPDSMDNGIGRGVRVVEIQKDNSEKNPNRLVWDPTHPDAIKSGPQEGYVAMPNVDVVTEMVDMISASRSYEANGAIIEGSKAMFQRALDIGSR

SEQ ID NO: 12907 - DNA, 414 bp, Unknown
  Obtained from environmental sample
  misc_feature (1)..(414): n is a, c, g, or t
ttgaactcagaaaaagttttgatgaaaggaaatgaagccattgcagaagcggcaataagggcaggttgtggcgcttatttcggctatcccataaccccccaaaacgaacttaccgcgtatatggctctgcatatgcttgaaaaggaccggatttttatccaggccgaaagcgagatcgcgtcaatcgtgatggtttacggcgcttccagcgcaggcgccagggctatgacctcctcgtcaagccccggcgtaagcctganacaggagggcatttcctacgccgccggggcggacgttccatgcgtcatcgccaatgtttccagggggggcccggggctgggctcaatcgccccggctcaggncgatttatttcagtcacgcggggcggcggccacggggactactactgcatag

SEQ ID NO: 12908 - protein, 137 aa, Unknown
  Obtained from environmental sample
  DOMAIN (16)...(137): Pyruvate flavodoxin/ferredoxin oxidoreductase, thiamine diP-binding domain
  misc_feature (1)..(137): Xaa is any amino acid
MNSEKVLMKGNEAIAEAAIRAGCGAYFGYPITPQNELTAYMALHMLEKDRIFIQAESEIASIVMVYGASSAGARAMTSSSSPGVSLXQEGISYAAGADVPCVIANVSRGGPGLGSIAPAQXDLFQSRGAAATGTTTA

SEQ ID NO: 12909 - DNA, 318 bp, Unknown
  Obtained from environmental sample
  misc_feature (1)..(318): n is a, c, g, or t
atgaaagccgatgtccgttcagcgctttatgaaggttatacagaaccgatacgagacgcgctctggggacatatctatctgaccccggccctttcggctctcacggaatcccctccgtttatgcgcttgcagcgtataatgcagttggggcccacattgagggtctaccccggcgctactcataacagggcaagccactccattggggtataccacctggcgcgcaggctttttgttcattttgccgaagaaagagcggaacactggcttacttctgtgggggtaaaatctttttctttgcgccgcattgctgcatga

SEQ ID NO: 12910 - protein, 105 aa, Unknown
  Obtained from environmental sample
  misc_feature (1)..(105): Xaa is any amino acid
MKADVRSALYEGYTEPIRDALWGHIYLTPALSALTESPPFMRLQRIMQLGPTLRVYPGATHNRASHSIGVYHLARRLFVHFAEERAEHWLTSVGVKSFSLRRIAA

SEQ ID NO: 12911 - DNA, 738 bp, Unknown
  Obtained from environmental sample
  misc_feature (1)..(738): n is a, c, g, or t
atggcgaggaagggtcggtggatcggtcagacggctcacgcaatggggcaggatattttgatccgtaacggctatgaggatccggtcggcgacctggcttacggcaacgcgggaggcataaacggaccctcaaagtttattgacgtggcggctatggataacgattcctatgcctgcctggacaggacgcgggggcggatttttatgtacgattttcagggcaaccttttatacgcctttggcggcctgggcaacagggagggctgtttcatgaaaccgacaggccttgcccaaatgggccattccctctatgccctggattccgacaccaccgcccttacccgctttgatatgacgaattacggggtgatgataaacagcgccctggacgaataccaggccggccgctacgaatcttccgcggaggtttgggaagaagtgcttaaaatgaacggcaactatgaccttgcctatatcggcataggccgggcggcgctgcggcagcgcgaataccanaaggcgatgacttactacaaactcaaacattaccgcgaaggctacggncaggcttttcagttataccgcanacnatttatggaagagaatctctggaaaatgctgctggttctggcgggtattttatttgtcccgcccgaatgtaaaactcgccgtgaaaatcgtcagggaggtaaaaggaagcatgaatatctgcctgacaaacctggtttctggttttag

SEQ ID NO: 12912 - protein, 245 aa, Unknown
  Obtained from environmental sample
  misc_feature (1)..(245): Xaa is any amino acid
MARKGRWIGQTAHAMGQDILIRNGYEDPVGDLAYGNAGGINGPSKFIDVAAMDNDSYACLDRTRGRIFMYDFQGNLLYAFGGLGNREGCFMKPTGLAQMGHSLYALDSDTTALTRFDMTNYGVMINSALDEYQAGRYESSAEVWEEVLKMNGNYDLAYIGIGRAALRQREYXKAMTYYKLKHYREGYGQAFQLYRXXFMEENLWKMLLVLAGILFVPPECKTRRENRQGGKRKHEYLPDKPGFWF

SEQ ID NO: 12913 - DNA, 444 bp, Unknown
  Obtained from environmental sample
  misc_feature (1)..(444): n is a, c, g, or t
ttgccacttattcccgatctcagcnggacaaagatatacgcgctgcgtgataacgcccagcaatatatgaaagaaatgatggaaggtttttcgcgggaggccagttacacctatgatgactattacgaagactcttcccgttataccgtttccgccggcgccgagaaaccggcgtttaacataacgctgcgttatacgcttgacggaaaatccctggtactcaacgtgccttttgacaaaatagcgtaccgtcccgcgtatcccataacgctgttatcgctcctgccttttatgggggccggcggcaggaatgaccagggttatatgctggtgccggacggcagcggggcgctgatatactttaacaacgggaagcaaaatcagataacgtacaacaataatgtattcggctgggatgaggctatgccccgcgacgcggtataa

SEQ ID NO: 12914 - protein, 147 aa, Unknown
  Obtained from environmental sample
  misc_feature (1)..(147): Xaa is any amino acid
MPLIPDLSXTKIYALRDNAQQYMKEMMEGFSREASYTYDDYYEDSSRYTVSAGAEKPAFNITLRYTLDGKSLVLNVPFDKIAYRPAYPITLLSLLPFMGAGGRNDQGYMLVPDGSGALIYFNNGKQNQITYNNNVFGWDEAMPRDAV

SEQ ID NO: 12915 - DNA, 546 bp, Unknown
  Obtained from environmental sample
  misc_feature (1)..(546): n is a, c, g, or t
atgtccaaaaattctatttttcatcttgtgcatttaattttcattccagccttcattctttttgcttttgtgtttgcaaacgcagagcgggttgtaggtgcaaatagttctttggaggttccgcagggggcgcgctcggcggctgttggtacggcggctttgcctgttcaaagtgatttgccatcgcttgctcaaaatcctttacaactttcgtggcttgaaaaattatcactcgcttttactcatgtgtcttattttgaagaaacttcttacaatggcgttgttatggcactacccctcaaagatgccggtgcgctggggtttgctgcgtcacgctttgggacaagtgatataccatacataaaagaaaatgaacctttgcccgaaggcgataactacaacacgttgaatatttccgattggcttttcacgagtgcgtgggggaaaaactttggcaaatggaatttggcatttgccttgcatttgcttaaaagagaattagaccaaagcggctggggctttcgttccgatattgctgctggttag

SEQ ID NO: 12916 - protein, 181 aa, Unknown
  Obtained from environmental sample
  SIGNAL (1)...(26)
  misc_feature (1)..(181): Xaa is any amino acid
MSKNSIFHLVHLIFIPAFILFAFVFANAERVVGANSSLEVPQGARSAAVGTAALPVQSDLPSLAQNPLQLSWLEKLSLAFTHVSYFEETSYNGVVMALPLKDAGALGFAASRFGTSDIPYIKENEPLPEGDNYNTLNISDWLFTSAWGKNFGKWNLAFALHLLKRELDQSGWGFRSDIAAG

SEQ ID NO: 12917 - DNA, 507 bp, Unknown
  Obtained from environmental sample
  misc_feature (1)..(507): n is a, c, g, or t
gtgaaccgcgaaaggggaaatatgtgccaaatctttatctctctaggcacaaacatagagccacgggaagagaggcttgcaaaggctagatatttgctaaagccgagggagccgctaaactggcaagagagcaaaatttatgaaactcttccttggggtaaaaccgagcaagcaaattttttgaatcaagttattggatttagttcaaaaaaaactccttatgaacttttagagctttgcaaaaatattgagcaaaaactcggcaggcaaaagcgggaaaaatggaaagagcgcgaaatagatttggatttgttatattgcgggagtgaaattttgcaaagcgaaactttaacacttccgcacccctatatttcccaaagagaattcgttttgcgccccttgtgcgatattgctccagatttcatagaccccagcagcaagctcacagccaaggaaatgcttactcaaacaaccaaatttacaacctcgcctaacattttatcttga

SEQ ID NO: 12918 - protein, 168 aa, Unknown
  Obtained from environmental sample
  DOMAIN (12)...(138): 7,8-dihydro-6-hydroxymethylpterin-pyrophosphokinase (HPPK)
  misc_feature (1)..(168): Xaa is any amino acid
MNRERGNMCQIFISLGTNIEPREERLAKARYLLKPREPLNWQESKIYETLPWGKTEQANFLNQVIGFSSKKTPYELLELCKNIEQKLGRQKREKWKEREIDLDLLYCGSEILQSETLTLPHPYISQREFVLRPLCDIAPDFIDPSSKLTAKEMLTQTTKFTTSPNILS

SEQ ID NO: 12919 - DNA, 660 bp, Unknown
  Obtained from environmental sample
  misc_feature (1)..(660): n is a, c, g, or t
ttggaagaccttgacgcactggattggcctgagcctgtgaagcaaatgcagcggaactggattggccgttcggaaggcgcggacgtaactttcaaaattgaagggcaccctgaaacgcttgagatttacaccacccgccctgacacgcttttcggagttacctacatggtactttccccggaacatcatcttgtggagaaaatcaccacggcggaacagaaggccgctgttgccgcgtaccttgaagaagccgcaaggaaaagcgatcttgagcgtacagatttagcgaaagaaaagacgggcgttttttccggggcttacgcaattaatcctgtgaacgatgaaaaaatcccaatctggattgccgattacgttttgatttcctacggcacaggagccatcatggcggttccggcgcacgatgagcgtgactgggaatttgctaaggtgtttaatctgccgataaggcaggtggtcgctggcgaaaaacccgaaagcggaaaagattattcggctgaaccggctgaatgtaccatagcctacggttactccgtgaactcaggccttatcagcggactgcccacaagcgaggctcaggccaagatctctaagtggctgaagaacgcaaatgggaaaatcggcggtctcggccgattctga

SEQ ID NO: 12920 - protein, 219 aa, Unknown
  Obtained from environmental sample
  misc_feature (1)..(219): Xaa is any amino acid
MEDLDALDWPEPVKQMQRNWIGRSEGADVTFKIEGHPETLEIYTTRPDTLFGVTYMVLSPEHHLVEKITTAEQKAAVAAYLEEAARKSDLERTDLAKEKTGVFSGAYAINPVNDEKIPIWIADYVLISYGTGAIMAVPAHDERDWEFAKVFNLPIRQVVAGEKPESGKDYSAEPAECTIAYGYSVNSGLISGLPTSEAQAKISKWLKNANGKIGGLGRF

SEQ ID NO: 12921 - DNA, 777 bp, Unknown
  Obtained from environmental sample
  misc_feature (1)..(777): n is a, c, g, or t
atgcaccgcaatgaccttttaaaatacctatcccccgtacattcgcctatgctttgcaccgctgtatttatgcgtaaatacgaaaacgtaaaaacaaaaatagcggcgctttctccatgcgtggcaaaagcttatgaatttgatgcaacaggcattgtagaatacaacgtgactttcaaaaaattgcgcgaatatatggaaaagaacaatgttgtgctaccaactaaagcgacaaaatttgataattacgaagcagctctaggctccttgtatcctatgcccggtggcttaaaagaaagcgttgagcattatgttgggaaggccttgagagtggataaatccgagggtcttgaagtgtataaggcattggacgaatatctggaatgttccagaacgtcatcgtcattgttgcctgttttgtttgatgttttgaattgcggtcacggttgcaatttggggacgggatgcacaaaagatatagatatctttaaaatcaatgccaaaatggacaaactgcggcaggaatcaattaaaaaagaaaatatagagtacacaaccactgaactattcaaaaaatttgacgatactttgaagttggaagatttcatcaggaaatacaccttatgcaccgtacgcccaatacctgttacgcaggaacaaatagagcaagcctttataaggctgggtaaacaagatgaaaagtcaagcaattctcctgtggtgcgtgcggtaacgatacctgctacnaaatggctattagggtggctaaaggcgtaa

SEQ ID NO: 12922 - protein, 258 aa, Unknown
  Obtained from environmental sample
  misc_feature (1)..(258): Xaa is any amino acid
MHRNDLLKYLSPVHSPMLCTAVFMRKYENVKTKIAALSPCVAKAYEFDATGIVEYNVTFKKLREYMEKNNVVLPTKATKFDNYEAALGSLYPMPGGLKESVEHYVGKALRVDKSEGLEVYKALDEYLECSRTSSSLLPVLFDVLNCGHGCNLGTGCTKDIDIFKINAKMDKLRQESIKKENIEYTTTELFKKFDDTLKLEDFIRKYTLCTVRPIPVTQEQIEQAFIRLGKQDEKSSNSPVVRAVTIPATKWLLGWLKA

SEQ ID NO: 12923 - DNA, 456 bp, Unknown
  Obtained from environmental sample
  misc_feature (1)..(456): n is a, c, g, or t
ttgattgacacgaggcgcggcgagaaccggaactggcctttagtaacggcagacagctttgtcaggttcgtcacggcccagcaaaaagaaattctgagtccggatgagcacctctatgtaaaacggatcatcgccattcccggcgacgagatcagcatgaacaattttgtcttccgggtgaagccggcgggcaatatgtacgtttttaccgaatttgaactttccgaccgcccctattaccccaacataccccaggtgcccgctctttgggatgagacgcttcctttttcggggtatatggacagcataacgctcggccccggcgagtattttgttgtctcggatgacagaagcaattcgggcgactcgcgaacatgggggccggttaacgcgaaaaaattactgggaaaacccgtattccggttttggcccatccagcgaatcggccggccatga

SEQ ID NO: 12924 - protein, 151 aa, Unknown
  Obtained from environmental sample
  misc_feature (1)..(151): Xaa is any amino acid
MIDTRRGENRNWPLVTADSFVRFVTAQQKEILSPDEHLYVKRIIAIPGDEISMNNFVFRVKPAGNMYVFTEFELSDRPYYPNIPQVPALWDETLPFSGYMDSITLGPGEYFVVSDDRSNSGDSRTWGPVNAKKLLGKPVFRFWPIQRIGRP

SEQ ID NO: 12925 - DNA, 783 bp, Unknown
  Obtained from environmental sample
  misc_feature (1)..(783): n is a, c, g, or t
ttgcgtatggtcgatcttgagatgggcgccggcaaaacgatcccaacggaaaagaacgtagtggacgcggtcttctcccccgccggcaatttcatatactacatagaggccaacagcggcggcgacatgggcgcgatccgcaaaacgagaatgtacatgaacgacgcgataacgattctcgaaccaaacgcgtcgctgcgtagcgatctgcaaatatcctccgacggggaaacgctcatcttcgcgtctaaatacaaagacacctattgggacatctacgcgctcgacacgtcgggaaaagtcgcgccggtcaggttgacggacggcagggccgaccaccgccgcccgcgcataagccccgacggcaaatacgtggcgtacctatcgaaccgcacgggcttcggcggaaagatggatctgtgggtatacgacagaatcgcgacggaacacaagcaacttacgttcaacaccgaggtgcaaggcttcacctggagcgacgactccgaatccatctacttctcggcgggcgcgaacctgctggaaatctgccgcgtggacatgaggcacgccttaattaaaaacataataccgcacccgcccggcgaggtaaaatcatggagcgaaagcgcgccgagattcgtacgctacaacgacgaaccgatgatagtgtacacgcggatatacccgaacgggaaacgacgcatatactggtacgacataaacaacgcgcgggatctcaagatgtacgccgtcggggagtttgacgagtggaatgaggattaa

SEQ ID NO: 12926 - protein, 260 aa, Unknown
  Obtained from environmental sample
  DOMAIN (104)...(142): WD40-like Beta Propeller Repeat
  misc_feature (1)..(260): Xaa is any amino acid
MRMVDLEMGAGKTIPTEKNVVDAVFSPAGNFIYYIEANSGGDMGAIRKTRMYMNDAITILEPNASLRSDLQISSDGETLIFASKYKDTYWDIYALDTSGKVAPVRLTDGRADHRRPRISPDGKYVAYLSNRTGFGGKMDLWVYDRIATEHKQLTFNTEVQGFTWSDDSESIYFSAGANLLEICRVDMRHALIKNIIPHPPGEVKSWSESAPRFVRYNDEPMIVYTRIYPNGKRRIYWYDINNARDLKMYAVGEFDEWNED

SEQ ID NO: 12927 - DNA, 732 bp, Unknown
  Obtained from environmental sample
  misc_feature (1)..(732): n is a, c, g, or t
ttggaaatagtttatccaactataggcaatattgttcaaaccataacggcaacaggccgtttgcaacccatagatcaggtggatgttggcacggaggtttctggcacggttagcaaaatttatgtggatttcaatcagcaggttgaaaagggacaggtacttttgcaaatagacccgctaaaagcaaaggcaagagttcagcaaacaagagccgcttataggtcttcggaaaatgaaagacaatatcaaaagcgaatttacgaaagaacattggaactttttgaaaaaggctccgttgcaaaaaccgaattggaaacggcagaatacagatatataaatgcacagaacagcttgataaatgcaatgagcaatttggaacaggcagaacttgacttgaacaactgcacaataaaaagccccatagacggcatagttttgagcagagcagtggaagcaggtcaaaccgtggcagcatcgctttccgcgccaaccctattcacactcgctagagatttaaccttaatggaggtcaaagccgatgttgacgaggcagatattggaatggtgaagatggggcagaaagttgaattttccgttgatgcttttccaaatgacaaattcacaggcgagggtcaagaaggtaggctttcgcccaatatatcttcnaaatgtgtgacctataccgntataataaaagcaaacaatcagagcaaaaacttttgcccggtatga

SEQ ID NO: 12928 - protein, 243 aa, Unknown
  Obtained from environmental sample
  DOMAIN (25)...(232): HlyD family secretion protein
  misc_feature (1)..(243): Xaa is any amino acid
MEIVYPTIGNIVQTITATGRLQPIDQVDVGTEVSGTVSKIYVDFNQQVEKGQVLLQIDPLKAKARVQQTRAAYRSSENERQYQKRIYERTLELFEKGSVAKTELETAEYRYINAQNSLINAMSNLEQAELDLNNCTIKSPIDGIVLSRAVEAGQTVAASLSAPTLFTLARDLTLMEVKADVDEADIGMVKMGQKVEFSVDAFPNDKFTGEGQEGRLSPNISSKCVTYTXIIKANNQSKNFCPV

SEQ ID NO: 12929 - DNA, 822 bp, Unknown
  Obtained from environmental sample
  misc_feature (1)..(822): n is a, c, g, or t
gtggcttgggtgcaaatagaaaaccaaccgccaatactcatagacaaaaaaggcaaaatggtttttcaaatggactctctaatttccgcagtccctttcaacaatggcatagctggaataaatgtttacagccttgggcaggaattgacgatgttcatagacaaaaaaggcaagcctgtggctactacgatgccgggagaagaggtaatgcccattataagtgatggaatgtatatgttcaaagataaagcgagcggaaaatggggttataaaaacaaaagcggtgatattgtgataaatgcgcaatatgacgaggttgattttttctttgacggaatggctgctaccatgagtggaaaaaaatggggcgccattgacaaaaaaggaaacattatgataaacccgcaatacgattcattgataaacgatggcaatggcttgtttttagccaaagttggcaaaaaatggggctgggtcaataaaaagaacgaaataataataaatccgcagtttgatgattcatggggcttcaatggaaacaaacttgctcccgtgcaaatgggtagcaaatggggctacgtgaataaagaaggacaaataataataaatccgcaatttagtctagcccttccatttaacggcgattacgctatgataatcaattccgagaccgagagcaagggctggagaactattactcaacgcanagttggttttatagacaaaactggcgccttcgttgtttcgcctatatacgatgacgttgacgaatgggaatatttatcgggcacaggacaaaatctatacggttttgagttttga

SEQ ID NO: 12930 - protein, 273 aa, Unknown
  Obtained from environmental sample
  DOMAIN (155)...(171): KWG Leptospira
  misc_feature (1)..(273): Xaa is any amino acid
MAWVQIENQPPILIDKKGKMVFQMDSLISAVPFNNGIAGINVYSLGQELTMFIDKKGKPVATTMPGEEVMPIISDGMYMFKDKASGKWGYKNKSGDIVINAQYDEVDFFFDGMAATMSGKKWGAIDKKGNIMINPQYDSLINDGNGLFLAKVGKKWGWVNKKNEIIINPQFDDSWGFNGNKLAPVQMGSKWGYVNKEGQIIINPQFSLALPFNGDYAMIINSETESKGWRTITQRXVGFIDKTGAFVVSPIYDDVDEWEYLSGTGQNLYGFEF

SEQ ID NO: 12931 - DNA, 363 bp, Unknown
  Obtained from environmental sample
  misc_feature (1)..(363): n is a, c, g, or t
atgtcttatgacggccaatacaaactggtaattgccatgaatgacaatctcgtttttgacgaacgcttgcaagtggcccgcgatattatcagcaaatgcctgaacaaatggagcaagggggcgcgggacgaaatccgtatcctggtcaatgacgcttttcaggttgataaaacagggaagatatcaacggcccgcgttctcgggctgcgccgccttgatatacaggatgcggattggaaaaaggcgatgaccgccatcaccgacagcgtgcagataaccggaacgaagcagtatttgcggatctatgagcgcgacgccaacggcgaatatcagatgattccgctggacgtggcggcgttatag

SEQ ID NO: 12932 - protein, 120 aa, Unknown
  Obtained from environmental sample
  misc_feature (1)..(120): Xaa is any amino acid
MSYDGQYKLVIAMNDNLVFDERLQVARDIISKCLNKWSKGARDEIRILVNDAFQVDKTGKISTARVLGLRRLDIQDADWKKAMTAITDSVQITGTKQYLRIYERDANGEYQMIPLDVAAL

SEQ ID NO: 12933 - DNA, 345 bp, Unknown
  Obtained from environmental sample
  misc_feature (1)..(345): n is a, c, g, or t
atggttctgaacgaagaaagcgacaatatttccgccgggcaaaaacagcttcttaccattgcgcgcgtgattctgacgaatcccggcatacttatccttgacgaggcgacaagcagcgttgatacccgcaccgaacggctcattcagaaagccatggatctgttgatgaaagaccgcaccagttttattatcgcccaccggctctccaccatccacaacgccgatcttatcctggtattaaaaaacggagagattgtcgaacagggaaaacaccgggagcttttggaaagccggggtttctacgcggaactttacaacagccaattcgcaggaagggaaatttag

SEQ ID NO: 12934 - protein, 114 aa, Unknown
  Obtained from environmental sample
  DOMAIN (1)...(83): ABC transporter
  misc_feature (1)..(114): Xaa is any amino acid
MVLNEESDNISAGQKQLLTIARVILTNPGILILDEATSSVDTRTERLIQKAMDLLMKDRTSFIIAHRLSTIHNADLILVLKNGEIVEQGKHRELLESRGFYAELYNSQFAGREI

SEQ ID NO: 12935 - DNA, 435 bp, Unknown
  Obtained from environmental sample
  misc_feature (1)..(435): n is a, c, g, or t
gtgggtaaagaaaaaccggaaaaatttcccgcccaaagagccaccggccggaacagccgtcactggaacaaccgccgcggaaaaaactccccccgaaaagccgctgcggaaacaacaccatcggaagagccgccattggctgaacagccattggcagaacaaccgccgccggaagatcccccgccggaacagccgccatctacggcggcttccgagctagagccgttagaggatcaactgctgcttgaagaactgccggaagaagaaccgccggaagaattcccggtagaagaagcgccgacggaagagctgatggtggaagaagaaccggaagagtcgctggtagaagaagagccggaagagttcctgtctgcggcggcttccgagctggagccgttaactgatcaactggtgctgtcagaagatctgctataa

SEQ ID NO: 12936 - protein, 144 aa, Unknown
  Obtained from environmental sample
  misc_feature (1)..(144): Xaa is any amino acid
MGKEKPEKFPAQRATGRNSRHWNNRRGKNSPRKAAAETTPSEEPPLAEQPLAEQPPPEDPPPEQPPSTAASELEPLEDQLLLEELPEEEPPEEFPVEEAPTEELMVEEEPEESLVEEEPEEFLSAAASELEPLTDQLVLSEDLL

SEQ ID NO: 12937 - DNA, 624 bp, Unknown
  Obtained from environmental sample
  misc_feature (1)..(624): n is a, c, g, or t
ttgcttctggatattgcccaaaaagaaaatgacatacccgccgtgcgaaagttgtcatacaaatttattaaagattatttaaaaaaagaatactatcaaatgtacaaggcaaccttcagtcccgaggaatgggccgatgaacgggagaaacttttccttcattattacagtgacaaaaattatttcgatcattctgcggcgaattttttagcggaagaaaatgacgttgggcgactcctgaattatgtggaaaagtatctttcaatggataatcttgaaagatattacgaggtatttgcggccgattaccctgaaaaaaccctggagatgttcaaaaaaatcctgcttccatacgctgacaataataccggaaggtaccactatgaacacatcctctcattattgaagaaaatgtcctgtatncagggcgggggaaaagccgcatcggatttgattgctgattttagaaatacgtataagaaccgccaggcaatgatggagatattgcgcggatttaanttacatgataagcgcatgccttattcatcaaaaccaaactgtacttttaatgttcgacggttttccgaaactgtacgtacgacctggaagtggcaacccggttag

SEQ ID NO: 12938 - protein, 207 aa, Unknown
  Obtained from environmental sample
  misc_feature (1)..(207): Xaa is any amino acid
MLLDIAQKENDIPAVRKLSYKFIKDYLKKEYYQMYKATFSPEEWADEREKLFLHYYSDKNYFDHSAANFLAEENDVGRLLNYVEKYLSMDNLERYYEVFAADYPEKTLEMFKKILLPYADNNTGRYHYEHILSLLKKMSCXQGGGKAASDLIADFRNTYKNRQAMMEILRGFXLHDKRMPYSSKPNCTFNVRRFSETVRTTWKWQPG

SEQ ID NO: 12939 - DNA, 840 bp, Unknown
  Obtained from environmental sample
  misc_feature (1)..(840): n is a, c, g, or t
atgggacatgtcgatcatggaaaaacaaaattattggacgccatcagaaaatcggacgttgtgtcgggcgaatttggaggcattacacagcatatcggcgcgtacatggtggaaaccccccacggcagcctcactttccttgacacgccgggacacgaagcttttacgcgcatgagggcgagaggcgcccaaataaccgacattgtagtgttggttgtcgccgcggatgacggcgttatgccccaaacaatcgaagccatcaatcacgctaaagacgcgaaggtgccgattattgtcgccgtaaataaaattgacaaaccggaagcgaaccctgacaaggtaaagagccagctttccgatcttggacttatgcctgaaagttgggggggacagacgatgtttgtcgagctttccgccctgcaaaaaaccggtattgataaattaatagaggccattctgctggaagccgaattgttggatttaagggcaaattttaaatgtaacgctgaaggaaaaattcttgaatcgaaagttgatcacggcaggggcattgtggcgactgtaatgatcgagaggggaaccctcgccattggagacgcgtatgtggcgggtatctggccgggcaaagtgcgcgcgatttttaatgacaaaggggaaaaaattaacaaggcgaccccttcaatgcccgttgaagttcttggctttgagggaatccccaacgctggagacccgttgcaggtggtagccgatgaaaaagtggcgcgcgaattctcgtcaaaaaggcaggaactgcgccgtttgaagacgccaaaatactgcgaaactcgtgccgattcctga

SEQ ID NO: 12940 - protein, 279 aa, Unknown
  Obtained from environmental sample
  DOMAIN (1)...(105): GTPase of unknown function
  misc_feature (1)..(279): Xaa is any amino acid
MGHVDHGKTKLLDAIRKSDVVSGEFGGITQHIGAYMVETPHGSLTFLDTPGHEAFTRMRARGAQITDIVVLVVAADDGVMPQTIEAINHAKDAKVPIIVAVNKIDKPEANPDKVKSQLSDLGLMPESWGGQTMFVELSALQKTGIDKLIEAILLEAELLDLRANFKCNAEGKILESKVDHGRGIVATVMIERGTLAIGDAYVAGIWPGKVRAIFNDKGEKINKATPSMPVEVLGFEGIPNAGDPLQVVADEKVAREFSSKRQELRRLKTPKYCETRADS

SEQ ID NO: 12941 - DNA, 393 bp, Unknown
  Obtained from environmental sample
  misc_feature (1)..(393): n is a, c, g, or t
ttgcagggcggaaagctcgacaaacatcgtctgtcccccccaactttcaggcataagtccaagatcggaaagctggctctttaccttgtcagggttcgcttccggtttgtcaattttatttacggcgacaataatcggcaccttcgcgtctttagcgtgattgatggcttcgattgtttggggcataacgccgtcatccgcggcgacaaccaacactacaatgtcggttatttgggcgcctctcgccctcatgcgcgtaaaagcttcgtgtcccggcgtgtcaaggaaagtgaggctgccgtggggggtttccaccatgtacgcgccgatatgctgtgtaatgcctccaaattcgcccgacacaacgtccgattttctgatggcgtccaataa

SEQ ID NO: 12942 - protein, 130 aa, Unknown
  Obtained from environmental sample
  misc_feature (1)..(130): Xaa is any amino acid
MQGGKLDKHRLSPPTFRHKSKIGKLALYLVRVRFRFVNFIYGDNNRHLRVFSVIDGFDCLGHNAVIRGDNQHYNVGYLGASRPHARKSFVSRRVKESEAAVGGFHHVRADMLCNASKFARHNVRFSDGVQ

SEQ ID NO: 12943 - DNA, 717 bp, Unknown
  Obtained from environmental sample
  misc_feature (1)..(717): n is a, c, g, or t
atgccttgtaaggatacctgggttatgcagagctgcatgttctccatgattgccggacggtttggcgggcaaggctgggatcaaaagatcctttccggccaggcgaaatttaccgacccggatttcgtggctgcccttgacttcatcaggcagctctatgctgacggcgttcttccccagtccgttctgggcatagactacggtgagggccccggattgttcgctaccaagaagtgcgcctactacgtagacggtgactggagggtgggagatttccttgaagacgaagatactggcggtgcgttgtttaccaccaggcagcagaataacataaagatcacggtattccccgacatatcgggcgccaagatcaacaagacaaactccaccgttttaggtaccggctgggcaatgagcgcggctatcccctctggttccgccaaggaagacgccgcatggcgcctgctcaaatggctgtctggaacagaggttttaacacgcatgctttccaccggtggaatttcagcgcctacacgtgctgatattgacgtcaaaaaggtaaagctttcaccattgcaggtatcaatggtaaatctgggcaaagagtataataccgccacctgcgttattgacgatgtgttccatgccgatgtgtacgaaccgatcaatgacggccttgtggaacttggtcttggttcaaatcggccgctcaggtag

SEQ ID NO: 12944 - protein, 238 aa, Unknown
  Obtained from environmental sample
  misc_feature (1)..(238): Xaa is any amino acid
MPCKDTWVMQSCMFSMIAGRFGGQGWDQKILSGQAKFTDPDFVAALDFIRQLYADGVLPQSVLGIDYGEGPGLFATKKCAYYVDGDWRVGDFLEDEDTGGALFTTRQQNNIKITVFPDISGAKINKTNSTVLGTGWAMSAAIPSGSAKEDAAWRLLKWLSGTEVLTRMLSTGGISAPTRADIDVKKVKLSPLQVSMVNLGKEYNTATCVIDDVFHADVYEPINDGLVELGLGSNRPLR

SEQ ID NO: 12945 - DNA, 834 bp, Unknown
  Obtained from environmental sample
  misc_feature (1)..(834): n is a, c, g, or t
gtgtttctctttatcggcgacggtatggcgatgtcgcagattagttccgccgaagtgtttgccgccgcgcgcgcatcaaaggacattaacattacgcggcttggtttcagccggtttccggtaacggggcttgtcacgacttatgacgcgggaacgtttatcactgattccgcttctgcgggtacggcgattgcgacaggcaacaaaacattaagcggcgttattaacatggattcgggaaaaacgcaaaaatttaagcctatcagcgaatatatccacgaagtgggaatgaaagtaggaattatttccacggtaacgctgaaccacgccacgccggcgtccttttacgcgaagaccccttcgcgcagcaattactatgatatcggagtgcagctagccggcagtaaatttgaattttacggcggcggttctatccttcaacaatccggaaaaaacggcgatcagagaagcgttattgacattgcgaaagacaatggttttacctatgtaaatacaaaggacgcgtttaacgccttaaaaccgggtgtgggaaaagttatcgccataagtcccagactgcaggatgacggagctatgccctatgatatggatttaaagccgggtgatcttacaattgccgattttacaaggaagggaattgaacttttagataaccccaggggttttttcatgatgattgaaggcggaaagattgactgggcaagccacgcgaacgacgccggcgccgttattcgcgacgtgcttgctatggacgcggcagtcagcgtcgcgcttgattttgcggcaaaacatcccaaagatacgcttatgtag

SEQ ID NO: 12946 - protein, 277 aa, Unknown
  Obtained from environmental sample
  DOMAIN (3)...(277): Alkaline phosphatase
  misc_feature (1)..(277): Xaa is any amino acid
MFLFIGDGMAMSQISSAEVFAAARASKDINITRLGFSRFPVTGLVTTYDAGTFITDSASAGTAIATGNKTLSGVINMDSGKTQKFKPISEYIHEVGMKVGIISTVTLNHATPASFYAKTPSRSNYYDIGVQLAGSKFEFYGGGSILQQSGKNGDQRSVIDIAKDNGFTYVNTKDAFNALKPGVGKVIAISPRLQDDGAMPYDMDLKPGDLTIADFTRKGIELLDNPRGFFMMIEGGKIDWASHANDAGAVIRDVLAMDAAVSVALDFAAKHPKDTLM

SEQ ID NO: 12947 - DNA, 711 bp, Unknown
  Obtained from environmental sample
  misc_feature (1)..(711): n is a, c, g, or t
ttgaagggaaatcccagaaccggggtttcaaggaagcaaggttttcgcttgccccgaattggcaagattcgggggggggggtggggcttaccccctaaaaaaaaaacggtgcgggcaggcgagcagnacagggaggacgtcccagaaaagcggcgcgagtgggctaagttccaagcagaagttcctgcggacaagctcgtgttccttgacgagtcgggggcgaagacgaacatgaccaggctgtacggagggccgcccaagggtaagcgctgtttctgcaaggcccccgacagccgctgggagcgggtgacgatgctttcggcgataaggctggacggctcggttgagagcatcgcgttcgagggcgcgatggacagggccgcattcgacgagtacataataggcacgctcgcccccacgctgaggccgggggacatgcttgtcctggacaacctgagcgtccacaagtcccccgccatgcaggaggcggtcgaggcccgcggcgcggaggtcaggttcctgccggcctacagccccgacatgaacccgatagagaagatgtggagcaaggtgaaggccgccctgcgcaagattgaggcgaggaccaacgaagaacttttcgatgcgattggggtggctttggcgatggtcactgcgagcgatgcgaaaggatggttcgagtcatgtggatatatagcatctcaaagttaa

SEQ ID NO: 12948 - protein, 236 aa, Unknown
  Obtained from environmental sample
  misc_feature (1)..(236): Xaa is any amino acid
MKGNPRTGVSRKQGFRLPRIGKIRGGGWGLPPKKKTVRAGEQXREDVPEKRREWAKFQAEVPADKLVFLDESGAKTNMTRLYGGPPKGKRCFCKAPDSRWERVTMLSAIRLDGSVESIAFEGAMDRAAFDEYIIGTLAPTLRPGDMLVLDNLSVHKSPAMQEAVEARGAEVRFLPAYSPDMNPIEKMWSKVKAALRKIEARTNEELFDAIGVALAMVTASDAKGWFESCGYIASQS

SEQ ID NO: 12949 - DNA, 378 bp, Unknown
  Obtained from environmental sample
  misc_feature (1)..(378): n is a, c, g, or t
gtggacgctcaggttgtccaggacaagcatgtcccccggcctcagcgtgggggcgagcgtgcctattatgtactcgtcgaatgcggccctgtccatcgcgccctcgaacgcgatgctctcaaccgagccgtccagccttatcgccgaaagcatcgtcacccgctcccagcggctgtcgggggccttgcagaaacagcgcttacccttgggcggccctccgtacagcctggtcatgttcgtcttcgcccccgactcgtcaaggaacacgagcttgtccgcaggaacttctgcttggaacttagcccactcgcgccgcttttctgggacgtcctccctgtnctgctcgcctgcccgcaccgttttttttttagggggtaa

SEQ ID NO: 12950 - protein, 125 aa, Unknown
  Obtained from environmental sample
  misc_feature (1)..(125): Xaa is any amino acid
MDAQVVQDKHVPRPQRGGERAYYVLVECGPVHRALERDALNRAVQPYRRKHRHPLPAAVGGLAETALTLGRPSVQPGHVRLRPRLVKEHELVRRNFCLELSPLAPLFWDVLPVLLACPHRFFFRG

SEQ ID NO: 12951 - DNA, 657 bp, Unknown
  Obtained from environmental sample
  misc_feature (1)..(657): n is a, c, g, or t
ttgagctacgccaggctcctggtcgtggacgatatacagaccaacctggacgtaacgtcaggcgtcgtgagcaaatacaaaatacaggtagattgcgtaacaagcgggcaggaggcaattgaacgcataagtgcaggaagcccggtttataacgcaatatttatggatcacatgatgccgggaatggacggcatagaagcgctggaagcgatccgggccttgggctcggaatatgcaaggaagataccgattatcgcccttacagcaaacgctgtccagggtaccaaagatatgttttataaacacggttttcaggactttatttccaagcccatagacacaatggatcttgattccgtaattaaaaaatgggtacgaaacgaatcgcttgaggccctggcccctccagatgaattgtcccccaatgagccgcctccggacgcaaaaggcaaaataaacattccgggagtggatactgaaaaggggctttctgccttcgacgagaatcagggcacttataagaaacttctgcgttcctatgtttccaatactcccgttgccctggaaaaaatcagaaatgtaaccggagaaacgttgcatgaatatgccatctacatgcatgggatcaaagagcgcaagctccagcttaggagttga

SEQ ID NO: 12952 - protein, 218 aa, Unknown
  Obtained from environmental sample
  DOMAIN (4)...(122): Response regulator receiver domain
  misc_feature (1)..(218): Xaa is any amino acid
MSYARLLVVDDIQTNLDVTSGVVSKYKIQVDCVTSGQEAIERISAGSPVYNAIFMDHMMPGMDGIEALEAIRALGSEYARKIPIIALTANAVQGTKDMFYKHGFQDFISKPIDTMDLDSVIKKWVRNESLEALAPPDELSPNEPPPDAKGKINIPGVDTEKGLSAFDENQGTYKKLLRSYVSNTPVALEKIRNVTGETLHEYAIYMHGIKERKLQLRS

SEQ ID NO: 12953 - DNA, 429 bp, Unknown
  Obtained from environmental sample
  misc_feature (1)..(429): n is a, c, g, or t
ttgtcggcgggtaacgatatttctagaaagatcaaaacgcaatttttattgggaggaaaacaaatgaaaaaagaccttaattatttttcaaaccttccgtatagttttaaaattgaatggagcgatgttaacgcctgttatattgcaaccgttgaggaaataccggagtgccagtcaaatggaaatacaccggatgaagctctctatatgattaaagacgcgctcaagtctcatattagctgctgcttgcattttggcgattcaattccggaaccggtaaaagttgtggattataaaggaaaaattcattttcgcacaactccgcaaaaacattatttgcttgataaacaggcaaaaatatcaggtgaaagcattaatacaattattaatgctgctatcgacagctattttaacgctacacaggcttag

SEQ ID NO: 12954 - protein, 142 aa, Unknown
  Obtained from environmental sample
  DOMAIN (33)...(81): Uncharacterised protein family (UPF0150)
  misc_feature (1)..(142): Xaa is any amino acid
MSAGNDISRKIKTQFLLGGKQMKKDLNYFSNLPYSFKIEWSDVNACYIATVEEIPECQSNGNTPDEALYMIKDALKSHISCCLHFGDSIPEPVKVVDYKGKIHFRTTPQKHYLLDKQAKISGESINTIINAAIDSYFNATQA

SEQ ID NO: 12955 - DNA, 846 bp, Unknown
  Obtained from environmental sample
  misc_feature (1)..(846): n is a, c, g, or t
gtgcgccttactgcggaaaagagggccctgggccgcattgccctgtacgccagcgtcaaaaaaaaaatccgcgctacaggcaggaactttaccctggtagtcgccggctgcatggcccagcggcttggtgaaaaattaaaagagcaataccccgaagtcgattatgtgatgggaaccgccggccgctccatgtttccccttatcctggaagcggcggaaaagcaaagcacggcagcgcccgattttacggaaaacgcggttttcgctttttcatcatcgcaccttgaggaagggcaattccgcagttttgttcccattatgcacggctgcgacaatttctgctcctactgtatagtcccctatgtgcggggcagggaaatctgccgctgtccccagtctatagccgaggaaatacggcttgtcggcgaacgaggtgtaagggaagtaactcttttgggccagaatgtgaatagctattgctggcaggacggcctggattttgccggacttcttggtctcgtcgccaaggaagcctcgcaaagcggagttgagtggctgcgctttctttccgcaaatccccgcaatttctcgccgggaacaattgaggccatggccgggaattcggttttttgtcggcacctgcacctctgcgtccagcatggctccaacagggtccttgccgccatgaaccggggctatacgcgggaacaatacctggaactggtcagggaaatccgccgcgcaatgcccgaaattagcctttccaccgacatcctggtaggttttcccggcgaaaccgaagaagaccggaacagaccctggaataaggaagaagtaagttcctga

SEQ ID NO: 12956 - protein, 281 aa, Unknown
  Obtained from environmental sample
  DOMAIN (1)...(58): Uncharacterized protein family UPF0004
  misc_feature (1)..(281): Xaa is any amino acid
MRLTAEKRALGRIALYASVKKKIRATGRNFTLVVAGCMAQRLGEKLKEQYPEVDYVMGTAGRSMFPLILEAAEKQSTAAPDFTENAVFAFSSSHLEEGQFRSFVPIMHGCDNFCSYCIVPYVRGREICRCPQSIAEEIRLVGERGVREVTLLGQNVNSYCWQDGLDFAGLLGLVAKEASQSGVEWLRFLSANPRNFSPGTIEAMAGNSVFCRHLHLCVQHGSNRVLAAMNRGYTREQYLELVREIRRAMPEISLSTDILVGFPGETEEDRNRPWNKEEVSS

SEQ ID NO: 12957 - DNA, 813 bp, Unknown
  Obtained from environmental sample
  misc_feature (1)..(813): n is a, c, g, or t
atgttccgcactcccgaattcggagaagccgggctggtttatgtttatgtcaaaggcaagaaaagtaacggggtgctttttgccaacagggcaacgctgccccggctggtacggggtgatgatacagcggcgggaccgcgcgttatttcaataatgccgccgtcaggggcggtaggttccctggtaagcatacgcggaacaggttttggcagttcgcgcttaaacggcggagtctttttttcatggaacgcgcggacatccgcttcggctccggctgaagcgcggacgcaggaattcgccgaagtttctgaaattgaatttggttacgaattgtggaccgaccgggaaatacgggcgcgcgtccccgacggcgcttccggcggaaatatggaaatacgaaccgcgcggggcgtttctcctcccatggcttttgatctgaacagcaggacgggaacaaaaacttttcacgataagcgcagttatacgttcaattattcggtaaacgtaaagatcggcgaagcgcaatcgcccaataccctgtacctctgggttccccgtcccgcgtcatcggcggcgcagagaaatatggaattgcttgccggcagcatagagccgtttgtcgataacttccgggggatcagcctgtacaaactggacgacctgacggcaaacaccgatatacagatcagcctttcctggaagtcgatgtttaccgtgtggaaacgacgatatggtccccatccgttaaacaggaacctaactcccccatcaacacggcctatattcaaacagcgtccagtttcccgccgatga

SEQ ID NO: 12958 - protein, 270 aa, Unknown
  Obtained from environmental sample
  misc_feature (1)..(270): Xaa is any amino acid
MFRTPEFGEAGLVYVYVKGKKSNGVLFANRATLPRLVRGDDTAAGPRVISIMPPSGAVGSLVSIRGTGFGSSRLNGGVFFSWNARTSASAPAEARTQEFAEVSEIEFGYELWTDREIRARVPDGASGGNMEIRTARGVSPPMAFDLNSRTGTKTFHDKRSYTFNYSVNVKIGEAQSPNTLYLWVPRPASSAAQRNMELLAGSIEPFVDNFRGISLYKLDDLTANTDIQISLSWKSMFTVWKRRYGPHPLNRNLTPPSTRPIFKQRPVSRR

SEQ ID NO: 12959 - DNA, 870 bp, Unknown
  Obtained from environmental sample
  misc_feature (1)..(870): n is a, c, g, or t
atggcggagcattaccggactgccgtgctgccggcccgcgtccgttcccccaaggacaaagccactgttgaaggtaatgtcggcgttatctcaacatggattaccgccgctttacgaaaccagcaattcctttccctatgggaactgaatgccgctgtccgtacgaaactggcggagtttaatgccaagccgtttcagaaaaaagaggggtcgcgggcaacggcattcgaggaggaacgcctgttcctgctccctttgccgcagtacccctatgagttggcggtatggaaaatcgccaccgtccaattcaattatcacataaccgtggaaggcggaaattattcagtcccctacgagtatatcaagcaaaaggtcaacgtccgcctcaccaagcgccttgtggaggtgtttttctcgggaaaccgtattgcaagccatccgcgtctgtacgggagacccggccaatacagcacccatgaggagcatatgccgaaagaacaccgggagtatgtggcatggaacggggaacggtttctaaactgggcaggaaaaatcggggaacatactaaaacggttgtccaactgtttctctcccgcaaccagatagaacagcagggttacaaagcctgcatagccctgctgaaactgtccgacgcctattccgctttgcggttggaacaggcctgtaaaagggcgctctcgttcacagagcgccccagcctcaagagcgttcagattatcctgaaatcaggtcaggataacctgccccgagaggaggccctcccttccgaccggcctgaaatttccgtccacaccttcaccagaggcagggattatttcagcgggaggaggaaaaccgatgctgactga

SEQ ID NO: 12960 - protein, 289 aa, Unknown
  Obtained from environmental sample
  misc_feature (1)..(289): Xaa is any amino acid
MAEHYRTAVLPARVRSPKDKATVEGNVGVISTWITAALRNQQFLSLWELNAAVRTKLAEFNAKPFQKKEGSRATAFEEERLFLLPLPQYPYELAVWKIATVQFNYHITVEGGNYSVPYEYIKQKVNVRLTKRLVEVFFSGNRIASHPRLYGRPGQYSTHEEHMPKEHREYVAWNGERFLNWAGKIGEHTKTVVQLFLSRNQIEQQGYKACIALLKLSDAYSALRLEQACKRALSFTERPSLKSVQIILKSGQDNLPREEALPSDRPEISVHTFTRGRDYFSGRRKTDAD

SEQ ID NO: 12961 - DNA, 837 bp, Unknown
  Obtained from environmental sample
  misc_feature (1)..(837): n is a, c, g, or t
atggtgagcgttcagagtaaagtggcggaattcgcggatatggtgaaattgccgcaagggggggatattatagaaattatacagtggcaagtcggatcgatgttaggaatgaatgttggaccgcgaccaacattcgcgcaatcgacgccgcctccgtctccgcaatccgcaactaccgcctcacagcaatcgacgcaatcacaatcttccgctgccaataaagccgagtccacggcgaacaaagccaccgtcgcccagagattggcgtggttgaagacaaatgcggaaagccacaaacaatataccattgatgtgtacgctgacgaaaatataagcccgtatacgtttgagttcaatggtgttatcaatgtcgccgttgtttttcgcggggtgggtggaaataaaactatcaggcttaaatctaacggcacaatgtttactgtggagtctaacgttacactgattcttgacagtaatattactcttcatgggcatagcggtaatattaatagtatggttatagtgaacggggggactcttaaaatcggggcaggggcggccattatcggtaatatttgtacgaatgtaaatggtggcggtgttgatttgagcggtggaaccgttgatatgactggtggaatgatttctaacaatgtatgttcttctggaggcggtgtttatataagtggtggtacatttcgcatgagcggtggagctatagttggtaataacgctactaaggaaggaggcggggtatatatactgacgcatagtaactctaatggcgatgcatcttttgttatgagcggagggacaatttctatgaatagtgcgtaa

SEQ ID NO: 12962 - protein, 278 aa, Unknown
  Obtained from environmental sample
  misc_feature (1)..(278): Xaa is any amino acid
MVSVQSKVAEFADMVKLPQGGDIIEIIQWQVGSMLGMNVGPRPTFAQSTPPPSPQSATTASQQSTQSQSSAANKAESTANKATVAQRLAWLKTNAESHKQYTIDVYADENISPYTFEFNGVINVAVVFRGVGGNKTIRLKSNGTMFTVESNVTLILDSNITLHGHSGNINSMVIVNGGTLKIGAGAAIIGNICTNVNGGGVDLSGGTVDMTGGMISNNVCSSGGGVYISGGTFRMSGGAIVGNNATKEGGGVYILTHSNSNGDASFVMSGGTISMNSA

SEQ ID NO: 12963 - DNA, 687 bp, Unknown
  Obtained from environmental sample
  misc_feature (1)..(687): n is a, c, g, or t
gtgacattccgcgaactgctaaacatcgcagcgataaacgtaaaagtgacagcctccggcggtcatggcgatcccatcatatccgatatctcctacgattcccgcaacgtcaagccaggctttctctacgtagccgttcccgggacaaaagttcacggggacacttttatagaatcggcgataaaaaacggcgcggccgccgtcatatcggaaaatagccacgatgagttgtcaacaccgtgggcggcggtttccgatgttagggcggttttgggagtgttgggcgtggcgctttggggaattgatcttaataaactgacagccgtaggcgtcaccggcaccaacggcaagaccaccacggtcagcctcttcaaaaacttgtttgaccgcgtatacggtaaagagtattcgtggctgtttgggacaatagcgaatgttttgggaaatgagactgtaggcgcgtctcacaccacgcctgaagccgttgatatattcaggttcataaataacgcgcctatcaaacccaagggcttggtgatggaggtgtcctcgcacgccttggcgcttaagcgtacggttgggatgaggtttaatgtctcggtgtggacgaatttgacgcaggatcatttagactttcataaatctatggaagaatattacgcggcgaagaagcnggttattcgttga

SEQ ID NO: 12964 - protein, 228 aa, Unknown
  Obtained from environmental sample
  DOMAIN (109)...(228): Mur ligase middle domain
  misc_feature (1)..(228): Xaa is any amino acid
MTFRELLNIAAINVKVTASGGHGDPIISDISYDSRNVKPGFLYVAVPGTKVHGDTFIESAIKNGAAAVISENSHDELSTPWAAVSDVRAVLGVLGVALWGIDLNKLTAVGVTGTNGKTTTVSLFKNLFDRVYGKEYSWLFGTIANVLGNETVGASHTTPEAVDIFRFINNAPIKPKGLVMEVSSHALALKRTVGMRFNVSVWTNLTQDHLDFHKSMEEYYAAKKXVIR

SEQ ID NO: 12965 - DNA, 840 bp, Unknown
  Obtained from environmental sample
  misc_feature (1)..(840): n is a, c, g, or t
ttggaagaagcggatgaggccaccgccccgattcgccggagcgggggagggggcggcggcagctcagtaagcccggcgccgccgaaaaaaaccgcgcctcccaccgcttctaaaaaacccccggcttcggaacaatcctccgaagaaaccgccccgattcgcaagggcagcagcagcagaagcagcggaggcgggggcggaggctggggcggagggggcccaaatataagcggtgaagcggctttgatccttttagccgtcatcgttgtcatcattgtggcagtggtgataactgaacatatcagcaaaaaacaatccagcctggctcaaaaacaagatcctgaaaaggccggcccgggctggggttcggaagaagcccccgcctacagccgagggtatgcccccccggacggcggaagcgtaaaggcggccaacgcgccagagccgctggaaaaaactccaggctggtggccctttggcaagcaacgcgcccaaaacgcgccggaacagcggccgggaaaccccacggccaacgcgccggagcagtggcagaaaaacgccaacgcgccggagcagcgggagcctaaccgcggcctcaaagctccaagctggtggccctttggcaagcaacgcgcccaaaacgcgccggaacaacggccgggaaaccccgcagccaacgcgccggagccgtggcataaaaacgccaacgcgccggagcagcgggagcctaaccgcggcctcaaagctccaggctggtggccttttggcagcaacgcgcccaaaacgcgccggaacatcggccgaaaaacccgccgccaacgcgccggagccgtggcataa

SEQ ID NO: 12966 - protein, 279 aa, Unknown
  Obtained from environmental sample
  misc_feature (1)..(279): Xaa is any amino acid
MEEADEATAPIRRSGGGGGGSSVSPAPPKKTAPPTASKKPPASEQSSEETAPIRKGSSSRSSGGGGGGWGGGGPNISGEAALILLAVIVVIIVAVVITEHISKKQSSLAQKQDPEKAGPGWGSEEAPAYSRGYAPPDGGSVKAANAPEPLEKTPGWWPFGKQRAQNAPEQRPGNPTANAPEQWQKNANAPEQREPNRGLKAPSWWPFGKQRAQNAPEQRPGNPAANAPEPWHKNANAPEQREPNRGLKAPGWWPFGSNAPKTRRNIGRKTRRQRAGAVA

SEQ ID NO: 12967 - DNA, 876 bp, Unknown
  Obtained from environmental sample
  misc_feature (1)..(876): n is a, c, g, or t
atgagaaagtttgcgttacgcataacagcggttattatttatatttgcgttattttttccgtacatgccttaaactggccctccgagaacgctgttcttgaccgtaatttcggctccaatgacaggggactgcctgttttagggatgattttcaacggaggcactgatgtgcttgccgccgagagcggcgaagttattttttcgcggggaaagaaagacaatgcgtcgcgtcttccctctccgttgggcgcgtggatggctgttgatcacggggacggattaatcagcatttacagccgctacgccgaacctgtcattccagttgaggaaacgcagattgaaaaacagcagataatcgcctcttccggcatttccggctggtcaacgcagaacggattttatttcatgctttttgacaggcgcgagcgccgctggattaaccccgcgatgattattacgccagtgcaggaaacccgtcctccgcagataatttccgtagatttgcgaaacagtcagggacaggtgatgcagtcgcgtaatttaacccagggacgctacacggtaattgtgaacgctcccggaggagtcccgataacgcaaaatttcgcttcccgtcaatacgcgcctcagaaaattatctgtcttataaacggcacagaagtcagttccctgaactttgaagctgtttcggcaagagacggggtgttaatggtttaccgtaacggccttgttcccgcaaagcaaatatactcaaatcttttatcttttgaagcggctgagatttttctgacccgcggacaggtaaacatggaaattatcgtgcaggatatatccggcgcttcccgcaacgcaataatccgcttatttataaattga

SEQ ID NO: 12968 - protein, 291 aa, Unknown
  Obtained from environmental sample
  SIGNAL (1)...(23)
  DOMAIN (48)...(148): Peptidase family M23
  misc_feature (1)..(291): Xaa is any amino acid
MRKFALRITAVIIYICVIFSVHALNWPSENAVLDRNFGSNDRGLPVLGMIFNGGTDVLAAESGEVIFSRGKKDNASRLPSPLGAWMAVDHGDGLISIYSRYAEPVIPVEETQIEKQQIIASSGISGWSTQNGFYFMLFDRRERRWINPAMIITPVQETRPPQIISVDLRNSQGQVMQSRNLTQGRYTVIVNAPGGVPITQNFASRQYAPQKIICLINGTEVSSLNFEAVSARDGVLMVYRNGLVPAKQIYSNLLSFEAAEIFLTRGQVNMEIIVQDISGASRNAIIRLFIN

SEQ ID NO: 12969 - DNA, 759 bp, Unknown
  Obtained from environmental sample
  misc_feature (1)..(759): n is a, c, g, or t
gtgaaaaggcgggttgtggttacaggcggcgctgtaatcagcgctttgggcagtgaatggaaagatatactcgttaagctcaaagagggaaaaaactgcgtgcgccggatggacgagtgggacaagtacgcgcacatgaataccagacttgcagctcctgtggattttgtgttgcccgattatcccagaaaaatgatccgcggtcttggcagggtaggacgtttggccctggtttcagcggacagggcattggaatccgccggcattgacaagggcgaccctgaactaaaagacggcagaaccggcgttgcttacggttcttcaatgggcagcattgattcgcttcttgatttttacagtatgcttgttacgaccgacgtaacaaaaatgagcgccaccacttatattaaagccatgcctcagacttgtgccgcgaatatctgcgtaattttcggtttgacaggaagagtaattacatcaaacaccgcctgcaaatccggcagccaggccattggttttgcgtacgaggccataaagtacggtatgcaggacataatgcttgccggcggagcggatgaaatgtgcctcgcaaacgccgccgtctttgacacgctttttgccgcgagcgccaaaaatgacaggccgcacaaaacgcctgccgcttatgacaaaaaccgcgacggccttgttgtcggcgagggggcgggctgccttgttctgaangaatacgaacatgccaaaaagcgcggggcaaaataa

SEQ ID NO: 12970 - protein, 252 aa, Unknown
  Obtained from environmental sample
  SIGNAL (1)...(17)
  DOMAIN (3)...(246): Beta-ketoacyl synthase, N-terminal domain
  misc_feature (1)..(252): Xaa is any amino acid
MKRRVVVTGGAVISALGSEWKDILVKLKEGKNCVRRMDEWDKYAHMNTRLAAPVDFVLPDYPRKMIRGLGRVGRLALVSADRALESAGIDKGDPELKDGRTGVAYGSSMGSIDSLLDFYSMLVTTDVTKMSATTYIKAMPQTCAANICVIFGLTGRVITSNTACKSGSQAIGFAYEAIKYGMQDIMLAGGADEMCLANAAVFDTLFAASAKNDRPHKTPAAYDKNRDGLVVGEGAGCLVLXEYEHAKKRGAK

SEQ ID NO: 12971 - DNA, 831 bp, Unknown
  Obtained from environmental sample
  misc_feature (1)..(831): n is a, c, g, or t
atgaggcacattgacagcgttctgccttctaccaaacttgaactttacggtgaaactttttcaacacccgttatgctggcggctctttcccatttgcaaagctgtcaccctgaaggcatggcggaagccgcgcggggcgtcaaggccgctgacgctgtaatgtgggcaggcatgggagacgaggcggaacttgaagcaattaccgcaacgggagcgagaactattaaaattatcaagccgtatgcggataacaaggttattttcaaaaagattgagcacgccgaaaaatgcggctgtcttgcggtaggcatggatatcgatcacgcttttaacagaaaaggaaattacgatgtaatccatgatctgaaaatgaaacctaaaagccttgatgaaataaaagaatttgttaaagccgcaaaattaccgtttatcatcaagggagtattaagcgtacatgatacttacaaatgccttgacgcaggcgtacgaggaatagtggtatctcatcatcacggtcatattgattacgccgtaccgccgttgtacgttctccccgccattgcggagatggttaaaaaacagaaagaaaggattcccattttcgttgattgcagtatcaacaggggaatggacgcatttaaggctcttgctctcggcgctgacgccgtgtcagccggacgaatcattatggagcctcttcacactgaaggagccgaaggtgtgcggaaaacaattaccggaatgacagaagaacttgcaggcgtaatggcagccacaaattcacctgatatacgccatattgatccttctgtggtatggctgccgttttaa

SEQ ID NO: 12972 - protein, 276 aa, Unknown
  Obtained from environmental sample
  DOMAIN (1)...(274): FMN-dependent dehydrogenase
  misc_feature (1)..(276): Xaa is any amino acid
MRHIDSVLPSTKLELYGETFSTPVMLAALSHLQSCHPEGMAEAARGVKAADAVMWAGMGDEAELEAITATGARTIKIIKPYADNKVIFKKIEHAEKCGCLAVGMDIDHAFNRKGNYDVIHDLKMKPKSLDEIKEFVKAAKLPFIIKGVLSVHDTYKCLDAGVRGIVVSHHHGHIDYAVPPLYVLPAIAEMVKKQKERIPIFVDCSINRGMDAFKALALGADAVSAGRIIMEPLHTEGAEGVRKTITGMTEELAGVMAATNSPDIRHIDPSVVWLPF

SEQ ID NO: 12973 - DNA, 741 bp, Unknown
  Obtained from environmental sample
  misc_feature (1)..(741): n is a, c, g, or t
gtgagtaccggacgcaaggacgagttcaacgtagaggcaaacaaattttcgctgatgcgcacattgtttaataacgaattgtacatcaaggcaattaaggaaggacgaaaaggcgtaattgttattaataaacttgataaagaatctgttgatgaagccgtctcaaactgcatagccctgaccgcctcggcgacgcccgatgacgcggaggatatcgccgaaaaaggcgggaacaaatcgtttgatcaaacctgcggcggtcctgacatggacaaactcttttcaaggtcaaaggaatttgtcgatcagcttgcggtagaatttccaaaaatagtgcttgaaggcatggtttcggattttaacagcgcggagactacttatgtaaacagcaacggcgtggaatttaagtcgtcgtcagagtggtatgatatgagtacaatgttttcggcgaaagatggagggaagacatcgtcgtttaacaattgctttattagggttgcgtcactcgaaactccatttatggaacttggcatgcagcggcaattgctggacgagtcgtcaaaatcgcttgacccgcgcgtggtggacggaaagtttaccggaaaggtgctgctaagccccgccaatgacgacatgatctggggttcgctttttacaaattttctctgcgacgcgccgcttattaagggcacaagccgctggaaggacgcgcttggctcaaggttgcagactccaaattaa

SEQ ID NO: 12974 - protein, 246 aa, Unknown
  Obtained from environmental sample
  misc_feature (1)..(246): Xaa is any amino acid
MSTGRKDEFNVEANKFSLMRTLFNNELYIKAIKEGRKGVIVINKLDKESVDEAVSNCIALTASATPDDAEDIAEKGGNKSFDQTCGGPDMDKLFSRSKEFVDQLAVEFPKIVLEGMVSDFNSAETTYVNSNGVEFKSSSEWYDMSTMFSAKDGGKTSSFNNCFIRVASLETPFMELGMQRQLLDESSKSLDPRVVDGKFTGKVLLSPANDDMIWGSLFTNFLCDAPLIKGTSRWKDALGSRLQTPN

SEQ ID NO: 12975 - DNA, 657 bp, Unknown
  Obtained from environmental sample
  misc_feature (1)..(657): n is a, c, g, or t
ttgatttgggatttggatggtacgctcatgatttcacaaggggaaatcttatattaccttgaacttgcattgaggaaatcatccttgaatatggctgatcaaataaagccaattagaacaggccctcctattgacattatgttaaaagaatcatttccggctgaaatgctcactgaggaaaaaattaatgaagtagtagcgcactacagagagggatattacaattccgggtttacaatgactgaccctttcaacggaattgaagaaattatctgcgatacaaccaattttacccatcacatagttaccaataaacctaaccctgcgtctcagcatattatagaaaaaatggggtgggcagacaaaatcgcatccttaaaaacccagtctaaacttattgaacaaagaaaatcaaaatccaggcttttcgccgaattaataaccgaattgggcggggacagttcttcattcatcggtataggagatacgaaaggcgactgtcttgcggcaagggataacaaaattactgctgttggcgttttatggggttcgggaaccagacaagaattatccgattgttgtgattacctttgtgaaaatgtaaaacaattgcatgattttttgtatgatatatcaaagcataagggaacagtttaa

SEQ ID NO: 12976 - protein, 218 aa, Unknown
  Obtained from environmental sample
  misc_feature (1)..(218): Xaa is any amino acid
MIWDLDGTLMISQGEILYYLELALRKSSLNMADQIKPIRTGPPIDIMLKESFPAEMLTEEKINEVVAHYREGYYNSGFTMTDPFNGIEEIICDTTNFTHHIVTNKPNPASQHIIEKMGWADKIASLKTQSKLIEQRKSKSRLFAELITELGGDSSSFIGIGDTKGDCLAARDNKITAVGVLWGSGTRQELSDCCDYLCENVKQLHDFLYDISKHKGTV

SEQ ID NO: 12977 - DNA, 567 bp, Unknown
  Obtained from environmental sample
  misc_feature (1)..(567): n is a, c, g, or t
ttgagtttgtgctcatcgaccgtgatacaaaacctacctgtttacaggacgagttgcgccgtaacgaagcctattggtctcgtcagtttgttatgtgaaaatggattgagtatggatgtatataaaacacttagggaagaatcattcgaggcgaaccttgaaataaagcggcgtaaccttgccatttacacatggggcaacgcatccgcttttgattttgacaagggagtatttgccataaaaccatccggcgtggaatatgatgaattaacgcctcaaaagatggtgttagtcgatcttgagggaaaggtcatcgaaggcaaactcaagccgtcttccgacacaaaaacccaccttgtcctgtaccgggaatttgagggcatcctcggcgtaacgcacacgcactcgccttacgcggttgcatgggcgcagtcgggaaaaccggttcctgttttcggaaccacccacgccgatcattgcgcttatgaaattccttgtacggaatttatgaatccgcangatgtaaaaaaacattacgaactggaaacaggcaattttaatttgtaa

SEQ ID NO: 12978 - protein, 188 aa, Unknown
  Obtained from environmental sample
  DOMAIN (46)...(184): Class II Aldolase and Adducin N-terminal domain
  misc_feature (1)..(188): Xaa is any amino acid
MSLCSSTVIQNLPVYRTSCAVTKPIGLVSLLCENGLSMDVYKTLREESFEANLEIKRRNLAIYTWGNASAFDFDKGVFAIKPSGVEYDELTPQKMVLVDLEGKVIEGKLKPSSDTKTHLVLYREFEGILGVTHTHSPYAVAWAQSGKPVPVFGTTHADHCAYEIPCTEFMNPXDVKKHYELETGNFNL

SEQ ID NO: 12979 - DNA, 648 bp, Unknown
  Obtained from environmental sample
  misc_feature (1)..(648): n is a, c, g, or t
gtgcttaacaaggatcaggaactggtgggcatcctcagttccctggacgtgatcaggagtttgctggccgagatgaacagggaggtactcaggttggaaaaactccaaaaaaacacagatggtattaattcgccctttttggagatggattttactatcgcccattacgattttgagctggcgggacgggcatccacggaaataaaaaaggcgctcaagcagcgtaatattgatccgaaagtgatacggcgtatagccattgccagctatgagctggaaattaaccaggtggttcattccaacggcggcaatatgcactgttccatacagcccgataaggtgatcatcacggcttccgacaacggccccggcattgccgacgtgaatctggctttgcaggaaggctggtcccacgcaaatgaatatatccgtttcttggggcttggcgcgggaatgggccttgccaacaccaagcggtctcggatgatttttcaattgagtccgccctgggaaaaggcactaccggtgccctccaagggggaacccccaattcccccaaaaccggaaaaccttgaaaaccggaggaaaaaactttattttgcccttggggacataccggggggggttgcccctttaaaaaaaaaataa

SEQ ID NO: 12980 - protein, 215 aa, Unknown
  Obtained from environmental sample
  misc_feature (1)..(215): Xaa is any amino acid
MLNKDQELVGILSSLDVIRSLLAEMNREVLRLEKLQKNTDGINSPFLEMDFTIAHYDFELAGRASTEIKKALKQRNIDPKVIRRIAIASYELEINQVVHSNGGNMHCSIQPDKVIITASDNGPGIADVNLALQEGWSHANEYIRFLGLGAGMGLANTKRSRMIFQLSPPWEKALPVPSKGEPPIPPKPENLENRRKKLYFALGDIPGGVAPLKKK

SEQ ID NO: 12981 - DNA, 810 bp, Unknown
  Obtained from environmental sample
  misc_feature (1)..(810): n is a, c, g, or t
ttgaaagacgcggcatatcccttcaaagacctttcaggatgcgcggtcgcatggaaactggtgtccgccctgcgttttgcccaaaacagcggactttacggccagccgatgtgccttttgaacacaagacccctgaatgaagcgtggatagttgaagccgtgaaaatgcggaatcttgtggtcatcgccacgcttagtgaaacaatcattccgggaatgctacatatcggcgacacaaggctccccgcttttctggaaggccagcagatactcgtatgggacgcccctttgcagaagcgcgtgacagtcaagctgttcggcaatggcgttgaaatcgggatgctggatgtcgcgcctgaaatcggcagggagataccttccgtcgccggtaaaagcctgatccgaatcaaggagctttccgccgtcgccaaatactcagacaaagaaattggagagcttgatgttttcgcgagccttttccgatcctacgcgcgcaagaaggaaaatcaggagagcgcggaagcgatctatgaaactcagcttgccgccctgggcactataggcgacatcatgccgcttttggacgagaacaggatcattgtccgttcgggcgtcaggtcgctcatgccttccgccggaggcagaacaagcggcactgggcctaaaccaggcatatcggaactgcttgacaagctggagctttccggcagccactttgacgtaaaagacatagcgtggaaactctgcccggcaataaacgcggggcgcagaatgggcatcccgaaaagcgctcgcgatcatccnnnntaa

SEQ ID NO: 12982 - protein, 269 aa, Unknown
  Obtained from environmental sample
  misc_feature (1)..(269): Xaa is any amino acid
MKDAAYPFKDLSGCAVAWKLVSALRFAQNSGLYGQPMCLLNTRPLNEAWIVEAVKMRNLVVIATLSETIIPGMLHIGDTRLPAFLEGQQILVWDAPLQKRVTVKLFGNGVEIGMLDVAPEIGREIPSVAGKSLIRIKELSAVAKYSDKEIGELDVFASLFRSYARKKENQESAEAIYETQLAALGTIGDIMPLLDENRIIVRSGVRSLMPSAGGRTSGTGPKPGISELLDKLELSGSHFDVKDIAWKLCPAINAGRRMGIPKSARDHPX

SEQ ID NO: 12983 - DNA, 501 bp, Unknown
  Obtained from environmental sample
  misc_feature (1)..(501): n is a, c, g, or t
ttgcttttttatcccggtctttttatctgctggttagtaattatgagcgggtgggaaaatcccgccgcgacgctcttatttttattcatcacattcagcagcgattcagtagcatggctttttggttcgttattcggagcaaacaaccggggaataattccggtaagccccaacaaaagcattgcaggcttcataggcggagcgttaggttctgtaattgtagccgtgggagccgcgtttatttttcccaatatatttgtttatttaaatcttgaaattccttccggtaaattggcaatcatggcggctattctgggcttctgtaccggtatcgccgcgtcattaggcgatcttgccgaatccgcgataaaaagaagctgtgattcaaaagattcggggaatttgatgctcggacgaggcggcgttcttgattcgattgactccattgccgtagccgctcctgtattttatctcctgttcaacatatttttcagagtttga

SEQ ID NO: 12984 - protein, 166 aa, Unknown
  Obtained from environmental sample
  DOMAIN (1)...(163): Cytidylyltransferase family
  misc_feature (1)..(166): Xaa is any amino acid
MLFYPGLFICWLVIMSGWENPAATLLFLFITFSSDSVAWLFGSLFGANNRGIIPVSPNKSIAGFIGGALGSVIVAVGAAFIFPNIFVYLNLEIPSGKLAIMAAILGFCTGIAASLGDLAESAIKRSCDSKDSGNLMLGRGGVLDSIDSIAVAAPVFYLLFNIFFRV

SEQ ID NO: 12985 - DNA, 486 bp, Unknown
  Obtained from environmental sample
  misc_feature (1)..(486): n is a, c, g, or t
ttgaggttccgcgcggaaaacgatgaggttccggcggtaaaagacgaagcgatcaaggccctgggagcgattaacaacgaagaagccttgagtattcttgattcgctttttgccgagcggaaaaatcctgacaggatacggattatggccgcggaaatgctgctgcagaataacgccgatacatacggtcccaaattattaattgaaatggaagaggcaaaacttaagaacctgacagccctttataacggatttatccgggttcttgtcccggcgaaatccgcttcacttgaagacatggcgcgccgcttcataacttctggcggggtgatagaaaaatcgctcgcactggatctaattttaaacaatgaattccgcggcctccaggagcaaatccgtcctctgctggacgaaaagaagaacggcgtaagcatagcccgtaaagcgaaaagcacccttgagaaattgggactgcaagcggagtga

SEQ ID NO: 12986 - protein, 161 aa, Unknown
  Obtained from environmental sample
  misc_feature (1)..(161): Xaa is any amino acid
MRFRAENDEVPAVKDEAIKALGAINNEEALSILDSLFAERKNPDRIRIMAAEMLLQNNADTYGPKLLIEMEEAKLKNLTALYNGFIRVLVPAKSASLEDMARRFITSGGVIEKSLALDLILNNEFRGLQEQIRPLLDEKKNGVSIARKAKSTLEKLGLQAE

SEQ ID NO: 12987 - DNA, 393 bp, Unknown
  Obtained from environmental sample
  misc_feature (1)..(393): n is a, c, g, or t
gtgggcactgacggcaaaatagcgtattcgaccaacggttctagctggaccgaagcaacaacagatataccttactctccaaacttagaagccgtcgcttatggcaacaacatgtttgtcgcaggcggcagttacagcacaatagcgtattcgtctgacggcgtaacatggacaaacgtaggtaccagtaatataggtaccattggcataatcgcatttggcaacggcacatttgttgcttctgaccattattccgaaaaaactgcgtgggtcacgaatggccacacatggacaaccgtagatgtncaaagcatatttcaaccnaatgacgactacggcagccgtataggtgcaatcgcttattgccacaacaagttttgtcctccttggtaa

SEQ ID NO: 12988 - protein, 130 aa, Unknown
  Obtained from environmental sample
  misc_feature (1)..(130): Xaa is any amino acid
MGTDGKIAYSTNGSSWTEATTDIPYSPNLEAVAYGNNMFVAGGSYSTIAYSSDGVTWTNVGTSNIGTIGIIAFGNGTFVASDHYSEKTAWVTNGHTWTTVDVQSIFQPNDDYGSRIGAIAYCHNKFCPPW

SEQ ID NO: 12989 - DNA, 480 bp, Unknown
  Obtained from environmental sample
  misc_feature (1)..(480): n is a, c, g, or t
gtgcgctatgagaacggagagttttttataccttggttcaataccgaaaaaccgctttcctcggcttcggtttcgcataaaatattatggctgcattatctgacagcggacgggatacaaaaacaatcggggcatttaatcgcttacagggaagctgcgccggcgcttttttatgaaactaacttcaataagcgcgcggtaaaaccccttgttaatcagttcggtaaaaatccgcagagcctaatttccaccggcatcgcccttggcggacaaaggaccgatatgggcgacgcttccgttacgctgcatatccttccatatttaccgatgacttttatcatctgggaagccagtgaagaatttcccccggacggaaatatactctttgatcaaacggcaaaaacatggttcgcggcggaagaccttgcggtaattgcaagcctcgcggtttatgatttgattgcggcaagtaaacaataa

SEQ ID NO: 12990 - protein, 159 aa, Unknown
  Obtained from environmental sample
  misc_feature (1)..(159): Xaa is any amino acid
MRYENGEFFIPWFNTEKPLSSASVSHKILWLHYLTADGIQKQSGHLIAYREAAPALFYETNFNKRAVKPLVNQFGKNPQSLISTGIALGGQRTDMGDASVTLHILPYLPMTFIIWEASEEFPPDGNILFDQTAKTWFAAEDLAVIASLAVYDLIAASKQ

SEQ ID NO: 12991 - DNA, 702 bp, Unknown
  Obtained from environmental sample
  misc_feature (1)..(702): n is a, c, g, or t
atgaaaataattataccaaactcaaggattttcctgttttccttattttttttaagtatcaatatactttttgggcaggaaatagtcactgccggaaaatacctggaaatggtatccgaaacatactccggaataagggattacgaggcaaatctcggaattcgttccggcaattccgaaatgacaggaacagtgagccacctttctccttcttttttacgaatagattttacccgaccggctgatcaagttattgtttttaacggcgagttactcactatctatttgcccgaattcagggctgtattaaaccagactgtcaaccaaaccagaagacctggcgcaaccggagcttcattggcaagttcccaggggttaagcttgctgcgccgcaattatgctccttcatttgttacaggcccaaatcctgaaccgctggacagtaattcaagagagcaggttgtaaaactgcgtcttacaaggcagtccgtttccgaaggattcagagaaattatattgagtataaataatgacacaaaattaatccgcaggattgagggacggactatatcggacggcgaagtgcgttttgattttaccaacgtanaaacaaatcagggaattcccgaacagcgttttatatacgattctcctgcatctgcaaatatgtataataattttttattcanggattctgattaa

SEQ ID NO: 12992 - protein, 233 aa, Unknown
  Obtained from environmental sample
  SIGNAL (1)...(25)
  DOMAIN (43)...(216): Outer membrane lipoprotein carrier protein LolA
  misc_feature (1)..(233): Xaa is any amino acid
MKIIIPNSRIFLFSLFFLSINILFGQEIVTAGKYLEMVSETYSGIRDYEANLGIRSGNSEMTGTVSHLSPSFLRIDFTRPADQVIVFNGELLTIYLPEFRAVLNQTVNQTRRPGATGASLASSQGLSLLRRNYAPSFVTGPNPEPLDSNSREQVVKLRLTRQSVSEGFREIILSINNDTKLIRRIEGRTISDGEVRFDFTNVXTNQGIPEQRFIYDSPASANMYNNFLFXDSD

SEQ ID NO: 12993 - DNA, 696 bp, Unknown
  Obtained from environmental sample
  misc_feature (1)..(696): n is a, c, g, or t
ttgaatatacgcaacgcgatggaagaacaggaaataggcggaaggcagatactggactccatgaaccgcctgaaagagataagcgtatcggtcaagaaaggcgcggcggacatgatggattcaggcaataacctgaacaagtcaacgggcgatttcattgagatcagcaataaaactatggccggcatgaacgaaatagtgaacggggcaatgatcgagatacaaacggcggtgacccatgttgatgaaatgagcagcgagaataaccggaacttcgatgagctaaaaaaagaatcaatgaaatttaaagtcaatctgggcgatgagaagcagaaaatcatcgttattgacgatgaacagcccatacttgtcatggcaaaaggcatattggacaaggattacgaagtcaccaccgtcaactcgggcacagacgcccttcatttattctaccagggctacgccccggatttgatgctgctggacctgaatatgcccgacatggacggatggggtacctttaacaggatacgggatttgaccaaattaaacaaagttccgatagcgattttctcatcttcggaagatccgggggacagggccaaagcgaaggaaatgggggccgttgattttataaagaaacccattaacaagggcgaactgctggacagggtaggaaaactcataaaaaaagggtaa

SEQ ID NO: 12994 - protein, 231 aa, Unknown
  Obtained from environmental sample
  DOMAIN (111)...(225): Response regulator receiver domain
  misc_feature (1)..(231): Xaa is any amino acid
MNIRNAMEEQEIGGRQILDSMNRLKEISVSVKKGAADMMDSGNNLNKSTGDFIEISNKTMAGMNEIVNGAMIEIQTAVTHVDEMSSENNRNFDELKKESMKFKVNLGDEKQKIIVIDDEQPILVMAKGILDKDYEVTTVNSGTDALHLFYQGYAPDLMLLDLNMPDMDGWGTFNRIRDLTKLNKVPIAIFSSSEDPGDRAKAKEMGAVDFIKKPINKGELLDRVGKLIKKG

SEQ ID NO: 12995 - DNA, 822 bp, Unknown
  Obtained from environmental sample
  misc_feature (1)..(822): n is a, c, g, or t
atggatcgttctatcgtgaagggggcggggctggaatttttcggcatacccgcggggaagctcaggcggtatttcacccttaaaacaatacccgatgtcttcaaagtcgccgctggtttttttgccgccaggcgcatactgaaaaaacaaaaggtcaatctgcttttttcaaaaggcggttttgtcagtgtgccgccntgcgccgcggccgcttcactggggattcctgtttttacccacgagtcggattttagtccgggccttgccacaaggctcaacctgcgctttgtgcgtaaaaccaaaggcagggtttttatcgcgtattcggatacagccgggtttctggcaaagagccgattaagctcggatcaggtgatcgtcagcggtaatccggttcgctccgcgtttcgttcagccgatcccgcaaaaggccgcgcctttctgggactggagcaaaatgaaagggtgcttctggttctgggtggcagccagggggcaagagaacttaacacgctggttcgaggcgcaatttcagatctgcgcctattttacacggtagtacaccagtacgggcccgcacaggactgggacttgccaaaaacgcagggatatattccacttccctatatcaaagatgaaatgccccacgtacttgcaacagcggaactggtacttggacgcagcggggcagggactgtctgggaaagcgcggccctgggcaagccaatggtattgatccccctctgcggctccggcacaaggggcgatcaggtgaaaacgccaggttctttgaaaaacaaggagcggcgctggttttgttag

SEQ ID NO: 12996 - protein, 273 aa, Unknown
  Obtained from environmental sample
  DOMAIN (156)...(271): Glycosyltransferase family 28 C-terminal domain
  misc_feature (1)..(273): Xaa is any amino acid
MDRSIVKGAGLEFFGIPAGKLRRYFTLKTIPDVFKVAAGFFAARRILKKQKVNLLFSKGGFVSVPPCAAAASLGIPVFTHESDFSPGLATRLNLRFVRKTKGRVFIAYSDTAGFLAKSRLSSDQVIVSGNPVRSAFRSADPAKGRAFLGLEQNERVLLVLGGSQGARELNTLVRGAISDLRLFYTVVHQYGPAQDWDLPKTQGYIPLPYIKDEMPHVLATAELVLGRSGAGTVWESAALGKPMVLIPLCGSGTRGDQVKTPGSLKNKERRWFC

SEQ ID NO: 12997 - DNA, 750 bp, Unknown
  Obtained from environmental sample
  misc_feature (1)..(750): n is a, c, g, or t
atgattaataaatttgcgccgctatatgcgccgctatatgcgccgctccttgcgctgattctcccgcttgtttttgtctcttcctgtaagaccattaacagcgacaatgaagctctccacatccccaaatcaatagtttacttcagttttgatgacggtcctaatgcgaagggcgattcaaccgcgcggcttttggatgtacttaaaaaataccagataaaggcaatattctgcttaataggtgaaaatgttgaacggtatcccgatcttgtcagacgcatttataatgaagggcattatatagccaatcacgggtactcggaaatattggcgagcaaaatgaattatgctcaatttagggataaccttgtaaggggcggggaggcgatttcaagggttctgggattagacatgaatcccaaattgtataggccccacggaggtttttacagttccgcccaggaaaagatcatttacgacgaagattataaaattgttaaaaacactgtcagggtgtatgacgctgttattgacggaacaaaaaagagtaaggttgtaaaacaggttgtcaaaaaagttgaaaagcagggcgggggtcttgttttgctccatgacgctagggattcctgcgttaggatggaagcgcaacttgcaaaaaatccccacggtgtttttgaccgctcatggattcccgataccgtagaagaaataattactatccttttgaagaagngggtttattttaaatag

SEQ ID NO: 12998 - protein, 249 aa, Unknown
  Obtained from environmental sample
  DOMAIN (39)...(166): Polysaccharide deacetylase
  misc_feature (1)..(249): Xaa is any amino acid
MINKFAPLYAPLYAPLLALILPLVFVSSCKTINSDNEALHIPKSIVYFSFDDGPNAKGDSTARLLDVLKKYQIKAIFCLIGENVERYPDLVRRIYNEGHYIANHGYSEILASKMNYAQFRDNLVRGGEAISRVLGLDMNPKLYRPHGGFYSSAQEKIIYDEDYKIVKNTVRVYDAVIDGTKKSKVVKQVVKKVEKQGGGLVLLHDARDSCVRMEAQLAKNPHGVFDRSWIPDTVEEIITILLKKXVYFK

SEQ ID NO: 12999 - DNA, 534 bp, Unknown
  Obtained from environmental sample
  misc_feature (1)..(534): n is a, c, g, or t
ttgaccgaagcatttgtaacagacgcgcttctttccgcaagtaaaactacagacgttaccgttcatgaaaaggcaatcttacctgtaaccgcgctagtcttctcccccgccatgctggaaagttgtaaaacaaatgtatgcggcaattacaatagatcatgggtttgccctcccgcctgcgagagcattgaggagcaaaagaaaaaaatattttcgtatcaaaatcttttggtatttacaacaatgcacgctttagaagattcctttgattatgagggaatgacagaaggcagaaaactccacaccctgctgacattggaattaagaaaaatactgaacgcccccgtttacggcgcgggaaactgccctatttgtgaatcttgcgttttcccgtcgccttgcgtacatcccgaaaaaaaaataggctcaatagaagccgcaggaattgacgtaacaagtttgagtaaggcggcgaatatcgtttacaataacggacaaaatacggttacttttttttctatcgcgttgttttaa

SEQ ID NO: 13000 - protein, 177 aa, Unknown
  Obtained from environmental sample
  misc_feature (1)..(177): Xaa is any amino acid
MTEAFVTDALLSASKTTDVTVHEKAILPVTALVFSPAMLESCKTNVCGNYNRSWVCPPACESIEEQKKKIFSYQNLLVFTTMHALEDSFDYEGMTEGRKLHTLLTLELRKILNAPVYGAGNCPICESCVFPSPCVHPEKKIGSIEAAGIDVTSLSKAANIVYNNGQNTVTFFSIALF

SEQ ID NO: 13001 - DNA, 348 bp, Unknown
  Obtained from environmental sample
  misc_feature (1)..(348): n is a, c, g, or t
ttggaaatctgcctcggtcatcaggcgatttttgaagcgttcggcggtacggtatcttacgcaagcaaactaatgcacggcaaatcttcgcaggtaacggtagacgtaaacaatactttgtttaaagggcttccgccggcaatacaggcggcgcgctatcattcgcttgccggaattaaatcgacattgccggattctttaaaaattacggcatggacgcaggacgatgaaattatggctgtatgccacaaagaatatcccgtatacggcgtacagtttcaccccgaatcgatacttacacctaacgggaaaataatagcggaaaattttttaagagtgagaaattga

SEQ ID NO: 13002 - protein, 115 aa, Unknown
  Obtained from environmental sample
  DOMAIN (1)...(113): Glutamine amidotransferase class-I
  misc_feature (1)..(115): Xaa is any amino acid
MEICLGHQAIFEAFGGTVSYASKLMHGKSSQVTVDVNNTLFKGLPPAIQAARYHSLAGIKSTLPDSLKITAWTQDDEIMAVCHKEYPVYGVQFHPESILTPNGKIIAENFLRVRN

SEQ ID NO: 13003 - DNA, 432 bp, Unknown
  Obtained from environmental sample
  misc_feature (1)..(432): n is a, c, g, or t
atgaaaccgcttcccaaagacaagatctatgacgaaaccacattaggcagcgatggcaatcccgttttgcttaacctttttgtggaagatcagaatactgccattggcaaaagaaatattcattcgcttaaacccggctattccctcacaattggcggcggcaagtcggactttcttatctttcttgttcccgttccgccgcgcattgcggaagtcaggcatgatggcagaaactgtgttcttacacccgtaaaaccacagtacttacctgatataggttctcaaacaataccaaactgcataggcaagactttcagggtaatctctgataagaaatacgagcttcatatccggcttgaaaaatacgaggacccgctacacgctttgaacaaaatgctgcgctcaatcaaggtgccaggaccggtagtatag

SEQ ID NO: 13004 - protein, 143 aa, Unknown
  Obtained from environmental sample
  misc_feature (1)..(143): Xaa is any amino acid
MKPLPKDKIYDETTLGSDGNPVLLNLFVEDQNTAIGKRNIHSLKPGYSLTIGGGKSDFLIFLVPVPPRIAEVRHDGRNCVLTPVKPQYLPDIGSQTIPNCIGKTFRVISDKKYELHIRLEKYEDPLHALNKMLRSIKVPGPVV

SEQ ID NO: 13005 - DNA, 582 bp, Unknown
  Obtained from environmental sample
  misc_feature (1)..(582): n is a, c, g, or t
gtggtatctaccattgcgggaaccgtattgcaggctccctacagcatcggcgataccgtttcggcgcagtcggcgctgtatgtactgggaaacctttccgccttacgggtagagacctttataccggagcgttttgtttcatcaattaaacaaggactgcgcgctaccgttatctttgaagcaattcctgatgaaacttttctcgccgcggttgacgagataagccctgtgcttgatccggcaagccgcaccctgcgaatacgactccgtttcattgaccagcagggaaaagcggtgatagattcccggatcaaggcgggaatgtttgccactatcagcctggttaccagaacgcggaccaatgtgccggttataccccgcaattcggtaatcaatacctacggttcatggatcgtctttattgttgatgaaaataacattgcccgccggcgcacggtagaattgggcattgaaaatgaaagtttatttgaagtgttgaacggtgtcaattcgggagaccgggttgtcagtgccggacaaaattttctttcggacggcgatccggttcgcgttgtggagtaa

SEQ ID NO: 13006 - protein, 193 aa, Unknown
  Obtained from environmental sample
  misc_feature (1)..(193): Xaa is any amino acid
MVSTIAGTVLQAPYSIGDTVSAQSALYVLGNLSALRVETFIPERFVSSIKQGLRATVIFEAIPDETFLAAVDEISPVLDPASRTLRIRLRFIDQQGKAVIDSRIKAGMFATISLVTRTRTNVPVIPRNSVINTYGSWIVFIVDENNIARRRTVELGIENESLFEVLNGVNSGDRVVSAGQNFLSDGDPVRVVE

SEQ ID NO: 13007 - DNA, 837 bp, Unknown
  Obtained from environmental sample
  misc_feature (1)..(837): n is a, c, g, or t
atgggacagctnttcagcgaccttatctttaccgtggtaatttctttgacagcatccctgctagtcgccattactctggttcccagcctctgcggttccgttttgccgctcaatacccgtatacaaaaaccgctgaaaagacgtttcctgcgcgcaatagacgacaaaatggaatcttttttgaaaacaacggaaaacaaataccggaacgcgctggaatattgcctgtcccaccgcttgataattgttacgcttgttctgttaatcctgattttttccgtaatgcaattcggcggtatcgggatgaatatgtatgtccgtatgcgcaccgatgataatgttaatatcaatgtgtccatgcctcagggaaccgccattgatgtcaccgaagaaatgctgttccggctggaagaactggtcaaaaaagaggtacagggttaccggaacatcatccttaccgcgcggcgtagcggaaccaatcagggaacgattcaaattattcttcccgaaccggccaaacagattgatacgcccgattcagtaatccgcaaactgactccctataccaaccaaatccccggagcgcggatcagctttagagcgggccggggagtgggaactacttccgcgattgaaattgccataagttcccgcaattataacgcgattatggaagccgccggggagattcaccacatcattacgcgctatctgcccgaaattgagaatcccgttataaatattgacgaaggggctcctcaattacgggttgaaattgaccgggaccgcgccgcaagttttggtctttcccttgcgaccattgccacggagatttga

SEQ ID NO: 13008 - protein, 278 aa, Unknown
  Obtained from environmental sample
  misc_feature (1)..(278): Xaa is any amino acid
MGQLFSDLIFTVVISLTASLLVAITLVPSLCGSVLPLNTRIQKPLKRRFLRAIDDKMESFLKTTENKYRNALEYCLSHRLIIVTLVLLILIFSVMQFGGIGMNMYVRMRTDDNVNINVSMPQGTAIDVTEEMLFRLEELVKKEVQGYRNIILTARRSGTNQGTIQIILPEPAKQIDTPDSVIRKLTPYTNQIPGARISFRAGRGVGTTSAIEIAISSRNYNAIMEAAGEIHHIITRYLPEIENPVINIDEGAPQLRVEIDRDRAASFGLSLATIATEI

SEQ ID NO: 13009 - DNA, 321 bp, Unknown
  Obtained from environmental sample
  misc_feature (1)..(321): n is a, c, g, or t
atgatttttccctgtataaaatgcgggctgtgttgtaaaatgctgcgacacatccccattatatcagagtatgataaaggtaacggcgtttgccgttaccttgaaaacaatctgtgcggtatttatgaaaatcgccctttaatttgtaatattgaagaaatgtatcgttcttatttcagggtaataatgacagaaaacgaatttgtcaccataaatatagaggcatgtatacaaattgctgaacactttaacaatgaatatgtaaaaaaagagatgacagaattatgcaatcaaaaggagacctgcgatgaanaaagataa

SEQ ID NO: 13010 - protein, 106 aa, Unknown
  Obtained from environmental sample
  DOMAIN (3)...(81): Uncharacterised protein family (UPF0153)
  misc_feature (1)..(106): Xaa is any amino acid
MIFPCIKCGLCCKMLRHIPIISEYDKGNGVCRYLENNLCGIYENRPLICNIEEMYRSYFRVIMTENEFVTINIEACIQIAEHFNNEYVKKEMTELCNQKETCDEXR

SEQ ID NO: 13011 - DNA, 447 bp, Unknown
  Obtained from environmental sample
  misc_feature (1)..(447): n is a, c, g, or t
atggaaagccgcttatgccgcgcagctgcggctaagcgacgaaaaagtaacaaaatatatgtggcttgcgcccggaatgtaataggggattatatgttcataattgatgaaaaagacagagaatacaggtttggggactcaggtcccaagtacctcatgcaggggccgcggatgaatttcgcgcttgtacaatttatgcccggccaggatttccgcgcccactaccacgaggttatggaagaaaatttttttatacttgaaggaacagttaccatcgtcgtagacggaacggcgcatactcttaacccgggccaattaattcacatagaacctaacgaggttcattatgtgatcaataaatcttccgccgttgtccgaatggtctctacccttgcgccttacaagcaggttgacaagattgaagttgataatcctgttatcgcgtaa

SEQ ID NO: 13012 - protein, 148 aa, Unknown
  Obtained from environmental sample
  DOMAIN (61)...(131): Cupin domain
  misc_feature (1)..(148): Xaa is any amino acid
MESRLCRAAAAKRRKSNKIYVACARNVIGDYMFIIDEKDREYRFGDSGPKYLMQGPRMNFALVQFMPGQDFRAHYHEVMEENFFILEGTVTIVVDGTAHTLNPGQLIHIEPNEVHYVINKSSAVVRMVSTLAPYKQVDKIEVDNPVIA

SEQ ID NO: 13013 - DNA, 339 bp, Unknown
  Obtained from environmental sample
  misc_feature (1)..(339): n is a, c, g, or t
atgacgattttcttctctgnacgattcgcagccgaagctcccgcgcccgctcttcagcctgccgcaaaagctcctcctccacccgttcaagaagctaccgctccgcagcccgcgcctcaaaccgctccacaatccgcttctgtagccgtagcgggcggacaagccggcggcggcgctccgtttacccttccttcgggtttaagatcagaacttagaaatattttaagctacatggatcagcttcttgaatcattaccggaagaaaaaatcgaagagttcgcaaaatcagaatacttcgattcctacaagaaactttttaaggatttggggctggtataa

SEQ ID NO: 13014 - protein, 112 aa, Unknown
  Obtained from environmental sample
  misc_feature (1)..(112): Xaa is any amino acid
MTIFFSXRFAAEAPAPALQPAAKAPPPPVQEATAPQPAPQTAPQSASVAVAGGQAGGGAPFTLPSGLRSELRNILSYMDQLLESLPEEKIEEFAKSEYFDSYKKLFKDLGLV

SEQ ID NO: 13015 - DNA, 858 bp, Unknown
  Obtained from environmental sample
  misc_feature (1)..(858): n is a, c, g, or t
atgtcctattccttgaaaatggatagccgagcgaagtggagcgatggaaagcccataacggcttacgatgtgcagttctattacgatgttataatgaacccgaaaaatttaacgcccattttcaaagttgggcttgaacgccttgaacgcccagaggtcattgacagcctgcatttaaccataaaagccaaagacccgcattggaataatttttgggaagccgctggaatggtcgctttccctaaacatatttgggaaaatacagacttcaattccatccgttttgagttccccgttgtgagcggcccctatgccattaagcagatgaagatagaccgctcgctggaactcgtccgccgcgaagactggtggggcaggcaaaaaaattacaacgccggcaaatacaatttcaacaaaatcaaatacaactttatggaagaccgcaacaaagcccttgaagccctgaaaaaaggcgattttgatgcataccccatatacacttcgtcaatatggataaaccaaaccgattttgacgcggtgaaaaaaggctatgtgttgaaaaacagggtttttaatgaagagccaaaaggctttcagggatttgcgctcaacctgcgccgcgataaattcaaagatgtgcgcgttcgcaaagccctttcccttatgctgaaccgagagctgatgagcgaaaaatttatgttcaaccagtattttttgctgaacacttactacccaagtctttgggaagggcacaaaaacccgaatgcaccgttatacccctttgctcccgattccgctcgcaaacttttggaagaagcntggctacaccgtaaatacacaaggcaaattggtggataa

SEQ ID NO: 13016 - protein, 285 aa, Unknown
  Obtained from environmental sample
  DOMAIN (2)...(281): Bacterial extracellular solute-binding proteins, family 5 Middle
  misc_feature (1)..(285): Xaa is any amino acid
MSYSLKMDSRAKWSDGKPITAYDVQFYYDVIMNPKNLTPIFKVGLERLERPEVIDSLHLTIKAKDPHWNNFWEAAGMVAFPKHIWENTDFNSIRFEFPVVSGPYAIKQMKIDRSLELVRREDWWGRQKNYNAGKYNFNKIKYNFMEDRNKALEALKKGDFDAYPIYTSSIWINQTDFDAVKKGYVLKNRVFNEEPKGFQGFALNLRRDKFKDVRVRKALSLMLNRELMSEKFMFNQYFLLNTYYPSLWEGHKNPNAPLYPFAPDSARKLLEEAWLHRKYTRQIGG

SEQ ID NO: 13017 - DNA, 678 bp, Unknown
  Obtained from environmental sample
  misc_feature (1)..(678): n is a, c, g, or t
atgtcgtattcgtcagacggcataaactggacggcagttacagatagtaaattcagtactaccgcatatagctatatcaatggagttacttatggtaacggtaaatttgtcgccggaggaaataacgggaagggaactgccaatacttattcaggcgaaatggcctattcattggatggcataagctggacgaaagtttcagataacaagttcggtgatcatcaagtcagaggtattacatggggcaacagtaaatttgtcgctgtgggagatactggcacaatggcgacttcaacggacggcataacatggtcaccagttacagacagcaaattcggaactaccaatatcgtagctatctcctatggcaacgacaagtttatagctgtgggaagcgatggtaaaatggcgtattcaccagatggaataaactggacagcagttgcgaacagtacatttacatcttcttattctatccgaggcattgcatggggaaacaacaaatttgtagccgtaggagataatggcaagatggcgtattcctatgacggcataacatggacagccgaagaaaatagtacattcggttcttcaaggatatatgctgttacctatggcaacgacaagtttgtcgccggaggtaacgatagcaaaatagcgtattcatcgggcaattaa

SEQ ID NO: 13018 - protein, 225 aa, Unknown
  Obtained from environmental sample
  misc_feature (1)..(225): Xaa is any amino acid
MSYSSDGINWTAVTDSKFSTTAYSYINGVTYGNGKFVAGGNNGKGTANTYSGEMAYSLDGISWTKVSDNKFGDHQVRGITWGNSKFVAVGDTGTMATSTDGITWSPVTDSKFGTTNIVAISYGNDKFIAVGSDGKMAYSPDGINWTAVANSTFTSSYSIRGIAWGNNKFVAVGDNGKMAYSYDGITWTAEENSTFGSSRIYAVTYGNDKFVAGGNDSKIAYSSGN

SEQ ID NO: 13019 - DNA, 843 bp, Unknown
  Obtained from environmental sample
  misc_feature (1)..(843): n is a, c, g, or t
ttgtccatcttgatacgccgtggagtatgcaaaaaaaacggccttaagatgatattagacctgcacgagtgtcctggacacgatttttcggaagcggcaaaaactcccgttcaaaaacttttcaccgacgacgatacctatatcaaaaaaaccgaaaaaatctgggcttaccttgcggaacgttatgcgcataacgatcatgttctctttgagacgctcaacgagcctgtcgctcccaccgctgaaatttggaacaatgtgaaggacaggctctgccgagaaatacgtaaacacgcgccgaagtcaacgataataaccggttccaatatgtggaacatcccgggtacattcgactcccttactccctttgacgacggtaacatgatctactgcgtgcatttttacgagccgcttctttttactcaccaaaacgcgccatggattgacaatcctgaaattaaaatagcaagaccgtatccaggcgattacggtcccggtcttgtccgcaaattcggacaggcgcattcggcgggcgtttgggataaacagcggcttgtaaatgaatttacgcccgttaacactttcagaaaaaaatacaacgcgcgggtaatctgtaatgagttcggcgtttatacccccgtcgagcttcagtcccaactacgctggtatgatgatattctttcggtacttagggagatggagatcggtttcacatactggaactacaagaaccttgactttggaataatctctgtaggagagaaactgcacgaaaaccttccgcagtacaacaacagcgagaggataaatcatccggttcttgatgtgttaagaaaatattga

SEQ ID NO: 13020 - protein, 280 aa, Unknown
  Obtained from environmental sample
  DOMAIN (1)...(250): Cellulase (glycosyl hydrolase family 5)
  misc_feature (1)..(280): Xaa is any amino acid
MSILIRRGVCKKNGLKMILDLHECPGHDFSEAAKTPVQKLFTDDDTYIKKTEKIWAYLAERYAHNDHVLFETLNEPVAPTAEIWNNVKDRLCREIRKHAPKSTIITGSNMWNIPGTFDSLTPFDDGNMIYCVHFYEPLLFTHQNAPWIDNPEIKIARPYPGDYGPGLVRKFGQAHSAGVWDKQRLVNEFTPVNTFRKKYNARVICNEFGVYTPVELQSQLRWYDDILSVLREMEIGFTYWNYKNLDFGIISVGEKLHENLPQYNNSERINHPVLDVLRKY

SEQ ID NO: 13021 - DNA, 801 bp, Unknown
  Obtained from environmental sample
  misc_feature (1)..(801): n is a, c, g, or t
atggtgagcgaaaaaaattacttctttaagatgagcagttatcagcaaaaactaatcgaccacataaacgctaacccaagctggatcctgccggactttcgcaagaacgaagtgctcggttttttaaaaaagccgctcaacgacctctgcataagccgcccaaaatcacggctttcgtggggcataccgttgccatttgatgaagactttgtcacctacgtttgggtggacgcccttgaaaattacataagcggagtccaagacaaaaagcacaaagacggcactcctctttggcccgcagattttcacataataggcaaagatatattaacaactcattgcatctattggcccactataataatggcaatgggctgggaacttcccaaacacatcttggcacacggctggtggatgatagacggctctaagatgagcaaaacaagcggcacgggcgttaaccccatggactatgtggaaacctacggcgttgacgttttccgctacttcttgatacgggaaatggtggttgggcttgatgccacattcggacacgactcctttgtccgcagaataaactcggacttggcaaacgatttgggcaatgggttaaacagaatccacaaattgatattgaccaactatggtggcaaaattcccgtgccccccacatctgctcaaagcggagagcaagaaaaggaattgctcagctactcggaaaaagccactcaattcgcaaaggaaaatataggcgaagcaaagctgagtttgatagtggaagaaatttctcggccgatctga

SEQ ID NO: 13022 - protein, 266 aa, Unknown
  Obtained from environmental sample
  misc_feature (1)..(266): Xaa is any amino acid
MVSEKNYFFKMSSYQQKLIDHINANPSWILPDFRKNEVLGFLKKPLNDLCISRPKSRLSWGIPLPFDEDFVTYVWVDALENYISGVQDKKHKDGTPLWPADFHIIGKDILTTHCIYWPTIIMAMGWELPKHILAHGWWMIDGSKMSKTSGTGVNPMDYVETYGVDVFRYFLIREMVVGLDATFGHDSFVRRINSDLANDLGNGLNRIHKLILTNYGGKIPVPPTSAQSGEQEKELLSYSEKATQFAKENIGEAKLSLIVEEISRPI

SEQ ID NO: 13023 - DNA, 333 bp, Unknown
  Obtained from environmental sample
  misc_feature (1)..(333): n is a, c, g, or t
atgtccgtaaacgcagcgcaactcaacaactacatgggctacacgacggcggtcaaagagccttcccaggacctggacaaggacgccttcatgaaactgctggtcgcccagcttcaaaaccaggaccccagccagagccaggacccgcaggcgatgatgcagcagatgacggcgttcagccaactggaggccatgcagaacgtgggcgccatgctgcaggtcatgcagacgcagaacgtggccctgttccaggcgtcggccaccagcctggtgggcaagcacgtccgggtgcagggcgcgggcgtcgagctaaggangggtcgctcgcgataa

SEQ ID NO: 13024 - protein, 110 aa, Unknown
  Obtained from environmental sample
  DOMAIN (1)...(110): Flagellar hook capping protein
  misc_feature (1)..(110): Xaa is any amino acid
MSVNAAQLNNYMGYTTAVKEPSQDLDKDAFMKLLVAQLQNQDPSQSQDPQAMMQQMTAFSQLEAMQNVGAMLQVMQTQNVALFQASATSLVGKHVRVQGAGVELRXGRSR

SEQ ID NO: 13025 - DNA, 501 bp, Unknown
  Obtained from environmental sample
  misc_feature (1)..(501): n is a, c, g, or t
gtgggcccattcaatgcggacgtgtccgggacggtctcgaaacagcccgcagcacctgtggcgcatcggcaattcctaccccnccaggcgcccatgtcccagttggagggcagcgtcaggtggctgctccgaagcgacgcgaagggagccgaaatccaactgcacccggaaagcctcggcagggtgacggtacaactgaaagtggaaggctccgaggtccacgccagggtgtgggcgtccgaggcctccacgatgccccttctgagggaacacaaggcgtttctggaatccagcctcaaagaccagggccttacgctgggcagcttcgaccttcaacagggcaagggcggccaccaggcgcagggcgaggccgacaggcaccaccagcacttcgccccgccgatgcgggagatgtggaccggcacggaattcaggcaagagatgcccatacagatagtggcgcagcacatagacgaaagcggagtcgaggtttacgcctaa

SEQ ID NO: 13026 - protein, 166 aa, Unknown
  Obtained from environmental sample
  misc_feature (1)..(166): Xaa is any amino acid
MGPFNADVSGTVSKQPAAPVAHRQFLPXQAPMSQLEGSVRWLLRSDAKGAEIQLHPESLGRVTVQLKVEGSEVHARVWASEASTMPLLREHKAFLESSLKDQGLTLGSFDLQQGKGGHQAQGEADRHHQHFAPPMREMWTGTEFRQEMPIQIVAQHIDESGVEVYA

SEQ ID NO: 13027 - DNA, 465 bp, Unknown
  Obtained from environmental sample
  misc_feature (1)..(465): n is a, c, g, or t
atggtagaaaacccgctgattgttcaaggtgacaggactctgctgctcgatgttcacgcggaaaatgcggaacaggcaagagcggcggttattccttttgcggaacttgaaaaatcgcctgaacatatacatacctaccgtataacgccgctgtccctgtggaacgcggcaagcgccgggttcaaacccgatgacattgcgaaagtccttgccgaatacagccgctattcaatgccatccggcatcattgaaagtttttccgataccatgtcccgttacggcaagatcaggatgatcgccacgcccgaacctgccgctgacgtagcgcctgaacccgccggggacaatgacatgctgtttctggaaatcaccgataaggcggtgctggcggaagtcgaagccataaaaatactcgaaaaatatttaataaagacaggtgaagngcttcctcttgaggctggttga

SEQ ID NO: 13028 - protein, 154 aa, Unknown
  Obtained from environmental sample
  misc_feature (1)..(154): Xaa is any amino acid
MVENPLIVQGDRTLLLDVHAENAEQARAAVIPFAELEKSPEHIHTYRITPLSLWNAASAGFKPDDIAKVLAEYSRYSMPSGIIESFSDTMSRYGKIRMIATPEPAADVAPEPAGDNDMLFLEITDKAVLAEVEAIKILEKYLIKTGEXLPLEAG

SEQ ID NO: 13029 - DNA, 768 bp, Unknown
  Obtained from environmental sample
  misc_feature (1)..(768): n is a, c, g, or t
atggcgcttacaagctgcaaactggatgaattttttcgtggtctattggacatagagggatttagggatgcggattcatcgcttaacggcctacaggttgacaacgatgggtctgaaataaaaaaaattgcctttgcggttgacgcgggtctggaagtttttaagcaggctgtcgccgcaggagcgggcctgctttttgttcaccacgggcttttttggggccaggccgaaagagtgtggagaaaccacagggagaggatcaaattccttttcgacaataaccttgcgctatatggagttcatctgcccctggataaacacccgcgtctgggcaataacgcggttctggcggagcttttgggtattgaaaaccccgagccttttggcctttaccatgggcaaaaagtaggctacaagggaaacctgaaaaaagccctgactgtggacgaagcggtaaagagaattagctttatgaaccgtccgccaattggcgttcttccgtttggcaaaagcgagagccagacctgcgctgtaatgtctggcggcgctggccaggaagctttccaggctctggaagaaaaagtcgatctttacgtgaccggtgaaagttcccatacggtttatcatcacgcgctggaaggccgcatgaacatgattgcaggcgggcattattccacggaggtttggggggtcaggcggatgatggaagaatgtgccaaacagctcgaaacggacacagtttttattgatgtgccaaccggcttataa

SEQ ID NO: 13030 - protein, 255 aa, Unknown
  Obtained from environmental sample
  DOMAIN (12)...(251): NIF3 (NGG1p interacting factor 3)
  misc_feature (1)..(255): Xaa is any amino acid
MALTSCKLDEFFRGLLDIEGFRDADSSLNGLQVDNDGSEIKKIAFAVDAGLEVFKQAVAAGAGLLFVHHGLFWGQAERVWRNHRERIKFLFDNNLALYGVHLPLDKHPRLGNNAVLAELLGIENPEPFGLYHGQKVGYKGNLKKALTVDEAVKRISFMNRPPIGVLPFGKSESQTCAVMSGGAGQEAFQALEEKVDLYVTGESSHTVYHHALEGRMNMIAGGHYSTEVWGVRRMMEECAKQLETDTVFIDVPTGL

SEQ ID NO: 13031 - DNA, 303 bp, Unknown
  Obtained from environmental sample
  misc_feature (1)..(303): n is a, c, g, or t
ttgtgggttcacggtttcaggttctttttcactcccctcgccggggttcttttcgcctttccctcacggtacttctgctctatcggtcgtatctcgtatttagcctttgatcgtggtcgaccaggattccggcagggtttctcgtgccccgccgtactcaggtaccgccaaagaagccttcatcatttcgcgtacggggatttcaccctctctgtcaggctttcccaaaacctttccgctataatgaagctttctcactcctccccttgcgggtcggcggccctacaaccccgttattgctaa

SEQ ID NO: 13032 - protein, 100 aa, Unknown
  Obtained from environmental sample
  misc_feature (1)..(100): Xaa is any amino acid
MWVHGFRFFFTPLAGVLFAFPSRYFCSIGRISYLAFDRGRPGFRQGFSCPAVLRYRQRSLHHFAYGDFTLSVRLSQNLSAIMKLSHSSPCGSAALQPRYC

SEQ ID NO: 13033 - DNA, 393 bp, Unknown
  Obtained from environmental sample
  misc_feature (1)..(393): n is a, c, g, or t
atgaagacggtgctggattttcttaaaaaaacaggaacatactaccttgccactgtagacgaaaatcaacctagagtgaggccttttggcacgatcaatctctttgacggaaaactctacattcaaagcggcaggaagaaagaagtagcgaaacaaattaaggctaacccaaaagtagagctttcggcgtttgacggagataaatggattcgcattaccgcaaaacttgtggaggacgaccgcgccgaagcgcaggagagtttactggaagcttatcctaatttgcgtaacaggtatgccgtgaacgacggcaacaatattgtctattacttaaaagacgccgtggcgacattttattccttcagcggcgaaccaaaagaagtgcggttttaa

SEQ ID NO: 13034 - protein, 130 aa, Unknown
  Obtained from environmental sample
  DOMAIN (1)...(83): Pyridoxamine 5'-phosphate oxidase
  misc_feature (1)..(130): Xaa is any amino acid
MKTVLDFLKKTGTYYLATVDENQPRVRPFGTINLFDGKLYIQSGRKKEVAKQIKANPKVELSAFDGDKWIRITAKLVEDDRAEAQESLLEAYPNLRNRYAVNDGNNIVYYLKDAVATFYSFSGEPKEVRF

SEQ ID NO: 13035 - DNA, 342 bp, Unknown
  Obtained from environmental sample
  misc_feature (1)..(342): n is a, c, g, or t
atgaaaatagctcntgcgtcaagcgacggaataacaataaacgagcattttgggaaggcggcttcttttcttatttatgaaataagaaaagaaggccggtcgtttattgaacgacgtaatgtaatgcctntaagctgtgatgacaaacacaccgaagaaggtttattatcaactattgaagcgctcaaggattgtacggcggtaattgcggtaaaagtcggtgtccctgtgaaacggacgcttgaaaaaaacggcgtatcagtttttgaaagatccgattctattgattacgcgctgacaaaattggcggcgtattacacaagaatatcaggaggagtataa

SEQ ID NO: 13036 - protein, 113 aa, Unknown
  Obtained from environmental sample
  DOMAIN (9)...(104): Dinitrogenase iron-molybdenum cofactor
  misc_feature (1)..(113): Xaa is any amino acid
MKIAXASSDGITINEHFGKAASFLIYEIRKEGRSFIERRNVMPXSCDDKHTEEGLLSTIEALKDCTAVIAVKVGVPVKRTLEKNGVSVFERSDSIDYALTKLAAYYTRISGGV

SEQ ID NO: 13037 - DNA, 762 bp, Unknown
  Obtained from environmental sample
  misc_feature (1)..(762): n is a, c, g, or t
gtgcctgtgatcgttcccatcgacgaggaatgccgcttcacttcggaagtgccggattacgctggcatttttgtcaaggacgcggacaacgcgattatggcgcgtcttaaggccgaaaaaaaactgattaaaaaggaccagatcttacacgcttatccccactgctggagatgcgaaagcccgctcatctacagggcgataggttcctggtttgtaagcatagaaaaaataaagcaggatatgattgaagccaacaatcagattcactgggtgccggatcacatcaagactgggcgtttcggcaagtggcttgaaggggccagggaatgggcaatcagcaggaaccgctattggggcaaccccctgccaatctggaaatgccccgactgcggcaaaacggtctgcgtcggcagccgggcggaactgaaagagtattccggcgttgccgcaatcgatgatctccatatgcactttgttgacaaggttaccttcccgtgttcaaaagcgccgggcgaaaagaactgctccggaataatgaagcgcgtaccggaagttctggactgctggtttgaatcaggctcaatgacctacgcccagaatcattatccgttcgagaacaaagaattttttgaaaatcactttccggcggattttatcagcgaaagcctcgatcaaaccaggggctggttttacactcttaccatactggccgcggctcttttcagcggcccgctttcaaaaactgcattgtcagcggcatag

SEQ ID NO: 13038 - protein, 253 aa, Unknown
  Obtained from environmental sample
  DOMAIN (1)...(251): tRNA synthetases class I (I, L, M and V)
  misc_feature (1)..(253): Xaa is any amino acid
MPVIVPIDEECRFTSEVPDYAGIFVKDADNAIMARLKAEKKLIKKDQILHAYPHCWRCESPLIYRAIGSWFVSIEKIKQDMIEANNQIHWVPDHIKTGRFGKWLEGAREWAISRNRYWGNPLPIWKCPDCGKTVCVGSRAELKEYSGVAAIDDLHMHFVDKVTFPCSKAPGEKNCSGIMKRVPEVLDCWFESGSMTYAQNHYPFENKEFFENHFPADFISESLDQTRGWFYTLTILAAALFSGPLSKTALSAA

SEQ ID NO: 13039 - DNA, 573 bp, Unknown
  Obtained from environmental sample
  misc_feature (1)..(573): n is a, c, g, or t
gtgaatgattcctgcaaaaaaatacgagagttgctgaatgaagaaggcataaagtctgttatagacaagatggcagaaaaaataaccgcttgggcaaagtcgtcccaagactctgtgattcttatgggaatggcgagccgtggtgtgccaatagccaagaatgtagcggaaatactcagcagcagacacaatttgaatgttgcggttggcaccatagacaattcttattatagagatgattttcactaccggaaacgcacaaataacccttccattaaaataatagaaatgcccgccgaagtggaaggcaaaaccgtgattttgatagacgatgttctttacacaggtcgctctgtgcgcgctgctttgcaggctattttagaccttggcaggccagctgcggtgaaactctgcgtaattgtggacaggggctgccgcgaattgccaatagcccccgattatgtaggcatttcaatagagacaaagcacaaccaagaagtaaaagtttgcctaagcccctacgacaaagaaactgcggtttggctcgttgaaatagagggggaatctgcatga

SEQ ID NO: 13040 - protein, 190 aa, Unknown
  Obtained from environmental sample
  DOMAIN (6)...(160): Phosphoribosyl transferase domain
  misc_feature (1)..(190): Xaa is any amino acid
MNDSCKKIRELLNEEGIKSVIDKMAEKITAWAKSSQDSVILMGMASRGVPIAKNVAEILSSRHNLNVAVGTIDNSYYRDDFHYRKRTNNPSIKIIEMPAEVEGKTVILIDDVLYTGRSVRAALQAILDLGRPAAVKLCVIVDRGCRELPIAPDYVGISIETKHNQEVKVCLSPYDKETAVWLVEIEGESA

SEQ ID NO: 13041 - DNA, 333 bp, Unknown
  Obtained from environmental sample
  misc_feature (1)..(333): n is a, c, g, or t
atgaaagacattatcaaattcagatttaccggcattcttataatgctggcggcgattgcggcttttagcgcggcggcaatgttgttgtggaacgcgcttatgccgcagcttttcgcccttccgcaagttgactatctacaggcggtaggattgctggttctggcgcggctgttattcggcggcataggcggctggggtggcggacacagaggacatctgtttaatcatggaaacaaactacgcgagaaatggatgaacatgagcgaggacgagcgcaaagagtttatcgaaaaggaaaaagacttttttaagaaccngcgcttctcattttaa

SEQ ID NO: 13042 - protein, 110 aa, Unknown
  Obtained from environmental sample
  SIGNAL (1)...(26)
  misc_feature (1)..(110): Xaa is any amino acid
MKDIIKFRFTGILIMLAAIAAFSAAAMLLWNALMPQLFALPQVDYLQAVGLLVLARLLFGGIGGWGGGHRGHLFNHGNKLREKWMNMSEDERKEFIEKEKDFFKNXRFSF

SEQ ID NO: 13043 - DNA, 771 bp, Unknown
  Obtained from environmental sample
  misc_feature (1)..(771): n is a, c, g, or t
ttgtttaattcttttcagcaagcggaagccggcacaacgcgcaaatacggaggaaccgggctggggcttgctatttctaaaagtatcgtggaaatgatggacggaaaaatttgggtcaagtccgaacccgataaaggttcaacctttgctttttccgttaagatgagacgcggtgagacaaaagaaaagaacagtcttttatctcatgatgtgaattggggcaatatccgtattatggcaatagatgacgatactgacatattgaagtattttatcgatataacgcatggattcggcttatcctgctgtgataccgcaataagcggagaagaagcgcttaaacttgtagataaaaacggaccttatcatatatattttgtggattggaagatgccgggcatggacggtatacagctaacgcgggaactcaaagcgcgggcttcggaaaattccgtagtgataatgatttccgccaccgaatggagcgtgattgccgaagaagcgaaaaaagcgaaagttgataaatttgtgtccaagcctttgtttccgtccacaattattgacgttatcaaagaatgtatcggtatggaagaagagaatagaaaagaagaacagattgatataaacggcatttttgcgggacgccgtattttgctggcggaagatatggaaattaaccgtgaggttgtgctcgccttgcttgaatcaacaaagctggaaatagactgtgcggaaaacggcaaagaagcnncgtgcgtatgttcagcatga

SEQ ID NO: 13044 - protein, 256 aa, Unknown
  Obtained from environmental sample
  DOMAIN (76)...(191): Response regulator receiver domain
  misc_feature (1)..(256): Xaa is any amino acid
MFNSFQQAEAGTTRKYGGTGLGLAISKSIVEMMDGKIWVKSEPDKGSTFAFSVKMRRGETKEKNSLLSHDVNWGNIRIMAIDDDTDILKYFIDITHGFGLSCCDTAISGEEALKLVDKNGPYHIYFVDWKMPGMDGIQLTRELKARASENSVVIMISATEWSVIAEEAKKAKVDKFVSKPLFPSTIIDVIKECIGMEEENRKEEQIDINGIFAGRRILLAEDMEINREVVLALLESTKLEIDCAENGKEAXCVCSA

SEQ ID NO: 13045 - DNA, 822 bp, Unknown
  Obtained from environmental sample
  misc_feature (1)..(822): n is a, c, g, or t
atgccgccggaaacaaatcaatcaaaaaaacttgttgatctgcatatccacacccggtattccgacggcgtttgcacgctggaggagataatggggtttgccgcggccagaggtctggcggccatctccattaccgaccacgactgcacgggggcgtacccgcaggcgttggagatgggttccgctatgggcattgaggttgtccccggagtcgagctgtccagcgagattcaggggattgatatccatattctcggatactatgtagacttcaataacggcgcttttattgccaaacttcaggagatgaaggaggcgcggtatttgcgtgctcaaaaaatggtctcgaatttgaataagcagggcatagacctgcgtttcgacaccgttttgagcatagccggggagggttccatcgggcggccgcacatagcctccgccatgctcaaggaggagttcgtcttctctttccgcgaggctttcgacaagttcatagggtacgactccccggcatacgtcgagaaactccagatgtcgcccaaggaggtcttcgacctcataaagagcgcgggcggcgtgccggtgctggcgcaccccggagtgactaangttgacgagcgtattcaggagttcatccgcgacgggcttcagggtatagaggtcagccacgccgagcacccggacgccgccgtaaggcattatcttaaaatatgtaaaaaaaacggcctcgctttcaccggaggctcagatttccatagcagcggccgtagcaaatttgagcttggcttcccgcggntcaaatatgccgcgtcgaaagcctaa

SEQ ID NO: 13046 - protein, 273 aa, Unknown
  Obtained from environmental sample
  DOMAIN (12)...(255): PHP domain
  misc_feature (1)..(273): Xaa is any amino acid
MPPETNQSKKLVDLHIHTRYSDGVCTLEEIMGFAAARGLAAISITDHDCTGAYPQALEMGSAMGIEVVPGVELSSEIQGIDIHILGYYVDFNNGAFIAKLQEMKEARYLRAQKMVSNLNKQGIDLRFDTVLSIAGEGSIGRPHIASAMLKEEFVFSFREAFDKFIGYDSPAYVEKLQMSPKEVFDLIKSAGGVPVLAHPGVTXVDERIQEFIRDGLQGIEVSHAEHPDAAVRHYLKICKKNGLAFTGGSDFHSSGRSKFELGFPRXKYAASKA

SEQ ID NO: 13047 - DNA, 789 bp, Unknown
  Obtained from environmental sample
  misc_feature (1)..(789): n is a, c, g, or t
atgtatgagaagcagccctggctaaaacattttggagaaactcccgccaacctgaattatcccgatctttccatgtacgcaagcattagggaaaaaagcgagcagtaccccgatgtggacagcttcatctttttcggaaaaagaacgcggagggcggatcttgacaagcggattgtgttcatgagccgcaagttcgcccaaatcggcataaaaaaaggcgatgtcgtcatcgtctgcctgccgaatattcctcaggcggtagtgtcattttacgcgcttaacaggcttggcgcaatcacagcccccatacacccgctttcagcggccccggaaattgaaaccttcgcgaaacaagtttctgcaaaagcggccataacccttgacgctttttatccccgttttgccgaagttatctcaagcgcaggatttaacaaagtattagtatgctcgctaaagacagagatggggcctctcacaagaactgtctttgcccttgggcctggccgcaagatcaaacctgttccgtactccgccactatcctggactgggcaaaacttgaggcaggagaagaagccccagagctggaaaagcccgaccccatcggcgcagacgaaatggctctcatatttttttcaggcggcagtatggctttgcccaaggccgtaatgctttccagcagaaactttaacgcgcttgcaatgcangtgaacgcggttgccggccccgtcgtgccgggcgataaaatgctttcgattcttccttttttcacggcttttgctttgccgtag

SEQ ID NO: 13048 - protein, 262 aa, Unknown
  Obtained from environmental sample
  misc_feature (1)..(262): Xaa is any amino acid
MYEKQPWLKHFGETPANLNYPDLSMYASIREKSEQYPDVDSFIFFGKRTRRADLDKRIVFMSRKFAQIGIKKGDVVIVCLPNIPQAVVSFYALNRLGAITAPIHPLSAAPEIETFAKQVSAKAAITLDAFYPRFAEVISSAGFNKVLVCSLKTEMGPLTRTVFALGPGRKIKPVPYSATILDWAKLEAGEEAPELEKPDPIGADEMALIFFSGGSMALPKAVMLSSRNFNALAMXVNAVAGPVVPGDKMLSILPFFTAFALP

SEQ ID NO: 13049 - DNA, 567 bp, Unknown
  Obtained from environmental sample
  misc_feature (1)..(567): n is a, c, g, or t
atgaaagatatcatgttatgcgaaactatgcggcaatgcgaagagcatgagccgcagacaggcattcaatgcatggggctgctgaacagcgcgagcgggaagctggaggctctaccgcaggcgttcctcgcggaattgagacaccgctatgatattgtcctgctggaagccgacggttcccgcgggctgccgtgcaagggctggctggcgaacgagcctgtggttcccgatttctgtacgcacacggttggggtgatcacgatgtctgcgctgggtaaaaaagctggagattctactgttcaccgtctgcctgaatttttcgccctgacaggggtaggggaggggcaggcgatcacggcggctgctctggaggcaatggtctgcgccccgacagggatgttcaaaaacagcgcgggacaatgctatgtaattgtcaatcaggcagaggatgacgccgctactgctgttgcgctgtcctttttacgggcaattaaggaaaaatatccggcccgttttgagaaagtgcttttggggagcgtccatcgtgacgcgtggcaggaggtataa

SEQ ID NO: 13050 - protein, 188 aa, Unknown
  Obtained from environmental sample
  misc_feature (1)..(188): Xaa is any amino acid
MKDIMLCETMRQCEEHEPQTGIQCMGLLNSASGKLEALPQAFLAELRHRYDIVLLEADGSRGLPCKGWLANEPVVPDFCTHTVGVITMSALGKKAGDSTVHRLPEFFALTGVGEGQAITAAALEAMVCAPTGMFKNSAGQCYVIVNQAEDDAATAVALSFLRAIKEKYPARFEKVLLGSVHRDAWQEV

SEQ ID NO: 13051 - DNA, 390 bp, Unknown
  Obtained from environmental sample
  misc_feature (1)..(390): n is a, c, g, or t
atgaacaaactctattttgcgctggttttaacgcttttattttccgcttgcgcgtcaacaataaatattagccaagatttgtcccccgccgaattgattcaacgcgcccatgaagctatggacaggaaccgttacaaaatagcaatacaatattatcaggctttgtatgatcgtaactcaagtaatatagaccttattataacggcggaatatcatattgcgtttatccattataaacaaaaaaaatacgaacaggccaaagagggctttaacggtattctcgcgtattataatactccggatgaagaactcctcccccaacattttaaacgcctttcccaaatagtccttaacaacatagccgaaaaagaaaaacgaaataaaaaataa

SEQ ID NO: 13052 - protein, 129 aa, Unknown
  Obtained from environmental sample
  SIGNAL (1)...(24)
  misc_feature (1)..(129): Xaa is any amino acid
MNKLYFALVLTLLFSACASTINISQDLSPAELIQRAHEAMDRNRYKIAIQYYQALYDRNSSNIDLIITAEYHIAFIHYKQKKYEQAKEGFNGILAYYNTPDEELLPQHFKRLSQIVLNNIAEKEKRNKK

SEQ ID NO: 13053 - DNA, 378 bp, Unknown
  Obtained from environmental sample
  misc_feature (1)..(378): n is a, c, g, or t
gtgggcattcaagccctcttgaagatcgaggcgaatattttgggatatagcggcccggaacgatctacggttacatccggcgtttacgaaaaattttttgaggccgacggcaagcggtatcatcacatcttttcccctttcgacgggtatcctgtccgcaacagcctcctggcggtaacgattattgcaaaatattccattgacgccgacgcgctttcaactgcggtttttgttctgggttatgaaaaaggccgtgcccttgttgagtctcttgaagggatagaagcagtctttgtatttgatgatttaagcgtccgacagactcagaaagcggggtttgcgcttaccgacgagaactacacattgctgtctgattaa

SEQ ID NO: 13054 - protein, 125 aa, Unknown
  Obtained from environmental sample
  misc_feature (1)..(125): Xaa is any amino acid
MGIQALLKIEANILGYSGPERSTVTSGVYEKFFEADGKRYHHIFSPFDGYPVRNSLLAVTIIAKYSIDADALSTAVFVLGYEKGRALVESLEGIEAVFVFDDLSVRQTQKAGFALTDENYTLLSD

SEQ ID NO: 13055 - DNA, 516 bp, Unknown
  Obtained from environmental sample
  misc_feature (1)..(516): n is a, c, g, or t
atgcnnggtttcagatttacnagtttcttttttttggtttctggcatggctttcaggcaaaaagaacaatcttctttttacactnttagtcatctngggcatgtgatttttaacctcatcataccctatggacaggttctgttttccataggcattttcaaaatcacttccggcgcgcttataacaggtattcaacgggccgtaacccttgaagggctaatcatgctgtcccgctttactatccggcaggatcttaaaatccccggactttttggggaactgataggcgaatcttttcgtatcttcgccgtcataatgaaccagaaacaaaatattacccggaaaaacctgattgccgatattgaccgtcttttgcttgaattaagcggtgataacgccgaaaactcacaatctgccgtgaatcccgtatccggtacaaaacctgcgggctttgcaattctcgcgcttgtggtgattttgtcatggctcccctgggtaatgctcctggtcagttaa

SEQ ID NO: 13056 - protein, 171 aa, Unknown
  Obtained from environmental sample
  SIGNAL (1)...(19)
  misc_feature (1)..(171): Xaa is any amino acid
MXGFRFTSFFFLVSGMAFRQKEQSSFYTXSHLGHVIFNLIIPYGQVLFSIGIFKITSGALITGIQRAVTLEGLIMLSRFTIRQDLKIPGLFGELIGESFRIFAVIMNQKQNITRKNLIADIDRLLLELSGDNAENSQSAVNPVSGTKPAGFAILALVVILSWLPWVMLLVS

SEQ ID NO: 13057 - DNA, 699 bp, Unknown
  Obtained from environmental sample
  misc_feature (1)..(699): n is a, c, g, or t
ttgcctgagtancggcggcaaaaagtaatgctggtatatcacggcggacgtacgccggttatagaaatagatttgcagagatgcagaccatacaccgattttggaagaggtttttacgttacaaaatataaggaacatgccgagaattgggcaagaagattcaaaaaacaaaataataacggttttgtgacaacatttaactatattgaaagccaattttcagattatatctgcaaaaaaatgaagttcgacggatatacaaatgaatggttggattttattgttaataacagaaatcaagaagtcattgaacaagcacatggttatgacatagtagagggtccggttgcaaatgataaaattcaaaacaggatatataattatttacgcggtgaaataacaaaagaagcatttttaaaagaattaaagtatcacgatgatacgcatcaaatttgtttttgtacgcttgcttcttttcaagctttaaaaagaattgaaaatgaaatgactgttttcattgaaaagataagtgaagatatattaaataatcttgttaatgaaaaaggaatagacgctaataccgcttctgatttatttttttcatctaaaacatttattaatatcgcagatactaaaacaggctcttttaaaaaggattggcaggatatatataaaatgctaagggatgaaatcggataa

SEQ ID NO: 13058 - protein, 232 aa, Unknown
  Obtained from environmental sample
  misc_feature (1)..(232): Xaa is any amino acid
MPEXRRQKVMLVYHGGRTPVIEIDLQRCRPYTDFGRGFYVTKYKEHAENWARRFKKQNNNGFVTTFNYIESQFSDYICKKMKFDGYTNEWLDFIVNNRNQEVIEQAHGYDIVEGPVANDKIQNRIYNYLRGEITKEAFLKELKYHDDTHQICFCTLASFQALKRIENEMTVFIEKISEDILNNLVNEKGIDANTASDLFFSSKTFINIADTKTGSFKKDWQDIYKMLRDEIG

SEQ ID NO: 13059 - DNA, 897 bp, Unknown
  Obtained from environmental sample
  misc_feature (1)..(897): n is a, c, g, or t
atgggcattttagcgggcattttggcaggatgcggatcccaacctgtaccaggagaaacaccgcctccgccgcaggcagttgccgaggacgatatatgggctctgcttgccagaggcgaaactgaaaaagccaaggctctctttatggggaaggttgacgttaatgctactgacagccagggaagaacgcccttgcattatgcggcggaaaacagcgattcctttttagccgctttttttgttaccctgggcgctaagcctgacgtgcttgacaacaaacaaaagacgcctttaaccataagcgccgaaaaagtggacgcaaagaccgccgccatattggtcgggaaaggggccaatatacaccagagcatggatggcggaaactcgcctgcccgcatcgcggttcaagagaacggagaatttcttgcggccattttaaccccggcttctttggccagtgccgattcaacaggcaaaaccattctgcaccttgcttccgaagccggaagcgcctcggcagtaagtactattctaaaagccggagctaacttcgatttaaaggacaaaaacggaaaaaccgccctggatctcgcactggaaaggacagactcaaaaaaccatgccgaaactgccgtacagctgatctttgcgggggcggtatctgataatcctctttttacatatttttcgcccgccgcaaaaagcttaaactacaatatccgaagcgcggacggtatgaccccccttcattacatagcgcgggaagggtacatagggtacttaaccttcgtactggaaaaaggagccgacgttaatattaaaacgcgtccggcgcttccccactgcacgaagcggccccgttccggaaatatcacaatggatgcgcactcttgctga

SEQ ID NO: 13060 - protein, 298 aa, Unknown
  Obtained from environmental sample
  SIGNAL (1)...(18)
  DOMAIN (60)...(92): Ankyrin repeat
  misc_feature (1)..(298): Xaa is any amino acid
MGILAGILAGCGSQPVPGETPPPPQAVAEDDIWALLARGETEKAKALFMGKVDVNATDSQGRTPLHYAAENSDSFLAAFFVTLGAKPDVLDNKQKTPLTISAEKVDAKTAAILVGKGANIHQSMDGGNSPARIAVQENGEFLAAILTPASLASADSTGKTILHLASEAGSASAVSTILKAGANFDLKDKNGKTALDLALERTDSKNHAETAVQLIFAGAVSDNPLFTYFSPAAKSLNYNIRSADGMTPLHYIAREGYIGYLTFVLEKGADVNIKTRPALPHCTKRPRSGNITMDAHSC

SEQ ID NO: 13061 - DNA, 822 bp, Unknown
  Obtained from environmental sample
  misc_feature (1)..(822): n is a, c, g, or t
ttgatttactgcgctgacgatgcgggcgcttgcgaagttgcggaaattatcaagaacgataaccgagggatacaatttgttccgtacgggtttacggcagagggcgattttaaaataaattattataaaattgaaaatgagaaaggtgttttntccattgcgggctttcccgaagaatttaacatacgtattcctggaaaacatcaggctttgaataccgcagccggtttggctcttgcttcttcgctggcaaaaaatgacggtgcggcaagcggaacgggtttaaataaagaacaactggaatccataaaaaatgcgctgttgaattttaaaagcgcaaaacgccgaagcgagatagtgggagaaacaagcggaataatttttatggatgattacgggcatcaccccacggcgattaaaacgacgcttgcaggtataaaaagtttttatcctaacaggcggctgattgtaagttttatgtcgcatacatatacccgtacatctgcattactcgatgaattttcaacttgttttaatgacgcagatattctttacctgcataaaatttattcgtccgcaagagaaaattataagggcggagttaacgggcttacgctctatgacagaacatccgcagtccgcaagactgccggtaaagggcaaactttttatgttgatgaaataggcgaggcatacgagccattaagagaaactttaagaaatggggacatatttctaactcttggggcgggaaacaactggccgctcggtgttaatcttataaaatatttcaagctaaagaacagggaaaaacatggttag

SEQ ID NO: 13062 - protein, 273 aa, Unknown
  Obtained from environmental sample
  DOMAIN (113)...(201): Mur ligase family, glutamate ligase domain
  misc_feature (1)..(273): Xaa is any amino acid
MIYCADDAGACEVAEIIKNDNRGIQFVPYGFTAEGDFKINYYKIENEKGVXSIAGFPEEFNIRIPGKHQALNTAAGLALASSLAKNDGAASGTGLNKEQLESIKNALLNFKSAKRRSEIVGETSGIIFMDDYGHHPTAIKTTLAGIKSFYPNRRLIVSFMSHTYTRTSALLDEFSTCFNDADILYLHKIYSSARENYKGGVNGLTLYDRTSAVRKTAGKGQTFYVDEIGEAYEPLRETLRNGDIFLTLGAGNNWPLGVNLIKYFKLKNREKHG

SEQ ID NO: 13063 - DNA, 834 bp, Unknown
  Obtained from environmental sample
  misc_feature (1)..(834): n is a, c, g, or t
atgctgcagatgatcctgaccgccggcagccccgccgaattcgtgcgccgtatacgctactttcaggatttgaacctctacgacaggcgtctggcggcgtccataaaggacggcatagtctccgtgaacgagaagaggagcgctcagggggagaatcgggacaaattgataaagttgctttcggacaagaggaaggagcagcaggccctggtggcggaggaggcgcagaggcgcacggtgctttcggacattcgcactaagaagagcgcccacgagaccatggtggcggagttggaggaggcgcagaacgatcttgacgcgatgataaaaacgttggaggggcggcgcaagagggccaaggaggaggaggcggagcgcatggtggccttcagtttcgagagcggcaaggcgaaattgccttggccgcttcgcggggagtttgtgagcaagttcggcaacgtgattcttccggtttacaagacgataacccttaacaacggcatagacatagcgtccgggaaagggctacgcgggccaggagtgtggccgcggcccaagtggctccttgtgaaggggatgcccggtttacggcgaggtgcgttgttcttagatcacagggggcggttacttacttgcctgtacgcccaacttggaacaaggtgtcccgtggcggaaaaaacgccccgcgagtttttcccgtcccggaagataggccaagctcagcggagaactggcaccaaccggtggcccctaaagctgcttttttggagaacaaagctgagggttggaattccgcttaaattcccgaaaagaggtggcttggaaaaaaaataa

SEQ ID NO: 13064 - protein, 277 aa, Unknown
  Obtained from environmental sample
  misc_feature (1)..(277): Xaa is any amino acid
MLQMILTAGSPAEFVRRIRYFQDLNLYDRRLAASIKDGIVSVNEKRSAQGENRDKLIKLLSDKRKEQQALVAEEAQRRTVLSDIRTKKSAHETMVAELEEAQNDLDAMIKTLEGRRKRAKEEEAERMVAFSFESGKAKLPWPLRGEFVSKFGNVILPVYKTITLNNGIDIASGKGLRGPGVWPRPKWLLVKGMPGLRRGALFLDHRGRLLTCLYAQLGTRCPVAEKTPREFFPSRKIGQAQRRTGTNRWPLKLLFWRTKLRVGIPLKFPKRGGLEKK

SEQ ID NO: 13065 - DNA, 588 bp, Unknown
  Obtained from environmental sample
  misc_feature (1)..(588): n is a, c, g, or t
atggtaaggtatagcgagaaaactcaggctaatcaagaagcggcgatggctgaggctctcaagaaaattgagaaatgccgagtgtctcattcaaagacccttaaaattggttataatctatacctaactgtatttccagatgagataaggcaacttacctggctaacaggtctttctgtaataagtacagacataagagtaataccagactggatcggcgagctggggaacctaagagttcttgatgtcagttctaatcaaaaaatccgcaaactaccttcaagtttgggcaatttaaagcaccttaaaaagcttattcttaataatgctggcttaaagaaacttccgtcaattattggcaatttgctttctttggaattattggaaataagcctgtatgatataaaggaagtaccccaatacattttagatttacctaaattaaagcgtattgaaacaagaggctatgatattagccatcatccttctcttgcagtncaacaacacgaattgaatgtgaaggaatatttacgccgtattgaacactgtaaaaataaaaatcgaaaaaacttgatctgtcatatttag

SEQ ID NO: 13066 - protein, 195 aa, Unknown
  Obtained from environmental sample
  misc_feature (1)..(195): Xaa is any amino acid
MVRYSEKTQANQEAAMAEALKKIEKCRVSHSKTLKIGYNLYLTVFPDEIRQLTWLTGLSVISTDIRVIPDWIGELGNLRVLDVSSNQKIRKLPSSLGNLKHLKKLILNNAGLKKLPSIIGNLLSLELLEISLYDIKEVPQYILDLPKLKRIETRGYDISHHPSLAVQQHELNVKEYLRRIEHCKNKNRKNLICHI

SEQ ID NO: 13067 - DNA, 561 bp, Unknown
  Obtained from environmental sample
  misc_feature (1)..(561): n is a, c, g, or t
atggaacagtacaccgacccatcggcgtttaacgcttcttttgaacagcggctgagaaccgccgtgacggggacaaaacggcgttccgccgaatcttttgcggaattgcaaaatcttgcggaaattaacccaagatacaccggtataaggggcataattacacaggcggaaattgatatgggctatcgcccgccgccgcccgatccgcaggctttggcgcgttcaagggaattagcgtcttcggcaaatcgtattctgacatcaaataacacaacgttatttgaagtcgccttgactcaggttaacgaagcaattgccctgaatcctgaaaatacggacgctatgcgggtaaaagacaggcttttgaacagaatgaacgttccgggggctgtcgttctttccagcgaggatgaagttgaatatcaaaaagcggtcagggaattacaggccggtaataatcttgtcgcttttgcggttgtacaaagactcctgcagagccccaaaaaccgcaatataaccaagctgattgaattacagcgaaggatacagtcgatattatga

SEQ ID NO: 13068 - protein, 186 aa, Unknown
  Obtained from environmental sample
  misc_feature (1)..(186): Xaa is any amino acid
MEQYTDPSAFNASFEQRLRTAVTGTKRRSAESFAELQNLAEINPRYTGIRGIITQAEIDMGYRPPPPDPQALARSRELASSANRILTSNNTTLFEVALTQVNEAIALNPENTDAMRVKDRLLNRMNVPGAVVLSSEDEVEYQKAVRELQAGNNLVAFAVVQRLLQSPKNRNITKLIELQRRIQSIL

SEQ ID NO: 13069 - DNA, 855 bp, Unknown
  Obtained from environmental sample
  misc_feature (1)..(855): n is a, c, g, or t
atggacagccgcaatataggcagagtaggctcaagcgaaacggggcagttcgcttataccctgtcgagggaaaccgggaagatagaggtacaggccagcaccatcattcaggagacaattgccatattgaacagttccagcggcagagtagtaaatatgagcgaccccgccccctttaagaatcatggaaacgatacctatgccgtcagaatcaccgttcccattatcaataagcggattaatgacgtggtcggagccgtaatcgcccagctggatattggcataatacaaccaaccgtggaaaacaccctcaaaaccagcaaggaagttaccagcgcggttctttattccaacaacgggtttattttggcaaattatatgccggagtttataggaaagcaaattgacgcggaaacgcaatacggccaccagttagacgacgttaaaacagccattaaaaattcgaaagaatggctgggggaagagtatgaccccggaatacatactaaggtggtaatggcagtagccactattcctatagggtcttctccgacaacctggtcgataatgatcggctcatccgaagactatatcatgcaggacgtcgagaggatgattgaatttaccattattctggcggcggtggcgcttattgcgtctgtgttagttgtttatttgatcataaacgccgttaccagaccaatcgtcatggtaaccgacaacctcanggaaatagctgaaggcgaaggcgacctgaccagaaggctgaatattaagagcaaagacgaagttggcgagttagccaggtatttncaccagaccatggggtctattaccacccttataaaaagataa

SEQ ID NO: 13070 - protein, 284 aa, Unknown
  Obtained from environmental sample
  DOMAIN (209)...(280): HAMP domain
  misc_feature (1)..(284): Xaa is any amino acid
MDSRNIGRVGSSETGQFAYTLSRETGKIEVQASTIIQETIAILNSSSGRVVNMSDPAPFKNHGNDTYAVRITVPIINKRINDVVGAVIAQLDIGIIQPTVENTLKTSKEVTSAVLYSNNGFILANYMPEFIGKQIDAETQYGHQLDDVKTAIKNSKEWLGEEYDPGIHTKVVMAVATIPIGSSPTTWSIMIGSSEDYIMQDVERMIEFTIILAAVALIASVLVVYLIINAVTRPIVMVTDNLXEIAEGEGDLTRRLNIKSKDEVGELARYXHQTMGSITTLIKR

SEQ ID NO: 13071 - DNA, 369 bp, Unknown
  Obtained from environmental sample
  misc_feature (1)..(369): n is a, c, g, or t
atgaacgtacaaattttagttgtcgaggacgacacgcggattcaggatatggtttgcaaatttttccgcaaggaaggatggtttgtggacgcgtgcgccaatggcaataaagcattggaattattctacgataaatattatcatcttgtcattttggacatcatgcttcccggaatgaatgggcaagagcttttgaaagagctcaggcaaatccgcgacacgccggtattgatgatgactgctctgtcggacgacgacaatcaattgcgggcgttcaataaccacgcggacgactatgtaacaaaacctttttccatgcaaattcttgtcaaacgagccgaagccctgctccggcgcagcggggcgtaa

SEQ ID NO: 13072 - protein, 122 aa, Unknown
  Obtained from environmental sample
  DOMAIN (3)...(114): Response regulator receiver domain
  misc_feature (1)..(122): Xaa is any amino acid
MNVQILVVEDDTRIQDMVCKFFRKEGWFVDACANGNKALELFYDKYYHLVILDIMLPGMNGQELLKELRQIRDTPVLMMTALSDDDNQLRAFNNHADDYVTKPFSMQILVKRAEALLRRSGA

SEQ ID NO: 13073 - DNA, 420 bp, Unknown
  Obtained from environmental sample
  misc_feature (1)..(420): n is a, c, g, or t
gtgggccttttcaatttcgtcaagaagaaccaccgcgtggggctgcttgcggatggcgtcggtaagaaggccgccttcctcatagcccacatagcctggaggtgcgcctaccaagcgggaaacggtgtgcttttcctggtactcgctcatgtcaaagcggtgcatggtaatgcccatcgtttccgcgaggctccgggccagttctgttttgccgactcccgtgggacccacaaaaaggaaatttgccaccggcttgttgtcgtcccggaacccggccctggatcgtttgaccgcctttaccacggcattaaccgcctggtcctggccgaaaatcctctcttttatccggtcttccagcaagcgcaggcgatccttctcgtttccgcctaccgatcgctcgggaatgcgggcgatttttga

SEQ ID NO: 13074 - protein, 139 aa, Unknown
  Obtained from environmental sample
  misc_feature (1)..(139): Xaa is any amino acid
MGLFNFVKKNHRVGLLADGVGKKAAFLIAHIAWRCAYQAGNGVLFLVLAHVKAVHGNAHRFREAPGQFCFADSRGTHKKEICHRLVVVPEPGPGSFDRLYHGINRLVLAENPLFYPVFQQAQAILLVSAYRSLGNAGDF

SEQ ID NO: 13075 - DNA, 708 bp, Unknown
  Obtained from environmental sample
  misc_feature (1)..(708): n is a, c, g, or t
atggacttcgcgcttatcgcccacgcaagcactctgcgttcacgcgttcccttccttcacttctttgacggtttccgcaccagccatgaattgcagaatgttgaagaaatatcccacgatgatatgcgcaagatgatcgataacgatctgatgatggcccacaggacgcggggccttaaccctgaacatccccgtatcaggggaaccgcccaaaacccggacacctatttccagggacgcgaaggcgtgaacaagtactacctcgcagtgccgggcatcgtgcaggcggagatggacaaattagccaaaatcatcgggcggcagtatcatgtattcgattatcacggcgcgaaagacgcggagaaagtgatcgtgattatgggttccggcgcggaaacctgcgaggaaaccgttgattaccttaattcaaagggagagaaaatcggcctggtgaaagtacacctgtaccgcccctttgacgtaagcctctttgtaaaggccctgccatccacggtaaaagccattgccgtcctcgaccgcaccaaagatccgggcgcgattggcgagcccttatacgaagacgtgcgcaccgcgattgccgaggcgcaggcatcaggcccattcaaagccaacccgattgtactgggcggacgctacgggcttggttcccaggaattcacccccacaatggtcaaggcgggtgtttga

SEQ ID NO: 13076 - protein, 235 aa, Unknown
  Obtained from environmental sample
  DOMAIN (1)...(99): Pyruvate flavodoxin/ferredoxin oxidoreductase, thiamine diP-binding domain
  misc_feature (1)..(235): Xaa is any amino acid
MDFALIAHASTLRSRVPFLHFFDGFRTSHELQNVEEISHDDMRKMIDNDLMMAHRTRGLNPEHPRIRGTAQNPDTYFQGREGVNKYYLAVPGIVQAEMDKLAKIIGRQYHVFDYHGAKDAEKVIVIMGSGAETCEETVDYLNSKGEKIGLVKVHLYRPFDVSLFVKALPSTVKAIAVLDRTKDPGAIGEPLYEDVRTAIAEAQASGPFKANPIVLGGRYGLGSQEFTPTMVKAGV

SEQ ID NO: 13077 - DNA, 780 bp, Unknown
  Obtained from environmental sample
  misc_feature (1)..(780): n is a, c, g, or t
atggacaaaaacaaggtaatcacagcgaaatttacccccgttgtagatctcaataaaaaccctgtaacaaatggtactttcacgaataaagagggttggacttttaatagtggttccagttatggcaactccgaaggaaatttcgatgtgtcaaacagcgaaggcagaataaatgtgacgaaaattggctccaacccgtgggaaccacagctagttcaaaatggcatcacccttgttgaaggaatgaattacaaaataacttttgaggcttctgcctctgctgcacgaaaaataggcgtggttatacaaatggcaggcggcgattataccacttattttgaaaaagagatagacttgactgccacaaagcaacaattttcgtatgaattcaaaatgaagtcgccaagtgatgaaagtggtcgtattgggtttaatttggggcaagcaactggaaacgtcactctaagcaaaatcacccttcattatttagaggaagatccatcaacaccagacgatgacacctgcgaagagccagaaccaccagaacctattttgaaaaaccgcattcccgcaattaatttctcaattcaaccgctgagggataaatctttgcgcataaatgtaagctcaccttcggttgtggagatttttgacctaaaaggaaataaagtcacaagtttgaatgtttccggttcgcaaacagttaaattatccgttccaagcggagtatattttgccaaagcacagggaacaaaaagcgtgagatttgtgttgaaataa

SEQ ID NO: 13078 - protein, 259 aa, Unknown
  Obtained from environmental sample
  DOMAIN (19)...(163): Carbohydrate binding domain
  misc_feature (1)..(259): Xaa is any amino acid
MDKNKVITAKFTPVVDLNKNPVTNGTFTNKEGWTFNSGSSYGNSEGNFDVSNSEGRINVTKIGSNPWEPQLVQNGITLVEGMNYKITFEASASAARKIGVVIQMAGGDYTTYFEKEIDLTATKQQFSYEFKMKSPSDESGRIGFNLGQATGNVTLSKITLHYLEEDPSTPDDDTCEEPEPPEPILKNRIPAINFSIQPLRDKSLRINVSSPSVVEIFDLKGNKVTSLNVSGSQTVKLSVPSGVYFAKAQGTKSVRFVLK

SEQ ID NO: 13079 - DNA, 531 bp, Unknown
  Obtained from environmental sample
  misc_feature (1)..(531): n is a, c, g, or t
gtgaaagaaacgcaggataatgaaaaaaagacttcgataaaagtccggtatattattttctccatatctctgtttttgattatttttatcggcggaagcgcggcatttatcttttctatgtggaaaatgctccattccaccgtcgggtacgaactggaacaggcaatggaacttgaaagggcgaaacttgaaacatcggttaacagcgaaatagccattgccctgaaaatggcgacttctcccctgatacagcgccatttccttaatccttctgacaaggatctgaaaaaaatagcctttgaggaaatagacggttacagacgggctttcaaaagccagtcggtcttctggtgcagcgatgttgataaagaattttatttttccgaggttaatcattattaccttgacgccgacaaccccgataactattggtacaagatgaccttgtacgaaacggataaattaattttaacatcaactataacgcggaaaacaacagaccttgctgtttatcaacgcgcctgtttttga

SEQ ID NO: 13080 - protein, 176 aa, Unknown
  Obtained from environmental sample
  misc_feature (1)..(176): Xaa is any amino acid
MKETQDNEKKTSIKVRYIIFSISLFLIIFIGGSAAFIFSMWKMLHSTVGYELEQAMELERAKLETSVNSEIAIALKMATSPLIQRHFLNPSDKDLKKIAFEEIDGYRRAFKSQSVFWCSDVDKEFYFSEVNHYYLDADNPDNYWYKMTLYETDKLILTSTITRKTTDLAVYQRACF

SEQ ID NO: 13081 - DNA, 327 bp, Unknown
  Obtained from environmental sample
  misc_feature (1)..(327): n is a, c, g, or t
ttgtacggggagcattcagccgtagaatgctaccgccaaacgacaaacagcgcattttttgaagattggtttgagaataacctgctgaaagaaataccagacggttatacgataataatggacaacgcaagttttcacaggaagaaggtactgcgaaagaaagcccgtgggaaagcccggttattatttctgccaccatattcgcctgattataatccgatagaaaaaacctgggcaaacatgaaacgttttattcgtaataaccttaaaaattttcaatctgttgtttccggtatttctaactattttgggcttatagataactaa

SEQ ID NO: 13082 - protein, 108 aa, Unknown
  Obtained from environmental sample
  misc_feature (1)..(108): Xaa is any amino acid
MYGEHSAVECYRQTTNSAFFEDWFENNLLKEIPDGYTIIMDNASFHRKKVLRKKARGKARLLFLPPYSPDYNPIEKTWANMKRFIRNNLKNFQSVVSGISNYFGLIDN

SEQ ID NO: 13083 - DNA, 681 bp, Unknown
  Obtained from environmental sample
  misc_feature (1)..(681): n is a, c, g, or t
gtgctctccctcaaaggcgaacaccggcttgccntgagcggcactccggtagaaaacaatctgggggaactgtacagcctgttccggtttttgaacccttcgttcttcggttccgagcggctctttatgcagcggtacctccaccccattcaggataataacgacgaagacgcgctgatggaccttaaggcccggatatacccctttatgctgaggcggctgaagcgggacgtgctgaaagaccttcccgccaaaaccgaggaaaccgcatacatcgaactggaagaaagccacctggccgtgtatcaccggaggcggcaggagtataaacagcttattgacagtattgtggcgcggggggaagttgcaaaatcccagtttatgatttttaaggcgctgggcgaactgcgccgccttgccagcgttcccgaagcggacagcgaatacgccgggccgtcggcaaagcggcagtacctgctcgaccggataacggagctggttgaaaacaaccacaaatgccttatctttaccagttttctggcgacggtggatatagtaagcgaagaccttgccgggctgggaatccagaacctgaccatgaccggtgcgacggtggaccgccagtcgctggtcagccgttttcaaaccgacgacaatgtaaaggcttttatcatgacgtaa

SEQ ID NO: 13084 - protein, 226 aa, Unknown
  Obtained from environmental sample
  misc_feature (1)..(226): Xaa is any amino acid
MLSLKGEHRLAXSGTPVENNLGELYSLFRFLNPSFFGSERLFMQRYLHPIQDNNDEDALMDLKARIYPFMLRRLKRDVLKDLPAKTEETAYIELEESHLAVYHRRRQEYKQLIDSIVARGEVAKSQFMIFKALGELRRLASVPEADSEYAGPSAKRQYLLDRITELVENNHKCLIFTSFLATVDIVSEDLAGLGIQNLTMTGATVDRQSLVSRFQTDDNVKAFIMT

SEQ ID NO: 13085 - DNA, 312 bp, Unknown
  Obtained from environmental sample
  misc_feature (1)..(312): n is a, c, g, or t
atgaacggcaacataggggcgctcgtctccggcgaagagtcggaatcggtcaaaagccttacaaaaggaactgtcgtccacgccagcccctggcgcggttacggtaatgtcgcgattattgaggcggacgggggctacaggtatttatacggggcctgtaaaaccctctcggtcaggaaaggcgacaccattgaacccggcacggaattgggaaaattgggaatctatccggcatccggcaaaccggagctggtttttatagtatcgcataacgggtcgcctgttgacccggtaaaagcgcccagattatag

SEQ ID NO: 13086 - protein, 103 aa, Unknown
  Obtained from environmental sample
  DOMAIN (2)...(97): Peptidase family M23
  misc_feature (1)..(103): Xaa is any amino acid
MNGNIGALVSGEESESVKSLTKGTVVHASPWRGYGNVAIIEADGGYRYLYGACKTLSVRKGDTIEPGTELGKLGIYPASGKPELVFIVSHNGSPVDPVKAPRL

SEQ ID NO: 13087 - DNA, 399 bp, Unknown
  Obtained from environmental sample
  misc_feature (1)..(399): n is a, c, g, or t
gtgctcagtgtcggagagtccggtgatatggatgtaagggatgtaatcattgccgacattccggggctgatagaaggcgcttcacaaggtgcggggcttggcacccgtttcctcaaacatatttcccgtacagttgccctggcttttctggttgatctttcagacgataattaccttaccgcttttgatgtgttacaacaggagcttgcctcattttctcccgatctggtgcaaaaaaaacggctgcttgtggggacaaaaacggatctgccggaaactgaaggccgcctcgcggagttggcggctaaatacccaaatgaaaaaatattcggtatttcggttttttccggcgaaggcataaaagaactggctctggaatttctccggcttgccgattaa

SEQ ID NO: 13088 - protein, 132 aa, Unknown
  Obtained from environmental sample
  misc_feature (1)..(132): Xaa is any amino acid
MLSVGESGDMDVRDVIIADIPGLIEGASQGAGLGTRFLKHISRTVALAFLVDLSDDNYLTAFDVLQQELASFSPDLVQKKRLLVGTKTDLPETEGRLAELAAKYPNEKIFGISVFSGEGIKELALEFLRLAD

SEQ ID NO: 13089 - DNA, 345 bp, Unknown
  Obtained from environmental sample
  misc_feature (1)..(345): n is a, c, g, or t
atggctaaaaaaataaaagaacatgaaaagtatcttgtaaacataacaaaaaacgctgaagatgatttgaacgaaataatacaattcattgctcaaaataatccgcaaaacgcaataaaaataatggaaaaaatacaggcaaaagtaaaaacgcttgatcattctccgaataggggcggttatgttcctgaattgttagccaaaaatataaaagactatagacaaataatagagtcaccgtggaaaataatatataaggtagataatgatattgtaaatatactggcaataattgactcaagaagaaatttacaggatatattggtaaaaaaactattgaaataa

SEQ ID NO: 13090 - protein, 114 aa, Unknown
  Obtained from environmental sample
  DOMAIN (13)...(104): Plasmid stabilisation system protein
  misc_feature (1)..(114): Xaa is any amino acid
MAKKIKEHEKYLVNITKNAEDDLNEIIQFIAQNNPQNAIKIMEKIQAKVKTLDHSPNRGGYVPELLAKNIKDYRQIIESPWKIIYKVDNDIVNILAIIDSRRNLQDILVKKLLK

SEQ ID NO: 13091 - DNA, 525 bp, Unknown
  Obtained from environmental sample
  misc_feature (1)..(525): n is a, c, g, or t
atgaaagttaccctgcattcgttaagaagccagatgggaataatgcttcaggacaattttttattcacgggaacaatcgccgacaacatccgttacgggaaacttgacgccgcagacgaagaaatccgcgccgccgcgagtttaataggagccaaccattttattgaaaaactgcccgacggctacaacacgcaaatcacggagcgcggaagcggcatctccgccggagaaaggcagcttttggcttttacgcgcaccctcatttccaacccgcgaattcttattctggacgaagccacaagcagtatcgacacaggaaccgaacagcttgtacagcagggaattcagacattgatgaagggacgcacttcgtttatcatcgcacacaggctttccacaatacgcaactgcactcagataatgtttgtaagcgatggtcaaatcattgaaagcggcacgcacgaggaactgatggcgaagcgaggaaggtactacgaactttgtcttgcgcagtatcagcagtaa

SEQ ID NO: 13092 - protein, 174 aa, Unknown
  Obtained from environmental sample
  DOMAIN (1)...(146): ABC transporter
  misc_feature (1)..(174): Xaa is any amino acid
MKVTLHSLRSQMGIMLQDNFLFTGTIADNIRYGKLDAADEEIRAAASLIGANHFIEKLPDGYNTQITERGSGISAGERQLLAFTRTLISNPRILILDEATSSIDTGTEQLVQQGIQTLMKGRTSFIIAHRLSTIRNCTQIMFVSDGQIIESGTHEELMAKRGRYYELCLAQYQQ

SEQ ID NO: 13093 - DNA, 483 bp, Unknown
  Obtained from environmental sample
  misc_feature (1)..(483): n is a, c, g, or t
ttgactatgactaacactgaagatagagacggcagcctcgcccttttgggggatgaggcggcggccctgggggccatacacgaagggatttccgcggcttacgggtatccgggaactccttctacggaaataatcgaatatttaatcgaaaaggccgaagaaaaggcggacaacgccttcatcgcgaagtggtgttccaatgagaaaaccgccctggaggctgccttggggacctctttcgcgggaaaacgggcactggtaaccatgaagcatgtgggccttaatgtggccgcggacccctttatgaatggggcgcttctggatattaacggcggccttgtggtcattgtggccgatgatccggggatgcacagttcccagggcgaacaggattcccggttttacagttcctacgccatggttccctgccttgaacccaggaaccagcaggaaacctacgacatggtgagggaaggcgtttga

SEQ ID NO: 13094 - protein, 160 aa, Unknown
  Obtained from environmental sample
  misc_feature (1)..(160): Xaa is any amino acid
MTMTNTEDRDGSLALLGDEAAALGAIHEGISAAYGYPGTPSTEIIEYLIEKAEEKADNAFIAKWCSNEKTALEAALGTSFAGKRALVTMKHVGLNVAADPFMNGALLDINGGLVVIVADDPGMHSSQGEQDSRFYSSYAMVPCLEPRNQQETYDMVREGV

SEQ ID NO: 13095 - DNA, 315 bp, Unknown
  Obtained from environmental sample
  misc_feature (1)..(315): n is a, c, g, or t
gtgcgtatgatgcttgagggcgcgggtttcgaggttatagatcttggcgttgatgtggacgaaaacaaaattgtggaagctgttaagcagcaccagccccaggtactgtgcctgtccgctctgcttacaacgacaatgagtcaacagggcgttgtaatcgaagcgctaaaaacttccggcttgcgcgacaaggtaaaggtaatggttggcggcgcgccggttacacaaagtttctgtgaatcgatccatgcggatgcctacagccaggacgcggcaagcgcggcggaaaccgcaaaggcatttgtcgtaagctaa

SEQ ID NO: 13096 - protein, 104 aa, Unknown
  Obtained from environmental sample
  DOMAIN (1)...(100): B12 binding domain
  misc_feature (1)..(104): Xaa is any amino acid
MRMMLEGAGFEVIDLGVDVDENKIVEAVKQHQPQVLCLSALLTTTMSQQGVVIEALKTSGLRDKVKVMVGGAPVTQSFCESIHADAYSQDAASAAETAKAFVVS

SEQ ID NO: 13097 - DNA, 459 bp, Unknown
  Obtained from environmental sample
  misc_feature (1)..(459): n is a, c, g, or t
atgcttagggccgcgcggccaaccgattcaatagtttcctgggctnttcgttttctgcaatctcttccaaatgttccggttgttttaagcggcatgactactttggatcagttaaaagaaaatatagcgctattctccaaagaagacccgacaacagatcaggaaaaagaactgctccaacaggctatcaagacaattgtcgatatggttccgtgtaccggatgcttttactgtactgaggcctgtccgcagaaactggacatacccaggcttttttctacatataatgaaatgcgttttaacgccgcgtcatccgcgaaaaggagctttactctaaacgggatgacagaaaaggaactgccttccgcctgtattgcgtgcggagcttgtgcaaagctatgcccgcaggggatagacattccttctgtactgaaacagttttcagatatattagaatag

SEQ ID NO: 13098 - protein, 152 aa, Unknown
  Obtained from environmental sample
  DOMAIN (117)...(140): 4Fe-4S binding domain
  misc_feature (1)..(152): Xaa is any amino acid
MLRAARPTDSIVSWAXRFLQSLPNVPVVLSGMTTLDQLKENIALFSKEDPTTDQEKELLQQAIKTIVDMVPCTGCFYCTEACPQKLDIPRLFSTYNEMRFNAASSAKRSFTLNGMTEKELPSACIACGACAKLCPQGIDIPSVLKQFSDILE

SEQ ID NO: 13099 - DNA, 474 bp, Unknown
  Obtained from environmental sample
  misc_feature (1)..(474): n is a, c, g, or t
ttgcagacggagaaaaaaggggcggaagttatcgatttaatgaaagcgcggattgccgaaataagccaggagacggcgcatattgataccaaaaggaccgtgtattttgaaatatccgccgctccggatatgatgacttttggcaagggcagttatattaacgatatgatctccgttatcggggcgcgcaatatttttgaacatgataactggctggtcagccccggcgcggagtctgttattgaacgcaatcccgatgtgattcttaccaatgtaaattatattgacgatccaatcggcgaaataaaaagccgtcccggctttgaacatattaacgccgttatcaataaccggatttatcaaatagacaccgattcttcggtgcggccttcaacccgcataattttagccttacggcagatgtcgcaggccgtctatccgaccactaaaatatatcaagaagataaattataa

SEQ ID NO: 13100 - protein, 157 aa, Unknown
  Obtained from environmental sample
  misc_feature (1)..(157): Xaa is any amino acid
MQTEKKGAEVIDLMKARIAEISQETAHIDTKRTVYFEISAAPDMMTFGKGSYINDMISVIGARNIFEHDNWLVSPGAESVIERNPDVILTNVNYIDDPIGEIKSRPGFEHINAVINNRIYQIDTDSSVRPSTRIILALRQMSQAVYPTTKIYQEDKL

SEQ ID NO: 13101 - DNA, 372 bp, Unknown
  Obtained from environmental sample
  misc_feature (1)..(372): n is a, c, g, or t
ttgggactgatgtataatcgcgggcatggagtgccgcaaagcgaagcaaagtctgctcagtggttcaaaaaagctgccgctcaggggaacgctgacgcgcaaggttttttgggcgtgatgtacttggctggtcgcggcgttatccgcgatcaagaaaaaggctgtgccctgctacgcgaatccgctgaacaaggacttgagaaagctattgagatatacaatgaagtttgcgctgaaggtgaaaataagcaaaagggaaaacgtagaggacaaatcccaaaaggcactacttacaaagacgaaaaacagcgcttagaagaagaaatagcccgcatcgtcaaaaattccgaagaccttggcagactgcaatag

SEQ ID NO: 13102 - protein, 123 aa, Unknown
  Obtained from environmental sample
  DOMAIN (1)...(30): Sel1 repeat
  misc_feature (1)..(123): Xaa is any amino acid
MGLMYNRGHGVPQSEAKSAQWFKKAAAQGNADAQGFLGVMYLAGRGVIRDQEKGCALLRESAEQGLEKAIEIYNEVCAEGENKQKGKRRGQIPKGTTYKDEKQRLEEEIARIVKNSEDLGRLQ

SEQ ID NO: 13103 - DNA, 360 bp, Unknown
  Obtained from environmental sample
  misc_feature (1)..(360): n is a, c, g, or t
gtggatgagggtatttcattaagaatggaaaatattcaattttatgccgattcaaataagatgcttcccggagaattggaaaaacttgaaagaatcgccgcaattttaaatcgctatcccgagagagacattgtaatcagcggacataccgctttggcgaggggaacaagagaggagcatcttgaactttcacaggaacgggctaaagcggtagcggactatttgcttgaaaataaagtgcgtacggcggatcgcatggtaattcgcggatacggcgcggataagccgattgcggataacaaaaccgaagaaggaatgcgaaagaacagaagggtagagattactattctggaaaattaa

SEQ ID NO: 13104 - protein, 119 aa, Unknown
  Obtained from environmental sample
  DOMAIN (13)...(110): OmpA family
  misc_feature (1)..(119): Xaa is any amino acid
MDEGISLRMENIQFYADSNKMLPGELEKLERIAAILNRYPERDIVISGHTALARGTREEHLELSQERAKAVADYLLENKVRTADRMVIRGYGADKPIADNKTEEGMRKNRRVEITILEN

SEQ ID NO: 13105 - DNA, 411 bp, Unknown
  Obtained from environmental sample
  misc_feature (1)..(411): n is a, c, g, or t
atgttaagagaaagccttttaaggttaaatcgcgcaatggacaggtttatccctgtcattactcccttgtccgtggcgcttggtttgctttttccaagtttttttctgcccctgcgcccctatgtgatactgctgttcagtattatgactttttcaggcgcgttaaaacttaccgcagttgagttaggctccactgtaaaaagccccgttcctattttgcttttctttttttcaacccatgtattaatgccgttagccgctctttttttatcatcgcaatttattaaagacacagatataatcgcgggttttgttctcctttttgccggtcctacggcggtttccggttttatttggtcggcaatttataaaggagacaaggcattgggggctttctttaatactgcttga

SEQ ID NO: 13106 - protein, 136 aa, Unknown
  Obtained from environmental sample
  misc_feature (1)..(136): Xaa is any amino acid
MLRESLLRLNRAMDRFIPVITPLSVALGLLFPSFFLPLRPYVILLFSIMTFSGALKLTAVELGSTVKSPVPILLFFFSTHVLMPLAALFLSSQFIKDTDIIAGFVLLFAGPTAVSGFIWSAIYKGDKALGAFFNTA

SEQ ID NO: 13107 - DNA, 537 bp, Unknown
  Obtained from environmental sample
  misc_feature (1)..(537): n is a, c, g, or t
atgccggataataaaagtttttttcaagatatgcgtgagggtcaaaaaccgcagataaacattgcccgttctactgcgggccgtatgtggcttgtaaatttatgcgcctttatggttgttattcaatcatcccttacagattcctattcctcgctttttattgcaatgagcgctgttttctcggctgttttaactgaatttcttattttgttaaaaagcggaaaggagaaggctcttatggatggaagcgccatagcttccgcattgatcctgaccattcttttgccagacaggatttccccgttatgtgcggcggcaggagccgcttttgctatagctgtaattaaacatagcttcggcggccttggttccaactggcttaatccggcagcgggaggctggctttttatcaggttttcatggcctgcttcttttatgaacgccctcgaaggttcacccctttcagtgatcggtgaaagtgtaagagagggcggctacggcattgactcttttcttgccgcatctcnccccctgtga

SEQ ID NO: 13108 - protein, 178 aa, Unknown
  Obtained from environmental sample
  misc_feature (1)..(178): Xaa is any amino acid
MPDNKSFFQDMREGQKPQINIARSTAGRMWLVNLCAFMVVIQSSLTDSYSSLFIAMSAVFSAVLTEFLILLKSGKEKALMDGSAIASALILTILLPDRISPLCAAAGAAFAIAVIKHSFGGLGSNWLNPAAGGWLFIRFSWPASFMNALEGSPLSVIGESVREGGYGIDSFLAASXPL

SEQ ID NO: 13109 - DNA, 678 bp, Unknown
  Obtained from environmental sample
  misc_feature (1)..(678): n is a, c, g, or t
atgaattttaattggagcgttatattttcatctgacggcattcctaattcggcgtgggttcccatagaaggaagcaaaaaagctgtagttcaatgggaacgttatcctttcgtaaagcatgtatctattttaaatgagttttttttcttccgtccggcggattttcaatacgcgcctattgaccttataatttttgccggcagtaaaaaatacgccggtcccgcgtatcctgttttaattcctcaatatatgggattaccgcgcaaagcgcttgtttcattttgttccagtatacggcgcccaagcatggagtttgacggagctatggaggaattattccttgaaaaaggcataatcacgagggctgtggaaacatcgggcggaaagcaaatttccgttacggaatttgaaaggggatctccggttatacagcgcgttgatatggatatggacggaagaatggaaaccatacgccgcttttaccgcgcggatccttcatggagcgaattggacgaaacttttaattaccgcaggttgatcgcctcttcagaaagcgactggacggggcaggggaaatttaagacaggcgaagtgtatcaaaaggacggttcggttgtttattcttgggatatggacggttcaggggatatgaattattcggaaactgaaaaaaaatga

SEQ ID NO: 13110 - protein, 225 aa, Unknown
  Obtained from environmental sample
  misc_feature (1)..(225): Xaa is any amino acid
MNFNWSVIFSSDGIPNSAWVPIEGSKKAVVQWERYPFVKHVSILNEFFFFRPADFQYAPIDLIIFAGSKKYAGPAYPVLIPQYMGLPRKALVSFCSSIRRPSMEFDGAMEELFLEKGIITRAVETSGGKQISVTEFERGSPVIQRVDMDMDGRMETIRRFYRADPSWSELDETFNYRRLIASSESDWTGQGKFKTGEVYQKDGSVVYSWDMDGSGDMNYSETEKK

SEQ ID NO: 13111 - DNA, 771 bp, Unknown
  Obtained from environmental sample
  misc_feature (1)..(771): n is a, c, g, or t
atggcgcgggatttgcccattggcgcggacgatgtaacagtcgccgccggaggggacggtacctgcaacgaagttgtaaacggtttattgacgcgccctacgcaagcccctccggtctttggaatcctccccattggcaggggtaatgatttttcctcaacgccgggtatcccgacggatgttgaaaaagcccttcaactgctcatcaccggaaatgtaaaaccactggacgccggttttgtaaagggaggctttttccccgacggacgctattttattaacggaattggcatcgggtttgataccaaagtcggctttgaggccgcgaaactgaaaataaaaagcggcattacctacgccgtcggcgcccttattaccgttattcgctacgagccttcgcccgtattgcaaattcattatgatgataaggaagtattgcttccggcggtgcttgtttcggttgtaaacggaaggcgtatgggcggaagtttctacatggggccgaacgccctgcttgacgacgggctcctggacatctgttatgtgcagcatcaaaaaacgcgcatggatctgctaagaataatttctcattacacaaaaggaacccagggcgaatgtcatggagtgacttttgacaggggacggcatttccacctgaaagcgcttgaggggggaatggcggcgcactgtgacggagaaactgtctgttacgatggcaaggaactggagataacctgtatcccgaacgccctgcggcttgttgaggcgtaa

SEQ ID NO: 13112 - protein, 256 aa, Unknown
  Obtained from environmental sample
  misc_feature (1)..(256): Xaa is any amino acid
MARDLPIGADDVTVAAGGDGTCNEVVNGLLTRPTQAPPVFGILPIGRGNDFSSTPGIPTDVEKALQLLITGNVKPLDAGFVKGGFFPDGRYFINGIGIGFDTKVGFEAAKLKIKSGITYAVGALITVIRYEPSPVLQIHYDDKEVLLPAVLVSVVNGRRMGGSFYMGPNALLDDGLLDICYVQHQKTRMDLLRIISHYTKGTQGECHGVTFDRGRHFHLKALEGGMAAHCDGETVCYDGKELEITCIPNALRLVEA

SEQ ID NO: 13113 - DNA, 579 bp, Unknown
  Obtained from environmental sample
  misc_feature (1)..(579): n is a, c, g, or t
atggtgctgagcgggattattgccataggaaacgcagcgacagtgatgaacgaaataatccaaaaaattgatgaaaacgaagaggtgctggcggatcagaaaaaagggttttgggaaaaactacggcagctaatccgggctatgatgcatgccgaaccggaagaagttttttacgatttgatgtttgtcgatcaatcaaccggggtacagaaaaaggaaaccaccaatctgcaccagttcaggggggatctggaaagaaaaacaaggatccttgccggtatgaacgcgaacggggcggtgatggcaaaacttaaaaacatgaatgaggagcagtgtaccgcctatcttgaacggacaatccgtgatgtacagaattaccaccgtatcctggccgcgcttgatgattatttcaaatcaaatataccccagagtgaacgctcgcggataaagggaataaaacccgaattggcatccgtcaagaactgtattgtcagggcgaaccaactgagggctgaatataccgccgcaaaagaagaagaggaacagatgaaacgcctgggtctcaatcctggcgcatga

SEQ ID NO: 13114 - protein, 192 aa, Unknown
  Obtained from environmental sample
  misc_feature (1)..(192): Xaa is any amino acid
MVLSGIIAIGNAATVMNEIIQKIDENEEVLADQKKGFWEKLRQLIRAMMHAEPEEVFYDLMFVDQSTGVQKKETTNLHQFRGDLERKTRILAGMNANGAVMAKLKNMNEEQCTAYLERTIRDVQNYHRILAALDDYFKSNIPQSERSRIKGIKPELASVKNCIVRANQLRAEYTAAKEEEEQMKRLGLNPGA

SEQ ID NO: 13115 - DNA, 636 bp, Unknown
  Obtained from environmental sample
  misc_feature (1)..(636): n is a, c, g, or t
ttgatgtttgagtttattgctgtcacaaaccgccgtctctgttcccagaggaacggcgtgtacgttaacgcgcagttcctggcgcaaatcgaaaaaatcgcagtctcgggggttaaggcaattgtgttaagggaaaaggatctttcattgaaaaattatcttgatcttgcaagggatgtccttgagatttgtagcagcagaaaagttcaatttattgttcatggtctgcctcaggcggttccggaattgggctgcgcttatcttcatctgccctggacagtgtttaaagaaaatcgcataagttcaaaagacattttttcttttggagtttctgttcatagtgcggaagaagcgaatcttgccatagccaatggagcttcatggctatttggcggccatatttatgcaacccaaagcaaagacggccttgaaggcaggggcccggaattccttgcggagctctgtaagttgtcctctgtccccgtgtacgggatcgggggcattaacgaacataacataaccgaaattgtaaaaaccggcgcggcgggagcatgcctgatgtcttctttgatgcaaagtcccgatccttccgcgctgataaccacattgaaaaacacgagtaaaacatatatttag

SEQ ID NO: 13116 - protein, 211 aa, Unknown
  Obtained from environmental sample
  DOMAIN (5)...(190): Thiamine monophosphate synthase/TENI
  misc_feature (1)..(211): Xaa is any amino acid
MMFEFIAVTNRRLCSQRNGVYVNAQFLAQIEKIAVSGVKAIVLREKDLSLKNYLDLARDVLEICSSRKVQFIVHGLPQAVPELGCAYLHLPWTVFKENRISSKDIFSFGVSVHSAEEANLAIANGASWLFGGHIYATQSKDGLEGRGPEFLAELCKLSSVPVYGIGGINEHNITEIVKTGAAGACLMSSLMQSPDPSALITTLKNTSKTYI

SEQ ID NO: 13117 - DNA, 636 bp, Unknown
  Obtained from environmental sample
  misc_feature (1)..(636): n is a, c, g, or t
ttgagcgtactgtatgattccggcgcgcgggtacaggaactttgtgatttgcgcgtccgtgacatccgtctcgaccacccgcccgtcattacactgaccggcaaagggcgtaaaacaagacatgtgcccctcatggcagacaccgtgagactgttgcgatcctgcatggaagaaaattccctgttccaaaacggctgtcaagacgcgccgctgctctgtaaccagcgccgttcaaaactgacccgcggaggcgttaatcacatcctgtgcaaatactccagtacattgtcgataaaatatcctgatatatcaaaaaggcttacgccccatgtgctgaggcattctaaggcaatgcatctatatcaagccggtgtgagccttgtatatatacgcgatatccttggacacgttgatataactaccactgatatttacgccagagccgacaccgagtccaaacgcaaggcgcttgagaatatttacccgggtataacgccggttgctttcttcgtgccggactggaaccgcgatacgaacctgcttgattacttggacggccttttaaatattatgctcagtctttttgccgtaaagccttgttttttaccgcaatttaggcttatcactggccattaa

SEQ ID NO: 13118 - protein, 211 aa, Unknown
  Obtained from environmental sample
  DOMAIN (1)...(155): Phage integrase family
  misc_feature (1)..(211): Xaa is any amino acid
MSVLYDSGARVQELCDLRVRDIRLDHPPVITLTGKGRKTRHVPLMADTVRLLRSCMEENSLFQNGCQDAPLLCNQRRSKLTRGGVNHILCKYSSTLSIKYPDISKRLTPHVLRHSKAMHLYQAGVSLVYIRDILGHVDITTTDIYARADTESKRKALENIYPGITPVAFFVPDWNRDTNLLDYLDGLLNIMLSLFAVKPCFLPQFRLITGH

SEQ ID NO: 13119 - DNA, 909 bp, Unknown
  Obtained from environmental sample
  misc_feature (1)..(909): n is a, c, g, or t
atggcgagcggcgtgcttcggttcttcatgggcagtatcgatgcgcttcttgatttttacagcatgctggttatgggcgatgtaacaaaaatgagcgcaaccacctatataaaagccatgccacagacctgcgccgcgaatatcggagtaattttcggtctgacaggaaggataattacatctaacaccgcctgcacatccggcagtcaggccattggtttggcatacgaaaccataaagtacggcatgcaggacattatgcttgcaggcggcgcggaggaaatgtgccccgcaaacgccgccgtattcgatacgctttttgccgcaagttccaaaaatgacagtccgcataaaacacccgccgcttatgacaagagccgcgacggtcttgttgtcggcgaaggggcaggctgtctggttctggaagaatacgaacacgccaaaaagcgcggggcaaaaatagtcgcggaagttgtcggcttcggaaccaacaccgacggaacccacatcacccagcctaaccgcaccaccatgggcatcgccatgaagctggcgctggaagattcgcagctcgaccagtcttcgattgcttatgtgaatacgcacggaacagctacggaagccggagacattgccgaaagctgggccaccgcggatgttttccaaaggcccgttccagcaagcactttgaaaagctatattggccacactctgggcgcgtgcggngccatagaagcttggatagcggttcaaatgatgagagaaaaatggttttgccccaacctgaaccttgacgaactggatccccgttgtgcgtctttggattacatcacaggaagcggcagagaaatcgacgcttcttgtattatgtcaaacaattttgcctttggcggaataatacgtcgttga

SEQ ID NO: 13120 - protein, 302 aa, Unknown
  Obtained from environmental sample
  DOMAIN (1)...(147): Beta-ketoacyl synthase, N-terminal domain
  misc_feature (1)..(302): Xaa is any amino acid
MASGVLRFFMGSIDALLDFYSMLVMGDVTKMSATTYIKAMPQTCAANIGVIFGLTGRIITSNTACTSGSQAIGLAYETIKYGMQDIMLAGGAEEMCPANAAVFDTLFAASSKNDSPHKTPAAYDKSRDGLVVGEGAGCLVLEEYEHAKKRGAKIVAEVVGFGTNTDGTHITQPNRTTMGIAMKLALEDSQLDQSSIAYVNTHGTATEAGDIAESWATADVFQRPVPASTLKSYIGHTLGACGAIEAWIAVQMMREKWFCPNLNLDELDPRCASLDYITGSGREIDASCIMSNNFAFGGIIRR

SEQ ID NO: 13121 - DNA, 723 bp, Unknown
  Obtained from environmental sample
  misc_feature (1)..(723): n is a, c, g, or t
ttgtttgtactggacatcagccccagtatggcggcgcttgatatgggcggggcaagccgttttaacattgcccgtgaactattgaaaaaatntgcggaacaccgtccttcagacagcgtcggtcttgcggtagttggatatgacgccgccctgctcgtcccgccaaccacagaccgggaattgtttgtctcgcggctgggagggctgcgtcttggtgaaatgggagatggaaccgccctgggtatggggcttgcgcttgcggcctaccaccttgaaaaatccgtcgcaccccgcagggtggcagttcttatcagcgatggtgaaaataacgcgggggcgattcacccggaaactgccgccgcaatgctcaaagatcttggggtttcgctgtgggtcatcgggattggttccggtggggaagttcccattgattatgttgatccttttacccggatacgccgtaccggcctgtttgactccagctacgatacggaagcccttcgaagaataagcattgcaggcggcggaaacatgatctccgcgccttcggcggatgctcttgccgcggcctttgcctatcttgacgatcaggaaatggttgtgcgcagatccggtacggtaacgcgattttatccctgttatctgtcatttatgatcgccgccctgagccttatcattacggtgcgttttgtcaggcgctttttcctgggggcatggctatga

SEQ ID NO: 13122 - protein, 240 aa, Unknown
  Obtained from environmental sample
  DOMAIN (1)...(194): von Willebrand factor type A domain
  misc_feature (1)..(240): Xaa is any amino acid
MFVLDISPSMAALDMGGASRFNIARELLKKXAEHRPSDSVGLAVVGYDAALLVPPTTDRELFVSRLGGLRLGEMGDGTALGMGLALAAYHLEKSVAPRRVAVLISDGENNAGAIHPETAAAMLKDLGVSLWVIGIGSGGEVPIDYVDPFTRIRRTGLFDSSYDTEALRRISIAGGGNMISAPSADALAAAFAYLDDQEMVVRRSGTVTRFYPCYLSFMIAALSLIITVRFVRRFFLGAWL

SEQ ID NO: 13123 - DNA, 786 bp, Unknown
  Obtained from environmental sample
  misc_feature (1)..(786): n is a, c, g, or t
atggaataccgcaaagggctggacgttgtttttgccattgacatttcgcgcagtatggacatccgtgatgtgcaagcaggctctcaagcaaggacgcgaagcgcttttcagtcccgtcttgagcgcggtatttcaatcgcaagagagagcgtaatagccgtttccggggcgcgttttgccgccgcgataggcagaggaaggggatatttagcggttccgttaacctacgacagcgaagctacgttaatttttcttgaatcgctggacgtatcttccatgacgggaagaggcacaaatcttgagtccttagttgacgcggcggctgacgtttttcaagactcatctccggcgcggaaagtaattatccttgtctcggacggcgagtctcatgccggcattcttaggaatgcggttaaccgctgtatccgcgacggtattatactaaataccgtggcagttggcagtgatgaaggccggcaaataacggcgcagattaatgaccctgattccccgtccgtaatcagccgaagggacgcttttgtaatgaaagcggctgccgaaagaacgggcggcatttacattgacggaggccgagaggactcaggcgcaatgctttcttcgcatcttctttcgcttgcgcaggaaatgatgagcggaaacaggaaacaggagccaaagcaaagaagaccgctatttatcatactcgcgattatttcttacggcgcgtctaaattttgtacgcgtcaatcgcaaggaaaacaatgcgccgnttatcaaccgctttga

SEQ ID NO: 13124 - protein, 261 aa, Unknown
  Obtained from environmental sample
  DOMAIN (8)...(180): von Willebrand factor type A domain
  misc_feature (1)..(261): Xaa is any amino acid
MEYRKGLDVVFAIDISRSMDIRDVQAGSQARTRSAFQSRLERGISIARESVIAVSGARFAAAIGRGRGYLAVPLTYDSEATLIFLESLDVSSMTGRGTNLESLVDAAADVFQDSSPARKVIILVSDGESHAGILRNAVNRCIRDGIILNTVAVGSDEGRQITAQINDPDSPSVISRRDAFVMKAAAERTGGIYIDGGREDSGAMLSSHLLSLAQEMMSGNRKQEPKQRRPLFIILAIISYGASKFCTRQSQGKQCAXYQPL

SEQ ID NO: 13125 - DNA, 585 bp, Unknown
  Obtained from environmental sample
  misc_feature (1)..(585): n is a, c, g, or t
ttgttttcatttcaggcttcgtcacttatctgggagtattcgagtgttatcgtaatagtgtggatttgtatttataatattattttgccgtttatccgtgaactaaaaaaaggcaggaagttcaccgatactttggctaatacttatccggggaatctgttaattgccactttaataatcggcataacctcaatctttgaccttattgattcttttaccctgcatttatcgcttcatttaaccaattacagtattgtcgtcttcgcgttgtcggttacatttatgttatttcgaatgtccgtcataaaagacagggaacttaaagaaaaaagcgcgctgctggaaaaggcgaccaatcccgcgtccgcgcgtgaaaaagtattcagattatacggtttaacggaacgtgaaaaggaagttgcccggttgatggcggaagggcttgacaacaaggatattggaaaacgtctctttttatccaccagaaccgtctcgtttcatgtaacaaatattttccgtaaattcggcattattgacggcaagaacaagggacgggctatgtttttggccaagttgttcaattaa

SEQ ID NO: 13126 - protein, 194 aa, Unknown
  Obtained from environmental sample
  DOMAIN (130)...(190): Bacterial regulatory proteins, luxR family
  misc_feature (1)..(194): Xaa is any amino acid
MFSFQASSLIWEYSSVIVIVWICIYNIILPFIRELKKGRKFTDTLANTYPGNLLIATLIIGITSIFDLIDSFTLHLSLHLTNYSIVVFALSVTFMLFRMSVIKDRELKEKSALLEKATNPASAREKVFRLYGLTEREKEVARLMAEGLDNKDIGKRLFLSTRTVSFHVTNIFRKFGIIDGKNKGRAMFLAKLFN

SEQ ID NO: 13127 - DNA, 753 bp, Unknown
  Obtained from environmental sample
  misc_feature (1)..(753): n is a, c, g, or t
atgcctgcttatctttcttcccttttagctttgatgaaagtaaatatcccgtctccgtattacacgataaatggcaattaccttttcctctctgaatccgctgaaaccctggtggaggcaattaacgccgttaggcgcaacgaggtgctgccgaagcaggagctttggcgcgccctttccgaagataattcgggcccatcgagtttttccctgtactattcactggatcattcgcttccttttttcctcaagggtaccggcattgtacaggcgatactaaaatcttacagccaggggcttgcccggcttggttttgagaacaaactgctcaacgtttcactgttcactatttcaggcacgggaaaaggcctggtgccggtttccggctatcccctggatctttcccggagcaatgaaaggacagggaaaagcctatacgccgtttcttccggcaaagactcaaggctcctcttaacgcgggggaacaccgttctggcggtgaaccccgttagccctaatgaaagtggcattaaggaatttttctttagcggctctgccagctcaggtgtttttgttgtaccggcggaagctggaaattacgttgaaggcgtcgcctggatagcgaactcccagggcagcgtaagccttgtaaataaggacatggaaaacctaanaggttttcctgtcagcacaggaataaaattgtcggcttctcccatatcctacggaggaaaacttttcctggccgggtga

SEQ ID NO: 13128 - protein, 250 aa, Unknown
  Obtained from environmental sample
  misc_feature (1)..(250): Xaa is any amino acid
MPAYLSSLLALMKVNIPSPYYTINGNYLFLSESAETLVEAINAVRRNEVLPKQELWRALSEDNSGPSSFSLYYSLDHSLPFFLKGTGIVQAILKSYSQGLARLGFENKLLNVSLFTISGTGKGLVPVSGYPLDLSRSNERTGKSLYAVSSGKDSRLLLTRGNTVLAVNPVSPNESGIKEFFFSGSASSGVFVVPAEAGNYVEGVAWIANSQGSVSLVNKDMENLXGFPVSTGIKLSASPISYGGKLFLAG

SEQ ID NO: 13129 - DNA, 543 bp, Unknown
  Obtained from environmental sample
  misc_feature (1)..(543): n is a, c, g, or t
ttgtgtggggaagtaagcatggattacgatactatcgttatcggcggcggacacgcgggaatcgaggcgtcccttgcgacaagccgtcttggtttttcaaccctccttattacgcaaaacccggacaggattgggacgctttcatgcaaccctgcgattggcggcctttcaaaaggcaaccttgtaagggaagtggacgctctcggcggagagatgggcaggcttacagacgcgacaatgatccagtatcgtgttcttaaccgttcgcggggaccggcggtacagtcgccaagggcgcaggcggacaagcacgcgtatcctgcgacggcgcgttccgttcttgagaagcagaaaaatttgacgattttcatggacatggttactgattttattatagaaggaaccggcgcggacggagttgtaaaggactctgcacttgcgaaaattaccggagtaattacaaaacngcggtcatcgcataacggcgcgcactgttattcttgccgccggaacttttatggaagggaaaatttttatcggtga

SEQ ID NO: 13130 - protein, 180 aa, Unknown
  Obtained from environmental sample
  DOMAIN (10)...(176): Glucose inhibited division protein A
  misc_feature (1)..(180): Xaa is any amino acid
MCGEVSMDYDTIVIGGGHAGIEASLATSRLGFSTLLITQNPDRIGTLSCNPAIGGLSKGNLVREVDALGGEMGRLTDATMIQYRVLNRSRGPAVQSPRAQADKHAYPATARSVLEKQKNLTIFMDMVTDFIIEGTGADGVVKDSALAKITGVITKXRSSHNGAHCYSCRRNFYGRENFYR

SEQ ID NO: 13131 - DNA, 354 bp, Unknown
  Obtained from environmental sample
  misc_feature (1)..(354): n is a, c, g, or t
atgtccatgaaaatcgtcaaatttttctgcttctcaagaacggaacgcgccgtcgcaggatacgcgtgcttgtccgcctgcgcccttggcgactgtaccgccggtccccgcgaacggttaagaacacgatactggatcattgtcgcgtctgtaagcctgcccatctctccgccgagagcgtccacttcccttacaaggttgccttttgaaaggccgccaatcgcagggttgcatgaaagcgtcccaatcctgtccgggttttgcgtaataaggagggttgaaaaaccaagacggcttgtcgcaagggacgcctcgattcccgcgtgtccgccgccgataacgatagtatcgtaa

SEQ ID NO: 13132 - protein, 117 aa, Unknown
  Obtained from environmental sample
  misc_feature (1)..(117): Xaa is any amino acid
MSMKIVKFFCFSRTERAVAGYACLSACALGDCTAGPRERLRTRYWIIVASVSLPISPPRASTSLTRLPFERPPIAGLHESVPILSGFCVIRRVEKPRRLVARDASIPACPPPITIVS

SEQ ID NO: 13133 - DNA, 627 bp, Unknown
  Obtained from environmental sample
  misc_feature (1)..(627): n is a, c, g, or t
atgcacgacaaagcctatatttttgacggcgacacaggcggtcagcattttgcattcactgtaaaaacgcttgaacgaaacggagtatccgcagtcatcatagaagacaaaaccggtcttaaaagaaattcgctnttcggcacagacgttaatcaggaattatgcccaattcccgaattctgcgataaaatcaaagccggcaaacaggcgcaggtaacaaaagaatttatgatcatagcgcgtctggaaagcctgattgcgggtttccccgtatcacacgcgcttgaaaggggacgcgcatttgccgacgcgggcgctgacggcgttatgatacatagcaaagaaaaaacaggcgatgatattaaagaattctgttcgcttttccgcgccgaatatcctcatgtaccgttggtgcttgttcccacaacatataataaatttacagaaaaagaactcgcctcatggggcgcgaatatcattatctacgcaaaccacatgctccgttccgcgtatccggcaatggtaaacaccgcaaaaatgatcttacaaaacgaacgttctcttgaagcggattcggtttgtatgccgataaaagaaatacttgaattaattcccggcggcaaataa

SEQ ID NO: 13134 - protein, 208 aa, Unknown
  Obtained from environmental sample
  misc_feature (1)..(208): Xaa is any amino acid
MHDKAYIFDGDTGGQHFAFTVKTLERNGVSAVIIEDKTGLKRNSLFGTDVNQELCPIPEFCDKIKAGKQAQVTKEFMIIARLESLIAGFPVSHALERGRAFADAGADGVMIHSKEKTGDDIKEFCSLFRAEYPHVPLVLVPTTYNKFTEKELASWGANIIIYANHMLRSAYPAMVNTAKMILQNERSLEADSVCMPIKEILELIPGGK

SEQ ID NO: 13135 - DNA, 870 bp, Unknown
  Obtained from environmental sample
  misc_feature (1)..(870): n is a, c, g, or t
ttggatgccntgaggttcaagctaggcgcaaacgatgcccagcttgggcttgcggcatcaatagcggttttgggcgcggcaggcggtgctttctttgcaggtgccttggcagacaagtttgggcggcgcagggttatgataacgtctagcattctattcttaatcagcgcgataggttccggcaatccctactttttcacaacagcaggaactgctggaaatatgattgaatttattgtttggcgtgtgattggcggagtaggcgttggtgcagctagcattattgttccggcttatatcgcagaaattgcccccgcgcctttgcgcggcaggcttgcgactatgcagcagttcgctatagttataggcattttctcggcacttctctccaattatttcttaggcgaaattgccggcggcggagcggttgttatggatcacacaactcgtttagcaaaagacgttacaagaataggttcttttgaaacttggcaatggatgttttgggtagagtgcattcctgcggctctttatggtttgttagttctgtttatccccgaaagcccccgttatttggtagctcgcaagcaaccaaaaaaagctggtgaaattttgggcaaaattctctcgcctagcgttgtagctcaaaaaatagaagacattaaaaagagtttgcactccgaagttgctccaaaattcagcgacttgctggaaaaagttgctggaaaaacccgcttggctcccattgtctgggttggaataggcattgccgcattgcagcaatttgttggcataaatgtaattttctactacggcaatgttctatgggaatcagtgnggttttacgcagcaagatctcggccgatctga

SEQ ID NO: 13136 - protein, 289 aa, Unknown
  Obtained from environmental sample
  DOMAIN (1)...(289): Sugar (and other) transporter
  misc_feature (1)..(289): Xaa is any amino acid
MDAXRFKLGANDAQLGLAASIAVLGAAGGAFFAGALADKFGRRRVMITSSILFLISAIGSGNPYFFTTAGTAGNMIEFIVWRVIGGVGVGAASIIVPAYIAEIAPAPLRGRLATMQQFAIVIGIFSALLSNYFLGEIAGGGAVVMDHTTRLAKDVTRIGSFETWQWMFWVECIPAALYGLLVLFIPESPRYLVARKQPKKAGEILGKILSPSVVAQKIEDIKKSLHSEVAPKFSDLLEKVAGKTRLAPIVWVGIGIAALQQFVGINVIFYYGNVLWESVXFYAARSRPI

SEQ ID NO: 13137 - DNA, 807 bp, Unknown
  Obtained from environmental sample
  misc_feature (1)..(807): n is a, c, g, or t
gtgccgcttatcgttctgagttcggataaaaaaaatcgtatcgtccatcttttggcgtttgacacaataccccatgagcagccctatcttctgcctgaaagacccctttccctggttaacgagagggataagatccgaaaagacgagatggccaaaattgaagctgaactgaccgctctctcgtcccagaaaaaacaactcgaagaccaaaagaactctttgctttatgatattgaatacgagactgccagcgccagtatggaacgcattgaaaatgatgccgcggcgtcgggcgcgagtatttcctggatttccggctacgctccggcctctgatgtgggtttactcaaacgggcggccagcgaaaacggctgggccttttgcgccgcagatccggctgaagacgatatgcaaattcccacaaagctgaaaaacaataagcttacagagcttatttatccccttacgggttttctggaaatgtcgccgggataccgggaagtggatatttccggctggttcctcctcttctttacgctgttcttcggcatgatcttcggggacgctgcatacggcgcgatactctgcctgatttcgctcatctttatagcgaagacctctaaaaaaggcacgccgcttattttcaaattcctgttgttgatgagccttttcaactttacttggggtgcccttacctgcgcctggtttcgttttgatgtttctgcggtgccgcaagtcttacaaaatatcagtcttcccctaatcgtcaacacttcgagcggaactgggatggcttgctgcctataa

SEQ ID NO: 13138 - protein, 268 aa, Unknown
  Obtained from environmental sample
  misc_feature (1)..(268): Xaa is any amino acid
MPLIVLSSDKKNRIVHLLAFDTIPHEQPYLLPERPLSLVNERDKIRKDEMAKIEAELTALSSQKKQLEDQKNSLLYDIEYETASASMERIENDAAASGASISWISGYAPASDVGLLKRAASENGWAFCAADPAEDDMQIPTKLKNNKLTELIYPLTGFLEMSPGYREVDISGWFLLFFTLFFGMIFGDAAYGAILCLISLIFIAKTSKKGTPLIFKFLLLMSLFNFTWGALTCAWFRFDVSAVPQVLQNISLPLIVNTSSGTGMACCL

SEQ ID NO: 13139 - DNA, 804 bp, Unknown
  Obtained from environmental sample
  misc_feature (1)..(804): n is a, c, g, or t
gtgggctgggaacttgatgtgggtccggacacaaatgtcaggatttataccagcgcctcaggaaagccgcctccccgaaggccgcgtgtcgcaactccggctccagttccggcttcaactccggagccagttccggttttaactccggagccagttccggcttcaactccggatccagtttcggttttaactccggagccagttccggctttaactccggatccagttccggtttcaactccggctccaactccgcctgagcctgtaatacaaacgtctgtcacggaaatattcgaaagagcttacgacactggttacgacgatggttatgacgatggttattatgatgggtactcaattatctatcaggtggtcaagcctgccgcggtcaacgaaacaaggcccgcccaacccgctcccgttgtcgaaacccgccagaaacaggcgcagtccgttcctgttgtcgagcccccccgccagcaacaaacacagtctgccgtgacaagcgatatatgggcgcaagtagccaagccgacgacgttgaaagccccgcccgcgtccgccgcggtcaacgatgcgcggccacagcaggcgcagtctgctcctgttgttgaaacccgtcggcaagccacgcagcccgctcccgttgtcgaagcccgnccagcagcggcggcccccgtttttcgaacgcggacgcaggggatccagaccatcgtgataaatgaaacaggcagcaaacggcccaacctgtgggtgtcattgataacgagccgccgcagcgatcaagcctatcatggtcgttga

SEQ ID NO: 13140 - protein, 267 aa, Unknown
  Obtained from environmental sample
  misc_feature (1)..(267): Xaa is any amino acid
MGWELDVGPDTNVRIYTSASGKPPPRRPRVATPAPVPASTPEPVPVLTPEPVPASTPDPVSVLTPEPVPALTPDPVPVSTPAPTPPEPVIQTSVTEIFERAYDTGYDDGYDDGYYDGYSIIYQVVKPAAVNETRPAQPAPVVETRQKQAQSVPVVEPPRQQQTQSAVTSDIWAQVAKPTTLKAPPASAAVNDARPQQAQSAPVVETRRQATQPAPVVEARPAAAAPVFRTRTQGIQTIVINETGSKRPNLWVSLITSRRSDQAYHGR

SEQ ID NO: 13141 - DNA, 675 bp, Unknown
  Obtained from environmental sample
  misc_feature (1)..(675): n is a, c, g, or t
atggtggatntgaaaaagcggacggaatntaagacaagagccggaaagctcgtgaaagtacaggagaaactgggagagggcggacagggcacggtgtacaaagtttcctatgacggaaagccgaaagcctttaagtggtaccacgaaaaggccctgaaagatccgtcgaaattctacgaaaaccttgaaaacaatatcaaaaatggcgcaccgacaaattcgtttttgtggcccctggatattactgaaaatacaggcggtcgctttggctacatcatggatttgcggccagcgcagtacaagagtttttcgctttttcttttggcaagggaaaaattcgccagcgttaccgctattacaaatactgcccttcaaataacagaagcgtttcgcgaactgcacaattcgggctatagctatcaggatttaaatgacggcaatttttttgtcaatcctaaaaacggcgatgtgctgatttgcgacaacgacaacgtggcggaatacgggaagaatctgggcattgccggaaaatgccgctacatggcaccggaggtcgtgcttggcaaggccccgcccagcatacataccgataaattctctctttcggtcgtgctttttctcttattgatgaacaatcaccccttgaaggaaagcgttcatatccgccgtgcatga

SEQ ID NO: 13142 - protein, 224 aa, Unknown
  Obtained from environmental sample
  misc_feature (1)..(224): Xaa is any amino acid
MVDXKKRTEXKTRAGKLVKVQEKLGEGGQGTVYKVSYDGKPKAFKWYHEKALKDPSKFYENLENNIKNGAPTNSFLWPLDITENTGGRFGYIMDLRPAQYKSFSLFLLAREKFASVTAITNTALQITEAFRELHNSGYSYQDLNDGNFFVNPKNGDVLICDNDNVAEYGKNLGIAGKCRYMAPEVVLGKAPPSIHTDKFSLSVVLFLLLMNNHPLKESVHIRRA

SEQ ID NO: 13143 - DNA, 387 bp, Unknown
  Obtained from environmental sample
  misc_feature (1)..(387): n is a, c, g, or t
ttgatggccgacaatacattggctttttattatattatatcaaaaggacgcgccaatatgaacccaaatgtcaaaacagaactcgacaaaatcgtgagcacgctggccgaaaccgggatcgttaccaaaatcatcctgttcggctcatacgcgaggggagacgagacccccgacagcgacattgatttgtgcgtcatcacgccggtgcgggatagacgccctatagatattaccattgatctacggagaaaaatatacgatattcgggagactccgttagatttgtttacccgtactcaagatgatttttcttatcgcgcggcgtacgcgggttcgcttgaacacgagattgcaaaggagggcgtggtgctgtatgaacacaaatag

SEQ ID NO: 13144 - protein, 128 aa, Unknown
  Obtained from environmental sample
  DOMAIN (24)...(124): Nucleotidyltransferase domain
  misc_feature (1)..(128): Xaa is any amino acid
MMADNTLAFYYIISKGRANMNPNVKTELDKIVSTLAETGIVTKIILFGSYARGDETPDSDIDLCVITPVRDRRPIDITIDLRRKIYDIRETPLDLFTRTQDDFSYRAAYAGSLEHEIAKEGVVLYEHK

SEQ ID NO: 13145 - DNA, 483 bp, Unknown
  Obtained from environmental sample
  misc_feature (1)..(483): n is a, c, g, or t
atgatttttcttatcgcgcggcgtacgcgggttcgcttgaacacgagattgcaaaggagggcgtggtgctgtatgaacacaaatagcactattgtcggcgagtggatatatctcgctcagatggattatgatcacgcgctaaaatccgctgacacttttcatcctgcccctgtggaaataatatgttttcattgccaacaagccgccgagaaaatattaaaggcctatatcgccgcacatggcgatactccggttaaaacacacgatcttacgacattaataaagtactgcgaacagtattcgtcagattttaataactatgcgggtttcggcgatatgctaacggcgtacaattccgatacccgctatccacccaaattatcattggcggaatcggatatgaaacaagctctgaactatgcccgcaaaatattggagttcacaaaatctaagttggcggaaatggggttcggggctacgtga

SEQ ID NO: 13146 - protein, 160 aa, Unknown
  Obtained from environmental sample
  DOMAIN (32)...(151): HEPN domain
  misc_feature (1)..(160): Xaa is any amino acid
MIFLIARRTRVRLNTRLQRRAWCCMNTNSTIVGEWIYLAQMDYDHALKSADTFHPAPVEIICFHCQQAAEKILKAYIAAHGDTPVKTHDLTTLIKYCEQYSSDFNNYAGFGDMLTAYNSDTRYPPKLSLAESDMKQALNYARKILEFTKSKLAEMGFGAT

SEQ ID NO: 13147 - DNA, 816 bp, Unknown
  Obtained from environmental sample
  misc_feature (1)..(816): n is a, c, g, or t
gtgtcgcgtaaccccccgaaccaaacgagctatgcctgtgggtcgaccgttaccgtaacggcgacggaggcgagcggctatacgttcaccaattggacgataaccggcaacggcacaattgccaacgagagcagcgcctccacgagcgtgactgtgaacgggaacgtgaccgttacggccaacttcacactgataccaacgtacacgctgaccatcgggaaaaatccttcggcaggcgggaccaccacgccgacaagcagtcaatcgaacatcaaagcgggagaaaaggtcagtatagaggctaagatggcgagtagttgctatacgttcataaattggacgataaccggtagcggcacgattgacaacgcggctagcgcttccacgagcgtgacggtgaatgggaacgcgaccgttactgccaatttccaacaaaacacatacacgctaacgacaagcgtattcccgttgtcaagctatggatatttgtcgcatagcccgaatcaaacatcatactcgtgtgggacgagcgttaccgtaacggctacgcccacgagtagcgattataagtttgacagctggatagacgcgccatcgggcgtaagcgcttcgagcgaatcaataacatttgtcataaacagtaatgtgacgctaaccgcanaatttaaaacaaaaaaaagtggaatttcagaatatacctccggtactcatctttttaacanaggttttccagcgaaagcagaggtttatgtctttgncnncggtggggagcggtgctgcggatcttctacaagattgggattatcgaacatatag

SEQ ID NO: 13148 - protein, 271 aa, Unknown
  Obtained from environmental sample
  SIGNAL (1)...(26)
  misc_feature (1)..(271): Xaa is any amino acid
MSRNPPNQTSYACGSTVTVTATEASGYTFTNWTITGNGTIANESSASTSVTVNGNVTVTANFTLIPTYTLTIGKNPSAGGTTTPTSSQSNIKAGEKVSIEAKMASSCYTFINWTITGSGTIDNAASASTSVTVNGNATVTANFQQNTYTLTTSVFPLSSYGYLSHSPNQTSYSCGTSVTVTATPTSSDYKFDSWIDAPSGVSASSESITFVINSNVTLTAXFKTKKSGISEYTSGTHLFNXGFPAKAEVYVFXXGGERCCGSSTRLGLSNI

SEQ ID NO: 13149 - DNA, 816 bp, Unknown
  Obtained from environmental sample
  misc_feature (1)..(816): n is a, c, g, or t
gtgcggaactntggacttgaccagccgttttatgttcagtatttccgctggctgaaccgcgttattgttcataaagaccttggtgtcagccttatttcgcgtgcgcccgtttcgttccttatcgcttctcgcattttgaattcgcttcttcttaacgtaatatcccttgtgttaattactttcttttctttcgcggcgggtatatatttttctactaaagccggaacaagagccgacatagcggtaacctttttcgcccttgtgcttcacgccttccccggtcttttgcttcttatccttcttcagttgttcgcgtccgtaacggggctttttccggtaaccgcctaccctccgtttccgttttcgtccgcgcctgtaaaatttgttttctcttacgcccatcatatattcctgccgctgttatccgcttttttaggcgggataggcggctctctgcgcatgatacgcgcgacaatgctcgatcagcttggacagccgtacatcacaagtttgcgctcgcgcggcattgccgaatggcgcgtatactttgcccatgccttccgcaacacgcttaacccatacataacaggaagcgcaaatcttttggcaagccttttttcaggttcgcttattttggaaataatttttgcgtacccgggtatcggaaggttaatgtacgaagctgtaattcagcaggatattaatcttgtgcttgccaacattatgtttatctcattccttgtgctggttggaatggcattggcggacattacacttgcctttgtagacccccgcatcaggtacgggaaagagtaa

SEQ ID NO: 13150 - protein, 271 aa, Unknown
  Obtained from environmental sample
  DOMAIN (45)...(268): Binding-protein-dependent transport system inner membrane component
  misc_feature (1)..(271): Xaa is any amino acid
MRNXGLDQPFYVQYFRWLNRVIVHKDLGVSLISRAPVSFLIASRILNSLLLNVISLVLITFFSFAAGIYFSTKAGTRADIAVTFFALVLHAFPGLLLLILLQLFASVTGLFPVTAYPPFPFSSAPVKFVFSYAHHIFLPLLSAFLGGIGGSLRMIRATMLDQLGQPYITSLRSRGIAEWRVYFAHAFRNTLNPYITGSANLLASLFSGSLILEIIFAYPGIGRLMYEAVIQQDINLVLANIMFISFLVLVGMALADITLAFVDPRIRYGKE

SEQ ID NO: 13151 - DNA, 681 bp, Unknown
  Obtained from environmental sample
  misc_feature (1)..(681): n is a, c, g, or t
atgaggaacaccgatgaaggcgaccgcaatttgggaatttatggcggttcgcaaacacaaaatatatacggtggttggtgggatgccactggagaccccggcaaacatctatcccatttatcttatgcaaattatttcaaccctcagcaaattccattagtggtatggtctctgcttcatgcaaatgaacttcagccaagcgtatatggctcatcaacaaaagacgaagctgcatggggtgcggactatcttttgcgttcgctttcttccgctggttatttttattcgtctgtatttgataactggggtcaggggcatcgtgaaatttgtgcttggagcggtgaagagggagatcgttcagccgcctaccaagcagctatgcgtgagggtgggggcgtatcaatagcggctcttgctagggcaagcaaagccggcataagcaaagacagcagttctgcacaatatcttgccggagcaaaacgcgcttatgcacacctcanagctaatcccacaagatatcaagacgatggaatagaanacattatagacgattacgctggtcttctcgctgcaaccgagctatacaatgcaacagatgaagaacagtatttaaatgatgcaaaaacaagagttgaatcgcttttgagccgtcaatctgatgagggatgttttacactgtga

SEQ ID NO: 13152 - protein, 226 aa, Unknown
  Obtained from environmental sample
  misc_feature (1)..(226): Xaa is any amino acid
MRNTDEGDRNLGIYGGSQTQNIYGGWWDATGDPGKHLSHLSYANYFNPQQIPLVVWSLLHANELQPSVYGSSTKDEAAWGADYLLRSLSSAGYFYSSVFDNWGQGHREICAWSGEEGDRSAAYQAAMREGGGVSIAALARASKAGISKDSSSAQYLAGAKRAYAHLXANPTRYQDDGIEXIIDDYAGLLAATELYNATDEEQYLNDAKTRVESLLSRQSDEGCFTL

SEQ ID NO: 13153 - DNA, 420 bp, Unknown
  Obtained from environmental sample
  misc_feature (1)..(420): n is a, c, g, or t
atggaggtctttatgaacaggattggattgtttttattgaacattgcggtggccctttatctttttgtaaacgggattgtagggtttatcaacataaacaacagcgaatttgccaaaatagtcagcactattttcaagggctggtattttaactatgtgttaatcatcgtgctgtcggtctgcgctattattgcgggggtattccttataacggcgtcctttagaaatgatgttctggtaataagggtgatactgctcatttttatcgtattgtgggctatttttattgtaatagtggatgttgtcaatccgctggcttatggaagagtcgaaaactttttatcctatttaaaggatttgtccgcccaccttatgatcctgggcgcgataattttgtcaacaaggcgttttgttgtttaa

SEQ ID NO: 13154 - protein, 139 aa, Unknown
  Obtained from environmental sample
  misc_feature (1)..(139): Xaa is any amino acid
MEVFMNRIGLFLLNIAVALYLFVNGIVGFININNSEFAKIVSTIFKGWYFNYVLIIVLSVCAIIAGVFLITASFRNDVLVIRVILLIFIVLWAIFIVIVDVVNPLAYGRVENFLSYLKDLSAHLMILGAIILSTRRFVV

SEQ ID NO: 13155 - DNA, 768 bp, Unknown
  Obtained from environmental sample
  misc_feature (1)..(768): n is a, c, g, or t
atgtcgctggagcgattgacgcccgctattgtccatgttattctagaaccaagacaggccctttccattccgattgcgctttttctttccgcgcttacaggcgccttcttttcgctatttcacgcttttgcttccattacgttgaggncggatcaggttgtctctggtacgggtataattcttcttgccaacggattaaccgtttttgtatgccagcttattttcagaatggatcgcagtatgaattacaggatgggaatgaggtcgggtcttttcgggctttatcctaccatctggatcgcgcttatcattttggctgtcagttggtttatgctgtacaagcgcccttggggtttacgtcttcgtgccgcaggcgaacatccgcaggctttagcttctgccggggttaatgtaataaaactccgatatgccgccgttattatttccggccttctcgcgggtcttgcgggcggctgtatcgttcttactcaggatattcaattcacagtaagcacaattaacggaaaaggttttatcgcccttgccgctgtttctttcgggcgctggctgccgttaggcatactcggttccagtttcctgttcggcgcatcttcgagcatggcggttaacattgttaatattgaaaaactccagtttctgccctcggaagtgttcagcatgatgccgtttttaattacattaataacccttgttctgttcagcggaaaggagacggcgcctaaggcgttgggccagaaggatttttag

SEQ ID NO: 13156 - protein, 255 aa, Unknown
  Obtained from environmental sample
  DOMAIN (1)...(237): Branched-chain amino acid transport system / permease component
  misc_feature (1)..(255): Xaa is any amino acid
MSLERLTPAIVHVILEPRQALSIPIALFLSALTGAFFSLFHAFASITLRXDQVVSGTGIILLANGLTVFVCQLIFRMDRSMNYRMGMRSGLFGLYPTIWIALIILAVSWFMLYKRPWGLRLRAAGEHPQALASAGVNVIKLRYAAVIISGLLAGLAGGCIVLTQDIQFTVSTINGKGFIALAAVSFGRWLPLGILGSSFLFGASSSMAVNIVNIEKLQFLPSEVFSMMPFLITLITLVLFSGKETAPKALGQKDF

SEQ ID NO: 13157 - DNA, 774 bp, Unknown
  Obtained from environmental sample
  misc_feature (1)..(774): n is a, c, g, or t
gtgcgggccgaatttttgtgctatgagaatttcacagggaattacggacacttgcaaatagcccttttaaaagcgtttaacaaacgtaagaatctacgagctacaaatgcttatagactttgcaacgggattgcagacggcttgaatggccttgttattgacaaatacgcaaaccattatcaaattcaatttttcacaccggaattttcagaatttgaaacagagatagtagaatttttaaaagaagtgtttaagccggaatttatcgcggtgaaatacaggtttatcaattacaagcaaattaaaaaggcatttggagataattcaaaaaccatcgtttgcgaaaacgatatcaaattcgccgttgatttattagacaccctgaacccgggtttatttttggatatgcgtgacgccagattattttttgcaaaaaactgcacggatagaaatgttctgaatttatttgcctacacctgttcttttgccctttatgccagaaagcacaaggcggctaaggcggtgaatgttgatatcagcaaaaagaatttgaacaaaggcaaggaaaattatctgttgaacgaaatagaaccgaacaaaggcgagtttttttgcggcagtgcggaagagtatattgactgggctataaaaaaagaaaagaaattcggaagcatagcaatagacccacccagttttgcaaagaacagcaaggagacttttagccttgcgaaagactttggcaattnagcgnagaaagcggtgaaaatttcttga

SEQ ID NO: 13158 - protein, 257 aa, Unknown
  Obtained from environmental sample
  misc_feature (1)..(257): Xaa is any amino acid
MRAEFLCYENFTGNYGHLQIALLKAFNKRKNLRATNAYRLCNGIADGLNGLVIDKYANHYQIQFFTPEFSEFETEIVEFLKEVFKPEFIAVKYRFINYKQIKKAFGDNSKTIVCENDIKFAVDLLDTLNPGLFLDMRDARLFFAKNCTDRNVLNLFAYTCSFALYARKHKAAKAVNVDISKKNLNKGKENYLLNEIEPNKGEFFCGSAEEYIDWAIKKEKKFGSIAIDPPSFAKNSKETFSLAKDFGNXAXKAVKIS

SEQ ID NO: 13159 - DNA, 582 bp, Unknown
  Obtained from environmental sample
  misc_feature (1)..(582): n is a, c, g, or t
gtgtactggttcaacgcgtcgggagtgcttctgtatttggtaaagatcgcgtccgaatcgattcccgcgtatcctgaatggccgcaggctataaccgcggtagaccatgtcgccgccgcggcagacgcgcggaaactctatataaaagttgactacagccgcgatacctttgatcaattaacaaataccagaacaggccccgagcctatcagttccattatctggattctggacattgaagacggcaacggcacttactcaagctcaatagaagtccctctttttgaaatttcagagaaccaccgttccgccggttttaaggtgttttattccatgattggcgttatgcgcggcggcaaggttcttctttattttccggttgacaacggtttttcaattctttttgtggattcacattccagcgaacagcgcagggggtatcttaatttctttattgacgaactcaggtacaacgactttttcctttcgccggacggcattctttgcgcgatgtttgcggataactttaacgtaaaactcctttggtggagaaccgataagtttataggcgtatcccaatga

SEQ ID NO: 13160 - protein, 193 aa, Unknown
  Obtained from environmental sample
  misc_feature (1)..(193): Xaa is any amino acid
MYWFNASGVLLYLVKIASESIPAYPEWPQAITAVDHVAAAADARKLYIKVDYSRDTFDQLTNTRTGPEPISSIIWILDIEDGNGTYSSSIEVPLFEISENHRSAGFKVFYSMIGVMRGGKVLLYFPVDNGFSILFVDSHSSEQRRGYLNFFIDELRYNDFFLSPDGILCAMFADNFNVKLLWWRTDKFIGVSQ

SEQ ID NO: 13161 - DNA, 921 bp, Unknown
  Obtained from environmental sample
  misc_feature (1)..(921): n is a, c, g, or t
ttgcgagctgatcattcggtgttaggcgataattcgacgatctcctgctgcgagatactcaataacctgatctttccggtgcacgaacagcaccacaacaactcttttttaatcgccagccttgttcagggacagtccaatatagcggccgccgccaccatcggcagcaaccacaacagcagggccaacgacggcgaattgcgcgcaagtcggggtttctggcccgggctggcggtgacattaaaacactccagcgtttttgcctcgtttgtcattatcgccaaaggggaatacccctcggaactcaacattcccctgccgttctccctggttaccaataatgtccataaaaaccggctggaactgtcccccgcgtacttctggcttcacaatttatacgcccttgagcgcaattcgtggaaatcccgcgcccgtgaccgccggataataaaactccagcatattgagactgattacctggcccccgacaccgcggaggagataatttccggcctttcaattcttgaaggctggctcgccgatgccggctattcgccaatggacttgcacgggcctgaaggggcccaggacatacgcgtgatcccgtgcagccatctggagcacagcaaacgcggccaggttattaagtatccgctcagggcaatcgccgcctaccgtcagatgcttcgctggtacgcggtcaaaaccatagctgttttttttgacagccggcccaatttggactatccgggcctctgctcgctattggccgccggaggggagaggataaacgactgggtaaatatgggcgggcagttaaccccggctttcanggtagataaactgcgccatgatattaccntcgggcaaatcaacacctggggcgatatacacaatgtgtatacattatggcaagaataa

SEQ ID NO: 13162 - protein, 306 aa, Unknown
  Obtained from environmental sample
  misc_feature (1)..(306): Xaa is any amino acid
MRADHSVLGDNSTISCCEILNNLIFPVHEQHHNNSFLIASLVQGQSNIAAAATIGSNHNSRANDGELRASRGFWPGLAVTLKHSSVFASFVIIAKGEYPSELNIPLPFSLVTNNVHKNRLELSPAYFWLHNLYALERNSWKSRARDRRIIKLQHIETDYLAPDTAEEIISGLSILEGWLADAGYSPMDLHGPEGAQDIRVIPCSHLEHSKRGQVIKYPLRAIAAYRQMLRWYAVKTIAVFFDSRPNLDYPGLCSLLAAGGERINDWVNMGGQLTPAFXVDKLRHDITXGQINTWGDIHNVYTLWQE

SEQ ID NO: 13163 - DNA, 735 bp, Unknown
  Obtained from environmental sample
  misc_feature (1)..(735): n is a, c, g, or t
gtgcggcttgaaatcttcaatggagcgacaatagaaaataccgccggtatagcgatatacaataattcgtccagcaccttaaacatttacggaggcacggtttcggcgacagggaccggcatagcggtagtcaacaattcctccggcgcgttaaacatttacggaggcacggtttctaaaatcggacctaccggcaacacgattaccaataataataccggtgcggtaactgtcttcggcggtacggtttcaagagacccaagtggtaacggcgtcacgattgagaacagtggcgccggctcaataactgtcgcaggcggcacggttaaggggccggtgatcaacgaattcacgggaacgatcaatatctccagcggcacgatttcggcggatggcaacgcgatttataacgagggcaacggcgcgataaacatcacaggcggtacggtttcgtcgaaaacgggtatagcggtacgcaaccagagccagggcagaattatcgtgtcgggcacggcaacgaaggttacatcggcaaacaatctcatcgacggtccaaacgcgggcacgattcttcttctgggcggcaccggcggctcagtgcttgaaatcaaaggcggcaccattgaaaatacctccccgagcggcatagcggtatacaacagaggatacacccggcttgatcggtatgacaggcggcacggnttcaacaacagggcccaacgccacttcatttag

SEQ ID NO: 13164 - protein, 244 aa, Unknown
  Obtained from environmental sample
  misc_feature (1)..(244): Xaa is any amino acid
MRLEIFNGATIENTAGIAIYNNSSSTLNIYGGTVSATGTGIAVVNNSSGALNIYGGTVSKIGPTGNTITNNNTGAVTVFGGTVSRDPSGNGVTIENSGAGSITVAGGTVKGPVINEFTGTINISSGTISADGNAIYNEGNGAINITGGTVSSKTGIAVRNQSQGRIIVSGTATKVTSANNLIDGPNAGTILLLGGTGGSVLEIKGGTIENTSPSGIAVYNRGYTRLDRYDRRHGFNNRAQRHFI

SEQ ID NO: 13165 - DNA, 714 bp, Unknown
  Obtained from environmental sample
  misc_feature (1)..(714): n is a, c, g, or t
atgncgttggcaatcgtaatctcaatggcaagtctgccgctgacaagctgcaataacggcaacggcgatggcctggaacccgacgttaaaaccctcgaaagtattagcgtgacaccgccaaccaaaaccgagtacaacatcggcgaagaattggacacgaccggtatggaggtaaccgcagcctacagcgacggcacatcagagacggtacctgaaactgactataccatcagcggctttgattctatcacggcgggaaataaaaccgtcaccgtaacgtataacggcaaaatcgcagaattttccgttaatgtaaccgacccgggacttgaaaccgtcgcaacgcccacggcctctccggaagccggaacctaccccacggcgcagagcgttactctgtccaccacaactgaagacgcaataatttactacaccctcgacggaacaacccccacaatcgcaagtactgaatattcggatacaatcagcatcagcgcgacaagtaccgtaaaagccattgccgttaaagagggcatgaacaactcaagcatgttggtggcggcgtatattataggcgcagcccccgaaatcaccacaacagcattgacaaacggaattccgggaataccatacagtgtgacgcttacggcaacaggaagcccgcctattacatggacacttgaaagncggaacattacnncggcaggttnttga

SEQ ID NO: 13166 - protein, 237 aa, Unknown
  Obtained from environmental sample
  SIGNAL (1)...(22)
  DOMAIN (38)...(105): Bacterial Ig-like domain (group 3)
  misc_feature (1)..(237): Xaa is any amino acid
MXLAIVISMASLPLTSCNNGNGDGLEPDVKTLESISVTPPTKTEYNIGEELDTTGMEVTAAYSDGTSETVPETDYTISGFDSITAGNKTVTVTYNGKIAEFSVNVTDPGLETVATPTASPEAGTYPTAQSVTLSTTTEDAIIYYTLDGTTPTIASTEYSDTISISATSTVKAIAVKEGMNNSSMLVAAYIIGAAPEITTTALTNGIPGIPYSVTLTATGSPPITWTLEXRNITXAGX

SEQ ID NO: 13167 - DNA, 444 bp, Unknown
  Obtained from environmental sample
  misc_feature (1)..(444): n is a, c, g, or t
gtgtggaggcaggggttggtgtccaagattgtgatgaccggcgggcttttggagtggacgaccgacgaggccgttccggaggcccgtagcatgtttgatttgatgagcgaacatttcggcgtggacagcgccgacgtgattcttgacagtatggcgcagaacactagagataacgccgtgtacacgcgagaggcgctggaagcggaagggcttgagcttgacattgtactggtgacgagcgcctaccacatgccgcgttcggtggcggttttcgaaaaagccggcttcatggtggcgcctgcccctataggctacttcgccgataaggaattcagtcaaaaaccgatcaggtggctacccacagtcacgtcgctccttgagtctacgattgcgctgcgcgagtatttggggatggtcgtctacaaggtggcggggtggatatga

SEQ ID NO: 13168 - protein, 147 aa, Unknown
  Obtained from environmental sample
  DOMAIN (1)...(138): DUF218 domain
  misc_feature (1)..(147): Xaa is any amino acid
MWRQGLVSKIVMTGGLLEWTTDEAVPEARSMFDLMSEHFGVDSADVILDSMAQNTRDNAVYTREALEAEGLELDIVLVTSAYHMPRSVAVFEKAGFMVAPAPIGYFADKEFSQKPIRWLPTVTSLLESTIALREYLGMVVYKVAGWI

SEQ ID NO: 13169 - DNA, 429 bp, Unknown
  Obtained from environmental sample
  misc_feature (1)..(429): n is a, c, g, or t
gtggatatgagcgtgcgcaacgactttcacgtgcactccaacgagtccgacgggcagctgagcccggagatgctgatagacgccgccataggaaacggcgtgtccgttatcgccatctgcgaccacgacaccaccgccggtgtgcggcgcttcgtgcagtacgggcgcagccgaggcataaacgccatatcgggaatcgaactctcggccaagtggcatggcgggaattgccaccttctgggccntacggtaaacgacggccacgaaccgctggagtcgctccttagaaagacgcgggagagccgcgacagggcgcacacccttattctggaaaaactctccgcgcctgggataaacataagccgcgaacagctgcaaagcgaggccggcggaaaagtcntggcccgccgcacatcggccacgcgttaa

SEQ ID NO: 13170 - protein, 142 aa, Unknown
  Obtained from environmental sample
  misc_feature (1)..(142): Xaa is any amino acid
MDMSVRNDFHVHSNESDGQLSPEMLIDAAIGNGVSVIAICDHDTTAGVRRFVQYGRSRGINAISGIELSAKWHGGNCHLLGXTVNDGHEPLESLLRKTRESRDRAHTLILEKLSAPGINISREQLQSEAGGKVXARRTSATR

SEQ ID NO: 13171 - DNA, 582 bp, Unknown
  Obtained from environmental sample
  misc_feature (1)..(582): n is a, c, g, or t
atgaaaaaagcagctctctacgatacactgtattacagggccctaggagcggacgaggattgcggcgggcttctttcctataattacttttccggtgaacatattaccggaattgaggaaggccgcccgctgttcgcacgaatgccagacagcagctttactctggcaaattttatgcggactctcctgttttccagcatggcaaccttaaagtacggcatagacatacttaccgaaaaagaaaaagtgcggatagacaaactgctgggccacggcggcctgttcaaaaccagaggcgtggggcagcgctttatggccgcggtctttaacgcgccggtttcggtaatggcgtccgcgggggaaggcggtgcctggggcattgcccttcttgccgcgtttatgcgcgaaggagggggggtgactttggaaagcttcctctctgacaaggtctttgccggaaagacaggcgcattgattgaacctaatccaaatgatgtgaagagttttattaaatttatggagcattataccgcgggactcaaaatcgaacaggccgcggttgaaaattttaaaaaggggtga

SEQ ID NO: 13172 - protein, 193 aa, Unknown
  Obtained from environmental sample
  misc_feature (1)..(193): Xaa is any amino acid
MKKAALYDTLYYRALGADEDCGGLLSYNYFSGEHITGIEEGRPLFARMPDSSFTLANFMRTLLFSSMATLKYGIDILTEKEKVRIDKLLGHGGLFKTRGVGQRFMAAVFNAPVSVMASAGEGGAWGIALLAAFMREGGGVTLESFLSDKVFAGKTGALIEPNPNDVKSFIKFMEHYTAGLKIEQAAVENFKKG

SEQ ID NO: 13173 - DNA, 798 bp, Unknown
  Obtained from environmental sample
  misc_feature (1)..(798): n is a, c, g, or t
gtgagttataaccatgatgtttctctgtgtgtcggttgtaaccggtgtattcgggtttgtcctgttgagggcgccaacattgtttttagtgaaaacggccagatcaaggtaagggtggattttaatcgatgtattgtgtgcggcgcgtgcattcatgcctgccggcacaaatgccgaggttatttcgacgataccgagcgttttctagacgatttgcagagcggtgtgcccatatccattttcgccgcgccggctaaccgcgccaacggcgagaattgggggcgtctattgacgtggctcagacagatgggggtgaagaagatattcgatgtttcggttggggcggatatctgcacgtgggcgcatatccgttacatccagagggagtctccggcgtccgtcatcacgcagccttgtccggccatagtgaactatatccttctgcataggcatgaattggtttcgtatctctcgccggtgcatagccctatgctgtgtacggcgatttttatgaaaaagtatgagaacataaccgacaatatcgccgccctgtccccttgcatagccaaggcccacgagttcgacgccacccagtacgtgcactacaacgtgacgcttaaaaagctctacgaatatatcaaaaagcatggaataatgctgccccatgaagaatcagggttcgatcacgcggagtcgtcgctagggtgcttgtactccatgccgggcggaatgcgggaaaacgtggagctgtacttangcaaagcgttgcgcatagacaatccgaangccaaagcatag

SEQ ID NO: 13174 - protein, 265 aa, Unknown
  Obtained from environmental sample
  DOMAIN (37)...(60): 4Fe-4S binding domain
  misc_feature (1)..(265): Xaa is any amino acid
MSYNHDVSLCVGCNRCIRVCPVEGANIVFSENGQIKVRVDFNRCIVCGACIHACRHKCRGYFDDTERFLDDLQSGVPISIFAAPANRANGENWGRLLTWLRQMGVKKIFDVSVGADICTWAHIRYIQRESPASVITQPCPAIVNYILLHRHELVSYLSPVHSPMLCTAIFMKKYENITDNIAALSPCIAKAHEFDATQYVHYNVTLKKLYEYIKKHGIMLPHEESGFDHAESSLGCLYSMPGGMRENVELYLXKALRIDNPXAKA

SEQ ID NO: 13175 - DNA, 663 bp, Unknown
  Obtained from environmental sample
  misc_feature (1)..(663): n is a, c, g, or t
ttgatagcagttgaaaacggaggagcgccaaaacacactttcgacaataaatcaggaagtattcttttttccttccctttatacgattcttttgatatttactgcggtacagctttgttttccctctctatagatgccatattggagaagcttttcagtgagggaaggataatatccagccatgaaataatcttgattcaaaagccgccgggaatggtatttgggaccatgaccgccgatgaatgggttatgccaggccaaatttcatcagtttgggaaacaacggggctaaaaactgccagagtcctttctaatgattcaggcgtcccatatatcctggtatcaaccaaaacatcccaggatttatttatcggaagcctcattaaggaagaattatacctgttcccgtggaacatgaagcttcttctcctggtttctttctttataacggtgtacctcacgattttcctgctgttcagtatcaaacaagagcctgtcacaataattcanaaccggcttaaacgcctgcaagtttcacttttgggacagttttatgaaacaaaggacgaagaagactggaacccgctgggtaagggaactgagacatcgcagggaagaaacaagcgctctgntaaaacaggttattcggacccgcttccgtaa

SEQ ID NO: 13176 - protein, 220 aa, Unknown
  Obtained from environmental sample
  misc_feature (1)..(220): Xaa is any amino acid
MIAVENGGAPKHTFDNKSGSILFSFPLYDSFDIYCGTALFSLSIDAILEKLFSEGRIISSHEIILIQKPPGMVFGTMTADEWVMPGQISSVWETTGLKTARVLSNDSGVPYILVSTKTSQDLFIGSLIKEELYLFPWNMKLLLLVSFFITVYLTIFLLFSIKQEPVTIIXNRLKRLQVSLLGQFYETKDEEDWNPLGKGTETSQGRNKRSXKTGYSDPLP

SEQ ID NO: 13177 - DNA, 315 bp, Unknown
  Obtained from environmental sample
  misc_feature (1)..(315): n is a, c, g, or t
atggaaattttaaaacgcgaagaactgatgagtaccgccatcggctgcggaatagccattccgcatgtgcgcctttcctcggtaactgatcttattgtttctgtaggaattagccgtacagatattgtagattttaatccgttggatgatgagccggtgcgccttgttttcatgatcacggccgctcaaaatcagcatacatattatttacagacgctttcctggtttagctcccgccttaaaaacaaagatctgcgggattcgcttctggcggcgaagaccccgcaggaagtttacgatttgctgacggcgtaa

SEQ ID NO: 13178 - protein, 104 aa, Unknown
  Obtained from environmental sample
  misc_feature (1)..(104): Xaa is any amino acid
MEILKREELMSTAIGCGIAIPHVRLSSVTDLIVSVGISRTDIVDFNPLDDEPVRLVFMITAAQNQHTYYLQTLSWFSSRLKNKDLRDSLLAAKTPQEVYDLLTA

SEQ ID NO: 13179 - DNA, 537 bp, Unknown
  Obtained from environmental sample
  misc_feature (1)..(537): n is a, c, g, or t
gtgtttatagaacgtgaatttagattctttcaactatatacaaattcttcgtactggcagaacgcgtggaaacgctattacaggcttgtttaccgagattcctatgatcgtataacgaacccggtattgccacttgcgcgtaatttgggcggatacaatgccaataccgccgaaaagaagaaagaattcgcgcaaagagctctggattttgtacagagctttgaatacaaacgtaatttaaacggaagtgattttattaatctggtaagcgccgtcaccgaaagatcaggcgactgcgacagccgttccatgctttgggcaataattcttatacatgcggatattcgcgcatctatgatggtttctcctcaatacgaccatgccatggggcttgcggatattgaaggaaacggctctcgttttgaacattcagggatcaactggcttgtagctgaaacaacagataatgtagatattggccttattgacagagaacaaagtgatccgcgcaactggataggggttttatttgagtaa

SEQ ID NO: 13180 - protein, 178 aa, Unknown
  Obtained from environmental sample
  misc_feature (1)..(178): Xaa is any amino acid
MFIEREFRFFQLYTNSSYWQNAWKRYYRLVYRDSYDRITNPVLPLARNLGGYNANTAEKKKEFAQRALDFVQSFEYKRNLNGSDFINLVSAVTERSGDCDSRSMLWAIILIHADIRASMMVSPQYDHAMGLADIEGNGSRFEHSGINWLVAETTDNVDIGLIDREQSDPRNWIGVLFE

SEQ ID NO: 13181 - DNA, 957 bp, Unknown
  Obtained from environmental sample
  misc_feature (1)..(957): n is a, c, g, or t
atgattcgcgttgctgcttatgttagcattgctatgcttatagcggtaatcatagtggcggtaattatgtccttatccatcagcaagcctattgtcaaggtgaccaaaaccattaaaaatatttccgaaggggaaggcgatttaaccaaaagaatagagactcgtgctggaggcgaagtaggcactttggtgaattatttcaataagctaatggatactctccaatatcccattagagaaaccaaaatgaccgtgaatggcttgtctgctgctgcagataaactttcttctgtttctaaacacctatccgaaacctcaaaagaaacggtaaaccaaattaccaatgctgcaagtactgccgaacaagtggcaacgaatgcaaaagcaatggcaagtggcgcggaacaagcgagcgttagcgcaagtgaagtagccagcaccacagagcaaatggcagtgaatatcaacgcaatggcaaacggtgccaaacaggctagccttaacgcaagcgaagtagctggcgcggcagagcaaatgtctgtgaatatgaatacaatagcctctgcaattgaagagatgagcgcaagcataaggcaaattgcagacaatgctggtgaggcacgccacgttgcaaatgatgcaactatgaaatcttccgatgcaacagctgcaataaacaaactcggcatagcagccaaggaaattgggaaggtcaccaatgttatcaaaaaaattgcaaacaaaacaaatcttttggctttaaatgctaccattcaagctgctggtgcaggcgaagccggcaagggttttgctgtagtggcaagcgaaatcaaagaacttgcccatcagagtgcccaaagcgcagacgagatagccaaccgcatagaaggagttcagaacgaaacctatgcgacagtgaagttatacaccagggaagcggcattattattaaaataa

SEQ ID NO: 13182 - protein, 318 aa, Unknown
  Obtained from environmental sample
  SIGNAL (1)...(28)
  DOMAIN (163)...(318): Methyl-accepting chemotaxis protein (MCP) signaling domain
  misc_feature (1)..(318): Xaa is any amino acid
MIRVAAYVSIAMLIAVIIVAVIMSLSISKPIVKVTKTIKNISEGEGDLTKRIETRAGGEVGTLVNYFNKLMDTLQYPIRETKMTVNGLSAAADKLSSVSKHLSETSKETVNQITNAASTAEQVATNAKAMASGAEQASVSASEVASTTEQMAVNINAMANGAKQASLNASEVAGAAEQMSVNMNTIASAIEEMSASIRQIADNAGEARHVANDATMKSSDATAAINKLGIAAKEIGKVTNVIKKIANKTNLLALNATIQAAGAGEAGKGFAVVASEIKELAHQSAQSADEIANRIEGVQNETYATVKLYTREAALLLK

SEQ ID NO: 13183 - DNA, 480 bp, Unknown
  Obtained from environmental sample
  misc_feature (1)..(480): n is a, c, g, or t
atgaaactcgcccagnaaatgaagncgaagnnnaacgnaacntnntgnttntggaanaatttttttttgggggnggggggttttttttttttttgccccccaaaggggggtttttttttctttttcctcaaaaaaaggggggggctttttttcaagggggggggaaaaaaaaatttttttttcccccccacaaaaaaaaaagggttttttttttttccccgcgcgcggggggggggtgtcctcccccccccccccgggggggggggcggggcccccccctcctttttttttttttttttggtgaaaaaaaaaaaaaaaaaaagggggggggggaagaacattttttttctttttttttttttttttttnaaaaaaaaaaaaaaaaaaaaaaaaaaaaccccccgcccgggggggggggggggggggtttttttttttttttttttttttaaaaannnnaaaaaaaaaaaaaaanatttaa

SEQ ID NO: 13184 - protein, 159 aa, Unknown
  Obtained from environmental sample
  misc_feature (1)..(159): Xaa is any amino acid
MKLAQXMKXKXNXTXXXWXNFFLGXGGFFFFCPPKGGFFFFFLKKRGGLFFKGGGKKNFFFPPTKKKGFFFFPRARGGGVLPPPPGGGGGAPPSFFFFFLVKKKKKKRGGGKNIFFLFFFFFXKKKKKKKKKTPRPGGGGGGFFFFFFFLKXXKKKKXI

SEQ ID NO: 13185 - DNA, 498 bp, Unknown
  Obtained from environmental sample
  misc_feature (1)..(498): n is a, c, g, or t
ttgttgttntttttctccccccgnccctcccaagnggagggggaggaggggaaagaaaattnnnntttnnncttntttnntttgntgtggggggggggggtgggtcggggnntttnnncnccccccccccgcccgcgcgggggaagaaaaaaaaaaaaaaaaaaaaaatttaaatntttttttttttttttnnnntttttaaaaaaaaaaaaaaaaaaaaaaacccccccccccccccccccgggcggggggttttttttttttttttttttttttttttnaaaaaaaaaaaaaaaaaaagaaaaaaaatgttcttccccccccccctttttttttttttttttttcaccaaaaaaaaaaaaaaaaaggaggggggggccccgcccccccccccgggggggggggggaggacaccccccccccgcgcgcggggaaaaaaaaaaaacccttttttttttgtgggggggaaaaaaaaatttttttttcccccccccttga

SEQ ID NO: 13186 - protein, 165 aa, Unknown
  Obtained from environmental sample
  misc_feature (1)..(165): Xaa is any amino acid
MLXFFSPRPSQXEGEEGKENXXXXXFXLXWGGGVGRGXXXPPPRPRGGRKKKKKKKFKXFFFFXXFLKKKKKKKTPPPPPPGGGFFFFFFFFFXKKKKKKEKKCSSPPPFFFFFFSPKKKKKRRGGPRPPPRGGGGGHPPPARGEKKKTLFFLWGGKKNFFFPPP

SEQ ID NO: 13187 - DNA, 882 bp, Unknown
  Obtained from environmental sample
  misc_feature (1)..(882): n is a, c, g, or t
ttgattgcgagacttttcggcacaatgcgccagcggtacgggcgagttcttaaaacacagcttgcacgcatggacatgactctcgatgatatcgacaaagtgccggataccgcgaaagtgtatccgctttccacgcgctgttccgtgtttatgaaaagcgactgcacccaccgcctgaacaagcgcgaagcgacaaaggacgacattgttctttcgctctccgatgtcatggcggtaaaggttatcgacttcttaaagcgggcgaaggtaacgtccggcagggtagtgctctcaggcggaattacgcttaacaggcacattatccgctttatacgcgaaaaagcgccgcagattgaatttatcatccccgaaaccgcccctgtttttgaagcgctgggagcggcagtgctcgcgaaacagtcgggaagcagtctgcctaaggcggacaagctgttaaggcacaacgacgtccgtttcggagttttgggcgcgttacgcgattggcaaagtaaggtaaagttttttgacaagccggacggcaaggtttacgccggacgctcttacatacttggggttgacggcggttccaccacgacaaaagcgtgccttgtggacatgcaaaccgacgaaatcgccgcaagccattacgggcgcacacacggcgatcccgttaaagcccttaaagaatgtctttcgattattcaggaaaaagttatcgccgacacgggcgggaaaaacatcgacatacgccttgtcgccacaacgggttcaagccgtgagattttgggcgtgtttctggaaactcccggcgtttataacgagattatagcccacttcgtaggcactacctactttgacaaagaggtgaaaactattttttga

SEQ ID NO: 13188 - protein, 293 aa, Unknown
  Obtained from environmental sample
  misc_feature (1)..(293): Xaa is any amino acid
MIARLFGTMRQRYGRVLKTQLARMDMTLDDIDKVPDTAKVYPLSTRCSVFMKSDCTHRLNKREATKDDIVLSLSDVMAVKVIDFLKRAKVTSGRVVLSGGITLNRHIIRFIREKAPQIEFIIPETAPVFEALGAAVLAKQSGSSLPKADKLLRHNDVRFGVLGALRDWQSKVKFFDKPDGKVYAGRSYILGVDGGSTTTKACLVDMQTDEIAASHYGRTHGDPVKALKECLSIIQEKVIADTGGKNIDIRLVATTGSSREILGVFLETPGVYNEIIAHFVGTTYFDKEVKTIF

SEQ ID NO: 13189 - DNA, 861 bp, Unknown
  Obtained from environmental sample
  misc_feature (1)..(861): n is a, c, g, or t
gtgcgtttcagaatgaggagcatacaacaaactctgcaagtaaccaaagcaatgaatctatttcaactgcaaaatgcggaagagcnggcgtacctgcaagacatggaaccgtattttaccagaatccaaaaggcaatgttcgatatcctttcgggaacaataatggaaagaagcagattcattaacccttatggaaacgccgattcctcccgcaccgccatnatagtcataaccagcgacaagggtttggcagggggctataacgcgaacatttttcaccaggtaaatcagctctgcgcaaaagtcaaaaatccggtgctcatccttatcgggtccattgggtatcggtacttcatccattccccttggctcattttagaaaatttttctttcaaggcccgtatgcctgatctggacgatgcgaaggaaatcgctgaattcatcatttcccagtatctttggggtatgtttgatgaagttcatattgtgtatacccacatgtatagctcagttaaacttgttcccagagaacggcagatcctgcccctgaatccaaagattatccagcaagaatttgcaaaagatggggaaaaacggaaggtgtatcatttaggatactggccttccacaaggaaagtgttcgacgcgctggttcccatgtacgtaaaaggggtgctttttggctctttgattgaagcttatgccagcgaacaaagcgctcgtatgtccgccatggatgaggcaagcaaaaacgccgaggaaatgcttacagatctaaaagtttactataaccgggcacggcaggcgagtatcacccaggagatgacggagatcattggcggcgctgaaactttaagttaa

SEQ ID NO: 13190 - protein, 286 aa, Unknown
  Obtained from environmental sample
  DOMAIN (2)...(285): ATP synthase
  misc_feature (1)..(286): Xaa is any amino acid
MRFRMRSIQQTLQVTKAMNLFQLQNAEEXAYLQDMEPYFTRIQKAMFDILSGTIMERSRFINPYGNADSSRTAXIVITSDKGLAGGYNANIFHQVNQLCAKVKNPVLILIGSIGYRYFIHSPWLILENFSFKARMPDLDDAKEIAEFIISQYLWGMFDEVHIVYTHMYSSVKLVPRERQILPLNPKIIQQEFAKDGEKRKVYHLGYWPSTRKVFDALVPMYVKGVLFGSLIEAYASEQSARMSAMDEASKNAEEMLTDLKVYYNRARQASITQEMTEIIGGAETLS

SEQ ID NO: 13191 - DNA, 891 bp, Unknown
  Obtained from environmental sample
  misc_feature (1)..(891): n is a, c, g, or t
ttgatcagatcggccgagacgagttgtgttctccgggaaacctgcatgctgcaccttgccacaaagacagacccctcgccgcttggcaaatacccctatatttcaaatatcaagggaggtgaaatcatacccgcggcgggacttggaatttccgctttcggccatgtttatattccgcccattatcgcggcgtttatcggcgcggatataacgtcaggaatctttatatcaaaattgaaggagaaaaagggaaagaccctttttattgacatagggacaaacggggaaattgtaatggcggataacggccgtcttgccgccgcctctaccgctgcgggcccggcttttgaaggaatgaacataacctgcggtatgcgcgcggctcccggagcggtggaacagtttgccataacagatgaaaaaggaaattttactttcaacactatcggcggcggcaaagcggagggtatttgcggaagcgggctttttgatataacgggagagcttgtaagaacaggcgtaattgacaagacaggcaggttcgagaaatcctatcctctgctcaaggaacataacggcaggcctgcattttttattacagataacgtattttttacattgcaggatatacggcagatgcagctcgccaaaggcgctataagggccggcattacgacgcttttaaacaaactggggcttgagcctgatgacattgacgaagcgctgattgccggttctttcggttatcatctttcggaaaacagcctgtttaacatagggctgcttccgcctgaattacggggaaaaataaaatttttaggcaatacatcgcaatccggcgcaacggcgttcctgctgaatgtggatttcagggaaacatccatgcaataa

SEQ ID NO: 13192 - protein, 296 aa, Unknown
  Obtained from environmental sample
  misc_feature (1)..(296): Xaa is any amino acid
MIRSAETSCVLRETCMLHLATKTDPSPLGKYPYISNIKGGEIIPAAGLGISAFGHVYIPPIIAAFIGADITSGIFISKLKEKKGKTLFIDIGTNGEIVMADNGRLAAASTAAGPAFEGMNITCGMRAAPGAVEQFAITDEKGNFTFNTIGGGKAEGICGSGLFDITGELVRTGVIDKTGRFEKSYPLLKEHNGRPAFFITDNVFFTLQDIRQMQLAKGAIRAGITTLLNKLGLEPDDIDEALIAGSFGYHLSENSLFNIGLLPPELRGKIKFLGNTSQSGATAFLLNVDFRETSMQ

SEQ ID NO: 13193 - DNA, 525 bp, Unknown
  Obtained from environmental sample
  misc_feature (1)..(525): n is a, c, g, or t
atgtttccgttcatagagcaagcggtaaacgaccttaccgtctcccgcgagaccatcatatcgaatcctgacgtcctgctgtcgcaacccatagacgaccccacgcagagaacctacgtgcaaaagaaactcgtcccgcagctgcaagtggcgcaacgctaccaaggcatagtctcgcagaagtcaaagcggagggtaaaacttggcgaggtaaaagagggcgcggtggtctccggccgggtaacgaacataaccccgttcggcgtgttcgtaaacataaacgccgtctgcgacggactgatccacatctcgcagctgaccgaccaatacgtggaaacgccggaccaagtcgtctcggtgggggacagggtggacgtgcgcatactgaaagtagacacaaagaaacgcagaatctcgctgtcgttgaaaaatataggcggcgttggaaaattggccggagggtctaaggtcaagcccaccaaagggcaattggacaatttggcggagcacttcaagaacaggtag

SEQ ID NO: 13194 - protein, 174 aa, Unknown
  Obtained from environmental sample
  DOMAIN (70)...(143): S1 RNA binding domain
  misc_feature (1)..(174): Xaa is any amino acid
MFPFIEQAVNDLTVSRETIISNPDVLLSQPIDDPTQRTYVQKKLVPQLQVAQRYQGIVSQKSKRRVKLGEVKEGAVVSGRVTNITPFGVFVNINAVCDGLIHISQLTDQYVETPDQVVSVGDRVDVRILKVDTKKRRISLSLKNIGGVGKLAGGSKVKPTKGQLDNLAEHFKNR

SEQ ID NO: 13195 - DNA, 348 bp, Unknown
  Obtained from environmental sample
  misc_feature (1)..(348): n is a, c, g, or t
gtgaccgagtgcgcccacagcaatgtccacatcatcaaaaacggcaggttcatcacccatccggcggacaacctgatcctccggggcatagcccgcagtcatttattgcaagcctgcgacaggctggacattccggtcgacgaacgggagtttaccctttcggaactgtttgaggcggacgaggtgcttgcgtccagttgcgacactttcggcctttccgccgaaacaatcgacggaaaaaacgttggaggaaaagcgccggaactgctgaaaaaaattcaggacgaagtgatgaaggaatttaccgaagagacaggctacgcacctgcctggagcaagaaagcatag

SEQ ID NO: 13196 - protein, 115 aa, Unknown
  Obtained from environmental sample
  misc_feature (1)..(115): Xaa is any amino acid
MTECAHSNVHIIKNGRFITHPADNLILRGIARSHLLQACDRLDIPVDEREFTLSELFEADEVLASSCDTFGLSAETIDGKNVGGKAPELLKKIQDEVMKEFTEETGYAPAWSKKA

SEQ ID NO: 13197 - DNA, 519 bp, Unknown
  Obtained from environmental sample
  misc_feature (1)..(519): n is a, c, g, or t
atgcgtatancagcaggcgatttgcgggggcgtgccttgttgcccgtgaaagacaaagcagttcgccccacatcttcaaaaaccagagaagcccttttcaacatcattggctgcgttcaaggctttaaggttttggatttatacgccggcactggctccgtgggttttgaagccatatcaagaggtgcaagctcggttgcaatggtggaaatttcaagcaacctgttgcaagccataaaagaaaccgcagagaaatggaaaatagcagagaaagtaatttgccacagaaacgatgttctgcgctttgcagcacaaaattcacagtccccagaaaaatacgatttaattttcgcagatccgccattcaataaagaatatcccgacctcagaatctttttgccaagattgaatgaaggtggctttgccgtttttgaagttccctccagagcaatgccagtatgggcaggtgaagcaaaaaagtcaagaagctatggggagtctagcctgctgattttctaa

SEQ ID NO: 13198 - protein, 172 aa, Unknown
  Obtained from environmental sample
  DOMAIN (1)...(172): Conserved hypothetical protein 95
  misc_feature (1)..(172): Xaa is any amino acid
MRIXAGDLRGRALLPVKDKAVRPTSSKTREALFNIIGCVQGFKVLDLYAGTGSVGFEAISRGASSVAMVEISSNLLQAIKETAEKWKIAEKVICHRNDVLRFAAQNSQSPEKYDLIFADPPFNKEYPDLRIFLPRLNEGGFAVFEVPSRAMPVWAGEAKKSRSYGESSLLIF

SEQ ID NO: 13199 - DNA, 483 bp, Unknown
  Obtained from environmental sample
  misc_feature (1)..(483): n is a, c, g, or t
gtggatggagttagctccttaggctttgggcttatgagtatgggggagcgagtttatggttctgcaacccccaaaggcataatgaatcttttggagcattataaaattcccttggaaggcaagcacgccgttgtggttgggcgtagtgctattttgggcaagccaatggcggcaatgctcttgaataaaaactgcacagttacaatatgccacagcaaaacccaaaatttgccgcgcataatagggcaagcagatatcgtggttggcgcggttggaataccggaattcataaaagccgagtggctgaaaaacggagcggtagccattgatgcgggctatcataacggcgggataggcgatattcaaaaagatggattaagcgacaaatgctctgcatacacgcccgtacctggtggtgttggaccgatgaccatctcaacgctgattatgcaaacagtggaaagcgcggaaaaattttcttag

SEQ ID NO: 13200 - protein, 160 aa, Unknown
  Obtained from environmental sample
  DOMAIN (5)...(160): Tetrahydrofolate dehydrogenase/cyclohydrolase, NAD(P)-binding domain
  misc_feature (1)..(160): Xaa is any amino acid
MDGVSSLGFGLMSMGERVYGSATPKGIMNLLEHYKIPLEGKHAVVVGRSAILGKPMAAMLLNKNCTVTICHSKTQNLPRIIGQADIVVGAVGIPEFIKAEWLKNGAVAIDAGYHNGGIGDIQKDGLSDKCSAYTPVPGGVGPMTISTLIMQTVESAEKFS

SEQ ID NO: 13201 - DNA, 312 bp, Unknown
  Obtained from environmental sample
  misc_feature (1)..(312): n is a, c, g, or t
gtgaatacaaccattgtgccgcagagaactgatgtacatatagtgaacccaacaaacctatttaaagagcgtttgtatagagagcaaatcggtttttgcaatggttgcaaaaaacaatttgagattcgcaatttggaaattgaccacattgttccaaaatcaaagggcggcggcagttattacgaaaattatcagttgctgtgcggagcttgcaatagaaaaaaaggcgacagaccaatggaatacctgcgaatgaaaatagacaaagaagaggaattgctaaagaacaaaataatttttggagaaatctaa

SEQ ID NO: 13202 - protein, 103 aa, Unknown
  Obtained from environmental sample
  DOMAIN (31)...(79): HNH endonuclease
  misc_feature (1)..(103): Xaa is any amino acid
MNTTIVPQRTDVHIVNPTNLFKERLYREQIGFCNGCKKQFEIRNLEIDHIVPKSKGGGSYYENYQLLCGACNRKKGDRPMEYLRMKIDKEEELLKNKIIFGEI

SEQ ID NO: 13203 - DNA, 777 bp, Unknown
  Obtained from environmental sample
  misc_feature (1)..(777): n is a, c, g, or t
atgatcattgatnatatcataantattctgatgggaaaaaatttgttattcgctccnggagagaatgtcgattatacgataatatccgtatgtatttccgcgctatggaaatggggagacaactcgtcttatcccgctctnttttccgttctctacgccgggtatcctgaagtaattatttccgaggcgcaaggcgcgttggaattaatttccggaaacctgcagcaatttcttgtaaacataataacgcataatccgcccgaagaaaaatttgccgcttttacaatgggaatgaacagcgacagattaactgtatctcagcgcggacagcttgcggaacttgcgcttgaacagggattaacttccacagatgacaatatcgatcttaccgctatgcgctattcgtcggttttactgcttacgcggcttagatggacgcgcgcaaacgctctggcgatacgtcactattaccgcgtgcaatccgattaccttctgaatcccgcgcaaaaggaaagatttatcgaggcgattacatgtctcggcgcggttggaaattccgacgcggctcttgtgcttggtttgcagcttggacttatcaacgccagaacggaaagcacgggaacttatgatccggaaataacaatggcgattgtacaagctttaggacgaatcggctataatgccgcgtttgatcatttattaaatgtcagtaatttatcgtaccccgaagagattcaagccgcggcaagggaggcggttgctcgccttaaatggtaa

SEQ ID NO: 13204 - protein, 258 aa, Unknown
  Obtained from environmental sample
  misc_feature (1)..(258): Xaa is any amino acid
MIIDXIIXILMGKNLLFAPGENVDYTIISVCISALWKWGDNSSYPALFSVLYAGYPEVIISEAQGALELISGNLQQFLVNIITHNPPEEKFAAFTMGMNSDRLTVSQRGQLAELALEQGLTSTDDNIDLTAMRYSSVLLLTRLRWTRANALAIRHYYRVQSDYLLNPAQKERFIEAITCLGAVGNSDAALVLGLQLGLINARTESTGTYDPEITMAIVQALGRIGYNAAFDHLLNVSNLSYPEEIQAAAREAVARLKW

SEQ ID NO: 13205 - DNA, 621 bp, Unknown
  Obtained from environmental sample
  misc_feature (1)..(621): n is a, c, g, or t
ttgttattttatatttgttatttattatttatgatttgttcggtttttcatcttaacataattggttttaaagcggcggttgccgcggttaaggataaaaatcttcgttttcgcccttatgtgatagcgggaacggcgggagggcgaagccttgcccttgactgttcgccggaagccgttaagcaggggattatgccaggtatggcgttggctgtggcgcagaggcaggttaaagatttaattgttctttctcccgatattcaggcttatcaggttatgaacaatgaattggagaaggtggcggaacgatatgccccggtttgggaaaatgataagatggggaatttatttttggacataacgggcacgtcaagaatattcggtcctcccgccgattgttcaagccggatactgcgggaaattaatgagcaagcgggaataaaacccgccgccgcagttgcgtctaacaaacttgtgtctaaggtcgcgancagaaccattagaccgatgggattgatacagatatataacggaaacgaagcggaanttttatcccatcangatatacggattttgcccggcatggngcagaaacttttaaggacngcttctatcgtttga

SEQ ID NO: 13206 - protein, 206 aa, Unknown
  Obtained from environmental sample
  misc_feature (1)..(206): Xaa is any amino acid
MLFYICYLLFMICSVFHLNIIGFKAAVAAVKDKNLRFRPYVIAGTAGGRSLALDCSPEAVKQGIMPGMALAVAQRQVKDLIVLSPDIQAYQVMNNELEKVAERYAPVWENDKMGNLFLDITGTSRIFGPPADCSSRILREINEQAGIKPAAAVASNKLVSKVAXRTIRPMGLIQIYNGNEAEXLSHXDIRILPGMXQKLLRTASIV

SEQ ID NO: 13207 - DNA, 723 bp, Unknown
  Obtained from environmental sample
  misc_feature (1)..(723): n is a, c, g, or t
atgtattccaatttccagcaatcggaagaagatataagacaggaagtgaatctaaaaatctttgtgttcatctgtgtatgtatagtggcattttccattttgctcataaggcttttgcagctgcaatactttgaatacgataacaacctcaaaagagccgaagaaaaccgcattcgcaaggttaatataaaagcaaatcgcggccttattttagatcgcaacggagttgttttggttcgcaacagaccctcttaccaaatatcccttatgtatagcggatttaaaaacaaagaaattagggattccgtttttgagaggcttttaaagataaaggacggcaacggaaaacgcctgttggattccgcggcactcgcattttcctttgagcgtggcaggtggcaaaaattcaggtttcagaggcttatagaagatgcagcgcccgaagttgttgcgctatttgaagaacacagcgaggagttgcccggcattgaaattttggttgagtcgcgcagggattatccctttgggatgtatggcgcacacgtgtttggctataccagcgaaatatccgaacaggaacttgaacttccagaanatgctcattatgtaatgggagatcgcataggcaaaaagggtttggaactcagctatgaacaggaattcagaggaaacaacgggcttaggtttgtagaggtaaacgcaatggggcgtgagatggaatag

SEQ ID NO: 13208 - protein, 240 aa, Unknown
  Obtained from environmental sample
  DOMAIN (62)...(240): Penicillin-binding Protein dimerisation domain
  misc_feature (1)..(240): Xaa is any amino acid
MYSNFQQSEEDIRQEVNLKIFVFICVCIVAFSILLIRLLQLQYFEYDNNLKRAEENRIRKVNIKANRGLILDRNGVVLVRNRPSYQISLMYSGFKNKEIRDSVFERLLKIKDGNGKRLLDSAALAFSFERGRWQKFRFQRLIEDAAPEVVALFEEHSEELPGIEILVESRRDYPFGMYGAHVFGYTSEISEQELELPEXAHYVMGDRIGKKGLELSYEQEFRGNNGLRFVEVNAMGREME

SEQ ID NO: 13209 - DNA, 795 bp, Unknown
  Obtained from environmental sample
  misc_feature (1)..(795): n is a, c, g, or t
gtgcgttttgcaatcgccattgtggttcttttttttatgtatcgcttttctccggaatggcatggcgcaaacaggatgcttaagtcggatatgctcctgttaataggttcaggtttgacaggggttactttttattttttctttgaaaacaacggcgtggcgcgggttaccgcatcggaagcttcaattattacagcggcaattcctgtgcttacaatgatcgctgattggcttgcggcaaaatcatcattacataaaaatgcggctcgtcttggctggcaatcatggttaggagcgtttatttcaattaccggagtcgcattggttgccggagtttcattttctctttcggggagtatatcaggttatgtttatatgggaggagccgcattgtgctgggttggctacagctttcttactcgtcctctctttgacaggaaacgatcccgtctctatattgtattctggcaaaatttttttgggtttctgggattacttccttttgccatgcttgaatacaaaaactggggcgatcccacattaccggtcatgcttcatgtgctctttcttgcgctgggttgttctgctcttggatactggctctacgcttacgcaatggaagcgctgggagtatcaacaacgtcggtatttatcaatttaattccggtagtaacggtgattgccggattcatcgtcctgcatgaaaggcttgcccttctgcaaggagcgggagccgtgctggttcttgtcggggtatatttgacatactggcgcagcgcgaataatgccttttag

SEQ ID NO: 13210 - protein, 264 aa, Unknown
  Obtained from environmental sample
  DOMAIN (131)...(257): Integral membrane protein DUF6
  misc_feature (1)..(264): Xaa is any amino acid
MRFAIAIVVLFFMYRFSPEWHGANRMLKSDMLLLIGSGLTGVTFYFFFENNGVARVTASEASIITAAIPVLTMIADWLAAKSSLHKNAARLGWQSWLGAFISITGVALVAGVSFSLSGSISGYVYMGGAALCWVGYSFLTRPLFDRKRSRLYIVFWQNFFGFLGLLPFAMLEYKNWGDPTLPVMLHVLFLALGCSALGYWLYAYAMEALGVSTTSVFINLIPVVTVIAGFIVLHERLALLQGAGAVLVLVGVYLTYWRSANNAF

SEQ ID NO: 13211 - DNA, 729 bp, Unknown
  Obtained from environmental sample
  misc_feature (1)..(729): n is a, c, g, or t
atgagtacagaagaaaacaaatcgcatgcgaacgcacaggggggcggcgcggaggcggctgccacgaaagcggtcagggagtttgacccgccctttntgcacctctccacaccgccgcacatacgttcgaacttaacggtgtccaagatcatgctgttcgtgattgtcgccttgatgcccgcgctggccgcgtcggtagtttttttcggcgtggaagcggcattgctcccgattttggtatgcatcgtcgcggccgtggctacggaatgcgtcgccaaccttatacttaggaagagtcagacggcgggcgactttagcgcggtggtcacgggattgctcgtcgctttcaacctccccccaagcctgccgttgtggatggcggctttaggctctgttttcgccatagccgtggccaaaatggttttcggcggtctcggttgcaacttcataaaccccgcccttgccggtcgggcgttcttagtggccagctatccggcgcccatgacaagctacccgcctacgctctacggtagcgtaaacgcggtggcggccaaagcgccgaccgcgctctccgacgccgtctcggcggcgacatcttcatccgcgtcgacatcggcggcggattccttaaaggacgccttaggcgcggcggcggactccttggcggatacggcggccttagcggccagcaggctcgcggacacggtctcggcggccgctcggccataa

SEQ ID NO: 13212 - protein, 242 aa, Unknown
  Obtained from environmental sample
  DOMAIN (32)...(242): NQR2, RnfD, RnfE family
  misc_feature (1)..(242): Xaa is any amino acid
MSTEENKSHANAQGGGAEAAATKAVREFDPPFXHLSTPPHIRSNLTVSKIMLFVIVALMPALAASVVFFGVEAALLPILVCIVAAVATECVANLILRKSQTAGDFSAVVTGLLVAFNLPPSLPLWMAALGSVFAIAVAKMVFGGLGCNFINPALAGRAFLVASYPAPMTSYPPTLYGSVNAVAAKAPTALSDAVSAATSSSASTSAADSLKDALGAAADSLADTAALAASRLADTVSAAARP

SEQ ID NO: 13213 - DNA, 354 bp, Unknown
  Obtained from environmental sample
  misc_feature (1)..(354): n is a, c, g, or t
atgatggccgagagagccgagacgctcaaatcgcgtccgggaggcaggtctggcctatggtgcgcccgggtgtttgaaaaaatggcggatattgtccggcagcacatccgcggccacgatgtcgaggcgctgtatctctccggcggctcgtgcgcgttgcccggcgtgctggaacttttccgggaggaattccccggacacagcgtcgtgctgcccgatcaccccatctttctgactcccctcgccatcgcggcataccggccggatgcggaaggacgcaagccgcggcgtccggcgggttcaggctccggaaaagcgggcaaacaagcgcttcacggcgcgggaagaagctga

SEQ ID NO: 13214 - protein, 117 aa, Unknown
  Obtained from environmental sample
  misc_feature (1)..(117): Xaa is any amino acid
MMAERAETLKSRPGGRSGLWCARVFEKMADIVRQHIRGHDVEALYLSGGSCALPGVLELFREEFPGHSVVLPDHPIFLTPLAIAAYRPDAEGRKPRRPAGSGSGKAGKQALHGAGRS

SEQ ID NO: 13215 - DNA, 312 bp, Unknown
  Obtained from environmental sample
  misc_feature (1)..(312): n is a, c, g, or t
ttgatgaaaagaattatatatttaaacggacgaaaagttgtatatgaactggagtggaagaatgtaaaaaacattaacctgcgaatccgtttcgattgttcggtatatgtttccgcaaatgacaatacgctcatcaaaacgatagaagattttttacatgacaagtcgggttatattctttcagctttggataaatactcaaaaatatcaaagaacgccgagagtaaacatagttacgttacgggtgataattttaaatacttggggaagaacttgcggcttgttgttaaaaaagggaaaagnngggtataa

SEQ ID NO: 13216 - protein, 103 aa, Unknown
  Obtained from environmental sample
  misc_feature (1)..(103): Xaa is any amino acid
MMKRIIYLNGRKVVYELEWKNVKNINLRIRFDCSVYVSANDNTLIKTIEDFLHDKSGYILSALDKYSKISKNAESKHSYVTGDNFKYLGKNLRLVVKKGKXXV

SEQ ID NO: 13217 - DNA, 831 bp, Unknown
  Obtained from environmental sample
  misc_feature (1)..(831): n is a, c, g, or t
ttggatttgcngcgtttgccctnagatttctcccccggtaatatgcagtatttttcatggttaattttatggatgtttagacctctctttgacagaattattctgcatataatatcagtacgtttttttgaaagcagcgcgggcattaagcggctgttgcggggacttggcaaaagtttattgcggggattggcaggcgatttgctatggaggcgttttagtccgctacgttccgcgatgatgccggtgcgcgtgcttgaaccccgcaaaaaatccggcagagaaaacgcacaacgcagaaaactgttaaaaaacggaggcattaatttttgttttttcattactctatggggaattgcagttgaaattactcttttattcggtgaaataattttttttatgttaatggcggatctatttacaaacgccaatatttcatttaccggagaattttgggaaaaagcggaaatatacatatttgccgcatggtgcataaattatataataatagaaactatctatgtatgtatgggatttagtctatatatcagcagccggattaatgttgaaggctgggatttggaaattatgttccgtggttttgccgaaaaattaaaaagcaaaaagacagcgggcgtgttggttgttttctgccttgtctgtcttctttttcctgttaatatatttgccttagatttgcaaaatgatacaacagaagttccgctggagatactgcaggatattcttgattctccggatttcggaggcgaaaaggattcatggggaataagatttaaaaatgagtatgaacctaaaaataatttaatttaa

SEQ ID NO: 13218 - protein, 276 aa, Unknown
  Obtained from environmental sample
  misc_feature (1)..(276): Xaa is any amino acid
MDLXRLPXDFSPGNMQYFSWLILWMFRPLFDRIILHIISVRFFESSAGIKRLLRGLGKSLLRGLAGDLLWRRFSPLRSAMMPVRVLEPRKKSGRENAQRRKLLKNGGINFCFFITLWGIAVEITLLFGEIIFFMLMADLFTNANISFTGEFWEKAEIYIFAAWCINYIIIETIYVCMGFSLYISSRINVEGWDLEIMFRGFAEKLKSKKTAGVLVVFCLVCLLFPVNIFALDLQNDTTEVPLEILQDILDSPDFGGEKDSWGIRFKNEYEPKNNLI

SEQ ID NO: 13219 - DNA, 771 bp, Unknown
  Obtained from environmental sample
  misc_feature (1)..(771): n is a, c, g, or t
gtggagattctcaggcagaatcctgcggtggcggcgcgtatccgcggccgtttcagggtgatcctggtggacgagtaccaggacgccaacatcgcccagtttgaactgctgagggagctctgcgattccgagacctacgtgtgcgtggtgggggacgacgatcagtcgatttaccgcttccggggcgccgaggtgcggaacattctggagttcccggatcgtttcccggggacagacatcatacgcctggaacggaactaccgctccattgcgcctattcttcgggcggcttcttcggtggtggatcacaacaagaaccgtctgggtaagacccttagagccgaacggggaccggggaaaaaaccggtgctggcctttcttccggatcaggatgaggaggcgaagttttgcgcggaattaatcgggaaccaaaagaacgagggccacggctcctctaatcgatcctcttattctgactgggcaattctctaccggacaaacgcccagtctttgggatttgagaccgagttacttcgccgccgcatcccctaccgggttgtgggttctctcaagttctatgagcgtgaagagatcaaggacgccctggccctgctggctttcctggtgaacccccgggacgaggtggcgttccggcgcgtggtgaacaagcccgcccggggcctcggggccgttgcaatcggacgcatcatcggggacacatacggccccgggggccgttccagtcgagggcgccaacggggacacccatga

SEQ ID NO: 13220 - protein, 256 aa, Unknown
  Obtained from environmental sample
  DOMAIN (1)...(256): UvrD/REP helicase
  misc_feature (1)..(256): Xaa is any amino acid
MEILRQNPAVAARIRGRFRVILVDEYQDANIAQFELLRELCDSETYVCVVGDDDQSIYRFRGAEVRNILEFPDRFPGTDIIRLERNYRSIAPILRAASSVVDHNKNRLGKTLRAERGPGKKPVLAFLPDQDEEAKFCAELIGNQKNEGHGSSNRSSYSDWAILYRTNAQSLGFETELLRRRIPYRVVGSLKFYEREEIKDALALLAFLVNPRDEVAFRRVVNKPARGLGAVAIGRIIGDTYGPGGRSSRGRQRGHP

SEQ ID NO: 13221 - DNA, 900 bp, Unknown
  Obtained from environmental sample
  misc_feature (1)..(900): n is a, c, g, or t
ttgcggcggcgaaaacgccggttcgtcgtccagtgcgtttcaagggataccccgttaaagcccaaaaccgttaccgacataaggctttcctttgctatcccngacgccggtttattcagcccggcttttcagcaccgggcggcggttgaatattttgtcagggaaataatcggcgggcgcntcattgaaaatattgacagggaaaccgccggcatggcggaagggggggggaagcctgtctctgacaggctcgaggtctccgcaaaggaattcctggaaaagataacggacatacagcccgattttgccgccgccggttcggcgccgcccggcgggaaaaccgccgcgatggaagagctgcgggggcggggcttcgccgccgcggtcaattcgctgcttgccgcgcttgaaagcagccggctggattatcaggttattgaaaagcaaatgaacaggcgggaagcgtgcgtccgcgaatatgaggataccgaaacggaaacccttcccgacgagcgcttccagattaaaatgcggtacatggacagggaacagcttgccggggaacgcgaggcctatgacgcgcaggtgaaaagtttcgttaccgaggttcagcatttgtgggatttggttgaggtaatctaccaggattcaaaatccgtgtttaaggtaaacgactttgacgacctcgcgaagaaaaacaagggtcgcatcaagtacctgataaaagacagaaccggcgagccgctgtatgaaaatatcgccaaagtgtgggatgagattacgtttgtccgccccgccgaaacggatttgcaaaaagccagcccgcgattagcggttttgaaaagaactggatacgggacaggtttgcccggatccgcgagcggattcagaataccgtga

SEQ ID NO: 13222 - protein, 299 aa, Unknown
  Obtained from environmental sample
  misc_feature (1)..(299): Xaa is any amino acid
MRRRKRRFVVQCVSRDTPLKPKTVTDIRLSFAIPDAGLFSPAFQHRAAVEYFVREIIGGRXIENIDRETAGMAEGGGKPVSDRLEVSAKEFLEKITDIQPDFAAAGSAPPGGKTAAMEELRGRGFAAAVNSLLAALESSRLDYQVIEKQMNRREACVREYEDTETETLPDERFQIKMRYMDREQLAGEREAYDAQVKSFVTEVQHLWDLVEVIYQDSKSVFKVNDFDDLAKKNKGRIKYLIKDRTGEPLYENIAKVWDEITFVRPAETDLQKASPRLAVLKRTGYGTGLPGSASGFRIP

SEQ ID NO: 13223 - DNA, 399 bp, Unknown
  Obtained from environmental sample
  misc_feature (1)..(399): n is a, c, g, or t
atgtggcatcccagaatgatagaattcgatgagcgcctgaagaagcttttcgatgaagtcgatgactatattgaagacctctatggggacagatacaacttgcatcccgttcgtcccgcgcggggtgaaaccgctaacccggaaacagacggccttttcaacataggcgctaactttacgcctggtttcggatctgaactgggccgtggctaccttattgatgtatccatgtccaccctggacaaagttgatgataatgtacgccgtgaaatctacgaagccgtagctgccaaagtaagagaactcctgccgctccatttcccggaccgggagcttatagttaggcgcgacaaanaccatttcaagattctaggcgactttagcctaggggcaatttaa

SEQ ID NO: 13224 - protein, 132 aa, Unknown
  Obtained from environmental sample
  misc_feature (1)..(132): Xaa is any amino acid
MWHPRMIEFDERLKKLFDEVDDYIEDLYGDRYNLHPVRPARGETANPETDGLFNIGANFTPGFGSELGRGYLIDVSMSTLDKVDDNVRREIYEAVAAKVRELLPLHFPDRELIVRRDKXHFKILGDFSLGAI

SEQ ID NO: 13225 - DNA, 777 bp, Unknown
  Obtained from environmental sample
  misc_feature (1)..(777): n is a, c, g, or t
atgatctttgatattcacaagcttgattgggacgataggcttctggaagcgctggatattccccgcgccatgctgcctgaggtaaagccgtcgagcatggtgtatgcctccgccaatattcagggcatgagggtacccattgcgggcaatgcgggagatcaacaggccgcccttttcgggcaatgctgctttgaaaagggcgaagccaagtgcacctatggtaccggttgcttccttttaatgaattccggttatgaggctgtcgaaagcggaaacggtcttatagccacaattgccgctggtgtttccgacaaggttcagtacgcccttgaaggctcggtgtttgtgggcggcgcagtgattcagtggctgcgggatgaaatgcgttttttaatggaaagtgtggacagtgagtattacgcaggcaaggtagaagataccggcggagtctacctggttccggcttttgccggcctgggcgctccctattgggatatgtacgcccgcggctgcatagtgggaattaccagggggacaaagcgaagccacattatcagggctgcgcaggaatccattgcgtaccaggtgatggatttactgcgtgcaatggaaaaagactccggtagcaggatgggcgagctcaaggtggatggcggcgcaagcgttaacaaattcataatgcaattccaggccgacatttgcgacgccgacattgtgcgccctgtagtaagcgaaaccaccgccctggcgccgcctgccttgcgggaattgccgtag

SEQ ID NO: 13226 - protein, 258 aa, Unknown
  Obtained from environmental sample
  DOMAIN (63)...(258): FGGY family of carbohydrate kinases, C-terminal domain
  misc_feature (1)..(258): Xaa is any amino acid
MIFDIHKLDWDDRLLEALDIPRAMLPEVKPSSMVYASANIQGMRVPIAGNAGDQQAALFGQCCFEKGEAKCTYGTGCFLLMNSGYEAVESGNGLIATIAAGVSDKVQYALEGSVFVGGAVIQWLRDEMRFLMESVDSEYYAGKVEDTGGVYLVPAFAGLGAPYWDMYARGCIVGITRGTKRSHIIRAAQESIAYQVMDLLRAMEKDSGSRMGELKVDGGASVNKFIMQFQADICDADIVRPVVSETTALAPPALRELP

SEQ ID NO: 13227 - DNA, 468 bp, Unknown
  Obtained from environmental sample
  misc_feature (1)..(468): n is a, c, g, or t
ttgatcagatcggccgaggtagaaagcctgatacgcccttccaaagcggaaagggaaaaagagctttcggatcgaatcctgcgtttctgccacgaaaaagaaatcggccttattgttttcgctggattcctttcgattttagcgggcgaaataatcgaagccttcgcgggaaggatgattaaccttcacccggcgctgctccccaggttcggcggccgcggaatgtacggcgagcatgtccaccgcgcggtacttgcagcgggagaaagcgagtcaggctgcaccgttcatttggtggacgccggaaccgacaccggctcaatacttttgcagaggaaggttcctgttctaagcggcgacaccccggaaagccttgcggaaaggatccacaaagaagagcatatcgcaattgttgatgcggttaagatgatgcttgggcgattagagggaaggatggaggcattatga

SEQ ID NO: 13228 - protein, 155 aa, Unknown
  Obtained from environmental sample
  DOMAIN (2)...(141): Formyl transferase
  misc_feature (1)..(155): Xaa is any amino acid
MIRSAEVESLIRPSKAEREKELSDRILRFCHEKEIGLIVFAGFLSILAGEIIEAFAGRMINLHPALLPRFGGRGMYGEHVHRAVLAAGESESGCTVHLVDAGTDTGSILLQRKVPVLSGDTPESLAERIHKEEHIAIVDAVKMMLGRLEGRMEAL

SEQ ID NO: 13229 - DNA, 372 bp, Unknown
  Obtained from environmental sample
  misc_feature (1)..(372): n is a, c, g, or t
atgatggtgcaaaagctggaggacgaagatccccatatttttgaagatcccgataagaccttcatcgacctcttcatgaagtccggcctttacataacggaactggtgaaacgccttttcaataaccgcgtgatgaaggaaaagatccccgatgccggcgaccggttaaaacacatacttgaaaagcagttgtacggattagcccccagtgatattatcttccatatcgccacgaattatattttcagcttcgatgccgaaaatcgtataagccgtcaccattttaagcaagttgacacccggcctgccgttaaagagggaaggcttgaggagttgctgtcagccacctttgatgacctgaagcgagggtaa

SEQ ID NO: 13230 - protein, 123 aa, Unknown
  Obtained from environmental sample
  misc_feature (1)..(123): Xaa is any amino acid
MMVQKLEDEDPHIFEDPDKTFIDLFMKSGLYITELVKRLFNNRVMKEKIPDAGDRLKHILEKQLYGLAPSDIIFHIATNYIFSFDAENRISRHHFKQVDTRPAVKEGRLEELLSATFDDLKRG

SEQ ID NO: 13231 - DNA, 873 bp, Unknown
  Obtained from environmental sample
  misc_feature (1)..(873): n is a, c, g, or t
gtggggaataaaggaccggttgcgcttattgttgataccggtaaaatcgtagaactttgcgctgaagaaggacagtacaaatacgaccagtcttcggaaccaagcatattctacggcggactgggaaaaggcattctggacgcttttaaaaatataggggaacgttttaagtacggcggccagcccggtaaagaacagcggatttattattttaacaccaaagaaataatggggaacaaatacggaaccccggcgcctattccctaccttatcgtcgatccaaatatcaaccttcgacttacaatcagtttgcgcgccaatggcgaatattcctatcatataataaaccctatggctttctacgcgaatgtttcggggaacgtggaagacgtatacacccgtgacaaaatcgacagccaattaaagagtgaaatagttactgttctgggtccgtctttggcaaagttaggaacaggactggaataccatgaaatttcttatcaaacagaaaagctggctgagatacttaacgaagcgctttctaacaagtggagggaaggaaggggcatagaaattgtcaacttcgggattacctgcaccgccacgccggaagatgaacagaagatcaaacaacttcaaacggcggctgttatgcgcgacccgacaatggcggcggcttcgctggtgaacgctcagggcgacgccatgcggacggcggccggaaatacctcaggcgcgatggccggcttcatgggcatgggcatggcaaacatggccggcggcatgaattcccagaacctgttcgcgatggggcaagcccagcaggcgcaacaggcggcagcgcaacaagctgcgcccgcggccgcgggatga

SEQ ID NO: 13232 - protein, 290 aa, Unknown
  Obtained from environmental sample
  misc_feature (1)..(290): Xaa is any amino acid
MGNKGPVALIVDTGKIVELCAEEGQYKYDQSSEPSIFYGGLGKGILDAFKNIGERFKYGGQPGKEQRIYYFNTKEIMGNKYGTPAPIPYLIVDPNINLRLTISLRANGEYSYHIINPMAFYANVSGNVEDVYTRDKIDSQLKSEIVTVLGPSLAKLGTGLEYHEISYQTEKLAEILNEALSNKWREGRGIEIVNFGITCTATPEDEQKIKQLQTAAVMRDPTMAAASLVNAQGDAMRTAAGNTSGAMAGFMGMGMANMAGGMNSQNLFAMGQAQQAQQAAAQQAAPAAAG

SEQ ID NO: 13233 - DNA, 483 bp, Unknown
  Obtained from environmental sample
  misc_feature (1)..(483): n is a, c, g, or t
atgatctaccccggacttttattagcctggatcgttcagatgtcggttttcccaaaagaagaacgggttattcttattttctttctnataggcttactgaatgacgccgtggcctggtgttcgggaatgcttttcgggaaaaataaccgcggcattgtggcggtaagcccccaaaaaagtatcgccggctttatcggcgggatggccgtttcggtggggaccggacttttcgcggcggcgtttttcccgtccgcctttacttccagggtgatgccttcgttacccgcgggggcgttgttgggcttcggcgcaggcgccgccgctatcctgggcgaccttgccgagtccgcgctgaaacgcagcgccggcgttaaggactcaggaacccttatacttggccgaggcggggcccttgattcgattgattccctggcccttgcggcgccggtctattacatcatctaccaggttctttttcagtga

SEQ ID NO: 13234 - protein, 160 aa, Unknown
  Obtained from environmental sample
  DOMAIN (1)...(158): Cytidylyltransferase family
  misc_feature (1)..(160): Xaa is any amino acid
MIYPGLLLAWIVQMSVFPKEERVILIFFLIGLLNDAVAWCSGMLFGKNNRGIVAVSPQKSIAGFIGGMAVSVGTGLFAAAFFPSAFTSRVMPSLPAGALLGFGAGAAAILGDLAESALKRSAGVKDSGTLILGRGGALDSIDSLALAAPVYYIIYQVLFQ

SEQ ID NO: 13235 - DNA, 879 bp, Unknown
  Obtained from environmental sample
  misc_feature (1)..(879): n is a, c, g, or t
atggcgagaatcccgcaaggcaaggtttttgcgcacggtgcaatagggaaaaaatcgttccgtagggatgataatactccggttcaaccggattctgtgcggtacatagcctcaattaccaaagtatttaccgctgtggcgataatgaaactggtagaggacggctttatgcgtctggatgtacctgtgggcgaaattctgccgcagttcaatacgccgccgtataacggcgttacgccgtttcagcttttaacccacacttctggaatgcacgcagatgacggatgttttgaaaacaaataccagtcagcttactggaaattaattgatgacgcctacaagctttgcgaccctgacaagaaaaacgaatttgactggttagccgctgcgttaggcacaataggaaacggcttccgtgtcaagcccgataccgaatgggcttattgcagttttggttttgtcattctgggcgctgttatcgaaaaattgtcaggtatgcccgctcataagtttattgaagacaatatttgcaaaccgttgggtatgaaggacacttcttttgacgtaacggcggaaatggcaagaagatatattgttacggatgaggagcttgaaaaatacataaacgatgcaataaacggaacttccgaacaccattggtttagagaaaaacttaaaataccttcgaccggaggcggtctggagtcgacagtttacgatctcagccgttttggaaatatgatgttattcggcggaacttttgaaggcgctcgtgtgttaggcagaanagccgttgaaagaatgacaacgatttccagcgcccttcctaactcacatggaacgcaaagaaaaagaacggtactacggcataggttttga

SEQ ID NO: 13236 - protein, 292 aa, Unknown
  Obtained from environmental sample
  DOMAIN (1)...(288): Beta-lactamase
  misc_feature (1)..(292): Xaa is any amino acid
MARIPQGKVFAHGAIGKKSFRRDDNTPVQPDSVRYIASITKVFTAVAIMKLVEDGFMRLDVPVGEILPQFNTPPYNGVTPFQLLTHTSGMHADDGCFENKYQSAYWKLIDDAYKLCDPDKKNEFDWLAAALGTIGNGFRVKPDTEWAYCSFGFVILGAVIEKLSGMPAHKFIEDNICKPLGMKDTSFDVTAEMARRYIVTDEELEKYINDAINGTSEHHWFREKLKIPSTGGGLESTVYDLSRFGNMMLFGGTFEGARVLGRXAVERMTTISSALPNSHGTQRKRTVLRHRF

SEQ ID NO: 13237 - DNA, 750 bp, Unknown
  Obtained from environmental sample
  misc_feature (1)..(750): n is a, c, g, or t
gtgtatccggtcagcggccagacttattccagaaaagttgattactacactgtttccgttctgtctggtatcgcccagagcgcttataagttctcaaacgatatacgcctgctctcccatctgaaagaaatagaagaaccgtttgaagccggacaggtcggctcatcggcaatggcgtataagaggaacccgatgagaagcgaacgcatcgcctcactcgcgcggtatatgacggttaacgcgctgaatcccgcgttgacggcaagcgcgcagtggatggaacggacacttgacgattcggcaaaccgccgtatcgctatccccgaagccttcctcgccgttgacgcgatactttcactgtatatcaacataacgggcggacttaccgtttatccgcatataataaaaaaacacctgaacgaggaactgccgtttatggcgaccgaaaacattttaatgcactgcgtaaaaaaaggcggggacagacagttacttcacgagagaatacggcttcattcactggaggcggcgaaaaagataaaacaggaaggcggggaaaacgatctgatagcccgcattatatcggatgcaaatttcggagtaagcgaagaagaaataaacggccttctgctagccgaanaattcacgggcagggcagccgaacagaccgggggatttttagcggaagtcaaagcaatgcttgatgccaataaagaaatcctgggcgttttgaatcagatcactgtttaa

SEQ ID NO: 13238 - protein, 249 aa, Unknown
  Obtained from environmental sample
  misc_feature (1)..(249): Xaa is any amino acid
MYPVSGQTYSRKVDYYTVSVLSGIAQSAYKFSNDIRLLSHLKEIEEPFEAGQVGSSAMAYKRNPMRSERIASLARYMTVNALNPALTASAQWMERTLDDSANRRIAIPEAFLAVDAILSLYINITGGLTVYPHIIKKHLNEELPFMATENILMHCVKKGGDRQLLHERIRLHSLEAAKKIKQEGGENDLIARIISDANFGVSEEEINGLLLAEXFTGRAAEQTGGFLAEVKAMLDANKEILGVLNQITV

SEQ ID NO: 13239 - DNA, 888 bp, Unknown
  Obtained from environmental sample
  misc_feature (1)..(888): n is a, c, g, or t
atggccgagttngacgtgttggatggtaaagtgactaaccatgaatatgtgccgaacaaaaatctgagagggcaattcaaaaagtcttttcagcggaatgatattctttattcagaaatacgtccaagaaatcgtcgctttgccttcattgattttgatgccgatgactatgttgcttcaacgaaattaatggtgattcgtgctaacgataaagtcttaccgcagtttctttttcaggtgttgaagtcagacggaataatcgaccaacttcaatcattggctgaaacacggtcagggacttttccgcagattacattttctgaattggcggccttggatgtcagaatacctcctattccagagcaacgggaaatagctgccacgctctcttgccttgacgacaaaatcgcaaacaacacagcaataaaccgtcttttagagcagatggcgcaggcgattttcaattcgtggttcgtggattttgagccttggggtggggttatgcctaaaaattggcgagaaggcacactctctgaaatcgccaatatcactatgggacagtcgcctgatgggttgagctataatgaggacggtatcggaatggtcttttatcaaggtcgtgccgagttcgactctcgttttccgactcgccgcttgtttaccacacaaccaaaacgtatggcagcgaaaggcgatgtgcttataagtgttcgcgctcctgttggagatttgaatgtcgcctttgagtcttgctgtcttgggcgcggcttggcgggtatccgaagcaatagcggctgtcagtcatttatcctctacactatgttcgcttttgaacagcaactggatatgtttaaatggcgaaggtacggtgttcggctctatcaataa

SEQ ID NO: 13240 - protein, 295 aa, Unknown
  Obtained from environmental sample
  DOMAIN (4)...(134): Type I restriction modification DNA specificity domain
  misc_feature (1)..(295): Xaa is any amino acid
MAEXDVLDGKVTNHEYVPNKNLRGQFKKSFQRNDILYSEIRPRNRRFAFIDFDADDYVASTKLMVIRANDKVLPQFLFQVLKSDGIIDQLQSLAETRSGTFPQITFSELAALDVRIPPIPEQREIAATLSCLDDKIANNTAINRLLEQMAQAIFNSWFVDFEPWGGVMPKNWREGTLSEIANITMGQSPDGLSYNEDGIGMVFYQGRAEFDSRFPTRRLFTTQPKRMAAKGDVLISVRAPVGDLNVAFESCCLGRGLAGIRSNSGCQSFILYTMFAFEQQLDMFKWRRYGVRLYQ

SEQ ID NO: 13241 - DNA, 636 bp, Unknown
  Obtained from environmental sample
  misc_feature (1)..(636): n is a, c, g, or t
ttgcaggctaacagaatgattataggtattgatataggcagcaccaccaccaaagcggtttcgctggaagaaggcaaggttgtcaaaaaaataagcaccagggccgaggacgcgattacctcggcttcgggcgcgtttggcaaaatcattcttgaaaacgggatcaggatggcggacataaagcgtattatgatcaccggcgcgggagcgactaaaattgatggggagctgttcggcattcccacggaaaaggtaaacgagatcaccgcgataggcattggcggcaagtacctttcaggccaggaaaatatcattatcgcgaacgtcggaacaggaaccgcgatcatcgaagctcaaagggacaaaatcattcatcttggcggttcgggcgtgggcggcggcaccatcctcgggctggcgaaaaagctcctttcgctttcggatttcaaagacattatgaagctggccggggaggggaacctcgatcctgtagaccttctactcgaagacatcatggtagccgattttagctttctcgggaaaaaatcgacagcctccaactttgggaaaatgctggacacagcccggaacgaaggatattgcccttgggataataaatatgggtctttcaagtaa

SEQ ID NO: 13242 - protein, 211 aa, Unknown
  Obtained from environmental sample
  DOMAIN (6)...(206): Fumble
  misc_feature (1)..(211): Xaa is any amino acid
MQANRMIIGIDIGSTTTKAVSLEEGKVVKKISTRAEDAITSASGAFGKIILENGIRMADIKRIMITGAGATKIDGELFGIPTEKVNEITAIGIGGKYLSGQENIIIANVGTGTAIIEAQRDKIIHLGGSGVGGGTILGLAKKLLSLSDFKDIMKLAGEGNLDPVDLLLEDIMVADFSFLGKKSTASNFGKMLDTARNEGYCPWDNKYGSFK

SEQ ID NO: 13243 - DNA, 585 bp, Unknown
  Obtained from environmental sample
  misc_feature (1)..(585): n is a, c, g, or t
atgaaagtttttgtcatagcaattatactaagtctgctatttgtggggcttttagtcggaggcggcattgggatctggtacataggcactcgcaacaaccttataaagctggacgagacaataaaccaaagcatggcggaaatcgacaaccagctccagaggcgcagcgaccttattcccaactttgtgaatactgtcaaaggctacgccgcccacgagcagcaggtttatagcgatatcgcggacgcgcgttcccggcttgcgggggcgcaaaccgtagaggaaaaagcggctggctacaacgatatgcagtccgcgcttgccaggctgttggttgtggtagagcagtaccccgacttgaaagccaatcaaaactttatcgcgctgcangatgagctggcgggtacggaaaaccgcctcgctgtggcgcgcaaacgctacaacgacagcattaccaccttccacgtgcgtatacgccagttccccggttccatagtagcgggcaagatggggtttcgtccccccacgcctattttgaaattgccgagaccgccgcggccaggttccgaaccgtacagtttttag

SEQ ID NO: 13244 - protein, 194 aa, Unknown
  Obtained from environmental sample
  SIGNAL (1)...(20)
  DOMAIN (6)...(189): LemA family
  misc_feature (1)..(194): Xaa is any amino acid
MKVFVIAIILSLLFVGLLVGGGIGIWYIGTRNNLIKLDETINQSMAEIDNQLQRRSDLIPNFVNTVKGYAAHEQQVYSDIADARSRLAGAQTVEEKAAGYNDMQSALARLLVVVEQYPDLKANQNFIALXDELAGTENRLAVARKRYNDSITTFHVRIRQFPGSIVAGKMGFRPPTPILKLPRPPRPGSEPYSF

SEQ ID NO: 13245 - DNA, 717 bp, Unknown
  Obtained from environmental sample
  misc_feature (1)..(717): n is a, c, g, or t
atgaccgacaatacctgccgactttgcggttccagcaacctgtcgctcatcagccgagagcggcattcgcgccctttctacctttgccccgcctgcgccctaatatccgtccccgcccaatatcatttaagcgtagacgacgaacgggcccgatacgccctgcacgacaataccctatccaaccaagggtacgttgacttcctatccgaaatcgccgatgtggccgtacgtatggcgtccgaaatatcgaataataatcatcatagtcatcatataaaactactcgatttcggatgcggtaaggaagcggtactctgccgtcttcttgaaagacgcggaatagggatagactgccgcccctacgacccgttgtacgacgatttgcgtcagttgcccgacgttgttgacaaatgcgacataattgttgcgagcgaggtcgttgagcatatcagggacatagttggagaactgcggctgatgggcaatcttttacgtgacgacggcggtgtgattattttacgaacgcaactatacgaagactccggtatcaatgtcataggaggcgacggcacatcanacgacttccgtaaatggtggtacgctcaggatcctacgcatataaattttttccacaagcaatcgctttccaagttggcgtcgattatcgataaacgggttgaggagacggagcgcccggatatatttattcttcggtga

SEQ ID NO: 13246 - protein, 238 aa, Unknown
  Obtained from environmental sample
  misc_feature (1)..(238): Xaa is any amino acid
MTDNTCRLCGSSNLSLISRERHSRPFYLCPACALISVPAQYHLSVDDERARYALHDNTLSNQGYVDFLSEIADVAVRMASEISNNNHHSHHIKLLDFGCGKEAVLCRLLERRGIGIDCRPYDPLYDDLRQLPDVVDKCDIIVASEVVEHIRDIVGELRLMGNLLRDDGGVIILRTQLYEDSGINVIGGDGTSXDFRKWWYAQDPTHINFFHKQSLSKLASIIDKRVEETERPDIFILR

SEQ ID NO: 13247 - DNA, 750 bp, Unknown
  Obtained from environmental sample
  misc_feature (1)..(750): n is a, c, g, or t
ttgcgccccgcgcgcctagcaatacatgccgccgttgacggccagcacctggccggtgatgtagtttgccttgtccgaggcgagaaaggccacggcctccgcgacatcctgggcctgccccagacgtttcaaaggaatatgttccagataggcggcgcggatttcttcggacaacaccgccgtcatgccggtttcaataaagccgggcgccacggcattgacggtgatgttgcgcgcggccaattccttcgccgccgacttcgtcatgccgatcagaccggccttggacgcggaatagttgatctgtccggcattgcccatctgcccgctgacggagctgatgttaatgatccgtccgttccgctgcttgctcatgattttcgcggcttcgcgcagacaggtgaaggccccccgcagatttatcgccagcacgctgtcgaaatcctcgtccgacatgcggatgagaaagccgtcccgggtgatgccggcgttgttcaccagcacggcaagctgaaccttgttcttgatttcggcggcgaanaaatcgctcaccgcccgcgcatcggcgacatccagacggaacgcgcgaaccctgccgccctgttcttcaatttccttgatcgccggggccgcctcttccggcatgctcacatcggtcagatagacctgaaagccgtcccgggcgagacattgggccacggcttttgcgatgccccggaaagcgcctgtcaccagggcggtagctgctga

SEQ ID NO: 13248 - protein, 249 aa, Unknown
  Obtained from environmental sample
  misc_feature (1)..(249): Xaa is any amino acid
MRPARLAIHAAVDGQHLAGDVVCLVRGEKGHGLRDILGLPQTFQRNMFQIGGADFFGQHRRHAGFNKAGRHGIDGDVARGQFLRRRLRHADQTGLGRGIVDLSGIAHLPADGADVNDPSVPLLAHDFRGFAQTGEGPPQIYRQHAVEILVRHADEKAVPGDAGVVHQHGKLNLVLDFGGEXIAHRPRIGDIQTERANPAALFFNFLDRRGRLFRHAHIGQIDLKAVPGETLGHGFCDAPESACHQGGSC

SEQ ID NO: 13249 - DNA, 744 bp, Unknown
  Obtained from environmental sample
  misc_feature (1)..(744): n is a, c, g, or t
atggaggcatcagcagctaccgccctggtgacaggcgctttccggggcatcgcaaaagccgtggcccaatgtctcgcccgggacggctttcaggtctatctgaccgatgtgagcatgccggaagaggcggccccggcgatcaaggaaattgaagaacagggcggcagggttcgcgcgttccgtctggatgtcgccgatgcgcgggcggtgagcgatttnttcgccgccgaaatcaagaacaaggttcagcttgccgtgctggtgaacaacgccggcatcacccgggacggctttctcatccgcatgtcggacgaggatttcgacagcgtgctggcgataaatctgcggggggccttcacctgtctgcgcgaagccgcgaaaatcatgagcaagcagcggaacggacggatcattaacatcagctccgtcagcgggcagatgggcaatgccggacagatcaactattccgcgtccaaggccggtctgatcggcatgacgaagtcggcggcgaaggaattggccgcgcgcaacatcaccgtcaatgccgtggcgcccggctttattgaaaccggcatgacggcggtgttgtccgaagaaatccgcgccgcctatctggaacatattcctttgaaacgtctggggcaggcccaggatgtcgcggaggccgtggcctttctcgcctcggacaaggcaaactacatcaccggccaggtgctggccgtcaacggcggcatgtattgctag

SEQ ID NO: 13250 - protein, 247 aa, Unknown
  Obtained from environmental sample
  SIGNAL (1)...(20)
  DOMAIN (8)...(242): NAD dependent epimerase/dehydratase family
  misc_feature (1)..(247): Xaa is any amino acid
MEASAATALVTGAFRGIAKAVAQCLARDGFQVYLTDVSMPEEAAPAIKEIEEQGGRVRAFRLDVADARAVSDXFAAEIKNKVQLAVLVNNAGITRDGFLIRMSDEDFDSVLAINLRGAFTCLREAAKIMSKQRNGRIINISSVSGQMGNAGQINYSASKAGLIGMTKSAAKELAARNITVNAVAPGFIETGMTAVLSEEIRAAYLEHIPLKRLGQAQDVAEAVAFLASDKANYITGQVLAVNGGMYC

SEQ ID NO: 13251 - DNA, 837 bp, Unknown
  Obtained from environmental sample
  misc_feature (1)..(837): n is a, c, g, or t
gtggtgcagatgaatgaaaaaccttccgacatcctgcgccgcaagaaagattcctccattcaggtcgcctgccgcctggtgaaggaaggcgccgcgaacggcgtgatcagcgcggggcattccggcgccacggccgcgtgcagtattttcaccatcggacgcattcccggggtggagcgtccagccttgacaacctgtctgcccacggaaaaaaaccctctcgtggtcattgacgccggcgccaatgtggattgcagaccctaccacctgttccagttcggactgatgggcgatgccttcgcgcgcgacatcttcggatatccttcgccgcgggtcgccttgctcagcatcggcgaagaagaaggcaagggcaacagtcaggtcaaggaagcctacgagttgtataaaatggccgaacatgtgaattttgtcggcaacgtcgaagggcgcgacattttttccggcgatatggatgtggtcgtctgtgacggctttgtgggcaacatccttctgaaaatgagcgaaggctttgctgtttccatgatgcgcatgctgaagcgggaactcgtttccggttttgtgaccaggctcggcgcccggctttccaagcccgccttcaaacgtttcgtcaacacggtggattatgccgaatacggcggagcgccgcttctggggttgcagggcatctgcattgtctgccacggcaagtccaaccccaaggccgtgaccaacgccgtgaagatggcggctacctttgtggagaaaggaaccaacgaccggctgagggaagccatcgtcaccaacgaggaactgacccgctacagccgggcgctgtaa

SEQ ID NO: 13252 - protein, 278 aa, Unknown
  Obtained from environmental sample
  DOMAIN (1)...(260): Fatty acid synthesis protein
  misc_feature (1)..(278): Xaa is any amino acid
MVQMNEKPSDILRRKKDSSIQVACRLVKEGAANGVISAGHSGATAACSIFTIGRIPGVERPALTTCLPTEKNPLVVIDAGANVDCRPYHLFQFGLMGDAFARDIFGYPSPRVALLSIGEEEGKGNSQVKEAYELYKMAEHVNFVGNVEGRDIFSGDMDVVVCDGFVGNILLKMSEGFAVSMMRMLKRELVSGFVTRLGARLSKPAFKRFVNTVDYAEYGGAPLLGLQGICIVCHGKSNPKAVTNAVKMAATFVEKGTNDRLREAIVTNEELTRYSRAL

SEQ ID NO: 13253 - DNA, 423 bp, Unknown
  Obtained from environmental sample
  misc_feature (1)..(423): n is a, c, g, or t
gtgattctcgggcacgataaaaaactattccaaaaattggacgcaatgcttgacgaagcaatcgcagggacttttcaggcccagtcgtttgacgaaaccctgctgtcaaaaatcgagtcgaaaatggtgcgctttcttgagcaatcgcggcttaggcaagagcaaatcgcgaatgagcaggagcgcgtccgttctttgattagcgatatatcccaccagacgaaaactccgctttccaatgtcgcgctctatacgcaactgctcgcggaacaagatttaacagacgaacagaaaaagctcgccgagcaaatttccgcaagcgcagaaaaactgagttttctaatacagtcgcttgttaaaacgtcgcgcctggaaagtggcattattaaaatcgaaccaaaacccggcaatgtctacgattga

SEQ ID NO: 13254 - protein, 140 aa, Unknown
  Obtained from environmental sample
  DOMAIN (62)...(127): His Kinase A (phosphoacceptor) domain
  misc_feature (1)..(140): Xaa is any amino acid
MILGHDKKLFQKLDAMLDEAIAGTFQAQSFDETLLSKIESKMVRFLEQSRLRQEQIANEQERVRSLISDISHQTKTPLSNVALYTQLLAEQDLTDEQKKLAEQISASAEKLSFLIQSLVKTSRLESGIIKIEPKPGNVYD

SEQ ID NO: 13255 - DNA, 450 bp, Unknown
  Obtained from environmental sample
  misc_feature (1)..(450): n is a, c, g, or t
atgctcacagcgaaagatacggaactggatatggtaacaggattggaaagcggtgcggacgattacgttaccaagcctttttcgcttgccgtacttcgggctcggatcgatgccttatgncggcgcgattcccacagtgacagcaaggcgttttcaggcgattttgtgtttgattttgaaaccatgcgctttgaaaagaacggtcaaaccgttgagttatcgaaaacggaagcacgccttttgcagctgcttttcgcgaacaaagggcagaccttaacccgcgaacgggcgctttcggcaatatggcctgacggtaccgaatatgttgacgaaaacgcgctgtccgtggctgtcaggcggcttcgcgcaaaactggaaaacgacccttcgaacccgcagtttatcaaaactgttcacggtatcgggtataaatgggcggctagcctgtga

SEQ ID NO: 13256 - protein, 149 aa, Unknown
  Obtained from environmental sample
  DOMAIN (68)...(145): Transcriptional regulatory protein, C terminal
  misc_feature (1)..(149): Xaa is any amino acid
MLTAKDTELDMVTGLESGADDYVTKPFSLAVLRARIDALXRRDSHSDSKAFSGDFVFDFETMRFEKNGQTVELSKTEARLLQLLFANKGQTLTRERALSAIWPDGTEYVDENALSVAVRRLRAKLENDPSNPQFIKTVHGIGYKWAASL

SEQ ID NO: 13257 - DNA, 858 bp, Unknown
  Obtained from environmental sample
  misc_feature (1)..(858): n is a, c, g, or t
ttggcctctcanntatttcggatngacggtttaaaacaagatctaagttttttcaatctggaagaaatacctattttaacggaagaagatttaaagaaacgggaaaccgacctttacggcataacaaatgatcaaaatggattaaataaattcttaaaaaaagtttctccattttatgaaagaaaggaaattataaaaactctcttcctgcgtagaaatcacataactcccgtatctttacggaagagcgatgaagaaagcaatgaaaccgcagggaaagaattaccttttaatgaagaattttcaggcgctgaatcaaaggatatttttaggaaagtagattcaatactgtcgcgattttcacaaaacgatgatgaagcgtcggaaaaatttaattcgggcagttttggaacaatcgcgcatatctgcgttgaggcgcttttggaaaatacggagattgtaatcccgtcaaatatttccgggcttttaaatgaaaatgattttaatatcctgcttgaagccggaaaaaaattagcccgcagatttgtggcttccccgttgggaaaaatagcgcanactgcgaaacatagggaaagtgagtttccattcaggacgttgttaaaaaataaagaaggaaaagaaatatttataaatggcgctatagacctgttttttgtggataaggacgcggtacatatagtggattttaaaactgacggcagcgaaaaaccttgggagcatacggtacagatgggctgttattatcaggctatttcaaaccttttttgccattcctataaaaaagaatgcagattttggctttactatcttagaacccggccatgcccgtggaaatga

SEQ ID NO: 13258 - protein, 285 aa, Unknown
  Obtained from environmental sample
  misc_feature (1)..(285): Xaa is any amino acid
MASXXFRXDGLKQDLSFFNLEEIPILTEEDLKKRETDLYGITNDQNGLNKFLKKVSPFYERKEIIKTLFLRRNHITPVSLRKSDEESNETAGKELPFNEEFSGAESKDIFRKVDSILSRFSQNDDEASEKFNSGSFGTIAHICVEALLENTEIVIPSNISGLLNENDFNILLEAGKKLARRFVASPLGKIAXTAKHRESEFPFRTLLKNKEGKEIFINGAIDLFFVDKDAVHIVDFKTDGSEKPWEHTVQMGCYYQAISNLFCHSYKKECRFWLYYLRTRPCPWK

SEQ ID NO: 13259 - DNA, 486 bp, Unknown
  Obtained from environmental sample
  misc_feature (1)..(486): n is a, c, g, or t
atgaagaaacttgaaaatttagggttgggagaattgattgaacagggaggaattttctatgatcttactggaaattcggttagggaagtccttgaggctcttgtcgcctcagtcccggtcccatcggtaatcaccccccaggacctgctccaggcaatactggaacgggaagccctgatgtctaccagtattggccggggaatagcgctgcctcatccacggaatcccttggtaaccagggacgaggaacaatttgtggccctggcttttctggaaaagtctgtagaatggaaagctctggataatgaacctgtggacactttgctgctcatagtttcctcctcagcaaaatcccacctgaagacccttgcgaacattacctttttttgccggcaggaggcttttctaagcctccttagggaaagggcccccagggaaaccttaatcgactatatcaaagacactgaaaaggaatggtcggtgtaa

SEQ ID NO: 13260 - protein, 161 aa, Unknown
  Obtained from environmental sample
  DOMAIN (11)...(155): Phosphoenolpyruvate-dependent sugar phosphotransferase system, EIIA 2
  misc_feature (1)..(161): Xaa is any amino acid
MKKLENLGLGELIEQGGIFYDLTGNSVREVLEALVASVPVPSVITPQDLLQAILEREALMSTSIGRGIALPHPRNPLVTRDEEQFVALAFLEKSVEWKALDNEPVDTLLLIVSSSAKSHLKTLANITFFCRQEAFLSLLRERAPRETLIDYIKDTEKEWSV

SEQ ID NO: 13261 - DNA, 414 bp, Unknown
  Obtained from environmental sample
  misc_feature (1)..(414): n is a, c, g, or t
atgacagattcggccgaggatatccttaccagctggggtcagcttgccacagccggatcggtgtccaggctctttaagcgcctgggtgtcatcactttggacggtgaaaagtacaccgaagaccaggtgatggaagtggccattgagggtggagccgaagacgtgtccctttcagacggcgtcattgaggttacgacggcgccagaggattttgaaaccgtcgtgaacgctttaaccgagaaaagctttgaaaccatgagcgcggaaatcagtatggttccggaagccgatgtttcactggataatgacgctaccgccaaagtgctgaagctaatcgataaactggaagaaaacgacgacgttcaaaacgtctactccaacataaatatacccgacgggtttgagtctgagtga

SEQ ID NO: 13262 - protein, 137 aa, Unknown
  Obtained from environmental sample
  DOMAIN (4)...(129): Domain of unknown function DUF28
  misc_feature (1)..(137): Xaa is any amino acid
MTDSAEDILTSWGQLATAGSVSRLFKRLGVITLDGEKYTEDQVMEVAIEGGAEDVSLSDGVIEVTTAPEDFETVVNALTEKSFETMSAEISMVPEADVSLDNDATAKVLKLIDKLEENDDVQNVYSNINIPDGFESE

SEQ ID NO: 13263 - DNA, 375 bp, Unknown
  Obtained from environmental sample
  misc_feature (1)..(375): n is a, c, g, or t
ttgagtctgagtgacagattcagaataatcggtgttgaccccggtctggcatcaaccggctggggcgtggtggagttttcgggaaatcgtctgttctatgttgcccacggctgtatcgaaaccggtgctgaagaccccaggggcaagcggttgcatatcattcacagttcttttttaaaagttttaaaagcttataagccccgcgaagccgccatagaaaacctttatttcggcaaaaatatttccagcgccatgtctgtcgctgaagcccgtggcgttctgcttttggctttaacaagccaggggcttcccatcagggagctgacgcctcacgccataaaaaaaactgtggtaggggtaaccagggctcgataa

SEQ ID NO: 13264 - protein, 124 aa, Unknown
  Obtained from environmental sample
  DOMAIN (9)...(124): Crossover junction endodeoxyribonuclease RuvC
  misc_feature (1)..(124): Xaa is any amino acid
MSLSDRFRIIGVDPGLASTGWGVVEFSGNRLFYVAHGCIETGAEDPRGKRLHIIHSSFLKVLKAYKPREAAIENLYFGKNISSAMSVAEARGVLLLALTSQGLPIRELTPHAIKKTVVGVTRAR

SEQ ID NO: 13265 - DNA, 561 bp, Unknown
  Obtained from environmental sample
  misc_feature (1)..(561): n is a, c, g, or t
ttgaagaaaaaaacngaacaccgaaggccaaaacgaatatcaaggaagaagcaggcaatgattaagaaaatagtctggactgtgttttttggacttgttgcggctatcntgcaatcgaccctgctttctcattttaccctgtaccgggcggtacccgatcttgctctcgggattgttgtatattcggcaagcgtaaacggaatgatggtcgggcagctctccggtttcttttacgggatcgcgctggatttcctttccgtagcgcccgttggccttaacgcgttaatccggacgctgcttggcgctcttgcgggcctgctgaaagggaacctcctccttgatgttttccttctcccgatgatactctgcgccctggccacccttctcaaagctctcatgctctttttattacatttactttttggcgaagcagtccacgcctacccgcttaccgcttcgttattatgggcggagacggcgttaaatacaattaccgcgccgtttcttttcgcgtttcttaaacgctttaaagcgcttcttgcggggaaggaaattgtttga

SEQ ID NO: 13266 - protein, 186 aa, Unknown
  Obtained from environmental sample
  DOMAIN (20)...(176): rod shape-determining protein MreD
  misc_feature (1)..(186): Xaa is any amino acid
MKKKTEHRRPKRISRKKQAMIKKIVWTVFFGLVAAIXQSTLLSHFTLYRAVPDLALGIVVYSASVNGMMVGQLSGFFYGIALDFLSVAPVGLNALIRTLLGALAGLLKGNLLLDVFLLPMILCALATLLKALMLFLLHLLFGEAVHAYPLTASLLWAETALNTITAPFLFAFLKRFKALLAGKEIV

SEQ ID NO: 13267 - DNA, 921 bp, Unknown
  Obtained from environmental sample
  misc_feature (1)..(921): n is a, c, g, or t
ttgaaagatgacgggaaaacggaggctgattataaaacatacctaaccgtaagaaaggatcacgccaattcgccgaccttctactttaatatggcaagctggttctacgcctgcggcgacaaggaaacagcaatacgcgtgatcacatccatcgccgatttggaactcgaaaacgccaccctctatcggctactgggctatagactgaaggagttcggcgagtacgcgctcgaaaagtttgtctgtcaaaaagtagtccaatggcgccccatggaaccgcaaagccaccgcgactacgccaacgccctcgccgacaacggagagccgcaagcggcgctcaacacgctctacggagcgctgtcaaagacctattcgagacatatcgaagaccgcagtagcgggatagaagaggtcgtagttacggagataaatcgcttggtaaccaaaaacaatttgaataagtcaaagatttaccaaagtatgctgattaacattcccgtcgatattcgcgtggttataaactggaacatgaacaacaccgacatcgacctgcacgtggtagacccgacaggcgttgagtgccattacggcaacaaaaaaacaatgatcggcggacgcctaagccccgatatcacagagggttacggcccggaacaattccttttgaaaaaagccgtaaaaggaaaataccgcgtctacgtagactactacggcgacaacaaagtcaccgacgcgggcccggcgaccataatggcggaaatctacaccaaatacgccgacccaagcgagaaacgcanagtcgtatgtttgcaaatgtcaaacgcgaaaaaacgagaggacgggactgtgctggtggcggatttngagtttgaaacattggctttcgccgagataacnagttgggctgaactaggattttaa

SEQ ID NO: 13268 - protein, 306 aa, Unknown
  Obtained from environmental sample
  misc_feature (1)..(306): Xaa is any amino acid
MKDDGKTEADYKTYLTVRKDHANSPTFYFNMASWFYACGDKETAIRVITSIADLELENATLYRLLGYRLKEFGEYALEKFVCQKVVQWRPMEPQSHRDYANALADNGEPQAALNTLYGALSKTYSRHIEDRSSGIEEVVVTEINRLVTKNNLNKSKIYQSMLINIPVDIRVVINWNMNNTDIDLHVVDPTGVECHYGNKKTMIGGRLSPDITEGYGPEQFLLKKAVKGKYRVYVDYYGDNKVTDAGPATIMAEIYTKYADPSEKRXVVCLQMSNAKKREDGTVLVADXEFETLAFAEITSWAELGF

SEQ ID NO: 13269 - DNA, 330 bp, Unknown
  Obtained from environmental sample
  misc_feature (1)..(330): n is a, c, g, or t
atgcgaattaaattaaaatcagccattaaaatcatctgtctttttttgcttgttttttgctgcttttttacagcctgtaaagattcagacggcgatgataatgactatgtcattgttgatctgggcgaggtaagcgagcttactttttcgcataacagcgggctttatgacaaaaagttcaaacttacaatagcggcgcaggcgggaagcgaaatttattactcaaccgacggaagtattccgttgccgcagaaagcaggcaacggatttgtttttttgtacacttctcccattaccgtacagaaccgtaacgggcaggcaaatgtatag

SEQ ID NO: 13270 - protein, 109 aa, Unknown
  Obtained from environmental sample
  SIGNAL (1)...(27)
  misc_feature (1)..(109): Xaa is any amino acid
MRIKLKSAIKIICLFLLVFCCFFTACKDSDGDDNDYVIVDLGEVSELTFSHNSGLYDKKFKLTIAAQAGSEIYYSTDGSIPLPQKAGNGFVFLYTSPITVQNRNGQANV

SEQ ID NO: 13271 - DNA, 417 bp, Unknown
  Obtained from environmental sample
  misc_feature (1)..(417): n is a, c, g, or t
atgggtttcgtcttttacaacacgcttggccgtgaaaaacagccttttttgcccctgcaagagggaaaagtcggcttttacggctgcggacctacagtttacaatttcgcgcatatcggcaatttacgcgcctatgtgcatcatgatatattggtccgatcgctccgccgcgcgggttttgacgtaaaccatgtaatgaacattaccgacgtaggccatctttccgacgatgcggacgacggcgaagataaaatggtaaaaagcgcggaagaacgcggcaaaagcgttcttgaaattgcggatttttacacaaaggctttttttaacgatacagacagaatgaacattacccgccctacggttatatgcaaagctacggagcatataagcgaaatgatcacccttattcaaaaatag

SEQ ID NO: 13272 - protein, 138 aa, Unknown
  Obtained from environmental sample
  DOMAIN (15)...(138): tRNA synthetases class I (C) catalytic domain
  misc_feature (1)..(138): Xaa is any amino acid
MGFVFYNTLGREKQPFLPLQEGKVGFYGCGPTVYNFAHIGNLRAYVHHDILVRSLRRAGFDVNHVMNITDVGHLSDDADDGEDKMVKSAEERGKSVLEIADFYTKAFFNDTDRMNITRPTVICKATEHISEMITLIQK

SEQ ID NO: 13273 - DNA, 900 bp, Unknown
  Obtained from environmental sample
  misc_feature (1)..(900): n is a, c, g, or t
atggggcgcggcggtattgcttcgaacacacatggacgccggttcgtacaaacagtatatctttccgctcttgtcttcaagcgtatatgcgacgtttatgaagaggaacttaccgcctctatcaaagaatacggtgaagattttcccgaaaaccaccgtttcgttattcccaccggttcacattggaaaaacgtgcgtgaagtagccgaaaatgtcggggtagccatcgtgaacgcatttcgcgccattgaacgtgcaaatactgagaaattagccggcgtattcggcgacagcgcttggacgaataaaaaccgcttgccggacaaactactgaaaaacctgatagagcatttttccacgcaaacgctgtcaatcgccaattgtccggaggacgaacttggacaaggctatgaataccttatccgcaagttcgccgacgacagcggacacaccgcgcaagagttctacaccaatcgcacggtggtccatcttatgaccgaaatccttaaaccgcaatccggtgaaaatatatatgacccgacctgcggtagcgccgggatgttaatatcggcgattgcttacctaaggtcacacggaaaagaatggcgtaatgtgaatatattcggacaggagattaatgcgctgacatcaactatcgcccgaatgaatctatttctccacggcgtaaaagattttcaaatagttaataatgatactctcgtcaatccagcgtttattgtaaacggacaactcagaacattcgatattgtggttgccaatccgccatactcaatcaagcagtggaatcaagaagcattttcggcggacaaatacggacgaaactttttaggaactcccccgcaaggtagagccgactacgcgttctttcaacatatttga

SEQ ID NO: 13274 - protein, 299 aa, Unknown
  Obtained from environmental sample
  DOMAIN (128)...(299): N-6 DNA Methylase
  misc_feature (1)..(299): Xaa is any amino acid
MGRGGIASNTHGRRFVQTVYLSALVFKRICDVYEEELTASIKEYGEDFPENHRFVIPTGSHWKNVREVAENVGVAIVNAFRAIERANTEKLAGVFGDSAWTNKNRLPDKLLKNLIEHFSTQTLSIANCPEDELGQGYEYLIRKFADDSGHTAQEFYTNRTVVHLMTEILKPQSGENIYDPTCGSAGMLISAIAYLRSHGKEWRNVNIFGQEINALTSTIARMNLFLHGVKDFQIVNNDTLVNPAFIVNGQLRTFDIVVANPPYSIKQWNQEAFSADKYGRNFLGTPPQGRADYAFFQHI

SEQ ID NO: 13275 - DNA, 699 bp, Unknown
  Obtained from environmental sample
  misc_feature (1)..(699): n is a, c, g, or t
atgggggaagtactggataaagcgtacaaacggcttaaaacttccgataatgtttcccgttaccgtcagggtatttttaagcaggtaacggcgctgcttaaggacgataaatggcttgaggaaagcgccggcaagtatatgcggatacttcaaaccagccgcgaagagtgccgcagaaaacttatgctcatgctggaagaaatccgggatgacttgaaatccgttgatcctctggaagatgaaatcgaccggcggaatgcggcctattcccgttccagcactgaaattattaaagcctacattgagccggacagtaccgttgcgggaaaaatcggacttctcataaaagcgattcacggcggcaatgaggaaattcaatcccaaattgcccacggcctgtaccgcatcagattcctttcaccttcaagtctggctttttcccagaaacgggcggagggtgattttattaccagtccttcaaaagtcgatgttgaagcattaaaccaaactgaaaaagatttttttgagcgcatgaaaaagcgtctttccatcaaacggattaacgcatggcttgacactaagggcgggaaggaacacattctcattccggaaaaacttattaccggggaagattcttatatccgttttatttacgctctgctctatggcgactcccgcagcaattttggtatactatga

SEQ ID NO: 13276 - protein, 232 aa, Unknown
  Obtained from environmental sample
  misc_feature (1)..(232): Xaa is any amino acid
MGEVLDKAYKRLKTSDNVSRYRQGIFKQVTALLKDDKWLEESAGKYMRILQTSREECRRKLMLMLEEIRDDLKSVDPLEDEIDRRNAAYSRSSTEIIKAYIEPDSTVAGKIGLLIKAIHGGNEEIQSQIAHGLYRIRFLSPSSLAFSQKRAEGDFITSPSKVDVEALNQTEKDFFERMKKRLSIKRINAWLDTKGGKEHILIPEKLITGEDSYIRFIYALLYGDSRSNFGIL

SEQ ID NO: 13277 - DNA, 705 bp, Unknown
  Obtained from environmental sample
  misc_feature (1)..(705): n is a, c, g, or t
atgaccaaggtatgctatttcagcgggaccggtaattccctgtggtcagcccaaaaaatcgcggagagtatcgcgggggattgcgagtatatcaatataggcgctgaagcgcagaaggacgaaattaccattgaagcggacgcggttgtactggtttttccttcttatgcctatggcttgccgatcattgtcagcagttttcttaaaaaagccgtgtttaagacgccttatatcgcggcttttgtcacttacggaaccagccccggagggacgcttgccgcggccagccgcattctgaaacgcaaatacaaaggcgggaccttttttgggcgcatacccgcggtagaaaattacatcgctatttttggccctccaaaagagaagaccacgcagaagcggctggccatgcagcgtanaatgacagatcatgcggtctgcgccattattgaaaggcgtacaaacaaaattaatacaatccgcccgttatcggcttttatttcatcgctgttctcgttaggcgcaaagattttttataaattctacaaagtcacggacgactgtaacggctgcggggtttgcgaaaaactgtgccccgtatcgtgtattacaatggttaacaaccgtccgctggtttccggcaaatgcgaacactgcaacggctgccttaactggtgtccccagaggcgattcattttgggcggctga

SEQ ID NO: 13278 - protein, 234 aa, Unknown
  Obtained from environmental sample
  DOMAIN (180)...(203): 4Fe-4S binding domain
  misc_feature (1)..(234): Xaa is any amino acid
MTKVCYFSGTGNSLWSAQKIAESIAGDCEYINIGAEAQKDEITIEADAVVLVFPSYAYGLPIIVSSFLKKAVFKTPYIAAFVTYGTSPGGTLAAASRILKRKYKGGTFFGRIPAVENYIAIFGPPKEKTTQKRLAMQRXMTDHAVCAIIERRTNKINTIRPLSAFISSLFSLGAKIFYKFYKVTDDCNGCGVCEKLCPVSCITMVNNRPLVSGKCEHCNGCLNWCPQRRFILGG

SEQ ID NO: 13279 - DNA, 453 bp, Unknown
  Obtained from environmental sample
  misc_feature (1)..(453): n is a, c, g, or t
ttggcagagtctgacctggccgtctttcttggcgacggcttgaaggaactgccccttgcgcagcagtatgtaagccttccctgtgaattgaaaaaaatccgcggaaacaatgatgacgcgccgacagcgccggaatctgaggtttttgatttttgcgggtatcgtttttatatatgccacggacaccgctttgttctttacaatggttttgacaaacttatagccactgcgcgcggcaagggcgccgaggtcgttcttttcggtcatatccatgttccctatcttgaggaggcggaggggcttctgcttgtttgtccgggcagcatcgcaagggcgcgcagcggcgcgggggatacattcgccgttcttgactgtacgccgggaaaaccgcttgcggtacaattttgggaaatcgacaacgattcattggaaattacgcagtttctttcttaa

SEQ ID NO: 13280 - protein, 150 aa, Unknown
  Obtained from environmental sample
  misc_feature (1)..(150): Xaa is any amino acid
MAESDLAVFLGDGLKELPLAQQYVSLPCELKKIRGNNDDAPTAPESEVFDFCGYRFYICHGHRFVLYNGFDKLIATARGKGAEVVLFGHIHVPYLEEAEGLLLVCPGSIARARSGAGDTFAVLDCTPGKPLAVQFWEIDNDSLEITQFLS

SEQ ID NO: 13281 - DNA, 630 bp, Unknown
  Obtained from environmental sample
  misc_feature (1)..(630): n is a, c, g, or t
ttgggcgcacggataatgagcaaagagcaaaaagctgaggttaatactgtttttgatggtatgaaagaaaacagcaatcttgattatgtaacctgttggtataaaaaagcaacgaagtatattcagaaaactgaaattgaatgtgcttttgtttctactaacagcatttgtcagggcgagcaagttccaattctttggccggaattgatgaacaaatacaatataaaaatcaatttcgcccatcagacatttaaatggagtaacgaagcgcgagggaaagcggcggtatattgcgtgataatcggttttgcgcttgcggacagagacacgaaaaagatttaccaatacgcaactgttaccggagaaccaatggaaactttggtaaaacaaataaatgcgtatttagttgacgctcctttgttatttattcaaaaaaggagtaagccgctatgcaatgtttccgaaatggtatttggaaatatgccaaatgataatgggaatttttcacttaccgaaaaagaaagaaaagaaataataaaagaaaatccggaagtaagaaaaataatcaagccatttaccggagctgacgaatttatcaataacattttcccggtattgtctttggcttaa

SEQ ID NO: 13282 - protein, 209 aa, Unknown
  Obtained from environmental sample
  misc_feature (1)..(209): Xaa is any amino acid
MGARIMSKEQKAEVNTVFDGMKENSNLDYVTCWYKKATKYIQKTEIECAFVSTNSICQGEQVPILWPELMNKYNIKINFAHQTFKWSNEARGKAAVYCVIIGFALADRDTKKIYQYATVTGEPMETLVKQINAYLVDAPLLFIQKRSKPLCNVSEMVFGNMPNDNGNFSLTEKERKEIIKENPEVRKIIKPFTGADEFINNIFPVLSLA

SEQ ID NO: 13283 - DNA, 777 bp, Unknown
  Obtained from environmental sample
  misc_feature (1)..(777): n is a, c, g, or t
atgatgggcggcagtatggatattgaaagctctccccggatcggcagtaaattcagctttactntgaaattcgatacatcaaaagaaaccgatgaatcacttaaacaaaaaacggcgcttgaaaaaattgaaaaaccggcttttgagggcgaggtattaatctgcgaagacaatgccatgaatcaaagggttatatgcgagtatctttcaagggtgggactaaaacccgttatagcgggaaacggcaaggaagggcttgatatggtcagcgagcgcatggaaaaaggcttaaaaccttttgacttaatttttatggatatacatatgccggtaatggacggaattgaagccgcgtcaataattaacaaactaaatgtaggaacgcccattgtcgccatgaccgcaaatattttgtccaccgacaaagagctttacaaaaggaacggtatgctcgattatcttggaaaaccctttacttcccaagtgttatggcgttgtctgctgaaatacttcacgcccataaagaaagaaaacatacaggaaaatacgatagacgaagaagaattggcggtacagcgtatatttcaattaagttttgtaaaagagaatcaaaaaagatttgacgagattgcaaacgccttaaaaaccaacgactttattcttgcgcacagactggctcacgctttaaaagccaacgccgggcagattggaaaaacccgcctgcaagccgccgccactgatattgaacagacaataaaaacggggaaaaaaaggtga

SEQ ID NO: 13284 - protein, 258 aa, Unknown
  Obtained from environmental sample
  DOMAIN (50)...(168): Response regulator receiver domain
  misc_feature (1)..(258): Xaa is any amino acid
MMGGSMDIESSPRIGSKFSFTXKFDTSKETDESLKQKTALEKIEKPAFEGEVLICEDNAMNQRVICEYLSRVGLKPVIAGNGKEGLDMVSERMEKGLKPFDLIFMDIHMPVMDGIEAASIINKLNVGTPIVAMTANILSTDKELYKRNGMLDYLGKPFTSQVLWRCLLKYFTPIKKENIQENTIDEEELAVQRIFQLSFVKENQKRFDEIANALKTNDFILAHRLAHALKANAGQIGKTRLQAAATDIEQTIKTGKKR

SEQ ID NO: 13285 - DNA, 570 bp, Unknown
  Obtained from environmental sample
  misc_feature (1)..(570): n is a, c, g, or t
ttggtgcctctaacaacagaccgcgaggttttgtattcgcggcttaattccctgatgataggcgagctgggggacggaaccgccctgggtacgggccttgcccttgctgcttttcatatcagcaagtccgatgcgccaaggcgggcggtggttcttattaccgatggagaaaacaacgcggggacaattcatcctgagtccgcagcagccatgctgggcgatatgggcgtttccctttgggtggtaggagtgggatcctccggagaggttcccgtcaactatgtggatccaattacaaaaatgcgccgcaccggcacatttgaatcgcggtatagcaccgaagatctaaaaagcatagccgataaggcgcatgggcagtggattcacgcgccccaggcggaagccttgtcagcggcgttttcgcaactggaccaaagggaaatgatcatacgcaggtctattcccgtaagaagagaagaacctctttacgttgtttttgtaattgcggcggtagccctgctttggggggtgcgttttgtaaggcgttacgtactgngggcccttctttga

SEQ ID NO: 13286 - protein, 189 aa, Unknown
  Obtained from environmental sample
  misc_feature (1)..(189): Xaa is any amino acid
MVPLTTDREVLYSRLNSLMIGELGDGTALGTGLALAAFHISKSDAPRRAVVLITDGENNAGTIHPESAAAMLGDMGVSLWVVGVGSSGEVPVNYVDPITKMRRTGTFESRYSTEDLKSIADKAHGQWIHAPQAEALSAAFSQLDQREMIIRRSIPVRREEPLYVVFVIAAVALLWGVRFVRRYVLXALL

SEQ ID NO: 13287 - DNA, 552 bp, Unknown
  Obtained from environmental sample
  misc_feature (1)..(552): n is a, c, g, or t
atgatgagccgtaaagggataattatttttgtttttctcctgctcgcgcaaggcgttttcgcccaggaaacaagcgagccggcgaaggaattgtcggcaaccgagttgccgcgtcagttccgcgccctttctttgggaatgagccttgatgatctgaaagcaaatttaatcagcgataattattttaatttccggggcgacagagacgtctcttttctgcctgtcagaaaccagagtcttgtggaaactaccggttcgtcttttataaaacgcgcttttttccagttaagggacgaggctgtttttatcatggctttttcgcttaataccgagataatcgaccattattcggtttttacccaattagttgaaaaatacggccagcctgcctaccttgatccttcctctgctgtttgggaaacggaaaaaaccaggatatcgattgaaaggccgttaacagtaaaatacattgataaaagcgtatttgacgatatattaatgaatccggcttggttgaatcgggacaggtcaaacttaggcaggatttcctga

SEQ ID NO: 13288 - protein, 183 aa, Unknown
  Obtained from environmental sample
  SIGNAL (1)...(21)
  misc_feature (1)..(183): Xaa is any amino acid
MMSRKGIIIFVFLLLAQGVFAQETSEPAKELSATELPRQFRALSLGMSLDDLKANLISDNYFNFRGDRDVSFLPVRNQSLVETTGSSFIKRAFFQLRDEAVFIMAFSLNTEIIDHYSVFTQLVEKYGQPAYLDPSSAVWETEKTRISIERPLTVKYIDKSVFDDILMNPAWLNRDRSNLGRIS

SEQ ID NO: 13289 - DNA, 609 bp, Unknown
  Obtained from environmental sample
  misc_feature (1)..(609): n is a, c, g, or t
atgatggccgagccgagcctcccgcgcggcgacctgcacatatcctccgacggcgagacgctcatcttcgcatctaagtacagagacagcaattgggacatctacgcgctcgacacgtctgggaaagccgcgccggtgagattgacggacggcaaagccgaccaccgctatccgcgtataagccccgacggcaaatacgtcgcgtacctctcgaaccgcaccggtttcgcgtggaaaatggatttgtgggtttacaacagggtcgcgaaggagcacaggcagcttacgttcaacaccgacgttcaaggcttcacctggagcgacgactccgaggcgatctacttctcggcgggcgcgaacctgctggaaatctgccgcgtggacatgaggcacggcctgataaaaaatatgatcccccacccgcaaggggcggtaaagtcgtggagcgagagcaatccgcggtttatacgctacaacgacgagcctatgatcgtctacacgcggacatacccaagcgggaagcggcagattttctggttcgacatcaacaacgcggcggacgccaaaatgtactcggtcgaggagtttgacgagtggaacgaggattag

SEQ ID NO: 13290 - protein, 202 aa, Unknown
  Obtained from environmental sample
  DOMAIN (46)...(84): WD40-like Beta Propeller Repeat
  misc_feature (1)..(202): Xaa is any amino acid
MMAEPSLPRGDLHISSDGETLIFASKYRDSNWDIYALDTSGKAAPVRLTDGKADHRYPRISPDGKYVAYLSNRTGFAWKMDLWVYNRVAKEHRQLTFNTDVQGFTWSDDSEAIYFSAGANLLEICRVDMRHGLIKNMIPHPQGAVKSWSESNPRFIRYNDEPMIVYTRTYPSGKRQIFWFDINNAADAKMYSVEEFDEWNED

SEQ ID NO: 13291 - DNA, 321 bp, Unknown
  Obtained from environmental sample
  misc_feature (1)..(321): n is a, c, g, or t
ttgggcggtaaggcccagtttggcggccagcgccttggggaaatggaagtttgggcactggaggcttacggcgcggccaatacactccaggaactcctcactatcaagtccgacgatatgacggggcggtccaagatttacgaagccattgtaaagggagaaccttcgactaccgcgggaattccagagtctttcaatgttttggttcaggaactccggggccttgggcttgacctcaccatttatgacgctaagaataagcaaatccccctaaccgagcgggatgatgaattgataaacaagagcggttcgaatttttaa

SEQ ID NO: 13292 - protein, 106 aa, Unknown
  Obtained from environmental sample
  DOMAIN (8)...(84): RNA polymerase Rpb2, domain 7
  misc_feature (1)..(106): Xaa is any amino acid
MGGKAQFGGQRLGEMEVWALEAYGAANTLQELLTIKSDDMTGRSKIYEAIVKGEPSTTAGIPESFNVLVQELRGLGLDLTIYDAKNKQIPLTERDDELINKSGSNF

SEQ ID NO: 13293 - DNA, 432 bp, Unknown
  Obtained from environmental sample
  misc_feature (1)..(432): n is a, c, g, or t
atgagggacattcaggattttgattctattatgatacgcttggcttctccggaaatgatccgtgattggtcttatggagaagtgaaaaaaccggaaaccatcaattaccggaccctgcggccggaaaaagacgggcttttttgtgaaaggatcttcggaactaccaaagagtgggagtgctactgcggaaagttcaagtctatccgctacaagggggtcatctgtgaccgctgcggcgtagaagttacccattttaaggtccgccgggagcggatggngcatatcgagcttgccgctccggtgtcccatatttggtattaccgttcagttcccagccgcatgggcctgctcctggatcttctatgggcagtctgcgctcagtactttactatgaaaaatacgtggtcattgacgcgggggataccgatctga

SEQ ID NO: 13294 - protein, 143 aa, Unknown
  Obtained from environmental sample
  DOMAIN (4)...(143): RNA polymerase Rpb1, domain 1
  misc_feature (1)..(143): Xaa is any amino acid
MRDIQDFDSIMIRLASPEMIRDWSYGEVKKPETINYRTLRPEKDGLFCERIFGTTKEWECYCGKFKSIRYKGVICDRCGVEVTHFKVRRERMXHIELAAPVSHIWYYRSVPSRMGLLLDLLWAVCAQYFTMKNTWSLTRGIPI

SEQ ID NO: 13295 - DNA, 363 bp, Unknown
  Obtained from environmental sample
  misc_feature (1)..(363): n is a, c, g, or t
gtgggcnggatatctttccaaagcgacattgctcacataaggaggatgcttgatttgacatgctggtttgtttcccgccatcccggagccgtcgaatgggccgtccggcggaagcttgccgtggatcaattcgtgccgcatctgaacgcgcgggatgtgcggggcggcgacttggtttacggcacactgcctgttgaactggcggcggaagtctgccgccggggggcgcggtttttcgccctgtgcgtgaacgtgacagaggaagaaagagggcgtaacctgacagccgatgatctcttccgcttgaacgcccgcttgcgggaataccatgtcgcagaattggaggatgacaatgacccctga

SEQ ID NO: 13296 - protein, 120 aa, Unknown
  Obtained from environmental sample
  misc_feature (1)..(120): Xaa is any amino acid
MGXISFQSDIAHIRRMLDLTCWFVSRHPGAVEWAVRRKLAVDQFVPHLNARDVRGGDLVYGTLPVELAAEVCRRGARFFALCVNVTEEERGRNLTADDLFRLNARLREYHVAELEDDNDP

SEQ ID NO: 13297 - DNA, 834 bp, Unknown
  Obtained from environmental sample
  misc_feature (1)..(834): n is a, c, g, or t
atggatcttgcccatgtgcgaatgttagtcgcgccaagcggggacgctcgtcttgtcgctgataaattagggaaagaattaacgaaaaattgccgtattattgatcgtgaagattttataaagtttgtagaaaaaatccgcaattacagcatagaagacagcatgaaagaatttgggataacttacgccgaagccgaagggtttgttctgggtcttttagtgcttaaactttttcttgaacaaacgggagccgcaaacatcgccgttccgctagttacgattcgggacggctatcttgtcgatttagtttccggcgttgactcctctttgcaggacgagttcttttcgcagattatcgcttccgctcttaaccttgggcgtaaataccattttgatgaagcgcacggcagactggtcgccaaccattgcatgacattattcgacgctcttacaaaagaacacggcatgaacaggcggcacaggataatgctggagacagccgctattctgcacgatgtcggcacttacataaaagagtcgggacatcagaaacacggtcagtacattgtcgccaactctgaaattttcgggcttcatcaggacgaacttggaataatcgccaacgtaatcaactgtcatcggggcgagcctcccacccagtccgaccttgaatttatgtcgctccagagagaggagcgagtacttgttcttaaaatggcttctattttgagagtcgctgacgttttggatcgaggtcatactcaacaagtaaaaaaaatctccgtggaacgccgtcctgaaaccgtcgttcttcatattgataaagcnttatga

SEQ ID NO: 13298 - protein, 277 aa, Unknown
  Obtained from environmental sample
  DOMAIN (139)...(252): HD domain
  misc_feature (1)..(277): Xaa is any amino acid
MDLAHVRMLVAPSGDARLVADKLGKELTKNCRIIDREDFIKFVEKIRNYSIEDSMKEFGITYAEAEGFVLGLLVLKLFLEQTGAANIAVPLVTIRDGYLVDLVSGVDSSLQDEFFSQIIASALNLGRKYHFDEAHGRLVANHCMTLFDALTKEHGMNRRHRIMLETAAILHDVGTYIKESGHQKHGQYIVANSEIFGLHQDELGIIANVINCHRGEPPTQSDLEFMSLQREERVLVLKMASILRVADVLDRGHTQQVKKISVERRPETVVLHIDKAL

SEQ ID NO: 13299 - DNA, 714 bp, Unknown
  Obtained from environmental sample
  misc_feature (1)..(714): n is a, c, g, or t
gtgaacgaccggattaaagctcttattaaagaagtaaacaagacaccttccggacttcagattgtactgtcgcgcaccgaccccgaatttgtccgggctatttttgagcttgaagttccggagatatacgacaaaaccgtcgagatacacaagatcgtcagggaggccggctacagaaccaaacttgccgtgtattcaaaccgcgacgacgttgaccctgtcggagcctgcgtgggtcttaagggtgtgaggatacaggcggttataaaggagcttgagggagaaaagatcgacatactaaaatacgatcccgatccgaggcactttattaagaacgccctttcccccgccgaggtcagagacgtgatcatcctcagcgagaaatcgaagaaagcccttgccgtagtaaacgattccctattatcgcttgccataggcaaacagggtcttaacgtgcgccttgccaacaaactaaccgactggatgatagacgtgaagaccgacgcgcaattcgccgaaatggatatagccgccgaatccaaacgtgcggtcaaggaactttttggagaaggagaaacagaggagttctccagaatttcggaacttccgggagtggatcccgccgctgcccaggcattgcttgacaatggcattgactatatcgtggacttccttgatctgagcaaggaacagcttgacgcgatggagatataa

SEQ ID NO: 13300 - protein, 237 aa, Unknown
  Obtained from environmental sample
  misc_feature (1)..(237): Xaa is any amino acid
MNDRIKALIKEVNKTPSGLQIVLSRTDPEFVRAIFELEVPEIYDKTVEIHKIVREAGYRTKLAVYSNRDDVDPVGACVGLKGVRIQAVIKELEGEKIDILKYDPDPRHFIKNALSPAEVRDVIILSEKSKKALAVVNDSLLSLAIGKQGLNVRLANKLTDWMIDVKTDAQFAEMDIAAESKRAVKELFGEGETEEFSRISELPGVDPAAAQALLDNGIDYIVDFLDLSKEQLDAMEI

SEQ ID NO: 13301 - DNA, 396 bp, Unknown
  Obtained from environmental sample
  misc_feature (1)..(396): n is a, c, g, or t
atgcaagtgcctataaaagacatcatagtcaaaaaaagaatacggaaagacttgggggacattgatgttctggcgaaaagcctcaaacatcacggacaaatcagccccattgtcataagcaaaaaaaacgttcttattgcaggaggaaggcggcttgaagccgcgaaaagccttggctggcggacgataaacgcggtgatacttgaaaattccaccgagctttcaagactgcaactggaaatagaagaaaacacccaacgccgcaatttcaccatggatgaactcgcggacgcgacaagaaaactttaccgtatgcaaaacccgggatttttcagccgcgtatggaaagccattatccgttttttcaaatggctgtttaaaattgagagcgaataa

SEQ ID NO: 13302 - protein, 131 aa, Unknown
  Obtained from environmental sample
  DOMAIN (1)...(85): ParB-like nuclease domain
  misc_feature (1)..(131): Xaa is any amino acid
MQVPIKDIIVKKRIRKDLGDIDVLAKSLKHHGQISPIVISKKNVLIAGGRRLEAAKSLGWRTINAVILENSTELSRLQLEIEENTQRRNFTMDELADATRKLYRMQNPGFFSRVWKAIIRFFKWLFKIESE

SEQ ID NO: 13303 - DNA, 465 bp, Unknown
  Obtained from environmental sample
  misc_feature (1)..(465): n is a, c, g, or t
ttgaaagtcggcgacgccgttatatccaccggacttctttaccacgatgttgacgttaccgcgtttaaatacctgcccggccagcttcccggccagcctcaaatttttccggcggatgaaaaacttataaaagccgccgaggacgctgttgatgaactggtaacggaaaaagttcttccttctgattttacccaccgccggggcataatcggttccggcgacatttttatgcacgaaccggaacgcatagacgcggtacgccgtgttttccccgacgtagttgcagtggaaatggaaggagccgcgatagcgcattcatgccgccttttttcggttccctttttggtaatccgcgccctttctgacattgccggcacgcagtcgcctgtaagttttgatgaatttcttccgatagcttccaaacattccgctaaaatagtaatcagaattattaagaaaaaatga

SEQ ID NO: 13304 - protein, 154 aa, Unknown
  Obtained from environmental sample
  DOMAIN (1)...(151): Phosphorylase family
  misc_feature (1)..(154): Xaa is any amino acid
MKVGDAVISTGLLYHDVDVTAFKYLPGQLPGQPQIFPADEKLIKAAEDAVDELVTEKVLPSDFTHRRGIIGSGDIFMHEPERIDAVRRVFPDVVAVEMEGAAIAHSCRLFSVPFLVIRALSDIAGTQSPVSFDEFLPIASKHSAKIVIRIIKKK

SEQ ID NO: 13305 - DNA, 354 bp, Unknown
  Obtained from environmental sample
  misc_feature (1)..(354): n is a, c, g, or t
atgatcagatcggcacgagcatggactgcccccattcttcctgccaatcctatcactactcccgattgcccttggtgcggaaaaaaaataagcgatattactacatccatttcagacaaagagacagggcttccggtgcattttgactgcgtgcttgcgcggattgcggaaacggaaaaacttgaggctaacgacagcatttgttacatcgggggcgggcgttttgggattgtgcattacagcaatccgccggacacaaaaggattcaccataaaaaaaatttttgagtgggaagctaaagacgctgtaagcgaatggcggcgtccaataagcgaatatttttcgataacgtaa

SEQ ID NO: 13306 - protein, 117 aa, Unknown
  Obtained from environmental sample
  misc_feature (1)..(117): Xaa is any amino acid
MIRSARAWTAPILPANPITTPDCPWCGKKISDITTSISDKETGLPVHFDCVLARIAETEKLEANDSICYIGGGRFGIVHYSNPPDTKGFTIKKIFEWEAKDAVSEWRRPISEYFSIT

SEQ ID NO: 13307 - DNA, 396 bp, Unknown
  Obtained from environmental sample
  misc_feature (1)..(396): n is a, c, g, or t
gtgtgctgcggcggcattgtggggatgggcgaaaagatagacgaccgcatacattttttgcacgaactgacgctgttggatccgccgcccgaaagcatacccatcaaccaactgcaccccgtggccggcacccccttggagggcatcgaaccgccgccgcccttggagttcatccgcatgattgccactgcgcggatactcttcccaaatagccgcatacgcctgagtgctgggcgcgtgaacatgggcatcgagatgcaggccctggcatttctagcaggtgcaaacagcctgttcacgggcgaaaaactgtttgtcaccccaggccccggcggctcgcaggatcatctgatgctggaggcgatggggatgatggtcgagaccggggcacaatag

SEQ ID NO: 13308 - protein, 131 aa, Unknown
  Obtained from environmental sample
  DOMAIN (34)...(126): Biotin and Thiamin Synthesis associated domain
  misc_feature (1)..(131): Xaa is any amino acid
MCCGGIVGMGEKIDDRIHFLHELTLLDPPPESIPINQLHPVAGTPLEGIEPPPPLEFIRMIATARILFPNSRIRLSAGRVNMGIEMQALAFLAGANSLFTGEKLFVTPGPGGSQDHLMLEAMGMMVETGAQ

SEQ ID NO: 13309 - DNA, 396 bp, Unknown
  Obtained from environmental sample
  misc_feature (1)..(396): n is a, c, g, or t
ttggcttcgtacctgaacggcagcggctgggagattctctcaactggcggcacagcgaaatatttaaaggaaaataatattcctgtaaccgacgttgcctcggtgacgggctttcccgaatgtcttgacggcagggtaaagaccctgcaccctgcaatccacgccggccttctggcccgcagagatgaaaagagccacatggatatgctgcaggaactgggacttggaaccatcgatcttgtttccgtcaacctgtacccgttttttgaaaaggtacaggcgaagctgacccttgaacagaccgttgagtttatcgacataggcggaccgaccatgcttcgttcggctgcaaaaaatatcacgatgtcattggtcctacagaccccccggatttaa

SEQ ID NO: 13310 - protein, 131 aa, Unknown
  Obtained from environmental sample
  DOMAIN (2)...(111): MGS-like domain
  misc_feature (1)..(131): Xaa is any amino acid
MASYLNGSGWEILSTGGTAKYLKENNIPVTDVASVTGFPECLDGRVKTLHPAIHAGLLARRDEKSHMDMLQELGLGTIDLVSVNLYPFFEKVQAKLTLEQTVEFIDIGGPTMLRSAAKNITMSLVLQTPRI

SEQ ID NO: 13311 - DNA, 567 bp, Unknown
  Obtained from environmental sample
  misc_feature (1)..(567): n is a, c, g, or t
gtgaccgcgatcaggaaggggactcaggcacaagcaaccgcngtttttgcccaaatagccagtttcatgggggacacttcttaccggggaaagatcatctggttccttataacctgccgtcccgaccttcttcccattgaccttaaacgccagggccgggcggaagaacactttgcccttttttacccggaaaccctgccggaaaaagtagcgctttttgaaacccttgtaaagaaactcagattcgggattcacactttttcggctctcgatcttttcaggaaatacgatcacgaggtttccggggcagaaattgaatccatgcttatcagggcaatgcaaagggctgtaatggaaggccggacaatgatttcaaaactggatatggaagaggtgatggaagattttatcccgccgcagtacccccacgcaatacggcttcaaaacctggtggcggcggtggaatgtacttccaaaaaaatggtcccaaagcgtttccagcttgataattcccagatggtgaaggaaatacaggagttgaagactctgctgggcgagagaaagtaa

SEQ ID NO: 13312 - protein, 188 aa, Unknown
  Obtained from environmental sample
  misc_feature (1)..(188): Xaa is any amino acid
MTAIRKGTQAQATAVFAQIASFMGDTSYRGKIIWFLITCRPDLLPIDLKRQGRAEEHFALFYPETLPEKVALFETLVKKLRFGIHTFSALDLFRKYDHEVSGAEIESMLIRAMQRAVMEGRTMISKLDMEEVMEDFIPPQYPHAIRLQNLVAAVECTSKKMVPKRFQLDNSQMVKEIQELKTLLGERK

SEQ ID NO: 13313 - DNA, 669 bp, Unknown
  Obtained from environmental sample
  misc_feature (1)..(669): n is a, c, g, or t
ttggagacgataacgtggaatcttgacagcgcggaaaaaggcggctatcgccatttcatgcttaaagaaattatggagcagcctaaagttttgcgcgaaacaattaattcggcgttaaatacgtataagagcatgattgacgctcttgacgtttcgcgctttacaaaaatcgtgataaccgcctgcggttcggcgtacaataccggcgtcgccgccaagtacgtgtttgaacgattgtgcagattcccgtcgattgaagttgagcttgcaagcgagttcaggtacagggacgcggtaattaatgaaaaaacccttgtaattttaattagccagtcaggcgaaactgcggatacaatcgcggcgttgcgcgaggcaaaaagtaaaggcgcttttacgctttcaatagtcaatgtggtgggaagtacaattgcgaaggaagccgacatttgcctgttcacttctgcgggaccggaaattgctgttgccacgacaaaggctttttccgcccagcttgtgctgttgtattttttagccgtttggtttgccgtcaagctggataaaataccgagagaaactgagcaggaacttttatcgcaaattgccgcattgccggaaaagacggagaatatactcaagcagatcgattctattaanctcgtgccgatctga

SEQ ID NO: 13314 - protein, 222 aa, Unknown
  Obtained from environmental sample
  DOMAIN (48)...(183): SIS domain
  misc_feature (1)..(222): Xaa is any amino acid
METITWNLDSAEKGGYRHFMLKEIMEQPKVLRETINSALNTYKSMIDALDVSRFTKIVITACGSAYNTGVAAKYVFERLCRFPSIEVELASEFRYRDAVINEKTLVILISQSGETADTIAALREAKSKGAFTLSIVNVVGSTIAKEADICLFTSAGPEIAVATTKAFSAQLVLLYFLAVWFAVKLDKIPRETEQELLSQIAALPEKTENILKQIDSIXLVPI

SEQ ID NO: 13315 - DNA, 390 bp, Unknown
  Obtained from environmental sample
  misc_feature (1)..(390): n is a, c, g, or t
atgaacctagccaccatactgacgacctcacgcatcgtaatcgcccccatattcgcgatggtattcgttcacggctaccgctccgacaccacaagcgtctcatggatatacatctgcttcgcgctcgcggtgctgatagagctttccgatatgttcgacgggatggccgcccgcgcccgcaaacaggtcaccgacttcggcaaagtctacgacccgatagccgacagcgtctcgcgggcaacggtcttcatatcgtttatgtacaccggcattataccgcttttgatgtacatgtattcctctaccgcgacgccttcatgcaattcccgcggaaagtctgcgccctccgggggcaacatgcttggaggcccaaatgttccggaaaaataa

SEQ ID NO: 13316 - protein, 129 aa, Unknown
  Obtained from environmental sample
  misc_feature (1)..(129): Xaa is any amino acid
MNLATILTTSRIVIAPIFAMVFVHGYRSDTTSVSWIYICFALAVLIELSDMFDGMAARARKQVTDFGKVYDPIADSVSRATVFISFMYTGIIPLLMYMYSSTATPSCNSRGKSAPSGGNMLGGPNVPEK

SEQ ID NO: 13317 - DNA, 459 bp, Unknown
  Obtained from environmental sample
  misc_feature (1)..(459): n is a, c, g, or t
gtgttcagcaaaaatccgggacacaacgacgacggcagttacacactgacaattgacctctctccggcggaaggcggtacggtgtcgcgcagcaacgagcggtcaggctacaaagccggaacgtcggttaccgtaacggccacgcctatggaaggatacacgttcctaggatggtcgggagcgctaaactccactaacgccaaagtaacaatcaccatgaatggcgacagatggctctccgccaacttcataaaagagggaagcggccaaaccgcgtacgacgtgcgcttcgacgcccacggcgcgaacggcaacgccccatcgcttgcgcgcgccgtctccggcaacagcataacgcttcccggacgggaaattatgaaaagagcggaatttaatttctccgaagggaaacaaacagtttccggtcgggacttaaccaccccctcgaattcttcttaa

SEQ ID NO: 13318 - protein, 152 aa, Unknown
  Obtained from environmental sample
  misc_feature (1)..(152): Xaa is any amino acid
MFSKNPGHNDDGSYTLTIDLSPAEGGTVSRSNERSGYKAGTSVTVTATPMEGYTFLGWSGALNSTNAKVTITMNGDRWLSANFIKEGSGQTAYDVRFDAHGANGNAPSLARAVSGNSITLPGREIMKRAEFNFSEGKQTVSGRDLTTPSNSS

SEQ ID NO: 13319 - DNA, 711 bp, Unknown
  Obtained from environmental sample
  misc_feature (1)..(711): n is a, c, g, or t
atggcatatacaggaaatgagaaagctggtgacgaaatgacaaaaagcggcataataatttccggcgatgccggagcggttaatttccgtgaaatacacatgggaactattgcgcctaatacgctttatcgcagcagccatcccattaaagacgacaaacaggaaccggttatttcaatgcttgcgtcaagcacgcggattgccacgataataaatttatccgactttgacactgaaataaaaagaaaggcgttctttgccccctggtacaatcagctccttaaaaacaaccgggttattgccctgggtatggactttagtcaaaccagcgaatattttcaaaaaaaattaaaaaaaggcctgcaatttatcatcaataccgaagggccctggcttattcattgccatgcgggaattgaccggacgggttttgtttccattgtgctggagtcccttatgggggcgacgctggacgagattatcaacgattaccttcaatcctttaacagtatatataattcgagtatttatggcgaaataaacaaaggggattctcttattgtgatgcggcttttatccgctatgggtaattatatgccgataaacgaccgaaatctgtcggctatcgcggaaaattatctgcttcataccattaagttgtctgttgcggaaatagagatgcttaaaagaaaattggctcgtacactgtaa

SEQ ID NO: 13320 - protein, 236 aa, Unknown
  Obtained from environmental sample
  misc_feature (1)..(236): Xaa is any amino acid
MAYTGNEKAGDEMTKSGIIISGDAGAVNFREIHMGTIAPNTLYRSSHPIKDDKQEPVISMLASSTRIATIINLSDFDTEIKRKAFFAPWYNQLLKNNRVIALGMDFSQTSEYFQKKLKKGLQFIINTEGPWLIHCHAGIDRTGFVSIVLESLMGATLDEIINDYLQSFNSIYNSSIYGEINKGDSLIVMRLLSAMGNYMPINDRNLSAIAENYLLHTIKLSVAEIEMLKRKLARTL

SEQ ID NO: 13321 - DNA, 459 bp, Unknown
  Obtained from environmental sample
  misc_feature (1)..(459): n is a, c, g, or t
ttgtgtgtggttgagtttttatcaaaacgtataagcaaggccaatgcttataaaaaaaggaatgaaatgaactggctggacgcccttattatcggcatatttcaggccgttgccattccgccaggcatctcccgttcaggcgcgactatttcgggcgcactttcccgcaggctggatcgggacttcgccgcccgcttttctnttctgctctccattccggcaatactcggcgctcttgtgctgaacctcaaagacctggcagagaacagcggagcgatgggcggtatgggtgtggaagttatcctggggatgctaacagcggcaattgtcggcttttttgccgttaagctgatgctgaaaatcgtcagggaaaaatcgctttttggctttgctgtttataccgctgcattgggcggtttgatcataatagatcagtttgtgactcatttggttttttaa

SEQ ID NO: 13322 - protein, 152 aa, Unknown
  Obtained from environmental sample
  DOMAIN (1)...(141): Bacitracin resistance protein BacA
  misc_feature (1)..(152): Xaa is any amino acid
MCVVEFLSKRISKANAYKKRNEMNWLDALIIGIFQAVAIPPGISRSGATISGALSRRLDRDFAARFSXLLSIPAILGALVLNLKDLAENSGAMGGMGVEVILGMLTAAIVGFFAVKLMLKIVREKSLFGFAVYTAALGGLIIIDQFVTHLVF

SEQ ID NO: 13323 - DNA, 363 bp, Unknown
  Obtained from environmental sample
  misc_feature (1)..(363): n is a, c, g, or t
atgcattttatttttttttgtatctttgcaagcaaaaaatttaccatgtcaacgctgacatctcaccaatcagctccctttcaagaagtgatctacacgccccaagcaacgcattttgcgctttggtcgccaatggccgatgaggttttgttgcgcatctacgacgctggaatagacggaaatcgattggcggaaattccgatgaaaccggatggtgacggctattggaaaacgtctttgaacggcaattacgacagaaaaatttacaccttgaacttcctatccgccaaccatggtacggtaaaacccccggtatatttgcaaagggccgttggggtaaacggactttcccggggcaattag

SEQ ID NO: 13324 - protein, 120 aa, Unknown
  Obtained from environmental sample
  misc_feature (1)..(120): Xaa is any amino acid
MHFIFFCIFASKKFTMSTLTSHQSAPFQEVIYTPQATHFALWSPMADEVLLRIYDAGIDGNRLAEIPMKPDGDGYWKTSLNGNYDRKIYTLNFLSANHGTVKPPVYLQRAVGVNGLSRGN

SEQ ID NO: 13325 - DNA, 870 bp, Unknown
  Obtained from environmental sample
  misc_feature (1)..(870): n is a, c, g, or t
ttgtcggccggtaacgcctccgccgaccaatctacggcgctacccggcggcagcgcggtagtcgaccaactggacgagttattcggcggccagacggtattgcaggcggccggtcccatagctggcggccagccggcggtcacaagcggcaacgccgttgtcgatcagttagacgaactcttcggcggccagactgttctgcccccggcggccatgccggtgggcggcatctcgaccgacccgcgccagacggcgtccagcggcaacgccgttgtcgaccagctggatgaactcttcggcggccagaccgttctgccgccggcggccctgcccgcggagggcatagcggccgcgcccgacctgccgtacgacatcacatccgagcttgacctgcccgaacccacggaggccatgtcggaaatctccgacagcggcgcggacgacgaggccgcccttgccgccgccttgggaggggatacctcggccatctccggctacgacgtggagagccgcataaacgacattttcggcgactccgccgacaagcagcaacagcagccgctcatgccgtatgagccggaatcggagccggagccggatgagaccatgtcgtacgcaatggacgaggccgcgctcgcaacgccgccggaggcggaatccgccgacaagcggcagccgctcaaaccgtatgagccggaaccggatgagaccatgtcgtacgcaacggatgaggccgcgctcgcaacggcgccggaggcggaatccgccgacgaactcgcgctgatagttgacgaaagcgaaaccgcgcccgccgacgaggccgcgccggatgcaggcgaagcggccgcccagaaactcccgtcctcatag

SEQ ID NO: 13326 - protein, 289 aa, Unknown
  Obtained from environmental sample
  misc_feature (1)..(289): Xaa is any amino acid
MSAGNASADQSTALPGGSAVVDQLDELFGGQTVLQAAGPIAGGQPAVTSGNAVVDQLDELFGGQTVLPPAAMPVGGISTDPRQTASSGNAVVDQLDELFGGQTVLPPAALPAEGIAAAPDLPYDITSELDLPEPTEAMSEISDSGADDEAALAAALGGDTSAISGYDVESRINDIFGDSADKQQQQPLMPYEPESEPEPDETMSYAMDEAALATPPEAESADKRQPLKPYEPEPDETMSYATDEAALATAPEAESADELALIVDESETAPADEAAPDAGEAAAQKLPSS

SEQ ID NO: 13327 - DNA, 540 bp, Unknown
  Obtained from environmental sample
  misc_feature (1)..(540): n is a, c, g, or t
ttgaccctctgtaannaaagctgtcgtattattcgtagggaaaagctggatatattatatggaagtaatcagggtagaaggcctttcaaatcttttggctccctggaagtgctaaaaaacatctcctttaccgtacaccagggtgaagtaatagcgatcatcggcccgtccgggtcgggaaaatccaccctgctgcgctgcattacccaccttgaaacagtaaacagcggcagcatcacccttaccggcagggacatggttaaagacggagtatatgcccacgcggacgcgttgcgggagatatgccttaaagtggggctggtctttcacaactttaacctctttccccatttttcggtggagcggaacattaccgaagcccaggtacatgtgcttaaaagaaccaaagcggatgccgcaagccgggcaagggccctgctggaaaaaatggggctttccgacaaggcccgttcctatccctttgagctgtcgggggggcagcaagcacggggtttcaatcgcccccaccatggcccttga

SEQ ID NO: 13328 - protein, 179 aa, Unknown
  Obtained from environmental sample
  DOMAIN (48)...(178): ABC transporter
  misc_feature (1)..(179): Xaa is any amino acid
MTLCXXSCRIIRREKLDILYGSNQGRRPFKSFGSLEVLKNISFTVHQGEVIAIIGPSGSGKSTLLRCITHLETVNSGSITLTGRDMVKDGVYAHADALREICLKVGLVFHNFNLFPHFSVERNITEAQVHVLKRTKADAASRARALLEKMGLSDKARSYPFELSGGQQARGFNRPHHGP

SEQ ID NO: 13329 - DNA, 627 bp, Unknown
  Obtained from environmental sample
  misc_feature (1)..(627): n is a, c, g, or t
gtggatgaggaatacgcccgtttaagcggggaggtgagggtgagccttaaagacggcgaagcgatccacgagataagggcatggagcattctttttaaccgtaccaggaatatccttacagcgtcgggcggtgttgaatatatcaagaaggaaggggataaaatagaaaccttcaggggggattccataaccgtagacattgacaactggtcaagcgtgttcctcggcggcgtatcggaacgctccctgcagagcgacaataccacctatctgttcgccggaaccgtaatttcacgcgatgaggaggaagtcaccgttctgaacagagccacgatcagcagcgccaacaaccccgaatccctgtggtcgcttaacgcctcgcgcgtatggcttcttccgggatccgatttcgcgattctgaacgccgtgcttaaagtcggcgaaatacctgtaatgtatatacccttcttttattatcccgcggatgaggttatttttcatcccgtgattggttcccgcacgagggaggggcactttatacagactaccacatatattctgggccgtcccaaggcaacttctacttcccagaattcgcttacgaaaatactggggcaattcggctga

SEQ ID NO: 13330 - protein, 208 aa, Unknown
  Obtained from environmental sample
  misc_feature (1)..(208): Xaa is any amino acid
MDEEYARLSGEVRVSLKDGEAIHEIRAWSILFNRTRNILTASGGVEYIKKEGDKIETFRGDSITVDIDNWSSVFLGGVSERSLQSDNTTYLFAGTVISRDEEEVTVLNRATISSANNPESLWSLNASRVWLLPGSDFAILNAVLKVGEIPVMYIPFFYYPADEVIFHPVIGSRTREGHFIQTTTYILGRPKATSTSQNSLTKILGQFG

SEQ ID NO: 13331 - DNA, 615 bp, Unknown
  Obtained from environmental sample
  misc_feature (1)..(615): n is a, c, g, or t
ttgaaaaagaggtttgaaaaatttgttccagcagggcagagcactcagatgattgtgggcgcaagccctgaaaacgatttgaacataataacgcttgcggcaaatctttacggtgagcaaaagttgaaaagggtttattattccagctatattcccgtgaatacagacaaccgcctgcccgttatttccgcaccaccgctcaaaagggaaaaccgcctttaccaagcggactggctgatgcgtttctatggtttttcttttgatgaaattttggataaggaaaatccttggctggatatggagtttgacccaaagatggcgtgggctttgaggcatccggagttttttcccgttgatttggactccgcgagctacgaggagattttgcgtgtcccaggcattggggttaggagtgcgaaatttatagtgcacagccgccgctttgggcacattcgcttggaacatctaaagaaaatgggtgttgcacttaaaagggcaaagtattttttggcaaacccagatattccaagggagtggcaaaagttttaccccgagcagattaaaatgcaattattgcccgcaccaaagaaagccgctttgccaaaattgttttaa

SEQ ID NO: 13332 - protein, 204 aa, Unknown
  Obtained from environmental sample
  misc_feature (1)..(204): Xaa is any amino acid
MKKRFEKFVPAGQSTQMIVGASPENDLNIITLAANLYGEQKLKRVYYSSYIPVNTDNRLPVISAPPLKRENRLYQADWLMRFYGFSFDEILDKENPWLDMEFDPKMAWALRHPEFFPVDLDSASYEEILRVPGIGVRSAKFIVHSRRFGHIRLEHLKKMGVALKRAKYFLANPDIPREWQKFYPEQIKMQLLPAPKKAALPKLF

SEQ ID NO: 13333 - DNA, 654 bp, Unknown
  Obtained from environmental sample
  misc_feature (1)..(654): n is a, c, g, or t
atgcgccccaaacagggttttgggaggaattttttgttttttggacaccgggtttgtaacgaccacattcttgcagaggggcagcctcgccggtatgaaccggcgcaccggttttttccggatcccaagctgtggctttcgccgctgtcagcggccgggagcaagcttgggataattgcagcaaaaatgtataaaaaaataatatttacaaactggtttaagaaaaacaaaaggacaggcggcaagtttatggaaaatataaaagaaagagcgttaaaactggcaaataaaaaaatagcgtttgtcggttctgtcaacgaaaataatatgccgaacatcaaggctatgtcggtcgcaaaacatcatgggctggaaacattttactttgcctcaagtcattccgcaataaagacggaacactataagcgtaattttaacgcttgtatatattttaacgacgggcaaatttataaagaacttgtgctggaaggcataatgaaaatattcaatgacatcgatataaaaaagttagtatggaaagacgccttcagaagcgcgtataaaaacggcggaataaacgatcctgattactgtgtgttaaaatttactgcaaagaagggacactatcacaccgaggcgtttgagatagattag

SEQ ID NO: 13334 - protein, 217 aa, Unknown
  Obtained from environmental sample
  DOMAIN (87)...(173): Pyridoxamine 5'-phosphate oxidase
  misc_feature (1)..(217): Xaa is any amino acid
MRPKQGFGRNFLFFGHRVCNDHILAEGQPRRYEPAHRFFPDPKLWLSPLSAAGSKLGIIAAKMYKKIIFTNWFKKNKRTGGKFMENIKERALKLANKKIAFVGSVNENNMPNIKAMSVAKHHGLETFYFASSHSAIKTEHYKRNFNACIYFNDGQIYKELVLEGIMKIFNDIDIKKLVWKDAFRSAYKNGGINDPDYCVLKFTAKKGHYHTEAFEID

SEQ ID NO: 13335 - DNA, 447 bp, Unknown
  Obtained from environmental sample
  misc_feature (1)..(447): n is a, c, g, or t
ttgnaacgggagccggcnggtttaaanccnttcaacattttttaccctttcgcccctgttgttttncgcggggggttttcccggtggggaaacagggcaacccggggggcgtccagcatgagcggatcggcggatgtgcttgaaaagctcggcgttgatattacagtatcgcctgagcgcagcctgcatctgttaaaaacgataaacctttgtttcctctttgcgcagaactaccacatctcaatgaagtacgtcgctccggtacgccgcgagctgggaatccgcacgatattcaacatactcggcccgctggtaaatccggcaggtgcaaacatggaattgctgggcgtgtatgacaaagacatgatagagccgatggcgaaagtcctgtgcaaccttggggtaaaaagcggcatnggtggtatatggacaggacggcctggatga

SEQ ID NO: 13336 - protein, 148 aa, Unknown
  Obtained from environmental sample
  DOMAIN (7)...(148): Glycosyl transferase family, a/b domain
  misc_feature (1)..(148): Xaa is any amino acid
MXREPAGLXPFNIFYPFAPVVXRGGFSRWGNRATRGASSMSGSADVLEKLGVDITVSPERSLHLLKTINLCFLFAQNYHISMKYVAPVRRELGIRTIFNILGPLVNPAGANMELLGVYDKDMIEPMAKVLCNLGVKSGXGGIWTGRPG

SEQ ID NO: 13337 - DNA, 498 bp, Unknown
  Obtained from environmental sample
  misc_feature (1)..(498): n is a, c, g, or t
ttgcgggatgccgaatatggccgttttcatcttgttgacgcggttgaaaccgcaaagatgatgaaagcgctgattagttaccagggaccggcgtatatcaggattaaccgaaacgacctgccggtttttactgaggaatcagacgattataaaatcgggaaaatctatccattaaccgaaggagatgatgccgcgatttttgctaccggtgtcatggtaagtaagtcaattgaagcggcggaaaaacttaaggcggaaggcattagcgtacaggtgttaaatgtcagtacccttaagccgcttttaaaagaggaagtactgaaattcgccaaagggaaaaaggcgattatcaccgcggaggaatctgttaaatcaggcggtcttggcagcgcgattgcctcgatgctcttcggtgaaattaatgccgccttgaacaggtggccattgatgacaaatttggcgcttccgcacattcatangaggatctcggccatctga

SEQ ID NO: 13338 - protein, 165 aa, Unknown
  Obtained from environmental sample
  DOMAIN (53)...(162): Transketolase, C-terminal domain
  misc_feature (1)..(165): Xaa is any amino acid
MRDAEYGRFHLVDAVETAKMMKALISYQGPAYIRINRNDLPVFTEESDDYKIGKIYPLTEGDDAAIFATGVMVSKSIEAAEKLKAEGISVQVLNVSTLKPLLKEEVLKFAKGKKAIITAEESVKSGGLGSAIASMLFGEINAALNRWPLMTNLALPHIHXRISAI

SEQ ID NO: 13339 - DNA, 705 bp, Unknown
  Obtained from environmental sample
  misc_feature (1)..(705): n is a, c, g, or t
gtgtacaatgaatataaaaaatggggccgcatggtgggggtgcgggtagtaggcgatctgaacgctttggtggcaaaacggacgatcaacgattacatcagaattgccgaggcgcaccagagccggaaaatggctgaaatagcggaacaaatctacgaacagttagaccgcattaaaacggtaatgcttgccggcccttccagttccggcaagaccaccagcgcgaaacggctttctattgaacttatggtgctggggattaagcccgtcgccatcagtctggatgattattatgtgggaaaagaacttactcccaaagatgaaaaaggcgatcctgattatgaatgtcttgaagccttggacatcccccttttgaacgagcatttacaggccttgtaccgcggcgaggaaatcagactgcccgtttatgattttaaaaccggcagccgcagggagggcgggggaaaaacgattcatcttgatgaccgcgcggtgctgatcgttgaaggcattcacgccctcaacgaanccctgactccaagtattgcgcgtaacacccggtttaagttatacgtttccgccctgacccagcttaatggggacgaccacaacccccgtccccaccagtggaaacctggttcttgggggngtagggggtccgagtcaccggagtcggggaaaaggaaggccgcccggaatagataa

SEQ ID NO: 13340 - protein, 234 aa, Unknown
  Obtained from environmental sample
  DOMAIN (60)...(225): Phosphoribulokinase / Uridine kinase family
  misc_feature (1)..(234): Xaa is any amino acid
MYNEYKKWGRMVGVRVVGDLNALVAKRTINDYIRIAEAHQSRKMAEIAEQIYEQLDRIKTVMLAGPSSSGKTTSAKRLSIELMVLGIKPVAISLDDYYVGKELTPKDEKGDPDYECLEALDIPLLNEHLQALYRGEEIRLPVYDFKTGSRREGGGKTIHLDDRAVLIVEGIHALNEXLTPSIARNTRFKLYVSALTQLNGDDHNPRPHQWKPGSWGXRGSESPESGKRKAARNR

SEQ ID NO: 13341 - DNA, 618 bp, Unknown
  Obtained from environmental sample
  misc_feature (1)..(618): n is a, c, g, or t
ttgggttttttttggggaattcgcgcgggggccccgggattttttttcgaacctgaattgccgagcccttggccttgcccgacggggtttccggcccggcccggggggggcggttgctcccacgaggattgttttcgccacggcggcccggtggggcatcccgaggcggatttaaaggggcccgcgcccctgggccgggtccacgatgacaacgcggcctggctggggggcgtggccggccacgccgggcttttcgccccggccgccggggcctgggccatagccgctgattgggttcgggcctggcgcgagggccggggcctggttttcgagcgtccggccctggccgcgtttcttcgtcccgtcccggaccggaacggaacggggcggcccttgggcttcaaccgccgggggctggtctcggccttggccggttccgactggcccgaaaacacggtcgggcattcgggctataccggccccgccctgtggtgggctccggaccttgatttcctctggcttttcctgaccaaccgggtccacccccgggcggtcaacccggcctgggttccggctacgtatatcggcggcccgccctggaagtgctggcttaactaa

SEQ ID NO: 13342 - protein, 205 aa, Unknown
  Obtained from environmental sample
  misc_feature (1)..(205): Xaa is any amino acid
MGFFWGIRAGAPGFFFEPELPSPWPCPTGFPARPGGGGCSHEDCFRHGGPVGHPEADLKGPAPLGRVHDDNAAWLGGVAGHAGLFAPAAGAWAIAADWVRAWREGRGLVFERPALAAFLRPVPDRNGTGRPLGFNRRGLVSALAGSDWPENTVGHSGYTGPALWWAPDLDFLWLFLTNRVHPRAVNPAWVPATYIGGPPWKCWLN

SEQ ID NO: 13343 - DNA, 534 bp, Unknown
  Obtained from environmental sample
  misc_feature (1)..(534): n is a, c, g, or t
ttggcagcagagatagttcatttaaggggaaataattccaaattcggcatgggaaccggaaaagccgaagaattggctaaaaaagcagcttcgctcgaagtggattgcatggttttcgacagggaaataagcccgtcgcagcagagaaactgggaaagcctggctggaatccccgtcatcgaccgccaggagctgattattcagatttttgccagccgcgcccgcacgcgcgaggccgaattgcaggtacgccttgcggagctgatctattcccttccaaggcttcagcataagcacatcgatctttccaggcaaaggggtggccgctacggctccagggattcaggcgaaacaaagctggaaactgacaggcgccaggtggaaaggaggattcacaggcttgaagaagagctggaacaattaaagcgccagaggcaggttcagaggaaaaagcgcgagcgcagcggcataccggttttgcgccctggtgggctacacaaacgccggaaaaatcctcgatcctttacgcgctga

SEQ ID NO: 13344 - protein, 177 aa, Unknown
  Obtained from environmental sample
  misc_feature (1)..(177): Xaa is any amino acid
MAAEIVHLRGNNSKFGMGTGKAEELAKKAASLEVDCMVFDREISPSQQRNWESLAGIPVIDRQELIIQIFASRARTREAELQVRLAELIYSLPRLQHKHIDLSRQRGGRYGSRDSGETKLETDRRQVERRIHRLEEELEQLKRQRQVQRKKRERSGIPVLRPGGLHKRRKNPRSFTR

SEQ ID NO: 13345 - DNA, 576 bp, Unknown
  Obtained from environmental sample
  misc_feature (1)..(576): n is a, c, g, or t
ttgtcaggcaaaggtattgaagatatactaccgttagaaattacaaacagaaaaataaccactgacgtttttaccaatagcgctttcggcagcggcaatgtcggttatgtaaaagccgccgcgcccataactctgccgcatatcgcctacaatgaaaacgatatttggccgctttctgccgcacttactccccattcaagccacgctcttttgttatgcggcgcttatggcaagagcatcctctacgtgctgacaatccctgacgcgttcgccgacttgtacaatctgccagctgaaacactctcttgtttacgccgggaatttaatttgcccataacgcttgaatgtgcaggccgcgtgtcgctattcccctatgacaacgatacttttattttgcagtcgtttcttaacaggccggagcgtgtgcgcgtccgcattaacaggcctgatgcanagctaattccgttgatgaaaccgagaatgcgtccctttgatatagccccccattcaggcgggaacgaaagcgtttttgatattcacataatgcctggggcattacatggtgtttatgattga

SEQ ID NO: 13346 - protein, 191 aa, Unknown
  Obtained from environmental sample
  misc_feature (1)..(191): Xaa is any amino acid
MSGKGIEDILPLEITNRKITTDVFTNSAFGSGNVGYVKAAAPITLPHIAYNENDIWPLSAALTPHSSHALLLCGAYGKSILYVLTIPDAFADLYNLPAETLSCLRREFNLPITLECAGRVSLFPYDNDTFILQSFLNRPERVRVRINRPDAXLIPLMKPRMRPFDIAPHSGGNESVFDIHIMPGALHGVYD

SEQ ID NO: 13347 - DNA, 396 bp, Unknown
  Obtained from environmental sample
  misc_feature (1)..(396): n is a, c, g, or t
gtgttgggagatcatatcgctcaaaaaggctccaatataacagccgagcgtatgcgctttgacttctcccacaacgcgccgatgaccgatgaagaaatcaaaaaagttcaggatttggtcaatgaacaaataactaagaatctgcctgtaagcatggagatcatggatctggaaagcgccaaagctgccggcgcttccgccctcttcggcgaaaagtacgagtcccaggttaaggtctataccatcgggcagaaaggacagcatttctccatggaagtctgcggcggcccgcatgtggaaaataccggtactcttgggaaattcgttattcagaaggaacagtcctcctcggccggcgtccgcagaatcagagctgtacttgaacaagtaacttga

SEQ ID NO: 13348 - protein, 131 aa, Unknown
  Obtained from environmental sample
  DOMAIN (77)...(124): Threonyl and Alanyl tRNA synthetase second additional domain
  misc_feature (1)..(131): Xaa is any amino acid
MLGDHIAQKGSNITAERMRFDFSHNAPMTDEEIKKVQDLVNEQITKNLPVSMEIMDLESAKAAGASALFGEKYESQVKVYTIGQKGQHFSMEVCGGPHVENTGTLGKFVIQKEQSSSAGVRRIRAVLEQVT

SEQ ID NO: 13349 - DNA, 507 bp, Unknown
  Obtained from environmental sample
  misc_feature (1)..(507): n is a, c, g, or t
atgccgatgcttgaagaactatcgatcaggaactatgcgttaatcgattctgttacgctgtcttttcgttccggattcaatgttttgtcaggtgaaaccggcgccggaaaatcaatcattgtaggttccttaagttttttaatgggagccaaagcggagactgatgtcatacgttcaggctgcgatgaagccggcgtgtcggcggttatttcgataaataagaacaatccggaagttacagaatggcttaaaaaccgcgacattgaatgcgaggaagaggctgtaattgtacgaagaaacataaaggcatctggacgttcttcaatatatattcagaatattccaataacaaaacaggatttggaagagttcatgggtctgttattcgatcttcacgggcagcataatcacgaatcactgcttcgcagggaaaaccacaggcgttatctggacaggtttgccggaatcaaaaatgaagttaaaaatttttcagggatatttggttga

SEQ ID NO: 13350 - protein, 168 aa, Unknown
  Obtained from environmental sample
  DOMAIN (3)...(165): RecF/RecN/SMC N terminal domain
  misc_feature (1)..(168): Xaa is any amino acid
MPMLEELSIRNYALIDSVTLSFRSGFNVLSGETGAGKSIIVGSLSFLMGAKAETDVIRSGCDEAGVSAVISINKNNPEVTEWLKNRDIECEEEAVIVRRNIKASGRSSIYIQNIPITKQDLEEFMGLLFDLHGQHNHESLLRRENHRRYLDRFAGIKNEVKNFSGIFG

SEQ ID NO: 13351 - DNA, 603 bp, Unknown
  Obtained from environmental sample
  misc_feature (1)..(603): n is a, c, g, or t
gtgatgaaatccgtgtcctacctgcggttcttagccgttgttattattttccttctacttgtaccgatctttgcccaggagactatggaatacactattcccgagccggaaaggcgatcccttgcccctgaaaatccggaggaggttccccgccagttccggggaatttcgctgggaatggctttggatgagcttaaaacggcccttattgccgatacgctttttagtttccgtggagaccgggacgtgtcatttttgcctgtgcgcgaagaaaccatggtggaaaccaccgggctttcctacatcagacgcgcttttttccagcttacacagggggcggtctacatcatgtcattctcactcgacacaaggcagatagaccattattcggtttttaccagctttgtaaaaaaatacggggagcctgttgaacttagtccgaccgaggcggtgtgggaatcagaaactaccagggtttccatcgaaaggccgcttacggtcaagtacatcgacaagacagtctttaaccgcctgcttgaagagtcaaaggcccgtgacagccaggaagttttacgcagggagagtttccttggcgatttttaa

SEQ ID NO: 13352 - protein, 200 aa, Unknown
  Obtained from environmental sample
  SIGNAL (1)...(25)
  misc_feature (1)..(200): Xaa is any amino acid
MMKSVSYLRFLAVVIIFLLLVPIFAQETMEYTIPEPERRSLAPENPEEVPRQFRGISLGMALDELKTALIADTLFSFRGDRDVSFLPVREETMVETTGLSYIRRAFFQLTQGAVYIMSFSLDTRQIDHYSVFTSFVKKYGEPVELSPTEAVWESETTRVSIERPLTVKYIDKTVFNRLLEESKARDSQEVLRRESFLGDF

SEQ ID NO: 13353 - DNA, 810 bp, Unknown
  Obtained from environmental sample
  misc_feature (1)..(810): n is a, c, g, or t
gtggcggcatccaagagcggcattaacatggacgcggtacgccgcatgggagaaatcatcaaggaaacagcggctaaaaccgcaagccacgacggcataggctgtgcgaagctcgttgtgttctgcaacgcgccggaagacaatccctttatggcaggcgcttttcacggagtgggagaagcggaaacctgcctgaatgtcggcgtttccgggcccggcgttgtaaaggccgctatggaaaaccatagagatgctggctttgacgagctggccgatatcataaaaaaaactgccttcaagataacccgcatgggccagcttgtcggcatggaagctgcaaaccgcatgggggtgcctttcggcatacttgacctttcgctcgcgccgaccccggcggttggcgattcggtggcgcgtatccttgaggagatggggctcgaagccgccggaacccacggaacgacggcggctctggcgatgctgaccgacatggtaaaaaaaggcggcgttatggcctccacccacgtgggcggtttttccggcgctttcattccggtttgcgaggacgaaggcatggccgaagccgtgaaaagcggcgcgattagcctggacaagctggaggccatgacttccgtctgttccgtgggccttgacatgatcgccctgcccggcgacaccagcgctgccacgatctcggcgattatcgccgacgagatggcgattggcatggttaacaacaaaaccaccgccgtgcgtgtatttcggtccaggcaaaaaaccggggactgggccgagtcggtggcattttag

SEQ ID NO: 13354 - protein, 269 aa, Unknown
  Obtained from environmental sample
  DOMAIN (1)...(269): Uncharacterized ACR (DUF711)
  misc_feature (1)..(269): Xaa is any amino acid
MAASKSGINMDAVRRMGEIIKETAAKTASHDGIGCAKLVVFCNAPEDNPFMAGAFHGVGEAETCLNVGVSGPGVVKAAMENHRDAGFDELADIIKKTAFKITRMGQLVGMEAANRMGVPFGILDLSLAPTPAVGDSVARILEEMGLEAAGTHGTTAALAMLTDMVKKGGVMASTHVGGFSGAFIPVCEDEGMAEAVKSGAISLDKLEAMTSVCSVGLDMIALPGDTSAATISAIIADEMAIGMVNNKTTAVRVFRSRQKTGDWAESVAF

SEQ ID NO: 13355 - DNA, 582 bp, Unknown
  Obtained from environmental sample
  misc_feature (1)..(582): n is a, c, g, or t
gtggttttgttgttaaccatgccaatcgccatctcgtcggcgataatcgccgagatcgtggcagcgctggtgtcgccgggcagggcgatcatgtcaaggcccacggaacagacggaagtcatggcctccagcttgtccaggctaatcgcgccgcttttcacggcttcggccatgccttcgtcctcgcaaaccggaatgaaagcgccggaaaaaccgcccacgtgggtggaggccataacgccgcctttttttaccatgtcggtcagcatcgccagagccgccgtcgttccgtgggttccggcggcttcgagccccatctcctcaaggatacgcgccaccgaatcgccaaccgccggggtcggcgcgagcgaaaggtcaagtatgccgaaaggcacccccatgcggtttgcagcttccatgccgacaagctggcccatgcgggttatcttgaaggcagttttttttatgatatcggccagctcgtcaaagccagcatctctatggttttccatagcggcctttacaacgccgggcccggaaacgccgacattcaggcaggtttccgcttctcccactccgtga

SEQ ID NO: 13356 - protein, 193 aa, Unknown
  Obtained from environmental sample
  SIGNAL (1)...(22)
  misc_feature (1)..(193): Xaa is any amino acid
MVLLLTMPIAISSAIIAEIVAALVSPGRAIMSRPTEQTEVMASSLSRLIAPLFTASAMPSSSQTGMKAPEKPPTWVEAITPPFFTMSVSIARAAVVPWVPAASSPISSRIRATESPTAGVGASERSSMPKGTPMRFAASMPTSWPMRVILKAVFFMISASSSKPASLWFSIAAFTTPGPETPTFRQVSASPTP

SEQ ID NO: 13357 - DNA, 471 bp, Unknown
  Obtained from environmental sample
  misc_feature (1)..(471): n is a, c, g, or t
atgcccagataccgaactaccgatgtcgcatcaggccaggggttatttttaaccgtatatttaaaagaacaattattacccggcagttttgaatatatgcgtgacgaaataatcgggacaaaaatagacctgagcgcatttgaggcgaagtataagaatgacgccacgggagcgggcgcgattccccctggggtattattgaaactggtaatctacggataccataacggcgtaataagttcacggaagatagatacactgaacaaaactaatatcatagcgaaagcgttaacgggggatatggaaatccattggacgacgatnggggatttcatatccgggaacaaagaggcggtgaaagagacatttacgcaggtgccactgactcggttcacattacgagggaaagggaaagtaaataatagaacccgtttgccctattacatattcaaatttgattaccggggataa

SEQ ID NO: 13358 - protein, 156 aa, Unknown
  Obtained from environmental sample
  misc_feature (1)..(156): Xaa is any amino acid
MPRYRTTDVASGQGLFLTVYLKEQLLPGSFEYMRDEIIGTKIDLSAFEAKYKNDATGAGAIPPGVLLKLVIYGYHNGVISSRKIDTLNKTNIIAKALTGDMEIHWTTXGDFISGNKEAVKETFTQVPLTRFTLRGKGKVNNRTRLPYYIFKFDYRG

SEQ ID NO: 13359 - DNA, 306 bp, Unknown
  Obtained from environmental sample
  misc_feature (1)..(306): n is a, c, g, or t
gtgcgcgacgagatcgtctcgcgcctttcgagcatcacccaaaaagacgagacggagcggctgttgtcggagatacgcgcgaggtcggatgtggagttcaacgtggatctgattccaggggtgggatcgattactccggacgcgcccaagcaggacgcggcgaagccggaaccgcctaaaccggtagcgcccgcggcgccgcccgcaccgagacctgtggtgcctgcgcagtcgaggcccgccgcgccagcgccggcgcaggccccggctccggctccggcggctccggcccaagagagtccttaa

SEQ ID NO: 13360 - protein, 101 aa, Unknown
  Obtained from environmental sample
  misc_feature (1)..(101): Xaa is any amino acid
MRDEIVSRLSSITQKDETERLLSEIRARSDVEFNVDLIPGVGSITPDAPKQDAAKPEPPKPVAPAAPPAPRPVVPAQSRPAAPAPAQAPAPAPAAPAQESP

SEQ ID NO: 13361 - DNA, 390 bp, Unknown
  Obtained from environmental sample
  misc_feature (1)..(390): n is a, c, g, or t
ttggctgtgcgaagatcgtccttgccgcggcgttggctgtcgcgtggttcgcgtcgctcgggttcgcccagacggctggatcggcggcgcctaagacgaaggttgagtcggcgcaatccaagacctctgccgccgctacgcctattgattcggtgccgcaaactaaaccgacccccgcgcaatcagctcccgcgtcagcggaatcgatcaaacccgaagcatccgccgtccagcataagcaacccgattctaccgccgaaagcgccgcgtcgcggaccgccgacgaggatgaggccgaagccgaggatgatgatgagcagacgcagagcggcagacgcgccgccgcgtcccgccccccgccgatcgcgttcgaccggcccggccacttag

SEQ ID NO: 13362 - protein, 129 aa, Unknown
  Obtained from environmental sample
  misc_feature (1)..(129): Xaa is any amino acid
MAVRRSSLPRRWLSRGSRRSGSPRRLDRRRLRRRLSRRNPRPLPPLRLLIRCRKLNRPPRNQLPRQRNRSNPKHPPSSISNPILPPKAPRRGPPTRMRPKPRMMMSRRRAADAPPRPAPRRSRSTGPAT

SEQ ID NO: 13363 - DNA, 741 bp, Unknown
  Obtained from environmental sample
  misc_feature (1)..(741): n is a, c, g, or t
atgaagcccggtaatgaggagaaaaagccgtccgagtccaccactgaaactccacccgctgaagttcccgcaactaaaactcccgccgataaaagcgccccggaaaaagcctctccgctcaaagtggcgcttaataaattcgagatacgtaacgcccaactttcctttcaagacgataagagcaaaatgaaggcgactgttgacgcgctcaatttcattctgcagggcgatatgtcgcttgataatgtcgtattaaaattaaaattggatataaacgatattgattttataatggacaacatccacatgttgaaaaaagcgcgagtcggctttgtttcggaagttggcgccgatcttaaaaacatggaattcactttaaaagataataaattcaacctgaatgaaattgtttttaaattcgcgggttcggtgaaaatgccgggcgacatcatagtcgatatgacgtttggcaccgaaacaatagatttcaagaacgtactgcaacttgttccggccatatttatgaagggctttgaatcaataaaaacgacgggcagattcggcttttcgggcgacataaaaggcacatacaacgataaacaaatgcccaacgccaatgtaagcttctttattgaaaatgccatgttcaaatatcccgacctgcccaagtcggtagacaatatcaacattcaactcaacgcgtattatgaccgagccaaattagacaatttcaaactttga

SEQ ID NO: 13364 - protein, 246 aa, Unknown
  Obtained from environmental sample
  misc_feature (1)..(246): Xaa is any amino acid
MKPGNEEKKPSESTTETPPAEVPATKTPADKSAPEKASPLKVALNKFEIRNAQLSFQDDKSKMKATVDALNFILQGDMSLDNVVLKLKLDINDIDFIMDNIHMLKKARVGFVSEVGADLKNMEFTLKDNKFNLNEIVFKFAGSVKMPGDIIVDMTFGTETIDFKNVLQLVPAIFMKGFESIKTTGRFGFSGDIKGTYNDKQMPNANVSFFIENAMFKYPDLPKSVDNINIQLNAYYDRAKLDNFKL

SEQ ID NO: 13365 - DNA, 408 bp, Unknown
  Obtained from environmental sample
  misc_feature (1)..(408): n is a, c, g, or t
atgacagttaaagaagataaaagatattattttgattgggcggcgtccgctcctttcgacataactcaaacacagtctcattacgggaatccttcgtctttacacagcgaaggcagagcggcaaaacaggcgctggaagacgcgcgccaaaaatgcgcggatgttttacaggttccgccgcagacgctctattttacaagcggtggcactgaatccaacggtacagcgattttatccaacctgatgagaaagggaaacggaagaagtatttcttctcttgccgaacacgcttccgtaagagacgcaatggaaactcttgacaaatttggaaagcccatcggcaatattacagtcgattccggcgggagggtaccgctgnaaaattacaaaaagcctcggccgatctga

SEQ ID NO: 13366 - protein, 135 aa, Unknown
  Obtained from environmental sample
  misc_feature (1)..(135): Xaa is any amino acid
MTVKEDKRYYFDWAASAPFDITQTQSHYGNPSSLHSEGRAAKQALEDARQKCADVLQVPPQTLYFTSGGTESNGTAILSNLMRKGNGRSISSLAEHASVRDAMETLDKFGKPIGNITVDSGGRVPLXNYKKPRPI

SEQ ID NO: 13367 - DNA, 597 bp, Unknown
  Obtained from environmental sample
  misc_feature (1)..(597): n is a, c, g, or t
gtgctgacaggttcaattgacggcgtggctgaaattcttgactccgccggaaagcgtgttttttactttgaaccgggcggttcgcgttattcggtgatccttggatgcgctgtttcaaataatggttcgcggattgggataataagcggcattgatcaacaaagatttttattgcttgaacgtttcggcaccggcagcgattacaaggtaatctaccatgaatttttaagcgaaggtttcaggcgccctgtgctgattgcttttactgacgaagaccgccgcattgtttatgagcgcatagaagggcttggctgttacaatataaaatccagacaggggttcagcatcccgctggacggcgagattgcggctgttgataattccggagacaaaggtttcttctttttgataaattcccgcgcggacaaggtaaaagagcttatcggcataaggtttccggaagataaaaggctttcggtttcaaagtacaacggggacatgagaggcgctatttttttaagggcgccattcaagagcgataccgtatttatcggcagaaacggccctatgctggtaaccggcggaggaaaaaattaa

SEQ ID NO: 13368 - protein, 198 aa, Unknown
  Obtained from environmental sample
  misc_feature (1)..(198): Xaa is any amino acid
MLTGSIDGVAEILDSAGKRVFYFEPGGSRYSVILGCAVSNNGSRIGIISGIDQQRFLLLERFGTGSDYKVIYHEFLSEGFRRPVLIAFTDEDRRIVYERIEGLGCYNIKSRQGFSIPLDGEIAAVDNSGDKGFFFLINSRADKVKELIGIRFPEDKRLSVSKYNGDMRGAIFLRAPFKSDTVFIGRNGPMLVTGGGKN

SEQ ID NO: 13369 - DNA, 495 bp, Unknown
  Obtained from environmental sample
  misc_feature (1)..(495): n is a, c, g, or t
atgtatcagatcggccgaggtacgggngaagaaatcggcatgatctttcaggagccggggcgctcctatgaccccctgcaaaacatgggcagcgtgtttctggaaacattcagaaacagcaggccgganataaccaaagaagaagcctttgaaaagcggcggcgctgcttgccgaaacggggcttgagcgcggcagggaaacgctggggcacttttccccacagttttccnggcgncagntgcagcggcatcgcatcgcgctggcgctggcgcaaggatgtgagttgctgntcccccaccaagcggaacacgccctggacgttacccatccgaaaccaaatgggggaactgctgcaaaaactgggccgaaaccgcggatttcccttttttttttcccccccgaaatttaaacggggaccccaaattttccaaccccctatggttattttccggcggcttgcaaaaaaaatggggcccggggggggaattttttga

SEQ ID NO: 13370 - protein, 164 aa, Unknown
  Obtained from environmental sample
  misc_feature (1)..(164): Xaa is any amino acid
MYQIGRGTGEEIGMIFQEPGRSYDPLQNMGSVFLETFRNSRPXITKEEAFEKRRRCLPKRGLSAAGKRWGTFPHSFPGXXCSGIASRWRWRKDVSCXSPTKRNTPWTLPIRNQMGELLQKLGRNRGFPFFFSPPKFKRGPQIFQPPMVIFRRLAKKMGPGGGIF

SEQ ID NO: 13371 - DNA, 405 bp, Unknown
  Obtained from environmental sample
  misc_feature (1)..(405): n is a, c, g, or t
atgagcgtatctgatcccgttgccgacatgctgacaaaaatcaggaatgccggaatgtcgaagcatgaaaaagttgatatacccacctccaagctgaaacttgagattgttaaaatcatgaagaccgaagggtatataaaaaatttcaaaaaggtaaaccaggacggcgtgaacgtgattcgtgttttccttaaatatgacgatttaactgccccgattatccacggcattgaaaaggtgtcaaagccgggccgccgtgtgtacatgggctataaaaatatgccgagaatttttaacggctatggaaccctgatcgtttccacgtcccaggggagtaacaaccggcaagaaaaccccccgagaaaaaagtccggcggtgaaattccatctgctccggggtggtga

SEQ ID NO: 13372 - protein, 134 aa, Unknown
  Obtained from environmental sample
  DOMAIN (5)...(128): Ribosomal protein S8
  misc_feature (1)..(134): Xaa is any amino acid
MSVSDPVADMLTKIRNAGMSKHEKVDIPTSKLKLEIVKIMKTEGYIKNFKKVNQDGVNVIRVFLKYDDLTAPIIHGIEKVSKPGRRVYMGYKNMPRIFNGYGTLIVSTSQGSNNRQENPPRKKSGGEIPSAPGW

SEQ ID NO: 13373 - DNA, 708 bp, Unknown
  Obtained from environmental sample
  misc_feature (1)..(708): n is a, c, g, or t
ttgccctctacccgatttcttgtccccttggttttttttaaggcttttttctgctggaactcgaaaagcccgggatccacttctaaggggtttggatggttaagaacatttgaaaacgcaacaagcgcagccaccaaatgccaggcggcgttcttgccgccgtatgttcaacagaaaactgggggaactgcggtttccgtaatagaagccgcccttgccagacgatccttcggccacagcggcagagatggcggtgaaggaaggggcagggggcgcgggcgcgaccgtgacagggaaccgtctgaaaaggaatttgttgaaaaactggtaaaactgaaccgtaccgcaaaggttgtcaaggggggccggcgtttttcgttctccgccctgacggtcattggcgaccgcaaaggcaatgtcggttacggctttggcaaggccaatgacgtttcggaggccatacgcaagagcattgacaaggcaaagcgtaacatggtgaaactgccggttataaaaggcacgattccccacgaggtgatagggtacttcaaggcttcgcaggttttgcttaagccggcccgctcaggaacggggatcatagccggagggccggtgcgcgctataatggaagcgggcggcgtaaccgatatactttcaaagtcaatcggcgcggcaagccagtataaatgtgctngtgccgaattctga

SEQ ID NO: 13374 - protein, 235 aa, Unknown
  Obtained from environmental sample
  DOMAIN (179)...(233): Ribosomal protein S5, C-terminal domain
  misc_feature (1)..(235): Xaa is any amino acid
MPSTRFLVPLVFFKAFFCWNSKSPGSTSKGFGWLRTFENATSAATKCQAAFLPPYVQQKTGGTAVSVIEAALARRSFGHSGRDGGEGRGRGRGRDRDREPSEKEFVEKLVKLNRTAKVVKGGRRFSFSALTVIGDRKGNVGYGFGKANDVSEAIRKSIDKAKRNMVKLPVIKGTIPHEVIGYFKASQVLLKPARSGTGIIAGGPVRAIMEAGGVTDILSKSIGAASQYKCAXAEF

SEQ ID NO: 13375 - DNA, 444 bp, Unknown
  Obtained from environmental sample
  misc_feature (1)..(444): n is a, c, g, or t
gtgccccggggaagcgggaacgctaagaattcctttacggacgccaaagccgggagagccctttgcgtgagagaatcctcgcccttcgcaccgcaatggattaaaaggggcccctcccgcgggtttttaaatctgtatccaaacttccgacaagggagattaccgggtggggtacttctcaatcaaaaggtgaatccgcagctcctccaaaaaaaagaagaccgggaaaaactgataagccttatccgcgccttttttaatcgccttgaaggatttcacgttcagtttaatgtggtttcccgcgaaacccttttagatgcccaggtacatccggaaaaacatcaagacctgattgtcagagtggcgggttacagcgcatttttcaatgtgctttccaaagcaacccaggacgacatcattgaaaggacggagcaaacgctttag

SEQ ID NO: 13376 - protein, 147 aa, Unknown
  Obtained from environmental sample
  DOMAIN (29)...(129): Glycine radical
  misc_feature (1)..(147): Xaa is any amino acid
MPRGSGNAKNSFTDAKAGRALCVRESSPFAPQWIKRGPSRGFLNLYPNFRQGRLPGGVLLNQKVNPQLLQKKEDREKLISLIRAFFNRLEGFHVQFNVVSRETLLDAQVHPEKHQDLIVRVAGYSAFFNVLSKATQDDIIERTEQTL

SEQ ID NO: 13377 - DNA, 768 bp, Unknown
  Obtained from environmental sample
  misc_feature (1)..(768): n is a, c, g, or t
gtgataaaaacggcctcgggctggtttttcttccgttgcgaggaagcggcgcaggaagccgatctaagcgatcctgcggttatggaaaaagtaaaatcatatctgcgtaattttgagagggggcgcatggaaaactgggcgatagagaaggcagaaagttttatcgcgcttgttaacgaaagcgatttttatgaagcgctgtcattgcagaaacttcaaagcaggagtttcggccccgttcccataaactacggcaatgtggaactctttaccacccttcagtcccaatccgttcccgagctcgcgggttccgcggaaaatgaaaatttctggaaagccgcgttttccacgcctgtcggaacgccctcccagtggatagtgcaggggagcaatgtgctggtgcttttcccggtcgaggagatcgaggctgaagcttccaaacaggatgacgtcgcttccaattacagcgcgtactggctggattatatgctcgggcagtccatgcagcagttctttatgaacagccccaaaatggaagacaagttcatggatgtctatttccgctattttggccggcaactgatgggaagggggttttttcctacgaagggaaaagacccctgctttcccgcgttgaatcccgtccggcaaagccgaatcgttatagccgaatatcttccccggtcgtttaacggaacccctgtacctttgttccatccacgcggggagggtaacgaggattggacgccttgttttccagaattatga

SEQ ID NO: 13378 - protein, 255 aa, Unknown
  Obtained from environmental sample
  misc_feature (1)..(255): Xaa is any amino acid
MIKTASGWFFFRCEEAAQEADLSDPAVMEKVKSYLRNFERGRMENWAIEKAESFIALVNESDFYEALSLQKLQSRSFGPVPINYGNVELFTTLQSQSVPELAGSAENENFWKAAFSTPVGTPSQWIVQGSNVLVLFPVEEIEAEASKQDDVASNYSAYWLDYMLGQSMQQFFMNSPKMEDKFMDVYFRYFGRQLMGRGFFPTKGKDPCFPALNPVRQSRIVIAEYLPRSFNGTPVPLFHPRGEGNEDWTPCFPEL

SEQ ID NO: 13379 - DNA, 486 bp, Unknown
  Obtained from environmental sample
  misc_feature (1)..(486): n is a, c, g, or t
ttgggggtaaactgtatggaatataaaattattgaaataatggataataataaaaaggcagaatacacaaatttcgttttaagaaaattgcctgaatggtttggtaatgaagaaaatttacaaaaatatgtaaatactgtacataaatatccattttgggctgctttcgataataataattgtataggctttttttctgtaaaaatacattataatagaactggtgatatttatgtttgtggtatagatccaaattatcacagaaaaggtataggaactcttttatataaatcaatagaaaactatttcattaaaaatgcttgtgagtatataattgtaaaaacattaagtgaaataaattcagatgaaaattatgcaaagacaagacatttctataaaaaaatgggatttaatgaattaatcacattaacagaaatgtgggatgaaaataatccttgcctaataatgataaaatgtataaaataa

SEQ ID NO: 13380 - protein, 161 aa, Unknown
  Obtained from environmental sample
  DOMAIN (53)...(138): Acetyltransferase (GNAT) family
  misc_feature (1)..(161): Xaa is any amino acid
MGVNCMEYKIIEIMDNNKKAEYTNFVLRKLPEWFGNEENLQKYVNTVHKYPFWAAFDNNNCIGFFSVKIHYNRTGDIYVCGIDPNYHRKGIGTLLYKSIENYFIKNACEYIIVKTLSEINSDENYAKTRHFYKKMGFNELITLTEMWDENNPCLIMIKCIK

SEQ ID NO: 13381 - DNA, 543 bp, Unknown
  Obtained from environmental sample
  misc_feature (1)..(543): n is a, c, g, or t
atgcagaaaaacgggacatggacatgggatgccttccttgacatttgtaaaaagctgacacgagatataaataatgacggtaaaattgatacttatgccctccctagagacctttctacggaaatgctggatgcgataatttcaagtaacggcgctacttatgttgacaaagaccccaatacgggcaaatttattaatgccaccaacaggactgaatttctggaagccctgcagtttgccatcaagttaaatactgaaggcgttttaaaaccaagaccggacggcagtaactgggattggtacaaatctgagtttgttgacggaagggtagcgatgagaattgatgagtcgtatatagcgatgggcagtcaaactgaactgaccagaatgaaagatgactggggtatggtactgttcccaaaaggaccaagatcttctacttatcgcgtatatagccgtgataacctttatgggtatccccgcccacatacaaacccgcggaaatgggaaaaaattctgtggggcgaaaatccctcttggtaa

SEQ ID NO: 13382 - protein, 180 aa, Unknown
  Obtained from environmental sample
  misc_feature (1)..(180): Xaa is any amino acid
MQKNGTWTWDAFLDICKKLTRDINNDGKIDTYALPRDLSTEMLDAIISSNGATYVDKDPNTGKFINATNRTEFLEALQFAIKLNTEGVLKPRPDGSNWDWYKSEFVDGRVAMRIDESYIAMGSQTELTRMKDDWGMVLFPKGPRSSTYRVYSRDNLYGYPRPHTNPRKWEKILWGENPSW

SEQ ID NO: 13383 - DNA, 591 bp, Unknown
  Obtained from environmental sample
  misc_feature (1)..(591): n is a, c, g, or t
ttgtcggggggcgcttcccgcctctaccttttcgggcacggggaaaattcaatttaccagatagacagagaattgcgccttttgcaggaagagggagtcggcgaaaaagcggcattggtgcccgtcataggggatttaagggatacggattatgttgattatattctgggacacttaaaggcggacgctgtttttcatacagcggcgtacaaacacgtaccgctgatggaggaaaaccccgtggcggcggtcgaaaacaatgtctttgggaccgaaaaccttgtgcttgccgcgataaagcataacatcaaaagatttgttcatattaccaccgacaaagcggtcgagcctgtttcggtatacggcgcttccaagtacctgtgcgaacaaatggggctggaagccgccgcttcgtcggacggcccccattttctggtagtccgtttcggcaatgttctcggctcccgaagctctatagtgccgctggtccagcaccaaattcaaaaagggggggcccgttacaatttcccaaccccaactttcgccggtgggttaagacccagaagcgaagggatgtttccctcgttataa

SEQ ID NO: 13384 - protein, 196 aa, Unknown
  Obtained from environmental sample
  DOMAIN (7)...(195): RmlD substrate binding domain
  misc_feature (1)..(196): Xaa is any amino acid
MSGGASRLYLFGHGENSIYQIDRELRLLQEEGVGEKAALVPVIGDLRDTDYVDYILGHLKADAVFHTAAYKHVPLMEENPVAAVENNVFGTENLVLAAIKHNIKRFVHITTDKAVEPVSVYGASKYLCEQMGLEAAASSDGPHFLVVRFGNVLGSRSSIVPLVQHQIQKGGARYNFPTPTFAGGLRPRSEGMFPSL

SEQ ID NO: 13385 - DNA, 777 bp, Unknown
  Obtained from environmental sample
  misc_feature (1)..(777): n is a, c, g, or t
atggggattgaagttgatccgccgtgtgttaacaattcggacaaggtttttaccgcagtaaacggacacattgcgtttggttttatgggtattaaggggttgggtgaagcgtccgcgcaggagattgtaaacggaaggaaggacggccggtataaaagctttatggatttccttgaccgtgtggacattaaggcggtaggtaagaaagtgattgagcttcttgttcagacaggagcgtttgacagtttcggtataacgcgtgaaactcttgcgggcaatcttgatagagctgttgaattcgctcttaaaaagaaagaagacaaactgaaagggcagacaagcctctttgaagactcagatgaacaggaattcggcgagtatgagtttgaagagtttccggcaaagagcagggaagacagactgaaccttgaaaagcagcttatagggttttatttctcaggtcatcctttggacgagtacagggaaatatggaagcaaacggtaaatttcaacttcgctcaggttgaaacctataaaacgggaaactgcgtccttataggaattatcaagaatataaaatcaatagtaaccgccaaagggagcaaaatggcatttgcgtctcttgccgattacaacggagaaattgatgtaacgtttttctcaggtacatgggaacggtacgagaatgaagttgaaaataacaaggtagtgatattaaaagggaagatagattatcaaaaggacaaggataaatatacatttatagcggacaggtaa

SEQ ID NO: 13386 - protein, 258 aa, Unknown
  Obtained from environmental sample
  DOMAIN (183)...(255): OB-fold nucleic acid binding domain
  misc_feature (1)..(258): Xaa is any amino acid
MGIEVDPPCVNNSDKVFTAVNGHIAFGFMGIKGLGEASAQEIVNGRKDGRYKSFMDFLDRVDIKAVGKKVIELLVQTGAFDSFGITRETLAGNLDRAVEFALKKKEDKLKGQTSLFEDSDEQEFGEYEFEEFPAKSREDRLNLEKQLIGFYFSGHPLDEYREIWKQTVNFNFAQVETYKTGNCVLIGIIKNIKSIVTAKGSKMAFASLADYNGEIDVTFFSGTWERYENEVENNKVVILKGKIDYQKDKDKYTFIADR

SEQ ID NO: 13387 - DNA, 519 bp, Unknown
  Obtained from environmental sample
  misc_feature (1)..(519): n is a, c, g, or t
ttgggattgaaaccnggccttatgaccacaattcactcttatacagcaacccaaaaaaccgttgacggcgtttcccagaaagactggagaggcggacgcgcggcggccatcaacattattccctccacaaccggcgcggcaaaagccgtaggcgaagtgcttcccgtcaccaagggcaagcttaccggcatgagcttccgcgttcccacacccaccggctcagtagtagacctgaccttccgcgcgacaaaagacacctcaattgaggaaattgacgccgccatgaaaaaagccgcagattcctaccttaagggcgttctggcctactgcaacgaggaaatcgtttcaaccgacatcattcacgatacccacacttcaatttacgacagcaaagccaccctcgaaaacaacctcaagggcgaaaaacgcttcttcaaggtagtttcctggtatgacaacgaatggggctactccaataaagttgttgatctgttgaaatatatcgatagcaagaaataa

SEQ ID NO: 13388 - protein, 172 aa, Unknown
  Obtained from environmental sample
  DOMAIN (1)...(151): Glyceraldehyde 3-phosphate dehydrogenase, C-terminal domain
  misc_feature (1)..(172): Xaa is any amino acid
MGLKPGLMTTIHSYTATQKTVDGVSQKDWRGGRAAAINIIPSTTGAAKAVGEVLPVTKGKLTGMSFRVPTPTGSVVDLTFRATKDTSIEEIDAAMKKAADSYLKGVLAYCNEEIVSTDIIHDTHTSIYDSKATLENNLKGEKRFFKVVSWYDNEWGYSNKVVDLLKYIDSKK

SEQ ID NO: 13389 - DNA, 516 bp, Unknown
  Obtained from environmental sample
  misc_feature (1)..(516): n is a, c, g, or t
atggctattctggaagcgtataatatcgccaaacgttttggctcttccgaagttttgaataacatcagtttttcgcttgaagaaggcgaagttctcgccattatcggatcttcaggcagtggaaagaccacgctcttgcgttgtttaaattttttggaaaaacccgactttggccgcatcatagtacgcggagagacattgatagattgcaagggtcattcacattgggatgagtccgacataaggcaaaaacggcggcattttggacttgtatttcaagcgttcaatttatttccccaatacacggcgtttgaaaatataacgcttgcccgcgaactggaagcaaaaaaacgcgcggacttcaaaaaaaacagaaaagccataatcgaagaaatacgcaaagagggcatggttcttcttgacaaatgggcctgtcccgcaaatgcgatttatatccacaccaattatctggcggtcagcaacaacgggtcgctatcgcaagggcattggctttaa

SEQ ID NO: 13390 - protein, 171 aa, Unknown
  Obtained from environmental sample
  DOMAIN (29)...(163): ABC transporter
  misc_feature (1)..(171): Xaa is any amino acid
MAILEAYNIAKRFGSSEVLNNISFSLEEGEVLAIIGSSGSGKTTLLRCLNFLEKPDFGRIIVRGETLIDCKGHSHWDESDIRQKRRHFGLVFQAFNLFPQYTAFENITLARELEAKKRADFKKNRKAIIEEIRKEGMVLLDKWACPANAIYIHTNYLAVSNNGSLSQGHWL

SEQ ID NO: 13391 - DNA, 564 bp, Unknown
  Obtained from environmental sample
  misc_feature (1)..(564): n is a, c, g, or t
ttgatagataaatatctaagcgggcttgagatagaagtggatgcgatatgcgatggaaaggatacgttgattccgggtataatggaacatatagaacgtgccggtattcattccggtgatagcatcgcggtttatccagctttgaatataaacgatgagttagccgagaaaatttttgaggtgacccaaaaactctgcttggctataagtgtcaaagggcttgtgaatattcaatatgttctatacgaaaacgacgtatatgtaatagaggtaaatccacgtgcatcccgtaccgttccataccttagcaaagtaactggcattcctatatgcgagatggccacaaaagcgagcgtggggaanacattgtcggagcttggatttaagtcaggcatagcgaaaattccgccctatgttgcggtaaaggtgccggtattctcctttgaaaaactctccggcgtggacacgcatctgggtcctgaaatgaaatccacgggcgaagtgctggggcttggaaaaaatcttgaggatgcgctttacaagggtcttgtagccgctgggtaa

SEQ ID NO: 13392 - protein, 187 aa, Unknown
  Obtained from environmental sample
  DOMAIN (3)...(148): Carbamoyl-phosphate synthase L chain, ATP binding domain
  misc_feature (1)..(187): Xaa is any amino acid
MIDKYLSGLEIEVDAICDGKDTLIPGIMEHIERAGIHSGDSIAVYPALNINDELAEKIFEVTQKLCLAISVKGLVNIQYVLYENDVYVIEVNPRASRTVPYLSKVTGIPICEMATKASVGXTLSELGFKSGIAKIPPYVAVKVPVFSFEKLSGVDTHLGPEMKSTGEVLGLGKNLEDALYKGLVAAG

SEQ ID NO: 13393 - DNA, 522 bp, Unknown
  Obtained from environmental sample
  misc_feature (1)..(522): n is a, c, g, or t
ttgggccgtttcagcgtgcaggccgaggacaagcgcatggcgcgtatggcgggagtgtggaaccagtaccagtgtatggttacgttcaatatgtcgcgcagcgcttcttattttgaatccggcatcgggcgcggcatgggtttccgcgattcaaaccaggatcttctgggctttgtgcatcttgtgcctgaacgcgcccgcgcccgtattctggacatcgctgccacgcagtttcccgacggcagcgcgtaccaccaataccagccgctgaccaagcgcggcaacaacgaggtaggttcaggcttcaacgatgaccccctgtggctgatctgcggcgtggcggcgtacatcaaagagacaggcgacttcggcatccttgatgagaaggttcccttcgataacaaagaggagctggcggacagcttgtttgtccatttaaagcgttcatttgatttcactgttacccacactggcccgcagggtctggctttgattggcccgccgacgggaacaattgtctaa

SEQ ID NO: 13394 - protein, 173 aa, Unknown
  Obtained from environmental sample
  misc_feature (1)..(173): Xaa is any amino acid
MGRFSVQAEDKRMARMAGVWNQYQCMVTFNMSRSASYFESGIGRGMGFRDSNQDLLGFVHLVPERARARILDIAATQFPDGSAYHQYQPLTKRGNNEVGSGFNDDPLWLICGVAAYIKETGDFGILDEKVPFDNKEELADSLFVHLKRSFDFTVTHTGPQGLALIGPPTGTIV

SEQ ID NO: 13395 - DNA, 453 bp, Unknown
  Obtained from environmental sample
  misc_feature (1)..(453): n is a, c, g, or t
gtgaatgggggtaacgccgacctatgggggaaatcaggttcccttaccatttcgctggggctgaggctgcacagccttattccctttagccaggattttcagagcgtgaaaaacctggacgatcaaatcgccggggcaaatatcggcctggccaggatgatccagggcacggagatcgaaatttacaataccgtgctggcgctgagcaaaacccagatctccgccgaagcccagaagaagacggtggaacttgccgagagggcataccggcttaccgaacaggcgttccgcgccggcttgcaggacctcctgcaggtgcagaatgcggaacttgagttaaagcaggcaaaggtttccatgcttgaacaacagtttaactacctcaatggcctgttggaccttgagtattctataggggttccttttggaaccctcaattccggagctcaataa

SEQ ID NO: 13396 - protein, 150 aa, Unknown
  Obtained from environmental sample
  misc_feature (1)..(150): Xaa is any amino acid
MNGGNADLWGKSGSLTISLGLRLHSLIPFSQDFQSVKNLDDQIAGANIGLARMIQGTEIEIYNTVLALSKTQISAEAQKKTVELAERAYRLTEQAFRAGLQDLLQVQNAELELKQAKVSMLEQQFNYLNGLLDLEYSIGVPFGTLNSGAQ

SEQ ID NO: 13397 - DNA, 651 bp, Unknown
  Obtained from environmental sample
  misc_feature (1)..(651): n is a, c, g, or t
atgcggacgataaagctgataatcgcctatgacggaacggatttcctcggatggcagagacaggccggggaaacgcgcaccgtgcaggctgtcattgaagcggctctggaaaaaatgcacggccatcctgtcgcgctggccggagcgggccgcaccgattcgggtgtccatgccagggcgcaggccgccagtttccaaaccgatattgaaagcataaaacccgaccgctttatcccggccctgaacagccttttgccttctgacgtacggattatggactcacgcgaagcgccggcgaatttccacgcccgttttgacgcgcgcatgaggctctatcgctattttttcatagccgggcgcccggccctgccccatgaaagccgttacgccatgcagctttggcggatcccagatgtcaataaggctcacttccaatggccgccttctgccccgggggggcgaactggcccaacttcggcccccccaggcgaccaaggtaaacaacccttcaaaataacccccctggcgttttcccggggaaagggggccctccttgtttttaaaaaccacccccaaaccttttcctgtgtaaaaaatgggggccccccccccccggggctttttctccctataaaaagggaaaaccgctaa

SEQ ID NO: 13398 - protein, 216 aa, Unknown
  Obtained from environmental sample
  DOMAIN (6)...(106): tRNA pseudouridine synthase
  misc_feature (1)..(216): Xaa is any amino acid
MRTIKLIIAYDGTDFLGWQRQAGETRTVQAVIEAALEKMHGHPVALAGAGRTDSGVHARAQAASFQTDIESIKPDRFIPALNSLLPSDVRIMDSREAPANFHARFDARMRLYRYFFIAGRPALPHESRYAMQLWRIPDVNKAHFQWPPSAPGGRTGPTSAPPGDQGKQPFKITPLAFSRGKGALLVFKNHPQTFSCVKNGGPPPPGLFLPIKRENR

SEQ ID NO: 13399 - DNA, 513 bp, Unknown
  Obtained from environmental sample
  misc_feature (1)..(513): n is a, c, g, or t
atggacagccgcgactgtgatcgccgccgctttcactcagggcatcctttctcttgttataaaatgccggagaaaaagaagatgaagtttagtaagatcaagatctttatagagaatctttctttcggctattccgggaaaatgatttttaatgggcttaacgttgtatttgacgaatctgacggtcccctcgcaatacttggcccctcaggttccggaaaaaccacccttctaaaaatactgggcgggttgttaaaacccttaagcggcgaaataaattttatgcgcgaagggggaaaaaaaagcggcgcgcctgtgtccgccttcatgttccaggaaccgaggcttcttccctggcttacagttcttgaaaatgtcagtatcccgcttgtaaaagtttatgaaaaagaaggcgcaaaaaaaaaggcccttgattttctttcgcttgtttcgctcgaagaaaaagagaaagttttcccgtggagcttcaggcgggaggctctgccgatctga

SEQ ID NO: 13400 - protein, 170 aa, Unknown
  Obtained from environmental sample
  misc_feature (1)..(170): Xaa is any amino acid
MDSRDCDRRRFHSGHPFSCYKMPEKKKMKFSKIKIFIENLSFGYSGKMIFNGLNVVFDESDGPLAILGPSGSGKTTLLKILGGLLKPLSGEINFMREGGKKSGAPVSAFMFQEPRLLPWLTVLENVSIPLVKVYEKEGAKKKALDFLSLVSLEEKEKVFPWSFRREALPI

SEQ ID NO: 13401 - DNA, 354 bp, Unknown
  Obtained from environmental sample
  misc_feature (1)..(354): n is a, c, g, or t
gtgatggccgccaattccatcgaaggcatgggcagtacggacccaaagctaaaggaactttttaccgcctataaaatgaggcgcgctgaaaccctgaagtacctttacatcccctcgcttgtcccttttattctcgccggcctaaggagctcgctttccctttgctggaaagtggttgtggccgcagaggtgatcgttcagccccttcgcagtcttggcacggggatgcagcagtcaaaaacgcagttggagacgcctgagcttttcgcatggacagccgcgactgtgatcgccgccgctttcactcagggcatcctttctcttgttataaaatgccggagaaaaagaagatga

SEQ ID NO: 13402 - protein, 117 aa, Unknown
  Obtained from environmental sample
  misc_feature (1)..(117): Xaa is any amino acid
MMAANSIEGMGSTDPKLKELFTAYKMRRAETLKYLYIPSLVPFILAGLRSSLSLCWKVVVAAEVIVQPLRSLGTGMQQSKTQLETPELFAWTAATVIAAAFTQGILSLVIKCRRKRR

SEQ ID NO: 13403 - DNA, 813 bp, Unknown
  Obtained from environmental sample
  misc_feature (1)..(813): n is a, c, g, or t
ttggcgtctataaaatccgccgtaacggccgccgtagaaaaagttgtggatgcggttaaagaccgtgtaaccgccgtagcgtcctcagtagccgccgccgtggcggctaccgttggaagcattctcggcctgcgtggcaagggggaccacgcagaaaccgaggcggcggagccggaaaaatgcttctgcgacagagatattaaagttaaagaatttgaaaaaattattaatgatttaagagacgccgaaggaattaaagaccgttcattatttacgatgggaaactgcgacattccatcgaaagataaaacaatgcaacggctaacggaagaattcaataagacttgcaaaaaatacaacattgactactgtattcaaaagatctattttctttctcaaatatatcatgaatccgccagatttatgaccgcgttggaatttgataacggcgaacgctataatcctgataggcgttccgacgctaagcaatatggaaacacggaaatcggcgacggccccaaatacaaaggcagaggattcatgcagcttacatggcgaaatattcagcttgagtatttgaaccacgcgaaagactatattgacgcgttaaaagaaaaaaccgcagaagaaatagccgaccgtaataataattttgagaaaataatatccgataccctattcgccgccatggactcggcgggctggtattggagtaagtatgtgatagtatcgttcattaaaaaggaaaatcgggaaaaatatcgcgaaatactcggtaaaacattaaaacgagccacattatacggggaataa

SEQ ID NO: 13404 - protein, 270 aa, Unknown
  Obtained from environmental sample
  misc_feature (1)..(270): Xaa is any amino acid
MASIKSAVTAAVEKVVDAVKDRVTAVASSVAAAVAATVGSILGLRGKGDHAETEAAEPEKCFCDRDIKVKEFEKIINDLRDAEGIKDRSLFTMGNCDIPSKDKTMQRLTEEFNKTCKKYNIDYCIQKIYFLSQIYHESARFMTALEFDNGERYNPDRRSDAKQYGNTEIGDGPKYKGRGFMQLTWRNIQLEYLNHAKDYIDALKEKTAEEIADRNNNFEKIISDTLFAAMDSAGWYWSKYVIVSFIKKENREKYREILGKTLKRATLYGE

SEQ ID NO: 13405 - DNA, 723 bp, Unknown
  Obtained from environmental sample
  misc_feature (1)..(723): n is a, c, g, or t
atgggaatagaagttgacgcgttatgcgacggtgacccttcccaggggggacagggcggagtgtttattccgggcataatggaacacattgagcgaaccggaatccattccggcgacagcatagccgtatatcccgccatcaacatagatgacgcgttagccgaaaagatttttgatgttacaaaaagactctgcatggcgctgaatgttaaaggtcttgttaatattcaatatgtcctctatgaaaacgacatatatgtcatcgaagttaaccccagggcgtcccgcactgttccctatctcagcaaggttaccagcgttcccatgtgcgagcttgccactaaattaagcgttggccttaagctttcggatttggggtacaggccgggcatcggaaaaatcccgccctatgtcgccgtcaaagtgcctgttttttcctttgaaaaacttgctggcgtggatacgcatcttgggccggaaatgaaatccaccggagaagttcttggtctggggaaaaacctggaggaagcgctgttcaagggacttggcgcccgccggataccaaatgaaaaaaaaagggcgggtactgtttacctccggaaaagcgacaagggggaaattacccgcgtcgccaaaaaattgacccaggccggaattttccgtgaccccgaacccgggggcaccgcccaattccgggggggaaagggggtttcaaaattttaa

SEQ ID NO: 13406 - protein, 240 aa, Unknown
  Obtained from environmental sample
  DOMAIN (3)...(147): Carbamoyl-phosphate synthase L chain, ATP binding domain
  misc_feature (1)..(240): Xaa is any amino acid
MGIEVDALCDGDPSQGGQGGVFIPGIMEHIERTGIHSGDSIAVYPAINIDDALAEKIFDVTKRLCMALNVKGLVNIQYVLYENDIYVIEVNPRASRTVPYLSKVTSVPMCELATKLSVGLKLSDLGYRPGIGKIPPYVAVKVPVFSFEKLAGVDTHLGPEMKSTGEVLGLGKNLEEALFKGLGARRIPNEKKRAGTVYLRKSDKGEITRVAKKLTQAGIFRDPEPGGTAQFRGGKGVSKF

SEQ ID NO: 13407 - DNA, 729 bp, Unknown
  Obtained from environmental sample
  misc_feature (1)..(729): n is a, c, g, or t
atggctgaagaaaaaagggcgggcgcccttgtacaggacgctgaattctggcgcatcgccatagagatcaacgcgttcctcctcttttttgttcctgacgtatacaagacggaggaattatgcgccctggccgttataagagacggcaatgcgcttacatatatccctcccaaaatgaaaaactatgagctttgcagaaaagcggtatttaataacgcttacacgcttgcgtatgttgacgacgaactaaaaacggaaaaactatgttggatggcggttaagtcagcggggagcgcgcttaaatatgtgccgcgaaagtttattacgccggaattgtgcgcgaccgcggttaaaaacagcgaatgggctttggaatatgtaccggaggaaatgaaaactccggaactttgcgccaaagcggtaaagaatgactcccgtttgcttaaatttgtgccggaggcactaaaaacgaaagaaatatgccttcttgccgtgtcccccaatgaatttgagaattttcgtttatttgtaccggatgtacactgcgcccttgcatatattcctgaagcgtttttaaccaaagaactctgccttgacgcggttatgagtgattctgaatccctggaattcgtacctgagaaattcaagacgcctgaactcttccttacggtagcaagaaaaaatccatgggccttgaagcttgtgcctgatgaattaaaaacngtatga

SEQ ID NO: 13408 - protein, 242 aa, Unknown
  Obtained from environmental sample
  misc_feature (1)..(242): Xaa is any amino acid
MAEEKRAGALVQDAEFWRIAIEINAFLLFFVPDVYKTEELCALAVIRDGNALTYIPPKMKNYELCRKAVFNNAYTLAYVDDELKTEKLCWMAVKSAGSALKYVPRKFITPELCATAVKNSEWALEYVPEEMKTPELCAKAVKNDSRLLKFVPEALKTKEICLLAVSPNEFENFRLFVPDVHCALAYIPEAFLTKELCLDAVMSDSESLEFVPEKFKTPELFLTVARKNPWALKLVPDELKTV

SEQ ID NO: 13409 - DNA, 603 bp, Unknown
  Obtained from environmental sample
  misc_feature (1)..(603): n is a, c, g, or t
gtgttccctggaaaagattttatcaggcgcgacgagatctacaacaccggcggagcgatttataaaatcgccagcgcccgcgtcgcccttgcccagaggaacatctttatccgcaaagactggcttgacaagctcggactcagggttccgacaaatatcaacgaattctataacgcgcttgtagcgttccgcgacagggacccgggcggagtaggagcaaccagggttataccgtacttccaaggttctgacgctcgttggggccttgccgatctaattggcaacagccttgtagcaaagaccgacagggaaatatggataaacagcgctgtcggccaggccggcgaacgcaatattaataaggaaggattcaaagaaggcgtgcgcctgatgaacaagtggtacaaccaaaagctcatcctaccagatttcccgcttcagacagtagccgaagacggcaataatatcttaaagagcggcgttgcaagcgcatttggcggaaactggggaactggcttacggggacggactacaatattggcgcggaatgggcgaagaaagtgggcgggcacgagcttttatcagggaagaaacaaaagttaa

SEQ ID NO: 13410 - protein, 200 aa, Unknown
  Obtained from environmental sample
  misc_feature (1)..(200): Xaa is any amino acid
MFPGKDFIRRDEIYNTGGAIYKIASARVALAQRNIFIRKDWLDKLGLRVPTNINEFYNALVAFRDRDPGGVGATRVIPYFQGSDARWGLADLIGNSLVAKTDREIWINSAVGQAGERNINKEGFKEGVRLMNKWYNQKLILPDFPLQTVAEDGNNILKSGVASAFGGNWGTGLRGRTTILARNGRRKWAGTSFYQGRNKS

SEQ ID NO: 13411 - DNA, 615 bp, Unknown
  Obtained from environmental sample
  misc_feature (1)..(615): n is a, c, g, or t
gtgtttgaggaagagtcagcgaagttaggcgacattccttttttggcgcaggggacgatctaccccgatgtcgtcgaatcgggcggtaaacacggcgcggttatcaagagccatcacaacgtgggcgggcttccagaaaacctcaagtttacagagatcgtggaaccgctttcgcggcttttcaaggatgaagtgcgcgaactgggcagaaaacttaaactgccgtcatcgcttgtaaaccgtcagccatttccggggccggggcttgccatccgcgtcatgggcgaaataacggaagaaaagctggatattttacgccgcgccgacgcaatcctccgcgaggaactggacgccctgaaacgcangccaaatcaatacttctgcgtcatgaccggcacgcgctccgtgggcgtaaaaggggacgacagaacctacgattttgtaatcgccgtcagggctgtaataactgatgattttatgacctgcgaatacgccccgctgccgcataatttattaagccgaatatcctcacggatcacaagcgagatacctcaggcaagccgggttgtttacgatattacatcaaagcccccggcgacggtggaatgggagtag

SEQ ID NO: 13412 - protein, 204 aa, Unknown
  Obtained from environmental sample
  DOMAIN (113)...(203): GMP synthase C terminal domain
  misc_feature (1)..(204): Xaa is any amino acid
MFEEESAKLGDIPFLAQGTIYPDVVESGGKHGAVIKSHHNVGGLPENLKFTEIVEPLSRLFKDEVRELGRKLKLPSSLVNRQPFPGPGLAIRVMGEITEEKLDILRRADAILREELDALKRXPNQYFCVMTGTRSVGVKGDDRTYDFVIAVRAVITDDFMTCEYAPLPHNLLSRISSRITSEIPQASRVVYDITSKPPATVEWE

SEQ ID NO: 13413 - DNA, 786 bp, Unknown
  Obtained from environmental sample
  misc_feature (1)..(786): n is a, c, g, or t
ttgctgtcacagattacgagtataaaggtgaggacgatgtttaaaggaaatgctttagaattgtcagccctcatcaaggcgagaaaactcagcgtggtcgaactgacaagcgcgtacattgacacaatcgaaaaaaacgacagccgctataacgcctttataacagtggcgaaagaggaggctttggcgcgcgcgaaagaagtacaatcaatgattgataagggcgagacgctttcgccgcttgcgggcgtgccaatcgctgtaaaagataacatttccacagagggaatcgaaaccacctgcgcttccaaaatgctcaagggatacacgcccgtgttcaacgcgacggttatcgagaagctggaaaaagccggcatggttctcgtcgggaaaaccaacatggacgagtacgcgatgggcggctccagcgaaaccggtgcggctggcccggtgcacaatccctgggatgtcgcgcgtgtcgccggcggttcatccggcggcagcgtcgcggctgtggctgccggggagatacccattacgcttggttccgacacagggcggcagtatacgccagcccctgcgccttctgcgggcgctaccggtatcaagcccaacctacggcgcaagtggcccctaccggccttatccccaatgcgtcctctctggaacaaaatcgccctggtcggcagaaaaattaacgaatggccccgccctggttttcaaacatttccgggccgggaaacccgccgacagtaccctgcgttaaaaaaaaacctttttgaataa

SEQ ID NO: 13414 - protein, 261 aa, Unknown
  Obtained from environmental sample
  DOMAIN (34)...(259): Amidase
  misc_feature (1)..(261): Xaa is any amino acid
MLSQITSIKVRTMFKGNALELSALIKARKLSVVELTSAYIDTIEKNDSRYNAFITVAKEEALARAKEVQSMIDKGETLSPLAGVPIAVKDNISTEGIETTCASKMLKGYTPVFNATVIEKLEKAGMVLVGKTNMDEYAMGGSSETGAAGPVHNPWDVARVAGGSSGGSVAAVAAGEIPITLGSDTGRQYTPAPAPSAGATGIKPNLRRKWPLPALSPMRPLWNKIALVGRKINEWPRPGFQTFPGRETRRQYPALKKNLFE

SEQ ID NO: 13415 - DNA, 807 bp, Unknown
  Obtained from environmental sample
  misc_feature (1)..(807): n is a, c, g, or t
ttggcggggcttggcgtcagtatcgcaatgcaggcaggcagcctgaacctcggcggagaaggacagatatattcgggggcctttgtcgcgacaattaccgctttgccgctggcgtttttggggctcccaggcggccttataagtatacttgccggtgcgttttttgcagggatattggcggcgctgtccggttttttcaaggcgcggtggaacacaaacgagcttatcacttcctttcttttgtcaaatgccatgatacttattgttaattaccttgttaccggtcctttccatgatcctgaaacaaatttgcagtcaacaaaaaaaattgccgcaaatttaagactgccgctgcttctgcttccgtcgaatttaaatatgtcgcttgtgattgcgcttgttgctgttgccgccgtgtatctttttctgaaaaaagccagactggggtatgaattcagaatagccggagcaaacgagatttttgcgcgatacggcgggattaacacaaaactgaatacggtgctggcgatgtttttaagcggcgcgctgtacggccttgccggagggctttgtgtcttcggctcttattaccagacggtaaaggaattttccgcagggcttggctggaacggccttgcggcggcgcttgtcgcgggctttaatcccatagcaataattcctgcgagccttttcttcgcgtggatttcctcgggcgcgagaatagccatgcaaaattcggatgttacttatgagatcgcttccattgtccagtcggtaattttctttctggctaccagcatggtttaa

SEQ ID NO: 13416 - protein, 268 aa, Unknown
  Obtained from environmental sample
  DOMAIN (1)...(265): Branched-chain amino acid transport system / permease component
  misc_feature (1)..(268): Xaa is any amino acid
MAGLGVSIAMQAGSLNLGGEGQIYSGAFVATITALPLAFLGLPGGLISILAGAFFAGILAALSGFFKARWNTNELITSFLLSNAMILIVNYLVTGPFHDPETNLQSTKKIAANLRLPLLLLPSNLNMSLVIALVAVAAVYLFLKKARLGYEFRIAGANEIFARYGGINTKLNTVLAMFLSGALYGLAGGLCVFGSYYQTVKEFSAGLGWNGLAAALVAGFNPIAIIPASLFFAWISSGARIAMQNSDVTYEIASIVQSVIFFLATSMV

SEQ ID NO: 13417 - DNA, 576 bp, Unknown
  Obtained from environmental sample
  misc_feature (1)..(576): n is a, c, g, or t
atgggccccgaccctgattttcctttcctctcaccaaatcagcgctttcaattcccgccacccgaaaaagcaaagcaccacagcgttgttgcctggggcggaaacctttctcccggtatgctcctatcggcttatgagcaagggcttttcccgtggtacggcgaagacgaccctgtaatctggcattctcccgatccaaggtttgttgtcttcccagaaaaactccatgtgtcacgcacaatgcagaaaatacttaggcaaaagatctttacagttacttttgacaaggatttctctggcgtaattacttcctgctctaaggtaaaaagaccgggccagaacggcacatggatcacttctgacataatagaagcctacacggaacttcaccgcctgggctgggtgcactcggcagaggcgtatcttgccggggaattggcaggcggctgttacggcgtgctgatagggaaaattttttttggcgaatccatgttcagcctaaagcccaacgcaagcaaggccgcttttattacctttgcgcgtatgctttttgaaaagggcattccgccttattga

SEQ ID NO: 13418 - protein, 191 aa, Unknown
  Obtained from environmental sample
  DOMAIN (37)...(190): Leucyl/phenylalanyl-tRNA protein transferase
  misc_feature (1)..(191): Xaa is any amino acid
MGPDPDFPFLSPNQRFQFPPPEKAKHHSVVAWGGNLSPGMLLSAYEQGLFPWYGEDDPVIWHSPDPRFVVFPEKLHVSRTMQKILRQKIFTVTFDKDFSGVITSCSKVKRPGQNGTWITSDIIEAYTELHRLGWVHSAEAYLAGELAGGCYGVLIGKIFFGESMFSLKPNASKAAFITFARMLFEKGIPPY

SEQ ID NO: 13419 - DNA, 825 bp, Unknown
  Obtained from environmental sample
  misc_feature (1)..(825): n is a, c, g, or t
gtggcggctggtaagccgcacatcggcaccatcactctcaaggcctaccagaagggcgggtctatctgcattgagatacaggacgacggccgcggcctcaaccgcgacgccatcttcaagaaggcggtggaaaagggcctcttggaccccaacgcgacggtctcggaggccgagatccacgccatgatattcgcccccggcttctctaccgccgcccaagttaccgacatctcaggccgcggcgtgggcatggacgtggtcaagaagaacgttgaggcgctgcgcggacgcatagagataaacaccaagatgggcgagggaacgacgttcgtcatccacctgccgctcactttagccatcatggacggcatgatagtcgtagcgggggacgaacgcttcatactgcccaccttctccgtggtggaaaacttcaagccggcaatgagcgaccttaccgacgttatgggtacgcagaagatggtcatgtgccacggccagttgttgcccctctacagtctggcggaggtcatgggcaggaccaacaccatcaagatcgacgagggcatagtgatggtggtggaggacgccggcaagcgcaccggattgctggtagacaggatcataggccagcagcagacggttatcaagaaactgggcgacggcgtgggaaagatagacggcgtctccggcggcgcgatcatgcccgacggcaaggtcagcctgatcatagacgtcgcggagacggtgaaactggccaccaggagcggcagcaccatcgtggatcctcccggcgacgcggctgacaaagctgccggcaaagcgtag

SEQ ID NO: 13420 - protein, 274 aa, Unknown
  Obtained from environmental sample
  DOMAIN (3)...(117): Histidine kinase-, DNA gyrase B-, and HSP90-like ATPase
  misc_feature (1)..(274): Xaa is any amino acid
MAAGKPHIGTITLKAYQKGGSICIEIQDDGRGLNRDAIFKKAVEKGLLDPNATVSEAEIHAMIFAPGFSTAAQVTDISGRGVGMDVVKKNVEALRGRIEINTKMGEGTTFVIHLPLTLAIMDGMIVVAGDERFILPTFSVVENFKPAMSDLTDVMGTQKMVMCHGQLLPLYSLAEVMGRTNTIKIDEGIVMVVEDAGKRTGLLVDRIIGQQQTVIKKLGDGVGKIDGVSGGAIMPDGKVSLIIDVAETVKLATRSGSTIVDPPGDAADKAAGKA

SEQ ID NO: 13421 - DNA, 441 bp, Unknown
  Obtained from environmental sample
  misc_feature (1)..(441): n is a, c, g, or t
atgaccatcttctgcgtacccataacgtcggtaaggtcgctcattgccggcttgaagttttccaccacggagaaggtgggcagtatgaagcgttcgtcccccgctacgactatcatgccgtccatgatggctaaagtgagcggcaggtggatgacgaacgtcgttccctcgcccatcttggtgtttatctctatgcgtccgcgcagcgcctcaacgttcttcttgaccacgtccatgcccacgccgcggcctgagatgtcggtaacttgggcggcggtagagaagccgggggcgaatatcatggcgtggatctcggcctccgagaccgtcgcgttggggtccaagaggcccttttccaccgccttcttgaagatggcgtcgcggttgaggccgcggccgtcgtcctgtatctcaatgcagatagacccgcccttctggtag

SEQ ID NO: 13422 - protein, 146 aa, Unknown
  Obtained from environmental sample
  misc_feature (1)..(146): Xaa is any amino acid
MTIFCVPITSVRSLIAGLKFSTTEKVGSMKRSSPATTIMPSMMAKVSGRWMTNVVPSPILVFISMRPRSASTFFLTTSMPTPRPEMSVTWAAVEKPGANIMAWISASETVALGSKRPFSTAFLKMASRLRPRPSSCISMQIDPPFW

SEQ ID NO: 13423 - DNA, 786 bp, Unknown
  Obtained from environmental sample
  misc_feature (1)..(786): n is a, c, g, or t
atggccgagactggacgactataccttgcggaattgggccttgaaccttcggaacattcaacccagcttgttgagcctgagtatttactgcggctgttgctggaattcaataccgcctttggaatcattgccaatcttgccgatgatttgcgtaatttgcagcgcagtgaaatcggggaactgcgggaaggttttgccgcggatcaggtcggttcttccaccatgccgcagaagcgcaatccctggaattcggaacacgttaaaagtttgtggaaagcctttatgccgcgggtgaataccttttttatggatcagataagtgaacatcagcgagatctttccaattcagcaagccagcgttttattgccgattatatcgccggtttctgtctggcaatttcccgcatgacgggggtaatcaaagggctgggtgcggaccgggaacggctgcttgccaatttgcgcggcggcaccggcggctttaccggcggagtattggctgaacccgcatatatactgttagccgaggccggcgtgtccgacgcccacgaggtgatccgcaaaattacactaaacgcagagaaagcgaatataagttttgctcaggctcttgccaaagagtcggatgtgttacagaggattggcggcaaaatgacggaactgggtttggttgcttcggctgatgatgcgctgtcattttttgaaaagccggaacggtattcgggtcttgcggcgcataaagcgaaatcattggcacgcaaatataaagcactaatggggggttga

SEQ ID NO: 13424 - protein, 261 aa, Unknown
  Obtained from environmental sample
  misc_feature (1)..(261): Xaa is any amino acid
MAETGRLYLAELGLEPSEHSTQLVEPEYLLRLLLEFNTAFGIIANLADDLRNLQRSEIGELREGFAADQVGSSTMPQKRNPWNSEHVKSLWKAFMPRVNTFFMDQISEHQRDLSNSASQRFIADYIAGFCLAISRMTGVIKGLGADRERLLANLRGGTGGFTGGVLAEPAYILLAEAGVSDAHEVIRKITLNAEKANISFAQALAKESDVLQRIGGKMTELGLVASADDALSFFEKPERYSGLAAHKAKSLARKYKALMGG

SEQ ID NO: 13425 - DNA, 588 bp, Unknown
  Obtained from environmental sample
  misc_feature (1)..(588): n is a, c, g, or t
ttgaagcccggctcgccagaggtcgtcgcggcctatccccgcctggcccgggcggccgtggcccgcgccttggccggccaaaagcccccggaccccttaaccatcgacccggccccggacctgtggcggccctgccgggcctgcttcgtctcccttaaaaacccggacctgcgcggctgcatcggcaccattcatccggcccgaaaagacctgggacgggaaataatcgccaacgccctggccgcggccacccgcgacccccgcttcccgcccctcacgccttcggaactgcccggggtgcttttttccgtcgatgtgctgagcgaacctgagccggtctcggatttgagtgaactggaccccggccccttggggggtcataatcagccgggaacggccgggggggcctcccgttgcccggacctcccgggggtggaaagcttggccccacaagtggcccatcgccgcccgggaaaacccgaatccagggtttggaaaccccaacccccccaggctttcagggggaaaatccatccccaaccgaagagagaacgaggtttaaggcccccctgggtgccgaatttttaa

SEQ ID NO: 13426 - protein, 195 aa, Unknown
  Obtained from environmental sample
  DOMAIN (7)...(177): AMMECR1
  misc_feature (1)..(195): Xaa is any amino acid
MKPGSPEVVAAYPRLARAAVARALAGQKPPDPLTIDPAPDLWRPCRACFVSLKNPDLRGCIGTIHPARKDLGREIIANALAAATRDPRFPPLTPSELPGVLFSVDVLSEPEPVSDLSELDPGPLGGHNQPGTAGGASRCPDLPGVESLAPQVAHRRPGKPESRVWKPQPPQAFRGKIHPQPKRERGLRPPWVPNF

SEQ ID NO: 13427 - DNA, 570 bp, Unknown
  Obtained from environmental sample
  misc_feature (1)..(570): n is a, c, g, or t
atgatggccgagatcntattgatatccnctcggttcataaccgcgcttgtgtcatggctggttcgagaagaccttacaatatccgccgaagaaaacaacttcgaggtgaatcgccgcgctgccgccgaaactgaacagacccttgaaaaaacacgtttgctttctctgacattctcccgcacggcggctctcgctaaaagcgcagacatagtacagaaagaagccgattatttctttgatcaaaatccgcaaattgctgctcttttctatacaacagtcttatcttccgcatggacaaacagggcttttgtcaacgaacgctttttcctttcacatggaattaatacaaaaattgcggacgcttatttcgctaacagcaaaaaaatacaggaaaactccgcaatggggcaaacaatactcgtcaatgtctcacccctgtttaataaagcgcaaggctcgacatatcttgcggcaatgtttttccccatacaggaaggaagcggctgtgttttgttctcaacccgaaaccttaacgaagtttcggcatgggcgttaacgcgtcttttctaa

SEQ ID NO: 13428 - protein, 189 aa, Unknown
  Obtained from environmental sample
  misc_feature (1)..(189): Xaa is any amino acid
MMAEIXLISXRFITALVSWLVREDLTISAEENNFEVNRRAAAETEQTLEKTRLLSLTFSRTAALAKSADIVQKEADYFFDQNPQIAALFYTTVLSSAWTNRAFVNERFFLSHGINTKIADAYFANSKKIQENSAMGQTILVNVSPLFNKAQGSTYLAAMFFPIQEGSGCVLFSTRNLNEVSAWALTRLF

SEQ ID NO: 13429 - DNA, 327 bp, Unknown
  Obtained from environmental sample
  misc_feature (1)..(327): n is a, c, g, or t
ttgcaccagcgacgggtcgccggagaagtgcgccagtacgcgcagctctatttgagagtaatcggcggaggccagcatatagccttgcggcgctatgaaggcctccctgatcttgcgtccgctctctgtgcgtatcgggatattctgcaaattgggattcgtgctagagaggcggccggtggcagttatcgcttgattgaaagaggtgtggacgcgtcccgtctgcggcagcacctgcgccggtatcgcgtctatgtaggtggagagcagtttttgcttttcgcggtagtcaagtatagacatcactatcggggtgtcggcggctaa

SEQ ID NO: 13430 - protein, 108 aa, Unknown
  Obtained from environmental sample
  misc_feature (1)..(108): Xaa is any amino acid
MHQRRVAGEVRQYAQLYLRVIGGGQHIALRRYEGLPDLASALCAYRDILQIGIRAREAAGGSYRLIERGVDASRLRQHLRRYRVYVGGEQFLLFAVVKYRHHYRGVGG

SEQ ID NO: 13431 - DNA, 339 bp, Unknown
  Obtained from environmental sample
  misc_feature (1)..(339): n is a, c, g, or t
atgaaaacaatttttgtcgtagatgacagtgatactaacctttccacggcggaaaaagctttagagaaattgtacagagttatgacaatcccttccgcggcgaaaatgttttctttattggaaaaagtgcctcccgatcttattcttttagacattgaaatgcccgatattgacggatttaccgctcttgaaagattaaaatcgaataatgcttgggctaacattccggttgtttttttaacgggacgcacggacaacgaaagtggaagtacacgggatttcaaaatggagcggtggaattttattttaaaaccttttttccaaacctgtggctggtaa

SEQ ID NO: 13432 - protein, 112 aa, Unknown
  Obtained from environmental sample
  DOMAIN (2)...(107): Response regulator receiver domain
  misc_feature (1)..(112): Xaa is any amino acid
MKTIFVVDDSDTNLSTAEKALEKLYRVMTIPSAAKMFSLLEKVPPDLILLDIEMPDIDGFTALERLKSNNAWANIPVVFLTGRTDNESGSTRDFKMERWNFILKPFFQTCGW

SEQ ID NO: 13433 - DNA, 327 bp, Unknown
  Obtained from environmental sample
  misc_feature (1)..(327): n is a, c, g, or t
atggaatgtataaatgtaaaantaacggttctaaaaagacattttgacgaggaactcgcgaaagaatacggtccagaaaatatcggcaaatgtcctattcacaatgaagggcaaatattttatggcgattgggcaaaacctgaaggattttgtgatgaggcatggaaagctatttaccaatatgtttttgcattggcacatggcagtgaaacattctattataaagactggattgtaaaacccggtgtcgcgatatgtagttgcaatgatgggctacggcccgttatttttaagatcgaaagaactgacgaagaatcaagaaaatga

SEQ ID NO: 13434 - protein, 108 aa, Unknown
  Obtained from environmental sample
  misc_feature (1)..(108): Xaa is any amino acid
MECINVKXTVLKRHFDEELAKEYGPENIGKCPIHNEGQIFYGDWAKPEGFCDEAWKAIYQYVFALAHGSETFYYKDWIVKPGVAICSCNDGLRPVIFKIERTDEESRK

SEQ ID NO: 13435 - DNA, 954 bp, Unknown
  Obtained from environmental sample
  misc_feature (1)..(954): n is a, c, g, or t
atgatcagatcggccgagtctctgcctttttatctggcaaagattatggacgacaattctcttagaaaggccagaattatcagcgggctgtacgatgccctcatggacattcattattcttccaccggaacagttcttgaggaagaagcggcagcggccaggaaaaagattcttctgcttcttgaagccaaaaatggttccaccgttcctgagatttatctcataggccacgcccacatcgatcacgcctggctttggcatatcggcgagactgaacgtaagatcgcccgcacgtatatcaacatgatccgtctcgcggaagaataccctgagtttatttttatccagacccagagcgcccagctcgaaattgtcaaacgggaataccccgaaatttttgaggctgtaaaggaagcctatcgcaagggaaactgggaacctaacggcggcatgtgggttgaggcagactgcaatattccaggcggtgaatctctggtgcgccagtttctggtgggtaaaaaagcggtgaaggaaatgctcggctatgagggagacaccctctggctgccggatgtttttggttatgccgcggccctgccacagatactttcgctctgcagaatcaagtactttgtaacaagcaagatcaactggaacgacacaacccgcttcccctacaacacgtttatttggaaggggatcgacggaaccggcataaagacccattacatcaactcctgggcaaccggttacaacggacgggtaaaccctgccgagctcgccgagacatggaacaacatacaacacanagagttgcagtccgcttcgattaagcccatcggcgaaggggaacggcggcggcgaactgcccgcggggacctggaagcggctcgtagacttagcaacctggaaggcgctccaaaagcaagctggaaaaagtctctgacgccctga

SEQ ID NO: 13436 - protein, 317 aa, Unknown
  Obtained from environmental sample
  DOMAIN (71)...(317): Glycosyl hydrolases family 38 N-terminal domain
  misc_feature (1)..(317): Xaa is any amino acid
MIRSAESLPFYLAKIMDDNSLRKARIISGLYDALMDIHYSSTGTVLEEEAAAARKKILLLLEAKNGSTVPEIYLIGHAHIDHAWLWHIGETERKIARTYINMIRLAEEYPEFIFIQTQSAQLEIVKREYPEIFEAVKEAYRKGNWEPNGGMWVEADCNIPGGESLVRQFLVGKKAVKEMLGYEGDTLWLPDVFGYAAALPQILSLCRIKYFVTSKINWNDTTRFPYNTFIWKGIDGTGIKTHYINSWATGYNGRVNPAELAETWNNIQHXELQSASIKPIGEGERRRRTARGDLEAARRLSNLEGAPKASWKKSLTP

SEQ ID NO: 13437 - DNA, 681 bp, Unknown
  Obtained from environmental sample
  misc_feature (1)..(681): n is a, c, g, or t
ttgctgccaagccttcctgtggttaccgttatggggcatgtcgatcacggaaaaactaaactgttagacgcaatccgcaaagctgatgttgtttccggtgaatttggcggcataactcagcatatcggcgcatacatggtagaaacaccccacggagcgatcacttttcttgatactcccggacacgaagcttttactcgcatgagggcgcgcggagcgcagataacggatatcgttgttcttgttgttgcggcggacgatggagtgatgcctcaaaccatagaagccataaatcacgcaaaagatgcgaaagtaccaatcattgtagcagttaacaaaatagataaacctgaggcaaaccctgacagggtaaaaagccagctttcagaattgggattaatgccggaagactggggcggacagaccatgtttgtagaattatctgctctgcagaaaaccggcattgataaactaatcgaagcaattctgctggaagcggaaattcttgatctaaaagccaatttccagcgtactgcagaaggaaaaatacttgaatcaaaagttgatcatggttccggtatcgtagcaactgtaatgatagaaaaaggtacngcttgcaatcggcgattcatttgtcgcaggtatttggcccggcaaagtccgcgccattctcaacgataa

SEQ ID NO: 13438 - protein, 226 aa, Unknown
  Obtained from environmental sample
  DOMAIN (6)...(115): GTPase of unknown function
  misc_feature (1)..(226): Xaa is any amino acid
MLPSLPVVTVMGHVDHGKTKLLDAIRKADVVSGEFGGITQHIGAYMVETPHGAITFLDTPGHEAFTRMRARGAQITDIVVLVVAADDGVMPQTIEAINHAKDAKVPIIVAVNKIDKPEANPDRVKSQLSELGLMPEDWGGQTMFVELSALQKTGIDKLIEAILLEAEILDLKANFQRTAEGKILESKVDHGSGIVATVMIEKGTACNRRFICRRYLARQSPRHSQR

SEQ ID NO: 13439 - DNA, 768 bp, Unknown
  Obtained from environmental sample
  misc_feature (1)..(768): n is a, c, g, or t
atggtaaagttattggatccccttatccgaaaacaaatagatgacacagcaattgccgcgccaaaaccggcctatacctggggtatcgagttgaaacacggggacgaggcgcttgtaagccacgattttggcgacagccgcatacccttaaccgtaagggtggaaaacaccggcaatcagccgacgggcgggcttctcattgagatatacggggacagcgtcggcttgtttacggcggatacggattggttagagagtattgacgcgggcgaaagcgccgctttcagggtagcgcctcacggcaaacctgacccgggcaggtacaacgcaaccataacggtaagcggcggcaacggtattggcgcgagttttgacgtggcttacacagaacccgccggcgcaagatacgcggttgcgctgctggacggcgacngcgcgaagattgaaggctacaacttttacgaccgcgcggcgccgttaactgtaacggtactgaataccggcaatacggatacaggcgggctggtcatacagatatacggggactgggagcccgcttttacagtgtccccggactcatttataaaaaatattcccatgggcgggggggaccgttttccctgtggaaacccaggaccgggaataaccccccgggaaaaccccaccgcgaatgataaacgcgttacccaacgggcgggtgacatttcccgccgggggtttttgttttgtgctttacacagccccgccaaagggaatacaagcctgtaa

SEQ ID NO: 13440 - protein, 255 aa, Unknown
  Obtained from environmental sample
  misc_feature (1)..(255): Xaa is any amino acid
MVKLLDPLIRKQIDDTAIAAPKPAYTWGIELKHGDEALVSHDFGDSRIPLTVRVENTGNQPTGGLLIEIYGDSVGLFTADTDWLESIDAGESAAFRVAPHGKPDPGRYNATITVSGGNGIGASFDVAYTEPAGARYAVALLDGDXAKIEGYNFYDRAAPLTVTVLNTGNTDTGGLVIQIYGDWEPAFTVSPDSFIKNIPMGGGDRFPCGNPGPGITPRENPTANDKRVTQRAGDISRRGFLFCALHSPAKGNTSL

SEQ ID NO: 13441 - DNA, 420 bp, Unknown
  Obtained from environmental sample
  misc_feature (1)..(420): n is a, c, g, or t
gtgatgggggttaatcaggacaagtacaatcccgccgaagacaaggttgtttcgaacgcgagctgcaccaccaactgccttgcgccggtggtttacgtgcttttaaaagagaaaatcggagtcgaaaaggggctcatgaccactatccattcctataccgcgacgcagaanaccgttgacggggtttcacagaaagattggcggggcggcagggctgccgcgattaacataatcccctcgactaccggcgcggccaaggccgtgggcgaagtgcttcccgaggtcaagggcaagatgaaccggcatgtctttcaaaatttccccaccccccaccgggttccgtcggtgaaacctgaaccttcccccgctgcaaggggatccttccattcccaaaaaaatcgaacagcccccttggcttaa

SEQ ID NO: 13442 - protein, 139 aa, Unknown
  Obtained from environmental sample
  DOMAIN (27)...(139): Glyceraldehyde 3-phosphate dehydrogenase, C-terminal domain
  misc_feature (1)..(139): Xaa is any amino acid
MMGVNQDKYNPAEDKVVSNASCTTNCLAPVVYVLLKEKIGVEKGLMTTIHSYTATQXTVDGVSQKDWRGGRAAAINIIPSTTGAAKAVGEVLPEVKGKMNRHVFQNFPTPHRVPSVKPEPSPAARGSFHSQKNRTAPLA

SEQ ID NO: 13443 - DNA, 513 bp, Unknown
  Obtained from environmental sample
  misc_feature (1)..(513): n is a, c, g, or t
atgttcttttggggcctcatgagcctggcctctttcggttttccgggcaccaacgggtttgtgggggagttcctggtcatcgtggccgccttcggcgtgaccacggaaatcggcggaatcaacgtgcccatcctgggccttctgaccgcgcccggggccatgctggccgcggcctacgcgctcaaggtcacccttaagctggcctggggccagcccagttcggccaaagacaagggttggccggacctgcgcgggcgcgaatgggcctacctcttgctcccggccgtattcgtcatctacctggggctggcccccggcggggtcttgtccaccattgaccccaccatagccgccaccgtcaaaacctttcagtcctcgggccgcccccggctcaagcgactgggcttttccgttccttccggcctcgaaaattctccggaacctgaacgtccccatccgccccccgggaaactgaaaagggaacctaaagaaccatgggtgaaatttttttaa

SEQ ID NO: 13444 - protein, 170 aa, Unknown
  Obtained from environmental sample
  SIGNAL (1)...(21)
  misc_feature (1)..(170): Xaa is any amino acid
MFFWGLMSLASFGFPGTNGFVGEFLVIVAAFGVTTEIGGINVPILGLLTAPGAMLAAAYALKVTLKLAWGQPSSAKDKGWPDLRGREWAYLLLPAVFVIYLGLAPGGVLSTIDPTIAATVKTFQSSGRPRLKRLGFSVPSGLENSPEPERPHPPPGKLKREPKEPWVKFF

SEQ ID NO: 13445 - DNA, 396 bp, Unknown
  Obtained from environmental sample
  misc_feature (1)..(396): n is a, c, g, or t
ttgaaggaaaggctggacgatctgcccctcctggccgatcatttccggcggaaatacgcccgcctgaacaacaagcaggtcaccggcctctccccggaagccttggcccgtttggaatcctacgactggcccggcaatatcagggaactggaaaacaccgtggcccggggggtgcttctggccgccgggccggaagtgacgccgggcgacctgttcatggatgaggccggtttcatggccgccctggagagagggcagcccgccgagcctcgagtcccggccgtggacgagccggactcagaggcggttacggcccggctggaacaggagatttcggcctccgaaggtctcatgaccattgagccatggaacgccggcttatcggccaggccttaa

SEQ ID NO: 13446 - protein, 131 aa, Unknown
  Obtained from environmental sample
  DOMAIN (2)...(51): Sigma-54 interaction domain
  misc_feature (1)..(131): Xaa is any amino acid
MKERLDDLPLLADHFRRKYARLNNKQVTGLSPEALARLESYDWPGNIRELENTVARGVLLAAGPEVTPGDLFMDEAGFMAALERGQPAEPRVPAVDEPDSEAVTARLEQEISASEGLMTIEPWNAGLSARP

SEQ ID NO: 13447 - DNA, 711 bp, Unknown
  Obtained from environmental sample
  misc_feature (1)..(711): n is a, c, g, or t
gtggtgctgactaatatagtagcatccaagccgactaaagtagactactggcagggcgaggctctcaacctggctgggatgacggtaaccggctattacaacaacaatacaaacggagctattacaaactggacggccgaccccgctaacggtacggctctcaacacgataagcgcaaactactatataaaagtaacttacaataacaaagacacttatgtaacggtgaacgtgagggagatcactttgagcggtatttctgttacaacactgccgacgaaaacgcagtacgaaatcggcgagcagttagtaaccgccgggatggtggtaaccgctctgttcagcaatagctccagcgcagttacaacaaactattctgtctccggttttgacagcaccacagccggtacaaaaaatatcacggtaacggtgcaaaacaaaacggctacatttaatgtaaccgtgaaacaagtgttagcggcactaccagtggaaatggtaaccataccggccggagtttctgtaacactgggcggagacggtcaaagtacgcagacaacacttaccctacagcaatttgctatgtctaaatacctgaacacacaggcgcagtttgagtctttgatgggaatacaatattccgggtacaagaccgctccgaaggcgaataagccaatggaatatgtttgctggtaccaaaacaatacataa

SEQ ID NO: 13448 - protein, 236 aa, Unknown
  Obtained from environmental sample
  DOMAIN (90)...(155): Bacterial Ig-like domain (group 3)
  misc_feature (1)..(236): Xaa is any amino acid
MVLTNIVASKPTKVDYWQGEALNLAGMTVTGYYNNNTNGAITNWTADPANGTALNTISANYYIKVTYNNKDTYVTVNVREITLSGISVTTLPTKTQYEIGEQLVTAGMVVTALFSNSSSAVTTNYSVSGFDSTTAGTKNITVTVQNKTATFNVTVKQVLAALPVEMVTIPAGVSVTLGGDGQSTQTTLTLQQFAMSKYLNTQAQFESLMGIQYSGYKTAPKANKPMEYVCWYQNNT

SEQ ID NO: 13449 - DNA, 471 bp, Unknown
  Obtained from environmental sample
  misc_feature (1)..(471): n is a, c, g, or t
ttgaacggtccatcggcaaggcaaaacgggttattgataaccggaggttataaaatgggaataaaacaaatatcagtttttctggaaaacactacgggccgcctgtgcgaagttacccagacgctggcaaaagcgggcgtaaacctgcgggcaatcagtattgccgacactgccgactttggcatactcaggcttattgccgataaaaccgatgaagcggttaacgtgctgacagccgcgggttttactacccggcagaccaatgttgccgcggtggaaattgacgacaagcccggcagccttgccgcccttatggaacttttccgcacatcgggaataaacattgagtacctgtatgcctctcttgagggcagccatgacaaggcggtggtgatattcaaactggaagatcatgagagaggttttgaaattctgaaaaaaaacggcctgattatggcggagaaattctag

SEQ ID NO: 13450 - protein, 156 aa, Unknown
  Obtained from environmental sample
  DOMAIN (22)...(87): ACT domain
  misc_feature (1)..(156): Xaa is any amino acid
MNGPSARQNGLLITGGYKMGIKQISVFLENTTGRLCEVTQTLAKAGVNLRAISIADTADFGILRLIADKTDEAVNVLTAAGFTTRQTNVAAVEIDDKPGSLAALMELFRTSGINIEYLYASLEGSHDKAVVIFKLEDHERGFEILKKNGLIMAEKF

SEQ ID NO: 13451 - DNA, 564 bp, Unknown
  Obtained from environmental sample
  misc_feature (1)..(564): n is a, c, g, or t
gtgcagaaagctttggacgcgggggcacagcccgctgatattcttcaagacgcgctgatggcgggaatgaatatcatcggcggaaaattcaagaggaacgaggtttttgtgccggaagttttaattgccgcgcgcgccatgaacaaagccacggaagccctaaaaccagcccttgcgaaagccggcgttcagcctgtggggcaggcgataatttgcaccgtcaaaggcgatcagcatgatatcggtaaaaatcttgttaagatgatgatcgaaggcaagggaatcgaagttgaagaccttggcgtagattgcgatacccagttggtggtagacaaggtaaaagaaggcaaggcaaaagttctctgcctttccgcgcttcttacgacaacgatgggcgtccaaaaagatgtaattgacgcgctgaaagacgcaggggtcagagacaaggtaaaagtgatggtaggcggcgctcccgttacgcagagttttgccgacgaaatcggcgcggacgcttacacgcccgatgccgcaagcgcggcggaagtttgcagaacattttattga

SEQ ID NO: 13452 - protein, 187 aa, Unknown
  Obtained from environmental sample
  DOMAIN (1)...(64): B12 binding domain
  misc_feature (1)..(187): Xaa is any amino acid
MQKALDAGAQPADILQDALMAGMNIIGGKFKRNEVFVPEVLIAARAMNKATEALKPALAKAGVQPVGQAIICTVKGDQHDIGKNLVKMMIEGKGIEVEDLGVDCDTQLVVDKVKEGKAKVLCLSALLTTTMGVQKDVIDALKDAGVRDKVKVMVGGAPVTQSFADEIGADAYTPDAASAAEVCRTFY

SEQ ID NO: 13453 - DNA, 339 bp, Unknown
  Obtained from environmental sample
  misc_feature (1)..(339): n is a, c, g, or t
gtggaggcctgcaaaaagttggtcaagtcgatcgcttacaactaccgcataccgtactttaccatatcgccgacgttctcagtctgcaagtctcacggctaccttaaaggccagcacttctcatgtccgaactgctcggaggagacggaggtctatgcccgaatagtcggctactaccgccccgtgcaaaactggaaccagggtaaaaagtcggagttcagccaaagaacggtctttgttcccaaagacccggacgaggagaatctgacgtatttttccgacatagccggacgggtcgaggagtgtgagatgatcgggttggccgaagccgtggggtga

SEQ ID NO: 13454 - protein, 112 aa, Unknown
  Obtained from environmental sample
  misc_feature (1)..(112): Xaa is any amino acid
MEACKKLVKSIAYNYRIPYFTISPTFSVCKSHGYLKGQHFSCPNCSEETEVYARIVGYYRPVQNWNQGKKSEFSQRTVFVPKDPDEENLTYFSDIAGRVEECEMIGLAEAVG

SEQ ID NO: 13455 - DNA, 381 bp, Unknown
  Obtained from environmental sample
  misc_feature (1)..(381): n is a, c, g, or t
ttgaacccccccgcaatttcaggctggacaaaaacgtctttcattgactatccgggttgtccggccactttgatcttcctccccggttgcaatctgcgctgtccgtattgccacaaccccggcgtcgtcttggacagctatcccccaattccgtttggggatatagaggatcacatcataaagcgtaaaaacgttatcgaggggcgcgtgataagcggcggggagccacgctgcatccgggctggaagaatctttgcaacgcgatcaaggggctcgggcttaaagtggaaaatcgacaccaacgggcttggaaaccgaaggtttaaccggagtgcccccccaaaattatctccttttggaaaaattaaaaactccctttga

SEQ ID NO: 13456 - protein, 126 aa, Unknown
  Obtained from environmental sample
  misc_feature (1)..(126): Xaa is any amino acid
MNPPAISGWTKTSFIDYPGCPATLIFLPGCNLRCPYCHNPGVVLDSYPPIPFGDIEDHIIKRKNVIEGRVISGGEPRCIRAGRIFATRSRGSGLKWKIDTNGLGNRRFNRSAPPKLSPFGKIKNSL

SEQ ID NO: 13457 - DNA, 798 bp, Unknown
  Obtained from environmental sample
  misc_feature (1)..(798): n is a, c, g, or t
gtggagcgcccccgccgcgatgggaaggccgaccgcgttgtagccgaaggcccaaaacaggttctgcctgatagtgcggatgacgcgcctggaaagctggagcgcggtggggacggccaagaggtcgccgcgcatcaagaccacatccgcgctttccatggccacgtccgtgcccgtgccgatggcgaacccgacgtcggcctgggccagggccggggcgtcgttaattccgtctccgaccatggccacgattccgccgccggcttgcagctttttcacctcgtccgccttgccgccgggcagaacctcggccagcacccggcccaggccgatctctttcgctatccgctccgccgtggcgcggttgtcgccggtgatcatcacggtttccaggcccatttcgcgcagcttggctatggccgcccggctgctctctttcggtttgtcggagacggtgatttgccccaggcgttcgccgtcggcgaacacttccaccccgcggccgatcaccactttccggccgccaattacgccctccaccccttggccgatattggccttgaaatcttcgacctcaaggtattcgccctggtaggcggccacgaccgcgcgggcgatggggtgttcggagtagcgttccaggctggcggcgatttgcaggacgtcgccttcaattccggtgacttccggctggccgcaggtgatggtcccggttttgtcaaagacgacgacgttgaccttgtgcgctgtttccagggcttccccgccctgaaaagtatgccgttttccgcgccctga

SEQ ID NO: 13458 - protein, 265 aa, Unknown
  Obtained from environmental sample
  misc_feature (1)..(265): Xaa is any amino acid
MERPRRDGKADRVVAEGPKQVLPDSADDAPGKLERGGDGQEVAAHQDHIRAFHGHVRARADGEPDVGLGQGRGVVNSVSDHGHDSAAGLQLFHLVRLAAGQNLGQHPAQADLFRYPLRRGAVVAGDHHGFQAHFAQLGYGRPAALFRFVGDGDLPQAFAVGEHFHPAADHHFPAANYALHPLADIGLEIFDLKVFALVGGHDRAGDGVFGVAFQAGGDLQDVAFNSGDFRLAAGDGPGFVKDDDVDLVRCFQGFPALKSMPFSAP

SEQ ID NO: 13459 - DNA, 534 bp, Unknown
  Obtained from environmental sample
  misc_feature (1)..(534): n is a, c, g, or t
ttgtgcggggtatgtataaggagtcgtcacccgccgtcggggcccaattactttctatataatagtataaacgaggggccggtgaaacagcctgtggtcgcctacctgtcgttcaagaacacaaaggagaacaacttagccatcccgctgcccgccggaaccgtccgtatatacaccgccgacgccaaggggagccagcagttcatcggcgaagaccgtataaaccacacgcccaaggacgaggagatccgcctgaaagtgggggaggccttcgacatagtggccgagcgcacccaggtggactttgcccagaagacgtcgaaagtcacggagacggagtggaaggttaccctgcgcaaccgcaaggaggaggatgtaacggtgcgcatacaggagaacgcgatggggcaatgggagatacttgacccgtcgcacaagttcaccaaggtcagcgccactatgttcaggttcgacgtgccggtggccaaggggcaggaggtcgcggtcaagtacaagatacgggttaagggttag

SEQ ID NO: 13460 - protein, 177 aa, Unknown
  Obtained from environmental sample
  misc_feature (1)..(177): Xaa is any amino acid
MCGVCIRSRHPPSGPNYFLYNSINEGPVKQPVVAYLSFKNTKENNLAIPLPAGTVRIYTADAKGSQQFIGEDRINHTPKDEEIRLKVGEAFDIVAERTQVDFAQKTSKVTETEWKVTLRNRKEEDVTVRIQENAMGQWEILDPSHKFTKVSATMFRFDVPVAKGQEVAVKYKIRVKG

SEQ ID NO: 13461 - DNA, 819 bp, Unknown
  Obtained from environmental sample
  misc_feature (1)..(819): n is a, c, g, or t
ttgacatccgtattgaccgttacattaacgctcggcttgacatttgccgtatcggtattaactttggcggcggtattgacatcggtatcaacagcggcgttagcgccgctattaacatttaccttgacgttagacgtattgacatcggcgttagcagttgtattaacatcaactttgacattagccgtatcggcattaactttcgtttccgtattgacgccggcgttaacggttacattaacatcggcctttacgtttaccgtgttgacattaatcttagcgtccgtattaatacctttattaacgcctattttgttatcagccttgacttctgtcttaacatccgcgtcattaacgtccgttttatcaactttaactttaacatccggatcgttcttaacgaacgtactgtcccctgcctttgccttgctcagcgcggccttgagtatctcagatttgacggtgccgagctccaccgccgccctttcgaggtcggtcatctcggcttgtccgcgcgcaatctgccttacgcggtcggcggaggcggccagttcttccctgatcaggttgctgaaagcgctcaccgtatcggctaccgacatactgaggtcggccgggttgaccgcctgcaggatgccggtcgccgagcctgcctcgctattctcggccatcttatcggcgatcatgccgctcacgccgatcagcttgaaggccatatccatgcggaacttttcggtgcgcagcgccgtagcgaactcggagagctcggcggcgttttgttctggctctatatgggatatcggactctccatgccgtaa

SEQ ID NO: 13462 - protein, 272 aa, Unknown
  Obtained from environmental sample
  SIGNAL (1)...(23)
  misc_feature (1)..(272): Xaa is any amino acid
MTSVLTVTLTLGLTFAVSVLTLAAVLTSVSTAALAPLLTFTLTLDVLTSALAVVLTSTLTLAVSALTFVSVLTPALTVTLTSAFTFTVLTLILASVLIPLLTPILLSALTSVLTSASLTSVLSTLTLTSGSFLTNVLSPAFALLSAALSISDLTVPSSTAALSRSVISACPRAICLTRSAEAASSSLIRLLKALTVSATDILRSAGLTACRMPVAEPASLFSAILSAIMPLTPISLKAISMRNFSVRSAVANSESSAAFCSGSIWDIGLSMP

SEQ ID NO: 13463 - DNA, 444 bp, Unknown
  Obtained from environmental sample
  misc_feature (1)..(444): n is a, c, g, or t
ttgtttatcctatgctttttaagccgnctggtgaaaaaaagtattgcctttggaagtataatggcggcttccattgccgcatctgttataactttacagcttggcgcgtttagcgtagtgcttgagacattgttttccggtattaccgagctgccatttacggcctttgttcttttaatgcagcccatacatctggctattggcattatcgaaggcattgtaaccgcggcggttctttgctttgtgtataaaatgcgccctgaaatcatggaaagcagctttgaaagaacggctattaaaagtggtgtgccgttaaaaaatattcttgttgtgcttgccgtaattacattgattaccggaggcttattgtccctgttcgtttcttcacaccctgacgggcttgaatggtcaataaagaatataaacgggttcaacgaagattga

SEQ ID NO: 13464 - protein, 147 aa, Unknown
  Obtained from environmental sample
  SIGNAL (1)...(26)
  misc_feature (1)..(147): Xaa is any amino acid
MFILCFLSRLVKKSIAFGSIMAASIAASVITLQLGAFSVVLETLFSGITELPFTAFVLLMQPIHLAIGIIEGIVTAAVLCFVYKMRPEIMESSFERTAIKSGVPLKNILVVLAVITLITGGLLSLFVSSHPDGLEWSIKNINGFNED

SEQ ID NO: 13465 - DNA, 690 bp, Unknown
  Obtained from environmental sample
  misc_feature (1)..(690): n is a, c, g, or t
ttggaactaaccaggaaacccttatccattcttaaaaattttcaagaagttacctttatcccggagaaagctttatcaagattttgtatggaacctttggagatttgggttccgcgaactcgaccatcaccgcgaattgcgaagggcgtcggcgaagtaatattcggggaaggaaaaacgcgggagcaaataacaggcatcgcggctgtcatgcaggataagcagcagcggttaattatgataaccagattatcagcggaagcggccgaaacagtcaataaaaaaattccgttgcaatatcgtaaagcagcgcgaattgggatcattggcgaaatgcccaaacctgacggcattggaaaaatcgtagtggccaccggcggcacgagcgatattcctgttgcggaagaagctgcggttaccgccgaagctcttggtaacgaagttgtccgcctgtacgatgtaggtgttgcgggtcttcaccggctcctttcacaacttgaagtaattatggacgcgcaggtaataatttccatagccggaatggaaggagcgttaaccagcgtaatcggcgggctggttgattgcccggttatcggcgtccccacaagcgtaggctacggagcttcattcaacgggttagccgcccttcttgcaatgcttaactcatgcgcatctcgtgccgaattctga

SEQ ID NO: 13466 - protein, 229 aa, Unknown
  Obtained from environmental sample
  misc_feature (1)..(229): Xaa is any amino acid
MELTRKPLSILKNFQEVTFIPEKALSRFCMEPLEIWVPRTRPSPRIAKGVGEVIFGEGKTREQITGIAAVMQDKQQRLIMITRLSAEAAETVNKKIPLQYRKAARIGIIGEMPKPDGIGKIVVATGGTSDIPVAEEAAVTAEALGNEVVRLYDVGVAGLHRLLSQLEVIMDAQVIISIAGMEGALTSVIGGLVDCPVIGVPTSVGYGASFNGLAALLAMLNSCASRAEF

SEQ ID NO: 13467 - DNA, 525 bp, Unknown
  Obtained from environmental sample
  misc_feature (1)..(525): n is a, c, g, or t
atgcctttacccggggaaaaacttgctacggaggtaaaaaggatggtgaatgaagcgacaatatcaaagctctatgaaataaaactgtccgctatggcggcttcctatcgccagcagacggaggataacggaatcagcaaactctctttcgacgaacggttcggccttttggtggataccgaatgggcagccaggaagaacaaccgcctgaaacggcttatccgttccgccgatttccccatttcaggcgcctgcgttgaaggcattgaataccgcgccgaccgcanactggacagggaacagatcctccattttgaaacctgcgcgtatattggcgaaaggcacaatgtcattattctcggggcaaccggggccggcaaaacgtatttgagctgcgcattgggaatgtccgcctgccgccgtttctattcggtcaagtatatcccgctgccggatttgctggatgaactttcggtagccaaaggcgtccgctcggaagagccgcagaatctttccgaaaggtaa

SEQ ID NO: 13468 - protein, 174 aa, Unknown
  Obtained from environmental sample
  DOMAIN (37)...(66): IstB-like ATP binding N-terminal
  misc_feature (1)..(174): Xaa is any amino acid
MPLPGEKLATEVKRMVNEATISKLYEIKLSAMAASYRQQTEDNGISKLSFDERFGLLVDTEWAARKNNRLKRLIRSADFPISGACVEGIEYRADRXLDREQILHFETCAYIGERHNVIILGATGAGKTYLSCALGMSACRRFYSVKYIPLPDLLDELSVAKGVRSEEPQNLSER

SEQ ID NO: 13469 - DNA, 687 bp, Unknown
  Obtained from environmental sample
  misc_feature (1)..(687): n is a, c, g, or t
atgcttctgctcggcaacggcaatgaaatggttgcggtaaacttaaaaattttatatgtaatttccgatttatattcctacatcaaaacttacgcagacgctgggtccgtgttaagcgccgctgtttacaacgctcttatgacccgcacaattaacactaccctcgactcatttctaaacgtagacagaaattccctttcggcgtccgtcatggacgagttatccgctttttgcgaatcggaaaaactgggattttccgttgtgcaggttgttattgaaaatatacatcctcctgtagatatagctgacgtatatcaaaaagttgtaagcgcctccgttgacaaaaccacaatgattacaagggcgcaaacttacgccgaaacaagagtaatagaagcggcgaaacaaggcaagttcgccgttgacggagcaagggcaatccaatacgacagaacaagcgacgctcaaaaagaatcggctgttttttacgctgcggcggacgcctatagaatttcccccgcctcttatgaattaaccagaaatcttgaggtataccaaaaaattattaaaaacaataaagtgtacgctttttcacggggaacggaaaatacaatatcgaaatttattataggaaaaataaatactattaatctgttggacgcaaataaaggagcagggaatgagtaa

SEQ ID NO: 13470 - protein, 228 aa, Unknown
  Obtained from environmental sample
  misc_feature (1)..(228): Xaa is any amino acid
MLLLGNGNEMVAVNLKILYVISDLYSYIKTYADAGSVLSAAVYNALMTRTINTTLDSFLNVDRNSLSASVMDELSAFCESEKLGFSVVQVVIENIHPPVDIADVYQKVVSASVDKTTMITRAQTYAETRVIEAAKQGKFAVDGARAIQYDRTSDAQKESAVFYAAADAYRISPASYELTRNLEVYQKIIKNNKVYAFSRGTENTISKFIIGKINTINLLDANKGAGNE

SEQ ID NO: 13471 - DNA, 489 bp, Unknown
  Obtained from environmental sample
  misc_feature (1)..(489): n is a, c, g, or t
atggatccgcgagcgcgcgaaaactatagtctggatattttggcgcagcagagccgcggttacgcgcaccgcttcgagtaccaccccgcggcgtatcccctgcgcctgatcgacgaggggcggattccagagtataaattcgcggcctgcctgcggcgcgccgttttcagtgatgagagtgacatcttcgccgatgagctgttcggcgagttcggcgggattcgctatcgttgccgacgagagtataaaaacgggacgcgctccgtaatacgcggcgatgcgtttcaggcggcgcaggacattcgcgagatggctcccgaatacgccgcggtaactgtgcatctcgtcgatcacaacgacagcgagcccgctgaagagcttctcccatttcggatgattcggcaggataccggtgtgcagcatatcgggattgtaatcactatctgccctcgggcgcgcgcggcggaacggatactcgtgccgatctga

SEQ ID NO: 13472 - protein, 162 aa, Unknown
  Obtained from environmental sample
  misc_feature (1)..(162): Xaa is any amino acid
MDPRARENYSLDILAQQSRGYAHRFEYHPAAYPLRLIDEGRIPEYKFAACLRRAVFSDESDIFADELFGEFGGIRYRCRREYKNGTRSVIRGDAFQAAQDIREMAPEYAAVTVHLVDHNDSEPAEELLPFRMIRQDTGVQHIGIVITICPRARAAERILVPI

SEQ ID NO: 13473 - DNA, 594 bp, Unknown
  Obtained from environmental sample
  misc_feature (1)..(594): n is a, c, g, or t
ttgaggctttccaaaggcacgtcacggacgatccgccgttctttgaaaggctgctgcacaactacgttacgggttccctggatgggtaggcaggaagacgagctggaagtccaggaaaggctcatggaaaacctcatgggggacctttcccttcttgtcccctatttcgactgcaggtccgtcaccaacgtctacgtttacggcacgggggcggtcgaagtcgacgacttcgacagggggctttattgggccgggttctcgctttccgtttccgacaggatgcgcatcgtgaacagccttgcctcggttaccggcacgccgatcgacaggtggaagtgccccaccctcgagagcatcgttccgaagtacaacatcaggaccacggccatcctgcccgactgggtaaaggctcccgaaatcgcgttccgcaggcccccggacaaaatttataccctcgaggaatacgtttcctccggaaggatgtccggcgagttttacgaaaaaatatgcgcctgcctcgaagaaaggggaaacgtcatcgtttccggaagcacgggatccggcaagacgacgttcacaaacgccctgctttga

SEQ ID NO: 13474 - protein, 197 aa, Unknown
  Obtained from environmental sample
  misc_feature (1)..(197): Xaa is any amino acid
MRLSKGTSRTIRRSLKGCCTTTLRVPWMGRQEDELEVQERLMENLMGDLSLLVPYFDCRSVTNVYVYGTGAVEVDDFDRGLYWAGFSLSVSDRMRIVNSLASVTGTPIDRWKCPTLESIVPKYNIRTTAILPDWVKAPEIAFRRPPDKIYTLEEYVSSGRMSGEFYEKICACLEERGNVIVSGSTGSGKTTFTNALL

SEQ ID NO: 13475 - DNA, 723 bp, Unknown
  Obtained from environmental sample
  misc_feature (1)..(723): n is a, c, g, or t
gtgctgtatgccatcctcatatcacagcatggttcacgaagttatgcaagttatttgactataaatatgtacaagaaaccccttgtacaacgtggcgcaaagtgttgcaatggtggcatggcatacagcagagacctcaaagagaaactgatcgcctatctggcaaagggccacacgatgcgggaggcgaaggagactttcagcgtcggccttgacaccgtgaacaactgggtccagaggctgaaggacacgggctgcttagaaaacaggaagccgcagagggcgcacaagaaacccggccccgaaaagctccgcgcctacatcgtggagcgccccgactcccacctggccgagaccggggaagccttcgggtgcagcgcgtcagcggtgtgcagggccctggcgaggctgggcatcacccgcaagaagaaggccaagaggttcagcgagcagagccccgagcgggtggccgagcaccttgcggagccggagaaggtctcaggccggccggtcgcctacgtggacgagacggggatggacacatggctgtgccgcgaatacggctggtccgtgcgcggcgcccccgtggccggggaggtgcgcgggcgcaagtatgaaaggggcgggcgtcgtcgccgccctcgtggggaaggagctggtcaccccatacatatatgggggacgaccatggagtccccaatttttttgagagactgggtttga

SEQ ID NO: 13476 - protein, 240 aa, Unknown
  Obtained from environmental sample
  DOMAIN (40)...(168): Transposase
  misc_feature (1)..(240): Xaa is any amino acid
MLYAILISQHGSRSYASYLTINMYKKPLVQRGAKCCNGGMAYSRDLKEKLIAYLAKGHTMREAKETFSVGLDTVNNWVQRLKDTGCLENRKPQRAHKKPGPEKLRAYIVERPDSHLAETGEAFGCSASAVCRALARLGITRKKKAKRFSEQSPERVAEHLAEPEKVSGRPVAYVDETGMDTWLCREYGWSVRGAPVAGEVRGRKYERGGRRRRPRGEGAGHPIHIWGTTMESPIFLRDWV

SEQ ID NO: 13477 - DNA, 564 bp, Unknown
  Obtained from environmental sample
  misc_feature (1)..(564): n is a, c, g, or t
gtggacggttacgctgtagttgccgccgacaccgccggcgcgggggaggcgattccggtctttttgaagcaggcgggatccgtgtccatgggaaagtccgcgggcttttccctgcggagcggagagtgcgcctatgtgcccaccggcgccatgcttccggacggcagcgacgcggtggtgatgatagagtattgcgaagacgcgggcgggaatattgccgtgtacgaagcggcggcgccgggcgcgggcatggcggaggccggtgaggatctgaaaaaaggggaaccgcttctccgccggggaactgtgatccggccccaggaagccggcgctctggcagccacggggataaccaatataaaggtctatgctccgctgaagctcgttcttttttctacaggcgacgaacttgtcccgcccgggacagaatcccaacccgggagagatacgcgacatttacacccattgcccttaaagcccttgcttcaaaacggggttttcaaggcccttttcggcccgggtgcttccccaagaaccccgggccggctggaaaccgctatttaa

SEQ ID NO: 13478 - protein, 187 aa, Unknown
  Obtained from environmental sample
  DOMAIN (1)...(116): MoeA N-terminal region (domain I and II)
  misc_feature (1)..(187): Xaa is any amino acid
MDGYAVVAADTAGAGEAIPVFLKQAGSVSMGKSAGFSLRSGECAYVPTGAMLPDGSDAVVMIEYCEDAGGNIAVYEAAAPGAGMAEAGEDLKKGEPLLRRGTVIRPQEAGALAATGITNIKVYAPLKLVLFSTGDELVPPGTESQPGRDTRHLHPLPLKPLLQNGVFKALFGPGASPRTPGRLETAI

SEQ ID NO: 13479 - DNA, 681 bp, Unknown
  Obtained from environmental sample
  misc_feature (1)..(681): n is a, c, g, or t
gtgaaaatccttgccgagtacagccgttatcaaattccctcggggataattgagagtttctctgataccatatcccgctacggaaaaatcaaaatgatcgccgccgcagattttgccgccactggcggcgatgccgccgcggacagcgggtacgagttatctctgaagattgaagacccggcggtatcggctgagattgccgcgattaaatcattggaaaaatatgtaataaaaaccgcgcagggttttgccctgcggctggtggatcgcggcagcgttaaacgggaacttataaaacagggctggcccgtgcaggatcaggcgccgctggttaaaggcgatgatttggatattattttgcggaatgaaagcctgtcgggaaggccctttgccccgagggattaccagatcgaggcggcccgcgccgtgctgggggacggcggtcccggcagcggttacggcgtagtggcgctgccctgcggttcgggcaagaccattgtcggcatggtcattatgtcgcttttgaaaaccaataccctgattttaacgactaacgttgcggcggtacaccaatggaatgaagaactgctggacaaaaaccaaattagcccccgaacagaatgccgaaaattcaggcgactcaaaatcttggggcgcccggtaacattgcccccctattaa

SEQ ID NO: 13480 - protein, 226 aa, Unknown
  Obtained from environmental sample
  DOMAIN (129)...(219): Type III restriction enzyme, res subunit
  misc_feature (1)..(226): Xaa is any amino acid
MKILAEYSRYQIPSGIIESFSDTISRYGKIKMIAAADFAATGGDAAADSGYELSLKIEDPAVSAEIAAIKSLEKYVIKTAQGFALRLVDRGSVKRELIKQGWPVQDQAPLVKGDDLDIILRNESLSGRPFAPRDYQIEAARAVLGDGGPGSGYGVVALPCGSGKTIVGMVIMSLLKTNTLILTTNVAAVHQWNEELLDKNQISPRTECRKFRRLKILGRPVTLPPY

SEQ ID NO: 13481 - DNA, 525 bp, Unknown
  Obtained from environmental sample
  misc_feature (1)..(525): n is a, c, g, or t
atggccgagaatccttattctggagacgagggggccaataaggacgcggtagacgagattttccgcgccgctcataccctaaaaggcggttcagccacggtggaaatgatggaactttcccattttacccacatggttgaggatgtactggatgccatacgttcagatcagcttaagataagtgaggatgtagtagacatcctcctttcggctattgatgtgattaaagcgatgctggaacagcggatgaacggcgcagtttatcaagagaatacctctgaaatcgaaggcaaattgtctgccctgattccggagggtaaaggcaaaaagggagccgcgcccaagcctaaagctgcgccgcagcctgctcccgcgcctgtggttcaagcgccggcggcgcctgccgccagtgggcctgcaagcggcacacagcttaccgaagaagagttacaggaacttagagaatcggtggacggcgggcttccgatcttgcaagtgtcggtaaaatttgacgaaaaaacctga

SEQ ID NO: 13482 - protein, 174 aa, Unknown
  Obtained from environmental sample
  misc_feature (1)..(174): Xaa is any amino acid
MAENPYSGDEGANKDAVDEIFRAAHTLKGGSATVEMMELSHFTHMVEDVLDAIRSDQLKISEDVVDILLSAIDVIKAMLEQRMNGAVYQENTSEIEGKLSALIPEGKGKKGAAPKPKAAPQPAPAPVVQAPAAPAASGPASGTQLTEEELQELRESVDGGLPILQVSVKFDEKT

SEQ ID NO: 13483 - DNA, 609 bp, Unknown
  Obtained from environmental sample
  misc_feature (1)..(609): n is a, c, g, or t
gtgcctatactaattgttcccgcctgtgaaccgggccgcggaggggggcatcttgtccgcagtatggctttggtacgcgagttgcgcgctcttggcagagaggcgtggctttacttaacatcatcaaacgcggatccggttttggacacggcgcaatttgaccgatcatggcttcttgatgaaagcggtttgcgtgagaaaaattggaaatgcatcatccttgaccggtttcaaacctctgccgatgagcttgcccgctggcaaaaaatcgcccctgtcatcggaatcgatgaaggcggcaaacacaggagcaattttgattttctgatcgacattctccccaactgcaataaaattgcgccaaacattacagatccttcccttttaccccttccaaaaaataagccgcgtccgccagcgcgcgctgaaacagctcctctaaaaatactgattagcttcggaatggaagactctgccggtcttggtcccgcgctcgcaaaaagacttgtggatcatcaaaatatcgaaatcattctgttaaaaggaaaattatcaaatgaaaaaaattattcctcattccttattcctcgtgccgctcggccgatctga

SEQ ID NO: 13484 - protein, 202 aa, Unknown
  Obtained from environmental sample
  misc_feature (1)..(202): Xaa is any amino acid
MPILIVPACEPGRGGGHLVRSMALVRELRALGREAWLYLTSSNADPVLDTAQFDRSWLLDESGLREKNWKCIILDRFQTSADELARWQKIAPVIGIDEGGKHRSNFDFLIDILPNCNKIAPNITDPSLLPLPKNKPRPPARAETAPLKILISFGMEDSAGLGPALAKRLVDHQNIEIILLKGKLSNEKNYSSFLIPRAARPI

SEQ ID NO: 13485 - DNA, 399 bp, Unknown
  Obtained from environmental sample
  misc_feature (1)..(399): n is a, c, g, or t
ttgacaaaagccactgacccggtattaaaagaaattgccgcaatttttaacaataacgggaaacaggtgtatcttgtgggcggcgcggtacgggatatgctgatggggaaaaaaaatcatgattgggatttggctacggatgcgctgccggaagaagtgatcgccattgtcaaaagcgcaaagggaaaggttatccctacgggcataaagcatggtaccgttacagttctttataaaaaacacagtatcgaggttaccacattcaggcttgaatccgattattcggacgggcgcagaccggatacggttcaattttcaacaagtatcgaagaagatctttcacggggcgatttttgcatgaacgcaatttgccctgcgccttccttccggcgagcttaa

SEQ ID NO: 13486 - protein, 132 aa, Unknown
  Obtained from environmental sample
  misc_feature (1)..(132): Xaa is any amino acid
MTKATDPVLKEIAAIFNNNGKQVYLVGGAVRDMLMGKKNHDWDLATDALPEEVIAIVKSAKGKVIPTGIKHGTVTVLYKKHSIEVTTFRLESDYSDGRRPDTVQFSTSIEEDLSRGDFCMNAICPAPSFRRA

SEQ ID NO: 13487 - DNA, 504 bp, Unknown
  Obtained from environmental sample
  misc_feature (1)..(504): n is a, c, g, or t
atgcttgtatatcatggaggaagggcgcaaattattgaaatagatttgcagaaatgcaggccgtatactgattttggaagaggtttttatgtaacaaaatataaattacacgctgaaaattgggcaagaaggtccggcaagcgtaataataataatggctttgttacaagttataattatatcgagaaccaattttcagattacatttgcaagaaaaaaaaatttgacggctatacaaatgaatggcttgattttatcgttaataacagaaatgaagaatccgttgaacaggctcacggctatgacataatagaaggcccggttgcaaatgataaagttcaaaacagaatttataattatttacgcggtgaaataacaaaagaagcatttttaaaagagctggaatatcacgaggaaacgcatcagatttggttttgcacactcgcttctttacaagccttaaaacggaatgaaaatgacctgaccgtcttttttgaaaaataa

SEQ ID NO: 13488 - protein, 167 aa, Unknown
  Obtained from environmental sample
  misc_feature (1)..(167): Xaa is any amino acid
MLVYHGGRAQIIEIDLQKCRPYTDFGRGFYVTKYKLHAENWARRSGKRNNNNGFVTSYNYIENQFSDYICKKKKFDGYTNEWLDFIVNNRNEESVEQAHGYDIIEGPVANDKVQNRIYNYLRGEITKEAFLKELEYHEETHQIWFCTLASLQALKRNENDLTVFFEK

SEQ ID NO: 13489 - DNA, 798 bp, Unknown
  Obtained from environmental sample
  misc_feature (1)..(798): n is a, c, g, or t
ttgggggggccgatgatggccgagccctattttcatacaatgaaaataaatatgaaagaagacatctggctttctcataactcatatttctctgcgtccgcgaaccgaaggttcgatgcgcctctgcgagaggataaaatgaacgaagtggacgtagcggtcattggcggcggaccggcgggcatggcggcggcaatcgcggcagagcagtcaggggcaaagacgacgctcattgaacgtgagggccgcctgggtggaatactgaaacagtgcatccacgacggctttggccttatccgttttggagaaaaactcagcggccccgaatactcccaccgctatatcgcggagttaaaaaaaaccggcgtgtcggttcatctgcaaaaatttgtcgtgcgaataaacaaattgcccggcggatttgaactgaccttgagcggaagaggcggcattgaaaaacttttcacaaaggcccttgtcctttccaccggctgccgggaacgcactgcgcggcaggcaggcatctacggcacccggcccgcaggggttcttactgccggggcagcccagtattacaccaacattttaggacagctcccctgccgccgatgtgttatactcggttcaggtgacattggacttatcatggcccggcgcttaacactgggaggggcggaagtgcttggagtttacgagggcccagcccaccccggtccggcctctcgcggaacatccccccaatggcttgatgaatttaagcatccccctttacaacaaaacggtacgggtggggcgtaa

SEQ ID NO: 13490 - protein, 265 aa, Unknown
  Obtained from environmental sample
  DOMAIN (50)...(265): HI0933-like protein
  misc_feature (1)..(265): Xaa is any amino acid
MGGPMMAEPYFHTMKINMKEDIWLSHNSYFSASANRRFDAPLREDKMNEVDVAVIGGGPAGMAAAIAAEQSGAKTTLIEREGRLGGILKQCIHDGFGLIRFGEKLSGPEYSHRYIAELKKTGVSVHLQKFVVRINKLPGGFELTLSGRGGIEKLFTKALVLSTGCRERTARQAGIYGTRPAGVLTAGAAQYYTNILGQLPCRRCVILGSGDIGLIMARRLTLGGAEVLGVYEGPAHPGPASRGTSPQWLDEFKHPPLQQNGTGGA

SEQ ID NO: 13491 - DNA, 399 bp, Unknown
  Obtained from environmental sample
  misc_feature (1)..(399): n is a, c, g, or t
gtggtcgtcattcaagcgtttgctaacattgttcgcggcgagatatttgacgaaaacttcttgatgagcgtcgcgactatcggtgcgttcgccatcggcgaatactccgaggcggtcggcgttatgctcttttacggcgtgggcgagcttttccaatcgatggccgtaagaaggtcgaaggcatccatctcgcgtcttatggacattaggcccgactacgccaacatcaagaggggcggcgatatcgtgaaggtcgcggcgagcgacgtcngtgtcggcgacgtagtaatcgtcaagccgggtgagaagataccgttggacggtacggtcattgagggcgcgtcaacgctcgacgcgtcggcgctgaccggggaatctttgcctaaaacgttgcggtga

SEQ ID NO: 13492 - protein, 132 aa, Unknown
  Obtained from environmental sample
  DOMAIN (40)...(132): E1-E2 ATPase
  misc_feature (1)..(132): Xaa is any amino acid
MVVIQAFANIVRGEIFDENFLMSVATIGAFAIGEYSEAVGVMLFYGVGELFQSMAVRRSKASISRLMDIRPDYANIKRGGDIVKVAASDVXVGDVVIVKPGEKIPLDGTVIEGASTLDASALTGESLPKTLR

SEQ ID NO: 13493 - DNA, 342 bp, Unknown
  Obtained from environmental sample
  misc_feature (1)..(342): n is a, c, g, or t
atggtggggatgcccgaggcgcgcattccgctcgcgcatgccgccgtgcgtgtcgccctcgcgccgaagagcaattcggcgtatatgggtctggaggcggccatgcgggatgtgcgcgaatttggcccgctcgcggtgccggaccatcttcgcgatgcttcgacagaagtggcggcgaagcggctgggacgggggaaggagtatgtgtatccgcatgattgcccggggcattggacgccgcaggactatcttcccgagacgcggacgttctaccaaaactccggaatgggaaacgaggcacagcttgggaaatggcttgattttttgcgcgcgaagaaataa

SEQ ID NO: 13494 - protein, 113 aa, Unknown
  Obtained from environmental sample
  misc_feature (1)..(113): Xaa is any amino acid
MVGMPEARIPLAHAAVRVALAPKSNSAYMGLEAAMRDVREFGPLAVPDHLRDASTEVAAKRLGRGKEYVYPHDCPGHWTPQDYLPETRTFYQNSGMGNEAQLGKWLDFLRAKK

SEQ ID NO: 13495 - DNA, 606 bp, Unknown
  Obtained from environmental sample
  misc_feature (1)..(606): n is a, c, g, or t
atgaaaattgtaatgttttctgacgcctattggcccagggttaacggcgtaacggtatcggttgactcttattcacgcgcgctgataaaagccgggcacgaggttttggttatttgttcctcttaccccgaaggcatagatgcaacgccttcattttctgttgatcgcaagcaggacggggaagggcctaaaattgtgcgcgttccttcgctgcccgccttcataacaaaagaagacaggattgccaaattctcaaaatggcactgggtattcaggcaggtagaatctttcaatccgggaataattcatatcaataccgaatttgttatcgccgagattggtttcctttatgcaagggctcataaccttccggtaatttatacctttcacacaatgtgggaagattacgttacgaattattttcccatggttccgtcttttttcataaaatttatagcccgcagcgtatgcagaaatattttgttccaatcctacagggtgaatgtccctaccccgcagattgataaagttgtacacaattaccatccaggacaaaacccttcttctccctaccgaaaaaaagccggaacttttttatccaactga

SEQ ID NO: 13496 - protein, 201 aa, Unknown
  Obtained from environmental sample
  misc_feature (1)..(201): Xaa is any amino acid
MKIVMFSDAYWPRVNGVTVSVDSYSRALIKAGHEVLVICSSYPEGIDATPSFSVDRKQDGEGPKIVRVPSLPAFITKEDRIAKFSKWHWVFRQVESFNPGIIHINTEFVIAEIGFLYARAHNLPVIYTFHTMWEDYVTNYFPMVPSFFIKFIARSVCRNILFQSYRVNVPTPQIDKVVHNYHPGQNPSSPYRKKAGTFLSN

SEQ ID NO: 13497 - DNA, 453 bp, Unknown
  Obtained from environmental sample
  misc_feature (1)..(453): n is a, c, g, or t
atgcctgccgtaaggtatgtggaccctataaaagaattaggcggctttcttttaaatgtggaaaaacccgcgcgttatacgggcggtgagtttgggcttcttgccgcagataaaaaactttcagataacgaattaagcgcgataatagccttccccgacctgtatgaaatagggatgggaaaccaggcagtgcggattatttacaaccaccttaacaaagaaaaaaatatcttttgcgaccgcgctttcgcccccgcgcccgattttgaaaaattgttacgtgagaaaaatattcctatttacggacttgatacgggaataagcgccgcgtccgtggatttgcttatgtttaccctcggttacgaacttggcttaaacggcatacttacaatgcttgatgtttcaagtattccgcttcattgtgaagaaaggaatggtactcatccaatgtaa

SEQ ID NO: 13498 - protein, 150 aa, Unknown
  Obtained from environmental sample
  misc_feature (1)..(150): Xaa is any amino acid
MPAVRYVDPIKELGGFLLNVEKPARYTGGEFGLLAADKKLSDNELSAIIAFPDLYEIGMGNQAVRIIYNHLNKEKNIFCDRAFAPAPDFEKLLREKNIPIYGLDTGISAASVDLLMFTLGYELGLNGILTMLDVSSIPLHCEERNGTHPM

SEQ ID NO: 13499 - DNA, 690 bp, Unknown
  Obtained from environmental sample
  misc_feature (1)..(690): n is a, c, g, or t
ttggtgggcaaatctggcagttcaggtgcgcctccaaggctcaaattgcaatccttccaagcccttccacaaacttcaggttcaagcaattcagatgttgctggttcaagcagttccatagctgatggctcaagcgactctggtgaagtaggctcaagcagttccaatggagatccaatgaacgttacgctcacttgcggtccggttcaatcaaatgttgaaagaggcggaactatcgctcaaccaagtttaacttgcagcgatggtagcacagcaagcaatccacaatggactggccgccctcaaagcaacggttcttggcaagtgagccaaacccctggttccaacagctataacataaaagttaccgttgcttgtggttctgtttccggtttagcagccgattgcggtacggtagtggttggcactgcttctacatcaagcagttccgttgcaggagcaggaagttcaagcagccgtgccacatcaagcagttccgtggcagcagcagtaagttcaagtagccgtgcggcaagttcaagcagccaagcatcttcaaatgttaccacaaggtcttggacaaatgtcgattacgcacccaacgcttcgcgcaggcacgcccgtcagagatacgacatcaaattgccggataccggcaacggaccttcccactatgatattctgcgataa

SEQ ID NO: 13500 - protein, 229 aa, Unknown
  Obtained from environmental sample
  misc_feature (1)..(229): Xaa is any amino acid
MVGKSGSSGAPPRLKLQSFQALPQTSGSSNSDVAGSSSSIADGSSDSGEVGSSSSNGDPMNVTLTCGPVQSNVERGGTIAQPSLTCSDGSTASNPQWTGRPQSNGSWQVSQTPGSNSYNIKVTVACGSVSGLAADCGTVVVGTASTSSSSVAGAGSSSSRATSSSSVAAAVSSSSRAASSSSQASSNVTTRSWTNVDYAPNASRRHARQRYDIKLPDTGNGPSHYDILR

SEQ ID NO: 13501 - DNA, 468 bp, Unknown
  Obtained from environmental sample
  misc_feature (1)..(468): n is a, c, g, or t
atgcggtgtcaggcggttgcggcggacatagtcatttcaaccaacgggggatacccgctggatcagaacatctaccaggcggttaaaggcatgaccgcagcggaggcggctgtaaaaaaagacggcgttattatcatgctcgcaaaatccgacgacggacacggagtgccggaattttacaaaacctttaaggaagaaaaaaacctggatcgcatgcttgatacttttatgaagacgccgaaggaaaataccagagtggatcagtggcagtcccagattttcgccagggtactcaagcacgccagggtaatttacgtttcttcatctccggacgagatggttaaggatttgcacatgatacccgcgcattctttgagcgaggctgtgaagaaagcggaggaaattcttgctaacctcagggcgactatcgcggcggtatctgacggcgtgtcggtgatggttttgtga

SEQ ID NO: 13502 - protein, 155 aa, Unknown
  Obtained from environmental sample
  misc_feature (1)..(155): Xaa is any amino acid
MRCQAVAADIVISTNGGYPLDQNIYQAVKGMTAAEAAVKKDGVIIMLAKSDDGHGVPEFYKTFKEEKNLDRMLDTFMKTPKENTRVDQWQSQIFARVLKHARVIYVSSSPDEMVKDLHMIPAHSLSEAVKKAEEILANLRATIAAVSDGVSVMVL

SEQ ID NO: 13503 - DNA, 342 bp, Unknown
  Obtained from environmental sample
  misc_feature (1)..(342): n is a, c, g, or t
atgtttaccggcgctttttcaggcctcgcgggaatgtgcttcgcctattcgataatggcccaattttctccaagtatatacatgggttacggctatttggccattgccgcgatgatcttcggcaactggaacatattgaccaccttcgcggcctgtatctttttcggcctggcgcgttccggcggctatcagctatgtctgactctgggaatgtccagtaatttttccgacctgttctatgtgcttccctatgtgctgaccttgctgtcactggtgtttttctccaggcacaatcatccgccgcgcgcaataggcgagatattcgataaaagcaaacgatag

SEQ ID NO: 13504 - protein, 113 aa, Unknown
  Obtained from environmental sample
  SIGNAL (1)...(20)
  misc_feature (1)..(113): Xaa is any amino acid
MFTGAFSGLAGMCFAYSIMAQFSPSIYMGYGYLAIAAMIFGNWNILTTFAACIFFGLARSGGYQLCLTLGMSSNFSDLFYVLPYVLTLLSLVFFSRHNHPPRAIGEIFDKSKR

SEQ ID NO: 13505 - DNA, 774 bp, Unknown
  Obtained from environmental sample
  misc_feature (1)..(774): n is a, c, g, or t
ttgtccgcacgcttggaatgcaccgcngtttacaattcggcttttatgaacatgcttaaaaacgaagaaaactcaaagtaccgctcaactatcaaaaacacaatggagtttgatcccgaaattttaaaacgctttgtcaattttatgaacaaccctgacgaagaaacggcggtcgcgcagttcggcaagggcgacaaatatttcggcatctgcacattgctcgtaacaatgccgggacttccaatgttcggacacgggcaaattgaaggctttgaggaaaaatacggaatggaataccgccgctcctatcgggacgagataccggacggttacatggtagaccgccatgaatgcgaaattttcccgttgatgaaacgccgcgcgcttttttcaggcagcgtgaacttcagactttacgacctttattgttcggacggctcggtaaatgaaaacgtatttgcctattctaaccgcgcatggataaacggtcatgaagaaaaaacggtaattttttacaataactcctattatgaaacgtcaggctggataaaggtcagcgatcccgctattccctgcgaaggcggaacgcaaagagacaatttaagcgaagcccttgccattcatggggaaagcccaaaacttttcattggttacgcggaacaaaaaatcaaattttgtggtaacatccggctcctaccaagggcaatccggcgaaaaacgggacttttttgtgccggaactgaaagggaaacaaaaaacttaaggtttttttaa

SEQ ID NO: 13506 - protein, 257 aa, Unknown
  Obtained from environmental sample
  misc_feature (1)..(257): Xaa is any amino acid
MSARLECTAVYNSAFMNMLKNEENSKYRSTIKNTMEFDPEILKRFVNFMNNPDEETAVAQFGKGDKYFGICTLLVTMPGLPMFGHGQIEGFEEKYGMEYRRSYRDEIPDGYMVDRHECEIFPLMKRRALFSGSVNFRLYDLYCSDGSVNENVFAYSNRAWINGHEEKTVIFYNNSYYETSGWIKVSDPAIPCEGGTQRDNLSEALAIHGESPKLFIGYAEQKIKFCGNIRLLPRAIRRKTGLFCAGTERETKNLRFF

SEQ ID NO: 13507 - DNA, 582 bp, Unknown
  Obtained from environmental sample
  misc_feature (1)..(582): n is a, c, g, or t
ttgggcggttttttcaaaatcagtgaaactccggaaggcttgctccatgaagttaatgatgtaaagcggattcgttcctttgttaacgaagcggtagaaccgttaaaagatataggttcaatgctgaattcccagagcgcgcttttaacagagattcccagtatatggcccattaaaaacggactggggcatatctcgatgtttttcggccagaatataaaccctttcagcggtcagtattatatccataaaggaatagatatttccacttaccgttcgggcgatccgattgtaacaaccgccgacgggcaggtggtctccatcgaatataccgaagatttcggcacctatgtgattatcaggcacaagcatggctattatacccgttacgcgcatatgctctccgtgcgggtcaggcttgggcagcgggtacagcagggtgaggtgataggctatatcggcaataccggcccctccaccggcccccatcttcattatgaaattcacatcggatccgaagttgtcgatccctacaaatatatgaaatccagtanatcgtgccaatttgtccacccgctgtga

SEQ ID NO: 13508 - protein, 193 aa, Unknown
  Obtained from environmental sample
  DOMAIN (81)...(177): Peptidase family M23
  misc_feature (1)..(193): Xaa is any amino acid
MGGFFKISETPEGLLHEVNDVKRIRSFVNEAVEPLKDIGSMLNSQSALLTEIPSIWPIKNGLGHISMFFGQNINPFSGQYYIHKGIDISTYRSGDPIVTTADGQVVSIEYTEDFGTYVIIRHKHGYYTRYAHMLSVRVRLGQRVQQGEVIGYIGNTGPSTGPHLHYEIHIGSEVVDPYKYMKSSXSCQFVHPL

SEQ ID NO: 13509 - DNA, 648 bp, Unknown
  Obtained from environmental sample
  misc_feature (1)..(648): n is a, c, g, or t
atgcaaggcggattttacagatatttcttaaacagcattttcgtcctagccgtttcccttttcttgctgttgttcctgagcgcttttgccgcctacccgctttcgcgaatgcaattcaaactgaacaaaccgatattcagcgcgattgtcgccgccatgtcaatccccatccatattacccttattccagtattcataatgaatatcggtattaaaatgtacgacaaagtttttgcccttatcggtcccaatgtggctttcaacctgcccatatcaattttcatcctgacctcgtttatgcagggtatttccaaagagatggaagaagccgccgagattgacggctgcggcaaattctcaacatttttcaggataatatttcccctgtcaaaaccggggcttgcgactctggctatttataacggggtagtgatatggaacgaatttgtatttgccatggtgcttacccagtcccaggacgcccgtaccctgccgcttgcgatttgggaataccaggggcaatattccataaatactccgttaatcatggccctgctggttttatccagcctgcccgtcattctattgtacgttttcagtcaggacaaactggtaaaaggtatgatggcgggagcaattaagggataa

SEQ ID NO: 13510 - protein, 215 aa, Unknown
  Obtained from environmental sample
  DOMAIN (5)...(210): Binding-protein-dependent transport system inner membrane component
  misc_feature (1)..(215): Xaa is any amino acid
MQGGFYRYFLNSIFVLAVSLFLLLFLSAFAAYPLSRMQFKLNKPIFSAIVAAMSIPIHITLIPVFIMNIGIKMYDKVFALIGPNVAFNLPISIFILTSFMQGISKEMEEAAEIDGCGKFSTFFRIIFPLSKPGLATLAIYNGVVIWNEFVFAMVLTQSQDARTLPLAIWEYQGQYSINTPLIMALLVLSSLPVILLYVFSQDKLVKGMMAGAIKG

SEQ ID NO: 13511 - DNA, 699 bp, Unknown
  Obtained from environmental sample
  misc_feature (1)..(699): n is a, c, g, or t
atgaagaaaagcaaaaaagactatagggccattacgtttcttcaatccgaggaacgccccagagaaaaactcctggaaaagggcctgtcagcgctttcggacacggaattactgacgattatcctgaatacggggattcggggaaaaaatgtaaggacgcttgccggggaattgcttgggctccttgacgggaacaaggatattcccgctgtcagggaactttccagtatgccgggcctggggcaggtcaaggcctgcgcggtggcagcaatgctggaattcggcaggcggcgctatggcgctttttcggcccgcattaaacagccagcggatatttatacattaatccggcattacgccgaccgcaaacaggagcgttttatcagcctttccctgaacggcgcgcatgaagtactggcggtgcggattgtaaccatcggccttgtaaaccggaccatggtgcatcccagggaggtctttgccgatctgatccaggacagggccgcggcattctgcgttgcccacaaccacccttccggccagcttcacagttcgccggaagacgaggaaatcacggcccgtttgcaggcaacagcccaaatcctgggcattcatttcctggatcacctgattttttcggaaacctcctggtggagtttccgggagaacggaaagctcgtgggagaagagccacagtga

SEQ ID NO: 13512 - protein, 232 aa, Unknown
  Obtained from environmental sample
  DOMAIN (103)...(226): RadC, DNA repair protein
  misc_feature (1)..(232): Xaa is any amino acid
MKKSKKDYRAITFLQSEERPREKLLEKGLSALSDTELLTIILNTGIRGKNVRTLAGELLGLLDGNKDIPAVRELSSMPGLGQVKACAVAAMLEFGRRRYGAFSARIKQPADIYTLIRHYADRKQERFISLSLNGAHEVLAVRIVTIGLVNRTMVHPREVFADLIQDRAAAFCVAHNHPSGQLHSSPEDEEITARLQATAQILGIHFLDHLIFSETSWWSFRENGKLVGEEPQ

SEQ ID NO: 13513 - DNA, 828 bp, Unknown
  Obtained from environmental sample
  misc_feature (1)..(828): n is a, c, g, or t
atggcattccttaaggaaagaaaatacggcgagccggttaatcctccgccattagataccccaccgcttgaattttttccctgggcgggaattgtcagccatcaccttcttgcccataattatattgattcgtggttttcgcgccttgcacaaatgagacaggtgcgttgtttttacgttttatgcccgtctcattggggactttcaacggagccttattcattgactgacggttcatgggtaagcgattttggcattgttgactcagataagaaaagcgtacgcaaactggagaaatcacttaatgtcggtttggataaaagggtattcgatgttgagcatggcgcgtcaaccttaatgccgtatattaaaaaatattttccaaaagcgttggtagtcgttattgcctacgaaggcgaacccccggtgaatgttccaaagagcgtcatacttgcggacgctctggaaagtttttttaacaaaaaaggaaaaaggaaaaatttcttactaatatcaaccgacttttcacatcacggcaacatggaagttactgaaaaaagagataataattcacttgcctttttaaaaaacccgacgaccgtttcctggaatatggctggctgtgataacaaacccggaattttaatccttgaccgtcttggtaaaaaaaatcttgaatcatttatactttaccacaccaattcatgggaaatctccaatgaatgggaacatgatgtcacaagctatttttttgtgtactttggagataaatccaaagagcttcacacaaaggacacaaaggtacaaagatcacaaagagggaattag

SEQ ID NO: 13514 - protein, 275 aa, Unknown
  Obtained from environmental sample
  DOMAIN (12)...(239): Protein of unknown function DUF52
  misc_feature (1)..(275): Xaa is any amino acid
MAFLKERKYGEPVNPPPLDTPPLEFFPWAGIVSHHLLAHNYIDSWFSRLAQMRQVRCFYVLCPSHWGLSTEPYSLTDGSWVSDFGIVDSDKKSVRKLEKSLNVGLDKRVFDVEHGASTLMPYIKKYFPKALVVVIAYEGEPPVNVPKSVILADALESFFNKKGKRKNFLLISTDFSHHGNMEVTEKRDNNSLAFLKNPTTVSWNMAGCDNKPGILILDRLGKKNLESFILYHTNSWEISNEWEHDVTSYFFVYFGDKSKELHTKDTKVQRSQRGN

SEQ ID NO: 13515 - DNA, 897 bp, Unknown
  Obtained from environmental sample
  misc_feature (1)..(897): n is a, c, g, or t
gtgcttggcgcgtacttccgcgcctttatgtggttcggcagaatcaattttaaccttggcggcgaaagcggtaacgcgaaagaagcggcaaaagaacttgctcccgtggctctttttattaccgacataaccgaaaattccccggaaataaaaaagctctggcagtccctttttgatcccattacggaaattataggcgcctccgatgatatcagtttttatgaactcgctcctctttggaataaaataaagggcgcgggttttatgcagtggtacaatgattctacaaaacttgaaacttttatatcaaaaaattacaaagaactgcaccctccggcaatttcaggttcttctttattcaagagcgttcatgacggcaatgacgctccggaagaacgctttgccccgacaggatggcggctgttcggccagcgttatacgcttgacagtgaaatacatcattttgtctccccgccaagacttttttttcgtaacatggtcagcgggcttgatattatgaaagtctttggatcaaaagccgcagacagttttttaagggtaagtgattatcccaagtatccggaattggaaaaagtattaaaatcgttacagcaaaacatgaagaatataaaggacgattattggttttcgacatattatacaaatatcctgtaccagataaggacacaggcgctctttgaaaacggcgcgngtttttattttacggaaaagcccggttggaatttaaaggcaatgaactcggcgcatggaacatgggcggaactaaggcatgatacgattctttatgtaaaacaaagttatgccgaaaacgcgggcgggggagactgggaacgacattcagaaccaaacccctgcctaacccgtcccctatattga

SEQ ID NO: 13516 - protein, 298 aa, Unknown
  Obtained from environmental sample
  misc_feature (1)..(298): Xaa is any amino acid
MLGAYFRAFMWFGRINFNLGGESGNAKEAAKELAPVALFITDITENSPEIKKLWQSLFDPITEIIGASDDISFYELAPLWNKIKGAGFMQWYNDSTKLETFISKNYKELHPPAISGSSLFKSVHDGNDAPEERFAPTGWRLFGQRYTLDSEIHHFVSPPRLFFRNMVSGLDIMKVFGSKAADSFLRVSDYPKYPELEKVLKSLQQNMKNIKDDYWFSTYYTNILYQIRTQALFENGAXFYFTEKPGWNLKAMNSAHGTWAELRHDTILYVKQSYAENAGGGDWERHSEPNPCLTRPLY

SEQ ID NO: 13517 - DNA, 738 bp, Unknown
  Obtained from environmental sample
  misc_feature (1)..(738): n is a, c, g, or t
atgtccgtttcgcgngcaataatggctgtaaataacgaaacagggacgattaatgaggctgttaacctgcataaaattatggttaacacagaaacgctcgtccattttcactgtgacatggtacaggccctgggtaaaatccccatagacattgttggttgtggaatagattcagcctcattcagcgcgcataaaataggcgggccacggggtatcggccttttatatctgcgaaaacccctggaagtcctgtactcaggcgggggccaggaaagaaatatacggcccggcaccgagaatgtaagcggcgcgcttgccctggcgcattgcatggaaacccatgccctgccggaaattgtcaccgcggaatacgccaaagcaaaagcccgctgcaaacgactgatctccgcattaagggaaatcggtcgctgccgccttatccctgcggaacgggcagacgaggattatgacgcggtcttttctccgtatatagtacaggcggcttttaaggacatccccggcgaagtgatggtcaggacattggacgatcttggctttgccgtttccaccggctccgcctgtacctcagccaaaacggagcgccctgtcctggccgccatgggcattgacgacaaacttgcttttgagggaatccgcatatcacaaggctggtcaaccaccgaggaggagatagacctgctgctggaggccatccgggaggtgctaaaatttctttag

SEQ ID NO: 13518 - protein, 245 aa, Unknown
  Obtained from environmental sample
  DOMAIN (2)...(234): Aminotransferase class-V
  misc_feature (1)..(245): Xaa is any amino acid
MSVSRAIMAVNNETGTINEAVNLHKIMVNTETLVHFHCDMVQALGKIPIDIVGCGIDSASFSAHKIGGPRGIGLLYLRKPLEVLYSGGGQERNIRPGTENVSGALALAHCMETHALPEIVTAEYAKAKARCKRLISALREIGRCRLIPAERADEDYDAVFSPYIVQAAFKDIPGEVMVRTLDDLGFAVSTGSACTSAKTERPVLAAMGIDDKLAFEGIRISQGWSTTEEEIDLLLEAIREVLKFL

SEQ ID NO: 13519 - DNA, 363 bp, Unknown
  Obtained from environmental sample
  misc_feature (1)..(363): n is a, c, g, or t
atgacagatcggccgaggttatttcccggtaaaggcctgcctgaactgtatgccggcgctgatttcgccgtattcccgcaaatgtatgaaagtttcggcatgggtgttgtcgaggcgatggcgtcgggaatacctgtggcctgcgcccgcgccgcatcccttcccgaaaccgccgagcatgccgccctgtattttgacccaaaggatcctgaggacatggctgaccgtatggtatcgctggcctccgaccgtgagctttaccaacaatgccgccatcttggcctggaacgcgccaagttgttttcctgggatcgctgcgcccagaggacgctggagattatattggagacggcggggggataa

SEQ ID NO: 13520 - protein, 120 aa, Unknown
  Obtained from environmental sample
  misc_feature (1)..(120): Xaa is any amino acid
MTDRPRLFPGKGLPELYAGADFAVFPQMYESFGMGVVEAMASGIPVACARAASLPETAEHAALYFDPKDPEDMADRMVSLASDRELYQQCRHLGLERAKLFSWDRCAQRTLEIILETAGG

SEQ ID NO: 13521 - DNA, 312 bp, Unknown
  Obtained from environmental sample
  misc_feature (1)..(312): n is a, c, g, or t
atggaaactgtaacgaatctaaacaattcagcggtcgcgttaaccgaggcaaataagccttttgaggcaattcccctgttccgcgaagcgttaattttagagcctgaaaacccctttttatggttgaatttaggcatagcccagcaaaaaacaggcgagtactcagaagccattgacagttttaaacgttctttagttattgataatgatatttgtgaagcatggaattccatgggccttatctattacgagttgaacgattttattcaggcggaaaaattgttacaaggcggcgttgtcctgcaacgataa

SEQ ID NO: 13522 - protein, 103 aa, Unknown
  Obtained from environmental sample
  DOMAIN (38)...(71): Tetratricopeptide repeat
  misc_feature (1)..(103): Xaa is any amino acid
METVTNLNNSAVALTEANKPFEAIPLFREALILEPENPFLWLNLGIAQQKTGEYSEAIDSFKRSLVIDNDICEAWNSMGLIYYELNDFIQAEKLLQGGVVLQR

SEQ ID NO: 13523 - DNA, 354 bp, Unknown
  Obtained from environmental sample
  misc_feature (1)..(354): n is a, c, g, or t
atgaaaccgtatgcgcaattagacaaagcggaattatccgctcttaaaactcaactgactgcggagctttcaaagtataaagaaagcgggcacaaacttaatatgacgcgcggagtgccctccgatgaacagttgtccctctgtaatgaaatgttaaccgacctttcggtaaatgattataaagccgcaaacggagccgactgccgcaactacggcggactcgacggtatccccgaaatgaaaaaaatgttcgccgatcttttggaacttacgccggacgaggttatcgtgggcggcaattcttccctgtccctcatgtttgacaatgtagcggtgaatatgtcccacggctaa

SEQ ID NO: 13524 - protein, 117 aa, Unknown
  Obtained from environmental sample
  misc_feature (1)..(117): Xaa is any amino acid
MKPYAQLDKAELSALKTQLTAELSKYKESGHKLNMTRGVPSDEQLSLCNEMLTDLSVNDYKAANGADCRNYGGLDGIPEMKKMFADLLELTPDEVIVGGNSSLSLMFDNVAVNMSHG

SEQ ID NO: 13525 - DNA, 735 bp, Unknown
  Obtained from environmental sample
  misc_feature (1)..(735): n is a, c, g, or t
atgtttaacgaagaaatgcccaaagtcttgccgtttatgaactatgaacttaaagacaaagaattgcgcacgcttgttgaatatattttcaaggaaaaaggatcatggattactgttcagatgctggacgccattaaatcgacaggctaccgttatgcgacagtattcggggcgaccatcggcgttgacgacattgttattcccaaagaaaaaaccgaaatgattgacaaggcgaataaagaagttgagtcaattcagaaacagtggaaacagggtcatattaccaacgaagaacgctacaatcaggtcgttcaggtttggacaaaaacaaacgaagaccttacagccatgacgatgaaaaccctcgaatcggacagagacggctttaactcgatctatatgatggcgaactcaggagcgcgcggaagccgcaaccagatacgccagcttgcgggtatgcgcggtcttatggcgaagccgtcgggcgacatcatcgaacttcctatccgttcaaactttaaggaaggactttcggttatcgaattctttatttcaactaacggcgcgcgcaaaggtcttgccgataccgcccttaaaaccgctgaagccggttatcttacacgccgtcttgtagacatagcgcaggacatggttgtaaatgaggacgactgcggaacaattaacggaactacatactcggctgtcaaacaaggcgaagaaattatcgaaccgtga

SEQ ID NO: 13526 - protein, 244 aa, Unknown
  Obtained from environmental sample
  DOMAIN (94)...(174): RNA polymerase Rpb1, domain 4
  misc_feature (1)..(244): Xaa is any amino acid
MFNEEMPKVLPFMNYELKDKELRTLVEYIFKEKGSWITVQMLDAIKSTGYRYATVFGATIGVDDIVIPKEKTEMIDKANKEVESIQKQWKQGHITNEERYNQVVQVWTKTNEDLTAMTMKTLESDRDGFNSIYMMANSGARGSRNQIRQLAGMRGLMAKPSGDIIELPIRSNFKEGLSVIEFFISTNGARKGLADTALKTAEAGYLTRRLVDIAQDMVVNEDDCGTINGTTYSAVKQGEEIIEP

SEQ ID NO: 13527 - DNA, 858 bp, Unknown
  Obtained from environmental sample
  misc_feature (1)..(858): n is a, c, g, or t
gtgacgttcaaaaaaaatgggttccgttggtggactgttttcgttgagaaatacggcggcgcttttttgtttggcaaatatccgtctaacgccggagaaaaattcaagaatgaactccttaaggctttggaggagatggttgccaatgcggtcgccgccgtgccggaaggctcggaaataactatccaatccgcctccgataaaactggcggatcggacgcgcatacggcatacatacaaatgatgaatagcgagatttccaaggccgtgcttggccaaaccctcacgacggaaataggagagaaaggaagttacgccgccgccaccgcgcataatttagtccgcgaggatatcgccgccgcagaccgccgccgcatcagcgcggcttttaaccggctgacggctgtttatacgttttataatttcggcccggatgcatcaccgcccctcttccagtttgtaaaagacgaagacctacaaatgcctcgcgcagatcgcgacgttaaactgcatcaagtcggttggcggccaaaaaaagaatattttatcagagagtatggaatgcaggaagaggattttgatctggctgaagtgccgtccggaggagattcatttcccggttttaatcaaatcattcctacgcaaaaacatcctgaaaactgtccatgcggttgcgggaacacaaataaaaggcgttcccttttttataagttggcaatgctatttgcaacaaaagatgaaaaggaactagagagagattcaaacctaatggaacgcttcggtgacacgatgctgaaagccgcacaggaagaaaccgaccacacggtggatgtgttcattgacgctttagccaagtaa

SEQ ID NO: 13528 - protein, 285 aa, Unknown
  Obtained from environmental sample
  DOMAIN (1)...(285): Protein of unknown function (DUF935)
  misc_feature (1)..(285): Xaa is any amino acid
MTFKKNGFRWWTVFVEKYGGAFLFGKYPSNAGEKFKNELLKALEEMVANAVAAVPEGSEITIQSASDKTGGSDAHTAYIQMMNSEISKAVLGQTLTTEIGEKGSYAAATAHNLVREDIAAADRRRISAAFNRLTAVYTFYNFGPDASPPLFQFVKDEDLQMPRADRDVKLHQVGWRPKKEYFIREYGMQEEDFDLAEVPSGGDSFPGFNQIIPTQKHPENCPCGCGNTNKRRSLFYKLAMLFATKDEKELERDSNLMERFGDTMLKAAQEETDHTVDVFIDALAK

SEQ ID NO: 13529 - DNA, 687 bp, Unknown
  Obtained from environmental sample
  misc_feature (1)..(687): n is a, c, g, or t
ttggcgcgggcgcttgttacggagttaaagagcggcaagcacgagtattttatcgctccaacgttancgagccttgagaccgtatccgccattatcgagggtacaaatatccgtcttggagcgcaaaactgcgcaagcgaagagcagggcgcgcataccggggaagtatcggtattacagttaaaagatcttggcgtacagacaattattttaggacacagcgaaaggcggcacacgtacaaggaagacgacgcgcttatcaacaaaaaagtaaagctcgctctcaagcacggttttgaggtaattctttgtatcggcgaacttttggaagaacgcgaagccggcaaagtggaagaagtctgcgaaagacaaacagtaaaggggcttgagggcgtagacgcaggacagctttccaatgtagttatcgcatacgagcctgtttgggcaatcggtacgggaaagacggcgacgccgcaggacgcggaagctgtccatgcctttgtccgcaaagtaatagcgcgtctgtacggacaagacgccgcagataagattcttattcagtacggcggttccgtaaaaccggataacgccgcgcagttaatggcgatggaaaacatagacggcgctcttgtgggcggcgcttctcttaaaacggatacttttgttccaatagcgaaatttgcctga

SEQ ID NO: 13530 - protein, 228 aa, Unknown
  Obtained from environmental sample
  DOMAIN (1)...(225): Triosephosphate isomerase
  misc_feature (1)..(228): Xaa is any amino acid
MARALVTELKSGKHEYFIAPTLXSLETVSAIIEGTNIRLGAQNCASEEQGAHTGEVSVLQLKDLGVQTIILGHSERRHTYKEDDALINKKVKLALKHGFEVILCIGELLEEREAGKVEEVCERQTVKGLEGVDAGQLSNVVIAYEPVWAIGTGKTATPQDAEAVHAFVRKVIARLYGQDAADKILIQYGGSVKPDNAAQLMAMENIDGALVGGASLKTDTFVPIAKFA

SEQ ID NO: 13531 - DNA, 339 bp, Unknown
  Obtained from environmental sample
  misc_feature (1)..(339): n is a, c, g, or t
atggtggttaagcggggcggccgccgggagccatttgacagagcaaaaatagagcgcggcgtaaaccgcgcgctggaaaaacgtcctgtctctcaaatgggcattgaaagccttgtaaacgagatcgaagatcaagccgccattctaggaaaggtaaaccacgaaatcgacgctgccgccataggcgatctggtactggagaaattagccatcctggataaggtggcatatataaggtttgcttcagtttaccggcattttgaggatttagacgaattcctgcgggaaattcaaaaaatagacggcaaaaagaacgaagaaaagggggaacaggtttga

SEQ ID NO: 13532 - protein, 112 aa, Unknown
  Obtained from environmental sample
  DOMAIN (1)...(92): ATP cone domain
  misc_feature (1)..(112): Xaa is any amino acid
MVVKRGGRREPFDRAKIERGVNRALEKRPVSQMGIESLVNEIEDQAAILGKVNHEIDAAAIGDLVLEKLAILDKVAYIRFASVYRHFEDLDEFLREIQKIDGKKNEEKGEQV

SEQ ID NO: 13533 - DNA, 858 bp, Unknown
  Obtained from environmental sample
  misc_feature (1)..(858): n is a, c, g, or t
ttgtgcgggctgctgcttggggggagccagggcggccgttcatcgtcagtcgcgccggatgcactggaggctgacagttttgacagtcccgtaccctacgaaatcggcactgacgaaaacgcgcagcttgtaaaccgcaccctgcacagcggggacgaagactttttcctcctcgttcccgccaatgacggacagcttacaatggaaacaacgggcggcactgacacttacatggaattttacaatgccgagacacaggagaaactggggcaaaacgacgacggaggaagcggcagcaacgcgcggatcagatacagcgtacaggcgggaaaacgttatattgccaaaataagaggctatagcggagagaccggatcttacggtttccgcgcttatctttccgtaggaacatcttccggcagttttgaaaatcctttagcttatgaaatcggcgctgacgaaaatgttccggttgtgaaccgcaccctgcacagcggggacgaagactttttcctcctcgttcccgccaatgacggacagcttataatggaaacaacgggcggcgttgacaccttcatggagttttacaacgccgagacacggcaaaaacttgcggaaaacgatgacggaggcagaggcagcaacgcgcgcataagatacgacgtgcaggccggaaaacgttatattgccagagtaagaggctatgacggtgataccggtcaatacggtttccgagcatggcttcatattcgggtcaggcttgcccccgatgaatatgaaccgaataacgattcggcttccgccaaacagatagaaatcggggcaacccaacagcataccctttcccaactcccatga

SEQ ID NO: 13534 - protein, 285 aa, Unknown
  Obtained from environmental sample
  DOMAIN (167)...(246): Bacterial pre-peptidase C-terminal domain
  misc_feature (1)..(285): Xaa is any amino acid
MCGLLLGGSQGGRSSSVAPDALEADSFDSPVPYEIGTDENAQLVNRTLHSGDEDFFLLVPANDGQLTMETTGGTDTYMEFYNAETQEKLGQNDDGGSGSNARIRYSVQAGKRYIAKIRGYSGETGSYGFRAYLSVGTSSGSFENPLAYEIGADENVPVVNRTLHSGDEDFFLLVPANDGQLIMETTGGVDTFMEFYNAETRQKLAENDDGGRGSNARIRYDVQAGKRYIARVRGYDGDTGQYGFRAWLHIRVRLAPDEYEPNNDSASAKQIEIGATQQHTLSQLP

SEQ ID NO: 13535 - DNA, 627 bp, Unknown
  Obtained from environmental sample
  misc_feature (1)..(627): n is a, c, g, or t
gtgttcttttatacgcgtaccccgcaaagagaactaatatctgaaccaatatttactagttccccgcctccggataatccgcttgaggaagatgataacgaacttgaggaagagaacaatgaaataattgatgagaaatccttatccaaggtaactcttgaacggtacggatccagcgtcggatgcggatggaacgggcttcttgcccctatctttgaagagatcaatctgtataacaacgaaaatcaagggcatgaaattgagattgaccaaattaaagagaaattcggcactttgagtatatatacgacgaaatgtcctgattatataaaggggatgatttctttagctgaaaaagaaagcgggtatatctgcgaaatttgcggggcgcggggggaaacagaaagaattaacggatggtatatgactctgtgccaccgtcacgccaaagctaaaaaagcggcgggatacgattctagcctgctgttaaagctgtacaggaaatttatggaaacttatgaatattacaggtggagcaggacgtataatcctgcttttaaaaggctgttgaaaaaaaattggtttgttacaaaaaacaaagttgacggaatattacggatcgtttag

SEQ ID NO: 13536 - protein, 208 aa, Unknown
  Obtained from environmental sample
  misc_feature (1)..(208): Xaa is any amino acid
MFFYTRTPQRELISEPIFTSSPPPDNPLEEDDNELEEENNEIIDEKSLSKVTLERYGSSVGCGWNGLLAPIFEEINLYNNENQGHEIEIDQIKEKFGTLSIYTTKCPDYIKGMISLAEKESGYICEICGARGETERINGWYMTLCHRHAKAKKAAGYDSSLLLKLYRKFMETYEYYRWSRTYNPAFKRLLKKNWFVTKNKVDGILRIV

SEQ ID NO: 13537 - DNA, 372 bp, Unknown
  Obtained from environmental sample
  misc_feature (1)..(372): n is a, c, g, or t
atggtacgtgacccgcaataccgtaccactcccaaggggacgccggtctgtacgttcagtttggcttccagccgttatttcaataatgacaacgncctgnaaaaggaagtgtctttcttcgatgtagaaagttgggggaaacttgcggaggcgtgcaacaacgagggtgagaaaggacgtggtgtccgcattgttggccggctcaaacaggatcgctggcaaggcgcggatggcaagcctcgagcgcgtatttccattgtcgcggaacatgtagagtttcgtccggaatttggaaagggaacgcagcaaacggaagaaaacgcagagcagtatgttgaacaggaaattttaccggatgatgaaatgttataa

SEQ ID NO: 13538 - protein, 123 aa, Unknown
  Obtained from environmental sample
  DOMAIN (2)...(94): Single-strand binding protein family
  misc_feature (1)..(123): Xaa is any amino acid
MVRDPQYRTTPKGTPVCTFSLASSRYFNNDNXLXKEVSFFDVESWGKLAEACNNEGEKGRGVRIVGRLKQDRWQGADGKPRARISIVAEHVEFRPEFGKGTQQTEENAEQYVEQEILPDDEML

SEQ ID NO: 13539 - DNA, 693 bp, Unknown
  Obtained from environmental sample
  misc_feature (1)..(693): n is a, c, g, or t
atgtcgcgggaggaaagtagggagcttttcgctttcatagtcaatgtggtgggaagtacaatcgcgaaagaagcggacatctgcctgtttacttctgcgggaccggaaattgccgttgccacgacaaaggctttttccgcccagcttgtgctgttgtattttttagccgtgtggttcgccgtcaagctgggaaaattaacgaaggatgttgagcaggaactgttagcgcaaatctcagccttgcctgaaaagacggagagtatactcaagcagatcgattctattcaaaagtacgcttctacgtgcatcggctgtaagagcattttcttcatcggcagaaatattgactatgccattacgctggaaggttcccttaagctgaaagagatttcctacattcactccgaagcctacgccggcggcgaattaaagcacggcactatttccctaatcgaggaagatacgtttgtcgtggcaatctcaaactgcgcccctctctacggaaaaattatgagcaatgtggaacaggttatcagccggggcgcgaaggtattgcttatcggtaactgccctgcgcccaagtctgacgaanaaatttttcatattgctctgccggaaagtcaggatttattctccccttccctgtcggttattgttttgcagcttttcgcgtattatgtcgccgcgaaatag

SEQ ID NO: 13540 - protein, 230 aa, Unknown
  Obtained from environmental sample
  DOMAIN (99)...(228): SIS domain
  misc_feature (1)..(230): Xaa is any amino acid
MSREESRELFAFIVNVVGSTIAKEADICLFTSAGPEIAVATTKAFSAQLVLLYFLAVWFAVKLGKLTKDVEQELLAQISALPEKTESILKQIDSIQKYASTCIGCKSIFFIGRNIDYAITLEGSLKLKEISYIHSEAYAGGELKHGTISLIEEDTFVVAISNCAPLYGKIMSNVEQVISRGAKVLLIGNCPAPKSDEXIFHIALPESQDLFSPSLSVIVLQLFAYYVAAK

SEQ ID NO: 13541 - DNA, 597 bp, Unknown
  Obtained from environmental sample
  misc_feature (1)..(597): n is a, c, g, or t
ttgataccggtaatggagaaggtatacaagatgacagaacgcagggagataatgaatgagaaagtgcctgtcggggagaaaatattttcgatatacgagcggcatactgacataatcgtgaaaggcgggcgtgaagcgaagttcgggcataaagtaaatcttggcagcgggaggagcaaattaatattaacctgtgagatagtggatggaaatccgaatgaccacgaattgtatgagggaacgataaagaagcttaaaaaggattacggcaagatgccggactcaagtactgcggacggcggttttgcgagcaaggcgaacatagaatattcgcagaaggttggaataataaacgtagtgttcaacaagatacgcgggagcatgcaaaacatagcgagcagtaaatgggtggaaaacaaactaaagcgctggaggagcggaatagaggcaataatttcaaatttgaaacggggttttcaaatacggcgatgcacatggaaaggtattgcacattatggacaaaaagtattttggagtgtcattggatataaccttcgagtaatgacaggtgctatattgcaatcaatgactttatag

SEQ ID NO: 13542 - protein, 198 aa, Unknown
  Obtained from environmental sample
  DOMAIN (21)...(185): Transposase DDE domain
  misc_feature (1)..(198): Xaa is any amino acid
MIPVMEKVYKMTERREIMNEKVPVGEKIFSIYERHTDIIVKGGREAKFGHKVNLGSGRSKLILTCEIVDGNPNDHELYEGTIKKLKKDYGKMPDSSTADGGFASKANIEYSQKVGIINVVFNKIRGSMQNIASSKWVENKLKRWRSGIEAIISNLKRGFQIRRCTWKGIAHYGQKVFWSVIGYNLRVMTGAILQSMTL

SEQ ID NO: 13543 - DNA, 801 bp, Unknown
  Obtained from environmental sample
  misc_feature (1)..(801): n is a, c, g, or t
atgccttttctctttgagggaaatgttgcagggtttaatagggggagcgctttgcgtcggcttgatgttggcggcgcgggtggcgctgtcgaatatttccataaactggtacttttcctatttgcccttcgtggtcgtcataggggtatttttcgggtggctcggaagcaggctcgcggtaagcaaatttctggtatagcgcttgcggcgcggtgttgcgtagcggctgttataatagccgtcctacgtccggcgccgttgtttgcgttgccggacagcgccgctgccggtcagcggaagtctgcgtcgtcgccgcaaaaaagcgttaatcagcagaaatcggcaccgtcgccccagaaaaatgttaatcagcagaaatcggcgccgtcgccgcaaaaaagcgttaatcagcagaaatcagcgccgtcgccgcaaaaaggcgcgaatcaacagaagaaatcggtatcatccccgcaaaaaggcgttaatcaacagaaatccgcgaatcaacagaaaccggcatcaacacagaaaaaatcgtggacgacggagtccgcctctcccgcggtcgccgccgtagagaaagagttgaacaagacgcaaggcgctcttgactccataaaggcggaattggaacgcggcaggctgcgcttcaaggagttgcagcacgaggaggggaactacttgagccgtttggagcagatagagaagaacatctactcttccggaaagtacgcggatcttgtacagaagcagatagacacgaccgagattacgcttgttacgcttggcgactcgtga

SEQ ID NO: 13544 - protein, 266 aa, Unknown
  Obtained from environmental sample
  misc_feature (1)..(266): Xaa is any amino acid
MPFLFEGNVAGFNRGSALRRLDVGGAGGAVEYFHKLVLFLFALRGRHRGIFRVARKQARGKQISGIALAARCCVAAVIIAVLRPAPLFALPDSAAAGQRKSASSPQKSVNQQKSAPSPQKNVNQQKSAPSPQKSVNQQKSAPSPQKGANQQKKSVSSPQKGVNQQKSANQQKPASTQKKSWTTESASPAVAAVEKELNKTQGALDSIKAELERGRLRFKELQHEEGNYLSRLEQIEKNIYSSGKYADLVQKQIDTTEITLVTLGDS

SEQ ID NO: 13545 - DNA, 315 bp, Unknown
  Obtained from environmental sample
  misc_feature (1)..(315): n is a, c, g, or t
atggcaagtaagattagaaaaggcgatttggtaaaaatattgtccggcaaagataagggcaagcaggataaagtcctgcaagtattcccggataaaggtttgcttttggtggacaatgtcaataaagttaaacggcatactaaaccgacccagggacatacgggcggtattatggataaattattgccgataccggctgcgcgcgctcagttggtctgtccgagctgtaaagcggctacgcgcgtgggttttaaagtggtgaaagataaaaaagtgcggttttgtaaaaaatgcgaagcggtcattgataagtaa

SEQ ID NO: 13546 - protein, 104 aa, Unknown
  Obtained from environmental sample
  DOMAIN (5)...(38): KOW motif
  misc_feature (1)..(104): Xaa is any amino acid
MASKIRKGDLVKILSGKDKGKQDKVLQVFPDKGLLLVDNVNKVKRHTKPTQGHTGGIMDKLLPIPAARAQLVCPSCKAATRVGFKVVKDKKVRFCKKCEAVIDK

SEQ ID NO: 13547 - DNA, 444 bp, Unknown
  Obtained from environmental sample
  misc_feature (1)..(444): n is a, c, g, or t
atgtccctgggtcggtttagtatgccgtttaactttattgacattgtccaccaaaagcaaacctttatccgggaatacttgcaggactttatcctgcttgcccttatctttgccggacaatatttttaccaaatcgccttttctaatcttacttgccatcttcgtctcctacagcacttccgaagcgcgcgaaataattttcgcgtagcccttatctttcagttcacgcgccaccggcccaaaaatacgcgtgcctttcggctctttagttttcgggtcgataatcacacaagcattgtcatcaaaccgcaaataggtgccgtccggacggcgcagcggccttttcgtccgcaccaccaccgctttttgcacttcggctttcttgaccgtcatcccgacagaggctttcttgataacgacggtcaccaccgcgcccgaccgtaa

SEQ ID NO: 13548 - protein, 147 aa, Unknown
  Obtained from environmental sample
  misc_feature (1)..(147): Xaa is any amino acid
MSLGRFSMPFNFIDIVHQKQTFIREYLQDFILLALIFAGQYFYQIAFSNLTCHLRLLQHFRSARNNFRVALIFQFTRHRPKNTRAFRLFSFRVDNHTSIVIKPQIGAVRTAQRPFRPHHHRFLHFGFLDRHPDRGFLDNDGHHRARP

SEQ ID NO: 13549 - DNA, 402 bp, Unknown
  Obtained from environmental sample
  misc_feature (1)..(402): n is a, c, g, or t
atggcagggccccagacgactcatgcattgccgccaccgggcgctgactttttgatgggtttttcgcccttgggccaaaaggcactgtttggctggggagacgttgggggcatggacgcgtggtgcgacgacgggggcgacatccacgtccgcgactacaaagggactgcgacaaggttgttgaacaggtcggagatgataattcccggcgaccacaacgtggagaacgcacttgccgcgttactgctggccatgcacgggggggcgtccgttggggcaatggcagatggactaaagacctaccctggcctggcccaccgcctggcgcttgccggcgaaaaaaagaggtgtcagggcgtacaacgactccaaggggaccaatgtgacggactctgcatctga

SEQ ID NO: 13550 - protein, 133 aa, Unknown
  Obtained from environmental sample
  misc_feature (1)..(133): Xaa is any amino acid
MAGPQTTHALPPPGADFLMGFSPLGQKALFGWGDVGGMDAWCDDGGDIHVRDYKGTATRLLNRSEMIIPGDHNVENALAALLLAMHGGASVGAMADGLKTYPGLAHRLALAGEKKRCQGVQRLQGDQCDGLCI

SEQ ID NO: 13551 - DNA, 582 bp, Unknown
  Obtained from environmental sample
  misc_feature (1)..(582): n is a, c, g, or t
atgatctccgcggccgagtggaagctggtagaggatgacgctaaaaaagcgggcgttgaatattatttgcaaaaaccgctgttccgttccgatattattgattgccttaataactgcttcggcccgaagcccgcggaagacgcgcggttacaggttaataaagataatttttacggcttccgtatactgcttgttgatgaccttgagataaaccgcgaaattgtagtcgcccttctggaaccgaccgggctggctatagactgcgccgtaaacggcaagtccgccctgaaaatggttatgaacgcggaaaaaccctacgatttgattttcatggatctgcaaatgcccgagatggatgggtatgaagccgtctttaaaatcaggcaattcgaggaaagccgttacggggcaatggggaccgaaaagcagactccgatcatcgccatgaccgcaagcatatcccgtgatgacgttgaaaaatgccttaagacgggcatgaatgaccacataggattgcctatggatattgaggaagtgttgaaaaaactgcgttcttacctgacccgccatgacgatgcttaa

SEQ ID NO: 13552 - protein, 193 aa, Unknown
  Obtained from environmental sample
  DOMAIN (60)...(184): Response regulator receiver domain
  misc_feature (1)..(193): Xaa is any amino acid
MISAAEWKLVEDDAKKAGVEYYLQKPLFRSDIIDCLNNCFGPKPAEDARLQVNKDNFYGFRILLVDDLEINREIVVALLEPTGLAIDCAVNGKSALKMVMNAEKPYDLIFMDLQMPEMDGYEAVFKIRQFEESRYGAMGTEKQTPIIAMTASISRDDVEKCLKTGMNDHIGLPMDIEEVLKKLRSYLTRHDDA

SEQ ID NO: 13553 - DNA, 345 bp, Unknown
  Obtained from environmental sample
  misc_feature (1)..(345): n is a, c, g, or t
ttggaagtggctattcggctggtagtagctaatatcaatggagtttcttccatacgacgtaagtatattcctatgggatttcttgcccctgatgttatcgttggtgataagattcaatttataccaaacgcaactatatatcatttcggtattcttacatcaagtttgcacatggcatggatgggtgttgtcggtggcaggcttaaaagtgattatagttactctccggcaccaatcgctataaccgccgctgcgataattttttgcggctcaaatatacaaatcattcatttttcttttgctttggagtatattgaagcgaaatcaattacacttaacgggtaa

SEQ ID NO: 13554 - protein, 114 aa, Unknown
  Obtained from environmental sample
  misc_feature (1)..(114): Xaa is any amino acid
MEVAIRLVVANINGVSSIRRKYIPMGFLAPDVIVGDKIQFIPNATIYHFGILTSSLHMAWMGVVGGRLKSDYSYSPAPIAITAAAIIFCGSNIQIIHFSFALEYIEAKSITLNG

SEQ ID NO: 13555 - DNA, 543 bp, Unknown
  Obtained from environmental sample
  misc_feature (1)..(543): n is a, c, g, or t
atgaaaagccatttcgctgctgctgaggcagtttacggcgaggaagggcagaagttgtcgctggagataactgtcccttcaaattacaccatgcacgtagataccgcccaggtaattgcctcccagcttgcgaaaattggaattcaggcaagcataaaactaacggactgggcttcatggctttccgatgtttactggaaccggaaataccaggcaacaataatttctctagacagcccgactgtatcgccgcgtgactttctttcccgttaccattccggcagtaatgtgaactttatcaatttttccagtcctgaatttgacggtatatacgatgaaattcttgttgaaatagacgaaggcaaacgcattgaaaagtacaaagaagcccaacggataatttccgaaaatgccgcaagcgtgtacattcaggatatagttctgttcagggcattgcgcatcggagcctacggcggagtacttaattacccgttaagtgtaattgatttcgcttcaatatactccaaagcaaaagaaaaatga

SEQ ID NO: 13556 - protein, 180 aa, Unknown
  Obtained from environmental sample
  misc_feature (1)..(180): Xaa is any amino acid
MKSHFAAAEAVYGEEGQKLSLEITVPSNYTMHVDTAQVIASQLAKIGIQASIKLTDWASWLSDVYWNRKYQATIISLDSPTVSPRDFLSRYHSGSNVNFINFSSPEFDGIYDEILVEIDEGKRIEKYKEAQRIISENAASVYIQDIVLFRALRIGAYGGVLNYPLSVIDFASIYSKAKEK

SEQ ID NO: 13557 - DNA, 648 bp, Unknown
  Obtained from environmental sample
  misc_feature (1)..(648): n is a, c, g, or t
atggactccggttcgcttgaaagtgccgaagccctggtattggcggcggaacgtgaaattgccgtttttggcgaatttggctttaatgagattctggtctcaatgaaggcctcttcagttgccgatactataaatgcgaaccggattttcgcggaaaggagcgatgttcccctccatgtgggggtaaccgaagcaggccccttaattgccggtgtggtgcggaataccgcggctcttgtagccctcctgggggagggaatcggcgatactatccgcgtctcgctttccgataccatggagaacgaggtaattgccgctcgggagatccttgaaactgttcaggagatgaagggggaagcgccgcgccatggtatacgcattgtgtcctgcccccgctgcggtcgaagcggcttcgatacccacgcttttaccgcgcgctggctgaacaggctttacgccatggataaaaacattaccgtggcaataatgggctgcgcggtaaacggccctgaagaagcccgccacgcggatatcggtattaccggcgcgggcgataaggtgcttatcttttcgaaaggaaaggtcatacgcaccataaacgccgtcgacgctgacgccgcatttgaggaagagctaaagaagatatga

SEQ ID NO: 13558 - protein, 215 aa, Unknown
  Obtained from environmental sample
  DOMAIN (1)...(215): GcpE protein
  misc_feature (1)..(215): Xaa is any amino acid
MDSGSLESAEALVLAAEREIAVFGEFGFNEILVSMKASSVADTINANRIFAERSDVPLHVGVTEAGPLIAGVVRNTAALVALLGEGIGDTIRVSLSDTMENEVIAAREILETVQEMKGEAPRHGIRIVSCPRCGRSGFDTHAFTARWLNRLYAMDKNITVAIMGCAVNGPEEARHADIGITGAGDKVLIFSKGKVIRTINAVDADAAFEEELKKI

SEQ ID NO: 13559 - DNA, 567 bp, Unknown
  Obtained from environmental sample
  misc_feature (1)..(567): n is a, c, g, or t
atggacaagcaaagaatcgcccacctgccggtactcaataaaaacaacgatcttgtgggccttatcaccagggccgatttattgagagcggccccatcatccgctaccagccttgatatgtacgagatcagctacctgctttcaaaacttaccgtagaaaagataatggaaaaaacggtgatcattgttcaggaaaacgaagttgtggaagaggcggcaaggatcatggcggatcagggaattggctgcctgcccgtgatgaacggctccctcttgaccggaattgttaccgacaccgacattttccatttttttattaacgcctacggcgcgcgccacaagggcatacggataacgattaatttcaaggaaaaacgcggccagtttgcggcctttgccggcgcgatagcggaaaagggaggcaatatcgttgccgttgtcacctccgagggcgatgatgtagcccaccgccgcgcaacgattaaaattaccgacataagccgcgccgccgtagaggaagttgccgctactttggacggcgcggagattgaagacattcgggaatag

SEQ ID NO: 13560 - protein, 188 aa, Unknown
  Obtained from environmental sample
  DOMAIN (1)...(106): CBS domain pair
  misc_feature (1)..(188): Xaa is any amino acid
MDKQRIAHLPVLNKNNDLVGLITRADLLRAAPSSATSLDMYEISYLLSKLTVEKIMEKTVIIVQENEVVEEAARIMADQGIGCLPVMNGSLLTGIVTDTDIFHFFINAYGARHKGIRITINFKEKRGQFAAFAGAIAEKGGNIVAVVTSEGDDVAHRRATIKITDISRAAVEEVAATLDGAEIEDIRE

SEQ ID NO: 13561 - DNA, 627 bp, Unknown
  Obtained from environmental sample
  misc_feature (1)..(627): n is a, c, g, or t
atgtatcagatcgcacgagtcgttgatttcgcccattcccagaaagactatgtaaccgttgagggagaattgggagtgctggccggcgttgaggatgatgtttcctctgaacatagccactatacccaaccggaagaggtgattgattttgtcggcaagaccaaggttgactcccttgccatttccattggcaccagccacgggcgggcaaaattcaaaccggaacagtgtaccagagacgccaacggcatactgattcctcccccgctccgttttgacattctggaagaaattgaaaagaaaatacccggcttccccatcgtactgcacggttcctcctcggtgccgattgagtatgtgcatatgatagagaagtacggcggcaagctgaccgactcggtgggcatccccgaagaacaactccgtaaagcggcaaaaagcgccgtctgcaaaattaacatcgactctgacggacgtttggcaatgactgccattatccgcaagatactggtcgaaaaacccgaagagtttgatccccgtaaaatactgggaccggcccgcgatgagctgaaaaaactctacgcccacaaaaaccagaacgtgctgggttcggcgggcaaagcgtaa

SEQ ID NO: 13562 - protein, 208 aa, Unknown
  Obtained from environmental sample
  DOMAIN (1)...(208): Fructose-bisphosphate aldolase class-II
  misc_feature (1)..(208): Xaa is any amino acid
MYQIARVVDFAHSQKDYVTVEGELGVLAGVEDDVSSEHSHYTQPEEVIDFVGKTKVDSLAISIGTSHGRAKFKPEQCTRDANGILIPPPLRFDILEEIEKKIPGFPIVLHGSSSVPIEYVHMIEKYGGKLTDSVGIPEEQLRKAAKSAVCKINIDSDGRLAMTAIIRKILVEKPEEFDPRKILGPARDELKKLYAHKNQNVLGSAGKA

SEQ ID NO: 13563 - DNA, 540 bp, Unknown
  Obtained from environmental sample
  misc_feature (1)..(540): n is a, c, g, or t
atgtcaacggaataccaaaaaattatcacttcccttaaacgacgaagaaaaggcgccgttgccgcggatatttgcgcggctacagccctgcctctttctgttgtgaacgaactattgcccagggcggcggatgagtattcgggtcatttgcgcgtgacggagtcgggtgaaattttatattattttccaaatggttttacaagccgctaccgtggattaaacgcaacgcttaaaaaagcggtaaaaaaaacttttgcttttataaaaaccgcatgtgcttttttatttaaaatttggattgtagtgatgctggtaggatattttcttttttttatcacgctcgcgctagcaagcgtttttttatccgtggcgggaaagtcaagcggtgggggagggcgcaggagcggcggctccgtaaactttggtttattcaatcttatctggcggatttggttttactcagaattgactcgtcccagatatggttataattatagttacggaaaggcggatcaaaancagggctcgtgccgatnctga

SEQ ID NO: 13564 - protein, 179 aa, Unknown
  Obtained from environmental sample
  SIGNAL (1)...(29)
  misc_feature (1)..(179): Xaa is any amino acid
MSTEYQKIITSLKRRRKGAVAADICAATALPLSVVNELLPRAADEYSGHLRVTESGEILYYFPNGFTSRYRGLNATLKKAVKKTFAFIKTACAFLFKIWIVVMLVGYFLFFITLALASVFLSVAGKSSGGGGRRSGGSVNFGLFNLIWRIWFYSELTRPRYGYNYSYGKADQXQGSCRX

SEQ ID NO: 13565 - DNA, 501 bp, Unknown
  Obtained from environmental sample
  misc_feature (1)..(501): n is a, c, g, or t
ttgctgaccccagcaacggaatcccccgaactcatacccgaaaacgaagggctgtttctggccccgctgggcgttgatctgtccagcagcgacgctttcccgcagggctgcatggccgtcagcgtgcgcgaatacagatggcacaagggcaggccatgcttggcattcaaccagatgagagacagaacggcggccgagccatataggggctggagcctgtgggcgtcgcgctggagggctgaattggcggaaggcgaatcattcaggcgcgactgggtgggctgccaagtgttcgctagggacgagttcattggcgaagtagccaagctggagccttcccccgctggctacgacattgtgcggatcaaagacatgcgcccaggaaggagcgggctgcgggatgtcccctacatcaaggcttggttcgacctagacttggcaaaccgccgtatcctaattgacccgccggaggggctgctggagcttgacaggctcgattga

SEQ ID NO: 13566 - protein, 166 aa, Unknown
  Obtained from environmental sample
  DOMAIN (84)...(160): PRC-barrel domain
  misc_feature (1)..(166): Xaa is any amino acid
MLTPATESPELIPENEGLFLAPLGVDLSSSDAFPQGCMAVSVREYRWHKGRPCLAFNQMRDRTAAEPYRGWSLWASRWRAELAEGESFRRDWVGCQVFARDEFIGEVAKLEPSPAGYDIVRIKDMRPGRSGLRDVPYIKAWFDLDLANRRILIDPPEGLLELDRLD

SEQ ID NO: 13567 - DNA, 759 bp, Unknown
  Obtained from environmental sample
  misc_feature (1)..(759): n is a, c, g, or t
gtggctttcacgctgattcctcacatgagcagcatctggtcgcttatggcggttataattgttttcacttttgttatgtctgcgtggcgcacgcccgtggtggcgctcatgcccgatattacacctggcccgctgcgcagtcaggccaatggcatcgtcaaccttttgggcggggtcggcacattaatcgctttccttgcgggcggtatcctctttagggtgggcggctttccgctcccgtttttaatgagcgcgatcatgatgatactcgcgctcgcggtactggtgctttttgtgcgcgaacccaagcaggcatacgaggcggaagagaaggacaaaaaggccgagataaagaaactaagcaaagatgagaaaaaaagcctgcttctgattcttttgggcgtgttcttctggttcaccggctacaatgccgtcgagaccttctttaccctgtacgccacgaacaccctgggcatggatcccggcggcgcgtcgatgacgctttcgattttttctcttacttttttggtcttcgcggttccggctggttatatggccgtaaaaaccggacggcgcaaggcgattttgataggcctggcgggtcttatcgttctgttcattccgctgatctttttggccaacgcatgggtagcccgcgcctgcctctttttgggagggtttttctgggcgatggtcaacatcaactcgcttccgatggtagtgcaccctttccggcgaagaaaaggtcggcgcttttag

SEQ ID NO: 13568 - protein, 252 aa, Unknown
  Obtained from environmental sample
  SIGNAL (1)...(27)
  DOMAIN (1)...(246): Major Facilitator Superfamily
  misc_feature (1)..(252): Xaa is any amino acid
MAFTLIPHMSSIWSLMAVIIVFTFVMSAWRTPVVALMPDITPGPLRSQANGIVNLLGGVGTLIAFLAGGILFRVGGFPLPFLMSAIMMILALAVLVLFVREPKQAYEAEEKDKKAEIKKLSKDEKKSLLLILLGVFFWFTGYNAVETFFTLYATNTLGMDPGGASMTLSIFSLTFLVFAVPAGYMAVKTGRRKAILIGLAGLIVLFIPLIFLANAWVARACLFLGGFFWAMVNINSLPMVVHPFRRRKGRRF

SEQ ID NO: 13569 - DNA, 399 bp, Unknown
  Obtained from environmental sample
  misc_feature (1)..(399): n is a, c, g, or t
atgaaccggtttcccatcgactacggctttcgccctcgccttaggggccgacttaccctgggaagattgcctttacccaggaaaccttgggcttccggcggagggggatcccacccctcttttcgtctacttatacctgcattctcccttccgcttcctccagcatacctcacagcacgccttcatcggttcgcggaatgctcccctaccatcctacccttgcggatagaatccgcggcttcggttgcatgcttagccccgttacattgtctgcgcgccgtgactcgaccagtgagctgttacgcactctttcaaggaatggctgcttctaagccaacctcctggctgtcctcgccagggcacatcatttcacactcagcatgctatccgggaccttag

SEQ ID NO: 13570 - protein, 132 aa, Unknown
  Obtained from environmental sample
  misc_feature (1)..(132): Xaa is any amino acid
MNRFPIDYGFRPRLRGRLTLGRLPLPRKPWASGGGGSHPSFRLLIPAFSLPLPPAYLTARLHRFAECSPTILPLRIESAASVACLAPLHCLRAVTRPVSCYALFQGMAASKPTSWLSSPGHIISHSACYPGP

SEQ ID NO: 13571 - DNA, 471 bp, Unknown
  Obtained from environmental sample
  misc_feature (1)..(471): n is a, c, g, or t
atgttaggaaatagtcctataaaaatatttgcaggttccagttcgttggaacttgctgagaagatagttagaagttacggttgcgaacttggcaaatgcccgatattacgtttcagcgatggcgagtttcaaccagcatacgaggaatctgtaagaggtgcgactgttttcataattcaatccactttcccgccaacggagcatttgtttgaattgttattgatgattgacgcagccaaacgagcgtcagcgtacagaattgtggccgttatgccttattttggctttgcgcgtcaagaccgcaaggacagaccccgttgcgccattggcgctaaattagtggcaaatctattggtggcgtcgggcgttgaccgcataatcacgctcgatttgcacgcagacccgatacagggttttttcgatgttccgcttgaccatctgtatgcctcgaacatattgtcctcgcgataa

SEQ ID NO: 13572 - protein, 156 aa, Unknown
  Obtained from environmental sample
  misc_feature (1)..(156): Xaa is any amino acid
MLGNSPIKIFAGSSSLELAEKIVRSYGCELGKCPILRFSDGEFQPAYEESVRGATVFIIQSTFPPTEHLFELLLMIDAAKRASAYRIVAVMPYFGFARQDRKDRPRCAIGAKLVANLLVASGVDRIITLDLHADPIQGFFDVPLDHLYASNILSSR

SEQ ID NO: 13573 - DNA, 456 bp, Unknown
  Obtained from environmental sample
  misc_feature (1)..(456): n is a, c, g, or t
ttgagcatagcctccacaagcattagaaggccggttttaacaatagtattgtcggcgctcattgtgctttttggagcaataggcttgtatcaggttggggttcgcgaataccctgcaatagatccgcctataatagatgttcgcacaacttataccggagcaaatgcggaagttgtggcaaaccaaatcacggaaccgctggaatccgccatcaacggcatagatgggataagagctataatgtcaacttcgcgcgaagagcaatccaacatcactgttgaatttaatttgggtgcgaatatggagcaagccgccaacgacgtgcgagacaaggtttcccgcgctcagaggtttctccctgacgatgcggatattccagttgtttcaaaagcggatgccaattccacgcctatagttgtactctcactcggagcaacaccatctcggccgatctga

SEQ ID NO: 13574 - protein, 151 aa, Unknown
  Obtained from environmental sample
  SIGNAL (1)...(25)
  misc_feature (1)..(151): Xaa is any amino acid
MSIASTSIRRPVLTIVLSALIVLFGAIGLYQVGVREYPAIDPPIIDVRTTYTGANAEVVANQITEPLESAINGIDGIRAIMSTSREEQSNITVEFNLGANMEQAANDVRDKVSRAQRFLPDDADIPVVSKADANSTPIVVLSLGATPSRPI

SEQ ID NO: 13575 - DNA, 486 bp, Unknown
  Obtained from environmental sample
  misc_feature (1)..(486): n is a, c, g, or t
gtgggcaattgcttttttaacgcgaaccagacaaatatagtcaaatatatgaaggagaacaacatagatnctaaatatcctattgttgctagttttcaattcggttccgcaatatcaaaaagattggataccacgggttatacatcgtttacagaatatcctccggttcccgatcacagcggcaattacgtcaatgtatccttcgcgagcattaaagacgacaaagctcagctttatgcgcccatattcaaggatgtcaaatattattttgccaagcctgcggattatttaaccgagttcgacaaaaatttaaccgctgtctccgatgaattggccttctcttacagttgcattttgaattatgtgaattcaaatttagaaggcaaaatcacaaaagggatgtacggtccgtttacctttggagagatagcttaccagttgctcaaccaaactttggtgtatctcgatataaaaacaaaaggataa

SEQ ID NO: 13576 - protein, 161 aa, Unknown
  Obtained from environmental sample
  misc_feature (1)..(161): Xaa is any amino acid
MGNCFFNANQTNIVKYMKENNIDXKYPIVASFQFGSAISKRLDTTGYTSFTEYPPVPDHSGNYVNVSFASIKDDKAQLYAPIFKDVKYYFAKPADYLTEFDKNLTAVSDELAFSYSCILNYVNSNLEGKITKGMYGPFTFGEIAYQLLNQTLVYLDIKTKG

SEQ ID NO: 13577 - DNA, 669 bp, Unknown
  Obtained from environmental sample
  misc_feature (1)..(669): n is a, c, g, or t
ttggagaatcggcaatggttcagagggcagaccagagcagccccgtccgcgtggggcatggacaaagactgggcggcggcagcggccggaggccttcacatggtggccttcaaagcggatggcagcctatgggcatgggtatggaatagtgacggccagttgggcgatggcacaaatacaagcagaaacgtgcctacccaagtgggcgaagacaaagactggaaagcagtttcggcgggcggcagccacaccctcgcactcaaagccgacggcggcctttgggcgtgggggctaaatgatcatggccagttgggcgatggcacaaatacagacagaaacgcgcccatccgtgtaggttcggacaaggattgggcggcagttacggctggcgggcttgaaactgcggccctaaaggcaaacggcagcctgtgggcttgggggctgacgctgacttccgcttatggcgacggctcagggcaaaacgcccccgtccaactgtttagggcaaatgactggaaagcggcttctgtcggctcaacgcacatcatggcagtcaaggcggacggccggctatttacttggggatcaaataaatacggccagcttggcgatggcacaaatataagcaggggcctccccgtttcgcctgaaaggcgggcagcgaaatga

SEQ ID NO: 13578 - protein, 222 aa, Unknown
  Obtained from environmental sample
  DOMAIN (90)...(137): Regulator of chromosome condensation (RCC1)
  misc_feature (1)..(222): Xaa is any amino acid
MENRQWFRGQTRAAPSAWGMDKDWAAAAAGGLHMVAFKADGSLWAWVWNSDGQLGDGTNTSRNVPTQVGEDKDWKAVSAGGSHTLALKADGGLWAWGLNDHGQLGDGTNTDRNAPIRVGSDKDWAAVTAGGLETAALKANGSLWAWGLTLTSAYGDGSGQNAPVQLFRANDWKAASVGSTHIMAVKADGRLFTWGSNKYGQLGDGTNISRGLPVSPERRAAK

SEQ ID NO: 13579 - DNA, 651 bp, Unknown
  Obtained from environmental sample
  misc_feature (1)..(651): n is a, c, g, or t
atgcccggccctgtgcttgcgaatattgtcctggcggacgaaattaaccgtaccactccaaaggtacagtccgcgctgttggaagtaatggccgaacggcaggttaccgtcggctccgctgtccacaagccgcctgaacctttctttgttatcgctaccgaaaacccaatcgaaagcgaagggacattcccgctgccggcggcgcagcttgacaggttcatgatgcgcctttctctgggctatcctgacagggagtcggagctttccattctggatgaaaacccggcggcgaaagccctcgcggagctaaagccggttatgactgaggcggaatttctttctgcccgtaccgccgccgcggaagtgtactgccatcaaagcctgaaagaagcggtggcggatattgtaagggaaacccgcagccaccggagctttgcgcttggcgcttcaccaagggcagctttgcactttcttggggctgtcaaagctctggctttagtgcggggcagggagtatgtcattgatgaagatctcatggttttagccgcccctgttttgagccaccgcgtacggcttcgggacgcaaaagcccaggggggaaggctaatcatggaaatttgccttgcatttctcaatggacttaaagcctaa

SEQ ID NO: 13580 - protein, 216 aa, Unknown
  Obtained from environmental sample
  DOMAIN (1)...(75): ATPase family associated with various cellular activities (AAA)
  misc_feature (1)..(216): Xaa is any amino acid
MPGPVLANIVLADEINRTTPKVQSALLEVMAERQVTVGSAVHKPPEPFFVIATENPIESEGTFPLPAAQLDRFMMRLSLGYPDRESELSILDENPAAKALAELKPVMTEAEFLSARTAAAEVYCHQSLKEAVADIVRETRSHRSFALGASPRAALHFLGAVKALALVRGREYVIDEDLMVLAAPVLSHRVRLRDAKAQGGRLIMEICLAFLNGLKA

SEQ ID NO: 13581 - DNA, 660 bp, Unknown
  Obtained from environmental sample
  misc_feature (1)..(660): n is a, c, g, or t
ttggaatatatgcgaaaacattggggaatgatattgggcaggttcgcgtcaaggctgcttttcggtctggatattatcagcgaggaagaaaaaccgggtttcatgggtcccggccccagcgaagtgatgagttttgccgggcttgacgaatacgagcgctttagcccggatcaggaatggatgcccaatacggtgctgatagcaaaaagcaccctggtctggctgttccaaatctcgcaaaaatacggcagggaaattacacaattggatcaggttcccgacgaggaactggacgagcttgcccgccgcggttttaccgggctttggctcatcggcttgtgggaacggagcaaggcgagcagaacgatcaaacagtggatgggcaaccccgaagccgcggcttccgcctacagcctgtacgactatgacatcgccggagagcttggcggctggggcgccctcgccaacctgagggaacgctgcatgaaacggggaattaggctcggctccgacatggttcctaaccataccggcatagacagccgctggatgatagaacaccctgaccggttcctgcagcttccgtatccgcccttccccacctacgactacaatttgcggaaatctgtcgggcagagacgatataaccgttcaaattga

SEQ ID NO: 13582 - protein, 219 aa, Unknown
  Obtained from environmental sample
  misc_feature (1)..(219): Xaa is any amino acid
MEYMRKHWGMILGRFASRLLFGLDIISEEEKPGFMGPGPSEVMSFAGLDEYERFSPDQEWMPNTVLIAKSTLVWLFQISQKYGREITQLDQVPDEELDELARRGFTGLWLIGLWERSKASRTIKQWMGNPEAAASAYSLYDYDIAGELGGWGALANLRERCMKRGIRLGSDMVPNHTGIDSRWMIEHPDRFLQLPYPPFPTYDYNLRKSVGQRRYNRSN

SEQ ID NO: 13583 - DNA, 393 bp, Unknown
  Obtained from environmental sample
  misc_feature (1)..(393): n is a, c, g, or t
gtgcctgacagttttgccgcctggatgcagggaaccgtcagctcaaagtacgttttcctcctgctgttaaatctttcccttcttgtggttggctgcctgatggacatattttcggcaatcctcgtcgtgcttccccttattgtcccgctcggatacgtctacggcattgatccggtgcatcttggaatcatttttatcatgaatcttgaagttggttttctgactccgcctgtcgggctgaacctctttctggcaagctatcgttttgaaaagccttttataaagatttgccgttatgtgctgccctaccttgcgattcaatttgccgtagtcctgctggtaacgtatgtgccgtggctgtcaaacggcttgatacaaataattaggaattag

SEQ ID NO: 13584 - protein, 130 aa, Unknown
  Obtained from environmental sample
  misc_feature (1)..(130): Xaa is any amino acid
MPDSFAAWMQGTVSSKYVFLLLLNLSLLVVGCLMDIFSAILVVLPLIVPLGYVYGIDPVHLGIIFIMNLEVGFLTPPVGLNLFLASYRFEKPFIKICRYVLPYLAIQFAVVLLVTYVPWLSNGLIQIIRN

SEQ ID NO: 13585 - DNA, 306 bp, Unknown
  Obtained from environmental sample
  misc_feature (1)..(306): n is a, c, g, or t
gtgagcgagggaacccttacagggtttgcggcccttttcaaggatgaatcaacgactgaaccgttgaaaatggtttttcaaatgactctgcagaaacccatgagggacattctctcacagctttcggagcgtgaaatgaagataatccagctccgctacggactcgccggcgaaggcccccttaccctggaagaaacaggaaagctgttaggtataacccgcgagcgcgtgcgccagatccaggaaaaagccaccttcaaacttcggaatatacgggcgttaagcgaactgaaagaaacctgctaa

SEQ ID NO: 13586 - protein, 101 aa, Unknown
  Obtained from environmental sample
  DOMAIN (37)...(90): Sigma-70, region 4
  misc_feature (1)..(101): Xaa is any amino acid
MSEGTLTGFAALFKDESTTEPLKMVFQMTLQKPMRDILSQLSEREMKIIQLRYGLAGEGPLTLEETGKLLGITRERVRQIQEKATFKLRNIRALSELKETC

SEQ ID NO: 13587 - DNA, 495 bp, Unknown
  Obtained from environmental sample
  misc_feature (1)..(495): n is a, c, g, or t
gtgaaaattggcacacaaacttggatggcacagaatttaaactatattattattggcgaatcatactacgccgaaggtatacgtgacatctacggtcttctttacacaaatgcccgtttcaatgacgtttgcccttctggttggcatttaccatccgatgatgaatggaatgttcttgtaaattatgctggcggttcctctacagccggaactaggctgaaagcaaaaaatggttggaatagcggcgtggttggcacagatatatatggattttcggctttgccaggcggctactacggaagggagggaataaactatatcatcttcaatgtcggtaacgaaggcaattggtggagtagaacaacagggacagggatttaccttggttattatcacacactgcacataagtgtcgacgacgcgagtgcagtcataaaatctacgaattctaatatgattacgaatgggtattctgtgcgttgtattcaagactga

SEQ ID NO: 13588 - protein, 164 aa, Unknown
  Obtained from environmental sample
  misc_feature (1)..(164): Xaa is any amino acid
MKIGTQTWMAQNLNYIIIGESYYAEGIRDIYGLLYTNARFNDVCPSGWHLPSDDEWNVLVNYAGGSSTAGTRLKAKNGWNSGVVGTDIYGFSALPGGYYGREGINYIIFNVGNEGNWWSRTTGTGIYLGYYHTLHISVDDASAVIKSTNSNMITNGYSVRCIQD

SEQ ID NO: 13589 - DNA, 513 bp, Unknown
  Obtained from environmental sample
  misc_feature (1)..(513): n is a, c, g, or t
ttggaaaattcagcgngttttcaaggcattcactttcatgaagaatcgatcccatttgcccaaacagcgaccaaagactcaaaagaactccttgatattcatcccgaatactatttaattttgccgaatatgtttgacgagacattgcgcggcaagtttgatgaatggatttacatcctaaaaaactccaaagtccgtgacgacttcaccgccgccgggataaaagaagccacagaaaaactaaacgaactgaccctgccgcccgacaaattagcggcatatcataagtacatggaaaatatcagaagcgtcaacagtcaggctatagcggcagaaataaaaggcaaagaagaaggcatagcggagggcataaccgtaggtaaagcggagggcaacgcagaaaaattaaaggaaattgtattaaatatgcacgaaactggttttagtattgcagacattgcaaaggctaccaaactatcggagcaggaagtcaaagatattttgaatcagtga

SEQ ID NO: 13590 - protein, 170 aa, Unknown
  Obtained from environmental sample
  misc_feature (1)..(170): Xaa is any amino acid
MENSAXFQGIHFHEESIPFAQTATKDSKELLDIHPEYYLILPNMFDETLRGKFDEWIYILKNSKVRDDFTAAGIKEATEKLNELTLPPDKLAAYHKYMENIRSVNSQAIAAEIKGKEEGIAEGITVGKAEGNAEKLKEIVLNMHETGFSIADIAKATKLSEQEVKDILNQ

SEQ ID NO: 13591 - DNA, 852 bp, Unknown
  Obtained from environmental sample
  misc_feature (1)..(852): n is a, c, g, or t
atgatcgcggctgcttgtggagatcgttttcacgccgctgatgcggaggcctggcataaggaaggccaaaaggtactccttgtgagggaagataccagcccggaggatataggaggcatggtagtgtcccagggtatcctcacttctaccggcggaaggaccagccatgcggcggttgttgcccgcggaatgggaaccccctgcgtagtcggtgcgaaagaagtggctattcatgaaaagaccatgaccataggatccaatacctttaacgaaggggactgggtcacaatagacggttctaccggccaggtttttagcgggaagcttcctcttataaccccggacgaaatgtcaaaagaaatggagactttcctcaaatggtgcgatgaaatcagcgccgcatcaaaacgcggaagcctgaagggattccaggtctgggccaacgcagatcagccggtggacgcaaaacgcgctttccagttcggggcccagggaattgggctttgccgcaccgagcatatgtttttcgacaaggaaaagctaatacatttcagggctatgatcgtttccgataccgcagaagagcgcaaggaagccctgaagaaaatccttccccttcaacagaaggactttttgggcatcttcaaggccatggaaggaaaaccggtaaccatcaggcttttggatccgcctcttcatgaattcgttccgcatacaccggaagagacgaaggagcttgccgatttcctgaatgtcccgattgaaaccctccaggtcaagatcgacaagctccgcgagcagaacccgatgttgggccacaggggctgccgcccttgcggtaacgtaccctga

SEQ ID NO: 13592 - protein, 283 aa, Unknown
  Obtained from environmental sample
  DOMAIN (115)...(283): PEP-utilising enzyme, TIM barrel domain
  misc_feature (1)..(283): Xaa is any amino acid
MIAAACGDRFHAADAEAWHKEGQKVLLVREDTSPEDIGGMVVSQGILTSTGGRTSHAAVVARGMGTPCVVGAKEVAIHEKTMTIGSNTFNEGDWVTIDGSTGQVFSGKLPLITPDEMSKEMETFLKWCDEISAASKRGSLKGFQVWANADQPVDAKRAFQFGAQGIGLCRTEHMFFDKEKLIHFRAMIVSDTAEERKEALKKILPLQQKDFLGIFKAMEGKPVTIRLLDPPLHEFVPHTPEETKELADFLNVPIETLQVKIDKLREQNPMLGHRGCRPCGNVP

SEQ ID NO: 13593 - DNA, 681 bp, Unknown
  Obtained from environmental sample
  misc_feature (1)..(681): n is a, c, g, or t
atggaaatgctgtaccagcttgccgacggctttaccgtcaacctcggcttctgcaccatctacccaaatatcagcgggaccttcaaaaatgagaaagaatcctacaacagcaaagaccacgccatcgacttccgttttcacgcgctcaaacaactgcgcgacatacgggacgatatagaagttatcatcgaaggcatagccgacactaagggctacatcatggactataccgatgtaatgaccggggcggtcaacgagacctttacccagatgaacgagttcgtcataaccggctaccggatgaaaatagccggggacgaccctcaaatcggtctctattttcagaacacggccaccggcgcgatgaccaaggcgcacagccttgcggaaaacagccagtccaaactaatcggcatattccccggcatcccagatgcggagtacaaaatcgtcataaagacgcagtattccggcggcggcaggttcctgaaagacctgcgcgtcatagaaagcggctttaccctgaagaaaactaaacaccgcgggcagtccgggcaaggcttgcccaaggggttgggcaaggctgcctcaatgtggttggcaaggcttgcccaaagtgttggggcaaggctgcccccaatgtggtggggaagggttggccccaacccaatggggaaatga

SEQ ID NO: 13594 - protein, 226 aa, Unknown
  Obtained from environmental sample
  misc_feature (1)..(226): Xaa is any amino acid
MEMLYQLADGFTVNLGFCTIYPNISGTFKNEKESYNSKDHAIDFRFHALKQLRDIRDDIEVIIEGIADTKGYIMDYTDVMTGAVNETFTQMNEFVITGYRMKIAGDDPQIGLYFQNTATGAMTKAHSLAENSQSKLIGIFPGIPDAEYKIVIKTQYSGGGRFLKDLRVIESGFTLKKTKHRGQSGQGLPKGLGKAASMWLARLAQSVGARLPPMWWGRVGPNPMGK

SEQ ID NO: 13595 - DNA, 360 bp, Unknown
  Obtained from environmental sample
  misc_feature (1)..(360): n is a, c, g, or t
gtgattgaccggttgtgccgagaactgagcgggaaacttttcggggatcgggggtatatatctcaggaactctttgaacgcttgtatgcccagggcatccagttaatcacgaagctgaggaagaacatgaagaataagctgatggatatgggggataagatgctgttaaggaaacgagcggtgatagagtcggtgaatgatttactgaaaaacaaatgtcaggtggaacacagccgacaccggagtattactaatttcctagtgaatctaatagcgggaatatcggcatatagcttcttgccgcataagccgtcgattcatggtcttgttgatgagggggctttaccgatgctcgcttaa

SEQ ID NO: 13596 - protein, 119 aa, Unknown
  Obtained from environmental sample
  misc_feature (1)..(119): Xaa is any amino acid
MIDRLCRELSGKLFGDRGYISQELFERLYAQGIQLITKLRKNMKNKLMDMGDKMLLRKRAVIESVNDLLKNKCQVEHSRHRSITNFLVNLIAGISAYSFLPHKPSIHGLVDEGALPMLA

SEQ ID NO: 13597 - DNA, 873 bp, Unknown
  Obtained from environmental sample
  misc_feature (1)..(873): n is a, c, g, or t
gtgaaaagcatgaccggttacgcgtacagtgaaagttccggaaaaaccaggaccgtgtcggtggaaattaaaagttataacagccgttttcttgacctggggatttttcttcccccctggctttccagcctggagccgagaatccgggagtatatggtttcccgctttggccgcggtaaaattgaggtgagtatccgggtgaaagaacgccgggaggacgtatcggttttggttaatacgtcggccgcccgttcctattacaaggcccttgaggagcttgccggggaaatggggattcaggaaaagccgagcctggcccttatcatcggccttgagggggttcttgaaaccgacaacagccgggacgacgaaaagtatttgcccgagattgaagaaaggctcgtatccgcggcaaacaacctggagattgagcgggagagggaagggatgcatacccaggaggatattctttcccatatcaccgccctggaagattcggtcaggattattgaagccaaggttccggaagtggaggcttcgatcaaagaaaatctgagggccaggtttgccgaagtgctggggaacgtcaccattatagaggaaaaccgcatcctggcggaaaccgcggtgttgttgatgaagtatacgatttctgaggaactttcccgcctttcaagccatctcacggaattccgccttgaaacagaacgaaactcaatgcctgggaagaagctggactttctatgccaggaaatcaatcgggaaatcaacactataggctctaaaacccctatattagaggtgagccgcgcggtggtggatatgaaaaacgcgttggaaaatatcagggagcagcttagaaatgtcgaatga

SEQ ID NO: 13598 - protein, 290 aa, Unknown
  Obtained from environmental sample
  DOMAIN (1)...(155): YicC-like family, N-terminal region
  misc_feature (1)..(290): Xaa is any amino acid
MKSMTGYAYSESSGKTRTVSVEIKSYNSRFLDLGIFLPPWLSSLEPRIREYMVSRFGRGKIEVSIRVKERREDVSVLVNTSAARSYYKALEELAGEMGIQEKPSLALIIGLEGVLETDNSRDDEKYLPEIEERLVSAANNLEIEREREGMHTQEDILSHITALEDSVRIIEAKVPEVEASIKENLRARFAEVLGNVTIIEENRILAETAVLLMKYTISEELSRLSSHLTEFRLETERNSMPGKKLDFLCQEINREINTIGSKTPILEVSRAVVDMKNALENIREQLRNVE

SEQ ID NO: 13599 - DNA, 741 bp, Unknown
  Obtained from environmental sample
  misc_feature (1)..(741): n is a, c, g, or t
ttggtagtggacgacctgccagaaaacctccttgtagcgcagggcttgcttgcaccctacggcttgaaggtagataccgccgcttcagggcgggaagccgtggaattggccaggagccatagctacggccttatattcatggatcacatgatgcctgaaatggacggcattgaagccgccgaggctatccgtaaaatggaaggccatgcccatactcccattgtcgcactgacggcgaatgccctgcggggaatgaaagagctttatctggaaaagggcttcgacgactacctttcaaagcctataagccccgaagcgttagacgcaattgtcaataaatggctcaatgaacaaataataatgaacaatgaacaattatcagagagccttggtcagaatgcgaagccctctgatgataactcattgttcattgctaatcgttcattgttaattgaaatagaggcgcagcggctggataaattaaaccattaccgcgccgcttttgaaataagcaaaacgtctgccgggctggaaatcgacgcggaatactacaggcggtttacttcattggtcggatcttttgacgcgctccctgttggcttgcgggcggacaaagagctactgatagaagccggacagaaagaagacgcgcaaaggatacgcgaaatgcttcccgctttttgcgaaagccctggcggcaatgcaccggagcaaagcggacagcggggaaacagaagatga

SEQ ID NO: 13600 - protein, 246 aa, Unknown
  Obtained from environmental sample
  DOMAIN (1)...(112): Response regulator receiver domain
  misc_feature (1)..(246): Xaa is any amino acid
MVVDDLPENLLVAQGLLAPYGLKVDTAASGREAVELARSHSYGLIFMDHMMPEMDGIEAAEAIRKMEGHAHTPIVALTANALRGMKELYLEKGFDDYLSKPISPEALDAIVNKWLNEQIIMNNEQLSESLGQNAKPSDDNSLFIANRSLLIEIEAQRLDKLNHYRAAFEISKTSAGLEIDAEYYRRFTSLVGSFDALPVGLRADKELLIEAGQKEDAQRIREMLPAFCESPGGNAPEQSGQRGNRR

SEQ ID NO: 13601 - DNA, 762 bp, Unknown
  Obtained from environmental sample
  misc_feature (1)..(762): n is a, c, g, or t
atgaaggctctttcccagatgctgctgctttgcgcggaaaaaatctcctgttccggaagcggttatcatgatttggcggaacaggagcaggggcatgactgctcaagccagcagtcttatctgaatgacaaggaaaggctgcttatagcgtgtctgcgccggggcgacagtaccgaggcccagaatatagcgcgggatctattggccgatttcagcaatttggctgacggcgattttgagttcttcaaaatgaaggcgatagagctggtagtcatggtttcaagaaccgggacaagttccgaaaacgaggcggaacttgtcgaaacgaacagccgcaatataaaacagattgaggattccgccaacgccgtggaattggctgataacgtctgcctgattcttgaaagaatggccggaaaaattttctcttttcaggggattcgccacgcgtcagcgcttagaaaagccgaacgttttatctgggaaaattacaccaggaagatcagccttaaagaaattgccgacgcgtccgggctttccgcgccttatttcagcacggtattcaagaacgaaatgggcgaaaacctttcaaattatcttaacaggctcagggtggaaaaagccttaatgatgctgggtgaaaccgacgctcccattaacaaaatttcggcggactgtgggtttgaagaccaaagctggttttcaaaagtattcaaaagttataccggtattagtccctatgaataccgtaaaaatggctga

SEQ ID NO: 13602 - protein, 253 aa, Unknown
  Obtained from environmental sample
  DOMAIN (207)...(251): Bacterial regulatory helix-turn-helix proteins, AraC family
  misc_feature (1)..(253): Xaa is any amino acid
MKALSQMLLLCAEKISCSGSGYHDLAEQEQGHDCSSQQSYLNDKERLLIACLRRGDSTEAQNIARDLLADFSNLADGDFEFFKMKAIELVVMVSRTGTSSENEAELVETNSRNIKQIEDSANAVELADNVCLILERMAGKIFSFQGIRHASALRKAERFIWENYTRKISLKEIADASGLSAPYFSTVFKNEMGENLSNYLNRLRVEKALMMLGETDAPINKISADCGFEDQSWFSKVFKSYTGISPYEYRKNG

SEQ ID NO: 13603 - DNA, 537 bp, Unknown
  Obtained from environmental sample
  misc_feature (1)..(537): n is a, c, g, or t
gtggccacttacctattcggaaaagctcgggccggcggaggaaatatgttcagacaccagttggataccatggcgatcctcattgactacagttatgtcgatccggttttgctcaaggcttccctggtgcatgatattcttgaggacatacctgattttaaccataaccagcttttatccattgacttcgaaagtcacgctgtttatgaactggttcaggaagtcacccgcaggcatgatgaaagcaaggtcgattttcttacgcgtattttacagaccggatcacacaacgcgaaaatccttaaagttgcggatcgtatctctaatatgatctccctgggatttgttaatgatctggaatttgtcagccgttacaccgatgaaaccgaaaaacatctttaccctatggcggaacaggcaaacgggtatatgcttatggaactgcggtatctggttgaatcccggcgcaggtatcttgaggtttattcaaaagtcagatcggaaaagtcttgcgccgattccgccaacttcaaataa

SEQ ID NO: 13604 - protein, 178 aa, Unknown
  Obtained from environmental sample
  DOMAIN (16)...(110): HD domain
  misc_feature (1)..(178): Xaa is any amino acid
MATYLFGKARAGGGNMFRHQLDTMAILIDYSYVDPVLLKASLVHDILEDIPDFNHNQLLSIDFESHAVYELVQEVTRRHDESKVDFLTRILQTGSHNAKILKVADRISNMISLGFVNDLEFVSRYTDETEKHLYPMAEQANGYMLMELRYLVESRRRYLEVYSKVRSEKSCADSANFK

SEQ ID NO: 13605 - DNA, 582 bp, Unknown
  Obtained from environmental sample
  misc_feature (1)..(582): n is a, c, g, or t
ttggccgagggtacaaaccccggcaaggactggatgcaacatattgaacaaagcgtccaatacccacgggtagtcgccatcggagaaatcggtcttgattattaccgtaaattcggcgataagaagtctcagatcgagttattcatcacccagcttgatcttgcggcaaaactcaatatgcccgtaattattcataaccgcgacgcgggacatgacgtgctggatattctccgcgaccgtctgcctccaaagggcggggcgcttcactgttattccgaagacgccgcttatgccgaaaaagcccttgagcttaatctgtatttttcttttgcgggaaatctaacgtacaagaacgctaaaaatctgcacgaaacactttttgctttgcctttagaccgcatattgatagaatcggaaagcccgttcatggttccagccgattatcgcggcaaaagaaatatgcccaagtatctgccgctgaccgcccgttttatggcaaatatgcttgaaatggaagaagaggctcttgccgctcagctttgggagaacgcgaataaatttttcggtttgccgagtgaatag

SEQ ID NO: 13606 - protein, 193 aa, Unknown
  Obtained from environmental sample
  DOMAIN (1)...(189): TatD related DNase
  misc_feature (1)..(193): Xaa is any amino acid
MAEGTNPGKDWMQHIEQSVQYPRVVAIGEIGLDYYRKFGDKKSQIELFITQLDLAAKLNMPVIIHNRDAGHDVLDILRDRLPPKGGALHCYSEDAAYAEKALELNLYFSFAGNLTYKNAKNLHETLFALPLDRILIESESPFMVPADYRGKRNMPKYLPLTARFMANMLEMEEEALAAQLWENANKFFGLPSE

SEQ ID NO: 13607 - DNA, 930 bp, Unknown
  Obtained from environmental sample
  misc_feature (1)..(930): n is a, c, g, or t
ttgatcgcgagacttgcaaagggggaggggattttccgcctgaacccgaattttattccccggcccttcggcgtcgagggcaggaggctgcgccttcatccggacgattactttgcctacggccttgagcgcggctcaattaaagagcggtggatgtcttccaccaacattgcccagaacgggccgctggccgggccggaagagggcttgagctttgttgccgtggactacggcagcgatgagaaattcagcctgaaagacgcaatcgcggcgctgggcgcggcaattatcgggaaagagcttatggacaaatacaacggtttcccggtgttctccaaattctacgaccttaaaactccccttttccaccacctgcatcttgacatggaagccgccgccagagtcggcaaactcggcaagccggaatgttactactttccccggcagttcgccagccatacgggcgagataaacgcgacctatttcggctatgatccggacacaaagccggaggaggtcaagcagcgcctgcgggattacaacaagggcgacaaccgcattaccgagctttcccgcgcgtggcgcatagaattgggttccggctggtactcccccgccggcgtcattcacgctcccggctcggtgatgacctacgaactgaactggaacggcgatgttaactcggtacacgagaatgttgtttcgggcgttacctatccccgcgagtttatgaacggcgagtgtccgccggacaaaaaagacgatatcgactatattttcagtctgctggactgggagaaaaacatcgacccccactataaaaagcgccttggccggcctccggttaccatcgttaaaaatccaactatgaggagaaatggaattcctacgccaacgacggctatttcagcgcgaaagaactatcggtaa

SEQ ID NO: 13608 - protein, 309 aa, Unknown
  Obtained from environmental sample
  misc_feature (1)..(309): Xaa is any amino acid
MIARLAKGEGIFRLNPNFIPRPFGVEGRRLRLHPDDYFAYGLERGSIKERWMSSTNIAQNGPLAGPEEGLSFVAVDYGSDEKFSLKDAIAALGAAIIGKELMDKYNGFPVFSKFYDLKTPLFHHLHLDMEAAARVGKLGKPECYYFPRQFASHTGEINATYFGYDPDTKPEEVKQRLRDYNKGDNRITELSRAWRIELGSGWYSPAGVIHAPGSVMTYELNWNGDVNSVHENVVSGVTYPREFMNGECPPDKKDDIDYIFSLLDWEKNIDPHYKKRLGRPPVTIVKNPTMRRNGIPTPTTAISARKNYR

SEQ ID NO: 13609 - DNA, 879 bp, Unknown
  Obtained from environmental sample
  misc_feature (1)..(879): n is a, c, g, or t
gtgacagagtgtatggaaaaagacagcgacatgcacacggagtttgcctcgttcaaggggggcaaatggaagggcatggaacttgagcagcatataggctttgttaaatggaacgaggacaattaccggaacccgctgagggtgcaggtaaagccggcgtataagccccggctggtcgtatcgcgcaaggacagggaagaggtttataccaaaaactacggccgcgtaatgacagtgttagtcgatgattttctttacgccggaaatgacgaggttattattgaaattgccaatgacggcataggcagccttgaatatgaaataatacctgaaaaggaatatgactggctccgtatcagctcccgaggacaacagtccttaaagggaaaagtcgagtcccaggaagaaataaccctgcgctgcgacagggaaaagttgacaggggaaacacaaaacgccaggctgttaatcaaggaaaaagaaattaaagatgccgtagtagtggacggcaaaactacgattgctatcgaaataaaagctaaaaaccctgttatacaagacctgccgccaatgacttttctggaaaacaacggcgtaatcgtaatggaagccaatcatttttgcggcaaaagagacgcgaccgatgccggttttatcgaactgaaaaattacggcagaagcggatccgggatgaaagtctacccgacaacggccgattttaacgagaatgatgaaaggccgttgcttgcctacccgtttttgattgaggaaccgggcgattatacggcgggaatttggacggcgcccgcgaattccgtacagaacaacgcccactgcgcttcacgcttgcggctaaaggaaagaggcggccgcaggtaa

SEQ ID NO: 13610 - protein, 292 aa, Unknown
  Obtained from environmental sample
  misc_feature (1)..(292): Xaa is any amino acid
MTECMEKDSDMHTEFASFKGGKWKGMELEQHIGFVKWNEDNYRNPLRVQVKPAYKPRLVVSRKDREEVYTKNYGRVMTVLVDDFLYAGNDEVIIEIANDGIGSLEYEIIPEKEYDWLRISSRGQQSLKGKVESQEEITLRCDREKLTGETQNARLLIKEKEIKDAVVVDGKTTIAIEIKAKNPVIQDLPPMTFLENNGVIVMEANHFCGKRDATDAGFIELKNYGRSGSGMKVYPTTADFNENDERPLLAYPFLIEEPGDYTAGIWTAPANSVQNNAHCASRLRLKERGGRR

SEQ ID NO: 13611 - DNA, 678 bp, Unknown
  Obtained from environmental sample
  misc_feature (1)..(678): n is a, c, g, or t
atggcagaagacgaagaaaaaaccgaagaccccacatccaagaaaaaatcggatgccattaaaaaggggcaaatagggcgctcaatggatttgtcaaatgctatttccataactgcggctttgattggattttatttttttggcggtgattttgcctctaagtgcgaagaaattatgcgtgaatttttcacaggctacatagactgggaaccaaccataacgaatttttcctctctgtctatccatatactttactcggttatgggcttgcttgccccaatgcttttgttttttttggtgattggaattattggaaatttgtctcaggtgggtttgcattttacactggaaaaattgcagcctaaattatcaaatgttttttccctctctggattaaagcaaatgtttgggaaaaatgcgtggattgagcttataaagggtctgataaaaataaccatagttgggataatagcctatacggtgataaaaaagcattatgaagatgttttatatatggcagatatgcaaataggggttttctgtgcttatatgatagatattctggttgaaatgcttttgaaaatattagtgtttttaataatattcggatctgcggatttaatttatcaaaaaagaaaaacattcaacgatagaaaatacaagaacaatctcgcataa

SEQ ID NO: 13612 - protein, 225 aa, Unknown
  Obtained from environmental sample
  DOMAIN (3)...(225): FlhB HrpN YscU SpaS Family
  misc_feature (1)..(225): Xaa is any amino acid
MAEDEEKTEDPTSKKKSDAIKKGQIGRSMDLSNAISITAALIGFYFFGGDFASKCEEIMREFFTGYIDWEPTITNFSSLSIHILYSVMGLLAPMLLFFLVIGIIGNLSQVGLHFTLEKLQPKLSNVFSLSGLKQMFGKNAWIELIKGLIKITIVGIIAYTVIKKHYEDVLYMADMQIGVFCAYMIDILVEMLLKILVFLIIFGSADLIYQKRKTFNDRKYKNNLA

SEQ ID NO: 13613 - DNA, 594 bp, Unknown
  Obtained from environmental sample
  misc_feature (1)..(594): n is a, c, g, or t
atggcacaaatcactcttataggtatgcttgtattaggggtcgtagcccttgttttaatttattttcttgcaagtttctttagcctgtggctgcaggctttgttttcaaaagccagcgtaggcatttttcagctactcggaatgcggcttaggaaggttaatccgcgcatgattgttgaatctaggattttgagcgttaaagccggtattcctgtagaaacaaatctgctggaagctcattatctctccggtgggaatgtgctgcgtgttgtgcaggctgttatagcggcaaacaaggcaaacatcaatctctcttttgcagaaagcgcagctatagatcttgccggcagaaatgttcttgaggcagtacaaatgagcgttaatccaaaagtgattaccactccaaaggttagcgcggttgccctggatggcattcagttgcaggcggttaccagaatcaccgtgcgagccagcattcgcaagctggttggcggtgcaggcgaagaaacggttatcgcccgcgttggcgagggtattgttagctccataggcagtgcaaaaatcacaaagaagttttggaaaacccaaatatga

SEQ ID NO: 13614 - protein, 197 aa, Unknown
  Obtained from environmental sample
  SIGNAL (1)...(28)
  DOMAIN (1)...(196): Protein of unknown function (DUF1432)
  misc_feature (1)..(197): Xaa is any amino acid
MAQITLIGMLVLGVVALVLIYFLASFFSLWLQALFSKASVGIFQLLGMRLRKVNPRMIVESRILSVKAGIPVETNLLEAHYLSGGNVLRVVQAVIAANKANINLSFAESAAIDLAGRNVLEAVQMSVNPKVITTPKVSAVALDGIQLQAVTRITVRASIRKLVGGAGEETVIARVGEGIVSSIGSAKITKKFWKTQI

SEQ ID NO: 13615 - DNA, 726 bp, Unknown
  Obtained from environmental sample
  misc_feature (1)..(726): n is a, c, g, or t
atgaaatttaaaatcatgatagtcgatgatgagaaaaatatccgcgaggggcttgccgcttccctggagatggacggctataacacggtctgcgccgccgatggggaggaaggctggaaactttttggcaaaggcgacatagacctggttattaccgacttgcgtatgcccggcatggacggcgaagagttgatgcggcgcatactggctgaagcccccggtttcccggttgttatgttaaccggacatggcacggtggaatccgccgtcaacgccatgcgcgaaggggcgtgggattttctgaccaagccggtgaatttggaccgcctttccctgctggtaaaacgcgcccttgaaaacagggaactggttttgcgtaaccgcgccatggaagccgatcttgaacggggccgcctgtttgaaaacatgatcggcaagtctgttgttatgcgtaaagtttttgacacggtaagccgtgtcgccccctccaaggcttctgttctggttaccggggaatccggcgtgggaaaagagcttgtcgccgacgccattcatgagctttcaccccgcaaggacaaaccgttggttaaggttcactgcgccgcccttgcttcgggcgttctggaaagcgaattgtttggccaccaaaaaggggccctttaccgcgcggtgtctcggccgcggggccctttccagcttgccaacgggggaacgcttttttcttga

SEQ ID NO: 13616 - protein, 241 aa, Unknown
  Obtained from environmental sample
  DOMAIN (143)...(241): Sigma-54 interaction domain
  misc_feature (1)..(241): Xaa is any amino acid
MKFKIMIVDDEKNIREGLAASLEMDGYNTVCAADGEEGWKLFGKGDIDLVITDLRMPGMDGEELMRRILAEAPGFPVVMLTGHGTVESAVNAMREGAWDFLTKPVNLDRLSLLVKRALENRELVLRNRAMEADLERGRLFENMIGKSVVMRKVFDTVSRVAPSKASVLVTGESGVGKELVADAIHELSPRKDKPLVKVHCAALASGVLESELFGHQKGALYRAVSRPRGPFQLANGGTLFS

SEQ ID NO: 13617 - DNA, 729 bp, Unknown
  Obtained from environmental sample
  misc_feature (1)..(729): n is a, c, g, or t
ttgcttgccgatggggggtatcgcgttatcgcgccggacttgccgggttttggccgttcgcgctggaagggcagaatcagtatacgctgccattgccgctctgttatacgattaatggagctgaccggcgcggcaagcgcggagaatcccgccgtgcttgccggaagttccctgggggccagtatcgcggaaatgatcgccggcaagcggccccgtctggtcaagaggcttatcttccttgacggctgttttccctttccctataaaatagacaaaggactttttttgctgggactgccatttatcggaagaggctggtatcgaagtttccgttcaaatcacgaagccgcgtggaaatcgctgtacccgtattacggcgacctggacggcatgagcgaggcggacagggaatttctgcgcgagcgggtaattgcccgcgtggaaagccctcatcaggaacgcggttatttttccaccctgcggagcatgaacgcttttttaatctttggcgggcggccgctgacccggacgatacaaaccttccccggcacaattcttatcctctggggcgaaaaagaccgtgttttcccgccggaaaaaaccactctcttccgcacattacggccggacgcgggctttgccttcattcccggcgcgggccatctgccccatcaggaaaggcccgacgcaaccgcggcggagatactgcgctttttgaacgatacataa

SEQ ID NO: 13618 - protein, 242 aa, Unknown
  Obtained from environmental sample
  DOMAIN (7)...(237): alpha/beta hydrolase fold
  misc_feature (1)..(242): Xaa is any amino acid
MLADGGYRVIAPDLPGFGRSRWKGRISIRCHCRSVIRLMELTGAASAENPAVLAGSSLGASIAEMIAGKRPRLVKRLIFLDGCFPFPYKIDKGLFLLGLPFIGRGWYRSFRSNHEAAWKSLYPYYGDLDGMSEADREFLRERVIARVESPHQERGYFSTLRSMNAFLIFGGRPLTRTIQTFPGTILILWGEKDRVFPPEKTTLFRTLRPDAGFAFIPGAGHLPHQERPDATAAEILRFLNDT

SEQ ID NO: 13619 - DNA, 804 bp, Unknown
  Obtained from environmental sample
  misc_feature (1)..(804): n is a, c, g, or t
atggaacatggagtaatgaccgaagcggcccaaaggcttattaatggagcttctcaggttatccgggggaaaagggagtttctggaactcctctgcacggggatcctcgcgggaggccatatacttattgaggataatccggggttgggtaaaaccacggtggccaagaccattgcccggcttatctcgggtgaaaacgacgcccctctccttttcaagcgaattcagtttaccccggatcttctgccctacgacatcacgggggttgatatctttgatcctgaaacccgcagtttccggtttatgcccgggccggtgctggcaaacattgtgttggccgatgaaatcaacaggactactcccaaggttcagtctgcgctgctggaagtgatggccgaaggtcaggtaactatcggggaaacaagccaccgtccgccagagcccttctttgtcattgccacggaaaaccccatagaaagcgagggaacctttccgcttcccgccgcccagctcgatcgcttcatgatgcgcctttccctgggttacccggatcgggaatcggaactttcgattctggaagataatccctcgggaatgatccttgacaacctccggccaagcctcaggacagaggaattcctggaaacccaaaaggcggttataaatattttctgtcatcctttggtacgggaggcaatggcagatattgtgcgggacacaagaattcaccgggactttattctgggagcttcctccagggctggtcttcttttctggaggctggaaagccccggccttgattaa

SEQ ID NO: 13620 - protein, 267 aa, Unknown
  Obtained from environmental sample
  DOMAIN (40)...(238): ATPase family associated with various cellular activities (AAA)
  misc_feature (1)..(267): Xaa is any amino acid
MEHGVMTEAAQRLINGASQVIRGKREFLELLCTGILAGGHILIEDNPGLGKTTVAKTIARLISGENDAPLLFKRIQFTPDLLPYDITGVDIFDPETRSFRFMPGPVLANIVLADEINRTTPKVQSALLEVMAEGQVTIGETSHRPPEPFFVIATENPIESEGTFPLPAAQLDRFMMRLSLGYPDRESELSILEDNPSGMILDNLRPSLRTEEFLETQKAVINIFCHPLVREAMADIVRDTRIHRDFILGASSRAGLLFWRLESPGLD

SEQ ID NO: 13621 - DNA, 903 bp, Unknown
  Obtained from environmental sample
  misc_feature (1)..(903): n is a, c, g, or t
atgctggccgtgatcgccgccatggtgccggcgctggccgcgtcggtggtctttttcggcgtggaagcggcattgttccctattttggtatgcatagccacggcggtggccacggagtgcgtcgccaacctcatactcaggaagaggcaatcgataggcgacctcagcgcgatagttaccggaatacttgtcgcgttcaacctcccccccgccctgcccttgtggatggcggctttgggttcggttttcgctatcgccgtggccaagatggttttcggcggcctcggcggcaatttcataaacccagctttggcgggccgcgcgtttttggtggcaagttatccggctccaatgacaagttacccgcccacgctctacggcagcgtaaacgggctggcggtcaaggcggcggatgcgtccggcacgctctcagacgccatatcgtcggcgacgtcaacatcggtatcaacgcccgccgttgcggattccttaaagagcgcagtcggcgccgcggcggattccttggcggacacggcggccttggcggcaggcaaactcgcggcggcggcatcgtcggtagcggacacagtgtcggcggcggcggcgtccgcggcctcggccatagacgccgtatcgtcggccacgccgctctacgtgataaagcacgtcttcgccgcgaacgcctacaggccgggcgatttttcgccggctctgaaagacctcttcttcggcaacgtcggcggctgcatcggggaaacatccgcgctggcgctgcttataggcgggatatttttgatatcgatacgggtggatagatttaccggaatacttttcgcttacctattcaccgggttcgccgcctttttggttgtcaaacgacacggggggcgttccttaccctaa

SEQ ID NO: 13622 - protein, 300 aa, Unknown
  Obtained from environmental sample
  SIGNAL (1)...(23)
  DOMAIN (1)...(298): NQR2, RnfD, RnfE family
  misc_feature (1)..(300): Xaa is any amino acid
MLAVIAAMVPALAASVVFFGVEAALFPILVCIATAVATECVANLILRKRQSIGDLSAIVTGILVAFNLPPALPLWMAALGSVFAIAVAKMVFGGLGGNFINPALAGRAFLVASYPAPMTSYPPTLYGSVNGLAVKAADASGTLSDAISSATSTSVSTPAVADSLKSAVGAAADSLADTAALAAGKLAAAASSVADTVSAAAASAASAIDAVSSATPLYVIKHVFAANAYRPGDFSPALKDLFFGNVGGCIGETSALALLIGGIFLISIRVDRFTGILFAYLFTGFAAFLVVKRHGGRSLP

SEQ ID NO: 13623 - DNA, 360 bp, Unknown
  Obtained from environmental sample
  misc_feature (1)..(360): n is a, c, g, or t
atgtttccccgatgcagccgccgacgttgccgaagaagaggtctttcagagccggcgaaaaatcgcccggcctgtaggcgttcgcggcgaagacgtgctttatcacgtagagcggcgtggccgacgatacggcgtctatggccgaggccgcggacgccgccgccgccgacactgtgtccgctaccgacgatgccgccgccgcgagtttgcctgccgccaaggccgccgtgtccgccaaggaatccgccgcggcgccgactgcgctctttaaggaatccgcaacggcgggcgttgataccgatgttgacgtcgccgacgatatggcgtctgagagcgtgccggacgcatccgccgccttga

SEQ ID NO: 13624 - protein, 119 aa, Unknown
  Obtained from environmental sample
  misc_feature (1)..(119): Xaa is any amino acid
MFPRCSRRRCRRRGLSEPAKNRPACRRSRRRRALSRRAAWPTIRRLWPRPRTPPPPTLCPLPTMPPPRVCLPPRPPCPPRNPPRRRLRSLRNPQRRALIPMLTSPTIWRLRACRTHPPP

SEQ ID NO: 13625 - DNA, 552 bp, Unknown
  Obtained from environmental sample
  misc_feature (1)..(552): n is a, c, g, or t
ttgcctctcgggctctgcccctctctcgccgtaagtacttctgtgaagaacggctggggcatggggctggccgccacctttgttttggcgttctccaacgtcataatatccataataaaggggtggataccggacaaggttcggataccgtgtttcatcgtggttatagccacgtttgtgtccatactccagttattgatcaaggcgtacgtgccgttgttagacgagcaactggggatattcataccgctcatcgtcgtcaactgcatcatattgggacgcgccgaggctttcgcgtccaagaataaccctatgcgttcgcttgtggacgggtttgtgatggggctgggctttaccgtatcgctcttgatactcagctgcattcgcgagtttttgggcagcaacaaactctgggatttgcttgtcgttccgaacttcaagcctatgacggctatgattttggctccgggcgggtttttcgccatagctttcgtcatgggggtagtcaattgggttcgcggttggaaaaagaaggaggttaagaaagcatga

SEQ ID NO: 13626 - protein, 183 aa, Unknown
  Obtained from environmental sample
  DOMAIN (3)...(167): Rnf-Nqr subunit, membrane protein
  misc_feature (1)..(183): Xaa is any amino acid
MPLGLCPSLAVSTSVKNGWGMGLAATFVLAFSNVIISIIKGWIPDKVRIPCFIVVIATFVSILQLLIKAYVPLLDEQLGIFIPLIVVNCIILGRAEAFASKNNPMRSLVDGFVMGLGFTVSLLILSCIREFLGSNKLWDLLVVPNFKPMTAMILAPGGFFAIAFVMGVVNWVRGWKKKEVKKA

SEQ ID NO: 13627 - DNA, 807 bp, Unknown
  Obtained from environmental sample
  misc_feature (1)..(807): n is a, c, g, or t
atggcacttggtattgaagcggtggctattccagttagctgcaataccgctgctgaaaagagcggatttttcaaagaagttttgcgaacaaaaattggaagtccttttgttattgaagggataaaaaaattgcagggcaaatacaagagcgttgcaggctttgaagctaacggcggttttttaaccgagggtttaacaacaagggatgcgctgacacccattatcgcaaccattatagagagcaaaaaacagggactgaaaatatctgagcttctcgcaaaattgccagcaagatacgcatcaagcggcttgactagaggattttcagtggatgccacggatggttacaggattgaatttgaaaacggagacattatccatttgcgcaaaagcggaaatgctccagaatttcgttgctacacggaaagcaaaacaccggagcaggcagagcttttgagcgataagtgcataaaggcttttgagctttggaaagttatgggttcaaaactatatgatgagttaaaagaattgacaacaaaagagataaaacacatagaagaaaacattgtcccgatgaattttgaaatgctgagcgacaatcccaaatacgaggaatttgaaaaagttggcaaggaaattttgaagcgtggaaaggctgcggcttttttgattgctggaggtcagggttcaaggctgggttttgaaggaccaaaaggagcctttaggctagagtcgcttggcaaatccattttccaaatacatgcggaaaatatgctgaagctggggaaaaacattccctgggtataa

SEQ ID NO: 13628 - protein, 268 aa, Unknown
  Obtained from environmental sample
  DOMAIN (78)...(162): Phosphoglucomutase/phosphomannomutase, C-terminal domain
  misc_feature (1)..(268): Xaa is any amino acid
MALGIEAVAIPVSCNTAAEKSGFFKEVLRTKIGSPFVIEGIKKLQGKYKSVAGFEANGGFLTEGLTTRDALTPIIATIIESKKQGLKISELLAKLPARYASSGLTRGFSVDATDGYRIEFENGDIIHLRKSGNAPEFRCYTESKTPEQAELLSDKCIKAFELWKVMGSKLYDELKELTTKEIKHIEENIVPMNFEMLSDNPKYEEFEKVGKEILKRGKAAAFLIAGGQGSRLGFEGPKGAFRLESLGKSIFQIHAENMLKLGKNIPWV

SEQ ID NO: 13629 - DNA, 705 bp, Unknown
  Obtained from environmental sample
  misc_feature (1)..(705): n is a, c, g, or t
atgcctcaaaaactcgcaatcatatttactagcataacagccattttctttctttcgctgtttatacctgtaaaaaatgacaacgattgcagcaaaattcttttttcttcgcaaggagagcttttgcgagtttggttaaatggaaatgagcaatatcaattcccaaaaagcgaaaaaatttcggaaaaatacaaaactgccgttttgcattttgaagataaaaggtttaattggcattttggaatagaccctattgcggtaatccgagcaatgaaacagaacgcaacggcagggaaaattgagagcggcgcaagcacaattactatgcaggtggcaaggctaaaaaaaccaaaaaagcgaacattttttgcaaaacttgtagaaactcattttgcccttagaatggaactttggaaaagcaaagacaaaatttttgcagaatatgcaagcctcgctcctatgggcggaaacataatcggggcagaaacagcttgctggagattttttggatatggcagcgaggaaatcacttgggcagaagccgctcttttggctctgcttccaaaccgcccctccgcgctcaatttggaaaaagaaagggaaaaacttttggagcgaagaaatcacttgctcnaatcccttgcaaaagcgggctacataaatgaggaaacattgaattcccgctttgcaagaatccttgcctag

SEQ ID NO: 13630 - protein, 234 aa, Unknown
  Obtained from environmental sample
  DOMAIN (32)...(199): Transglycosylase
  misc_feature (1)..(234): Xaa is any amino acid
MPQKLAIIFTSITAIFFLSLFIPVKNDNDCSKILFSSQGELLRVWLNGNEQYQFPKSEKISEKYKTAVLHFEDKRFNWHFGIDPIAVIRAMKQNATAGKIESGASTITMQVARLKKPKKRTFFAKLVETHFALRMELWKSKDKIFAEYASLAPMGGNIIGAETACWRFFGYGSEEITWAEAALLALLPNRPSALNLEKEREKLLERRNHLLXSLAKAGYINEETLNSRFARILA

SEQ ID NO: 13631 - DNA, 867 bp, Unknown
  Obtained from environmental sample
  misc_feature (1)..(867): n is a, c, g, or t
gtggggaaacatctttgcagggcctcgttccgctttattaatgctgatgaccgagggcaaagaaaggagttgaaatggttggaagatagcactgccgaaaaaaacgagcagttattgcagagtatcaccgcttatcacatcaaggaaattttgacatcggttaagagaccagattntgagcaatatcatttgcaattcaataaccacattcccgttgcttggaaaacaggcaccagctatggttcaagagatgcttgggcaataggggtaaatgagcaatggactataggagtttgggtggggaattttgcaggcggttcggttgcgaatttgagcggcagtgctacagcggctccgttgttgttttctctgttcaacaatttgagcgataataaaaaaagaatgtggagcgaattcccacgagatgcagattttgaagaaattgaaatttgtactcttagcggctacaaagcaaaagatttttgccctcataaaaaaaatatactgctcccgataaatagaatgcaaagcagagcctgctcatttcacaaagagataattatttcaaaaagcacaggttttgaagtttgcagtttatgttggaacgcagaagatactttgcacatagttgaagaacactactcaccctctgttagaaacgaacttagaaaaacaggaagggaaccaaaagcggaaactttgcacaatccgagctgcctcgcaaaaaaagagggaatccaattttctattgtttatcccgaaaatggtgcaaggctttttttgccaagcagtgatgctttgagcgaaatgggttttatagccatcgccgcccacaaacaacgcgatgcggagttgcaatggttttag

SEQ ID NO: 13632 - protein, 288 aa, Unknown
  Obtained from environmental sample
  misc_feature (1)..(288): Xaa is any amino acid
MGKHLCRASFRFINADDRGQRKELKWLEDSTAEKNEQLLQSITAYHIKEILTSVKRPDXEQYHLQFNNHIPVAWKTGTSYGSRDAWAIGVNEQWTIGVWVGNFAGGSVANLSGSATAAPLLFSLFNNLSDNKKRMWSEFPRDADFEEIEICTLSGYKAKDFCPHKKNILLPINRMQSRACSFHKEIIISKSTGFEVCSLCWNAEDTLHIVEEHYSPSVRNELRKTGREPKAETLHNPSCLAKKEGIQFSIVYPENGARLFLPSSDALSEMGFIAIAAHKQRDAELQWF

SEQ ID NO: 13633 - DNA, 693 bp, Unknown
  Obtained from environmental sample
  misc_feature (1)..(693): n is a, c, g, or t
gtgaacgaaaaccgccgcgtgcggctgacggcggtgacaggcaccaagggcaagtccggcacggcatcggcaattcactgggcattggcgcattccggcgggaaagggcccctttccgctggaaagggggccgcgtatctcggcggcaacatcaccgtatcgccgctggcgtttttggacaaactccacgattccgatgacgttgtgcttgaactttccagttggcagttaggcgatctgcggggccgccgcacagccgggggcagcccccttcttaaaccgcaggccgccgtgcttacgccgataatgccggatcacctggacaggtacggcactatggaagcctacgttgccgacaagcgggtgatctaccaggggcaggacgggcatgattttaccgttgccggacatgacgactggggaaggagttttcttgcacaaagcaaagcctgccccctggtttattcgagcgcccccctgcccgcaagaggaaccctgcttgcacggctatccggcggctggctggaagaccctgccggcccatgcttggtccgcctgtacggcttcgcggcgcatcgagccggtgtgccggaaagcgaaatgtctgaactgattccggcgccaccccatggtcccggactctcccaaaagaagaacctcctcacctgcggctctgcgctgtttggcctgtga

SEQ ID NO: 13634 - protein, 230 aa, Unknown
  Obtained from environmental sample
  DOMAIN (10)...(227): Mur ligase middle domain
  misc_feature (1)..(230): Xaa is any amino acid
MNENRRVRLTAVTGTKGKSGTASAIHWALAHSGGKGPLSAGKGAAYLGGNITVSPLAFLDKLHDSDDVVLELSSWQLGDLRGRRTAGGSPLLKPQAAVLTPIMPDHLDRYGTMEAYVADKRVIYQGQDGHDFTVAGHDDWGRSFLAQSKACPLVYSSAPLPARGTLLARLSGGWLEDPAGPCLVRLYGFAAHRAGVPESEMSELIPAPPHGPGLSQKKNLLTCGSALFGL

SEQ ID NO: 13635 - DNA, 636 bp, Unknown
  Obtained from environmental sample
  misc_feature (1)..(636): n is a, c, g, or t
atgtctgttctaaaagaaggatattcttttatttttacatcttttgcggcgggtttagcgctggtaattgtttctgtgtttatgcaattacgtcctgcaagcgttatctgcataacgcttggttccgtgttaataattttttctttgttctgcgtttttttcttcagagacccgaaaatcgagatcactatgggggacggaataattctctctccatgcaacggaacggtaatggaagtaactgaagaaggggaagaaaaaatcataagagtgtttctttctgttttcagcgttcatttacagcgggctcccgtgagcgggacagttacggatgttaaccacaagaaagggaaattccttccggcatgggatcataacgcgcatattgaaaatgaacagaatatttttacaatacagggtgaagacggagtgtatactgtaaaacaagttgcggggcttgttgcgcgcaggtgcgtttcatgggttaaatccggagataacctgaatgcgggagataaaatcgggatgattaaattcagttcccaggttgaccttcatattcccaaaaaagcgcagacggctgtaaagcctggcgataaaaccagagcgggtattactgtaatagcaaaaaaatga

SEQ ID NO: 13636 - protein, 211 aa, Unknown
  Obtained from environmental sample
  SIGNAL (1)...(28)
  DOMAIN (47)...(209): Phosphatidylserine decarboxylase
  misc_feature (1)..(211): Xaa is any amino acid
MSVLKEGYSFIFTSFAAGLALVIVSVFMQLRPASVICITLGSVLIIFSLFCVFFFRDPKIEITMGDGIILSPCNGTVMEVTEEGEEKIIRVFLSVFSVHLQRAPVSGTVTDVNHKKGKFLPAWDHNAHIENEQNIFTIQGEDGVYTVKQVAGLVARRCVSWVKSGDNLNAGDKIGMIKFSSQVDLHIPKKAQTAVKPGDKTRAGITVIAKK

SEQ ID NO: 13637 - DNA, 603 bp, Unknown
  Obtained from environmental sample
  misc_feature (1)..(603): n is a, c, g, or t
atggcgagcgagccagcagctcctgcacctgatgatccactcgctctacagccacaaggaggtcttcctccgcgaattggtctccaacgcttccgacgcgctcgacaagctgcggttcgaggcgctgaccgatccgtctatcgacgccggcgcggagctctccgtccgcatcgccgtggacaaggaggccaagaccgtcaccgtctccgacaacgggatagggatgacgcgcgaggaggtcatagagaacctcggcaccatcgcccgctccggctcaaaggcgttcctcgaaaagatgacgggcgaccagcgggccgactcgaatctcatcggacagttcggcgtgggtttctactcggcgttcatggtggcgaaccgcgtgagggtggtcaccaagcgggccggaagcggcggcgcggtggcgtgggagtcaaacggggagagctcgtacaccataagcgatgccgagaaagaggggcatgggacggacgtcgtagtctacctgaaggacgacgaggtagagtacgcggagctttggcaggttcgttcgctcatcaaaaaatactccgacttcatcgccttccccatctacctgccgaatga

SEQ ID NO: 13638 - protein, 200 aa, Unknown
  Obtained from environmental sample
  misc_feature (1)..(200): Xaa is any amino acid
MASEPAAPAPDDPLALQPQGGLPPRIGLQRFRRARQAAVRGADRSVYRRRRGALRPHRRGQGGQDRHRLRQRDRDDARGGHREPRHHRPLRLKGVPRKDDGRPAGRLESHRTVRRGFLLGVHGGEPREGGHQAGRKRRRGGVGVKRGELVHHKRCRERGAWDGRRSLPEGRRGRVRGALAGSFAHQKILRLHRLPHLPAE

SEQ ID NO: 13639 - DNA, 774 bp, Unknown
  Obtained from environmental sample
  misc_feature (1)..(774): n is a, c, g, or t
atgatccactcgctctacagccacaaggaggtcttcctccgcgaattggtctccaacgcttccgacgcgctcgacaagctgcggttcgaggcgctgaccgatccgtctatcgacgccggcgcggagctctccgtccgcatcgccgtggacaaggaggccaagaccgtcaccgtctccgacaacgggatagggatgacgcgcgaggaggtcatagagaacctcggcaccatcgcccgctccggctcaaaggcgttcctcgaaaagatgacgggcgaccagcgggccgactcgaatctcatcggacagttcggcgtgggtttctactcggcgttcatggtggcgaaccgcgtgagggtggtcaccaagcgggccggaagcggcggcgcggtggcgtgggagtcaaacggggagagctcgtacaccataagcgatgccgagaaagaggggcatgggacggacgtcgtagtctacctgaaggacgacgaggtagagtacgcggagctttggcaggttcgttcgctcatcaaaaaatactccgacttcatcgccttccccatctacctgccgaatgacaaaggggaaagcgaggtcgtcaatcagaccaagccgctgtggctgcgcccggcttccgagatcacatccgaacaatacgaggaattctatcatcaggccttgggcggttacggcaagccgatctgctccatacacaacaaggcggaggggatactcgaatactcgtctctactattcataccgtcgcaaccggctttttga

SEQ ID NO: 13640 - protein, 257 aa, Unknown
  Obtained from environmental sample
  DOMAIN (8)...(161): Histidine kinase-, DNA gyrase B-, and HSP90-like ATPase
  misc_feature (1)..(257): Xaa is any amino acid
MIHSLYSHKEVFLRELVSNASDALDKLRFEALTDPSIDAGAELSVRIAVDKEAKTVTVSDNGIGMTREEVIENLGTIARSGSKAFLEKMTGDQRADSNLIGQFGVGFYSAFMVANRVRVVTKRAGSGGAVAWESNGESSYTISDAEKEGHGTDVVVYLKDDEVEYAELWQVRSLIKKYSDFIAFPIYLPNDKGESEVVNQTKPLWLRPASEITSEQYEEFYHQALGGYGKPICSIHNKAEGILEYSSLLFIPSQPAF

SEQ ID NO: 13641 - DNA, 330 bp, Unknown
  Obtained from environmental sample
  misc_feature (1)..(330): n is a, c, g, or t
atggccgagatcgcggtcagaagagtcatggcttccacgcggtcatgtgtaacatacaccgcggttgttccaaggcttttttggatgcggcggatctccaccctcatctgctcgcgcaagagggcgtccaggttggagagtggctcgtctaaaagaagcaccgagggctccactataaggctccgcgcaagggcgacccgctgctgctgcccgcctgagagctgtccgggcggtctgtcgtggagatccccaaggccaaccatgtcaagaaattcctttacctttttgtcgatgtcctcttttggcagtttcttgagctttaagccgtaa

SEQ ID NO: 13642 - protein, 109 aa, Unknown
  Obtained from environmental sample
  DOMAIN (48)...(86): Protein of unknown function (DUF1602)
  misc_feature (1)..(109): Xaa is any amino acid
MAEIAVRRVMASTRSCVTYTAVVPRLFWMRRISTLICSRKRASRLESGSSKRSTEGSTIRLRARATRCCCPPESCPGGLSWRSPRPTMSRNSFTFLSMSSFGSFLSFKP

SEQ ID NO: 13643 - DNA, 696 bp, Unknown
  Obtained from environmental sample
  misc_feature (1)..(696): n is a, c, g, or t
ttgactccggggggcgctatccgcgttggcgcgctgactagctttttccatgtcgcccaagacccggttatacagaaaaatgttccagtgcttggggaagcggtgctgactattggcgggcctcagcttcgcaatatcggcactataggcgggaatgtctgtaacggggttacgtctgcggacagcgcctcaactctgctggcctatgacgtagtaatggaataccttggccccaacggcctgcggctggttcctatttccgaacattatattagcgcgggtaaaacagccctggcgcatgatgagattttgcaggctattcttattccgaaagaaagttatgaaaattgttttggaaattatatcaaatacgccatgagggaagccctggacatagcgaccctgggatgttcggcaaatgtcaggctatcaaaggatcgcaaaaccattgacaggctccgcctggcatacggcgtcgcgggacctgtccccatgcgcgttccaggcgcggaaaaggcggcatccggaaaaccggcaaacgcggaaaccgccgccgctgttgccaggctggtgttaaacgacattaatccacgctcaagctggcgggccagcaaggaattcagattgcacctggcggaggaacttgcaaaacgggcaattaccgaatcgcttaaacgcgcgggggtatcgttatga

SEQ ID NO: 13644 - protein, 231 aa, Unknown
  Obtained from environmental sample
  DOMAIN (1)...(112): FAD binding domain in molybdopterin dehydrogenase
  misc_feature (1)..(231): Xaa is any amino acid
MTPGGAIRVGALTSFFHVAQDPVIQKNVPVLGEAVLTIGGPQLRNIGTIGGNVCNGVTSADSASTLLAYDVVMEYLGPNGLRLVPISEHYISAGKTALAHDEILQAILIPKESYENCFGNYIKYAMREALDIATLGCSANVRLSKDRKTIDRLRLAYGVAGPVPMRVPGAEKAASGKPANAETAAAVARLVLNDINPRSSWRASKEFRLHLAEELAKRAITESLKRAGVSL

SEQ ID NO: 13645 - DNA, 318 bp, Unknown
  Obtained from environmental sample
  misc_feature (1)..(318): n is a, c, g, or t
gtgccccggcgctgtatactgcgggatatgtccttctcgggtgccaaggtaataatgatgggagtcgccaaattcctggtcaacaaggatacagccctgcgctttgactttgatgatccccgggaaacttttctggtcaagggaagatttatccgttcggaaaatgttgagggaaaaaaggaaatgatagcccttgccacggagtttgacgaggcggtagtccccatgggctacaagatacggatcaacgagtacctgaatactacaagggcggacagccgtgtccaggaaaacgaaggcgcttccccggcgaagtaa

SEQ ID NO: 13646 - protein, 105 aa, Unknown
  Obtained from environmental sample
  misc_feature (1)..(105): Xaa is any amino acid
MPRRCILRDMSFSGAKVIMMGVAKFLVNKDTALRFDFDDPRETFLVKGRFIRSENVEGKKEMIALATEFDEAVVPMGYKIRINEYLNTTRADSRVQENEGASPAK

SEQ ID NO: 13647 - DNA, 408 bp, Unknown
  Obtained from environmental sample
  misc_feature (1)..(408): n is a, c, g, or t
atgggtactatctcggtagaatacagctcaaacttgtactggcttggaagatatgcggaacgtgcatacaccacgcttaacacgtttttcaattatcacgacaaatcacttgacaaggataaaaactcctacaaggagttccttgaaaatttggaaatagatgacaagtatggcgatcatcgtaatttcatacaaggatatctgtacgacgatacagatgacttcaccatcagttcaactctgcgtttagctcacgacaatgcgcttgtttgccggaacgtgataggtagcgaggcacttgcctacattcagctcgcaattgatgcgttcaactccagccgtaatgcaaaaaatcttcgtctgtcactaatgcctgtcattgactatctgctgcctcggccgatctga

SEQ ID NO: 13648 - protein, 135 aa, Unknown
  Obtained from environmental sample
  misc_feature (1)..(135): Xaa is any amino acid
MGTISVEYSSNLYWLGRYAERAYTTLNTFFNYHDKSLDKDKNSYKEFLENLEIDDKYGDHRNFIQGYLYDDTDDFTISSTLRLAHDNALVCRNVIGSEALAYIQLAIDAFNSSRNAKNLRLSLMPVIDYLLPRPI

SEQ ID NO: 13649 - DNA, 450 bp, Unknown
  Obtained from environmental sample
  misc_feature (1)..(450): n is a, c, g, or t
gtgccccaaatgataaaatactacttaggcgaagacccaattttgcaaaacgcacccacatatttgccttactatgagaatgacctcaagtttacgcttgaaaacattgagcgtcttgtaataaaagatgtgtctgaagcaggtggatatggcgtggtgttcggtagcgaattgtcaaaagaaaaattagctgaattaaaagctcttatcataaaagaaccgagacgattcatatcgcaagaagtcatagactttatagacttagatataatggacgaaaacggcaatgctgttccacgaaaagccgacttgagggcatttgtgctgacggacaatgctactcacatgtgggcaagcggacttacacgcttttcacgtgttgtaggctcattcattgttaattcttcacaaggaggagggtttaaagacacatgggtactatctcggtag

SEQ ID NO: 13650 - protein, 149 aa, Unknown
  Obtained from environmental sample
  DOMAIN (4)...(148): Domain of unknown function (DUF407)
  misc_feature (1)..(149): Xaa is any amino acid
MPQMIKYYLGEDPILQNAPTYLPYYENDLKFTLENIERLVIKDVSEAGGYGVVFGSELSKEKLAELKALIIKEPRRFISQEVIDFIDLDIMDENGNAVPRKADLRAFVLTDNATHMWASGLTRFSRVVGSFIVNSSQGGGFKDTWVLSR

SEQ ID NO: 13651 - DNA, 795 bp, Unknown
  Obtained from environmental sample
  misc_feature (1)..(795): n is a, c, g, or t
gtgctgcttaatgacacggtagcaactctgctttccgggcttgcgtcaataccggcggacggctggggagaatcaacaaagaatccctatggttttccgggcgggccgatgattggctgtatattgggaaccggctttaataccgcgtatcctgagacgcggattcccaagattggctttgaatcaaagactgccccgcagatcgtggtttgtgagaccggctctttcagctttcactaccggggacggctggacagggaatttgacagcacaaccaaaaatcccggggcttataatctggagaaagccacttctggcgcgtatcttggccccctgaccctgcacatcctgaaacaggcgataaatgacaaactgatccgttttaaaaaatccgatgaattgcttgccatgccccagcttgaaacaaggatactcaacgagttctcccgcgccccgcgcgccgttgaaggcccgctgggttcgctattcggccctgatgaaggggacgcgcttgccgcagtgcagtacattgtctcgattatcaccgagcgcggagcgctgtttgccgcggcggtactggccgcgacaatggaaaaaatgcaggcataccgcgaaccgtactcgcctgttcgtatagccatagaaggaaccacctatatgatctacagggggatgcgccgcgcccttgaagccaggctgcatacattgcttatccatgataagccccggccttatgtcctcgcgcctgtggaacaggccagcctctttggcgcggcagtagcggcctgcggatag

SEQ ID NO: 13652 - protein, 264 aa, Unknown
  Obtained from environmental sample
  DOMAIN (35)...(263): Hexokinase
  misc_feature (1)..(264): Xaa is any amino acid
MLLNDTVATLLSGLASIPADGWGESTKNPYGFPGGPMIGCILGTGFNTAYPETRIPKIGFESKTAPQIVVCETGSFSFHYRGRLDREFDSTTKNPGAYNLEKATSGAYLGPLTLHILKQAINDKLIRFKKSDELLAMPQLETRILNEFSRAPRAVEGPLGSLFGPDEGDALAAVQYIVSIITERGALFAAAVLAATMEKMQAYREPYSPVRIAIEGTTYMIYRGMRRALEARLHTLLIHDKPRPYVLAPVEQASLFGAAVAACG

SEQ ID NO: 13653 - DNA, 639 bp, Unknown
  Obtained from environmental sample
  misc_feature (1)..(639): n is a, c, g, or t
gtggtaaccccgtttagaaaaatacggattaatatcaaagaaccaaaacgcctgccaaaatcattgtctctatttgatatggaaaagttattgtcgtttttatattctcaaacgcatattaagaaaatgtccattagaaaccttgccatatttgaacttatgtttgccactggaatccgagtttcagaattatgcaatataaggttgtcagacataaatctcgaaacgcagacattatccattaaaggcaaaggcaataaagagcgtttaggcattgtgaacaacaatcatgttatttccgcgttaaaaagatatctttccattcgcccaatcaccgattcgccttttttctttataaacagaatcaaaaagcaaatatcaacccaatcagtgcgtttttttatagaagcacttggtaaaaaagttctcaataaacttgttactccacacatgattcgccatactttcgcaacacttttattggaagaaggcgtagatattacctacataaaatcctttctaggtcattcttcaatctcaactacccaaatatacgctgcttctactacgtataagcagcggcagatattaaccgctttgcatccgaggaataggattgggggcgtgaatgaaggataa

SEQ ID NO: 13654 - protein, 212 aa, Unknown
  Obtained from environmental sample
  DOMAIN (30)...(195): Phage integrase family
  misc_feature (1)..(212): Xaa is any amino acid
MVTPFRKIRINIKEPKRLPKSLSLFDMEKLLSFLYSQTHIKKMSIRNLAIFELMFATGIRVSELCNIRLSDINLETQTLSIKGKGNKERLGIVNNNHVISALKRYLSIRPITDSPFFFINRIKKQISTQSVRFFIEALGKKVLNKLVTPHMIRHTFATLLLEEGVDITYIKSFLGHSSISTTQIYAASTTYKQRQILTALHPRNRIGGVNEG

SEQ ID NO: 13655 - DNA, 663 bp, Unknown
  Obtained from environmental sample
  misc_feature (1)..(663): n is a, c, g, or t
atgacgcctaaagagaaaacgttaattaataagctgttcacggtttcattcccggctttatttaaaaacagatccattcttgcttgggtgggagcgtttcttttctgtcttgtggtcatactgttaagcggaaattcaagcagtagcatgagaagaagcattgatgaatttgaagttggaaaggtagcgggcagggatttaatagcggaatacgatatcacaattgaggatgaacaggcgaccagggaaaaaatagaaacacaggagcggcttgttccggcggtgtttcagtattcaaacagggtgtccggggagctaaagagcaggtggaattatttttcgactctggcaaaaaagttttttacggaagctcaatcagcgcagtcattcgcgcttgagcttcggtccgagtttcccggcgaattttcaggcgaagtgctcagcctcctgtacggaagtgaaagccgcctggaaatactgggcgactgcggggccatacttgacgctgtgctggaaaagggcatttattccataccgcagacaggtcttgaacatttgaacagcgatgttgtggagctgatccgccagagcgattcaagaattgagcaggagaaaattcctttctgggcgattgtaacggagacgtcgcggccgcttccgtag

SEQ ID NO: 13656 - protein, 220 aa, Unknown
  Obtained from environmental sample
  misc_feature (1)..(220): Xaa is any amino acid
MTPKEKTLINKLFTVSFPALFKNRSILAWVGAFLFCLVVILLSGNSSSSMRRSIDEFEVGKVAGRDLIAEYDITIEDEQATREKIETQERLVPAVFQYSNRVSGELKSRWNYFSTLAKKFFTEAQSAQSFALELRSEFPGEFSGEVLSLLYGSESRLEILGDCGAILDAVLEKGIYSIPQTGLEHLNSDVVELIRQSDSRIEQEKIPFWAIVTETSRPLP

SEQ ID NO: 13657 - DNA, 690 bp, Unknown
  Obtained from environmental sample
  misc_feature (1)..(690): n is a, c, g, or t
atggtagccaatctggccgaggctgcttgccaggatattggggctaactccatccttgccagggttggggcttattaccacgatattgggaaaatggaaaaccccggatactttgtcgaaaaccagactgactataatccccatgacgatatgccgcccaagctttcggcaactgtgatacgcagccatgtaaagcttggagttgagaaggcaaggcagatggggctgccgatcgacgtaatcgatattatcgccgagcatcatggcaattcggtaattacatggttttacagcaaggcgcttaaacaggataatcttaaaaatcccaccgtaaatatggaagactaccgctatccgggaaacccgcctcattcgaaggaaagcgccgttgttatgctggcggatctcagcgaagcggcgacccgttcaataagcaagcctaacgcggttaaaattgagaagtttatcaaggagcttatcgcgaataaagtggactacggacagctttcccagtcggaactgacattcagcgatcttgagataattgaaaacgcttttgtcagggttttggccggttactatcattcaagaatcgaatatcccaaaattgatctccaggcggaaaataacaataataataacaccaataataacaccgcctctgaaaacggaaaggccgcaacagaatga

SEQ ID NO: 13658 - protein, 229 aa, Unknown
  Obtained from environmental sample
  DOMAIN (1)...(140): HD domain
  misc_feature (1)..(229): Xaa is any amino acid
MVANLAEAACQDIGANSILARVGAYYHDIGKMENPGYFVENQTDYNPHDDMPPKLSATVIRSHVKLGVEKARQMGLPIDVIDIIAEHHGNSVITWFYSKALKQDNLKNPTVNMEDYRYPGNPPHSKESAVVMLADLSEAATRSISKPNAVKIEKFIKELIANKVDYGQLSQSELTFSDLEIIENAFVRVLAGYYHSRIEYPKIDLQAENNNNNNTNNNTASENGKAATE

SEQ ID NO: 13659 - DNA, 861 bp, Unknown
  Obtained from environmental sample
  misc_feature (1)..(861): n is a, c, g, or t
ttgaaagatccgcagaagttcacaaaaatgggcgcacgcataccgaaaggtgtgctgcttgtgggaatgcccggcacgggaaaaacccttatggcgaaagcagtggccggggaagcaaaggtcgcttatttccatatgtccggctcggactttgttgagatgtttgtcggcgtcggcgcaagccgcgtccgcgatctttttgatcaggggcggcgcagtgctccctgcataatttttattgacgagctggacgctgtcgggcgtacccgaggcgcgggctacggtggaggccatgacgagcgggaacaaaccctgaaccagcttctggtagaaatggacggctttgattccaaagacggcgttataatcctcgcagccaccaaccgtcccgacgtactagatccggccctgctaaggcctggtcgttttgatcgccaggttgtggtagccatgcctgatataaaagagcgggaggacattctaaaaattcacgcggctaaaatcccgcttgacggcgaagtagacctgagcagaatcgcgagggcaacccccggcatgagcggcgcggacatagcgaacctggtaaacgaggcggccctctttgccgcacgcaaggacaaaacaacggtagagatgtctgattttgaagaagccagggacaaggttctgatgggggtcgcccggaaaacccttgtcgtctccgacagagaaaggaatatgaccgctattcacgaagcaggccacgccctgctgcattatttccttaaaaactctgatcccctgcacaaagttccatttggccccatggccagggcgcttggaaatggccatgtccccttccccaaaaaaaacaggttatag

SEQ ID NO: 13660 - protein, 286 aa, Unknown
  Obtained from environmental sample
  DOMAIN (17)...(151): ATPase family associated with various cellular activities (AAA)
  misc_feature (1)..(286): Xaa is any amino acid
MKDPQKFTKMGARIPKGVLLVGMPGTGKTLMAKAVAGEAKVAYFHMSGSDFVEMFVGVGASRVRDLFDQGRRSAPCIIFIDELDAVGRTRGAGYGGGHDEREQTLNQLLVEMDGFDSKDGVIILAATNRPDVLDPALLRPGRFDRQVVVAMPDIKEREDILKIHAAKIPLDGEVDLSRIARATPGMSGADIANLVNEAALFAARKDKTTVEMSDFEEARDKVLMGVARKTLVVSDRERNMTAIHEAGHALLHYFLKNSDPLHKVPFGPMARALGNGHVPFPKKNRL

SEQ ID NO: 13661 - DNA, 333 bp, Unknown
  Obtained from environmental sample
  misc_feature (1)..(333): n is a, c, g, or t
ttgatgcgattggtccgttttggtcatctttcacgcgaaattatggtttccattgtccaaaaagagttggacgcttttaccgcccagcttacggaaaagaacgttaccgttaccgttacggaaacctgtatagacaagttggcggaagaaggctacagcaaagagtttggcgcaagaaacgcgagcagattaatcgaagaaaagataaaaagtttctttgtggatgaagtcctatttggcagcctgagcgagggcggaagcgccgttgttgactggcgcgacggctactgcatggacattgaagagactcaagccttaacagcggaaaattag

SEQ ID NO: 13662 - protein, 110 aa, Unknown
  Obtained from environmental sample
  misc_feature (1)..(110): Xaa is any amino acid
MMRLVRFGHLSREIMVSIVQKELDAFTAQLTEKNVTVTVTETCIDKLAEEGYSKEFGARNASRLIEEKIKSFFVDEVLFGSLSEGGSAVVDWRDGYCMDIEETQALTAEN

SEQ ID NO: 13663 - DNA, 534 bp, Unknown
  Obtained from environmental sample
  misc_feature (1)..(534): n is a, c, g, or t
gtgcatgccctgcgccgcaacgcattccgcgctgtggagttttttggctcctcggaaatgggcaccgtgtgctgccgggaaaatccggacgatcctttttgtcttttgccccatgtggaacgaggcaggggagagcatgaaggcgcgctggaacgtctcttgccggacggcgcagtgatgcgctatcccttggtcgacagcgttgcctggataggggatcgcgccctgcgtcccggcgggcgccttgacgaggccgtgcaggtggcaggggtgaacgtgcatccccggcatgtcgggtccgtgctggaacggcacgaaggcgtgagcgcgtgcgtggtgcgccttatgcgtccggacgaaggatacaggctcaaggcgttcgtcgttcccaagccgggctggagcangcaggcgctgcgcgcgtcgctggagctttttgccaggcaacgcctgagcgacgccgagcggcccgtgcggtacgctttcggggatgacgttccgcgcggccccctgggcaaaccggcagactggtga

SEQ ID NO: 13664 - protein, 177 aa, Unknown
  Obtained from environmental sample
  misc_feature (1)..(177): Xaa is any amino acid
MHALRRNAFRAVEFFGSSEMGTVCCRENPDDPFCLLPHVERGRGEHEGALERLLPDGAVMRYPLVDSVAWIGDRALRPGGRLDEAVQVAGVNVHPRHVGSVLERHEGVSACVVRLMRPDEGYRLKAFVVPKPGWSXQALRASLELFARQRLSDAERPVRYAFGDDVPRGPLGKPADW

SEQ ID NO: 13665 - DNA, 711 bp, Unknown
  Obtained from environmental sample
  misc_feature (1)..(711): n is a, c, g, or t
gtggatcagatcggccgagatcacattccggcgttcggcgtaaggcggcagaccatgctcacgcaagagctatacaccattggctactacatctgcactgttgatggccccaccgtcaccgttgactactattcgtcccagccagtcagcacaggcggcgacatagcagccacgcccgatccgctgacatttacgaagaaagagacattcggctacaacctcggcggcaagagctacatcatcgcgcagggcgccccatacacagtggtgcgcgatgacggcgccgagatactgggcggcaccaacacattcgggatgaaggatttggcaggtcgcagttgttcccactatgttaccacgggctggaggcctgggacgccaggtctctgcacggacatctttaccatccaaggcatggccaacaccctcggcagcgaaaagactgacacatactgcctgtccatggaatatgacccacacgccgtcggaaagacccttgcggaaagcggcagggtgggcattgccaccaagaccacgaccacatgggtgaacgccgtcagcaaaaacacgggcggaactacaaaatttgtcatcggtccgtacggcccgtcgttgcacgaattgggcacctatggcgttgacaccgtcaaccacaggttctgggcggtgatcaactacaacgccgaattcgccgttgcgcctggcatttag

SEQ ID NO: 13666 - protein, 236 aa, Unknown
  Obtained from environmental sample
  misc_feature (1)..(236): Xaa is any amino acid
MDQIGRDHIPAFGVRRQTMLTQELYTIGYYICTVDGPTVTVDYYSSQPVSTGGDIAATPDPLTFTKKETFGYNLGGKSYIIAQGAPYTVVRDDGAEILGGTNTFGMKDLAGRSCSHYVTTGWRPGTPGLCTDIFTIQGMANTLGSEKTDTYCLSMEYDPHAVGKTLAESGRVGIATKTTTTWVNAVSKNTGGTTKFVIGPYGPSLHELGTYGVDTVNHRFWAVINYNAEFAVAPGI

SEQ ID NO: 13667 - DNA, 741 bp, Unknown
  Obtained from environmental sample
  misc_feature (1)..(741): n is a, c, g, or t
atggtcgagttcgcgcaatccgtcggttcgcaggggctggcctatttaatatggaatgaggagggcgcgaaagggcccatagctaaattcttggacgcgaacagcatggctgcgcttaccgaggcgctcggggcgaagccgggcgacgcggcgttcttcgtgtgcaacgacgagtccgccgcgaataaaatcgccggtgagatcagggtcaaacttgggaaagagctcgacatcgtagaaaagggcgcgttcaggttctgctggataacctacttccccatgttcgagtacaacgaggagctcaaaaagatagacttctcccacaacccattctccatgcctcagggcgggcttgcggcgcttacagagaaagacccgctcgaaatcctcgcctaccagtacgacatagtctgcaacggtatagagctgtcgagcggcgcgatccgcaaccaccgcccggacatcatgtacaaggccttcgagatagccggatacggcaaggaggaggtggacgcgaggttcggcgccatgataaacgccctaagctacggcgccccgccccacggaggtatcgccccgggggtcgacagaataataatgctcttggccgacgaaccgaacattagggaggtgatagccttcccgatgaaccaaaaagcccaagacctgatgatgaaagcgccggctgagccaacggagaagcagctgaaagagttgcatatccgcgtggttgatatttaa

SEQ ID NO: 13668 - protein, 246 aa, Unknown
  Obtained from environmental sample
  DOMAIN (1)...(65): GAD domain
  misc_feature (1)..(246): Xaa is any amino acid
MVEFAQSVGSQGLAYLIWNEEGAKGPIAKFLDANSMAALTEALGAKPGDAAFFVCNDESAANKIAGEIRVKLGKELDIVEKGAFRFCWITYFPMFEYNEELKKIDFSHNPFSMPQGGLAALTEKDPLEILAYQYDIVCNGIELSSGAIRNHRPDIMYKAFEIAGYGKEEVDARFGAMINALSYGAPPHGGIAPGVDRIIMLLADEPNIREVIAFPMNQKAQDLMMKAPAEPTEKQLKELHIRVVDI

SEQ ID NO: 13669 - DNA, 429 bp, Unknown
  Obtained from environmental sample
  misc_feature (1)..(429): n is a, c, g, or t
gtggaattgacgttttacgagaagttcgacaatttgtattctttgaatataggaaatagtatgattatcagtgcaagtagaagaacagatattccagcatattattctgattggatgctcaacagaataaaggaacgctatgtttatgttcaaaatcctatgaatatacatcaaataagtaaaatatgtcttaaccccgaaactgttgactgcattgttttttggagcaaaaatccaaaaccaattattgacaaactcaagtctttttatgaatatgcttattattttcaatttacccttaacccatacgataaagacattgaaacaaatctacctccaaaaaatgaaataattgaaacgttcaaaaaactatcagacaaagtaggaccgcaaaaaaattatttggagatacgatccagttttacttaa

SEQ ID NO: 13670 - protein, 142 aa, Unknown
  Obtained from environmental sample
  misc_feature (1)..(142): Xaa is any amino acid
MELTFYEKFDNLYSLNIGNSMIISASRRTDIPAYYSDWMLNRIKERYVYVQNPMNIHQISKICLNPETVDCIVFWSKNPKPIIDKLKSFYEYAYYFQFTLNPYDKDIETNLPPKNEIIETFKKLSDKVGPQKNYLEIRSSFT

SEQ ID NO: 13671 - DNA, 666 bp, Unknown
  Obtained from environmental sample
  misc_feature (1)..(666): n is a, c, g, or t
ttggccgatgtgaattatattctgatggcctccggaagaggcaatatcaacaagataaaaaacccaacgacgcttgggcgtttgtcttacgcgcatgattttgtggtgttgccggaagacaacgttgtcgacgcgttgagagtcgggtattacgattacaggacgactgtcgcgcttttggaagatccggaaatgccttttgctcgcgcggaagccgacgtgaacacggtcgatacaaatcaacaaaacgataacgcggtcgatacggctcttgtcaacgatggcggtaacggcgggaatagcggtcaggcggtcaacgcaaaggttgttgataacgccgccaagcggttgaaagtcgagtggaagaagtacacgcccaacaagaggatcgcggcggttaccatgcccgacgacggctttttgagaatatcggaagttttctatccgggatggcgtatcaaggttaacggggcgccggtcaaatactaccgttcggacatggcttggatggccgttccgctaaaggccggcgattacgaggtggtcatggaaccgaaatcgctctacatgggcgtcgcgtctaaggtatcgttggcgttctcgttgattattgtcggaatcttgacgtatggatatgtacgcaagcggacgggcagggcggcgtaa

SEQ ID NO: 13672 - protein, 221 aa, Unknown
  Obtained from environmental sample
  misc_feature (1)..(221): Xaa is any amino acid
MADVNYILMASGRGNINKIKNPTTLGRLSYAHDFVVLPEDNVVDALRVGYYDYRTTVALLEDPEMPFARAEADVNTVDTNQQNDNAVDTALVNDGGNGGNSGQAVNAKVVDNAAKRLKVEWKKYTPNKRIAAVTMPDDGFLRISEVFYPGWRIKVNGAPVKYYRSDMAWMAVPLKAGDYEVVMEPKSLYMGVASKVSLAFSLIIVGILTYGYVRKRTGRAA

SEQ ID NO: 13673 - DNA, 666 bp, Unknown
  Obtained from environmental sample
  misc_feature (1)..(666): n is a, c, g, or t
atggactttcgggggatgggtccggcggtagtcaaacagctgttggacggcgcgttgattaaggacgcggccgatctgtatgatttgacggtggagaagctgttgacgttagagcgtttcgcggagaagtccgccgccaacatcgtggaggcgcttgagaagtctaaggcccgtccgttggacagattgattttcggcttggggataaggatggtgggggcttcgtcggcccgcgatttggcgggtacggttgacgatatttcggagttctacaagatggaagttgaggaattggaacggacagagggcgtcggttcgctcacggcgcagagcatcaggctgttttttgaccggtcggagaacgtggatatgattgagaggctaagggcggccgggctgaatatgaagggcggcaaggggcaaggcggcgaggtgtccggcagttttgcgggtaagactttcgtgttgacgggaacgctggagcgtcatacgcgggagcaagcgtccgaaatcatactgcgcggcggcggcaaggtgtcgtcgagcgtgagcaagaaaacggattacgtcttagccggttcggaggcggggtcgaagttagacaaagcgctgtcgcttggggtcagggtgataagcgaagaggagttcgaggggatgattaattaa

SEQ ID NO: 13674 - protein, 221 aa, Unknown
  Obtained from environmental sample
  DOMAIN (144)...(220): BRCA1 C Terminus (BRCT) domain
  misc_feature (1)..(221): Xaa is any amino acid
MDFRGMGPAVVKQLLDGALIKDAADLYDLTVEKLLTLERFAEKSAANIVEALEKSKARPLDRLIFGLGIRMVGASSARDLAGTVDDISEFYKMEVEELERTEGVGSLTAQSIRLFFDRSENVDMIERLRAAGLNMKGGKGQGGEVSGSFAGKTFVLTGTLERHTREQASEIILRGGGKVSSSVSKKTDYVLAGSEAGSKLDKALSLGVRVISEEEFEGMIN

SEQ ID NO: 13675 - DNA, 510 bp, Unknown
  Obtained from environmental sample
  misc_feature (1)..(510): n is a, c, g, or t
ttgaaaagtaaatcatatatatacccctcattgatcaatacccatgatcatttacagggaaattaccgtcctccggtaggtccaaaggcgggtaactactaccttacatggcagccatgggacaatgaccttaaagcttcagagttattcaaggaacgatccaatctcagcagagaggatctgtacgcactgtccggttacaagtgccttttttccggggtgactaccgtcaacgatcattttccgcaaaagttcaacagagggattctgcctactttgccgatccgggcattccttgaatacggccttgcccatgaatgttcttcctatgatcttaaatggggcgaccggatagagattgagcatgagcgggcggttaaaaacaagtgggctttcataacccacctgtgcgaaggttttgatgaagaatcaatgcacggcgttcagacgcttggaaaactcaagatactggacaggccactgccttcttgtccagtggatcgcttttag

SEQ ID NO: 13676 - protein, 169 aa, Unknown
  Obtained from environmental sample
  misc_feature (1)..(169): Xaa is any amino acid
MKSKSYIYPSLINTHDHLQGNYRPPVGPKAGNYYLTWQPWDNDLKASELFKERSNLSREDLYALSGYKCLFSGVTTVNDHFPQKFNRGILPTLPIRAFLEYGLAHECSSYDLKWGDRIEIEHERAVKNKWAFITHLCEGFDEESMHGVQTLGKLKILDRPLPSCPVDRF

SEQ ID NO: 13677 - DNA, 447 bp, Unknown
  Obtained from environmental sample
  misc_feature (1)..(447): n is a, c, g, or t
ttggcgtataatgatgcgatttctacctacagagagaccagggtgaaaactgcgagtcagggacagcttgtcatgatgctctacaatgaggcaataaaatgccttgatcggagcctggaattactgggcttaaataccggaggaaagaaaaaccccgggaatatcgaaaaaatctcaaaatatgtccttaaggcgcaggaaatcattacggagttgattgtttccctggattttgatcagggaggggatatcgcaaaaagccttttttccctttatacctggtttaacaaggagctcttcgaagccaacattaaacaggatatgcatagactgacatctgtgcgtaatcagctcaacgagcttcgaagcgcctgggctgaaattacggcaaaaaatatcccggaggctgtcggtaaaagcgctataggtgttaatatcgccggttag

SEQ ID NO: 13678 - protein, 148 aa, Unknown
  Obtained from environmental sample
  DOMAIN (3)...(132): Flagellar protein FliS
  misc_feature (1)..(148): Xaa is any amino acid
MAYNDAISTYRETRVKTASQGQLVMMLYNEAIKCLDRSLELLGLNTGGKKNPGNIEKISKYVLKAQEIITELIVSLDFDQGGDIAKSLFSLYTWFNKELFEANIKQDMHRLTSVRNQLNELRSAWAEITAKNIPEAVGKSAIGVNIAG

SEQ ID NO: 13679 - DNA, 822 bp, Unknown
  Obtained from environmental sample
  misc_feature (1)..(822): n is a, c, g, or t
atgatcgcgagagcagtatataatgattctataaaagctttaaatcagtgggtacatttagaaggctcagttacgggaacaccggcgtcaggaaataataacggtaatgtagtgtatctttcaggcggtgaaagcggcggacaacttgaaaataatgctgtcacaatatacattgcaaattttgttatgagtataagcgacagcactactcctatcgtaccgccgagttccaatctactgaccattggcggtaaaaaagacctcaaacctcagcttaacgccaatatgaccggaactgtaacatggtcttcaaacaactcattaatatctgttgataccaacggaaatgtaacttcaaacattacttctttcacaggctctgaaggaactcaaaaatatacaacaggcgctgcgacagtttcggcaacaattacagctacggctggcggtaatacccaaacgtttaatgtagttgcaactacagaagcgcaggaatacattatggatctgccgccgctaaaagaaaaattcccggcaaatatccttattggaaatattgccacaaccgtcgatgcangcgcgacaggaatcagtaatcaatcgttaattcgtcactttaacgcgcttacttcggaaaacgatatgaagccaagctcaatttcaaatggcaagagctcggaaggagtaatcagctatacatatactaacgcagatagatttgtaaatgcggcaagagcttcaggttttaaagttatcgaacatactttgctctggcacagtccaattcccaccctggcaacaaaacatggcaaacgccggtaa

SEQ ID NO: 13680 - protein, 273 aa, Unknown
  Obtained from environmental sample
  misc_feature (1)..(273): Xaa is any amino acid
MIARAVYNDSIKALNQWVHLEGSVTGTPASGNNNGNVVYLSGGESGGQLENNAVTIYIANFVMSISDSTTPIVPPSSNLLTIGGKKDLKPQLNANMTGTVTWSSNNSLISVDTNGNVTSNITSFTGSEGTQKYTTGAATVSATITATAGGNTQTFNVVATTEAQEYIMDLPPLKEKFPANILIGNIATTVDAXATGISNQSLIRHFNALTSENDMKPSSISNGKSSEGVISYTYTNADRFVNAARASGFKVIEHTLLWHSPIPTLATKHGKRR

SEQ ID NO: 13681 - DNA, 516 bp, Unknown
  Obtained from environmental sample
  misc_feature (1)..(516): n is a, c, g, or t
atgacagatcggccgagggcaagggagagagccaggacatttgttttgttcctgacggagactacggaagttttatcgaaaattacacgcggaaaaacatatccgcatggggacattatcgacatggaagggaaaaaaatcggcacacacaaggggcttatccgttatactatcgggcaaaggcggggactaggcgttgccgccaatgttcccatttatgtagcgagtaaatcaatcgccgccaatacagtaacgctggggacagacgacgctctttttggcaaatcgctctccgccaaagacatcaatcttatcgcttgcgaggacttaaaaaaaccgatgcgcgtaactgtaaaaacccgctacttgcaggctgaacaaaacgccacggcggaacaaacaggggaaaacagcctgcacattgaatttgactcgccccagcgagcgattacgccggggcaagcggttgtcatgtacgacggaaacattgtgataggcggcggaacaatagaatga

SEQ ID NO: 13682 - protein, 171 aa, Unknown
  Obtained from environmental sample
  DOMAIN (1)...(170): tRNA methyl transferase
  misc_feature (1)..(171): Xaa is any amino acid
MTDRPRARERARTFVLFLTETTEVLSKITRGKTYPHGDIIDMEGKKIGTHKGLIRYTIGQRRGLGVAANVPIYVASKSIAANTVTLGTDDALFGKSLSAKDINLIACEDLKKPMRVTVKTRYLQAEQNATAEQTGENSLHIEFDSPQRAITPGQAVVMYDGNIVIGGGTIE

SEQ ID NO: 13683 - DNA, 579 bp, Unknown
  Obtained from environmental sample
  misc_feature (1)..(579): n is a, c, g, or t
gtgccaaaaatcaaaatatgcgggttgttcagagagcaggatattgagtttgcaaacgaggcaaaaccggatttcataggttttgtttttgcaaagagccatcgacaaatcaattctgaaacagccgctttgtttaaaaaacggttaaattcgcaaataactaccgttggcgtgtttgtgaatgcggaaattccttctataattgaattgtataattctggcataataaatattgcgcaactgcacggtagcgaaagcgaagattatataaatactttaaaaaaaacttgcgatgttcctattataaaagctgtgaacatagagagtgcaaagcctgcaaatgcagactacctgctttttgataatggcaaaggcggaacgggcaaggcttttgattggaatttaattcctaaatgcgacaaggaatttttcttggctggcggcataaatttaaataacattaaagaagccgtaaagctgaacccttacggcatagatttgagcagtggggttgaaaatgaaaaaggcgaaaaagacagggagaaaataattgaagcctgtcgaattgtgaagggttaa

SEQ ID NO: 13684 - protein, 192 aa, Unknown
  Obtained from environmental sample
  DOMAIN (4)...(192): N-(5'phosphoribosyl)anthranilate (PRA) isomerase
  misc_feature (1)..(192): Xaa is any amino acid
MPKIKICGLFREQDIEFANEAKPDFIGFVFAKSHRQINSETAALFKKRLNSQITTVGVFVNAEIPSIIELYNSGIINIAQLHGSESEDYINTLKKTCDVPIIKAVNIESAKPANADYLLFDNGKGGTGKAFDWNLIPKCDKEFFLAGGINLNNIKEAVKLNPYGIDLSSGVENEKGEKDREKIIEACRIVKG

SEQ ID NO: 13685 - DNA, 522 bp, Unknown
  Obtained from environmental sample
  misc_feature (1)..(522): n is a, c, g, or t
ttgaaactggcgaccgaaaaccgacagccgatttggaggatttcaatgtctgatgccgcgctagcctacttgtcttccccgcacttggagcctgaactgaaggtcgagttggaggcgctggtgaacgccgcgaagaccagcgaaagcgcgaaggccgaactggatgacaggttttcgggctcgctctcctttggcaccgctggtctccgaggcatcatggcggcaggtctgcgccgcatgaacaggcccatcgtgaggcgcaccactatggcgctggcgcaggtcgccaagaagaacgcgcccactaagactagggccgtagttggtttcgacacgcgaatccaatccagcgattttgcgcacgaagcagcgcgggtactggctgccgccggattcgaggtctatctgggggatcgcccgctgcccacgccattcctgtgctttgccatgcggaggctgggggctgcctgcggcgtgatcatcacggcatcccacaaccccaaggagtacaacggctattag

SEQ ID NO: 13686 - protein, 173 aa, Unknown
  Obtained from environmental sample
  DOMAIN (61)...(173): Phosphoglucomutase/phosphomannomutase, alpha/beta/alpha domain I
  misc_feature (1)..(173): Xaa is any amino acid
MKLATENRQPIWRISMSDAALAYLSSPHLEPELKVELEALVNAAKTSESAKAELDDRFSGSLSFGTAGLRGIMAAGLRRMNRPIVRRTTMALAQVAKKNAPTKTRAVVGFDTRIQSSDFAHEAARVLAAAGFEVYLGDRPLPTPFLCFAMRRLGAACGVIITASHNPKEYNGY

SEQ ID NO: 13687 - DNA, 438 bp, Unknown
  Obtained from environmental sample
  misc_feature (1)..(438): n is a, c, g, or t
atgaacaggttttacaaaacaaaaaaatccagcgatccaaaaaaagaaacagcttggaagtggttcgccaagtacataaaacttcgggacgctatcaaaactacaggcgatgtgctttacgcaaaatgtatcacttgcggggaaattctacctatagaagacatggacgctggacacgggatagcgggtaggatgaattcagttttatttaatgaggatttagtccatgcccagtgccgtccatgcaacaggggcggcggcggtgaattgcagatgtacaaaagggtattaattgatatgtacggacaggacaaatgggactactggcagtctaccaaacatattgcagtacagtatacgcagtttgactatgagcagatagcgaaaacatatcggatgaaagttaaagacatatatattagaaagggggaattatga

SEQ ID NO: 13688 - protein, 145 aa, Unknown
  Obtained from environmental sample
  misc_feature (1)..(145): Xaa is any amino acid
MNRFYKTKKSSDPKKETAWKWFAKYIKLRDAIKTTGDVLYAKCITCGEILPIEDMDAGHGIAGRMNSVLFNEDLVHAQCRPCNRGGGGELQMYKRVLIDMYGQDKWDYWQSTKHIAVQYTQFDYEQIAKTYRMKVKDIYIRKGEL

SEQ ID NO: 13689 - DNA, 813 bp, Unknown
  Obtained from environmental sample
  misc_feature (1)..(813): n is a, c, g, or t
gtgattacgaagatccctaccggttataatagtagtggtactagtattagtaatacnttcggcgttttaaccagcattaacgtgaaaattcaggggccgggccaaatgactttaccagtaggtactaacggcagcttgctatatatcttctcttcccagaacatcgttatccgcgacattgtttttaaagggcatggaagtaataatgcaccgttgatttatatgaacggcactaactgccgcgtaaccatggagggggatacttcggtaatcaacaataccggcggcagttctggtaacggcggcggcggggtgtatgttgccacaggcaccttaatcatgacaggcgggacaatctcgggcaataccgccagtgccacttacggcggcgccggcggcggggtgtatgttagtagtagtggaaccttcataatgacaggcggtataatctcaggtaataccgccgtcaccagtggcggcggggtgagtgttagcggaaccttcaaaatgacaggcgggacaatctcgggcaatatcgccaatggcaccagcagcagcggctacggcggcggcggggtgagtgttagttatgccagcggtaaattcctcatggtgacagggacaatttacggcaatgacacaggcgacccaaacttagataatacgacaaaggggacaggagcggccttatacaaaagcaacagcggcactgccgaacgcggaaactttagcgtccccggagacacagaaagcgtatggataccaagtgacggcggcgctcttaataacacaaacggcacgatcaatgtttaa

SEQ ID NO: 13690 - protein, 270 aa, Unknown
  Obtained from environmental sample
  misc_feature (1)..(270): Xaa is any amino acid
MITKIPTGYNSSGTSISNTFGVLTSINVKIQGPGQMTLPVGTNGSLLYIFSSQNIVIRDIVFKGHGSNNAPLIYMNGTNCRVTMEGDTSVINNTGGSSGNGGGGVYVATGTLIMTGGTISGNTASATYGGAGGGVYVSSSGTFIMTGGIISGNTAVTSGGGVSVSGTFKMTGGTISGNIANGTSSSGYGGGGVSVSYASGKFLMVTGTIYGNDTGDPNLDNTTKGTGAALYKSNSGTAERGNFSVPGDTESVWIPSDGGALNNTNGTINV

SEQ ID NO: 13691 - DNA, 807 bp, Unknown
  Obtained from environmental sample
  misc_feature (1)..(807): n is a, c, g, or t
atggctgatttggattttgagggcttatggaaagaaaccctcgtccaactgcggaactacctaggggaggaggagttcgcnggttggttttcggatatgaaatacctgcgttgttcatcaacagatgctggaaacagcataatcgtaggaattcnctctgcgtttcaccgagacaaggtgagttttcattataaaaagcaaattacctcgatttttaagaaaatttcaggtcaagatattgattttgaaatggaagtcatcggaaaaaccgcaaaaagtcctgaaactcagcaaaatcagcaaaaaaatgacgaacctgctcccgcaacacaagaaaaaactcaaaaagtaaaggaaaaaagggggcagcatcctcaaatgagagatgattatacctttgatcgctatgttgtcggggaaaataacaagttcgccgcaaacgccgcccacgcaataagcaaaaacccgggaaaagcgcacaatcccttcctgatttacggcggcgtagggcttggaaagacccatttaatgcaggcaatcggaaatcatatccatgaaaacacgggcagccgtgtaatttgcatcacttccgaagaatttttgaacaaataccttgaagggcttaaagacggcactatgaatatcttcaaaaacgaatatcggcaaaccgatgttttattaattgacgatatccaattttttaccgacaaacccggcgtacaagaagaattgtttcatactttcaacgcattaagggacgcaaagaaacaacttgtttttacctgtgaccgtccgatatcggactaa

SEQ ID NO: 13692 - protein, 268 aa, Unknown
  Obtained from environmental sample
  DOMAIN (127)...(268): Bacterial  dnaA  protein
  misc_feature (1)..(268): Xaa is any amino acid
MADLDFEGLWKETLVQLRNYLGEEEFAGWFSDMKYLRCSSTDAGNSIIVGIXSAFHRDKVSFHYKKQITSIFKKISGQDIDFEMEVIGKTAKSPETQQNQQKNDEPAPATQEKTQKVKEKRGQHPQMRDDYTFDRYVVGENNKFAANAAHAISKNPGKAHNPFLIYGGVGLGKTHLMQAIGNHIHENTGSRVICITSEEFLNKYLEGLKDGTMNIFKNEYRQTDVLLIDDIQFFTDKPGVQEELFHTFNALRDAKKQLVFTCDRPISD

SEQ ID NO: 13693 - DNA, 918 bp, Unknown
  Obtained from environmental sample
  misc_feature (1)..(918): n is a, c, g, or t
ttgccgtctatttgcggttattgcgatttttgcgctatgcctgtgccggaacgtgtgcatagcgaatacgtggatttgctcttgcaggaattaaaattcagagcagaaagcggattgaaaaattttgaaacggtgtatttgggcggaggctcgccatctgctttgaggccagagaacttgcgaaagttgctggctgggttgcaagagcagggtttgcaagcggaggaattaaaagagttttcgatggagtggaaccctgagcaggttagcgaagagcgtatagacgtagctttggaatttggaataaatcgctttagccttgggattcaaagcctggatgacggcttgcttaaaatgctcggcaggcagcactgtgcaaaagaagcacttgatgcttttgaaaaactgaatgaaaaatttaaaacaggcaatgcggatttaatgttttgcttgccaaaccaaagcacggagaattttttgagcgatgtgcaaacgctggtagaccaaagagcaaagcacataagtttttacggactgcttttaaaaaaaaagaacaaacttcccccccaacccgaagacctataccccgaaatgtatttaaaggcaacggaaattttgagcaaagctgggttgcataggtacgaggtttccaattttgcaatgccaagccacgagagcatacataacacggtttactggaaaagaggcgagtatctaggggtgggtccgtctgcgcacagctacctgggcggagttcgcagctatgcagacgggaaatacgtcccttggaaaaaatgggttttgagtggttgcccgcaaagtggcttaactttagatattccaagcgcggaaggcagggaaatagaagccatatggctatctttgagaacagggagggtttgtcgcttanaaatatga

SEQ ID NO: 13694 - protein, 305 aa, Unknown
  Obtained from environmental sample
  DOMAIN (1)...(163): Radical SAM superfamily
  misc_feature (1)..(305): Xaa is any amino acid
MPSICGYCDFCAMPVPERVHSEYVDLLLQELKFRAESGLKNFETVYLGGGSPSALRPENLRKLLAGLQEQGLQAEELKEFSMEWNPEQVSEERIDVALEFGINRFSLGIQSLDDGLLKMLGRQHCAKEALDAFEKLNEKFKTGNADLMFCLPNQSTENFLSDVQTLVDQRAKHISFYGLLLKKKNKLPPQPEDLYPEMYLKATEILSKAGLHRYEVSNFAMPSHESIHNTVYWKRGEYLGVGPSAHSYLGGVRSYADGKYVPWKKWVLSGCPQSGLTLDIPSAEGREIEAIWLSLRTGRVCRLXI

SEQ ID NO: 13695 - DNA, 879 bp, Unknown
  Obtained from environmental sample
  misc_feature (1)..(879): n is a, c, g, or t
gtggagggccgggtggcggaagtttccggaggcccggtcatcaccatgtatgaatacgaaccggccccgggcatcaagatatccagggtggccgggctggccgaagacctggccatggccatgaaagccaagtccatccgggtggccgggcatttgcctggcaagggcgccatcggcattgaaatacccaatctgacccgtttgcccgtttccttccgccaggtggtggagagcccggccttccgccggtcaaattccttattgactttgagtctgggggtggacattctgggcgaacccgtggtggccgacctggcggtcatgccccacctcctcgtcgccggggccaccggcaccggcaagtccgtggccctggccgccataatcatgtccatactgtacaaggctccgccggaccaggtccgcctcctgatgatagaccccaagagggtggaattctctttctaccgggatatcccccacctcatatacccggttctgaccgaaccgaccgaggccagcctggccctgaaatgggccgtggccgagatggagaaccgctaccggctgctggctgaaatggaagtccgccatatcgacacttacaatgaaaaagtgcgggccgggcggaagaaaaagcgccgggcggaagatgacgaagccccccgggaactgccttacctggtcatcatcatagacgaactgggcgacctgatgaccgtagcgcccaaggaagtggaagtcaatatcacccgcttgggccaaaaagcccgggccgccggcatccacctcatactggccacccagcgccccagcgcggctgtaataaccggcaccatcaaaatcaaccttctggccctcggccaatctgatcactga

SEQ ID NO: 13696 - protein, 292 aa, Unknown
  Obtained from environmental sample
  DOMAIN (71)...(273): FtsK/SpoIIIE family
  misc_feature (1)..(292): Xaa is any amino acid
MEGRVAEVSGGPVITMYEYEPAPGIKISRVAGLAEDLAMAMKAKSIRVAGHLPGKGAIGIEIPNLTRLPVSFRQVVESPAFRRSNSLLTLSLGVDILGEPVVADLAVMPHLLVAGATGTGKSVALAAIIMSILYKAPPDQVRLLMIDPKRVEFSFYRDIPHLIYPVLTEPTEASLALKWAVAEMENRYRLLAEMEVRHIDTYNEKVRAGRKKKRRAEDDEAPRELPYLVIIIDELGDLMTVAPKEVEVNITRLGQKARAAGIHLILATQRPSAAVITGTIKINLLALGQSDH

SEQ ID NO: 13697 - DNA, 618 bp, Unknown
  Obtained from environmental sample
  misc_feature (1)..(618): n is a, c, g, or t
gtgatcagattggccgagggccagaaggttgattttgatggtgccggttattacagccgcgctggggcgctgggtggccagtatgaggtggatgccggcggcccgggctttttggcccaagcgggtgatattgacttccacttccttgggcgctacggtcatcaggtcgcccagttcgtctatgatgatgaccaggtaaggcagttcccggggggcttcgtcatcttccgcccggcgctttttcttccgcccggcccgcactttttcattgtaagtgtcgatatggcggacttccatttcagccagcagccggtagcggttctccatctcggccacggcccatttcagggccaggctggcctcggtcggttcggtcagaaccgggtatatgaggtgggggatatcccggtagaaagagaattccaccctcttggggtctatcatcaggaggcggacctggtccggcggagccttgtacagtatggacatgattatggcggccagggccacggacttgccggtgccggtggccccggcgacgaggaggtggggcatgaccgccaggtcggccaccacgggttcgcccagaatgtccacccccagactcaaagtcaataa

SEQ ID NO: 13698 - protein, 205 aa, Unknown
  Obtained from environmental sample
  misc_feature (1)..(205): Xaa is any amino acid
MIRLAEGQKVDFDGAGYYSRAGALGGQYEVDAGGPGFLAQAGDIDFHFLGRYGHQVAQFVYDDDQVRQFPGGFVIFRPALFLPPGPHFFIVSVDMADFHFSQQPVAVLHLGHGPFQGQAGLGRFGQNRVYEVGDIPVEREFHPLGVYHQEADLVRRSLVQYGHDYGGQGHGLAGAGGPGDEEVGHDRQVGHHGFAQNVHPQTQSQ

SEQ ID NO: 13699 - DNA, 570 bp, Unknown
  Obtained from environmental sample
  misc_feature (1)..(570): n is a, c, g, or t
ttgatggccgagtgttgtgatgtgctgctctcattcccttcattactacttgcgttcctctttgtaaccgctatgggacggggaataacaagcgcggtgatggcgctgggaattatttatgtgccgatgattacccgcctgatcagatcgctcactttggttgaaaaaaataaaacttatgttgaagcggcggagtcgattggcttttccagaccgtacattttgttccgccatattctgccaaactgcgtttataccatgctggtacagcttaccctcgatctggcttacgcgattctggacttggcggcgttaagttttatcggtcttggggtaagtccccccacggctgactggggagccatgttacaggaaggaagaaattttctgctaatgagtcctctccttgccctcgctcccggagccgccattgttgttacggtaattagcctgaatattttcagtgactgtataactcagtaccttgatccacaggggagggttcttccttcttttgagaaaattgaaaaacgcaaaggcataatcaggagtgaaatcaatggaaactga

SEQ ID NO: 13700 - protein, 189 aa, Unknown
  Obtained from environmental sample
  DOMAIN (1)...(168): Binding-protein-dependent transport system inner membrane component
  misc_feature (1)..(189): Xaa is any amino acid
MMAECCDVLLSFPSLLLAFLFVTAMGRGITSAVMALGIIYVPMITRLIRSLTLVEKNKTYVEAAESIGFSRPYILFRHILPNCVYTMLVQLTLDLAYAILDLAALSFIGLGVSPPTADWGAMLQEGRNFLLMSPLLALAPGAAIVVTVISLNIFSDCITQYLDPQGRVLPSFEKIEKRKGIIRSEINGN

SEQ ID NO: 13701 - DNA, 870 bp, Unknown
  Obtained from environmental sample
  misc_feature (1)..(870): n is a, c, g, or t
ttggggcttcctcttttgtatatcgccatggcgcccatgattaaatggatcagccttcccttccctaaagccattgcgccaatgcattcccccctgatatacggccttgtggaactggcgctggttatgcctattataatcgccggttaccggttttataccgttggcttcaaaaaccttctgcgccgcagccctaacatggattcgctcatcgcggttgggacaacggcggcggttgtttacagcgtttataatctgttccggattgccggaggggatcatcacgcagtagacgctttgtattttgaaaccgcgggcgtgatcatcgccctgatccttctgggcaagtcgcttgaggcggtgtccaaaggccgcacaagcgaggcgattaagaaacttatgggccttgcgcccaagacggccatcattttcgaaaacggggaagaaaaggaaatccccattaaagaggtaatgcccggcgatattatcgtggtaaagccgggcgcgaaaatcccggtggacggcctggtaaccgctgggcaaagcgcggttgacgagtccatgctcaccggagaaagcatgccggttgacaagaagcccggcgatccggtttacgcggctactattaacagtaacggcgttatccgctttagggcggaaaaggtcggggacgaaaccgcgctggcgcagatcatcaagctgggtgaagacgcccaaagctccaaagcgccgattgcgcaaatggcggacattgtggccggctattttgtgccggttgtctgcgccatcgcgctttgcgcgggtatcgcgtggttcattgcggcatccataggtgttgtaagttttgcctcacgggaaaacccgtactga

SEQ ID NO: 13702 - protein, 289 aa, Unknown
  Obtained from environmental sample
  DOMAIN (107)...(287): E1-E2 ATPase
  misc_feature (1)..(289): Xaa is any amino acid
MGLPLLYIAMAPMIKWISLPFPKAIAPMHSPLIYGLVELALVMPIIIAGYRFYTVGFKNLLRRSPNMDSLIAVGTTAAVVYSVYNLFRIAGGDHHAVDALYFETAGVIIALILLGKSLEAVSKGRTSEAIKKLMGLAPKTAIIFENGEEKEIPIKEVMPGDIIVVKPGAKIPVDGLVTAGQSAVDESMLTGESMPVDKKPGDPVYAATINSNGVIRFRAEKVGDETALAQIIKLGEDAQSSKAPIAQMADIVAGYFVPVVCAIALCAGIAWFIAASIGVVSFASRENPY

SEQ ID NO: 13703 - DNA, 636 bp, Unknown
  Obtained from environmental sample
  misc_feature (1)..(636): n is a, c, g, or t
gtgctggcccagccctgcatgaccgacgtatgggaaaagaaattttacggcgaaaaccccgtgttcatgctcgaccccaacgacaagtccaacgagccggtgcccgacaaacaccagggcgcggtaaaacgctggcccttcctgcccccgtacctgcgggatacctttataaaagccttcagcaaggaagccatgaaagaccccgctcacagggttctggaaaaagactgggtaaaagtctttgtccgcatgaggtcggaaacatggaagtgcccctcctgcggcgaggtatacttcgccgatcccgtaacgcctaacccctgcccctcatgcgggaagccccacgcctttcccttctatataaaaacatccagcggctataacgtgcccgcccatcagcggacagtcctctaccagtgccatacaaccaccgacgccgccggagaagactttgacattaaaaccggggaaatgatggtcaaaggcgacgagatcggattaaagaacatttccagcgaacgctggtcacgcatcaaggacggcgtacaggcgccagtagaacccggacgcgccgcaaggctggaaaaaggcgtaaaactggattttggcagaggcgcctctgcggagattatatga

SEQ ID NO: 13704 - protein, 211 aa, Unknown
  Obtained from environmental sample
  misc_feature (1)..(211): Xaa is any amino acid
MLAQPCMTDVWEKKFYGENPVFMLDPNDKSNEPVPDKHQGAVKRWPFLPPYLRDTFIKAFSKEAMKDPAHRVLEKDWVKVFVRMRSETWKCPSCGEVYFADPVTPNPCPSCGKPHAFPFYIKTSSGYNVPAHQRTVLYQCHTTTDAAGEDFDIKTGEMMVKGDEIGLKNISSERWSRIKDGVQAPVEPGRAARLEKGVKLDFGRGASAEII

SEQ ID NO: 13705 - DNA, 336 bp, Unknown
  Obtained from environmental sample
  misc_feature (1)..(336): n is a, c, g, or t
ttgatggaaatgatttgtttttccgagaattatgttgtatcattaaaaggaataccaaataaaggaggtattatgggagccggtgtcacaataatgattgtagatgactccagaataatgaggaataccgtaaagggcgtattttccggagtagattctgcatgtaatttcattgaagcaaataacggagaagaagcgcttgcgctattggaaactcagcctactgatttagttctgcttgactggaatatgcctaaactatcaggcattgattttcttaaacaagttagagcaatggataaatataaagagcttcccggccgatctgatcattga

SEQ ID NO: 13706 - protein, 111 aa, Unknown
  Obtained from environmental sample
  DOMAIN (29)...(110): Response regulator receiver domain
  misc_feature (1)..(111): Xaa is any amino acid
MMEMICFSENYVVSLKGIPNKGGIMGAGVTIMIVDDSRIMRNTVKGVFSGVDSACNFIEANNGEEALALLETQPTDLVLLDWNMPKLSGIDFLKQVRAMDKYKELPGRSDH

SEQ ID NO: 13707 - DNA, 552 bp, Unknown
  Obtained from environmental sample
  misc_feature (1)..(552): n is a, c, g, or t
atgcaaaattgtacagcctgccgtttatgcgaaacaagaaaaaatatcgtagccggagaaggagcgccctttcctctggttatggtaatcggcgaagctcctggcgcggatgaagacgcctgcggaaggccctttgtgggtaaggccggccagcttcttgataaaatgcttgggtcaatcggcctgtccagggaaagcaactgttttatcgccaatattgttaaatgccgcccgcctgagaaccgtgaccctcagccggatgagatcgcagcctgcgccggtttccttgaacatcagatacaatcccttaaaccccgctttatactctgtgtcggcagattgtcttcgcaaaccctgctccatagcgcggagccggttgggaaactccggggaaaatttatggattttgagacagcaggcatgataataccgcttatcgccacttatcatcccagcgcccttctgcgtaacgagaacctaaagcgcccggcatgggacgaccttaaattgcttcgctcggcgattgcgcctgtggcgggcgaggatgaatag

SEQ ID NO: 13708 - protein, 183 aa, Unknown
  Obtained from environmental sample
  DOMAIN (18)...(173): Uracil DNA glycosylase superfamily
  misc_feature (1)..(183): Xaa is any amino acid
MQNCTACRLCETRKNIVAGEGAPFPLVMVIGEAPGADEDACGRPFVGKAGQLLDKMLGSIGLSRESNCFIANIVKCRPPENRDPQPDEIAACAGFLEHQIQSLKPRFILCVGRLSSQTLLHSAEPVGKLRGKFMDFETAGMIIPLIATYHPSALLRNENLKRPAWDDLKLLRSAIAPVAGEDE

SEQ ID NO: 13709 - DNA, 921 bp, Unknown
  Obtained from environmental sample
  misc_feature (1)..(921): n is a, c, g, or t
gtgtcggggccaaggagcgcggtgttcgcgccctgcctgaatctggggctggttatcatagacgaggagcatgacggttcgtacaaatccggcaatacaccccgctaccacgcccggcagaccgcgatacgccgctgtaccgttgaaggggcaaaactcgtgatgggttcggcgactccttcggccgaggcatggaaacttatggccgagggaaaaatcaaaaggctggacctttcattgcgccttgccggagggagcctgcctgaaataaaaccggtaagcctggaaaaaaccgaaggctgtctgaccagggagcttaaagaggaaattcgcctaacggcgcagatggggcggcaaacgattcttttcctgaaccgccggggtttcgcccacttttattattgcccttcatgcggttatgagcagaagtgcaaacgctgttccgtggcgctgacatggcataaaaacaaaaaccgggccttgtgccattactgcggctattcggaacctcctgttgatacctgtccgaattgcggttccctggaagcaggttacaggggcttcggcacggaaatggtggaggaggaggtcaggcgtacttttccgaatctgcgggtacgccgtatagacgcggatgcggccgcgaaaaaaggaattctggaagatactataagtttgtttaaagccggtttgatagacgtgctgcttggaacacagatggtcgccaagggcctgaactttcccggcgtgcgtctcgtgggcgtagtctttgccgacacgggtctgcatatgccggacttccgcgcggcagagcgtaccttttcgctgattgtgcaggtagccggcagggcagggcggtattttccggacggcaaggttatagtccagaccttccgatgctcgtgccgctcggccatctga

SEQ ID NO: 13710 - protein, 306 aa, Unknown
  Obtained from environmental sample
  DOMAIN (198)...(288): Helicase conserved C-terminal domain
  misc_feature (1)..(306): Xaa is any amino acid
MSGPRSAVFAPCLNLGLVIIDEEHDGSYKSGNTPRYHARQTAIRRCTVEGAKLVMGSATPSAEAWKLMAEGKIKRLDLSLRLAGGSLPEIKPVSLEKTEGCLTRELKEEIRLTAQMGRQTILFLNRRGFAHFYYCPSCGYEQKCKRCSVALTWHKNKNRALCHYCGYSEPPVDTCPNCGSLEAGYRGFGTEMVEEEVRRTFPNLRVRRIDADAAAKKGILEDTISLFKAGLIDVLLGTQMVAKGLNFPGVRLVGVVFADTGLHMPDFRAAERTFSLIVQVAGRAGRYFPDGKVIVQTFRCSCRSAI

SEQ ID NO: 13711 - DNA, 903 bp, Unknown
  Obtained from environmental sample
  misc_feature (1)..(903): n is a, c, g, or t
gtgcaggacatccagggcataatccacctgattccggaaatggccctggaaaaactgaaattcatgatctccggccaggtaagccacggcggtgcgctgccgctggtaaagtacgaccacaaccccggtcacgaagacaagccggaagacgtttcctaccgcacgggaacgggacacccttcctaccgcgccgatgacgcgctgtggctgttccccacggtatggaaatacatcaccgaaaccggcaataccgccctgcttgacgaggaaatcccctacgccgatagcggtacagacactctctataaacacctggacaaggcgattgatttttcgctgaatcatttgggcatacacggcttgcccgccggactgcacgccgactggaacgactgtctgcgtcttggtgccaacggtgtatcggtatttgttgcgttccagttgtattacgcgtttgaaattatgatccgttgtgcgaagcacaagggtgatgccgccacggaaatgcgcatgaatgaactgaagaaaaaattcggtgcgattatcgaggaacgctgctggaataccgatcgctttgtgcggggaatcaccgagcatgatcaagtggtgggcaagcccgacgatccggaagccagcctctggctcaaccctcaaagctgggcaattatcagcggctttgccccgcaaaagcgcagcaatgcgattatggatctggtttacaaacagctaaacaccaaatacggagcgcggcttatggccccctcgtaccgccgccatgcatttgacggggctttggccctgttgttcaacccttccaccaaagaaaacggcgggatctttttgcaaaccccagggctggctgatttggcggaagcactgtgggccgggcggcggccgcgataa

SEQ ID NO: 13712 - protein, 300 aa, Unknown
  Obtained from environmental sample
  misc_feature (1)..(300): Xaa is any amino acid
MQDIQGIIHLIPEMALEKLKFMISGQVSHGGALPLVKYDHNPGHEDKPEDVSYRTGTGHPSYRADDALWLFPTVWKYITETGNTALLDEEIPYADSGTDTLYKHLDKAIDFSLNHLGIHGLPAGLHADWNDCLRLGANGVSVFVAFQLYYAFEIMIRCAKHKGDAATEMRMNELKKKFGAIIEERCWNTDRFVRGITEHDQVVGKPDDPEASLWLNPQSWAIISGFAPQKRSNAIMDLVYKQLNTKYGARLMAPSYRRHAFDGALALLFNPSTKENGGIFLQTPGLADLAEALWAGRRPR

SEQ ID NO: 13713 - DNA, 516 bp, Unknown
  Obtained from environmental sample
  misc_feature (1)..(516): n is a, c, g, or t
atgagccagggaggatgcatgagccggaatcgcacgccgatcattgattttcacatccacacggcgccgcatgagcaggatgcgccgggctatgaaaacctgctcaaggaaaccctcggatcggctgaaacagtgcgagaattcaagcggcgctatgccgatccggcggacatggttgccaaactccgcgcgtatggcgtggattatggcgtggcgctggccgaatacgcgccgctggccaccggctactgcacaaacgacatgctggaaaactactgccggggacacaaagaactgctgcccttctgcagcttcaacccttttgaggagccggacatgcccggcgccctgcgccgcctgcacggccggngattcaagggcgtcaaactctacccttncctacanccactacatctcaacgatgccgggatgtatcccctgtacggcgcggcccaagaactgggcctgcccatcctcgtgcataccggcacgtcggtcttcaaaatacccgtttga

SEQ ID NO: 13714 - protein, 171 aa, Unknown
  Obtained from environmental sample
  misc_feature (1)..(171): Xaa is any amino acid
MSQGGCMSRNRTPIIDFHIHTAPHEQDAPGYENLLKETLGSAETVREFKRRYADPADMVAKLRAYGVDYGVALAEYAPLATGYCTNDMLENYCRGHKELLPFCSFNPFEEPDMPGALRRLHGRXFKGVKLYPXLXPLHLNDAGMYPLYGAAQELGLPILVHTGTSVFKIPV

SEQ ID NO: 13715 - DNA, 900 bp, Unknown
  Obtained from environmental sample
  misc_feature (1)..(900): n is a, c, g, or t
atggctgacgatctaaacgccggaccaaaggcaaaccgcgagttcaaaaactccgttttcacgctcctattcaacgaagaggaagccatccgcgatatttccggagccgtcggtgcaatgttgggtaaagaaatcagccccaatacgcctataaagaagactactctccaaaacgcgctattaggcggcaaactcaatgacttgtcgtttgtactggatgataagctcattgtattaatagaacaccaatcgacaatcaataaaaatatgccgttgcgtatgttgcactatatctgcgaaatatacaatcacctatacgagaagaaagatttatataggaaaaagaagatacttatccccaaaccggtattcattgtcctctacaacggtgaagaagatataaaggattttgaagaatacctattgtctgatttattcaaagactttgacatatcaaaagaacagccatacttggaattgagagtacaggtacgcaatatcaacaaaggccacagcgcggaaatcgtaaagcaaagcccgctactccttgattacgtggcatttgtcgaagaggtacgcgaagtcaacaaagaagagggcatgacccccgaactggcgatggaaaaggccatagaaaattgcataaaaaaaggaatattaactgtttttttaacccgccataaagaggaggttatgaaaatgctcgtcgcagaatgggattacgacttagatcgggaagtcgcaagagacgaaggccgagaggaaggccgagaggaaggccggaccgaagaaacggcaaacaacattaaggacttgtaccgaataggtgttagcattgagaccattgctaaagcatttggcctctcagaacacgatgtcaaagatattttgggcttgtag

SEQ ID NO: 13716 - protein, 299 aa, Unknown
  Obtained from environmental sample
  misc_feature (1)..(299): Xaa is any amino acid
MADDLNAGPKANREFKNSVFTLLFNEEEAIRDISGAVGAMLGKEISPNTPIKKTTLQNALLGGKLNDLSFVLDDKLIVLIEHQSTINKNMPLRMLHYICEIYNHLYEKKDLYRKKKILIPKPVFIVLYNGEEDIKDFEEYLLSDLFKDFDISKEQPYLELRVQVRNINKGHSAEIVKQSPLLLDYVAFVEEVREVNKEEGMTPELAMEKAIENCIKKGILTVFLTRHKEEVMKMLVAEWDYDLDREVARDEGREEGREEGRTEETANNIKDLYRIGVSIETIAKAFGLSEHDVKDILGL

SEQ ID NO: 13717 - DNA, 816 bp, Unknown
  Obtained from environmental sample
  misc_feature (1)..(816): n is a, c, g, or t
gtgctggatacgcttaccctttccgtattatggcccggacctgccggctacaacaggcgcgagtcaaaaaaagaaagcaaagatttttaccggcagtatccttccatgggaataggcataaattttttaatcccgtccggcgggggcagcagaaagccgggcgaaaggcacccttccgacggcgacataacatttgacgccgcgttcaagcccctgtacttcgacgtttacgcgacaggcgctggtataacatggtacgcgccttacagggacgatctgccgcccaatatcattgttgactatccccagactcaatatatttctcccaactatgacgggaaacaggacaatcttttatttcctgtaagaataatcgacgaccattacgtgacaagctggatcatgacaataaaagactcaaacggcaatacagtccgcacgtacgaaaacaaggatcgccgttttgaaatgatggacgtaagggatatttacggacgttactatctggaaaaaaaaggcgttgatgttccgtctgccatgcggtgggacggcgtatttaacacaggcgatatcgggccggacggaaaatactatttctccataagcgcctcggacgaaaacggcaatacaggatacagcccaagctacgaggtaataataaagaacaccgcgccgcaagttaccatagacaacataaatcttaatgatcgtgtttttgatccttcaagcgggaacagaaggtctgtcaatattgtcccgcacggtaccgtagaagacaaatgggaaagcggcatttngacgccgaaggaaaattga

SEQ ID NO: 13718 - protein, 271 aa, Unknown
  Obtained from environmental sample
  misc_feature (1)..(271): Xaa is any amino acid
MLDTLTLSVLWPGPAGYNRRESKKESKDFYRQYPSMGIGINFLIPSGGGSRKPGERHPSDGDITFDAAFKPLYFDVYATGAGITWYAPYRDDLPPNIIVDYPQTQYISPNYDGKQDNLLFPVRIIDDHYVTSWIMTIKDSNGNTVRTYENKDRRFEMMDVRDIYGRYYLEKKGVDVPSAMRWDGVFNTGDIGPDGKYYFSISASDENGNTGYSPSYEVIIKNTAPQVTIDNINLNDRVFDPSSGNRRSVNIVPHGTVEDKWESGIXTPKEN

SEQ ID NO: 13719 - DNA, 705 bp, Unknown
  Obtained from environmental sample
  misc_feature (1)..(705): n is a, c, g, or t
atggaaaaattgaaccacggccattcggccatagctaaagggcagacaaccagggtcttgatctacgtttttctcgttgttaccaccttcacaatgctgattccttttgcgtggatgctctcctcttcgctgaaatttaacaaagacgtatttacctttcccatgcaatggattccaaaagaaccacgctgggcaaattattcaataatctggactaaaattcctctgggaaaatttatactaaacacctttaagctcgcgattattattaccgcgcttcagcttttaagttccagtttcgccgcttacgcttttgccaagctgcgctttcccggaaggcggggcctctttcttgggtacatagcgaccatcgctgtaccctggcaggcctacatggttccgcagtttattatgatgagtgcaatggggctcaacaacacccacatggcgatgatctgtttgcaggcattctccgctttcggggtctttatgatgaaacagttctatgagagcgttcccgacgaactcagggaagccgcccgcatcgacggcctttcggaatacggcatctggtggaagataatgctgcccctgtcaaaaccggcaatctcaaccttgatcatcataacatttgtaaatacctggaacgatttcctcggccccatgatctaccttacaaggacagatctaaaaccattcagatag

SEQ ID NO: 13720 - protein, 234 aa, Unknown
  Obtained from environmental sample
  DOMAIN (76)...(234): Binding-protein-dependent transport system inner membrane component
  misc_feature (1)..(234): Xaa is any amino acid
MEKLNHGHSAIAKGQTTRVLIYVFLVVTTFTMLIPFAWMLSSSLKFNKDVFTFPMQWIPKEPRWANYSIIWTKIPLGKFILNTFKLAIIITALQLLSSSFAAYAFAKLRFPGRRGLFLGYIATIAVPWQAYMVPQFIMMSAMGLNNTHMAMICLQAFSAFGVFMMKQFYESVPDELREAARIDGLSEYGIWWKIMLPLSKPAISTLIIITFVNTWNDFLGPMIYLTRTDLKPFR

SEQ ID NO: 13721 - DNA, 594 bp, Unknown
  Obtained from environmental sample
  misc_feature (1)..(594): n is a, c, g, or t
ttgatcagatcggccgagcggaggagttatcctggactcgctcttgaaaccatcggcgccgccgccggggaggtaagcgaggaggagcgccgggcgcactacgaggccaataaggggcgctacaaggatgccgagcgagcgcgggcaagccacatagtcttcgagctggatccaaccgcctccgattcgcaggttcgggcggccattgagaaggccggtgaggtggcggcaaaggcgaggggcggggcggacttcgacgcgctcgtaaaggagcactcgcccgtcggcggcggcgacatcggctggttcaagagcggcgacctggtctccgacctggagagaaagatcttctccatgaagaaaggcgacataagcgacccggtgccgagcggcatgggcatacacataatcaaaaagacggacgaaaaggcgccgcgccagctggagtacgcggaggcggaagccggtatacgggcggcccttgaggataagaaaaaggcggaaaggataaacgcctacgtggacagcctgataggcgccgcggacgtaaagtacatagacaccacgctggtaatgagggattcggcgcgctga

SEQ ID NO: 13722 - protein, 197 aa, Unknown
  Obtained from environmental sample
  DOMAIN (51)...(141): PPIC-type PPIASE domain
  misc_feature (1)..(197): Xaa is any amino acid
MIRSAERRSYPGLALETIGAAAGEVSEEERRAHYEANKGRYKDAERARASHIVFELDPTASDSQVRAAIEKAGEVAAKARGGADFDALVKEHSPVGGGDIGWFKSGDLVSDLERKIFSMKKGDISDPVPSGMGIHIIKKTDEKAPRQLEYAEAEAGIRAALEDKKKAERINAYVDSLIGAADVKYIDTTLVMRDSAR

SEQ ID NO: 13723 - DNA, 663 bp, Unknown
  Obtained from environmental sample
  misc_feature (1)..(663): n is a, c, g, or t
atggcagaacaatttgatgttgccgttatcggcggagggccaggcggctacatcgccgccatacgctgcgcccaatttgggaaaaagaccgcccttatcgaaagtcgggatctgggaggtacctgccttaaccgaggctgcatccccaccaaagccctgctgcacacggcggaactctacgacgaagtgaaaaaccacggcagggaactgggtcttaccggtacggaactgcaatatgattacgctgctctggccgcacggaaagactcggtggtaagtacactccgccggggcatcgaaggcctggtcaagggcagaaaaatcaccctcattaagggaactgccgcccttaccggccccaggaccttcaaggtaaccgatgccgccggaacggcagccgaatacggcgcggcaaacatcatcatcgccagcggcagtgagccttcgtcaattcccgtccccggtgccggtctgcctgaggtcctcaactccgatgcggtactttcgcttacgtcgattcccgattcggcgattataatcggcggcggagttatcggcattgagttcgcgactcttttcaacagcctgggaaagaaaatcaccgttatcgaaatgttaccaaatatactcaatggcatggatcaaagcattgcgatgccatga

SEQ ID NO: 13724 - protein, 220 aa, Unknown
  Obtained from environmental sample
  DOMAIN (6)...(219): Pyridine nucleotide-disulphide oxidoreductase
  misc_feature (1)..(220): Xaa is any amino acid
MAEQFDVAVIGGGPGGYIAAIRCAQFGKKTALIESRDLGGTCLNRGCIPTKALLHTAELYDEVKNHGRELGLTGTELQYDYAALAARKDSVVSTLRRGIEGLVKGRKITLIKGTAALTGPRTFKVTDAAGTAAEYGAANIIIASGSEPSSIPVPGAGLPEVLNSDAVLSLTSIPDSAIIIGGGVIGIEFATLFNSLGKKITVIEMLPNILNGMDQSIAMP

SEQ ID NO: 13725 - DNA, 657 bp, Unknown
  Obtained from environmental sample
  misc_feature (1)..(657): n is a, c, g, or t
atgatgaaacccgagttttttatgaacggggtttttcttgaaaaaaaagaagataagataataatggtagcgaccgacggacgcaggctctcttatattgataaagacgccaataatattgaagattttaatggagtaataattcctcccaaaattttgaatgttattacaaaaaggtccggagacgaaggacttataggaatatctgtaatagataaaatgatttttatccgttttgggttttataaccttgcttcggtattgcttgacggacagttccctaactacagaaaagttataccggaagaacataaaagttcattccatgttaacaggctggaaatattggatgcccttcgccgtgtatcgcaggtcgttgaacagaaatcacaccgggtatatatagggctaaaaccgggaacaatgaatatttattctgaggaaggcgaaattggggaaggaagggaagaaattccctgcaaatatgacggggaagaagtgtcatttgcccttaactatcaataccttgaagagccttttaaggtgatgaactgtgaagaaatttgcataaattttacagggccgagcaaggctataaccatagttcctgtccccaagacggattattttcatattgtaatgcctatgcaatcctga

SEQ ID NO: 13726 - protein, 218 aa, Unknown
  Obtained from environmental sample
  DOMAIN (1)...(95): DNA polymerase III beta subunit, central domain
  misc_feature (1)..(218): Xaa is any amino acid
MMKPEFFMNGVFLEKKEDKIIMVATDGRRLSYIDKDANNIEDFNGVIIPPKILNVITKRSGDEGLIGISVIDKMIFIRFGFYNLASVLLDGQFPNYRKVIPEEHKSSFHVNRLEILDALRRVSQVVEQKSHRVYIGLKPGTMNIYSEEGEIGEGREEIPCKYDGEEVSFALNYQYLEEPFKVMNCEEICINFTGPSKAITIVPVPKTDYFHIVMPMQS

SEQ ID NO: 13727 - DNA, 522 bp, Unknown
  Obtained from environmental sample
  misc_feature (1)..(522): n is a, c, g, or t
atggacacagaacctaaaaacccgtttttaatatctggctatcatagccctgcctatttttgcgatagagtcgcagaaacaaaacaaataatgtccgcattgcaaaatgacagaaatatatctttaataagccctcgccgcattggaaaaacagggcttatacacaatgttttttattgcctaagggagaaggataaaaattcaaattgcttttacatagatatttttgcaactcaaaatctgcttgaatttacaaatcttttaggtaaagccgttattgggcaattagaaggcaaaccacaaacagcaataaagaaaatagccagtttcttcaaaagtttcagacctctattttcgtttgactctcagacaggaatgcctacagtttctttggatattaaatatgagcaggcacagaacagtttacaggaaattttttcatatcttaaaaagagcggcaaaaccatctacattgccatagatgaatttcagcaaattatggattatccagaaaaaggatag

SEQ ID NO: 13728 - protein, 173 aa, Unknown
  Obtained from environmental sample
  misc_feature (1)..(173): Xaa is any amino acid
MDTEPKNPFLISGYHSPAYFCDRVAETKQIMSALQNDRNISLISPRRIGKTGLIHNVFYCLREKDKNSNCFYIDIFATQNLLEFTNLLGKAVIGQLEGKPQTAIKKIASFFKSFRPLFSFDSQTGMPTVSLDIKYEQAQNSLQEIFSYLKKSGKTIYIAIDEFQQIMDYPEKG

SEQ ID NO: 13729 - DNA, 345 bp, Unknown
  Obtained from environmental sample
  misc_feature (1)..(345): n is a, c, g, or t
atgacaaattcggccgaggcactaccggcgacgattatttcgctggacgcaaatacagtttcgccccgcagttttcttttccgctatgtttcatgggattccggcaacttcatcaactttaaaaatcctgaatatgaccgcgtttataaagccgcgcatttggagccggatgagataaagcgcatagcgctctacaaggagtgtcaaaggattatttctgaaagcgccgccagtgtctttatacaggacatccttggctttagggttttcgcggctgaccgtttcggaggtgtggtaaattatcctctttatgttattgatttcgcctcaatgtatcgcaaataa

SEQ ID NO: 13730 - protein, 114 aa, Unknown
  Obtained from environmental sample
  misc_feature (1)..(114): Xaa is any amino acid
MTNSAEALPATIISLDANTVSPRSFLFRYVSWDSGNFINFKNPEYDRVYKAAHLEPDEIKRIALYKECQRIISESAASVFIQDILGFRVFAADRFGGVVNYPLYVIDFASMYRK

SEQ ID NO: 13731 - DNA, 822 bp, Unknown
  Obtained from environmental sample
  misc_feature (1)..(822): n is a, c, g, or t
gtgcaggttttattttcgtatgtacgccaaaactttagagaagggaggatattaagtatgccggaaaggattggagatgaaagtatttatttgcggattatggaattaaaaaatgggaatatccaatttactgacgctactaatgccgaaaggcttttgagggaacataaaagggatatacgttattttcccgcatggaagaaatggctggtgtggaacggtacgcattgggaaactgatgaaggcggggcattggtgcatgaaaagggacttgaaacggtacggaatatttatgatgaactatcaaaaacagacgattaccgtgaacgtaatgaaattgaaaactttgccaagataagcgagagcgtccgcagacgtgaggcaatgattaaaacggctcaatacattaaagaattgaatataaaagccgatgacctggataaaaacccgtatttgttgaatgtccgcaatggtacgattaacgtattgtccggtgaatttatggctcattgccaagaagacatgattactaagattgccaatgtagaatataatcccgccgccgattgtccgctgtggaaacagtttattcgagaaataatgaattataagggggaattaataagttttttacaaactgcggtagggtgggcattgaccggaaacattgaagagcaaactatgtttattttgtatggcaacggggcaaatggaaaatcgacatttttgaatacgatacagtttttgctcggcgattacgctatcgccgcacctacagaaagttttagaaaaagaacaatgaccaaaataccaatgatatag

SEQ ID NO: 13732 - protein, 273 aa, Unknown
  Obtained from environmental sample
  misc_feature (1)..(273): Xaa is any amino acid
MQVLFSYVRQNFREGRILSMPERIGDESIYLRIMELKNGNIQFTDATNAERLLREHKRDIRYFPAWKKWLVWNGTHWETDEGGALVHEKGLETVRNIYDELSKTDDYRERNEIENFAKISESVRRREAMIKTAQYIKELNIKADDLDKNPYLLNVRNGTINVLSGEFMAHCQEDMITKIANVEYNPAADCPLWKQFIREIMNYKGELISFLQTAVGWALTGNIEEQTMFILYGNGANGKSTFLNTIQFLLGDYAIAAPTESFRKRTMTKIPMI

SEQ ID NO: 13733 - DNA, 630 bp, Unknown
  Obtained from environmental sample
  misc_feature (1)..(630): n is a, c, g, or t
gtgcgctttactctggaaagcctgccgggacgggcttttaacggagtggtagagactgtacgcatggttcctgtagtgtcgaataacgtggtttcctatatggttattgtcagggtcgaaaatgtcagcggctccctgcttgcgggaatgacctgcgctgttgactttatcgtagagaacagcgagaacgtgcttatggtgtcaaatgccgctctgcgctatcagcctgccggtctgagcgcggaagtgattgaggatatggtatttaacgccagccttgagaacatgaacgatgaacagcgtcaggcagcgctgacaaacagagaacagccaagagcgcagaacgtgagccaaacaagtacaggggcaggattgactgatttgatgatgggcggcagacaaattaatcctggaggaaggcaaggacagggacaagggcaaagacagggacagggacagggcaggggcggcgctcccgcagtcgttatgcgcaacttgtggtatataaacgatgaaggtaaatttgccgtgctgcaggtacagatcggtatctcgtcaggctcctttaccgagattcgcgcctcagatgatcttgaaggaaaacaagtgatcctgagagagaagatataa

SEQ ID NO: 13734 - protein, 209 aa, Unknown
  Obtained from environmental sample
  misc_feature (1)..(209): Xaa is any amino acid
MRFTLESLPGRAFNGVVETVRMVPVVSNNVVSYMVIVRVENVSGSLLAGMTCAVDFIVENSENVLMVSNAALRYQPAGLSAEVIEDMVFNASLENMNDEQRQAALTNREQPRAQNVSQTSTGAGLTDLMMGGRQINPGGRQGQGQGQRQGQGQGRGGAPAVVMRNLWYINDEGKFAVLQVQIGISSGSFTEIRASDDLEGKQVILREKI

SEQ ID NO: 13735 - DNA, 348 bp, Unknown
  Obtained from environmental sample
  misc_feature (1)..(348): n is a, c, g, or t
atgagcgatagcaaaagttcgcccggcaaggttacggggattcgcggtccgggaatgggaaggggcgggccaggaggaatgttcgctgctatgggttctaaagcgaaggactttaaaggcactatgaggcagcttgcatcttacctgaaaccattcagcctgataatcatagtcgtatggattctggctctggcttctacagtttttacgattgtcggcccatggatcatgggaatggttactgacgaactggtaacgggaatttcacggcaagtgtcaggtattggtattgttgactttggcaagatcgcctcgatacttattatgcttttgagcctctatctgtaa

SEQ ID NO: 13736 - protein, 115 aa, Unknown
  Obtained from environmental sample
  misc_feature (1)..(115): Xaa is any amino acid
MSDSKSSPGKVTGIRGPGMGRGGPGGMFAAMGSKAKDFKGTMRQLASYLKPFSLIIIVVWILALASTVFTIVGPWIMGMVTDELVTGISRQVSGIGIVDFGKIASILIMLLSLYL

SEQ ID NO: 13737 - DNA, 495 bp, Unknown
  Obtained from environmental sample
  misc_feature (1)..(495): n is a, c, g, or t
gtgcctcaaaagagtatactcctttccggaacggttcnatttaacctccgttacgggaaaactgacgcatctgattctgagattcgtgaaggagcggagatagcgcagattatggattttatcgaggcaagacatgagggctttgaatcagttattgcgcagggaggagcaaatgtttccggcggacaaaaacagcgtctttctatcgcccgtgcgttggttcgcaatcctgagatactcatttttgacgacagtttttccgctctggattttgccaccgatgcgcggctgcggcaggcgctggaggaaaagagaaaaggagttacaaagatcattgtcgcccaaagagtgggaaccattatgtacgccgacaaaatcatcgtgctggaaaacggcgtaattgccggtatgggcaaacacagcgaactgatgaaaacctgcgccgaatatcgcgagattgccgaatcccaattttcacaggaagccgtattatga

SEQ ID NO: 13738 - protein, 164 aa, Unknown
  Obtained from environmental sample
  DOMAIN (4)...(132): ABC transporter
  misc_feature (1)..(164): Xaa is any amino acid
MPQKSILLSGTVXFNLRYGKTDASDSEIREGAEIAQIMDFIEARHEGFESVIAQGGANVSGGQKQRLSIARALVRNPEILIFDDSFSALDFATDARLRQALEEKRKGVTKIIVAQRVGTIMYADKIIVLENGVIAGMGKHSELMKTCAEYREIAESQFSQEAVL

SEQ ID NO: 13739 - DNA, 528 bp, Unknown
  Obtained from environmental sample
  misc_feature (1)..(528): n is a, c, g, or t
ttggcgcttaaagttaccgattgcgtaaaatcaaatgattattccggagcctgcgagtacctttcgggtttaactgaacggcgaatgggagcgcgtattctcttaactcttttacaacaatcaacccctgtccatggtcagcaatttatagtccaccgcgtagaacgcgccgttgaaacagaggcaaagaactgcctgaattcgcttgaaaacggttttaattttctcaccgccctaggctctctttcgccgttaacgggcttcctcggcactgtgtctggaatgatcggcgcttttaaatcaatcgccgaagcgacggaagtaaacgcgcagatagtcgcaaacggcatttacgaagctcttatcaccacagtattcgggcttataatcgcaattatcgcgatggttgcgcattcaattttaagccatatcgttgataaatttgcagcaagagttgaaggcgtttgttcggatttaatcgcccagcttgaaaccaatcaacttacaacaacaagtaaacataaatga

SEQ ID NO: 13740 - protein, 175 aa, Unknown
  Obtained from environmental sample
  DOMAIN (25)...(157): MotA/TolQ/ExbB proton channel family
  misc_feature (1)..(175): Xaa is any amino acid
MALKVTDCVKSNDYSGACEYLSGLTERRMGARILLTLLQQSTPVHGQQFIVHRVERAVETEAKNCLNSLENGFNFLTALGSLSPLTGFLGTVSGMIGAFKSIAEATEVNAQIVANGIYEALITTVFGLIIAIIAMVAHSILSHIVDKFAARVEGVCSDLIAQLETNQLTTTSKHK

SEQ ID NO: 13741 - DNA, 834 bp, Unknown
  Obtained from environmental sample
  misc_feature (1)..(834): n is a, c, g, or t
atgctgaaaatgaaaactacgaaagaaattgcggcccttattaccaagcctttcttcactttcagaaaaaaagctccgcttccttcatacattctgggacgcctccttgtgatggcgctgatgctctttctccttggcttcgcggtcttcggcttaatggccctggcccccggagacatcgtaacacaggtgatgatacagcagatcatgagttcctccgaaggaagggctaacgccgcccagttggaacttggaggagaatgggccgatgccctgcgggaagagcttggtcttaaccagcctttctatacccaatatttcaggtggctaaaacaagtagtcgtaaatcacgacttgggcttaagccttatttcgcgggcgccggtttcctttctattaagtaccagactttggaactcggttcttctaaatataatttcacttgtgcttatcaccttcttttcgtttttgcttggcgtctacttttccaccaaggcagggactaaagttgactttgtggttacattctttgccctcgcccttcacgctttccccggaatcctgctccttatcttgctgcagcttttcgcgtcgctcaccgggctttttccggtaaccgcctacccgcctttccccttccgcgactcgccgggccgcttcgtgttttcctacgcccatcacatcttcctgcccctgctcgcttcctttctcggcggcataggcggctcgcttaggatgatccgcgccaccatgcttgaccagctggggcagccctacatcactagcctccgttcgcgcggcatgctcgtgccgctcggccgatctgatcaatga

SEQ ID NO: 13742 - protein, 277 aa, Unknown
  Obtained from environmental sample
  misc_feature (1)..(277): Xaa is any amino acid
MLKMKTTKEIAALITKPFFTFRKKAPLPSYILGRLLVMALMLFLLGFAVFGLMALAPGDIVTQVMIQQIMSSSEGRANAAQLELGGEWADALREELGLNQPFYTQYFRWLKQVVVNHDLGLSLISRAPVSFLLSTRLWNSVLLNIISLVLITFFSFLLGVYFSTKAGTKVDFVVTFFALALHAFPGILLLILLQLFASLTGLFPVTAYPPFPFRDSPGRFVFSYAHHIFLPLLASFLGGIGGSLRMIRATMLDQLGQPYITSLRSRGMLVPLGRSDQ

SEQ ID NO: 13743 - DNA, 321 bp, Unknown
  Obtained from environmental sample
  misc_feature (1)..(321): n is a, c, g, or t
ttgatggccgagacacaagggcaggattctcttgatgtaaagggaaacagatgtttacgcggcgcggcttacgcaatggaagaaatccgcgcgccaagacgcgttgtaaccgccacttgcgctattaatggtcaggtaaacggttctgtcagacgtgtgccggtaaagaccgctgttccctgcccaaaggaaaagatatccgcccttctggaagatatttacaaggtgaaaattacccttcccgtaaaagtcggcgacgttgtaatcggcgactggaacggcagtaagatagacatagttgcggcaaggacattaagctga

SEQ ID NO: 13744 - protein, 106 aa, Unknown
  Obtained from environmental sample
  DOMAIN (1)...(103): Protein of unknown function (DUF1667)
  misc_feature (1)..(106): Xaa is any amino acid
MMAETQGQDSLDVKGNRCLRGAAYAMEEIRAPRRVVTATCAINGQVNGSVRRVPVKTAVPCPKEKISALLEDIYKVKITLPVKVGDVVIGDWNGSKIDIVAARTLS

SEQ ID NO: 13745 - DNA, 393 bp, Unknown
  Obtained from environmental sample
  misc_feature (1)..(393): n is a, c, g, or t
ttgaagatagtattagacacaaatattatagtttctgctttattatctccgcaaggattatccgcaaaattattgaatcttgtttttgataaaaaacttacaatagtttatgacaataatatttttgccgaatatttggaagttctcaatagagataaatttatgttggacaatgaattggttaatttaattatggatcttatttccaaggaggggaaatatgtaatagcgaaatttcaaaatatacaatttatagatgaaggcgataaagttttttatgaagtatataagggcggaaatgctgattacttaatcacaggaaataaaaagcatttccccaaagaaaaaaatatagtaactgcaagagaattttttgatgtctatgaaaattga

SEQ ID NO: 13746 - protein, 130 aa, Unknown
  Obtained from environmental sample
  misc_feature (1)..(130): Xaa is any amino acid
MKIVLDTNIIVSALLSPQGLSAKLLNLVFDKKLTIVYDNNIFAEYLEVLNRDKFMLDNELVNLIMDLISKEGKYVIAKFQNIQFIDEGDKVFYEVYKGGNADYLITGNKKHFPKEKNIVTAREFFDVYEN

SEQ ID NO: 13747 - DNA, 636 bp, Unknown
  Obtained from environmental sample
  misc_feature (1)..(636): n is a, c, g, or t
atggagtcttcgtttcagacacatgattcgacagcttccttttattttgtgcgcccacgtttgaatgatttataccgagaagcggtaaaatatccgctggtagttgtatgcgccggagcaggttacggtaagaccagttcggttcacgatttcttaagggaatatgctgtaactacgatatggatacagctttccgaacgcgataatgtcggggcgcgtttttgggaaaatgtcacgcattcagtatcaaaactcaacaaaaccctggccgagtcaatttccaaaattggtttccctgatacaaaggagaaactgcgccattacaaggccttaataaacgaatacgccgtggtggaaaagcgggcgcttgtaatagacgacttccattgcattgaagacgaggcggtgcttcgttttatggaagaaggtttttttaagaatatgcttccggggtctacgatttttctgatttcacgttccctttcccatctaaatgtcgccggtttgttttaccgggatcaaatattcaatataaacgaaaacgatttgcgtttcaccgaaaacgagctcagccggtatttccgccgggtcggcgtttcattccagacggacagcctgcgcgactcggccatctga

SEQ ID NO: 13748 - protein, 211 aa, Unknown
  Obtained from environmental sample
  misc_feature (1)..(211): Xaa is any amino acid
MESSFQTHDSTASFYFVRPRLNDLYREAVKYPLVVVCAGAGYGKTSSVHDFLREYAVTTIWIQLSERDNVGARFWENVTHSVSKLNKTLAESISKIGFPDTKEKLRHYKALINEYAVVEKRALVIDDFHCIEDEAVLRFMEEGFFKNMLPGSTIFLISRSLSHLNVAGLFYRDQIFNINENDLRFTENELSRYFRRVGVSFQTDSLRDSAI

SEQ ID NO: 13749 - DNA, 921 bp, Unknown
  Obtained from environmental sample
  misc_feature (1)..(921): n is a, c, g, or t
gtgatgggcggcagtcgtcaaacgcacaaggcggcggcgcaaaggctctgtaaacacagcgggctttcgcgtcttcccgatactgatcaggcggcggaggcaagggtctatgttgaaaaggacacggtttcccttttactggatttaagcggcgagccgctttttaagcggggatacaggaaggacggcggcatcgcccctttaagggaaaccaccgccgcggccatgatcctgctctccggctggaaacgcaaatatccgttatacgatcccttttgcggctccggcaccatactcgccgaagcgcttatgtacgcctgggacatggctccgggaattgcgcggacgggagttcggggattcgccgttgacaggctgcttatcgccgacaaaaaaattgaggaaacggtccgggctgaatttcgcgccaggatcaattttaaaaggctgattcgccttgccggaagcgacggggaccctgagtgttccgcgctggccctgtcaaacctgaaaaatgtccacgcgttagctgaaaaccacaatccggcaacagacggccccccgcttccgcttgttacaacaacgccaatgagcatggcgcggcccccctttgaggctgaacctcaaccgagcccgcagccatcggcgcgagagtgccgtaaaggttcccctcttgacgaggaaccgcggggctttatcattaccaatcccccatacgggaagcggcttggggatatagaggcgtcgcttgtaatttacagggagatggcggttttggcgaanaattttcccggctggaaactcgccgtgataagcgatcatcccggctttgagtctttttttggaaggaaagcggattcatgccgcgagattacgggcggagccatacccgcgtttttttaccagtatgaaaaaatataa

SEQ ID NO: 13750 - protein, 306 aa, Unknown
  Obtained from environmental sample
  DOMAIN (57)...(302): Putative RNA methylase family UPF0020
  misc_feature (1)..(306): Xaa is any amino acid
MMGGSRQTHKAAAQRLCKHSGLSRLPDTDQAAEARVYVEKDTVSLLLDLSGEPLFKRGYRKDGGIAPLRETTAAAMILLSGWKRKYPLYDPFCGSGTILAEALMYAWDMAPGIARTGVRGFAVDRLLIADKKIEETVRAEFRARINFKRLIRLAGSDGDPECSALALSNLKNVHALAENHNPATDGPPLPLVTTTPMSMARPPFEAEPQPSPQPSARECRKGSPLDEEPRGFIITNPPYGKRLGDIEASLVIYREMAVLAXNFPGWKLAVISDHPGFESFFGRKADSCREITGGAIPAFFYQYEKI

SEQ ID NO: 13751 - DNA, 489 bp, Unknown
  Obtained from environmental sample
  misc_feature (1)..(489): n is a, c, g, or t
atgctcattggcgttgttgtaacaagcggaagcggggggccgtctgttgccggattgtggttttcagctaacgcgtggacatttttcaggtttgacagggccagcgcggaacactcagggtccccgtcgcttccggcaaggcgaatcagccttttaaaattgatcctggcgcgaaattcagcccggaccgtttcctcaatttttttgtcggcgataagcagcctgtcaacggcgaatccccgaactcccgtccgcgcaattcccggagccatgtcccaggcgtacataagcgcttcggcgagtatggtgccggagccgcaaaagggatcgtataacggatatttgcgtttccagccggagagcaggatcatggccgcggcggtggtttcccttaaaggggcgatgccgccgtccttcctgtatccccgcttaaaaagcggctcgccgcttaaatccagtaaaagggaaaccgtgtccttttcaacatag

SEQ ID NO: 13752 - protein, 162 aa, Unknown
  Obtained from environmental sample
  SIGNAL (1)...(25)
  misc_feature (1)..(162): Xaa is any amino acid
MLIGVVVTSGSGGPSVAGLWFSANAWTFFRFDRASAEHSGSPSLPARRISLLKLILARNSARTVSSIFLSAISSLSTANPRTPVRAIPGAMSQAYISASASMVPEPQKGSYNGYLRFQPESRIMAAAVVSLKGAMPPSFLYPRLKSGSPLKSSKRETVSFST

SEQ ID NO: 13753 - DNA, 813 bp, Unknown
  Obtained from environmental sample
  misc_feature (1)..(813): n is a, c, g, or t
atgatcatcaaccacaatatgtctgcgcattntgcgcaccgacagctcgcaaatgtatctgcccagttgggcgaatccatcgaaaagctttcgtcggggtacaagatcaacaaggctggggatgatgcgtcaggacttgcggtatccgagaaactccgctcgcagattaaggggattgctcaggcaatgcgcaacgcgcagaatggtatttcgtttttgcagaccgctgagggttcaatgcaggagatgcattcgatccttcatcgtatgcgggaactttccattcagggggctaaccagatctacagtaccgaggataggcttcagattcaggtggaggtctctcagctcaagcaggagatcgaccggattgttgatgtcacctcgtttaatcaactgaagattttggatggctcgcttaaggatctgcggtttcatgtaggaccggacaaggatcaaacgatctccgtatcgcttgattccatggacacaaaggctcttgccgtgaatggcatcgatatcacttcggtggcgtcggcaaatgacagccttggttcgattgataccgcagtgaataccgtttcaaagcagcgcgcaaacgtgggcgcctggcagaatcgcatggggcacgtagttaatacccttgcggtcgccgaggagaaccttactgctgcggaatccaggatcagggacaccgatatggcccgggagatcatcgaatttaccaaaaacgagatcttgacgcagaccgggactgccatgcttgtccaggcaaatatgcagtccaaaacggttctcaagcttctgggctag

SEQ ID NO: 13754 - protein, 270 aa, Unknown
  Obtained from environmental sample
  DOMAIN (177)...(248): Bacterial flagellin C-terminus
  misc_feature (1)..(270): Xaa is any amino acid
MIINHNMSAHXAHRQLANVSAQLGESIEKLSSGYKINKAGDDASGLAVSEKLRSQIKGIAQAMRNAQNGISFLQTAEGSMQEMHSILHRMRELSIQGANQIYSTEDRLQIQVEVSQLKQEIDRIVDVTSFNQLKILDGSLKDLRFHVGPDKDQTISVSLDSMDTKALAVNGIDITSVASANDSLGSIDTAVNTVSKQRANVGAWQNRMGHVVNTLAVAEENLTAAESRIRDTDMAREIIEFTKNEILTQTGTAMLVQANMQSKTVLKLLG

SEQ ID NO: 13755 - DNA, 543 bp, Unknown
  Obtained from environmental sample
  misc_feature (1)..(543): n is a, c, g, or t
atgatacccactttaagccataacgacgttatcaccaattttgcggggcttcgtccttgtcttggagaggatttttatattgaagcttcaaaaaaagttcccgcttttgtgcaggttgcgggaattcaaagtcccgggcttactgcctcgcccgcgattgccgagtatgtaaaaaacattctggtggatattggtttgcagctaacggaaaagccgcactgggatccctatgtggaaaaccacccgaaggcaagagaacttgactttgaagaacttgacggctttatcgccaaagattccgcatggggcagtatcgtctgccgctgtgaaaatgtcagcgaagcggaaattattcaggccgtaaaattgggacatacgacattggacggagtaaaatattttacccgcgcccagatgggacgctgtcagggcggcttttgcacttacaagataataaaaattattatgagggaagctaatctttcctgggaagaggttacaaaacacggcggaaaaagccgcatattggacggtgtattatga

SEQ ID NO: 13756 - protein, 180 aa, Unknown
  Obtained from environmental sample
  DOMAIN (104)...(159): BFD-like [2Fe-2S] binding domain
  misc_feature (1)..(180): Xaa is any amino acid
MIPTLSHNDVITNFAGLRPCLGEDFYIEASKKVPAFVQVAGIQSPGLTASPAIAEYVKNILVDIGLQLTEKPHWDPYVENHPKARELDFEELDGFIAKDSAWGSIVCRCENVSEAEIIQAVKLGHTTLDGVKYFTRAQMGRCQGGFCTYKIIKIIMREANLSWEEVTKHGGKSRILDGVL

SEQ ID NO: 13757 - DNA, 528 bp, Unknown
  Obtained from environmental sample
  misc_feature (1)..(528): n is a, c, g, or t
atggctgattctccttatcttcttgaagtctccaatctttgccagtattttaaatccggcagaggcaaaaacaagcatacggttaaggctgttgacgacgtgagcttcggcgtaaaacccgccgagaccttcgggcttgtgggcgaatcaggctgtggcaagaccaccacagggcgtaccataattcgcctttacgatcccacgtccggcagagtttcattcgatggccacgagatttcaggcaaaatgaacagggatttgcggcgctatctgacaagcaaccttgcgatgatttttcaggatcccattgaatctcttaacccccggatgacaatagaggagataataggagagggcctgaaagtgcgggggcataaggacattgataaaatccgtcaaagcgtagtggaaatgttgagaaaggtagggcttaacgaagagcatgccacccggtatccccacgagttttccggcggacagcgccagcgtattggtatcgcccgcgccattatcgtgcggcccaaatga

SEQ ID NO: 13758 - protein, 175 aa, Unknown
  Obtained from environmental sample
  DOMAIN (41)...(175): ABC transporter
  misc_feature (1)..(175): Xaa is any amino acid
MADSPYLLEVSNLCQYFKSGRGKNKHTVKAVDDVSFGVKPAETFGLVGESGCGKTTTGRTIIRLYDPTSGRVSFDGHEISGKMNRDLRRYLTSNLAMIFQDPIESLNPRMTIEEIIGEGLKVRGHKDIDKIRQSVVEMLRKVGLNEEHATRYPHEFSGGQRQRIGIARAIIVRPK

SEQ ID NO: 13759 - DNA, 750 bp, Unknown
  Obtained from environmental sample
  misc_feature (1)..(750): n is a, c, g, or t
atgtttcagggggggcgggcttcacaacaagacattaatggccgcaatccggaaattgcttcccgcttgcgcggttctcagcggggacgatcttggaatccccgccgatgccaaagaagctgttgccttcgccatattggccaacgaaactatttttgggctttgcaacaatgccccggcggctaccggggcatctcaccccgtagtgatggggaaaatctctttttaacaaaggaacctaaagccttgtgcatacgcgccataacagaagcggacattcccgcctactatgagctgtcgcttaagctggacgaggaaacccctttccggctttacgaaacaggcgaacgcccttacgaccccgatttgtttttccgggaaaccgcaaattttcttaagaacccgcgcagtaacatctttgtagctgaaaaagacgaaaagcttgtcgggtatttgcaagccataggacgctcggcccggcgcatccgtcacgttgtctccataaacatcgccattcttcaggcatacacgggccagggtttgggcgggaaactcttcggcgtggtggaggaatgggcaaggcagataggcattaaacgtctggacttgtctgtaatggtgaacaacatccccgcccaaaaactttaccaaaagctgggctttgtcagagagggcataaagcgcggctccatgtttgtggacggagagtatatcgacgaatactacatgtgcaaatggctggaagattga

SEQ ID NO: 13760 - protein, 249 aa, Unknown
  Obtained from environmental sample
  DOMAIN (140)...(222): Acetyltransferase (GNAT) family
  misc_feature (1)..(249): Xaa is any amino acid
MFQGGRASQQDINGRNPEIASRLRGSQRGRSWNPRRCQRSCCLRHIGQRNYFWALQQCPGGYRGISPRSDGENLFLTKEPKALCIRAITEADIPAYYELSLKLDEETPFRLYETGERPYDPDLFFRETANFLKNPRSNIFVAEKDEKLVGYLQAIGRSARRIRHVVSINIAILQAYTGQGLGGKLFGVVEEWARQIGIKRLDLSVMVNNIPAQKLYQKLGFVREGIKRGSMFVDGEYIDEYYMCKWLED

SEQ ID NO: 13761 - DNA, 849 bp, Unknown
  Obtained from environmental sample
  misc_feature (1)..(849): n is a, c, g, or t
ttgtcagcgataaccaatccggatgataagattaattcactcgagtcctgggcggaaaaccccgaatgggaactggagtgggccgattgggacaaggagaaaataagcgcccattcgcttacggcaactttgtcggcttcggtcatggaaaaaacgcagactctttctatgaccgcggatctgccgccacgggacgctaagctgagctggaatacgggaataaatatatggatcaccagcaccaacgcaagctgggggatacagcttccggaaaaaagggaggaatggaagctggatcccttcactttccgggagagcttcaactttggaagctatggcagtctttcttttaacatgacaatggatactgagggttgggattcgcctgaaacggggaaaatggaaaaaaggttaagttcgattaccacgtcgctgaatcttacaaaatggggggtctcggcgtcgtattccgcttcccgcatgctgggttatgaatataaggttggaacaagtaacgccgatacaggatggttccagcggacaggggacgagaatatgattctccgccccatgaattttaacctttcctattcaaagaacatcgccatgaaagaactctggaaaaaaaatatagactttaccgttaacacaaagtcaagccttaatataaatctgcagcaatatacaagctccaattttaatttttcccttggctttaccctggggataaacagattactcagcatgagcgtagccgccgagtcatcgaattcgcgtatttaccagtactttcatgactggcccggcttcgacgacgctccgatagaattgccccctcggccgatctga

SEQ ID NO: 13762 - protein, 282 aa, Unknown
  Obtained from environmental sample
  misc_feature (1)..(282): Xaa is any amino acid
MSAITNPDDKINSLESWAENPEWELEWADWDKEKISAHSLTATLSASVMEKTQTLSMTADLPPRDAKLSWNTGINIWITSTNASWGIQLPEKREEWKLDPFTFRESFNFGSYGSLSFNMTMDTEGWDSPETGKMEKRLSSITTSLNLTKWGVSASYSASRMLGYEYKVGTSNADTGWFQRTGDENMILRPMNFNLSYSKNIAMKELWKKNIDFTVNTKSSLNINLQQYTSSNFNFSLGFTLGINRLLSMSVAAESSNSRIYQYFHDWPGFDDAPIELPPRPI

SEQ ID NO: 13763 - DNA, 786 bp, Unknown
  Obtained from environmental sample
  misc_feature (1)..(786): n is a, c, g, or t
ttggcttttcgaaagtgtaggaggaaacagtccttgcgtaaccgttatttcggagatccgaaggaatgtattatttttgactgcggcactggcattcgtgaattcggaatgtatcaaataaaagaaaaccgtaactcaactcaatactatatctttttttcacactttcattgggatcacatacaaggactgccgtttttcggccccggttataatccgtctgtggcgatgaatttctatactcctttcccgaatgttaaaaaattattaagcgggcaaatggtaaccccgtattttccgattggccttgacgctatgggggcgagaaaaacgtttaatcatatgaaagacaaggtaaatataacagggcgcaccgtaagtttcaaaaaaatgaaccatcccggcgattcttacgcgtactgcgtcaacgataacggaaaacggataatttattctacggataccgagcttacttcggacgattttcaaaagacgaatgaaaatatttctttttttaaaaatgcggatatgataattattgactgtcagtatacgcttggagaggcaatcgaaaaatacaactggggacacagcgcgttcagccttgccgtagactttgcggctaactggggaataaaacatatggttatgttccatcacgatccttcttatgatgatcataaactttacgggatattgcaatccgccaggtggtatctggaaaggatgaatataaaaggaattgaattgacccttgcctatgagggactggaaatatccatataa

SEQ ID NO: 13764 - protein, 261 aa, Unknown
  Obtained from environmental sample
  DOMAIN (12)...(197): Metallo-beta-lactamase superfamily
  misc_feature (1)..(261): Xaa is any amino acid
MAFRKCRRKQSLRNRYFGDPKECIIFDCGTGIREFGMYQIKENRNSTQYYIFFSHFHWDHIQGLPFFGPGYNPSVAMNFYTPFPNVKKLLSGQMVTPYFPIGLDAMGARKTFNHMKDKVNITGRTVSFKKMNHPGDSYAYCVNDNGKRIIYSTDTELTSDDFQKTNENISFFKNADMIIIDCQYTLGEAIEKYNWGHSAFSLAVDFAANWGIKHMVMFHHDPSYDDHKLYGILQSARWYLERMNIKGIELTLAYEGLEISI

SEQ ID NO: 13765 - DNA, 636 bp, Unknown
  Obtained from environmental sample
  misc_feature (1)..(636): n is a, c, g, or t
ttgcggctgcgatttatagcggtgcagatnggcggtccgtccggcggatgccntacacaagaacatctggacatgccccttgattatgacaaccttaaaaaggtcggagcgatggtaggctcaggcggtcttgtcgtaatgaatcaaagtacctgtatggttaagatcgcaaggtattttatgcagtttacgcaaaacgaatcctgcggaaaatgcgtagtgtgccgcgaaggaacccgtcagatgctggtgcttctggatgaaattatagaaggcagggcgacggcggaaaccctcgccatgcttgaagatttatcacaggtggttcaagtcggctcactgtgcgctcttggcaaatcggctccaaacccggtgttgtcaaccataaaatatttcagggacgagtataacgcccacgtatttgacaaaaaatgtccgaccggaaactgcgaagctcttgctgactataaaattcttcccgataaatgcaaaggttgttctctttgctccaagaaatgcccggttgaggctattagcggcgaaataaagaaaccgtataccattgatataaagaaatgtatcaaatgcggcgcatgtatacagaactgcaaatttgcagccattgtaaaaggatag

SEQ ID NO: 13766 - protein, 211 aa, Unknown
  Obtained from environmental sample
  DOMAIN (186)...(209): 4Fe-4S binding domain
  misc_feature (1)..(211): Xaa is any amino acid
MRLRFIAVQXGGPSGGCXTQEHLDMPLDYDNLKKVGAMVGSGGLVVMNQSTCMVKIARYFMQFTQNESCGKCVVCREGTRQMLVLLDEIIEGRATAETLAMLEDLSQVVQVGSLCALGKSAPNPVLSTIKYFRDEYNAHVFDKKCPTGNCEALADYKILPDKCKGCSLCSKKCPVEAISGEIKKPYTIDIKKCIKCGACIQNCKFAAIVKG

SEQ ID NO: 13767 - DNA, 822 bp, Unknown
  Obtained from environmental sample
  misc_feature (1)..(822): n is a, c, g, or t
atgccagaaaaatcgcaggcagcttcggaaaaaacgaaaatatcgtcatctgcctntccggcaggggggacaaggacgtttcggcaatcgcacgctacagagggaagaagatacatgagtaatatcgccaaagccttcgataatgataaaggcaaagcctttattggctttgttacaggcggggatccaagcattgaaaaaactaaggaatttatactggagatgttccgcgccggttccgatctggttgaaatcggaatccccttttccgaccctatagccgagggccctgttatccaggaagcgaacatccgcgcactccgcgccggagccaccgttgaaaagctcttcgcgcttgttgaggatgtccgcacgaaaaccgacgcgccgctggtgtttctgacttaccttaacccggtctttcattacggatacgacgctttctttaagcgctgtgaagctgtcggccttgacgggatcatcatccccgatcttccttttgaggagcaggatgatgtgcgggaggcctcgtccaaatacggagtagaccttatttccctaattgctcccacttcagagacacgtatcaaagagatcgccaaaaccgcctcgggctttatttaccttgtttcctcgatgggcgtaacaggtgtccgcagcgaaattaccaccgacattgcctcgattgccgcttcggtcaaatcggttacggaactgccggtggctgtgggctttggtattcacactccggcgcaggcccgcgaaatggcccgcgttgccgatggcgtaatgtgggaagcgcgattaaaatcctcgcgataa

SEQ ID NO: 13768 - protein, 273 aa, Unknown
  Obtained from environmental sample
  DOMAIN (46)...(273): Tryptophan synthase alpha chain
  misc_feature (1)..(273): Xaa is any amino acid
MPEKSQAASEKTKISSSAXPAGGTRTFRQSHATEGRRYMSNIAKAFDNDKGKAFIGFVTGGDPSIEKTKEFILEMFRAGSDLVEIGIPFSDPIAEGPVIQEANIRALRAGATVEKLFALVEDVRTKTDAPLVFLTYLNPVFHYGYDAFFKRCEAVGLDGIIIPDLPFEEQDDVREASSKYGVDLISLIAPTSETRIKEIAKTASGFIYLVSSMGVTGVRSEITTDIASIAASVKSVTELPVAVGFGIHTPAQAREMARVADGVMWEARLKSSR

SEQ ID NO: 13769 - DNA, 600 bp, Unknown
  Obtained from environmental sample
  misc_feature (1)..(600): n is a, c, g, or t
atggcgaggagcggcgctggtcccgtcatcgtggacgtggacgcgtttgccgtcaccaacagctacgcgctagagtgcgccgggctgccggacatgggtacggttgcgctactcaacataggccacagcacaacgagcatcactttcatacgggacggcatttaccactcctcccgcgatatctctacggcgggagagtttttcaaccgtatcatacagcgcaacatggggatatcgagcgaagaggcggcgcaggccgtcaagggcaaggcctccggaaccgttgatatgaaccagcttaaacagagcgtcagttacgccgcggaggagctctcttccggcattgacctcgccttttcctactacaagaactcagagaaaacggattccatagataagattgtactttctggaggcggggcttacatacccacattggtgcagtttttggagtcgcgccatcagactaaggtgcagatatcaaacccgcttgcccacatacagtacaacaaaaacctcttcgggaacacaaacgtggagagcataggcgcgctcctaaccgtggccgtgggtctggcgctcaggaagacgggtgaatga

SEQ ID NO: 13770 - protein, 199 aa, Unknown
  Obtained from environmental sample
  misc_feature (1)..(199): Xaa is any amino acid
MARSGAGPVIVDVDAFAVTNSYALECAGLPDMGTVALLNIGHSTTSITFIRDGIYHSSRDISTAGEFFNRIIQRNMGISSEEAAQAVKGKASGTVDMNQLKQSVSYAAEELSSGIDLAFSYYKNSEKTDSIDKIVLSGGGAYIPTLVQFLESRHQTKVQISNPLAHIQYNKNLFGNTNVESIGALLTVAVGLALRKTGE

SEQ ID NO: 13771 - DNA, 642 bp, Unknown
  Obtained from environmental sample
  misc_feature (1)..(642): n is a, c, g, or t
atgcaagacaacctacccgaattattaagtccgaaagtggacgtaatattcaaattgctgttcggagacgaacgccacaaggatttgactatcagcttcataagcgcggttctgggttacaaagacggcgagttggaagacatttccttttatgatactcacttgaaaaggaagcacccaaacgacaaactaggggttttggatataaaagccaagctttcaaatggaaatgttatagacatagagatgcagtctcgtaacgtttctgacatgagaagccggatatcgtattataggtcaaatctgctgaccgagcagataggtagtggtagcttgtactcggagctaaagcccgtgaaatccataatagtggcagattttgattttgtccctgaatcagaaaaatgccacactgtttttcaaacgcttgaaaaggacgagcatttccctttcaatgatttagaggagatacacgttctttgcttgaaaaaattatctaaattaaataatgagagattgcgtgaatggttgaggttcattaactcggagaaaagagaggaatttatggatttggcaggaatagatccagtgtttgtgaaagccgatagatgttttggctacgttcagtgcggacgaccataa

SEQ ID NO: 13772 - protein, 213 aa, Unknown
  Obtained from environmental sample
  misc_feature (1)..(213): Xaa is any amino acid
MQDNLPELLSPKVDVIFKLLFGDERHKDLTISFISAVLGYKDGELEDISFYDTHLKRKHPNDKLGVLDIKAKLSNGNVIDIEMQSRNVSDMRSRISYYRSNLLTEQIGSGSLYSELKPVKSIIVADFDFVPESEKCHTVFQTLEKDEHFPFNDLEEIHVLCLKKLSKLNNERLREWLRFINSEKREEFMDLAGIDPVFVKADRCFGYVQCGRP

SEQ ID NO: 13773 - DNA, 456 bp, Unknown
  Obtained from environmental sample
  misc_feature (1)..(456): n is a, c, g, or t
atggtgatgaaggcgcgttgctggggctgtcgggtcatccttgacgtaagaggaatagaccttttcaatggtctttctgttggagccaatctgataaagcccaatctttacgaatttatttctaccttcgcgcctgagctgctttctgaaaaaaacgccgacatcgttaaaaaaaaggtgggcgaaatctgggcggaactctacaaaagacacccatcctgcgctctggtactgacgcggggagctgagcctctatggtacgccgaaaaagggaaacttgcggagtatgcttttgaaagcgttgaaccacttaacaccaccggttcaggcgatgcctttaccgccggacttgccgccgccctggaagaaggcgcgagtctggctggggctgtggctgagggcgcacgctgcggggctcttaacgccgcactgctcaaacccggcgttatccgctag

SEQ ID NO: 13774 - protein, 151 aa, Unknown
  Obtained from environmental sample
  misc_feature (1)..(151): Xaa is any amino acid
MVMKARCWGCRVILDVRGIDLFNGLSVGANLIKPNLYEFISTFAPELLSEKNADIVKKKVGEIWAELYKRHPSCALVLTRGAEPLWYAEKGKLAEYAFESVEPLNTTGSGDAFTAGLAAALEEGASLAGAVAEGARCGALNAALLKPGVIR

SEQ ID NO: 13775 - DNA, 876 bp, Unknown
  Obtained from environmental sample
  misc_feature (1)..(876): n is a, c, g, or t
ttggcagtgtttaacgccattggagggttttttaccagacgttatacggtagtttttgttcctcattcagagaaaagagtttataaccttcatgtcaccattttatcaatctgctgttttttacttgtagtattcggcattcttggggcgttcttctggtacagcgcgacgtacagcagtaccatgtacgcaatggcgaacaaagacgggcgtcttaaagacacgcaggcttctcttgatcagttacgcgacgagacggctcttttgttacgtgaagcccgtaattttgaaagcgcgctttccggcgtactttccgcgttgggtataggcaataaaaatacactgtcaaaaaatacatccggcgatttaagttctttccttggcataaaagaaacaccgcaggggctcattcaggaagttgatgatataaggcggttagccgcgtatctttccgatcaagtggaaccaattacggaattacgcgcgcttatggattcgcaaagcgccctgttaactgaaattccaagtatctggcctgtaaaaggcggaattggacacattaccatgttctttgggcagaatattcatcctattacaggtcagtggcatattcacagaggcattgatatcgctactttccgttcgggcgatccgatagtcgcaagcgcagacggtcaggtggtaacagccgagtacacttacgattacggtaattttatcattatcaggcacaagcacggttattacacgcgttatgcgcacatgcttcgttttaacgtaaatgtcggtcagcgcgttcaacagggagaggtaatcgggtatatcgggaataccggtatttcacaggcccccacctgcattatgaaagtcatatag

SEQ ID NO: 13776 - protein, 291 aa, Unknown
  Obtained from environmental sample
  DOMAIN (203)...(284): Peptidase family M23
  misc_feature (1)..(291): Xaa is any amino acid
MAVFNAIGGFFTRRYTVVFVPHSEKRVYNLHVTILSICCFLLVVFGILGAFFWYSATYSSTMYAMANKDGRLKDTQASLDQLRDETALLLREARNFESALSGVLSALGIGNKNTLSKNTSGDLSSFLGIKETPQGLIQEVDDIRRLAAYLSDQVEPITELRALMDSQSALLTEIPSIWPVKGGIGHITMFFGQNIHPITGQWHIHRGIDIATFRSGDPIVASADGQVVTAEYTYDYGNFIIIRHKHGYYTRYAHMLRFNVNVGQRVQQGEVIGYIGNTGISQAPTCIMKVI

SEQ ID NO: 13777 - DNA, 633 bp, Unknown
  Obtained from environmental sample
  misc_feature (1)..(633): n is a, c, g, or t
atgagtgattatgacgaatatgaagatatagaagatgatatttccgcgcttgaagataaccgtaatgagataaagttacaggaacgcgatgtaattacgggcgcggacgcgggaatagagtccatagcgcctgacgctcctatttacagattacggcttttatattcccaagagacatttcttgccgtttaccgtgaagacaatttaagccctgatacgatggttatagtgcccacccgttatggcagagaccttgcgcaggttatcggttccgtacacggcaaacttccttcggtttccgagattgcatggattgtcagggcggctactcccgaagatttggaaaaatcgcgtaacaataacaaactggaaaaagaagcgtttgaaatttgtaaaaagaaaatagcgaatcacaaactggaaatgaagctcgttcttgtgcactatcttttagaagaacctaaaattttatttttctttaccgccgaaaacagggttgactttagggaacttgtaaaagatttagtcagcgtatttaagatgagaattgaactgcgtcagattggcgttcgcgacgaagccagagtagtcggcggcctggagtctcgctcggccgatcttgtcattgattaa

SEQ ID NO: 13778 - protein, 210 aa, Unknown
  Obtained from environmental sample
  DOMAIN (101)...(188): PSP1 C-terminal conserved region
  misc_feature (1)..(210): Xaa is any amino acid
MSDYDEYEDIEDDISALEDNRNEIKLQERDVITGADAGIESIAPDAPIYRLRLLYSQETFLAVYREDNLSPDTMVIVPTRYGRDLAQVIGSVHGKLPSVSEIAWIVRAATPEDLEKSRNNNKLEKEAFEICKKKIANHKLEMKLVLVHYLLEEPKILFFFTAENRVDFRELVKDLVSVFKMRIELRQIGVRDEARVVGGLESRSADLVID

SEQ ID NO: 13779 - DNA, 930 bp, Unknown
  Obtained from environmental sample
  misc_feature (1)..(930): n is a, c, g, or t
ttgacaagatcggccgagtgccactccgatgtgcagaatatgaatgtaaagaatgtagctttgtcttggaacttgcgtccaaacgttactaaatatgaagtgtatagggatggcgaacttttaggggaaacatttggcaatttaatggaagactatgatttaacaataggtaagacctacgaatacattgttgcggggtacgccggcactaacaaaattctttctacgccagttcaagcaaccccatttactgccgctgctgccccagggacgtggcggtatatgaatcgaaattccgaaggcggttcctcggaaaccactgttactgccgctacgggtgggggaagccccagtggggtagcaggtgctgacaataagagatatgaatttcaggtaacaggagatggcacactcagaacttttcaatatcggacatctacaaacggaacgtcttggagcaattggacaaatctcccttcatctccaggcggcagcaatgctttgaccgtgggttcgtgggcaggcgacttgaacggaacgaaaaccaccataaaccccgctgcctttgtttccagcggcaccacttggaacggagcttccgggcaaaccggaataaacttggaaggggtacattggtacagagtacaagacaaagggcttcgcataggtgagtttcaagagggaaaatatgtgcttggttgtcaccgcgaaccgagcggcaattataatctagcccacataatgttggtgagttgctatcccaacaacggcaagccttatggcgaaataacatattccggtcgtccatttggctttgaatcgcgagaccagcgaatttttgtagataacgatggcactccgtacgncatgtgttcggctctggnagacagtcatttcttncagctggatcccaattggagggacccatag

SEQ ID NO: 13780 - protein, 309 aa, Unknown
  Obtained from environmental sample
  misc_feature (1)..(309): Xaa is any amino acid
MTRSAECHSDVQNMNVKNVALSWNLRPNVTKYEVYRDGELLGETFGNLMEDYDLTIGKTYEYIVAGYAGTNKILSTPVQATPFTAAAAPGTWRYMNRNSEGGSSETTVTAATGGGSPSGVAGADNKRYEFQVTGDGTLRTFQYRTSTNGTSWSNWTNLPSSPGGSNALTVGSWAGDLNGTKTTINPAAFVSSGTTWNGASGQTGINLEGVHWYRVQDKGLRIGEFQEGKYVLGCHREPSGNYNLAHIMLVSCYPNNGKPYGEITYSGRPFGFESRDQRIFVDNDGTPYXMCSALXDSHFXQLDPNWRDP

SEQ ID NO: 13781 - DNA, 798 bp, Unknown
  Obtained from environmental sample
  misc_feature (1)..(798): n is a, c, g, or t
gtggacttaggcaatacttacaaagtgaacaaagttaggctcaattgggaagctgcgtatggaaaatcttacagaatagaagtttccaccaatggaagcaattggaatgcagttgcaaccatcaccaataatacaagcggcggcattaaagaacacacatttgcgtccaccaatgcgcaattcgtgagaatgtttggcatagaacgcgggaatgaatatggcggttattctctttatgaatttgagatttacggcgagccatcggaacaacagccaccatccactccgcacaatgcaaggttctttatgccccaagataacgaaacaggctattggtggcaaggtgagaacgctcgcatagcctctcttgccgcagcatttataatgggtgccccatttgtaggcaaccaatctttggcagataccttgtttggcatggctactgcacagcttgactggatacttgggaagaacccttttgcaattactatgatgtatggttttggagaaacaaattatccgcaatacaattcttcaaaaccaaagcccaacattaaaggcggaatttgcaacgggataaccgccaaaagaggaaacgaaaatgatttggaatggaagccttacgaagactacggagaaaacgcttggaaaaattggcgctggatagagcaatggcttccacataatgcttggtatttaattgcaatatcctctctttcgcacagaatagataatcccgtaattgaagacccagatccaattatcacaaaaacccgtccgcaacttggcattcaataa

SEQ ID NO: 13782 - protein, 265 aa, Unknown
  Obtained from environmental sample
  DOMAIN (2)...(81): F5/8 type C domain
  misc_feature (1)..(265): Xaa is any amino acid
MDLGNTYKVNKVRLNWEAAYGKSYRIEVSTNGSNWNAVATITNNTSGGIKEHTFASTNAQFVRMFGIERGNEYGGYSLYEFEIYGEPSEQQPPSTPHNARFFMPQDNETGYWWQGENARIASLAAAFIMGAPFVGNQSLADTLFGMATAQLDWILGKNPFAITMMYGFGETNYPQYNSSKPKPNIKGGICNGITAKRGNENDLEWKPYEDYGENAWKNWRWIEQWLPHNAWYLIAISSLSHRIDNPVIEDPDPIITKTRPQLGIQ

SEQ ID NO: 13783 - DNA, 723 bp, Unknown
  Obtained from environmental sample
  misc_feature (1)..(723): n is a, c, g, or t
atggagatgttggagataaaaacaattctcacttttcatattgccggtttttctatccccattacagagacagtgatcatctcgtgggccgccatgctgatcatcattgtagcgtccctgttgcttgtacgcaggctgaaggaagtgccttcaggcccgcaggcgattctggaaacgggggtagagttcctcaacgatttcgcaagcaatcagttcggcccatacgcaaagtaccttgggccttacatcggctctctgtttctctttctgcttgtggcaaacattcttccggttctttctcctatggagatcaaagcctttggtcatgtatttaccccgctttttgagatcaaaccgccgacaagggacattaacgtaacggcgtcgctggcgataatttccattttgctggtgatagttttgggctttgcggccagaggttttggcggctggtttaagcggctgctgcaccctttccccgtgatgctgccgtttaacatcatggaatacggtacacgggtcatgtccctggctttacgtttattcggaaacatccttggcggttttgttttgatgcgcctcatcgaaggattgctgccgatagcgcttcccatggtgttttcgctatacttcgattttttcgacggggccattcaggctgccatatttgtatttttaaccagcctttatatttccgaggctgtaaagctaaatgaagaataa

SEQ ID NO: 13784 - protein, 240 aa, Unknown
  Obtained from environmental sample
  DOMAIN (17)...(233): ATP synthase A chain
  misc_feature (1)..(240): Xaa is any amino acid
MEMLEIKTILTFHIAGFSIPITETVIISWAAMLIIIVASLLLVRRLKEVPSGPQAILETGVEFLNDFASNQFGPYAKYLGPYIGSLFLFLLVANILPVLSPMEIKAFGHVFTPLFEIKPPTRDINVTASLAIISILLVIVLGFAARGFGGWFKRLLHPFPVMLPFNIMEYGTRVMSLALRLFGNILGGFVLMRLIEGLLPIALPMVFSLYFDFFDGAIQAAIFVFLTSLYISEAVKLNEE

SEQ ID NO: 13785 - DNA, 768 bp, Unknown
  Obtained from environmental sample
  misc_feature (1)..(768): n is a, c, g, or t
gtgaatagttttcaatatattgccgtttgcggctatttagtctacactggacaaattatgagtgacggtgcggattcatttacttctcttggcatagaagagttattaacagacaagttaaaagaacgctctattgaaaagcccactgcggttcaaagccttgttattccgcgcctgcttgcgggaaaagacactgtttttcgttcggcgaccggaaccggcaaaactttcgcctacctgcttccggcgctgcagcgcgttgcttgcgaaggtggcagtttgttgatttgcgcgcctactttggaactctgctctcaaataaaagcggaagttgattttttaacgcaaagcctgcccgcttcatgccggaatacggcgcttcttatcggttcagtaaaaatagaaaaacaaattgaaaatttaagaaaagcaaagcccgttgtaattgtgggaaatcccggcagacttcttgttcttgcaaagatgaaaaagttaagggtaaacaacctgcgttttttaattttagatgaagcagaccgtcttaccgcgccagaatgtcttgaagaaacaaaagaattacttgctattattgagagtgtaacaaagcgttcgttttcacgcgaaccggcggattccgttcaaagccgcctgtgcgccgccgcctgttccgctacggtcggaaagaaaacaagcgcacagttggggtctctttttgaatcgccgaaattgtcgagtgcgccgatcatgaaattctgcgagagagattga

SEQ ID NO: 13786 - protein, 255 aa, Unknown
  Obtained from environmental sample
  DOMAIN (49)...(234): DEAD/DEAH box helicase
  misc_feature (1)..(255): Xaa is any amino acid
MNSFQYIAVCGYLVYTGQIMSDGADSFTSLGIEELLTDKLKERSIEKPTAVQSLVIPRLLAGKDTVFRSATGTGKTFAYLLPALQRVACEGGSLLICAPTLELCSQIKAEVDFLTQSLPASCRNTALLIGSVKIEKQIENLRKAKPVVIVGNPGRLLVLAKMKKLRVNNLRFLILDEADRLTAPECLEETKELLAIIESVTKRSFSREPADSVQSRLCAAACSATVGKKTSAQLGSLFESPKLSSAPIMKFCERD

SEQ ID NO: 13787 - DNA, 444 bp, Unknown
  Obtained from environmental sample
  misc_feature (1)..(444): n is a, c, g, or t
atgagagcgtgtccgcggcccgccggncttttgcaaaacaaacaggttacgggtgatcccgcagccgccgcttatggcgacgttaagcagattattaaagattttacggacgctatggacgatgactttaacacgccctcggcgatttcccatgtttacgctattgtcaaattgctaaatacggaaacgcacagcgacgcgccggatcctggcaaggtaaaaacgatactggatttcttctcaagccatgtcgagcctgttttgggtttcaactttgacgcgcagacaaccggttcaaatgaccagacgcaggagcttgtcacatacctctccgacatacgccagaagctgagagacgcgaagcaattcgagcttgccgacaaaatcaggacggatatggaaactgtgtttggggttaatgtcaaggatggaaagatcaaataa

SEQ ID NO: 13788 - protein, 147 aa, Unknown
  Obtained from environmental sample
  misc_feature (1)..(147): Xaa is any amino acid
MRACPRPAGLLQNKQVTGDPAAAAYGDVKQIIKDFTDAMDDDFNTPSAISHVYAIVKLLNTETHSDAPDPGKVKTILDFFSSHVEPVLGFNFDAQTTGSNDQTQELVTYLSDIRQKLRDAKQFELADKIRTDMETVFGVNVKDGKIK

SEQ ID NO: 13789 - DNA, 693 bp, Unknown
  Obtained from environmental sample
  misc_feature (1)..(693): n is a, c, g, or t
atgggaattcttgaaattcgtgaactgaccaaagaatacaggcgcgggaacagggcgtttaacgccgtaaacggcgtaaatctttctgttgatcgcggggattttatcagcattatcggcagaagcggaagcggaaaaagcacgctccttaacatgagcgccggtttgctcaggcccagcgcgggaacggttttatttgacggtcaggatattttcagtttggcggatatatcaatttcactgcttcgcaatgaaaaaataggttatgttccccaggggcagactcttctttcaaattttacggttttggagaatgtttgtataccgtggtttctgtttaagcgcgagggagaaccggaagaacgcgcccttaccctccttgaaaaaacaggcatagatcatcttgccgcctcatatccgaaacagctttccggcggcgagatgcggcgcgtggctattgcccgcgctcttatcaataatccggcgctgcttattgccgacgagccgacaagcgatttggacgcggaaaccacagctgacattatgcggctgttaagcgccatttcaaaagaaggaacggcgatactcattgttactcatgaacttgatacgctttctttcgggaaaaaaacatattctatgaacagcggtaatctatcgccgtatcataaagaaggaatagcggggatctaa

SEQ ID NO: 13790 - protein, 230 aa, Unknown
  Obtained from environmental sample
  DOMAIN (33)...(217): ABC transporter
  misc_feature (1)..(230): Xaa is any amino acid
MGILEIRELTKEYRRGNRAFNAVNGVNLSVDRGDFISIIGRSGSGKSTLLNMSAGLLRPSAGTVLFDGQDIFSLADISISLLRNEKIGYVPQGQTLLSNFTVLENVCIPWFLFKREGEPEERALTLLEKTGIDHLAASYPKQLSGGEMRRVAIARALINNPALLIADEPTSDLDAETTADIMRLLSAISKEGTAILIVTHELDTLSFGKKTYSMNSGNLSPYHKEGIAGI

SEQ ID NO: 13791 - DNA, 375 bp, Unknown
  Obtained from environmental sample
  misc_feature (1)..(375): n is a, c, g, or t
gtggagttgcggcccgtggtctctaaggagcagatagcggcttttcgtgagctggtgagacgcgtcccggcggcggattcggtggttgaggcggcggtacggctggctagggccagcaggccggcggaaaaggagtgtccggagggggtaaagaagtatcttacgtggggggcgggtcccagggcgtcgcaattcttggtgttggcggccagggcattcgcgctgttggacggacgtccggccccggacgtcaaggatgtgcatagggcggcgtatccggtgcttaggcatcggctggtgctgtcgtttcatggggatgtggagggggtgggggtcaatgatgttattgggagtttggtgaaggctaatcagtaa

SEQ ID NO: 13792 - protein, 124 aa, Unknown
  Obtained from environmental sample
  misc_feature (1)..(124): Xaa is any amino acid
MELRPVVSKEQIAAFRELVRRVPAADSVVEAAVRLARASRPAEKECPEGVKKYLTWGAGPRASQFLVLAARAFALLDGRPAPDVKDVHRAAYPVLRHRLVLSFHGDVEGVGVNDVIGSLVKANQ

SEQ ID NO: 13793 - DNA, 336 bp, Unknown
  Obtained from environmental sample
  misc_feature (1)..(336): n is a, c, g, or t
atggataacgacttattattagaactgaccgaccaaaacttcgacgaagccgtcctatcgaaccctcaacccgtagtggttgacttctgggctccgtggtgcgggccgtgcaagatgcttacaccgattatacacgagcttgcggcggagtacgcggggcgcgtcgttgtcggcaagctcaatattgataatagtccggccgttgcggccaagcacggcatagagaccatcccgacgttgctcttcttcagtaacggcggcatcgtgggtcggcaggtagggcttttggccaaggcgccgctcaaagccaaaattgacgacgcgtttaaggtttga

SEQ ID NO: 13794 - protein, 111 aa, Unknown
  Obtained from environmental sample
  DOMAIN (5)...(108): Thioredoxin
  misc_feature (1)..(111): Xaa is any amino acid
MDNDLLLELTDQNFDEAVLSNPQPVVVDFWAPWCGPCKMLTPIIHELAAEYAGRVVVGKLNIDNSPAVAAKHGIETIPTLLFFSNGGIVGRQVGLLAKAPLKAKIDDAFKV

SEQ ID NO: 13795 - DNA, 972 bp, Unknown
  Obtained from environmental sample
  misc_feature (1)..(972): n is a, c, g, or t
atggcgagcttcgctcctgccgggcaggaaaagcccgatccgaccaccgatgcgagggcagtgcccatttacgcgacgacatcctacgtattcaaggattgcgcgcaggcagccggaaggtttgctttaactgaaggcggcaatatttacacgcgcctgatgaacccgacgtcggacgtgtttgaacagcgaatagcggctcttgagggtggcgttgccgcgttggctacttcatccggggctgcggcggtaacttacgcggtacagaacattgccacagcagggcacaatattgtatccgataagcgtatttacggtggaacctacaatcttttcgcccacactttgcccgatttcggcgtatcaacgactttcgtagacggcggcgatccaaagaattttgaaaaggcgataaacaaggataccagggccttgttcgtggaatcgcttggaaatccccattccaccatcgttgaccttgacgcgctggcggctatcgcccataaaaacggcatcccgctcattgtggacaatactttttcgccgccctgcctgttccgccctattgaacacggcgctgacgtggttttacattccgccactaaatttatcggggggcacggaacggttatcggtggtgtgataatagattcggggaaatttaactgggcggcaaatgacaaattccccggcctttcaaaaccaaacccaagttatcatggcgtagtccttaccgatgcggtgggaaatctcgcttatatcataaaaattcgtgttaccttaatgagggacaccggcgcgacagttagtcctttccattccttcctttttcttcaagggctgngaatcttgtcgctgcggacagaacgccatgtagaaaacgcgttaaaagtggtagaatatttgcgcaaacacccgaaggtagaatcagtgaatcaccctggcctggctggtcaccagatcatgccctga

SEQ ID NO: 13796 - protein, 323 aa, Unknown
  Obtained from environmental sample
  DOMAIN (20)...(302): Aminotransferase class I and II
  misc_feature (1)..(323): Xaa is any amino acid
MASFAPAGQEKPDPTTDARAVPIYATTSYVFKDCAQAAGRFALTEGGNIYTRLMNPTSDVFEQRIAALEGGVAALATSSGAAAVTYAVQNIATAGHNIVSDKRIYGGTYNLFAHTLPDFGVSTTFVDGGDPKNFEKAINKDTRALFVESLGNPHSTIVDLDALAAIAHKNGIPLIVDNTFSPPCLFRPIEHGADVVLHSATKFIGGHGTVIGGVIIDSGKFNWAANDKFPGLSKPNPSYHGVVLTDAVGNLAYIIKIRVTLMRDTGATVSPFHSFLFLQGLXILSLRTERHVENALKVVEYLRKHPKVESVNHPGLAGHQIMP

SEQ ID NO: 13797 - DNA, 330 bp, Unknown
  Obtained from environmental sample
  misc_feature (1)..(330): n is a, c, g, or t
gtgcgcggcgcggtaaaaatcaccggcatggacgaataccggcacgaaaaaaaatcactcggtaaatgccccctttgccacagcggggatgtatacgaaggcaataataactattattgcggtaattataaggcggaacctccgtgtaaattggtaatctggaagaaaatttgccaagcatccgttacccatgctgacgtacaagccctacttgccggcaagcagaccaaagttaaaaaatgcgtcagccctaaaacagggaaattattcaacgctaaatttgagcttgttgccggcaaagtcgaattccgttttgaggagaaaaaatga

SEQ ID NO: 13798 - protein, 109 aa, Unknown
  Obtained from environmental sample
  misc_feature (1)..(109): Xaa is any amino acid
MRGAVKITGMDEYRHEKKSLGKCPLCHSGDVYEGNNNYYCGNYKAEPPCKLVIWKKICQASVTHADVQALLAGKQTKVKKCVSPKTGKLFNAKFELVAGKVEFRFEEKK

SEQ ID NO: 13799 - DNA, 444 bp, Unknown
  Obtained from environmental sample
  misc_feature (1)..(444): n is a, c, g, or t
ttgaggaacaaggccagaggcctgaacattgcgataaaacacctgcccataaccgctcaagccccatataccttcttgaattctagctccgccagaatcgtttatcccaactatgggaaaaccgagttcgcaagcctggtcttgaaggtcgctgattttttgtgcgtgcatttgggaaagcgaaccgccgctgatggtaaagtcttggctgaacaccgaaacaggacgcccatccacattgccgatgcctgtaatcacgccatcgccggggagccttttgctggtgggttttgcttggtcaacgtgcaaaccacgttcttgaaaagagtttttgtcgaacagggtttctaccctttcgcgagcactgagttgcccttttgcgtgacgcttttcaattttatcggcaccgccgccgagtttggcttctttacgcctattgtttaa

SEQ ID NO: 13800 - protein, 147 aa, Unknown
  Obtained from environmental sample
  misc_feature (1)..(147): Xaa is any amino acid
MRNKARGLNIAIKHLPITAQAPYTFLNSSSARIVYPNYGKTEFASLVLKVADFLCVHLGKRTAADGKVLAEHRNRTPIHIADACNHAIAGEPFAGGFCLVNVQTTFLKRVFVEQGFYPFASTELPFCVTLFNFIGTAAEFGFFTPIV

SEQ ID NO: 13801 - DNA, 810 bp, Unknown
  Obtained from environmental sample
  misc_feature (1)..(810): n is a, c, g, or t
atggaaagccaaaaaccgcgacaaaagaaaaataaaaatccagcgcatgaaagcgactaccttgcgcccgacacagcggaagaaatcatcgccgctctgtcgctactcggcggcttgctcggcgaagcgggcttctcgccaatggacttagcgggcgaggacggaattgaagtgcgtcaaattcactgccgccaccttgaacacagtaaaagagatcagatagtcataaagccgctggaagcgattgccgcttaccgccaaatgcttcgctattacgcggtaagaactatcgcggcgtttttggattcgcggaaagatttggattttaagggcttaagtaaattgcttggcgatgatgaacgtgtcaaagagtgggttaactcaggcgggcagattgttcccgctttccgcgtggacgctcttcgtaaggaaataggcggcggcaagtataaaaattgggacgagattcacaaggtatacgactcttgggacgaagaatatccgctggataaatgccgccacgcgtgggcggttcttgcgtttattcatggaacaaacaaagctcctgacgcatccatgttaaaaaaagagtttgccgaagttttggagatacgccattggatagaaagacaaatttttgagagcagggcgaaggactaccgtaatcattttaaaaaagccacattccgtaatcacgcggagatggaacaggtgcttggaaaaccggaagataatccctttatccggcttgtgaaagaagaaggtattggttttaaagagatgataaaaagagcaagcgcaaagttgtaa

SEQ ID NO: 13802 - protein, 269 aa, Unknown
  Obtained from environmental sample
  misc_feature (1)..(269): Xaa is any amino acid
MESQKPRQKKNKNPAHESDYLAPDTAEEIIAALSLLGGLLGEAGFSPMDLAGEDGIEVRQIHCRHLEHSKRDQIVIKPLEAIAAYRQMLRYYAVRTIAAFLDSRKDLDFKGLSKLLGDDERVKEWVNSGGQIVPAFRVDALRKEIGGGKYKNWDEIHKVYDSWDEEYPLDKCRHAWAVLAFIHGTNKAPDASMLKKEFAEVLEIRHWIERQIFESRAKDYRNHFKKATFRNHAEMEQVLGKPEDNPFIRLVKEEGIGFKEMIKRASAKL

SEQ ID NO: 13803 - DNA, 804 bp, Unknown
  Obtained from environmental sample
  misc_feature (1)..(804): n is a, c, g, or t
atggtcatgcccataggcgcggagaccatgagggaagcggttcgctggacggcggaagtctttcacaacctcaagaaactcctccacgacgccgggaaaaacacggccgtaggagacgagggcggctttgccccggacatcgacaacgaggaagccctgaaatttatcatgaatgccatcgaaaaggccggctacaagcctggcgagcagttcggaatcgccatggactgcgccagctccgagctattcggcgagggcgaaaagaagggctacaagttctggaagtccgaccccggcaagatcttgaccgccgaccagatgatcgatctcttcaccggctgggtaaacaagtacccgattatctccattgaggaccctctggatcaggacgactgggacggctatgtaaagctgaccaaatctctgggcggcaaggtccagatcgtgggcgacgatttcttcgttaccaacaccaagcggcttgaaaagggaataggcatgggtgcctgcaattccattctaatcaaggtaaaccagattggcacggttaccgaaacttacgaagctgtggaaatggccaaacgggcaggttacaccgccatcgtttcccaccgctcaggcgaaaccgaagacacatttatcgccgacctcgtagtggcgcttgaaaccggccagataaagaccggctccatgagccgcaccgacaggatctgcaagtacaaccagcttatgcgcatagaggacgaactcgatgacgcggctgtgtacgcggganaaaaagcgttttacaacattaagaagtag

SEQ ID NO: 13804 - protein, 267 aa, Unknown
  Obtained from environmental sample
  DOMAIN (1)...(265): Enolase, C-terminal TIM barrel domain
  misc_feature (1)..(267): Xaa is any amino acid
MVMPIGAETMREAVRWTAEVFHNLKKLLHDAGKNTAVGDEGGFAPDIDNEEALKFIMNAIEKAGYKPGEQFGIAMDCASSELFGEGEKKGYKFWKSDPGKILTADQMIDLFTGWVNKYPIISIEDPLDQDDWDGYVKLTKSLGGKVQIVGDDFFVTNTKRLEKGIGMGACNSILIKVNQIGTVTETYEAVEMAKRAGYTAIVSHRSGETEDTFIADLVVALETGQIKTGSMSRTDRICKYNQLMRIEDELDDAAVYAGXKAFYNIKK

SEQ ID NO: 13805 - DNA, 951 bp, Unknown
  Obtained from environmental sample
  misc_feature (1)..(951): n is a, c, g, or t
ttgttattgctgtttttgcctgttggtaaaaaaagatatggcgatacagcacctatgcctctggtactccggancatagagaaagctccgatgtacagccggttagaagaaattgcgcgggaacgcgccgcccgtatcgcgtcagccctggatgacaggcagcttaccgcacaggtaattatcaccggtattgacggcaaagggagtttgacacgggatatgaagagcttactctcggaatgtcccgcaggcggcgtaatgctgttcagatacaaccttaacaccgataacagcgcgatacaaaaactgatcgccgaaagcgtcgcgctcattatggagggggttaccattcccccctttgtcgtagtggatcatgagggggggaaagtaaaccgtttcctgcccggggctgcggatctgcccgccgcgtattcctattgggaaacagcccaaaacgaaggcaggggcgccgcgattgcccaaatactgagagacagctttaacacggggaaaaagctcaagagacttggcgttaattttaacttagcgcctgtcgctgaattcctgaataaagataattcagcctttcttgaggggcgttcatacggtccggatcctgtttttaccgttgaagctgtaaggacctttatcgtgggcatggaatttgccggtgttatctgcgccgtaaaacactttcccggaagcgcgggcgcggatcctcactattttccgggcaaactaaacggcggcaaggatgccctggcggaacttgtttccccgtttgccgccctcattcagggtaatcagacaagggcaatcatggtttcccactcggctgttcccgcatgggacacgaaaaacatagccagtctttcgccggtaataatgggcgaatggctgcggcaggaactggggtttaaggggctaatcatcagcgatgattttccatga

SEQ ID NO: 13806 - protein, 316 aa, Unknown
  Obtained from environmental sample
  DOMAIN (111)...(316): Glycosyl hydrolase family 3 N terminal domain
  misc_feature (1)..(316): Xaa is any amino acid
MLLLFLPVGKKRYGDTAPMPLVLRXIEKAPMYSRLEEIARERAARIASALDDRQLTAQVIITGIDGKGSLTRDMKSLLSECPAGGVMLFRYNLNTDNSAIQKLIAESVALIMEGVTIPPFVVVDHEGGKVNRFLPGAADLPAAYSYWETAQNEGRGAAIAQILRDSFNTGKKLKRLGVNFNLAPVAEFLNKDNSAFLEGRSYGPDPVFTVEAVRTFIVGMEFAGVICAVKHFPGSAGADPHYFPGKLNGGKDALAELVSPFAALIQGNQTRAIMVSHSAVPAWDTKNIASLSPVIMGEWLRQELGFKGLIISDDFP

SEQ ID NO: 13807 - DNA, 318 bp, Unknown
  Obtained from environmental sample
  misc_feature (1)..(318): n is a, c, g, or t
gtgtcaaaaacgtttgatgaacttgatttcggcagactgcgaattaacaactccactcatcaggtttttgtcgacgaggcagagataactctcacccgcaaggaatttgagcttctttattttcttgccgtcaacagggaaattgtattcagcaaagaacagctatacgataaaatatggggcgaagatatgtatggcgacataaaaacagtgtcggtacatatcaaacgccttaggggaaaaatcgagaaaaatccttctgagccagtacatctgcaaaccgtttgggggtcgggttataaattcatagggctatga

SEQ ID NO: 13808 - protein, 105 aa, Unknown
  Obtained from environmental sample
  DOMAIN (25)...(102): Transcriptional regulatory protein, C terminal
  misc_feature (1)..(105): Xaa is any amino acid
MSKTFDELDFGRLRINNSTHQVFVDEAEITLTRKEFELLYFLAVNREIVFSKEQLYDKIWGEDMYGDIKTVSVHIKRLRGKIEKNPSEPVHLQTVWGSGYKFIGL

SEQ ID NO: 13809 - DNA, 864 bp, Unknown
  Obtained from environmental sample
  misc_feature (1)..(864): n is a, c, g, or t
ttggagtatgagatgagcaagaaaccaattcttggaattacaatgggagacccatctggcatagggcctgagataagcgttaaggcgctggggcaggagaaggtttacgaaatctgccgcccgcttatcatcggagacgcgggagtaatcgaaagggctgcgcgtgaagctgtaaagcggcaggacattgttattcatcctgtgtctgcggttggggaatgtcttttcaaacccggaaccatcgatgtgtatgaactgcgcagtattgaagcgcggaacctcaaaatcggccaggtagacgccgcttcaggcgatgcggcttttgtcgccgtaaaaaaaacaattgaacttgctctggccggcgagattgacgcaaccattaccaatccgctgaacaaggaagcccttaacctggcaggccatcactatgcgggtcatactgaaatatacgccgatcttacaaagactaaggactataccatgatgctcgcggacggggatctccgtgtggcgcatatttcaacccatgtatccctgcgggaagcctgcaatcgggtcaaaaaagacagggttctaagggtgattgaactggcgcataacgcttgcaggagcttcggcataagcgcgcccagagcagcggtggccggacttaacccccacgccggagaggcgggcttgttcgggcgggaggagatcgaggaaatcacgcccgctattgaggccgcccaggcaaaaggcatcaacgccattggccccattccgccggacacagtttttgccaaggccctgggaggcatttacgacattgtaattgccagtaccacgatcagggcccggcacgagctcggccgaatctgtcattga

SEQ ID NO: 13810 - protein, 287 aa, Unknown
  Obtained from environmental sample
  DOMAIN (29)...(287): Pyridoxal phosphate biosynthetic protein PdxA
  misc_feature (1)..(287): Xaa is any amino acid
MEYEMSKKPILGITMGDPSGIGPEISVKALGQEKVYEICRPLIIGDAGVIERAAREAVKRQDIVIHPVSAVGECLFKPGTIDVYELRSIEARNLKIGQVDAASGDAAFVAVKKTIELALAGEIDATITNPLNKEALNLAGHHYAGHTEIYADLTKTKDYTMMLADGDLRVAHISTHVSLREACNRVKKDRVLRVIELAHNACRSFGISAPRAAVAGLNPHAGEAGLFGREEIEEITPAIEAAQAKGINAIGPIPPDTVFAKALGGIYDIVIASTTIRARHELGRICH

SEQ ID NO: 13811 - DNA, 855 bp, Unknown
  Obtained from environmental sample
  misc_feature (1)..(855): n is a, c, g, or t
gtgatagctgggcacggaggtaccggtaaaacaactctctttgagcacctgctcttttccgcgggggttattcccaaggcggaaaccctggactcaggcaaaacggtcagcgattgcacgaccgaggagattgaacgtaaaatttccattcatacggctatggcccatgtggattggaacggtaaaaagataaacatttttgacactccggggtcttcggactttaccggggacgtaattctggcgataagggcctcggaattcgcccttcttactgttgaaggccagacaggcgtgcagatcgaaaccataaaactatggcggaaccttgaaggcaggaacaaacccaggggggtatttattacgcgcctggacggggaacgcgccgattttagtaaggccctggcggatataaaagaaaaactcaaggccgagcctgtgccggttaccattcccataggaagcggggcgggctttaagggcgttatcgacgttttaagcggaaaagcctggtttgcccagggggaagcgcccgagaaagaaggccccatcccggcggaaatgcagcaggcagttgacgccgccagggaaaagcttattgaagccgccgccgaaggggacgacaccctgatggaacagtacatcgaaaagggttcccttacggcggaggaaatgcagaaaggcctggtgctggctttggcgggaaacaagttccttccggcctttgcggggacggcctttaaaaaatcaggcttgattcccttcctggattttgtggcaaacatcggcccgaatcctggtaccgcanaagacatctccctggacaagaagggaaagagagcgatgttcccatag

SEQ ID NO: 13812 - protein, 284 aa, Unknown
  Obtained from environmental sample
  DOMAIN (1)...(125): GTPase of unknown function
  misc_feature (1)..(284): Xaa is any amino acid
MIAGHGGTGKTTLFEHLLFSAGVIPKAETLDSGKTVSDCTTEEIERKISIHTAMAHVDWNGKKINIFDTPGSSDFTGDVILAIRASEFALLTVEGQTGVQIETIKLWRNLEGRNKPRGVFITRLDGERADFSKALADIKEKLKAEPVPVTIPIGSGAGFKGVIDVLSGKAWFAQGEAPEKEGPIPAEMQQAVDAAREKLIEAAAEGDDTLMEQYIEKGSLTAEEMQKGLVLALAGNKFLPAFAGTAFKKSGLIPFLDFVANIGPNPGTAXDISLDKKGKRAMFP

SEQ ID NO: 13813 - DNA, 576 bp, Unknown
  Obtained from environmental sample
  misc_feature (1)..(576): n is a, c, g, or t
ttggacatcggcccccttgcccgcggcgatggctacaagtttgaaaacaagatcttcggcggggcggttcccaagaactacatccccggcgtagaaaagggtatcgcggaaggtatggcgcatggcactatggcccagtatccggtcgttgatgttgaggtagccatcgtggacggcaaataccacccggtggattcttctgaactctctttcaaacttgcttccagaaacgctttccgcgaagccatgcgccaggcaaacccaaccctgcttgaacctgttatgagccttacggtttttgtggaagacaagtacctgggtgatgtaatgagcgacctttcaagcaagcgaggcaaaatcctggggcaggattcatcaggcggcatagcggaaatccgcgccgaagtaccgcaggcagaactcttgcgctactctatcgaccttcgctcaattacttcgggcacgggctccttcggcgtatccctcgatcactacgcgccgattgcgggcagaatcgcagaagacgtcatcaaggcggcggaagccttcaagatccaggaggaagaggacgcctag

SEQ ID NO: 13814 - protein, 191 aa, Unknown
  Obtained from environmental sample
  DOMAIN (1)...(87): Elongation factor G, domain IV
  misc_feature (1)..(191): Xaa is any amino acid
MDIGPLARGDGYKFENKIFGGAVPKNYIPGVEKGIAEGMAHGTMAQYPVVDVEVAIVDGKYHPVDSSELSFKLASRNAFREAMRQANPTLLEPVMSLTVFVEDKYLGDVMSDLSSKRGKILGQDSSGGIAEIRAEVPQAELLRYSIDLRSITSGTGSFGVSLDHYAPIAGRIAEDVIKAAEAFKIQEEEDA

SEQ ID NO: 13815 - DNA, 684 bp, Unknown
  Obtained from environmental sample
  misc_feature (1)..(684): n is a, c, g, or t
atgcggttcttcgtcagcgtggctgttgtatttctcctcatgtcacttccggcgacagcccagtcgccggacgggactgatttgaagcccctttccgcgattgagaattacaaccggggcagggagctggaaaacctgggccgcacgagcgaggctaatgcccattataacgaggctgtccgccaatgccttgaggaagtgaacgccaatacagccacacgcctcagctatacgattttgacatggaccttacagcggcaaaaaagatataacgaggtcatatcctggggggaacgtggtcttaagacatttcccgacgaataccgcattgtggaaacaatgggagaggcgtttttttatcttgacgattacccgcgctcgcttgcctatatgcagcgttatacaaacgcgctgccccatggagaccgcgtttcggtcgcgtattttttcgccggcgagatttaccgtttaacgcaaaaataccgccacgcggacatcgcctataccgcggcgttgcgtcttgagcccaatctcgccctttggtggtacaggctcggctccgtgcgcgaagaaataggcgacaaaactcaggcgattgaagcctaccagcaggtcctgcggataaaccccaatcacaacgaagccaaaagcgggctcgcgagactgcaaaacaatgagcaataa

SEQ ID NO: 13816 - protein, 227 aa, Unknown
  Obtained from environmental sample
  SIGNAL (1)...(20)
  DOMAIN (179)...(212): Tetratricopeptide repeat
  misc_feature (1)..(227): Xaa is any amino acid
MRFFVSVAVVFLLMSLPATAQSPDGTDLKPLSAIENYNRGRELENLGRTSEANAHYNEAVRQCLEEVNANTATRLSYTILTWTLQRQKRYNEVISWGERGLKTFPDEYRIVETMGEAFFYLDDYPRSLAYMQRYTNALPHGDRVSVAYFFAGEIYRLTQKYRHADIAYTAALRLEPNLALWWYRLGSVREEIGDKTQAIEAYQQVLRINPNHNEAKSGLARLQNNEQ

SEQ ID NO: 13817 - DNA, 597 bp, Unknown
  Obtained from environmental sample
  misc_feature (1)..(597): n is a, c, g, or t
gtgatacttgaagcaggcaaatgcgtccctattgccgcacagcgggagtatcatggattaagcagccaaattatcggaaagatcaaaaaagtacgcgttccttttaatattgatattggtatcggagacgtaattatccctaaaccggaaaagcgtgttatccaaacccaacttggcgggtatgatacaccggagatattaacctattcgcttgaaagcaccatcgctgaaaagtttgatgccattatccagcgttttgaattgaccgggcgcatgaaagatttttatgatattttctatcttgcccaaacttttgatttcgatgggcagaagctgacttatgctttgaaagaaacgttgcggaaccgtaaaacagagtataacaaagaaagtttccgccaaatacttgaactcgttgacagccatgatattcaagtacgttggcggtattttcaaaagacaataaaccaggcagggttaccattgtctgaagtcatgcgattatttgacagtttcctgcatccggtttttgaatcccttgtatcaggagagaatctaacaggaaaatggaatgccggatataggaaatggctgtaa

SEQ ID NO: 13818 - protein, 198 aa, Unknown
  Obtained from environmental sample
  misc_feature (1)..(198): Xaa is any amino acid
MILEAGKCVPIAAQREYHGLSSQIIGKIKKVRVPFNIDIGIGDVIIPKPEKRVIQTQLGGYDTPEILTYSLESTIAEKFDAIIQRFELTGRMKDFYDIFYLAQTFDFDGQKLTYALKETLRNRKTEYNKESFRQILELVDSHDIQVRWRYFQKTINQAGLPLSEVMRLFDSFLHPVFESLVSGENLTGKWNAGYRKWL

SEQ ID NO: 13819 - DNA, 957 bp, Unknown
  Obtained from environmental sample
  misc_feature (1)..(957): n is a, c, g, or t
gtgagggacgagctgcttcagaaagtgtccatgctgcaccgtaagtgcataaaggcgcgtatggcngacgtgagggcggggcttgccgatgttttcggaagagaaaaaagggcgnctaatggagcgcctccgcgaatacggggagcagctcagggagttgngtttgcgagaatgaccacgactacaagaaaaaacgacgcgccgccgccggaggccccgcccgtggacagggccgcgcttaggttgcgcaaactcgccaacctgcaaggctttgtcaccgaggcgcagatggaggacgcggcagacgccgcggacgacatagagcgcataagggagatgctggagcgcgagcgcatcaccatcaacaccttcgtgggcgagcgcagggcgctaccccgcggtgaacgcaaacaagagcgcccgcctgcccacgcgcactacacagaccccacgctggcctacctgaacaccgtaggcaaagttccgctgctctccaaagggcaggaggctgagtacgccatgcgcatggaggcggcgcagggcaaactctttgagatggccttccgctcccaatacgccatagacagcctgaaacgcctaggccaaaagctggaaaacggcgaggtgggctgcaccgacgtactgtccatagaggagggccaaggcgaggacgcggagccggtaaacttagaagaaaagcgcaccgagttcctccgaacgctctcaatagttaaagataaatacgacgccataaccgaactgtcgcgcaccggcgcagcagggagcgagttagacgaactctgggacgagaccatcctgatctgcagaggcatggggctgaactctaggcacgtggaagacatactggaaaattacaaagacgtattagcctcggagaaccgcgacgccgacatagaaaaattcgagcagtggaggctcggccgatctgatcattga

SEQ ID NO: 13820 - protein, 318 aa, Unknown
  Obtained from environmental sample
  DOMAIN (148)...(185): Sigma-70 factor, region 1.2
  misc_feature (1)..(318): Xaa is any amino acid
MRDELLQKVSMLHRKCIKARMADVRAGLADVFGREKRAXNGAPPRIRGAAQGVXFARMTTTTRKNDAPPPEAPPVDRAALRLRKLANLQGFVTEAQMEDAADAADDIERIREMLERERITINTFVGERRALPRGERKQERPPAHAHYTDPTLAYLNTVGKVPLLSKGQEAEYAMRMEAAQGKLFEMAFRSQYAIDSLKRLGQKLENGEVGCTDVLSIEEGQGEDAEPVNLEEKRTEFLRTLSIVKDKYDAITELSRTGAAGSELDELWDETILICRGMGLNSRHVEDILENYKDVLASENRDADIEKFEQWRLGRSDH

SEQ ID NO: 13821 - DNA, 588 bp, Unknown
  Obtained from environmental sample
  misc_feature (1)..(588): n is a, c, g, or t
gtggacacggatatgggcgtgtcgagggcgggcggctcgcaggaaaactacctgcatacgctttcgatattccgcggcgacgcggcggcaaaggccggcgagatgagggaggcgctgaaaaacggcgacctaccgtcattcgcgatgtacgcccacgcgctcaaaagcgccgccgcgaacatcggggcgctggatatatccgacaaagcaaaggcgctggaagaggccggaaagagcggcggcatcgacttcatcaccgcaaacgccgacggcttcctagccgacttggaagcgctcaccgaggacataaacctcatcatagccgtaaccaaaaaggcggcggcgcaaacgccgagcgacctcggcgcgctgaaaaccatcctgacggcgctgaaaaccgccctagccgccgtagatatcgaagaaatagacaaaaacgcccacgaactgcaagccttctcgcacacggcgggagccgaaagcgccgtagaggcaatcctgaggatggtgctgatcggcaatttcgacgaggcggaggtacggatagactgcctcttgaaagagccttttttgaacgcggttgagtag

SEQ ID NO: 13822 - protein, 195 aa, Unknown
  Obtained from environmental sample
  DOMAIN (19)...(102): Hpt domain
  misc_feature (1)..(195): Xaa is any amino acid
MDTDMGVSRAGGSQENYLHTLSIFRGDAAAKAGEMREALKNGDLPSFAMYAHALKSAAANIGALDISDKAKALEEAGKSGGIDFITANADGFLADLEALTEDINLIIAVTKKAAAQTPSDLGALKTILTALKTALAAVDIEEIDKNAHELQAFSHTAGAESAVEAILRMVLIGNFDEAEVRIDCLLKEPFLNAVE

SEQ ID NO: 13823 - DNA, 813 bp, Unknown
  Obtained from environmental sample
  misc_feature (1)..(813): n is a, c, g, or t
ttggcgcatttgaatttggtaatgtgccaccgctcaattaactatatcgccgaaatgatgaagacaaaatacggaactgactggcttaaagtaaactttatcggcatcggcgctacgtgcaagtctctgcgtgaaatcgctaaatattttaacgatcccgctttgacaaaaaaagttgaagaagtaatcgccgatgaaacagccgctgtatccgaatctatggaatactacaagtcaaaactgaaaggcaagacggcgggtattttctcgggcggttcgcgttctcatcattatcaggtgcttcttgaagacttgggaatgaaaacggtaatcgccggttatgaattcgcccaccgtgacgactatgaagggcggcaaattatacccgagattaaagaagacgcggacaacaaaaacattgagagcattacggttacgccggatgaaaaattgtaccgtgaggtttactcggagaagcaaatcgaagctctgcgaaaagaaatcgagcttgatacttacgacggtatgattcctgaaatgggcaagggagacgtggtagtagacgattacaaccactttgaaaccgacgagcttattaaagctgtgaagccggatatctttctttcaggtatcaaagataaatattcaattcaaaaggcgggcgtctcttcacggcagattcactcgtatgactattcaggaccctattcgggtttccggggcgctgtaattttcgctcgcgatgttactatggcgctgtacgcaaacgcgtggggactggttacgccgccgtggaaaaaagaccatttatag

SEQ ID NO: 13824 - protein, 270 aa, Unknown
  Obtained from environmental sample
  DOMAIN (1)...(255): Nitrogenase component 1 type Oxidoreductase
  misc_feature (1)..(270): Xaa is any amino acid
MAHLNLVMCHRSINYIAEMMKTKYGTDWLKVNFIGIGATCKSLREIAKYFNDPALTKKVEEVIADETAAVSESMEYYKSKLKGKTAGIFSGGSRSHHYQVLLEDLGMKTVIAGYEFAHRDDYEGRQIIPEIKEDADNKNIESITVTPDEKLYREVYSEKQIEALRKEIELDTYDGMIPEMGKGDVVVDDYNHFETDELIKAVKPDIFLSGIKDKYSIQKAGVSSRQIHSYDYSGPYSGFRGAVIFARDVTMALYANAWGLVTPPWKKDHL

SEQ ID NO: 13825 - DNA, 567 bp, Unknown
  Obtained from environmental sample
  misc_feature (1)..(567): n is a, c, g, or t
atgataaccgttacagaactgagcctcagttatggggagcgcaccctttttaaggatgtaaacctgaaatttaccccgggcaactgctatgggataataggagcgaacggggcaggcaaatcgacttttctcaaaatcctttccggcgagattgagcatgataagggtgatgtttccattggtaagggcgagcgtatcgccgtcctaaaacaggaccatttcgcctatgaggaattcccggcgctggaaacggtggttatggggtttcagaaacttcacgcaatccagaaagagcgcgaggcgatttatgccaaagaggacttttcggaagaggacgggttaagggcgagcgagctggaggcggactttgccgagtttgggggatgggaggcggaagcccaggcgggccagcttctttccggtcttggccttgacgaggaagatcacggcaagctcatggccgaactggacgaatcaaaaaaagtcagggtgcttttggcccaggccctgtttggcaatcccgacatactgcttttggacgaaccgacgaatgggttggacccttga

SEQ ID NO: 13826 - protein, 188 aa, Unknown
  Obtained from environmental sample
  DOMAIN (27)...(188): ABC transporter
  misc_feature (1)..(188): Xaa is any amino acid
MITVTELSLSYGERTLFKDVNLKFTPGNCYGIIGANGAGKSTFLKILSGEIEHDKGDVSIGKGERIAVLKQDHFAYEEFPALETVVMGFQKLHAIQKEREAIYAKEDFSEEDGLRASELEADFAEFGGWEAEAQAGQLLSGLGLDEEDHGKLMAELDESKKVRVLLAQALFGNPDILLLDEPTNGLDP

SEQ ID NO: 13827 - DNA, 639 bp, Unknown
  Obtained from environmental sample
  misc_feature (1)..(639): n is a, c, g, or t
atgccagggggcaatgttaccgattccgcgcaaagcggctccatggacattgccgctttttcccttggcagcagccatatcgtgattttaaggacaggcggatttgttagcgcgattggggataacgatttcggacaatgtaatattcaggaatggcgcgatattatcaggatttcagcgggccaatttcacaccgtcggcttgagaggtgacggaacggttgccgcggccgggcataatgaatacggccaatgcgaaacacgggagtggcgggatattgttgacatctcggccggatttgcccatacggtcggcataaaggcggacggcgcggttataacagccgggagcaagggcatggcgcattgcgcgacacaaaactggcgggatattgtcgcggtttccgcggggcttgcacataccgtaggtttgaaagctgacgggacggttatcgtgaccggaagcaatgatttcggccaatgcaatgtccaaaactggcagaactatatcgcggtccgcgccggaatggccaatactgtgggcttgaaagcggatggcacggtcgttgtatgcggcgacaacagattcggccaatgtaatactcaaagctggcggaatatagggttaatccctgactga

SEQ ID NO: 13828 - protein, 212 aa, Unknown
  Obtained from environmental sample
  misc_feature (1)..(212): Xaa is any amino acid
MPGGNVTDSAQSGSMDIAAFSLGSSHIVILRTGGFVSAIGDNDFGQCNIQEWRDIIRISAGQFHTVGLRGDGTVAAAGHNEYGQCETREWRDIVDISAGFAHTVGIKADGAVITAGSKGMAHCATQNWRDIVAVSAGLAHTVGLKADGTVIVTGSNDFGQCNVQNWQNYIAVRAGMANTVGLKADGTVVVCGDNRFGQCNTQSWRNIGLIPD

SEQ ID NO: 13829 - DNA, 486 bp, Unknown
  Obtained from environmental sample
  misc_feature (1)..(486): n is a, c, g, or t
ttgggcattgtcaacgccctcttcgtggccgactatttgggtatgctcacgcaccacaacatagatcaggcgtggtactgggatatccacaacagcatcacccctgagggcggcgactacggctacctctcccgcaccggcgctcccgacggcgataacgtaccgcgcccgtcgtactgggcgttcaagatggcgagccacagtttgggccgcgggtcgctccttgagtcgcacaccggaaacgaccgcgtctccagctactacacgctggacggcaagaggaagtcgctcatggtcatcaacaagcaccccaagagcgtggcggatctcacgatcaacatccccggcttccagggcaaggccaagaagcagctcctgaatgttgataacgccaagaaggggccgacggaggagtctatcgacgtgaagccgggcgtgaagttgtcgctgccggcgcactcggtggttaatattacgcttgagtag

SEQ ID NO: 13830 - protein, 161 aa, Unknown
  Obtained from environmental sample
  DOMAIN (38)...(154): Alpha-L-arabinofuranosidase C-terminus
  misc_feature (1)..(161): Xaa is any amino acid
MGIVNALFVADYLGMLTHHNIDQAWYWDIHNSITPEGGDYGYLSRTGAPDGDNVPRPSYWAFKMASHSLGRGSLLESHTGNDRVSSYYTLDGKRKSLMVINKHPKSVADLTINIPGFQGKAKKQLLNVDNAKKGPTEESIDVKPGVKLSLPAHSVVNITLE

SEQ ID NO: 13831 - DNA, 885 bp, Unknown
  Obtained from environmental sample
  misc_feature (1)..(885): n is a, c, g, or t
gtggcgttgcagtttgaccttgccgccaacgactattcgggcggttccgtctgcttgtacaatatgatgtacgacctcaccccctacatcgcctccggcgcgttgcagttttgggtaaagggcgccaatggcgccgagatcgcttgggcggcgctggtcgacgacgaaaacggcgacggcaagaagaccgtcgtgcgcctcccgatgaacaattacggcggcatcacgaatgattggacgctcgtcagcattcccctcgtcgatttcggcaagcgcggcgtattctgggacgccaagaagcgggtcgaggtgcccgagcctttccagtgggacaaggtctgcgagttccgcatagagatcaagaagaacgaaaacccctctttccgcatttgggtggacgacatctttatagtcagcaacgtctttgaggccaaagtggttgaggacgtcaagtattgggacgacaatgacgaggtgcttgaggatgtccccgtggcgaacaagccggcggtcaaggagaccgacaagtttttggcgggcggcgacccggtgggctttgcttacgtttacggcggcaagaccgccttcaaggtgcagaagacgaagtccggcgcgccggtcttcgcgaactatatggacggcagcgaatactccggcgtcacgatttccttgggcgagggcaagttcgccaacctgacgaacgccaggactgctaaggcggcgggtatcgctttctggggtcgcggcggcgagggcgtgggcaacgtcngcgtaggtctcttggacaatcagggcaagaacagcgccggcgtggaggtcaagttcagactaangtgctcctcggcgacttcggcaagatcgagccccagtggaagtactatatga

SEQ ID NO: 13832 - protein, 294 aa, Unknown
  Obtained from environmental sample
  misc_feature (1)..(294): Xaa is any amino acid
MALQFDLAANDYSGGSVCLYNMMYDLTPYIASGALQFWVKGANGAEIAWAALVDDENGDGKKTVVRLPMNNYGGITNDWTLVSIPLVDFGKRGVFWDAKKRVEVPEPFQWDKVCEFRIEIKKNENPSFRIWVDDIFIVSNVFEAKVVEDVKYWDDNDEVLEDVPVANKPAVKETDKFLAGGDPVGFAYVYGGKTAFKVQKTKSGAPVFANYMDGSEYSGVTISLGEGKFANLTNARTAKAAGIAFWGRGGEGVGNVXVGLLDNQGKNSAGVEVKFRLXCSSATSARSSPSGSTI

SEQ ID NO: 13833 - DNA, 729 bp, Unknown
  Obtained from environmental sample
  misc_feature (1)..(729): n is a, c, g, or t
atgattgccggaacccacgcgcttttctcccgcgatgtggaatacaaaaatctgcgccttgtcactgtggacgagcagcatcgctttggggtgttacagcgccaggcaattaccgccaagggcagctttccaaacttgttgatgatgagcgcgactcccattccccgaagcctggcgctcaccgttttcggcgatctggacgtgtcagtgatcgccgatctgcctcctgggcggaaggccataaaaacccacctggcaaaagaatccaacgaggggaaggtatacgattttgttcgccgtgaactggcagcaggtcgtcaggcttattttgtttatccgctaatcgagggcggagaggaaacggcattaatgccgaacgagctaaaagacgcggtatccatggcggacaggcttgccaaagaagtgttccccggtttccccctggcgcttttgcattcaaaagtggacgacgaggacaagcgaaaagccatggaagccttccgccgcggggaaataaaaatacttgccgccacgagcgttgtggaagtcggcgttgatgtgccaaacgcgacctgcatggtaattgagcatgccgaacgctttggcctttccgccctgcaccagctccggggcagggtgggccggggagaagatcagtcctactgttttttggtctactcggacaatctgggtgaagatgggaaaaagcggctaaagngtgatgcttga

SEQ ID NO: 13834 - protein, 242 aa, Unknown
  Obtained from environmental sample
  DOMAIN (140)...(217): Helicase conserved C-terminal domain
  misc_feature (1)..(242): Xaa is any amino acid
MIAGTHALFSRDVEYKNLRLVTVDEQHRFGVLQRQAITAKGSFPNLLMMSATPIPRSLALTVFGDLDVSVIADLPPGRKAIKTHLAKESNEGKVYDFVRRELAAGRQAYFVYPLIEGGEETALMPNELKDAVSMADRLAKEVFPGFPLALLHSKVDDEDKRKAMEAFRRGEIKILAATSVVEVGVDVPNATCMVIEHAERFGLSALHQLRGRVGRGEDQSYCFLVYSDNLGEDGKKRLKXDA

SEQ ID NO: 13835 - DNA, 912 bp, Unknown
  Obtained from environmental sample
  misc_feature (1)..(912): n is a, c, g, or t
ttgcgctttccattaccgcggatccgcgagctttcagttgacgcctgcgagatcaagcggaaagagttttcctacaccgtggacacggttactgacatattcaaccgttacaatcctgacggcaaaccgggactcatcatcggcgatgacctggccggggaattcccaaaatggtacagaagcgatgatattctttctatggcggatataatcatcgcgcggcgtgttcgttcaggcagtccggaagttccttttccctatacagggataacaaatgatattatggaaatttcatcgggcgctgtaagggagaaaatcgcctcaaattcgacatggcgttatcttgtgcccaatgccgcaagaataataatcgaagaccggaaactctacggttttcgtgacccaactgccaataacggcgcccggcccgcatcagttaaaaacattatccagcgtatagagaatgaagcgcgcgcaaaccttaatcaggcgcgttacatccattccaggcatacggcgttattggcatgggatctatgctgccgtttcaggaaagattacccctctcttgatcctgatctgggttatctggtggggattgcccacgatctgtgcaagcagttatgcgatgacgaacagatcagattggcaaaaatatacggcggagaaatatcacgcattgaaaaagaaaagccgtcattgctgcacggcagagcctgcgcggttatgttaaaagagcgtttcaaaattaatgataatgaggtgctggaggcgatagcccatcatacagaaggctacaaggatatgggtcctttggcaaaagtgctgtatattgccgacaagatggaggtatcaagggtaaaagtcgaacctgctcttagaaaccnggatattgtcaggcgatactcttga

SEQ ID NO: 13836 - protein, 303 aa, Unknown
  Obtained from environmental sample
  DOMAIN (165)...(285): HD domain
  misc_feature (1)..(303): Xaa is any amino acid
MRFPLPRIRELSVDACEIKRKEFSYTVDTVTDIFNRYNPDGKPGLIIGDDLAGEFPKWYRSDDILSMADIIIARRVRSGSPEVPFPYTGITNDIMEISSGAVREKIASNSTWRYLVPNAARIIIEDRKLYGFRDPTANNGARPASVKNIIQRIENEARANLNQARYIHSRHTALLAWDLCCRFRKDYPSLDPDLGYLVGIAHDLCKQLCDDEQIRLAKIYGGEISRIEKEKPSLLHGRACAVMLKERFKINDNEVLEAIAHHTEGYKDMGPLAKVLYIADKMEVSRVKVEPALRNXDIVRRYS

SEQ ID NO: 13837 - DNA, 432 bp, Unknown
  Obtained from environmental sample
  misc_feature (1)..(432): n is a, c, g, or t
atggagaggctgctattctgctcaagcccgggcaagaaccgcggttgcgacaaggacaatctgctcctctatcgcggaaaaacgtgttttgtgttgatgaacttgttcccttacaacaacggccatttaatgataattccttacaagcacacttccgatattcttgatatagacaatgaaacatcagctgaattgtggagccttgtttgcatgagtaagcgggctctcgacagcgtaatgcatcctgacggtttcaacataggtatgaatttaggccgcaccgccggcgccgggatagatcagcatatacacatgcacatcgtcccgcgctggaacggcgacaccaacttcatgccggtagtgggggagaccaaggtcatatcgcaggcgctctccgacacttacgacgcgttgctgcctcattatctttaa

SEQ ID NO: 13838 - protein, 143 aa, Unknown
  Obtained from environmental sample
  DOMAIN (4)...(113): HIT domain
  misc_feature (1)..(143): Xaa is any amino acid
MERLLFCSSPGKNRGCDKDNLLLYRGKTCFVLMNLFPYNNGHLMIIPYKHTSDILDIDNETSAELWSLVCMSKRALDSVMHPDGFNIGMNLGRTAGAGIDQHIHMHIVPRWNGDTNFMPVVGETKVISQALSDTYDALLPHYL

SEQ ID NO: 13839 - DNA, 777 bp, Unknown
  Obtained from environmental sample
  misc_feature (1)..(777): n is a, c, g, or t
gtggaagtcctgtccggcgcggaaatttttcttgactactccgatgatgaagtaagcgcggacgccggggaaatcgcgggacatctgcccggagagactcttgcgcgggaagcgcttgaccgcctgcaaaaactcgctaaatcatggcagttggaacgtatctatcaggatggggttctcgcggtgatcgcgggacggcccaattccggcaagtccagcctgttcaacctgttgctaaaagaagaacgttccattgtcacggagattcccggaacgacccgcgactggatagaggcatgggtttccgttgagggcatccctacgcgccttatcgacacagccggcctcagggcagattcttcagatcgggttgaaataatcggcgtggaacgcagccgtgaattgctggaagccgccgacattgttctgtacctcatcgacggcgaagcgggcattacggacgaagataccgcgttaattgaagggctgggtgtatcctcccttatcatctggaacaaaactgacatcgcccccgcgccccaagggtttactgccatcagcgcgaaaacgggcgaaggcctcactgaactgtcgacggcgattgccacggtaatacagattgcggttaactctgaaaacgccgacacggcggtttcgctcggcactgaacggcagaagaacctcgtggaggcggcaattgccgcgctggaagaggcgttagatctggctgaaaancgtggagccgctttgaccctcgtgccgaattctgatcattga

SEQ ID NO: 13840 - protein, 258 aa, Unknown
  Obtained from environmental sample
  DOMAIN (59)...(175): GTPase of unknown function
  misc_feature (1)..(258): Xaa is any amino acid
MEVLSGAEIFLDYSDDEVSADAGEIAGHLPGETLAREALDRLQKLAKSWQLERIYQDGVLAVIAGRPNSGKSSLFNLLLKEERSIVTEIPGTTRDWIEAWVSVEGIPTRLIDTAGLRADSSDRVEIIGVERSRELLEAADIVLYLIDGEAGITDEDTALIEGLGVSSLIIWNKTDIAPAPQGFTAISAKTGEGLTELSTAIATVIQIAVNSENADTAVSLGTERQKNLVEAAIAALEEALDLAEXRGAALTLVPNSDH

SEQ ID NO: 13841 - DNA, 456 bp, Unknown
  Obtained from environmental sample
  misc_feature (1)..(456): n is a, c, g, or t
ttgtacgaagatgtagcgggaatatcagggattaatgtacagtatattcaatcatggaaaagcgaaaaagacattattgattatttaagagaacggcgatcgacggatatgtccgccggcctttcgctttcaggtccgcaccgcgaccgctacgtgtttgcacataacggcgttgaatttacgggaaaagcgtcaacaggccagcggcggcttttggcgctgcttctgcggacggcgcaggcccgccgtttttctgaggtgacaggtcaaaatccaatactcctgctcgacgatgtccttcttgaaatggacggtgaaaaacggcgcaggtttctttctgtaatgccggcatacgatcaggctttttatacatttttgccggaagaaccatatcaacgttactgtaaagaaaacacgttgatttacagagttaacgctggtaagcttttaaaatga

SEQ ID NO: 13842 - protein, 151 aa, Unknown
  Obtained from environmental sample
  misc_feature (1)..(151): Xaa is any amino acid
MYEDVAGISGINVQYIQSWKSEKDIIDYLRERRSTDMSAGLSLSGPHRDRYVFAHNGVEFTGKASTGQRRLLALLLRTAQARRFSEVTGQNPILLLDDVLLEMDGEKRRRFLSVMPAYDQAFYTFLPEEPYQRYCKENTLIYRVNAGKLLK

SEQ ID NO: 13843 - DNA, 831 bp, Unknown
  Obtained from environmental sample
  misc_feature (1)..(831): n is a, c, g, or t
atggcgaaaaatgctggattcatgaaagccaaacgagggccgcaaaggcagctaaacataagcgaggtgcttacgctgaatataatgcgtttttattttcacatattcgatttgaaagcatttgtaagccttgccgagaatacctataaagcatattttccccgtttacccaactatgaaaattttctgaaggcggcaaaccggtcatttccgtttaccgtatcgctgttgcggtattttttgctgctaaaccgccggatgagcagggacgggatattttttcttgactcgaccgcattgagcgtgtgtgccaactggaacatatcaacgcatcgcgtaaccaaagggtatgcttcacgcgggaaaacaagcaagggatggtttttcggcttcaaactgcatggggcctgcgatgcggaagggaatctggtgaacctgcgtttttcaactggaagcgaacatgacagccaacaaactgagtcgctcactgacgggctgactggaatatttgtcggcgatgcggggtatttgctgaggcaggaggcatttatacgcctatttgaaaagcataaacgcattttgtctgccgcccggaagaatatgaagcgtctgatgactgaagagcaagggcaattattgaggaaacggagcgttattgagaccgtgtggggcgtattaaaagaacgccatgggctggtatttcatttggcacgaaatatggtcgggcttttcaggcattactgctacagtctgctcagtaaaatgatgcagccttttttgtattcttgttcattaaggctgcccgacctttcttttggtctcctgctttaa

SEQ ID NO: 13844 - protein, 276 aa, Unknown
  Obtained from environmental sample
  DOMAIN (92)...(256): Transposase DDE domain
  misc_feature (1)..(276): Xaa is any amino acid
MAKNAGFMKAKRGPQRQLNISEVLTLNIMRFYFHIFDLKAFVSLAENTYKAYFPRLPNYENFLKAANRSFPFTVSLLRYFLLLNRRMSRDGIFFLDSTALSVCANWNISTHRVTKGYASRGKTSKGWFFGFKLHGACDAEGNLVNLRFSTGSEHDSQQTESLTDGLTGIFVGDAGYLLRQEAFIRLFEKHKRILSAARKNMKRLMTEEQGQLLRKRSVIETVWGVLKERHGLVFHLARNMVGLFRHYCYSLLSKMMQPFLYSCSLRLPDLSFGLLL

SEQ ID NO: 13845 - DNA, 528 bp, Unknown
  Obtained from environmental sample
  misc_feature (1)..(528): n is a, c, g, or t
atgcgcgacaacaaaaaccgccgcattgaattcaatctggttataagatccgaaagcacaatttctcaggatatcgcgtctattatcagggacgagctttcaaaaatcggaattaaggtaaatatccgcatagtggatttccagaaacaggtggaacagctgtttaccacttttgactgggactccactttaataggtctttcgggcagtaatatttttccaagtcagggaagcaatgtctggcctacaacgggaaaccttcacctttggtatcccaatcaggaaacgcccgccactgaatgggaggcgcgcgtagattatctttacaacgagggaaaatttaccatcgacagcgataaggcgcaaataatttgggatgaatttcaatcgattttaaatgaacaatgcgctataatacaccttatgcgttcccgcggtttttgggctattaacaacaggtgggattttacaaatgtttattacgataaccaaaacggcgcggaaaccagttatatatatctgaagtaa

SEQ ID NO: 13846 - protein, 175 aa, Unknown
  Obtained from environmental sample
  misc_feature (1)..(175): Xaa is any amino acid
MRDNKNRRIEFNLVIRSESTISQDIASIIRDELSKIGIKVNIRIVDFQKQVEQLFTTFDWDSTLIGLSGSNIFPSQGSNVWPTTGNLHLWYPNQETPATEWEARVDYLYNEGKFTIDSDKAQIIWDEFQSILNEQCAIIHLMRSRGFWAINNRWDFTNVYYDNQNGAETSYIYLK

SEQ ID NO: 13847 - DNA, 801 bp, Unknown
  Obtained from environmental sample
  misc_feature (1)..(801): n is a, c, g, or t
gtgagctcggctgctcctgctcccgccgccgctccggctgcggctcctgccgctgcagcacccgccgccgctgccgctcctgctaaacctgcggcaaaagcaacttcttcagaagacgcaaagaaagcgggcaaagaagcgggatcaattctccgcgtagactccaagcgcattgacgacttgttaaaccttgtttcggaaacagttattaccaaggcgacattcaaccagatcagtatgcagtttggagaacttacggcgcagttacgcggtatggaaaatcaataccgtgaaagaataaaagaactgtttgacgaattgcccgattaccttgaaagcatacaggaaggcggtaaaacagtaaaagatgtccgcaaagaaattaacgaaaatttcagcgatatctttacgatatttgatccttttgaagctgcgttcaagggcagtatagcgaaattccgctctacttcgcaaaacctcgggcgtatcacaggcgagcttcaggaaggcgtcatgcgtatccgcatggttccgattagtcagatattcagccgtttcccgcgcctcgtacgcgatctttcaaaaacgcttaataaaaaaatcaatctggttatcgaaggtgaagacacagaacttgacaaatcggtagtcgaagaccttcttgatcctattatgcactcggtgcgtaactctatcgaccacggaattgaatccgctgaaataagaaaagccgcaggcaagccggaagaaggcatggtgctcttaaaagccgccaatgaaggcaacatgattgtcatctaa

SEQ ID NO: 13848 - protein, 266 aa, Unknown
  Obtained from environmental sample
  SIGNAL (1)...(25)
  DOMAIN (48)...(174): Signal transducing histidine kinase, homodimeric domain
  misc_feature (1)..(266): Xaa is any amino acid
MSSAAPAPAAAPAAAPAAAAPAAAAAPAKPAAKATSSEDAKKAGKEAGSILRVDSKRIDDLLNLVSETVITKATFNQISMQFGELTAQLRGMENQYRERIKELFDELPDYLESIQEGGKTVKDVRKEINENFSDIFTIFDPFEAAFKGSIAKFRSTSQNLGRITGELQEGVMRIRMVPISQIFSRFPRLVRDLSKTLNKKINLVIEGEDTELDKSVVEDLLDPIMHSVRNSIDHGIESAEIRKAAGKPEEGMVLLKAANEGNMIVI

SEQ ID NO: 13849 - DNA, 720 bp, Unknown
  Obtained from environmental sample
  misc_feature (1)..(720): n is a, c, g, or t
ttgtttcaggaaagcctttccgctttaaggcattttactaccacggcagttaatgaaaaatgggtgttcagacgctttgccgaatggagttcaaggcggacaggcgacgacgtgcagttacgcagtacctcggaagccgacgaattcctcgaagattttccgtctccctgttcaggtcatttctgggtggaatcttacgctaatgcggtcaagaagattctcccgaattttacatcggcgaatatcaatgtttggaacataggcagcggaaagggttttgaaacttattcgtttgcgtgtatacttaaagtgaagtatcccaacgctcgtattaaaatatgggctaatgataacgatattatggctgtttcgcaggcgaccaatatggtttgtgatctggaagaagcgcctgattattgcagaccttttatggtacgcgggacaagcggatattctttcaatcaggccataaaggactcgattgtttttgaatatcatgatataactaatgagaacaccttgcctgaggttgacattatccttgcaagagacgttctttcatacttacctgaatcaatacagggaaaagttataagtgatttttcagaaaagctgaaaaataacggagttgctattttgggcagaaatgaagagcttaacggtgttatctggcagtcaatagcggatgatcctgtttcagcctttttgcatagtgcataa

SEQ ID NO: 13850 - protein, 239 aa, Unknown
  Obtained from environmental sample
  DOMAIN (56)...(235): CheR methyltransferase, SAM binding domain
  misc_feature (1)..(239): Xaa is any amino acid
MFQESLSALRHFTTTAVNEKWVFRRFAEWSSRRTGDDVQLRSTSEADEFLEDFPSPCSGHFWVESYANAVKKILPNFTSANINVWNIGSGKGFETYSFACILKVKYPNARIKIWANDNDIMAVSQATNMVCDLEEAPDYCRPFMVRGTSGYSFNQAIKDSIVFEYHDITNENTLPEVDIILARDVLSYLPESIQGKVISDFSEKLKNNGVAILGRNEELNGVIWQSIADDPVSAFLHSA

SEQ ID NO: 13851 - DNA, 870 bp, Unknown
  Obtained from environmental sample
  misc_feature (1)..(870): n is a, c, g, or t
gtgcttaacacaattgaggcggcagacatcggcgaagctgttaattccgtttccatcaacgatgtgcttgccgatcttgacgcgatggtcggcatgaaagaagtgaaagagaccgtgcgcggcattgcaaacaaaatagcatatcataaaaaaattatggagcaaacaggcaaagctccggacgatgaaggaaacaacatctgtattaccggcaatccgggaaccggcaagacgactatagtccgtacccttgcaaaacttttcaaagcaataggacttctttccgatgacaaggctctggaaattcaaggggcggatcttaaaggctcttatgtaggtcattcaaaagacaaggtaaacgattattgccgtcaaacaatgggacgcgtactttttatagacgaagcatacagtcttgtcaacgaacaaggtccggtagatcagtttgccaatgaagcgattactgttttgttagcgcatctggaaaatgaccgcgacaaattcgtttgtgttgtagccggttaccccagagagatggacacattcatcaagaaaagcaaccccggcatgaaaagacgttttaagcactacatacatattcccgattacaacgccgatgaactcatagaaatctttgaacgctttaatgtaaaaaaagcaggttacaccctcaccgatacggcgcgtgaaaaagcgcaggaggcaattcgcaagatggttgccaacaaaagcaacacatttggcaatgcgggagatatacgtacattttttgagacgattaccggaaataccgctaatcgtgtttctaaactacctgatgaccagcaggttgcggttctacaggttatcgaagctgaggatataccgtaa

SEQ ID NO: 13852 - protein, 289 aa, Unknown
  Obtained from environmental sample
  DOMAIN (66)...(237): ATPase family associated with various cellular activities (AAA)
  misc_feature (1)..(289): Xaa is any amino acid
MLNTIEAADIGEAVNSVSINDVLADLDAMVGMKEVKETVRGIANKIAYHKKIMEQTGKAPDDEGNNICITGNPGTGKTTIVRTLAKLFKAIGLLSDDKALEIQGADLKGSYVGHSKDKVNDYCRQTMGRVLFIDEAYSLVNEQGPVDQFANEAITVLLAHLENDRDKFVCVVAGYPREMDTFIKKSNPGMKRRFKHYIHIPDYNADELIEIFERFNVKKAGYTLTDTAREKAQEAIRKMVANKSNTFGNAGDIRTFFETITGNTANRVSKLPDDQQVAVLQVIEAEDIP

SEQ ID NO: 13853 - DNA, 843 bp, Unknown
  Obtained from environmental sample
  misc_feature (1)..(843): n is a, c, g, or t
gtggatttcggcgacctaatcaaaaagccagtggaaattttacgcaacgagccggaagttgcccggcgttttcgcgacaggttcaaggtgattcttgtagatgaatatcaggacgccaacatcgcgcagtcgcagctgctgaaggagctatacggcagcgacacttacatctgcgttgttggcgatgacgatcagtccatttaccgcttccgtggcgcggaggtaaaaaatatactgcaatttccgaatcaatacgaaaacacggacatcatccggctggagcgcaattaccgttccaccacacctatactggatacagccgcctcggtggtggatcacaacaggggccggcttggcaaaaagctaaaatccgagcgaggcgatgggaaaattcccgtgcttgcttttttgccggatcaggatacggaggcggaattttgcgcggagcttataaaaaaaggagcgacagccgcaaagaccgttccatatgcagactgggctgtagtctacagaaccaatgcccaatcccttggttttgaaactgaatttttacgcagaaaaataccatatcgcattgtgggctccctcaaattctacgaacgggaagaggtaaaagacaccctcgcgcttctttcgtttctggttaatcccagggacgaagttgcctttcgcagaatggtaaacaagccaagccgaggggtgggccttgccacagttgaacgcattgtcgaggaagccgcgaaggaagagtacagcgggaacctggctttggcagcaggaaatcttgcgccacagctttcagccaaggcgcgggcgggtgtagcggcttttacaaggccatag

SEQ ID NO: 13854 - protein, 280 aa, Unknown
  Obtained from environmental sample
  DOMAIN (1)...(279): UvrD/REP helicase
  misc_feature (1)..(280): Xaa is any amino acid
MDFGDLIKKPVEILRNEPEVARRFRDRFKVILVDEYQDANIAQSQLLKELYGSDTYICVVGDDDQSIYRFRGAEVKNILQFPNQYENTDIIRLERNYRSTTPILDTAASVVDHNRGRLGKKLKSERGDGKIPVLAFLPDQDTEAEFCAELIKKGATAAKTVPYADWAVVYRTNAQSLGFETEFLRRKIPYRIVGSLKFYEREEVKDTLALLSFLVNPRDEVAFRRMVNKPSRGVGLATVERIVEEAAKEEYSGNLALAAGNLAPQLSAKARAGVAAFTRP

SEQ ID NO: 13855 - DNA, 858 bp, Unknown
  Obtained from environmental sample
  misc_feature (1)..(858): n is a, c, g, or t
atgcccaactgtgatgaagaacttttgcgctcgctgcccatggtgcttcgcgcccgtgattttcacctttacaccgagggaggaaaaagactcgtcgatctttggctntacggcggaaaggcggttctgggccacaagccgcccagggttttgctggaacttaaaaatgccgcggaacggggactttttactccccttccccatcccttggaaaagcgccttgtaaaagctctttcaacctttttcccagaccgatcattccgcttctacaatgatttactttccatgtaccgcgccattgaaaaagccttcccaagtgaaagcgcgttattccacgccgaggctattcccgatccggcttttcccgccagcaatgacggtaaagctatcgtttccctttggcggcccttcgtccagccgcttcccgccgacgaaaaaacgccaatcctaatccccgttttaccctggccgttgggccctgctgtgcttacgctcgacaaaagcctggaagcttcttttccacagggagaactaatcccgccggtactgctcgcccaggcggccagggccctctacgaccttgcggcaaagatccgcagccctgaccgccaaaggttttaccggattgaaaaagccatcgccggggcaggacagagtaaagactccaaaaacagcgtatggcagcatcgggggatttacttaaccacacggatggacagagaaaaatatgctgaattgtttcgaagatttttggaagcaggttttctcttgccgcctcgggctagcgaacctgcaattcttcctgcaacaatgtcaaagggagaagaaacttgtcttacagaattgcttggcaggtaa

SEQ ID NO: 13856 - protein, 285 aa, Unknown
  Obtained from environmental sample
  misc_feature (1)..(285): Xaa is any amino acid
MPNCDEELLRSLPMVLRARDFHLYTEGGKRLVDLWLYGGKAVLGHKPPRVLLELKNAAERGLFTPLPHPLEKRLVKALSTFFPDRSFRFYNDLLSMYRAIEKAFPSESALFHAEAIPDPAFPASNDGKAIVSLWRPFVQPLPADEKTPILIPVLPWPLGPAVLTLDKSLEASFPQGELIPPVLLAQAARALYDLAAKIRSPDRQRFYRIEKAIAGAGQSKDSKNSVWQHRGIYLTTRMDREKYAELFRRFLEAGFLLPPRASEPAILPATMSKGEETCLTELLGR

SEQ ID NO: 13857 - DNA, 591 bp, Unknown
  Obtained from environmental sample
  misc_feature (1)..(591): n is a, c, g, or t
ttgctgactatgacgattatagcgggcggggagaattttcttcgcccggaaaaaatttcaatggtggaggacatatncaatgagcatatggcaaaataccgcaaatggcttgcgtttaaagaaacgcaaaatcaaagaccttttttcccgatgtttgttgatatgggcggcagagacgcggtggttgtaggcggcgggaatatagctgagcggagaattaaaattttgattgattttggcatgaaaataacagttatcgcgcccgcagttacagaatatattgaacgcgcggcttcatcacaaaaaataaaattactcaatcgaaaataccaaaaaggcgatataagcgcagtatccccttttcttgttataacggcggctgatgacagacaggtaaacagggatgttacgctggaagcaaaggaactgaatataccggtatcggccgcggataacagggacgaatgttcgttctattttccggcaatagtgaaaaatgaaaactataccgccgctgtcgtgtcgaacgacggcaatcatcgcggcgtaaaagagacagcgcgaaaaataagggaactgattgatttatga

SEQ ID NO: 13858 - protein, 196 aa, Unknown
  Obtained from environmental sample
  misc_feature (1)..(196): Xaa is any amino acid
MLTMTIIAGGENFLRPEKISMVEDIXNEHMAKYRKWLAFKETQNQRPFFPMFVDMGGRDAVVVGGGNIAERRIKILIDFGMKITVIAPAVTEYIERAASSQKIKLLNRKYQKGDISAVSPFLVITAADDRQVNRDVTLEAKELNIPVSAADNRDECSFYFPAIVKNENYTAAVVSNDGNHRGVKETARKIRELIDL

SEQ ID NO: 13859 - DNA, 918 bp, Unknown
  Obtained from environmental sample
  misc_feature (1)..(918): n is a, c, g, or t
atggaaagtgacgtaatacnacaaatggcatactctgatttttcccgcgccagaggaaaggctatgttatcgcaaatacagaattttttaaatacggatcgtgacaaactgctttcgtttaacgatgtcaagggtatattaaaacccaagaatcaagtatacatgggacaccggacggtgccgataaatttgattgtcggcagcgaaggccgttaccacgattttaacaagtattttcttccccgcaaagatcatatgcgccaacgctggtcaaaagttgacgaggcgcatatcaaggatataattcttcctccaatactgctctatgaaattggcggagtatatttcgtgcgggacggcaatcaccgcgtgtcagtcgcaaaattgcagggtgttgaatacatcgacgctgaggtaatcagtcttacgacggagataaatattcttccttccatgacaaccgatgaattaatagccgaacttatcaaatatgaaaagaatattttttacagcgaaacattattcggcgatttaacagattattgggaaatgaatttcagttctcccggacgttatgacgttatttacaaccatatacttgttcacaaatactacttaaacgaagatattgaagaggagattcattttaacaatgcgcttgtgtcatggtacaataatgtttatagtcccgtaataaagataatcagagatcattggttgcttgccaattttcccggaagaacggaagccgacctttatgtttggataattaagcactgggatttcttgaaaaagaaatatgggacttatccgctttacaaagcggcgggagatttttcaaaaaagtacggacaaagtcaggggaagttttttagggttttggcattgtgggttaacaggatatttcataaatcttaa

SEQ ID NO: 13860 - protein, 305 aa, Unknown
  Obtained from environmental sample
  misc_feature (1)..(305): Xaa is any amino acid
MESDVIXQMAYSDFSRARGKAMLSQIQNFLNTDRDKLLSFNDVKGILKPKNQVYMGHRTVPINLIVGSEGRYHDFNKYFLPRKDHMRQRWSKVDEAHIKDIILPPILLYEIGGVYFVRDGNHRVSVAKLQGVEYIDAEVISLTTEINILPSMTTDELIAELIKYEKNIFYSETLFGDLTDYWEMNFSSPGRYDVIYNHILVHKYYLNEDIEEEIHFNNALVSWYNNVYSPVIKIIRDHWLLANFPGRTEADLYVWIIKHWDFLKKKYGTYPLYKAAGDFSKKYGQSQGKFFRVLALWVNRIFHKS

SEQ ID NO: 13861 - DNA, 372 bp, Unknown
  Obtained from environmental sample
  misc_feature (1)..(372): n is a, c, g, or t
ttgaatatgaaatttcgtaacggttattgggaaatcagggatggtttcagccagataaagcccgctgaattttgggatgctgaaatcaggggaagggaacttcatctctttgcgacggctaaaaaattcaatcattggggggacacactcaataccccgcttttaacgaccataatttcttcccccatgcctgacataattcatgtaaaaatgttccggcacaaaggcataaaaaaagttcctcccgaattcaatattattcctgacctgtccggccatgacgaaaccggtataacaatcggggaaaaagacggcttatggcgctttaccgccggcaaactcgccgggagatcgatgcgaaggggtctttga

SEQ ID NO: 13862 - protein, 123 aa, Unknown
  Obtained from environmental sample
  misc_feature (1)..(123): Xaa is any amino acid
MNMKFRNGYWEIRDGFSQIKPAEFWDAEIRGRELHLFATAKKFNHWGDTLNTPLLTTIISSPMPDIIHVKMFRHKGIKKVPPEFNIIPDLSGHDETGITIGEKDGLWRFTAGKLAGRSMRRGL

SEQ ID NO: 13863 - DNA, 453 bp, Unknown
  Obtained from environmental sample
  misc_feature (1)..(453): n is a, c, g, or t
gtggcaagagttacgagtttgatcagaaagccctggggcctgggattaatctactggggactgggagccccgctggctgttttcctctatcatgggtttgttaaaaccattcctttggaacttgacgagtgcgctgttattgacggcgcttccccgccaaaaatcttttttatgattatctttcccctgttacagccggtcacggttacggtaattgtaattaacgccatgtggatgtggaacgattttctgctgccgctgcttatagtgggcggcgcaaaagacgcctacacattacagcttgcggcaaacaattttatggggcaatataaaacagaatggaactatgccatggccggggttatactttccgtagttccggctataactttctaccttgttttgcagaagtatattataaagggcatgaccgcaggagcggtcaaattatag

SEQ ID NO: 13864 - protein, 150 aa, Unknown
  Obtained from environmental sample
  misc_feature (1)..(150): Xaa is any amino acid
MARVTSLIRKPWGLGLIYWGLGAPLAVFLYHGFVKTIPLELDECAVIDGASPPKIFFMIIFPLLQPVTVTVIVINAMWMWNDFLLPLLIVGGAKDAYTLQLAANNFMGQYKTEWNYAMAGVILSVVPAITFYLVLQKYIIKGMTAGAVKL

SEQ ID NO: 13865 - DNA, 897 bp, Unknown
  Obtained from environmental sample
  misc_feature (1)..(897): n is a, c, g, or t
atgatcagatcggccgagcgatatcgtaaactcagccgctgcgaggttctgcctttccagattgacgaggaaagcaacgcgggcgaggatctccggcttaaataccgctatctggacctccgctcaacggccatgcagaccaggctgcgcctgcgcagcgaagttacatacgccgtgcgtgagtggatgacggctaacggattttatgaaatcgaaacgccgacatttatccgctcgacacccgaaggcgcgcgggattaccttgtgccatcgcgtctgtacccgggaaaattctacgccctgccccagtctccccagctttacaaacagcttttgatggtgtcaggcttcgacaaatatttccagatcgcccgctgttaccgcgatgaggacgcgaggggcgaccgtcagcccgagttcacccagatcgacattgagatgtcatttgtgggccgtgatgatattcttgcggtgaccgagggcatgcttgtccacgtctttaaaaaaaccctcggcgttgaacttcccgcgcaattcccccgcctgagttacgaggacgctatgacccaatacggtacggacaagcccgacctgcgttttgaaatgctgttgcaggatttttccccatacgtcgaggcgggcggttttcaggccttcaaggacgcgctttcccaacaaacaggcgccgtaaaggcgctggtggtgaaaggacaggccggttattcccgcanacaaattgaggaactggaggcccacgcgaagatctacaaagccaagggcatggcctggatgaaagttgcagctaacaacgcgcttganggtggggtgagtaagttctttaccgataacgccccccaaataatcaacggggcttggcgcggccccagggggatctga

SEQ ID NO: 13866 - protein, 298 aa, Unknown
  Obtained from environmental sample
  DOMAIN (219)...(292): GAD domain
  misc_feature (1)..(298): Xaa is any amino acid
MIRSAERYRKLSRCEVLPFQIDEESNAGEDLRLKYRYLDLRSTAMQTRLRLRSEVTYAVREWMTANGFYEIETPTFIRSTPEGARDYLVPSRLYPGKFYALPQSPQLYKQLLMVSGFDKYFQIARCYRDEDARGDRQPEFTQIDIEMSFVGRDDILAVTEGMLVHVFKKTLGVELPAQFPRLSYEDAMTQYGTDKPDLRFEMLLQDFSPYVEAGGFQAFKDALSQQTGAVKALVVKGQAGYSRXQIEELEAHAKIYKAKGMAWMKVAANNALXGGVSKFFTDNAPQIINGAWRGPRGI

SEQ ID NO: 13867 - DNA, 783 bp, Unknown
  Obtained from environmental sample
  misc_feature (1)..(783): n is a, c, g, or t
gtgattaaaaccgctggggacggcgagtggtatgtgcgttggttcgatgaaaaaggggaaccgctgggttcgtcaaagaacaagtacaacaaaatagactcacttgggcagagctggcctgtgattagcggcattgcttctgatgaatatgctaaaacagcacttgatagcgttaacaaactgctgaacacagaaaatggaattaaactttcttggcctggctacaacggttttgaccctcacgttggaggtgtttcaacataccctcccggagcaaaagaaaacggcggcatattcctgcacgcaaatccttgggttatgatagccgaaaccataattggaaacggcgacagagcctttcagtattacaaccaaataaatccggctgcaaaaaacaatggcaaaataagcgaatttgaatccgagccatattgctacccgcaaaacattcttggtagtgaacataagcaattcggtttggcacgcaatgcgtggttaagcggcacaagttcttggacatatcaagccgcaacccaatatattttgggcataaaagccacatttaaaggattgtctgttaatccctgcattccaaaagcctggaaagaattcagcgttagccgcaaattccgagatgcagtttatgagatttccgtgaaaaacccaaatggcataagcaaagggataaagtcggttaccatagacggcaatgctattgaaggcaatgtacttccaattttgccgggcaaaaagcatattgttgaagtggttatgggggagtaa

SEQ ID NO: 13868 - protein, 260 aa, Unknown
  Obtained from environmental sample
  misc_feature (1)..(260): Xaa is any amino acid
MIKTAGDGEWYVRWFDEKGEPLGSSKNKYNKIDSLGQSWPVISGIASDEYAKTALDSVNKLLNTENGIKLSWPGYNGFDPHVGGVSTYPPGAKENGGIFLHANPWVMIAETIIGNGDRAFQYYNQINPAAKNNGKISEFESEPYCYPQNILGSEHKQFGLARNAWLSGTSSWTYQAATQYILGIKATFKGLSVNPCIPKAWKEFSVSRKFRDAVYEISVKNPNGISKGIKSVTIDGNAIEGNVLPILPGKKHIVEVVMGE

SEQ ID NO: 13869 - DNA, 525 bp, Unknown
  Obtained from environmental sample
  misc_feature (1)..(525): n is a, c, g, or t
gtggaaatagccatgaacaagaatcaggccagggttataagcctgttgtcggcggcgatctttttattggtttttttaataagcggccgcttgttcttccgcctggatttaacaaagaacaaagcctacaccatctcggaggtctcaaagaacctctacaaggaaatatcggatcaggtaagaattacctatttcgtttcggaaaagctaaggcaggcccatcccatgcccggagaaattgccgacttgctgcgcgaatacgcggcgaactcaaggggaaaaatccgtttcttccaaaaagacccggcaaaggcggagcttcttaaggcagtggaagatctgggaattgagccccagcaaattcaactggcggaacagaatgaaataaccgtagccactgtctattcgggaatccttatagaatacctggatcgggaaacggttattcccgttgtcttttcgttggataccctggaatacgacttaagctcccgcctcgtgccgctcggccgatctgatcattga

SEQ ID NO: 13870 - protein, 174 aa, Unknown
  Obtained from environmental sample
  misc_feature (1)..(174): Xaa is any amino acid
MEIAMNKNQARVISLLSAAIFLLVFLISGRLFFRLDLTKNKAYTISEVSKNLYKEISDQVRITYFVSEKLRQAHPMPGEIADLLREYAANSRGKIRFFQKDPAKAELLKAVEDLGIEPQQIQLAEQNEITVATVYSGILIEYLDRETVIPVVFSLDTLEYDLSSRLVPLGRSDH

SEQ ID NO: 13871 - DNA, 402 bp, Unknown
  Obtained from environmental sample
  misc_feature (1)..(402): n is a, c, g, or t
ttgttattcgcaatggttttacttaccgtccttgtcccgttaagcattttaccgctggggcgttttgaaggcggggtaatattcggcgaatacgccgggacattgttcctgggagcaagcgctaccgctcttggggtttttctttcaggcgtttccaaaaatcaggccgccgcgtttgttggaagcgtggtcgcgctgcttgcggtaatgctcatgcatcaactaacggagaacctgccttccggcctcgcgtccatggttaattacctttcccttgcttttcattttgaaagtttttcccgcgggcttttggacagccgtgatatggccttcttcctgataaccacgattctctttttgtttctcaacacccagattcttgtctatagaaggtggaaatag

SEQ ID NO: 13872 - protein, 133 aa, Unknown
  Obtained from environmental sample
  misc_feature (1)..(133): Xaa is any amino acid
MLFAMVLLTVLVPLSILPLGRFEGGVIFGEYAGTLFLGASATALGVFLSGVSKNQAAAFVGSVVALLAVMLMHQLTENLPSGLASMVNYLSLAFHFESFSRGLLDSRDMAFFLITTILFLFLNTQILVYRRWK

SEQ ID NO: 13873 - DNA, 885 bp, Unknown
  Obtained from environmental sample
  misc_feature (1)..(885): n is a, c, g, or t
atgcctcatgcgaaattatcagtaccacatttaagcccagaggaaagccgccctgggcatttgaatatttgcccccctagcgagcctactccattcttgttaaaaagcccctacgcccctgctggagaccagccgcaggctattgaggcgataaccaaggcttttcaagacggagagaaattccagattcttttgggagtaacgggtagcggaaaaacattcacaatggcaaatgtcattagaaatttggcaaaaccaactttgattttaacacacaataaaacgcttgccgcacagctttaccacgaattcaaaacattttttccagaaaatgcagttgaatattttgtaagctactacgactactatcagcccgaagcctatattgtgtctagcgatatttttatagacaaagatgcctccataaacgaggaaatagataaattgcgcctccgtgccacaaaaaatttgctcactcgcagagatacaataatagtggcttctgttagctgcatttacggtttgggaagccctgctgaatattttgaactgatggttcgccttaaagttggagaagaacgggatagagaccgcattttgaaagatttggttgccattcaatacgaccgcaacgattatgctttggaacgcggaacattcagggtacgaggcgaccgcatagatatttaccctagctacgacgatattggacttcgcattgaactttttggagacacaatagaaaaactctcttggtttcatctggtatctggcgaaactataaaagaggttggcgaaattgttgttgctccctgcaagcattttgtaacccgagnaagaagcngaaatagaataantaagagaattcaaaagaactggatatga

SEQ ID NO: 13874 - protein, 294 aa, Unknown
  Obtained from environmental sample
  DOMAIN (37)...(157): Type III restriction enzyme, res subunit
  misc_feature (1)..(294): Xaa is any amino acid
MPHAKLSVPHLSPEESRPGHLNICPPSEPTPFLLKSPYAPAGDQPQAIEAITKAFQDGEKFQILLGVTGSGKTFTMANVIRNLAKPTLILTHNKTLAAQLYHEFKTFFPENAVEYFVSYYDYYQPEAYIVSSDIFIDKDASINEEIDKLRLRATKNLLTRRDTIIVASVSCIYGLGSPAEYFELMVRLKVGEERDRDRILKDLVAIQYDRNDYALERGTFRVRGDRIDIYPSYDDIGLRIELFGDTIEKLSWFHLVSGETIKEVGEIVVAPCKHFVTRXRSXNRIXKRIQKNWI

SEQ ID NO: 13875 - DNA, 540 bp, Unknown
  Obtained from environmental sample
  misc_feature (1)..(540): n is a, c, g, or t
ttgacgttcggcgattcttcgggaacggggagcgcgccggtcatttcacggataaaaagcgcgtcagccgcctcgcgcagggaagacaccgccttgaatcgcataacagggttcccgcccgctccgtatagtatagcggcttcccctttgttttcagccggcacgatgaattcagtaatgccctcctcaaggccgccggcgattgccgccagaacgccgcgtaccgggcgtatatttccggaaagctccagctcccccataacaaggatgttcggaggctccggcacaagtcccgcggccgccattaccgccagcgcgatcggcaaatccagcgcggccccgtctttccgcagccccgccggcgccaggttgataagaatcctgtccagcgggaaggtaaacccggaattcctgaacgccgcccttaccctttccttcgcttcacgaaccgccccttcggcaagcccgctgatgtcgataccgggaatcccccgccgtatatccgcttccacccggataataaccccgcccgcgccataa

SEQ ID NO: 13876 - protein, 179 aa, Unknown
  Obtained from environmental sample
  misc_feature (1)..(179): Xaa is any amino acid
MTFGDSSGTGSAPVISRIKSASAASRREDTALNRITGFPPAPYSIAASPLFSAGTMNSVMPSSRPPAIAARTPRTGRIFPESSSSPITRMFGGSGTSPAAAITASAIGKSSAAPSFRSPAGARLIRILSSGKVNPEFLNAALTLSFASRTAPSASPLMSIPGIPRRISASTRIITPPAP

SEQ ID NO: 13877 - DNA, 597 bp, Unknown
  Obtained from environmental sample
  misc_feature (1)..(597): n is a, c, g, or t
atgagtgatttgatagaaaaaaaagacggttacacaggagtacacacaaaacgggtaagcgaatatgttgctattttactgcgtgaattggcgcgccgcggccatcaatttaccgaatcagagatccagagaatggcagaatcttccctgttacacgacatgggaaaaatagcgataccagacagtatccttcttaaagaaggaaaattgaccgatgatgagtttgatgtaatgaaaagccacagcgcgaaaggtgcggattcattgcaaaagtcgatgcagttcgcgaaagataacgattttttgaagaatgcgtttgtaatggctaaacatcaccatgagaagtggaacggcggaggttatcctgacgggaaaaaaagaaatgagatacctcttcttgctcgtgtaatcgccatcgcggacgtttatgacgcattgcgttcgaaacgttcttataaaacgccattcagccgtgagaaagcaaaatcaatcatattggaagaaaacggacgccaattcgatcccgaactggttgatgtttttttagcggtagagccggaatttaatgaattctgtgaatctgccaaaaatgaatga

SEQ ID NO: 13878 - protein, 198 aa, Unknown
  Obtained from environmental sample
  DOMAIN (12)...(146): HD domain
  misc_feature (1)..(198): Xaa is any amino acid
MSDLIEKKDGYTGVHTKRVSEYVAILLRELARRGHQFTESEIQRMAESSLLHDMGKIAIPDSILLKEGKLTDDEFDVMKSHSAKGADSLQKSMQFAKDNDFLKNAFVMAKHHHEKWNGGGYPDGKKRNEIPLLARVIAIADVYDALRSKRSYKTPFSREKAKSIILEENGRQFDPELVDVFLAVEPEFNEFCESAKNE

SEQ ID NO: 13879 - DNA, 552 bp, Unknown
  Obtained from environmental sample
  misc_feature (1)..(552): n is a, c, g, or t
atgatcgtaaccataaaagacctctggaaaatctaccccatgggcgaccttgaagttcaagccctaaaaggtataaaccttgaaatttccgaaggcgattttgttgcagtcgcaggcccctcaggctccggaaaaaccaccttaatgaacatcatcggcctaatcgacagcttcagccgcggcagtctaacaattaacaatctggaaattaattcaaaaaaacgaagagaacttgcccgtctccgccgcgaccttttaggctttattttccagtcctttaacctcttgcctgtgttaaatgtttttgaaaatgtggaactgccgctgattatctccggaaaaggcgggacaaaggcgcagaggcgggacagggtaaattatttgctggaagaagtcgggcttggagacagaagccgtcatattccaacggaactttccggcggccagcagcagcgagtcgccatcgcgcgggcgttggttacaagtcccagaatcgttatcgcggatgaacctacctgcaaccttgactcgggaacaggcgaaaaagtttaa

SEQ ID NO: 13880 - protein, 183 aa, Unknown
  Obtained from environmental sample
  DOMAIN (32)...(182): ABC transporter
  misc_feature (1)..(183): Xaa is any amino acid
MIVTIKDLWKIYPMGDLEVQALKGINLEISEGDFVAVAGPSGSGKTTLMNIIGLIDSFSRGSLTINNLEINSKKRRELARLRRDLLGFIFQSFNLLPVLNVFENVELPLIISGKGGTKAQRRDRVNYLLEEVGLGDRSRHIPTELSGGQQQRVAIARALVTSPRIVIADEPTCNLDSGTGEKV

SEQ ID NO: 13881 - DNA, 300 bp, Unknown
  Obtained from environmental sample
  misc_feature (1)..(300): n is a, c, g, or t
atggcgcttaattcgacaaagtttgtttcttacaaggacttgaaaaaagtatgcgccgatttaaagacaatatattcagctaacagcgaagaaaccggacatgacgctctgaaagatttcggcaagaaatggaatgacaaatatccgatgatatataaatcatgggagcagcgctgggcagacttaaacgaattttttaagtacccgcctgaaatccgccgtgcgatttatacaactaacgccgttgagtcacttaattatcagttaagaaaagttactaaaaacagatcgacattttaa

SEQ ID NO: 13882 - protein, 99 aa, Unknown
  Obtained from environmental sample
  misc_feature (1)..(99): Xaa is any amino acid
MALNSTKFVSYKDLKKVCADLKTIYSANSEETGHDALKDFGKKWNDKYPMIYKSWEQRWADLNEFFKYPPEIRRAIYTTNAVESLNYQLRKVTKNRSTF

SEQ ID NO: 13883 - DNA, 768 bp, Unknown
  Obtained from environmental sample
  misc_feature (1)..(768): n is a, c, g, or t
ttgcggtcaaaagaaaaggtgaacgcttatttttatttccggtcgccaaagatggaagtgggggaagggttcaaagaaaaccccggttcccttgaggcgcaaaagttagccgccctcaagcaaactcttcgggaacagcgggactacccggtaaaggattacgattccattgagcacctgggcaatttggtggaagcggacttcaaggcgctggtggacaggctttttccgcagggggcgctgtcgccgcttgaaaaagaacggtttctgcaacgggtttatctgaaaagaatgacccgcgtgtatgtgtcgaatcctgagtatgacgcacgtatcgaccgttttgtcaaaagcgccgatggaaggagcatcgcaatatgcggagaggcaggtatagggaagagcgccctgcttgcccactggattcaaaacaggggggaacgggagaacgaaaagatcatctatcactttgtcgggcagggcggggacgaaggggattaccgcaagatcacccgtcggctcatcgaagagatacgtgacctgtacagagtccagtcagcgccgccgtccgaacaaccggaaggggaggatccgcaaaaaacagaactgcaaaacctgcttgccgccgtcaaggatagaggcaggctgatcatcatcatggacggtcttgataaattccggaaaattgatgatgagccttttgtatcaacactagactggcttcccgatctttctgataatatcagatttatttgttctacccaatga

SEQ ID NO: 13884 - protein, 255 aa, Unknown
  Obtained from environmental sample
  misc_feature (1)..(255): Xaa is any amino acid
MRSKEKVNAYFYFRSPKMEVGEGFKENPGSLEAQKLAALKQTLREQRDYPVKDYDSIEHLGNLVEADFKALVDRLFPQGALSPLEKERFLQRVYLKRMTRVYVSNPEYDARIDRFVKSADGRSIAICGEAGIGKSALLAHWIQNRGERENEKIIYHFVGQGGDEGDYRKITRRLIEEIRDLYRVQSAPPSEQPEGEDPQKTELQNLLAAVKDRGRLIIIMDGLDKFRKIDDEPFVSTLDWLPDLSDNIRFICSTQ

SEQ ID NO: 13885 - DNA, 471 bp, Unknown
  Obtained from environmental sample
  misc_feature (1)..(471): n is a, c, g, or t
atgatctactgcgtacatttttatgagcctctgctgttcacccaccagaacgcgccatggattggcaattctgaaattaaaaccgtaagatcgtatccgggcgattacggccccggctttgtccgcaagtacggcttaacaatgtccgccggcatctgggaccgacagcggctggtaaaggagtttgagccggtcaacacgttcagaaagaagtacaacgcgcggataatctgcgacgagttcggcgtttatacgcccgtcgagcttcaatcgcagttacgctggtatgatgatctgctttcaatcctcaaggatatggagattggtttctcgtattggaactacaaaaatcttgattttggcataatttcaaccggagagaaactgcatgaaaatcttccgcagtacaacaacagcgagcggattaattacccggtgcttgaagtgttgagaaaaatattagattgttaa

SEQ ID NO: 13886 - protein, 156 aa, Unknown
  Obtained from environmental sample
  misc_feature (1)..(156): Xaa is any amino acid
MIYCVHFYEPLLFTHQNAPWIGNSEIKTVRSYPGDYGPGFVRKYGLTMSAGIWDRQRLVKEFEPVNTFRKKYNARIICDEFGVYTPVELQSQLRWYDDLLSILKDMEIGFSYWNYKNLDFGIISTGEKLHENLPQYNNSERINYPVLEVLRKILDC

SEQ ID NO: 13887 - DNA, 759 bp, Unknown
  Obtained from environmental sample
  misc_feature (1)..(759): n is a, c, g, or t
gtgctggagatgtttcattatcaaaaatgcggcgttgaccttgaatgtggattgtggtctcatcccgcatgtcatataacgcccgcggtgatttacggaacagacaaaaagaaagatgtttccggcggttggcatgacgcgggcgattacggacgctatattgtccccgccgcaaaaacggtcgctgatttattgtgggcgcataagtttgccgacaatcctgacgcgccgctgttggatacggtgtggtttgaaattgaatggatgctgaagatgcaggatgaggaatcaggcggcgtttaccataaggtaagctgcgaaaaatttaacgcgttggatgaaatgccgcatgatgaacatgacgaactgtttttgtcgcccatttcggcaacggcaaccgccgactttgccgcgtctatggcgcttgcgtcgcgtttttatcccgatcataaagataccttgctcaacgcggcatggcgcgcgtggaactggtgccgcgcacatcccaacgcggagggttttatcaatcctcccggcataaacaccggcggctacggcgacgacgacagcagggacgaacgtctttgggcggcgtgcgcgttatttgccgcgaccggggatgaaacctgccacgcttatattaaaacatgcgggctttactccgaagaataccgagccgatgttttgtttcccttcggtctgggttggggtaatgtagaagcgtacgggtttatggaatatcttctcggccgattctga

SEQ ID NO: 13888 - protein, 252 aa, Unknown
  Obtained from environmental sample
  DOMAIN (5)...(252): Glycosyl hydrolase family 9
  misc_feature (1)..(252): Xaa is any amino acid
MLEMFHYQKCGVDLECGLWSHPACHITPAVIYGTDKKKDVSGGWHDAGDYGRYIVPAAKTVADLLWAHKFADNPDAPLLDTVWFEIEWMLKMQDEESGGVYHKVSCEKFNALDEMPHDEHDELFLSPISATATADFAASMALASRFYPDHKDTLLNAAWRAWNWCRAHPNAEGFINPPGINTGGYGDDDSRDERLWAACALFAATGDETCHAYIKTCGLYSEEYRADVLFPFGLGWGNVEAYGFMEYLLGRF

SEQ ID NO: 13889 - DNA, 798 bp, Unknown
  Obtained from environmental sample
  misc_feature (1)..(798): n is a, c, g, or t
gtgatgaagatgggcgtaatgggagcggcgctgtcaaccttnttaagcaggataatagccgcggccatcacaaccgttatgcttgtcagaaacaaaacaagccccatatcgcttttcgggctgcaccatatccgtatagtccgttccatgataaaaaatattcttaatgtcggagtccccagcggcgtggaaagttctatgttcatgattgggaaactccttacacagcgtattttcgccgtttttggcacggccgccatcgccgccaacgccattgccagccttgtcaattctttttcattcatgcccggtaacgcctttggcatagccctccttacagttgtcgggcaatgcataggcgccggggactatcaggcggttaaaaaacagacatttaaaatcatgaaaatcgcgtacatttccattttttgcatgagtacggcgacctacatccttatggaaccgctggtaagcctgtttaaaatgagtccgtcagctcatgagttggccaagtccattctgcgcgtacactgcatttccatggcttttggctgggcaatgagctttgcccttcccaacgccctgcgggccgcaggcgacgcccgctatgtgatgattgtcgcgagtttatccatgtggatagtccgcgtgtgtttctcttatttattttcttttacgctgggattcgggcctttgggcgtatggctcgccatgggcgctgattttgttgtacgcggcacatcctatttaacgcgctggattcgcggcaagtggcaggagaaacgagtaataacatag

SEQ ID NO: 13890 - protein, 265 aa, Unknown
  Obtained from environmental sample
  SIGNAL (1)...(21)
  DOMAIN (60)...(222): MatE
  misc_feature (1)..(265): Xaa is any amino acid
MMKMGVMGAALSTXLSRIIAAAITTVMLVRNKTSPISLFGLHHIRIVRSMIKNILNVGVPSGVESSMFMIGKLLTQRIFAVFGTAAIAANAIASLVNSFSFMPGNAFGIALLTVVGQCIGAGDYQAVKKQTFKIMKIAYISIFCMSTATYILMEPLVSLFKMSPSAHELAKSILRVHCISMAFGWAMSFALPNALRAAGDARYVMIVASLSMWIVRVCFSYLFSFTLGFGPLGVWLAMGADFVVRGTSYLTRWIRGKWQEKRVIT

SEQ ID NO: 13891 - DNA, 441 bp, Unknown
  Obtained from environmental sample
  misc_feature (1)..(441): n is a, c, g, or t
atgtttgttgacatgagcggcagagatgtggtggttgtaggcggcgggaatatagcacagagacgtattaaaattatgattgaatttggtatgaaaataacggttattgcgcctgaagttactgaatatattgaacatgaagctttatcacgaacaataaatttactcaatcgaaaataccaaaaaggcgatataaacgccatctctcctttttttgttatagcagcggccgatgacagacaggtaaacaaggatgttatgctggaagcaaagggattgaatataccggtatcggttgcggataacagggatgaatgttcatttcattttccggcaatagcgaaaaatgaaaattataccgccgctgttgtatcgaacaacggtaatcatcgcggcgtaagagagacagctcaaaaaataagggaactaattgatttatga

SEQ ID NO: 13892 - protein, 146 aa, Unknown
  Obtained from environmental sample
  misc_feature (1)..(146): Xaa is any amino acid
MFVDMSGRDVVVVGGGNIAQRRIKIMIEFGMKITVIAPEVTEYIEHEALSRTINLLNRKYQKGDINAISPFFVIAAADDRQVNKDVMLEAKGLNIPVSVADNRDECSFHFPAIAKNENYTAAVVSNNGNHRGVRETAQKIRELIDL

SEQ ID NO: 13893 - DNA, 747 bp, Unknown
  Obtained from environmental sample
  misc_feature (1)..(747): n is a, c, g, or t
atgtatccgcttaatatggaaaacggcgagcagatatttacatgggtttccactcttcccgataacgcaagccgcgtacagcgaattgattgttttgtggcaaaaaataaaatgagctggtcttttaccaacttttttacttccgtaaacgattcaaaaaagcataatattgaattttcaaatttaactccgattattccgaaaacatggagtcatcatcttatccgtttcgacgcgacaacgggaatgttagagtacattgtagacggcagaagcgaggcgattgtttacgctacgtccacaggacgcgaaaacagcgaagtgcataatccggtactcggcgttaacggcagattcttgcttggcgagcgtttttccggtcttattgatgaatttaagattcacagcatttgcgcgggacgttcttcgattcaaagatacgctacgagcggcggaaggattgagacaagagccattgatctgggagcaaacgcaagcggcgttgtaagaattaacgcgtcgggcggcagaacaagcatcaggggcgcgagagtacagaacgaataccgcgagaacggaaggtttaaattttccgacgacggggaaatgaatttctttatccgcgccggagaanatccatatcttttaagaaataacccctgggtcatgtttacgccgggaagcgatataaaaggcatcaacggacgttacgcgcaaattgcccgtagatttttacccttccgctga

SEQ ID NO: 13894 - protein, 248 aa, Unknown
  Obtained from environmental sample
  misc_feature (1)..(248): Xaa is any amino acid
MYPLNMENGEQIFTWVSTLPDNASRVQRIDCFVAKNKMSWSFTNFFTSVNDSKKHNIEFSNLTPIIPKTWSHHLIRFDATTGMLEYIVDGRSEAIVYATSTGRENSEVHNPVLGVNGRFLLGERFSGLIDEFKIHSICAGRSSIQRYATSGGRIETRAIDLGANASGVVRINASGGRTSIRGARVQNEYRENGRFKFSDDGEMNFFIRAGEXPYLLRNNPWVMFTPGSDIKGINGRYAQIARRFLPFR

SEQ ID NO: 13895 - DNA, 360 bp, Unknown
  Obtained from environmental sample
  misc_feature (1)..(360): n is a, c, g, or t
gtggaaccctatgtttactcgcaatttaccgaaagcgttgacagcccgtttgaaggacgcagtcatgtacattggctcacaggtactgcaagtacctgtatggtcggcagcgtagaagggattttgggattaaggccggatattgaaggcttgcgccttgctcccgccgttccgtcatcatggaaatcatttacaatggaaaaaactttccgggggagcaagcttaacataaaagtaaataaccccgacgggcatgaaagcggatgcaagaaattgacagttaacggctcggcggtagacggaaattacattcccgcttcattattaaaagcggaaaacgaaattgtactggagatgtag

SEQ ID NO: 13896 - protein, 119 aa, Unknown
  Obtained from environmental sample
  misc_feature (1)..(119): Xaa is any amino acid
MEPYVYSQFTESVDSPFEGRSHVHWLTGTASTCMVGSVEGILGLRPDIEGLRLAPAVPSSWKSFTMEKTFRGSKLNIKVNNPDGHESGCKKLTVNGSAVDGNYIPASLLKAENEIVLEM

SEQ ID NO: 13897 - DNA, 732 bp, Unknown
  Obtained from environmental sample
  misc_feature (1)..(732): n is a, c, g, or t
gtgaccatattcttggacaaagaccgtgatagcgtgatagatgtgcttgatgaccgaaaagcggaaacgctggaaacatggcttaaaacacagaaaaccagcgatttaagcgagttaaacagcattaccatggatatgtgggatccgtatataaaagcagtgaaggcagcgataagcgaggcagaaaataaaatagcatttgaccgatttcatgtaagcaagcatattaaccaggcattggataaagtaagacggagggaacacaatgcttttattaaacaggctggagaaagcccgttaagcaaaagccggtttcagtggctgattaattcaaacaaaactgataaccggagcggcaaacggaaagcatttatgagcatatcgcggcttaatcttgagacagcccgtgcatggaggataaaagaaacagccaacagtttgtgggattatatatacatgaatgtagcagagagtgcatgggagaaattactttggtggataagccacagccggatacctgaaatgatagaagccggcaaaacgatacggaattatttctgggggatcatgaatgcaatacgtttaaaaacaacaaacggtatgcttgaagcaaaaaacaattgcattcaacggattaagcgtatggcatgtgggtttagaaatcctgaaaggtttaaaactgctattcttttccaccttgggaatttagacctttttccttccaccttttag

SEQ ID NO: 13898 - protein, 243 aa, Unknown
  Obtained from environmental sample
  DOMAIN (2)...(87): Transposase
  misc_feature (1)..(243): Xaa is any amino acid
MTIFLDKDRDSVIDVLDDRKAETLETWLKTQKTSDLSELNSITMDMWDPYIKAVKAAISEAENKIAFDRFHVSKHINQALDKVRRREHNAFIKQAGESPLSKSRFQWLINSNKTDNRSGKRKAFMSISRLNLETARAWRIKETANSLWDYIYMNVAESAWEKLLWWISHSRIPEMIEAGKTIRNYFWGIMNAIRLKTTNGMLEAKNNCIQRIKRMACGFRNPERFKTAILFHLGNLDLFPSTF

SEQ ID NO: 13899 - DNA, 417 bp, Unknown
  Obtained from environmental sample
  misc_feature (1)..(417): n is a, c, g, or t
atgagcacacgtactgaccatcagattgttacacacaacggtacgcctgtcgccgtggtcatttcttacgaggaatacctgaagctgacgggggggggggatgccggcaatcatgaggatattccgagcgatgcggaaatcgaggctgttcgtaatgacctgcataccatcccggacgaagtggtggatatgatgctcaaaaatcgtttttccgtcatccgtgcatggcgggagtacttggggttgacgcaaagggccgttgccggggcaatgaagatttctcaacccgtatatgcgcgcatggagtcgggcagggtcacgccgcgcatcgccaccttgcgccggatcgcgcgcgccttgggcattgacgcggcgcaactggatgtacggccgcgtgcacgcaggatcagcgaatag

SEQ ID NO: 13900 - protein, 138 aa, Unknown
  Obtained from environmental sample
  DOMAIN (73)...(127): Helix-turn-helix
  misc_feature (1)..(138): Xaa is any amino acid
MSTRTDHQIVTHNGTPVAVVISYEEYLKLTGGGDAGNHEDIPSDAEIEAVRNDLHTIPDEVVDMMLKNRFSVIRAWREYLGLTQRAVAGAMKISQPVYARMESGRVTPRIATLRRIARALGIDAAQLDVRPRARRISE

SEQ ID NO: 13901 - DNA, 603 bp, Unknown
  Obtained from environmental sample
  misc_feature (1)..(603): n is a, c, g, or t
atggccgaaattataggcaggaatgttatggtcatatctaccggcatgggcggcccttccactgccattgcggtggaggagcttttcaaaacaggcgtacgcaatttcatccgggtcggtacatgcggcggtatggcgctgcctgttttgggcggggacattgtcatagcgaccggagctatccgtatggagggcaccaccagggaatacgttcctgttgaatttccggcggtcgcaaaccttgacattaccaacgcccttgtcgaagccgctaaaaagctcaacgcgcaatggcacgccggaatcgtgcagtgcaaagattccttttacgggcagcacaatcccgatcatatgcccgttggctatgagctaatgaacaagtgggccgcctggataaaagccggctgcctcgcgtctgaaatggaaagcgccgctctttttatcgtgagtcaggtacttggcgcaagggcgggctgtgtgcttaacgtggtgtggaaccaggagcgggaacgcgccggaatgagcaatccccacagccacgacacaagccttgggataaaagtagccgtggaggcaatacgtattttgattgagcgtgaatga

SEQ ID NO: 13902 - protein, 200 aa, Unknown
  Obtained from environmental sample
  SIGNAL (1)...(24)
  DOMAIN (1)...(193): Phosphorylase family
  misc_feature (1)..(200): Xaa is any amino acid
MAEIIGRNVMVISTGMGGPSTAIAVEELFKTGVRNFIRVGTCGGMALPVLGGDIVIATGAIRMEGTTREYVPVEFPAVANLDITNALVEAAKKLNAQWHAGIVQCKDSFYGQHNPDHMPVGYELMNKWAAWIKAGCLASEMESAALFIVSQVLGARAGCVLNVVWNQERERAGMSNPHSHDTSLGIKVAVEAIRILIERE

SEQ ID NO: 13903 - DNA, 546 bp, Unknown
  Obtained from environmental sample
  misc_feature (1)..(546): n is a, c, g, or t
gtgaaaaatttatctgcttccatttnttcgcttgttttagcgatcattttctgttacatgatcatcgcgtcaattaacgaatcgtttaccgttcctttgcttgtcctctcggcaattcctccgtctttaacggttccagctctattacttgttttaaccggaaacgcatataattccgccgtcgcttgcgcctttattgtcgtaagcggcatgacagttaacgcggcgattttatgcgtagacggtcttcgctcaaaaattaaatcaggaaaagaaaaaaactcgttcagcatttattacgctctccgtttaaaaatgcccgccctgctctccaccaccggtacaaccgttgccggcgcaattccgtttcttttcctgacagaaggcgcaaatacattgatacgcacattatctcttgtaagcgcgctcggagtaacttgctcgtttttttgttcaataaccgtaattccatctattttatctattaaacacacaacaaaaaaaattccgcttgtgcgggataaaaatcaaaatttgggagaatag

SEQ ID NO: 13904 - protein, 181 aa, Unknown
  Obtained from environmental sample
  SIGNAL (1)...(26)
  misc_feature (1)..(181): Xaa is any amino acid
MKNLSASIXSLVLAIIFCYMIIASINESFTVPLLVLSAIPPSLTVPALLLVLTGNAYNSAVACAFIVVSGMTVNAAILCVDGLRSKIKSGKEKNSFSIYYALRLKMPALLSTTGTTVAGAIPFLFLTEGANTLIRTLSLVSALGVTCSFFCSITVIPSILSIKHTTKKIPLVRDKNQNLGE

SEQ ID NO: 13905 - DNA, 804 bp, Unknown
  Obtained from environmental sample
  misc_feature (1)..(804): n is a, c, g, or t
gtgacgcgggtggttcacgtggtccgctgcttcgacgacggcgacgtcgtccacgtggacggcgggatcgaccctctgcgtgacatatccacggtcgacaccgaattaatgctcaaggatttcgagaccgccgagaagggtctgacgcgtgtgtctaaggccgccaagacgggcgacaaggagatgaaggggcggcttgccgtctacgagaagatacacgcggcgctcggcaagggcgtcccggcgcgtaaggcgctagaccctgaggagcttgcggccgtcgcggatatgcaccttttgacgtcaaagcccgttctctacgttacaaacgtcggggagggcgatctacaggaagacaataaatatgttaaggccgtagccgaacacgccgccggagagggggcctcttacgtgaagttttgcggcaaggcggagtctgaaatagcggagcttccgtcggaggagcgcgccgactttttggatagtttggggctaaaggagccgggattgaacgttttggcgcggggtatatacaaactgctgggtttggagaccttcttcaccgccgggaaggaggagaaccgcgcttggacgatccacgccggcgccaccgctccgcaggccgccggggtgatccacaccgacttcgagaagggcttcatcagggcggacgtctactcgctggccgaccttgagacgtacagatccgaggccgcgatcagggcagccgggaagattcgctcagagggccgggagtacgtcgtcaaagacggcgatattatgttcttcaagttcaacgtctga

SEQ ID NO: 13906 - protein, 267 aa, Unknown
  Obtained from environmental sample
  DOMAIN (183)...(266): Protein of unknown function (DUF933)
  misc_feature (1)..(267): Xaa is any amino acid
MTRVVHVVRCFDDGDVVHVDGGIDPLRDISTVDTELMLKDFETAEKGLTRVSKAAKTGDKEMKGRLAVYEKIHAALGKGVPARKALDPEELAAVADMHLLTSKPVLYVTNVGEGDLQEDNKYVKAVAEHAAGEGASYVKFCGKAESEIAELPSEERADFLDSLGLKEPGLNVLARGIYKLLGLETFFTAGKEENRAWTIHAGATAPQAAGVIHTDFEKGFIRADVYSLADLETYRSEAAIRAAGKIRSEGREYVVKDGDIMFFKFNV

SEQ ID NO: 13907 - DNA, 876 bp, Unknown
  Obtained from environmental sample
  misc_feature (1)..(876): n is a, c, g, or t
atgacgaaactgtcttcttacaagaattatgttccctttcttgggtttatatcgttagctgctttatttcagggagtattaaacagttttcatatttttactccgtcaggttttgcgcctattttattaaacattgttactattctctgcgcttacggtcttagtccctacactcaaaatcctgcgagagcaatggccgccgggattctaataggcgggtttttaagcgcaggtatccaactgccgtttgtcattaaacacggacagagattcttttttaccggattaaaacgcgcgatgaccaatccgggaacccgtaaagttctgcgattgatcagccccactataatcggaatggccgcatatcagctaaatgaccttttttctacagccttggctggcagagccggcgaaggcatagtatcaagccttcaatactcgctgcggctacaggaactgatacttggcgtatttgcggtttctatcggaacagtactgcttcctgaccttgcggaatattcaaaatccttacaatgggatatttataacaagcggttaatatcagccatgaacataattgcgcttataacaatccccataactttcttttcccttgttgagggacagagtttgatccgtcttcttttccaaacccgtaatttcgacgaaacatctgtcagtcttactctttctgctttcacatttcatatgcccggtttatttttcatagctttaaaccgtgttttagctcccgcattttacgcccaaagcgatactaaatcgcctactttagcgggaataatatcgtttctatttaacatttgccttgcaataattcttgtcaagccgttagcgcggcgccctcggccgatctga

SEQ ID NO: 13908 - protein, 291 aa, Unknown
  Obtained from environmental sample
  SIGNAL (1)...(25)
  DOMAIN (114)...(279): MatE
  misc_feature (1)..(291): Xaa is any amino acid
MTKLSSYKNYVPFLGFISLAALFQGVLNSFHIFTPSGFAPILLNIVTILCAYGLSPYTQNPARAMAAGILIGGFLSAGIQLPFVIKHGQRFFFTGLKRAMTNPGTRKVLRLISPTIIGMAAYQLNDLFSTALAGRAGEGIVSSLQYSLRLQELILGVFAVSIGTVLLPDLAEYSKSLQWDIYNKRLISAMNIIALITIPITFFSLVEGQSLIRLLFQTRNFDETSVSLTLSAFTFHMPGLFFIALNRVLAPAFYAQSDTKSPTLAGIISFLFNICLAIILVKPLARRPRPI

SEQ ID NO: 13909 - DNA, 474 bp, Unknown
  Obtained from environmental sample
  misc_feature (1)..(474): n is a, c, g, or t
atgccgatcagccttggcgatatatctgatgacgatatagaggtcgagggcgcccttcttgacgccgccgcggctgatgtaacagcgatcttgccggagttttttccgactacagtagacgcgctattaacgcgatgggaggcggaatacaacgtcatcccgaggtcaggggccggcatagaggatcgccgccgtgctgtcctagccgcctacgtcggcagcggcagcctaaccaaggcccacttcacagcgctggccgccgcgcttggatacgatgtcactatcaccgagggtggggacgggcttttgctatttcgagcaggtatcagcagggccggcgatccggtgtactcagcgggttcgatatggacatggacagtaacaacccacaacaagccggcagcgacagacatcagagacctatttaccgacctaggccctccacacatgcggctggaatttgctggcccataa

SEQ ID NO: 13910 - protein, 157 aa, Unknown
  Obtained from environmental sample
  misc_feature (1)..(157): Xaa is any amino acid
MPISLGDISDDDIEVEGALLDAAAADVTAILPEFFPTTVDALLTRWEAEYNVIPRSGAGIEDRRRAVLAAYVGSGSLTKAHFTALAAALGYDVTITEGGDGLLLFRAGISRAGDPVYSAGSIWTWTVTTHNKPAATDIRDLFTDLGPPHMRLEFAGP

SEQ ID NO: 13911 - DNA, 426 bp, Unknown
  Obtained from environmental sample
  misc_feature (1)..(426): n is a, c, g, or t
ttgtccgttgacgcattggggaaatttttatgcttttccatatcagttaccgtgataagccctgtaagtttaccttctttgtttacaaccggaagtttttcaatccggttttcgaaaaatatttttttgactttgtccagagacggttcatcttcaatttttacaagtttttgtgtcatcacactggttacagacagagaatcatcatcgcagaaacgcagatcgcggtttgtaataattccttttagttttccttcactatccactaccggaagacctgaaatgccgtgtttacttaccaattctctgacatcactaatatgcgcgttatgcggaacggttacaggagaatcaattatccagtttaaaaaacgcttaactcctgaaacctgccgcgcttgttcttcggggcttaggttacggtga

SEQ ID NO: 13912 - protein, 141 aa, Unknown
  Obtained from environmental sample
  misc_feature (1)..(141): Xaa is any amino acid
MSVDALGKFLCFSISVTVISPVSLPSLFTTGSFSIRFSKNIFLTLSRDGSSSIFTSFCVITLVTDRESSSQKRRSRFVIIPFSFPSLSTTGRPEMPCLLTNSLTSLICALCGTVTGESIIQFKKRLTPETCRACSSGLRLR

SEQ ID NO: 13913 - DNA, 624 bp, Unknown
  Obtained from environmental sample
  misc_feature (1)..(624): n is a, c, g, or t
ttgggaggggaaaaactgaaaatatccatatttgccttgctcctgcttacggtggggtttcttgtacaatttcaaacaatctcggctcaggaagaaccggttactaaggaagaaccgccttcgagagaagaacagttaagggctgaggaacgcgcttatacttttgatctaactgaagacgctcctgccgccgcgcggacaagttcttccgtatggcctattatcagaatgatactggttctggccctntgcgccgccgcggtgtacggcatagttttttttataaaacgttccgccaaacaacctgtttcaaaagaccctttcttaaaaattcttgccacggttaatcttggcgtaaaccgttacgcgcatgttgtttccgtaggaagcaaggcgtggcttttaggatcaagtgacggcggcgttaaccttataggcgaagtggaagacaaggaaataattgacgcgatgcttttagaagaatcgaaaaaggccgccgagccgcaggggcgtttccctgattttgtttcaatgctacgcaagctcggcttgcccgcgcagcaaacaggcccttccggcgcggaggatatacgcaagcgccgcgaaaggcttaaggggctgtga

SEQ ID NO: 13914 - protein, 207 aa, Unknown
  Obtained from environmental sample
  SIGNAL (1)...(28)
  misc_feature (1)..(207): Xaa is any amino acid
MGGEKLKISIFALLLLTVGFLVQFQTISAQEEPVTKEEPPSREEQLRAEERAYTFDLTEDAPAAARTSSSVWPIIRMILVLALCAAAVYGIVFFIKRSAKQPVSKDPFLKILATVNLGVNRYAHVVSVGSKAWLLGSSDGGVNLIGEVEDKEIIDAMLLEESKKAAEPQGRFPDFVSMLRKLGLPAQQTGPSGAEDIRKRRERLKGL

SEQ ID NO: 13915 - DNA, 591 bp, Unknown
  Obtained from environmental sample
  misc_feature (1)..(591): n is a, c, g, or t
ttggttttatcgccgagtgacgctatccgatggactaaagctcgccgggatccggcggaaatcatgaaggaggcgctcgccaaagccaagaccgcccgcttcaagatactcgacatcatgaccgaggcgttgccgtcggcccgtaaagagatgtccgccttcgcgccgcgcataaccacaatcactatcggcaaggacaagatccgcgaagtcatcggcaccggcggcaaggtgatccgcgacatacaagacaccaccggcgcgactatcttcatagacgacgacggcaccgtgcagatcgccgcctccaacaaggagtcaagggacgccgcgctgggccgcatcaaaggcatagtagcggaaccggagatgggcgcgatctacgagggcacggtcaaaacgatcgtggagttcggggcgttcgtggagtacctgccgggcaaagacggtctgctgcatatctcggaactggagcacgggagggtcaacaaggtggaggatgtgttgcagcttggggataaggtgaaggtgaagttgatcgggttcgacagggggaaggttaagctcagcaggaaggctttgctggagtag

SEQ ID NO: 13916 - protein, 196 aa, Unknown
  Obtained from environmental sample
  DOMAIN (58)...(115): KH domain
  misc_feature (1)..(196): Xaa is any amino acid
MVLSPSDAIRWTKARRDPAEIMKEALAKAKTARFKILDIMTEALPSARKEMSAFAPRITTITIGKDKIREVIGTGGKVIRDIQDTTGATIFIDDDGTVQIAASNKESRDAALGRIKGIVAEPEMGAIYEGTVKTIVEFGAFVEYLPGKDGLLHISELEHGRVNKVEDVLQLGDKVKVKLIGFDRGKVKLSRKALLE

SEQ ID NO: 13917 - DNA, 849 bp, Unknown
  Obtained from environmental sample
  misc_feature (1)..(849): n is a, c, g, or t
atgaataccatcctcaccgtagccgccgcgctatctatggcgcttgcttgggtcgggtgcggcaaggatagcaagcaggagggatcgggcgacgttaaggacgcttccgataaaaaagcggcgatagggcctaagtgggcgaacggcatttacgagaaagaggagtttgcggataggacattggcaatcctcgacggctccactttcgacgccgtctccagggataaagtgggcgccaagttatacaagtattacgaatcgcggggcaaatgcatggaggcgatattaaccggcgaggccgacgggatgctggttgaggatcaggtggccaggaagttcgccgcgcagcacccggactcgctgatcgtactacacccggcggtcgacaaagaggactacgcctacctattctgtaaaaaggacaagggcaagatgcgcgacgcgttcaacgcgtttttggagactgtccgcgccaacggcgtttacaaggagatggagcagcgctggatagacacgcccgactcgccgccaatgccggagatcgatcttacgcccgccaagaagaagctgatcttcgccacctccgacaccgacctgcccttcgctttcagggacggatccggcgcgatcgcgggcttcgacatagagatggcctcgcgcttcgcccattccaagggctgcgggctggaggtcaaggtgctggccttcccggacatcatcccggccgtcgcggcgggctcggtagacttcgcggccaaccttatagccataaccgacgagcggaaagccatggtggacttttcggagccggtgtactccggcgggactgtggtactcgccccgcagtag

SEQ ID NO: 13918 - protein, 282 aa, Unknown
  Obtained from environmental sample
  SIGNAL (1)...(25)
  DOMAIN (5)...(172): Bacterial extracellular solute-binding proteins, family 3
  misc_feature (1)..(282): Xaa is any amino acid
MNTILTVAAALSMALAWVGCGKDSKQEGSGDVKDASDKKAAIGPKWANGIYEKEEFADRTLAILDGSTFDAVSRDKVGAKLYKYYESRGKCMEAILTGEADGMLVEDQVARKFAAQHPDSLIVLHPAVDKEDYAYLFCKKDKGKMRDAFNAFLETVRANGVYKEMEQRWIDTPDSPPMPEIDLTPAKKKLIFATSDTDLPFAFRDGSGAIAGFDIEMASRFAHSKGCGLEVKVLAFPDIIPAVAAGSVDFAANLIAITDERKAMVDFSEPVYSGGTVVLAPQ

SEQ ID NO: 13919 - DNA, 468 bp, Unknown
  Obtained from environmental sample
  misc_feature (1)..(468): n is a, c, g, or t
gtgggcgaatcgcctacgggcgataaaaaggcagaaaaattcgaggacgactatattgaggagctctttgccgaaatttccaggcatggctttaaagcaattacatacatgccaccaagaaacacccaggatcagttacgcaatttaagacggctttcagccgaatggggttttatggaaatctccggtgtagatataaacagttcccgccagtcattcaactgtcccgaagttttaaaaaacgaattccgccatcttttggataccacctgggctctgatcgcccacgagcggcttgcatcggttgatacttgctacgggcttttttcggataagaatccgatcgcttccatgaatctcgcggaacgactcggagtctatgcggacattgggaagaagcttgaccttcatcatcctgatgaatccgcaattatgctgtctaatgaaattgataaaggtaatacttag

SEQ ID NO: 13920 - protein, 155 aa, Unknown
  Obtained from environmental sample
  misc_feature (1)..(155): Xaa is any amino acid
MGESPTGDKKAEKFEDDYIEELFAEISRHGFKAITYMPPRNTQDQLRNLRRLSAEWGFMEISGVDINSSRQSFNCPEVLKNEFRHLLDTTWALIAHERLASVDTCYGLFSDKNPIASMNLAERLGVYADIGKKLDLHHPDESAIMLSNEIDKGNT

SEQ ID NO: 13921 - DNA, 894 bp, Unknown
  Obtained from environmental sample
  misc_feature (1)..(894): n is a, c, g, or t
atggccgaggccgtatccgcctactatgccgccgccgcgcaatttttacacggcgatgtatatcattccgccgatcttgccgcaaagtcaattaaacaatcgcttgtagccggtcgccccgattgggcggatcgttcccgttttttggaaggtcggatagagttcgatcttgggcactacagcaaagccctagatatttttgagcatcttcttaaagagccttacggcggaatgacatgcgaaaaagaaaacctaatggcggcgtggatatatcgatctaaaatatacttggaagtatcaaacttaaaaaaacccgaaccagcgaacaacgacgccgatttattcgagatagaagccgcgtttttatccggcaattatcaaagagccgtcgatcttgcgtcctcgcataaaaatccgtttacggaagaaaattttctttactcggagcaagccgattggcgcagcggattcgctcaatgcgagcatttatattttacacacggcgagatacaaagcagaatgatatcgatttttcattctctcgcgttaagcaagctgtcaagagaaggatgcgaagaggcgcttcatgaaattcaaaaaatactccgcgatgaaaaattatgcgaaatggacccatgggacgcgttttatttttacgcaaaataccgaatccttgaacaaacagaagccagtcttgtagacatgagtactgccgtcagcatggcattcaagcgtttacagcgcagagccggaagaatagacgacattgagactcgccgtcaatatttgaacggttccagatggaaccgcgaattaagcaaagccgcgaaagaattcagcttatttagccatagagccgtattgacattttcccgtgcattttatactncttaa

SEQ ID NO: 13922 - protein, 297 aa, Unknown
  Obtained from environmental sample
  misc_feature (1)..(297): Xaa is any amino acid
MAEAVSAYYAAAAQFLHGDVYHSADLAAKSIKQSLVAGRPDWADRSRFLEGRIEFDLGHYSKALDIFEHLLKEPYGGMTCEKENLMAAWIYRSKIYLEVSNLKKPEPANNDADLFEIEAAFLSGNYQRAVDLASSHKNPFTEENFLYSEQADWRSGFAQCEHLYFTHGEIQSRMISIFHSLALSKLSREGCEEALHEIQKILRDEKLCEMDPWDAFYFYAKYRILEQTEASLVDMSTAVSMAFKRLQRRAGRIDDIETRRQYLNGSRWNRELSKAAKEFSLFSHRAVLTFSRAFYTX

SEQ ID NO: 13923 - DNA, 393 bp, Unknown
  Obtained from environmental sample
  misc_feature (1)..(393): n is a, c, g, or t
atgaattggcacgcctttccggataaggaaattgaaaagatggagatcaagggaaccgatgcagggacaggtttgcccaggcggctggaaattgattcggagcaaatcagggaagcccttaaggtaccggtaaatataattctggatgaaattaaatcaatcctgggaaagaccccgccggaacttgcggcggacatcgttgagcggggaatagtaatgaccggaggcggctcgcttttaaaaggactgccaaaactcatttccaaagagacaggggtgtcggtaattcttgcccagagtcctcttgattgcgttgcccttggcgccggcaagtactttgaaaagaccagaggttatgaaatccgcaatatgtacgatagcttaaacaaatag

SEQ ID NO: 13924 - protein, 130 aa, Unknown
  Obtained from environmental sample
  DOMAIN (1)...(121): MreB/Mbl protein
  misc_feature (1)..(130): Xaa is any amino acid
MNWHAFPDKEIEKMEIKGTDAGTGLPRRLEIDSEQIREALKVPVNIILDEIKSILGKTPPELAADIVERGIVMTGGGSLLKGLPKLISKETGVSVILAQSPLDCVALGAGKYFEKTRGYEIRNMYDSLNK

SEQ ID NO: 13925 - DNA, 672 bp, Unknown
  Obtained from environmental sample
  misc_feature (1)..(672): n is a, c, g, or t
atgtacgtcgcggtttcaggttccgcgttccgccgtccgttcaaaagcctgaaaggatttacccgtctttcgttacgatctggcgaagagcaagttgttcgctttgctctgcctgttgaagaattggcggtttggaatagttttcagaaccgtttttgtgtggaaacaggccattgtactgttttgattggcgcgtcttcggcggacatacggctttcaggcggttttaaggtacatggcgagactgcatttccccgaaaaattcccgatcatatttatgcgcaaagttttgacgattattcaggctgctttctgcatgaaaaacggggcagcgcaattcccgccgtattcaacagttctgaaggctgctggatacattttgccgcgctggattttaccaatagccgcagagtttgttctgccattgtacaaggcgcggccggcagccgcattgaaattcgtttggatgcgccggacggcacgttagcgggaacgctcgttatcccaaacaccggagatatatccttttaccatctggcagaaaaaaacagccaccgccgccgtccggtttgggcatatgctgaaacccccacggaaagaatacgcggcgttcatgatctgtatctggtgttttatgggaagaccggtctctggcgaattgattttcaataa

SEQ ID NO: 13926 - protein, 223 aa, Unknown
  Obtained from environmental sample
  DOMAIN (95)...(221): Carbohydrate binding module (family 6)
  misc_feature (1)..(223): Xaa is any amino acid
MYVAVSGSAFRRPFKSLKGFTRLSLRSGEEQVVRFALPVEELAVWNSFQNRFCVETGHCTVLIGASSADIRLSGGFKVHGETAFPRKIPDHIYAQSFDDYSGCFLHEKRGSAIPAVFNSSEGCWIHFAALDFTNSRRVCSAIVQGAAGSRIEIRLDAPDGTLAGTLVIPNTGDISFYHLAEKNSHRRRPVWAYAETPTERIRGVHDLYLVFYGKTGLWRIDFQ

SEQ ID NO: 13927 - DNA, 798 bp, Unknown
  Obtained from environmental sample
  misc_feature (1)..(798): n is a, c, g, or t
gtgggggaactttcccttacgcaaagcagtctcgctcttgaaaacgcgcggtacaatcttaacacggcgaaaacagcccacaaaaataatatgtcggactttctcgcaatgcttggaatgtccgacgaggacattacgttgtcaggtgaagttaaaatagttaagattgacgccgacgcggaagcgcttataaatgattatcttcctaaacgtcccgacatcataagggcgaatcaggagattgaaaggcttacactgacgcaaaagcaaaccttactgcaaactaaagcgccttctttaaatttatcggttgattggaacaactctgcttctgagccttatgataaaccttttaccgactcagtaagcgctaccgcccgtatcagcataccgattgacccgtggattccgggtacaacaaaatttcaaaacgtttcaaaagcttccgactcaatagaaaaagctaaacttgatctttcatcggcggagaattccgctaaaactcaaatacgctctctttgcgctcaacttcgcaactcatgggacaatatattgattgcccgccttagccttaccgcggcgcagagaagttatcaattaacagaacagggttttaataacggaactgttgaattgttaactttgcaagacgcgcgtaacaatatggcaaacgtaagacagcgtttattacaggcggaactttcatattttaatatgattcttgatctttcgtccgccttgaatatcgactggaaaaatcttattcaaacttttggagtatncagtgaagaaaactaa

SEQ ID NO: 13928 - protein, 265 aa, Unknown
  Obtained from environmental sample
  DOMAIN (68)...(248): Outer membrane efflux protein
  misc_feature (1)..(265): Xaa is any amino acid
MGELSLTQSSLALENARYNLNTAKTAHKNNMSDFLAMLGMSDEDITLSGEVKIVKIDADAEALINDYLPKRPDIIRANQEIERLTLTQKQTLLQTKAPSLNLSVDWNNSASEPYDKPFTDSVSATARISIPIDPWIPGTTKFQNVSKASDSIEKAKLDLSSAENSAKTQIRSLCAQLRNSWDNILIARLSLTAAQRSYQLTEQGFNNGTVELLTLQDARNNMANVRQRLLQAELSYFNMILDLSSALNIDWKNLIQTFGVXSEEN

SEQ ID NO: 13929 - DNA, 705 bp, Unknown
  Obtained from environmental sample
  misc_feature (1)..(705): n is a, c, g, or t
atgtttccctctcaatcaccaaaatcctcttacaggtactttgacgtgctaatgacgttntttgtcgttgttctcgttttaagtaacatcgcttcatcggcaaaaattgttgacctgggtttttcgattttcggaatccccatggcgtttgacggcggcactttgctgtttccgctggcttatgtactcggagacatactcaccgaggtttacggctttagggccgcaaagcgggttatctggacaggctttgccgtactagccttttcatcgcttgtgtttcttgtccttaagatccttcccggcgaaagctcctgggaagcccaagatggcgcagccatcacaggttccgccgcgtatgacgccattcttggcgggatgagctcgggcggcattgtcctcgcgagcctcgcgggataccttgtgggggaattatccaattcagccgtgctgtcaaagatcaagtttttgatgaatggccggtggttatggttcagggctatggtttccagccttgtcggggaactcctggacagtttaatttttgtgttcatagcctgcctcatgggggtttttggctggaatcttttccttagcctggcgctgaccaactatatcctgaaatgcctcatcgaagcgcttgtactgccccttacatatacggcggtgcgtttgctgaaaaaaggcgaagcggctcaggtatga

SEQ ID NO: 13930 - protein, 234 aa, Unknown
  Obtained from environmental sample
  DOMAIN (43)...(209): Uncharacterized ACR, YhhQ family COG1738
  misc_feature (1)..(234): Xaa is any amino acid
MFPSQSPKSSYRYFDVLMTXFVVVLVLSNIASSAKIVDLGFSIFGIPMAFDGGTLLFPLAYVLGDILTEVYGFRAAKRVIWTGFAVLAFSSLVFLVLKILPGESSWEAQDGAAITGSAAYDAILGGMSSGGIVLASLAGYLVGELSNSAVLSKIKFLMNGRWLWFRAMVSSLVGELLDSLIFVFIACLMGVFGWNLFLSLALTNYILKCLIEALVLPLTYTAVRLLKKGEAAQV

SEQ ID NO: 13931 - DNA, 441 bp, Unknown
  Obtained from environmental sample
  misc_feature (1)..(441): n is a, c, g, or t
gtgggaagttcgcagtcatttatcagatggaatttgccgcatcttttttactatttatcagaagacaatggttttattacacgcttttgtcaaaaaatcacaaaaaatcccatcgaaagaaatgaaaacggcaaaaggacgattatcggaattcaggaggttaagaaaatgaaaggtattggacaaaactttgacgaatttatggtcgagcagggtttatatgacgaggcaaaagaacttgcggcaaagaagttaatagttcttgaatttaaacatgaaatggaagcccagaaactttcaaaaagaaaaatcgcagaaaagatgcatacttctcgtgtcgccattgataacattttaaaccctgactataatacttcaattggaacgctggaacgttttgcatccgttttgggtaaaagtatttctatttcattacaatag

SEQ ID NO: 13932 - protein, 146 aa, Unknown
  Obtained from environmental sample
  DOMAIN (90)...(144): Helix-turn-helix
  misc_feature (1)..(146): Xaa is any amino acid
MGSSQSFIRWNLPHLFYYLSEDNGFITRFCQKITKNPIERNENGKRTIIGIQEVKKMKGIGQNFDEFMVEQGLYDEAKELAAKKLIVLEFKHEMEAQKLSKRKIAEKMHTSRVAIDNILNPDYNTSIGTLERFASVLGKSISISLQ

SEQ ID NO: 13933 - DNA, 492 bp, Unknown
  Obtained from environmental sample
  misc_feature (1)..(492): n is a, c, g, or t
gtgaccgtggcagtcttgccggaagccgacgagaccgagattgacataaagcctgaagatctccgcattgacgtaatgcgcgcgggcggaccaggcggccagtgcgttaacactacggattccgcagtgcgcataacacacctgccgacgggggttacggtacactgtcaggacgagaagagccagataaaaaacaaggctaaggccatgcgcatacttagggcgcgtatttacgagatggaagaagaaaaagccgcggcgcatagggccgaggcaagaaagagccaggtaggatcgggcgaccgctctcagagaatcagaacttataattttccacagaaccggttaaccgatcaccgcattaatcttacgctttacaaacttgatcttatcatgcagggcgacacatctgaactttttgacgcgctagaactttccgcaaaggaagaattattacaaagcagcgcgtctgatttcacagacggcgaatag

SEQ ID NO: 13934 - protein, 163 aa, Unknown
  Obtained from environmental sample
  DOMAIN (7)...(120): Peptidyl-tRNA hydrolase domain
  misc_feature (1)..(163): Xaa is any amino acid
MTVAVLPEADETEIDIKPEDLRIDVMRAGGPGGQCVNTTDSAVRITHLPTGVTVHCQDEKSQIKNKAKAMRILRARIYEMEEEKAAAHRAEARKSQVGSGDRSQRIRTYNFPQNRLTDHRINLTLYKLDLIMQGDTSELFDALELSAKEELLQSSASDFTDGE

SEQ ID NO: 13935 - DNA, 438 bp, Unknown
  Obtained from environmental sample
  misc_feature (1)..(438): n is a, c, g, or t
atggaaaagaaggggaaaaataagaaagctcttatattgaaaaacacccaaatcaatgaaaattcgcttcttacccatgtttccaaaataatagaaaaacgaaaaaaccgtgccggaatgtatgccaatcgtgaagtcacgctcatgtattgggagataggccgttatataagttcagttttacttggcggagaacgggccgaatatggaagaaaaattgtgacgacactgtcgtcacaattggttagaaagtatggttccagctttgaattacggaacttgcgaaggatggttcaatttgctgaattattcccgaacttatcaattgtgtcgccacttgcgacacaattgagttggtctcattttatagaaatcttgcctttgnaaacccgaaaagcaggtttgtttatgcgaatgaagcggcaacacgacatttag

SEQ ID NO: 13936 - protein, 145 aa, Unknown
  Obtained from environmental sample
  DOMAIN (23)...(145): Protein of unknown function (DUF1016)
  misc_feature (1)..(145): Xaa is any amino acid
MEKKGKNKKALILKNTQINENSLLTHVSKIIEKRKNRAGMYANREVTLMYWEIGRYISSVLLGGERAEYGRKIVTTLSSQLVRKYGSSFELRNLRRMVQFAELFPNLSIVSPLATQLSWSHFIEILPLXTRKAGLFMRMKRQHDI

SEQ ID NO: 13937 - DNA, 879 bp, Unknown
  Obtained from environmental sample
  misc_feature (1)..(879): n is a, c, g, or t
ttgcagaattttttttatgaaaacccgacttatgcanccattagtttattgccagcaaaccaaaccgtgcaatttgagaatgtgcaaaatgttgtggagattccttaccaaaaagattttcctgtgcaaaaaatattttcaaatatattgcaaaccccgccgcaacctcaacntattccacagccacaaccaattttgccagaacaattaattccgcaactgcagcagactacaccgcaaccgcaacaaccaattccacaatcgcagccgattctgccacaaccgcaatcaattccacagcaacaaccaattctacaatcgcaaccaattccgccagaacaaccaatttcacagcaagccacgccgcaaccaattcaaccgcaacaaccaattccacagcaagctacgccaccgctaattctgccacaacaatcaattctgccagaacaaccaatttcacagcaagccacaccgcaaccaattccgccagaacaaccaattccacagcaagctacgctgccgcgggttcaaccgcagcaaccaattccacagcaagccacgccgctgtgggttcaaccgcaacaaccaattccgcaaccgcaacagaccacgccgttaccgctaccgccgccaaatattccgcaaaaaattgaaatggcattttcacttcatcaaataacaattcctcaaaataccacgccctctcaaaacataccactttctcagaacgacccgccgcctgctccaaaatttattctgcaaccttggcctgttagtgcggtaattccaaaagaggaaagggatttttggttaaaaacaggatttacctttaactccgcaaatattaaatatcagagaaacaattttatcttttggtaa

SEQ ID NO: 13938 - protein, 292 aa, Unknown
  Obtained from environmental sample
  misc_feature (1)..(292): Xaa is any amino acid
MQNFFYENPTYAXISLLPANQTVQFENVQNVVEIPYQKDFPVQKIFSNILQTPPQPQXIPQPQPILPEQLIPQLQQTTPQPQQPIPQSQPILPQPQSIPQQQPILQSQPIPPEQPISQQATPQPIQPQQPIPQQATPPLILPQQSILPEQPISQQATPQPIPPEQPIPQQATLPRVQPQQPIPQQATPLWVQPQQPIPQPQQTTPLPLPPPNIPQKIEMAFSLHQITIPQNTTPSQNIPLSQNDPPPAPKFILQPWPVSAVIPKEERDFWLKTGFTFNSANIKYQRNNFIFW

SEQ ID NO: 13939 - DNA, 567 bp, Unknown
  Obtained from environmental sample
  misc_feature (1)..(567): n is a, c, g, or t
atgggcgacgattactataactcatggattatgtgttgtcaacgaaggtgcgggacgcaatacggagcagagctcacgctcgaaaagtttttcgacaaacggtattatttcctgctgaccgcctcgctttacaactcaaaatataaaggatacgataaagtagaacgcaatacacattttgccggaaattatgccttcaacggcttattcggatatgaatggaaaatcgggacaaataaactgttatccgttaatacaaaagtatcctacgcaggcggcaaaaggtacgttccgctggcggtgtcaatttctgaaacaggttatgattacacgtatgattactctcaggcatacacaaaaagagctgatgattatttccgtatggatttgaacgtaaacatgaagaataactataaacgctgttcgttagagtggtttgtggagataacaaacattacaaatcataaaaatatctggatgatatattatgatgtggacagaggtgaagatatgactatttatcagtatggcttgatgccgggtggaggatgcagactgtatttttaa

SEQ ID NO: 13940 - protein, 188 aa, Unknown
  Obtained from environmental sample
  misc_feature (1)..(188): Xaa is any amino acid
MGDDYYNSWIMCCQRRCGTQYGAELTLEKFFDKRYYFLLTASLYNSKYKGYDKVERNTHFAGNYAFNGLFGYEWKIGTNKLLSVNTKVSYAGGKRYVPLAVSISETGYDYTYDYSQAYTKRADDYFRMDLNVNMKNNYKRCSLEWFVEITNITNHKNIWMIYYDVDRGEDMTIYQYGLMPGGGCRLYF

SEQ ID NO: 13941 - DNA, 906 bp, Unknown
  Obtained from environmental sample
  misc_feature (1)..(906): n is a, c, g, or t
atggatccttggatgccggtcttcctttacgagcttacccccgacgcgtttgccgcgttaccggaagaaacgcgctacgttaaactttccgcgaataaaacggttattcgtttgctggttctggacaaagaaatacagggcgtaaccccctttcagcttcccgaaaaatcaatgtcctcgttcatcaaggaaacagacgaaattaaacttgaaattgaagaacttgacgccaagcttaaaaactttgccagccgccgtccggcgttaatcaaggaaatggaaattgtagagaaggatcttgaatttgagaccgctcttatcaacatggaaaaagttgaaaatgttccagcggaaatggggctttcttatctgacaggttatgcgccctgcgatgaaatagccggattaaaagccgccgccggagctaacggctgggccttgtcaatgattgatcccgaagatacggacgacgccgttccgacaaaacttaagaacgctaaaattgttaatctcttaaatcccattaccggttttctcgggattacgcccggttaccgcgaagtggatatttccccgtggttcctcttcttcttctgtattttcttcggcatgatcttcggagacgcggcatacggccttatcctttccattatcgccataatcggaattattaagacggcgaagaagggcgtgcctcaggccttgcagatgctgttgctgcttggtattttcaacacggcatggggcgtgcttacctgcacatggttcggcgtcgaagtgaataaagtgccgaaagaactgcaggatatttccctgtcgttcttctcaacggcaaaaaccgatgatgccattgtaagacagaaccttcagattttctgtttttcactntggtctttttgcagttga

SEQ ID NO: 13942 - protein, 301 aa, Unknown
  Obtained from environmental sample
  misc_feature (1)..(301): Xaa is any amino acid
MDPWMPVFLYELTPDAFAALPEETRYVKLSANKTVIRLLVLDKEIQGVTPFQLPEKSMSSFIKETDEIKLEIEELDAKLKNFASRRPALIKEMEIVEKDLEFETALINMEKVENVPAEMGLSYLTGYAPCDEIAGLKAAAGANGWALSMIDPEDTDDAVPTKLKNAKIVNLLNPITGFLGITPGYREVDISPWFLFFFCIFFGMIFGDAAYGLILSIIAIIGIIKTAKKGVPQALQMLLLLGIFNTAWGVLTCTWFGVEVNKVPKELQDISLSFFSTAKTDDAIVRQNLQIFCFSLWSFCS

SEQ ID NO: 13943 - DNA, 363 bp, Unknown
  Obtained from environmental sample
  misc_feature (1)..(363): n is a, c, g, or t
atggacaggatttctctaaagcggggtcgggttactcacagcacgccatggttttttgaaatgaaagccatagcctcgtccattatcggcggcacgcttttgaccgggggcgtaggcaatattgtcggttctcccattggcgtattggcgcttatgacgattgacactattgttcgcgcttcgggaataaccacaggaggcagggagtatttgcaggatatcacgacaggcgcaatgcttttcatcgcgcttgtactgcaaagcgtggttctctcgcgccgaggcaagggcagtttcaaactgatgattcccaaatggctgaggttcaatttaaaacctgttgaaaaagacaactcggtataa

SEQ ID NO: 13944 - protein, 120 aa, Unknown
  Obtained from environmental sample
  misc_feature (1)..(120): Xaa is any amino acid
MDRISLKRGRVTHSTPWFFEMKAIASSIIGGTLLTGGVGNIVGSPIGVLALMTIDTIVRASGITTGGREYLQDITTGAMLFIALVLQSVVLSRRGKGSFKLMIPKWLRFNLKPVEKDNSV

SEQ ID NO: 13945 - DNA, 654 bp, Unknown
  Obtained from environmental sample
  misc_feature (1)..(654): n is a, c, g, or t
atggacgaaactccgtatgattttccacaaacgcctccccaaagcgcatatcctactgcaccacctccggagcgacctccggagcgacagcagcagcagcagccgccgccgccgccgccgcgtatgcccgaagcccggaatcaagtacctcaaatgccaaattatccgcagttccccaaataccctgaatatccgccctttatacccaaagaaccgaaacctactaacgttccagaggagcccgttactttcgaggaagaagaggaaacatttgaagacctgctggatgacgtatcagacgaaaatctctctgaaactgaaccagacgcagagcctactgacgttccggaggatgaaatccaaaaagatgaaatcttagataaaccattagacgaaccattaaatgaaccaatagatgacaaacaggatgatttgtccagggtggttgaccttcttggtgcccttcacgggctaacggaagcgcttcctgaaaaacaccgaaattcctatagccagggaaaacttcagccggctctggaatcggttattgatagtttaaagaacctgactataatcaaagaatcgacagtggacgttgccagtaaggaagattcaggcagcaaggaaaagcgtggagtcccaaatggaagctag

SEQ ID NO: 13946 - protein, 217 aa, Unknown
  Obtained from environmental sample
  misc_feature (1)..(217): Xaa is any amino acid
MDETPYDFPQTPPQSAYPTAPPPERPPERQQQQQPPPPPPRMPEARNQVPQMPNYPQFPKYPEYPPFIPKEPKPTNVPEEPVTFEEEEETFEDLLDDVSDENLSETEPDAEPTDVPEDEIQKDEILDKPLDEPLNEPIDDKQDDLSRVVDLLGALHGLTEALPEKHRNSYSQGKLQPALESVIDSLKNLTIIKESTVDVASKEDSGSKEKRGVPNGS

SEQ ID NO: 13947 - DNA, 831 bp, Unknown
  Obtained from environmental sample
  misc_feature (1)..(831): n is a, c, g, or t
atggagcgctcggagtttttgcgttggaactcattcaggggcacggaggacagccgctacgtaggcctcacgctcccgcgtttctcattgcgcctgccgtacgggcccgacacgttgccggtcaaggagttcgtgtatagggagaacgtggccgggctgaacagcgacaaatacctttggggcaacgcggcgttcgcgttcgcctcaaatatggttcggtcattcatagataacggttggtgtgttcaaattcgcggtcccgaagcgggaggaaaggtagacaacctgccggtgcatgtatttgacgccggacgcgggacggaggtgaagataccaaccgaaattttaatcccggaaacccgggagtttgagttcgcccaagaggggttcattcccctctccttctacaagaacagggactacgcctgcttcttctccgcgaactcggcgcagaggccgcaagagtacgacaatcccataatcacagccaatatgcgcatcaactcccggctgccttacatcttcctgatatcgcgcatcgcccattatttaaaagtgatccaacgcgaaaacattgggtcgactaagagccgtacggtgctgcaggacgagttgacgcgttggataaagaagttagtcacggagatgaaagaaccgggccccgagcttatcgccacgcatccgttgaaagacgccgatgtggatgtgagcgagatagaggataatccgggggtcttcagggtcagtttgtcggtcattccgcactttcagatagaggggatagacataaacctgtcgcttgtgtcgaaaatgccccaagggaaggaataa

SEQ ID NO: 13948 - protein, 276 aa, Unknown
  Obtained from environmental sample
  DOMAIN (1)...(273): Protein of unknown function (DUF877)
  misc_feature (1)..(276): Xaa is any amino acid
MERSEFLRWNSFRGTEDSRYVGLTLPRFSLRLPYGPDTLPVKEFVYRENVAGLNSDKYLWGNAAFAFASNMVRSFIDNGWCVQIRGPEAGGKVDNLPVHVFDAGRGTEVKIPTEILIPETREFEFAQEGFIPLSFYKNRDYACFFSANSAQRPQEYDNPIITANMRINSRLPYIFLISRIAHYLKVIQRENIGSTKSRTVLQDELTRWIKKLVTEMKEPGPELIATHPLKDADVDVSEIEDNPGVFRVSLSVIPHFQIEGIDINLSLVSKMPQGKE

SEQ ID NO: 13949 - DNA, 534 bp, Unknown
  Obtained from environmental sample
  misc_feature (1)..(534): n is a, c, g, or t
atggataaaatagactttaatatttcctccatgcttaacgcgtcctctcaacctggtttaaaagcggaagcaaaaaaaacaaggccaaaaggcggaatttccggcggcaggacactgttttccagaattctggaaagcgccgcgcctgaggcaggagaacttggcccgcttagggagcttcagccctctgaagaagcattaacagagctaatggatgcggtacacagcgcggggagcgatcttatagaccggccttttcacgatgaaattttgcggtataaaaaagcagtacgggattttatacattatgtggttgacaatgcttttgccgtggaaaaatcacaaacccgccgcagagggaagatcacaaaccatgttcagattcaaattattgataaaaaacttgaagagctggcggcggcaattttgtccggccagaccagccagctggaaagggtttcaaaaatcggggaaatcaggggcttactggttgacccttacaatagcggcgtgataagagaaagggatgagtga

SEQ ID NO: 13950 - protein, 177 aa, Unknown
  Obtained from environmental sample
  DOMAIN (3)...(168): Protein of unknown function (DUF327)
  misc_feature (1)..(177): Xaa is any amino acid
MDKIDFNISSMLNASSQPGLKAEAKKTRPKGGISGGRTLFSRILESAAPEAGELGPLRELQPSEEALTELMDAVHSAGSDLIDRPFHDEILRYKKAVRDFIHYVVDNAFAVEKSQTRRRGKITNHVQIQIIDKKLEELAAAILSGQTSQLERVSKIGEIRGLLVDPYNSGVIRERDE

SEQ ID NO: 13951 - DNA, 519 bp, Unknown
  Obtained from environmental sample
  misc_feature (1)..(519): n is a, c, g, or t
atgaaatattccgctgggttttgtataccaagattatttttaaaagacaaaatttcgcttgcggaattaaaccggcgtttgtttctttctattttgcgatacagcaaaatgcataccgagggggctttcaatttactggactcacatgatacagcccgtattttaacagtggcagacggaaataaacaggctgttcgcaatgcgctaaccatgcaattgatgcttcccggctctccatgtatatactatggtactgaaattggtatggaaggcggacataaaaatgacgacaaccgccgtccgatggtatggaatgaaaaaaagcaggataaggatttatataaatatatacagtatttaatagatttcaggaaacggaatattgatttcataaatgaatgcagcatagatttttcaatttccgaagatgggaacggtaaatggatatttaagcatgaaaacaaatttattatattgaattatataaagaaaaaactaggaattgaaactaatttataa

SEQ ID NO: 13952 - protein, 172 aa, Unknown
  Obtained from environmental sample
  misc_feature (1)..(172): Xaa is any amino acid
MKYSAGFCIPRLFLKDKISLAELNRRLFLSILRYSKMHTEGAFNLLDSHDTARILTVADGNKQAVRNALTMQLMLPGSPCIYYGTEIGMEGGHKNDDNRRPMVWNEKKQDKDLYKYIQYLIDFRKRNIDFINECSIDFSISEDGNGKWIFKHENKFIILNYIKKKLGIETNL

SEQ ID NO: 13953 - DNA, 1005 bp, Unknown
  Obtained from environmental sample
  misc_feature (1)..(1005): n is a, c, g, or t
ttggccgaggtaatattgggcgagcgaatcggcgttgacggcttccgcttcgatctgatgggacttattgatactcccactatgaagcagctaactgatgaactgcgtcgctttgatcccacaattattatctatggcgaaccatggcaggcaggtggttccactttgcctggaaacctgcaaacaactattggaaagcaaaagggaatgggattcgcagtttttaacgatcgcatacgggcggcgataaaaggcgccagcgacgactcaagccgcggttttgcctcaggcgcgtctttaaaggaaagggctattattcttggcgtaaccggctcggtaaatgattttacccagcaggcaaatgagagcattaactacgtaaccgctcacgataaccttaatctgtgggacaagttcgcgcttacctacggtgcggcgaatttaaaaatgtcgtcttattccatgctggaaggcaaaaatgatatttttgaaagcgaggtagtaaaatccgtattgctggcaaacggtatcatcttcacttcgcagggaattccgtttttccaggcaggcgatgaaatgctgcgcagtaaattcggcgataataacagctactccagcccggacagtatcaacaaaatccgctgggaaaacgccacccgttaccgtgatgtttttaactattacgccggtctgattcagctcagaaaagagcatcccgctttccgcatgaacacaagagaagatatcgaanataacattgaattaatttcctcgcaggatttgggagtatcttttgctataaaaggaaccgcagcctctgactcctggcgtaccatatttgtagcatataacgggagcaattctccgaaagagttcgcgcttcccgattcttccngcgtttggcggcaggtagtggattcgcggcgggcaggagtgaaaacgctcgcagagtttacaagttctgttaccctgccgcctgtttncattgccgttccatacaaataa

SEQ ID NO: 13954 - protein, 334 aa, Unknown
  Obtained from environmental sample
  misc_feature (1)..(334): Xaa is any amino acid
MAEVILGERIGVDGFRFDLMGLIDTPTMKQLTDELRRFDPTIIIYGEPWQAGGSTLPGNLQTTIGKQKGMGFAVFNDRIRAAIKGASDDSSRGFASGASLKERAIILGVTGSVNDFTQQANESINYVTAHDNLNLWDKFALTYGAANLKMSSYSMLEGKNDIFESEVVKSVLLANGIIFTSQGIPFFQAGDEMLRSKFGDNNSYSSPDSINKIRWENATRYRDVFNYYAGLIQLRKEHPAFRMNTREDIEXNIELISSQDLGVSFAIKGTAASDSWRTIFVAYNGSNSPKEFALPDSSXVWRQVVDSRRAGVKTLAEFTSSVTLPPVXIAVPYK

SEQ ID NO: 13955 - DNA, 468 bp, Unknown
  Obtained from environmental sample
  misc_feature (1)..(468): n is a, c, g, or t
atgaaatatctttacttttttccatgttttcgctatagtgtgtttaccatgccaacatatgaatatgaatgtaaaaaatgcagccatcgtttcgaggtttttcagtcaatgagcgatgaaccgatcaagaaatgccctgaatgcggaaaagaagtacgccgtcttgtatctggcggcgttggtgtaatttttaaaggttccggtttttatgtaaccgacaaggataaatcaagcgttcccaaagggaacactgtttccaaaggaaacagtgactccaagggagacggcgtctctaaagcagacagcgcctccaaggtagacggcggatccaaagacgcccccgtttccaaaacagacggcgcttcctccgaaggcggatcttccaaagcggatggcggatccaaagatgccgttgccgccaaagcagacggcgcttcctccggaggcaaggcaaaacccgccgcctaa

SEQ ID NO: 13956 - protein, 155 aa, Unknown
  Obtained from environmental sample
  misc_feature (1)..(155): Xaa is any amino acid
MKYLYFFPCFRYSVFTMPTYEYECKKCSHRFEVFQSMSDEPIKKCPECGKEVRRLVSGGVGVIFKGSGFYVTDKDKSSVPKGNTVSKGNSDSKGDGVSKADSASKVDGGSKDAPVSKTDGASSEGGSSKADGGSKDAVAAKADGASSGGKAKPAA

SEQ ID NO: 13957 - DNA, 870 bp, Unknown
  Obtained from environmental sample
  misc_feature (1)..(870): n is a, c, g, or t
atgctagaccggaaaacaatacccatatacagcgtagncntgatcggcggttccatcggcgcggctctgaaggcgtcccggctcgggcgggcgtatcgtcgggctgtcgtcgaaaaaggtatcaatacgcccttgagccgtaacctgatgnacgaggggcacccgtattcctatttgtcaaccattataaagcaaaccgatctgcttattctctgctcgccgatcctgactattatcgacacgataaaggctttgggagggatggagctgcccgacggccttatagttaccgacataggcagcacgaaaagggcgatcgtcgagaccgccagtaaatgcctgccgccgcacgtaaggttcatcggcggccacccgatggccggttccgagagaagcggccccgacgcgagcgatcccggcctgttttcgaacgcggtgtacgtcttgacgccgacgtcgggcggggatgatacgggcgccggacttgttgagccgctgtcggcgtttctgcgcaaacacctgcgctgtcgcacggcggcgttcgaccccgcgacgcacgattcggtggcggccgcggtgagccatctgccgcacatcttggcgagcgcgttggttctgtgcgcgaacgagcgtgaaaaatcgatccccggcacgctggcgctggcggcgggcggtttccgcgacgtgacgcggatcgcctctgcgaagtacgagatttggcacgacatcttcgccacgaacaaggaggcgatcatcccgctgatagattcgtacatagatatcctgaacgagatgaaggttttgctgtcgaacgacgcgcttaaggggcggtttgaggaggcgagggcgattaaggagtccatgcagtga

SEQ ID NO: 13958 - protein, 289 aa, Unknown
  Obtained from environmental sample
  DOMAIN (9)...(285): Prephenate dehydrogenase
  misc_feature (1)..(289): Xaa is any amino acid
MLDRKTIPIYSVXXIGGSIGAALKASRLGRAYRRAVVEKGINTPLSRNLMXEGHPYSYLSTIIKQTDLLILCSPILTIIDTIKALGGMELPDGLIVTDIGSTKRAIVETASKCLPPHVRFIGGHPMAGSERSGPDASDPGLFSNAVYVLTPTSGGDDTGAGLVEPLSAFLRKHLRCRTAAFDPATHDSVAAAVSHLPHILASALVLCANEREKSIPGTLALAAGGFRDVTRIASAKYEIWHDIFATNKEAIIPLIDSYIDILNEMKVLLSNDALKGRFEEARAIKESMQ

SEQ ID NO: 13959 - DNA, 642 bp, Unknown
  Obtained from environmental sample
  misc_feature (1)..(642): n is a, c, g, or t
gtgattatgaatcaggataaagtaaaggaaaaactgcttgcaatagaagatgcgccgcttgaatttacccttgtattttcaggtaaaaaaagcaagaaagtgaacggtctttacaaggtacaaagcagggagattattattcataacaggaatttcaaaacggatgaagcaggacagaacctcttgctttatactgcaattcatgaatatgcgcatcatttacattcctgttcacgcggcggtactctttcttcacgcgctcataacagtgaattttgggctatttttcatgcgctgctggaaaaagccgaagataaaaaaatctacaaagatatcttttctgtttcaccggaactgttaaaacttacggatgttatccgaaacaagtaccttaaaaataacggcgagcttgtaaaggaaatgggtaaacatctgcttaaggctcacgatctttgtaccggaatcggcgtgcgttttgaagattatgttgacaggatgcttcgcataccaagaactgccgccaatatggcgattaaaatgtttgaattcgatatcgctcctgaagtcggggcggacaatatgcgttttctcgcaggtatccgcgacagtgatgaacgtaaagccgcggagactgctctttaa

SEQ ID NO: 13960 - protein, 213 aa, Unknown
  Obtained from environmental sample
  misc_feature (1)..(213): Xaa is any amino acid
MIMNQDKVKEKLLAIEDAPLEFTLVFSGKKSKKVNGLYKVQSREIIIHNRNFKTDEAGQNLLLYTAIHEYAHHLHSCSRGGTLSSRAHNSEFWAIFHALLEKAEDKKIYKDIFSVSPELLKLTDVIRNKYLKNNGELVKEMGKHLLKAHDLCTGIGVRFEDYVDRMLRIPRTAANMAIKMFEFDIAPEVGADNMRFLAGIRDSDERKAAETAL

SEQ ID NO: 13961 - DNA, 303 bp, Unknown
  Obtained from environmental sample
  misc_feature (1)..(303): n is a, c, g, or t
ttggcatttgcttggacgcccaaggggacagagatggacttggaaggttttctgaaagaagtgttggcgccggttttggattttcccgatgagcttgcggttgaagtcaaaaaaaacggacgccaagtggatgtgtccctgcgtgcgccacaagccgaccgcggcaggataataggcagaaatggcaagatgatttcgtccctccgctccctctgccgtgcggcgggtgacaagcatgggctaaacgtcaatttggagcttgtggaagacggcgaagacgaacagacggcccaggaggcgtga

SEQ ID NO: 13962 - protein, 100 aa, Unknown
  Obtained from environmental sample
  misc_feature (1)..(100): Xaa is any amino acid
MAFAWTPKGTEMDLEGFLKEVLAPVLDFPDELAVEVKKNGRQVDVSLRAPQADRGRIIGRNGKMISSLRSLCRAAGDKHGLNVNLELVEDGEDEQTAQEA

SEQ ID NO: 13963 - DNA, 546 bp, Unknown
  Obtained from environmental sample
  misc_feature (1)..(546): n is a, c, g, or t
atgccaaacgcgcgttttcagacgtcggtttcaccgcgaaaaaatgaaggacaaatttcctacggaccttacgggacggaagacatcgactttttaatttccgcaaatacgggcgagccgcttaaagatctggcaaaaattgcctcaggcggagagctttcaagggtaatgctggcgattaagaccgctcttttgtccgatgcgcggcgcgatgaaacggaaagcgttgaaaccctcgtctttgacgagatagataccgggattggcggggaagtcgccctgaaagtcggcgaatatctgacaaaaataggtaaatttaagcaaattttctgcgtaacacatctagcgagtatcgctgttcgcgccgataatcattttaaggtagaaaaaagaaccgaaggaggcagaacctacaccggaatcggaccgttaagcgccgaaggacggaaaaaggagattgccaggatgttggcaggggacgcgggagaagccgctatcgcccacgccgacgatttaatccggaaatacggaaaacggagcgattga

SEQ ID NO: 13964 - protein, 181 aa, Unknown
  Obtained from environmental sample
  misc_feature (1)..(181): Xaa is any amino acid
MPNARFQTSVSPRKNEGQISYGPYGTEDIDFLISANTGEPLKDLAKIASGGELSRVMLAIKTALLSDARRDETESVETLVFDEIDTGIGGEVALKVGEYLTKIGKFKQIFCVTHLASIAVRADNHFKVEKRTEGGRTYTGIGPLSAEGRKKEIARMLAGDAGEAAIAHADDLIRKYGKRSD

SEQ ID NO: 13965 - DNA, 858 bp, Unknown
  Obtained from environmental sample
  misc_feature (1)..(858): n is a, c, g, or t
atggctgcggaancggcatataaatcgggcagaaaatgtatttttactgccgtaaagactgccgcctatgtaaaggaattgatgcatcccgtcactcggacggatatttgtattttggcggctttgttgattgttattttaacgccgatagtcattaatctggtttataagctggaagcaagagccaaacgggtgaatctgtatttgtctgtaacgggcgaagaaatattcgggaaagagttaatggatacgctgatacgggaatttgaggaaaagaaccccgatattctgttgaagtttgcctatgcctccgccggcgtggagccggatgttcttttttttaacgaaggtgattacagcgcccatatctcctccggcgcattaatggaattaaacccgtttaccaactatgaatcaggcgggcggcagacggcgattccccttatctcgtttatggatatgcttttttataatattgatattttgtcagccgccggttttgatcgtccgccgaaaacaagggacgagtttttaacttacgcaagggcggtttcacgcgggagttcgggagccgccggatgcgcgttaagtttgagcgccggggatcgccgagcgttatcaagagatgttttttcatgggtattggcgtcgggcggcaatttgtattcggcggatgagaacggcgttattgtctttaacaaaattccggcgaatgatatttcgttttttgaaactctgaaccgtgaaggattacttgctcctaatgtttttggaacaacaggcgaagaacgccttgaagcgtttgcctcaggaaagacagcgatgatgattgcttctaccagagcaattccgtactga

SEQ ID NO: 13966 - protein, 285 aa, Unknown
  Obtained from environmental sample
  misc_feature (1)..(285): Xaa is any amino acid
MAAEXAYKSGRKCIFTAVKTAAYVKELMHPVTRTDICILAALLIVILTPIVINLVYKLEARAKRVNLYLSVTGEEIFGKELMDTLIREFEEKNPDILLKFAYASAGVEPDVLFFNEGDYSAHISSGALMELNPFTNYESGGRQTAIPLISFMDMLFYNIDILSAAGFDRPPKTRDEFLTYARAVSRGSSGAAGCALSLSAGDRRALSRDVFSWVLASGGNLYSADENGVIVFNKIPANDISFFETLNREGLLAPNVFGTTGEERLEAFASGKTAMMIASTRAIPY

SEQ ID NO: 13967 - DNA, 546 bp, Unknown
  Obtained from environmental sample
  misc_feature (1)..(546): n is a, c, g, or t
atgatgcatttgatcaaggatcgttcggcgatacttgacaggttcatagactcatgcagatctgcttatgacattttccccggagacatggcctcgggcctgcctcttgaggccgtatgtcgccaccatgtccgttcggaaaaatacgttttgtcaaaaaaagccaagctttgggccgtggaggtgaacgatcacctttaccttttcagcctgcccaggctgggaaaggagcaggctgaagagtgcgtgtcattttctattgaagacgccttgcccagggtaaagccgcataaagagcacatgtattcatttataaccgtggtttttgtggcggatgaggctgaacaggacgttcttaggtttattagccgtcgcaggttcaacaagagctataaattgggcttttacggatcgtcgcccttaaaaacggctgcgctggatataagccgcgaaaaagtcgtatccaataatatgggaagagatttgcgtatgcaaatcaaaaatattgtaaggagtgaaaccatgaatgggattgtattcttctga

SEQ ID NO: 13968 - protein, 181 aa, Unknown
  Obtained from environmental sample
  misc_feature (1)..(181): Xaa is any amino acid
MMHLIKDRSAILDRFIDSCRSAYDIFPGDMASGLPLEAVCRHHVRSEKYVLSKKAKLWAVEVNDHLYLFSLPRLGKEQAEECVSFSIEDALPRVKPHKEHMYSFITVVFVADEAEQDVLRFISRRRFNKSYKLGFYGSSPLKTAALDISREKVVSNNMGRDLRMQIKNIVRSETMNGIVFF

SEQ ID NO: 13969 - DNA, 573 bp, Unknown
  Obtained from environmental sample
  misc_feature (1)..(573): n is a, c, g, or t
atgggacaaaaaaaagttattccggcagatgcaggatgggttgaaaaaagcgttagggagcttaacggctcgccggtacggcgcatagccgatgagtggatgctgattaccgcaggtaacgccgctgtggaatcaagtaactggaataccatgaccgcctcttggggcgctcttggcgaactctggaacaaggatgcggctttcatttttatccggccaggccgctttacccgctcctttgtcgatgaaaattcgctgtttacgctttctttttttgaagaaaagtaccaccaggcgcttgtcttttgcggcgaaaaatccggcagagattacgacaaagcctccgaaaccggattaactcccatcttattttgcagcggaaaagtggacgacaagattgccggagcaatagcttttcaagaagcgtccgagattatcgtgtgcagaaaaatctacgcgcaggacattgatccggtgcattttctggatccttcaatcgccggcaattatccgcaaaaagactaccaccggatgtatgtcggggaagtgctggcgttgttgaaatcaaaataa

SEQ ID NO: 13970 - protein, 190 aa, Unknown
  Obtained from environmental sample
  misc_feature (1)..(190): Xaa is any amino acid
MGQKKVIPADAGWVEKSVRELNGSPVRRIADEWMLITAGNAAVESSNWNTMTASWGALGELWNKDAAFIFIRPGRFTRSFVDENSLFTLSFFEEKYHQALVFCGEKSGRDYDKASETGLTPILFCSGKVDDKIAGAIAFQEASEIIVCRKIYAQDIDPVHFLDPSIAGNYPQKDYHRMYVGEVLALLKSK

SEQ ID NO: 13971 - DNA, 582 bp, Unknown
  Obtained from environmental sample
  misc_feature (1)..(582): n is a, c, g, or t
ttggcggccgcctgcctttccgctctttcccaggagggaaaaagtgagggcggccccagagtcctcgatgcgttttcctacacaggctgtttcggaattcacgctgccagggctggggccgaatccgtggtctgtgtggatgtttctgccgctgccctggaaaccctgaaaaccaacgcggccctcaacggcgtgagtgacaggatcaaaacggtggaggccgatgtctttgaatttctcagaacggcggaacgcagaaaggaacgctacgatctgatcatcctggatcctccggctttcgcgaaaaccaggccgtccctggaaggcgcaatccggggctataaggaaatcaacctccgggcaatttccatgctttcaaagagcggcgtccttgttacttcttcctgcagccaggctatggacgaggccaattttagaaagatggtcaccgaggcggcgacggacgccggaaggcggcttgtcgagacagactttcgccgtcagtcggcggatcaccctatcctggtgggctacgatgaatctttctatcttaaatgcgggttttatagggcggttgattag

SEQ ID NO: 13972 - protein, 193 aa, Unknown
  Obtained from environmental sample
  DOMAIN (2)...(162): Methyltransferase small domain
  misc_feature (1)..(193): Xaa is any amino acid
MAAACLSALSQEGKSEGGPRVLDAFSYTGCFGIHAARAGAESVVCVDVSAAALETLKTNAALNGVSDRIKTVEADVFEFLRTAERRKERYDLIILDPPAFAKTRPSLEGAIRGYKEINLRAISMLSKSGVLVTSSCSQAMDEANFRKMVTEAATDAGRRLVETDFRRQSADHPILVGYDESFYLKCGFYRAVD

SEQ ID NO: 13973 - DNA, 318 bp, Unknown
  Obtained from environmental sample
  misc_feature (1)..(318): n is a, c, g, or t
atggggccggaagtcccggcggaaagtatcctggactgcctttgttccaattttcctgaaacagaaatcatcctgaccgtcggcaaagatggcgcttattacggtcttaacaaatccagggccagagggggaattgtgcctgttccggtagtagacaccacaggagccggggacagcttctccggttacttcctgacagcaagagaaaaagggtattcggttcaggactctttgaacgcagcctgcaaagcggcggccatcaccgtctcccggaaaggcgcaatggagtccattccttttaaggatgaagtgttttag

SEQ ID NO: 13974 - protein, 105 aa, Unknown
  Obtained from environmental sample
  misc_feature (1)..(105): Xaa is any amino acid
MGPEVPAESILDCLCSNFPETEIILTVGKDGAYYGLNKSRARGGIVPVPVVDTTGAGDSFSGYFLTAREKGYSVQDSLNAACKAAAITVSRKGAMESIPFKDEVF

SEQ ID NO: 13975 - DNA, 432 bp, Unknown
  Obtained from environmental sample
  misc_feature (1)..(432): n is a, c, g, or t
atgggcgggttgcacaatagctttggagaactggccgacnaaatggtcgtcccccggataatcaggcacttcaacaaaaagggtctttatttagggagcatctcgacctgcggactccaaatcctggaaaacgggaaggtaaaaaccgaagtggatattcttatggaaaatgttgattttctgatcgcggttgaggttaagtccaaacctaaagaagatgacatcgaacatcacataaggcggctggaaatagtgagggaataccggaacaaataccatgacacaaggaaaatacatggcgctatagcaggtgcaatattcacgcatgaagtgaagatattaacgcttaaggctgggctgtatgtaattgaacagtcgggggatactatgagggtagacgtaccggagggctttgttccgcgggaatggtaa

SEQ ID NO: 13976 - protein, 143 aa, Unknown
  Obtained from environmental sample
  misc_feature (1)..(143): Xaa is any amino acid
MGGLHNSFGELADXMVVPRIIRHFNKKGLYLGSISTCGLQILENGKVKTEVDILMENVDFLIAVEVKSKPKEDDIEHHIRRLEIVREYRNKYHDTRKIHGAIAGAIFTHEVKILTLKAGLYVIEQSGDTMRVDVPEGFVPREW

SEQ ID NO: 13977 - DNA, 558 bp, Unknown
  Obtained from environmental sample
  misc_feature (1)..(558): n is a, c, g, or t
atgcttcccgtcgagacaatctgctttgaaggcagaggtgaaagcatcataaccggcaatctgggagacgtcatgaaggaaagcgccaaaatcgccatttcttatttacgcagcgtacaggatcgctgcaagtttctcgtcaaagatatgtcggcaaccgattttcacatccacgttcccgaaggagccatccccaaggacggcccatccgccggtataaccctggcggtttcgcttctttctaccctctgccggattcccccaaaaccgggctatgccatgactggagagcttactctgacaggccgcatccttcccatcggcgggttaaaagaaaagctccttgcggcaatcagaaacggaatggaagaagtactgctccctgctgacaacagggaggactgggaagagctgaacgaagatattaaaaaatccctgaaagttaattttgttgacaatgcatgggaggcttttgggattctgttccccaaggagattctacgccgtacaagaaaaaagcagaacagtccggctaaaaagcgcccaaataagcggtaa

SEQ ID NO: 13978 - protein, 185 aa, Unknown
  Obtained from environmental sample
  DOMAIN (1)...(164): Lon protease (S16) C-terminal proteolytic domain
  misc_feature (1)..(185): Xaa is any amino acid
MLPVETICFEGRGESIITGNLGDVMKESAKIAISYLRSVQDRCKFLVKDMSATDFHIHVPEGAIPKDGPSAGITLAVSLLSTLCRIPPKPGYAMTGELTLTGRILPIGGLKEKLLAAIRNGMEEVLLPADNREDWEELNEDIKKSLKVNFVDNAWEAFGILFPKEILRRTRKKQNSPAKKRPNKR

SEQ ID NO: 13979 - DNA, 627 bp, Unknown
  Obtained from environmental sample
  misc_feature (1)..(627): n is a, c, g, or t
atgctcgggcaagttttccgctgggtagaacgctaccttgaatccggcaaaataatattagaaccggcactttttgtacagaatgacccgcttaaaagaaaaataatgtatatgctgaacatgaataaaatagtacagcatctctggaaatttattgaatgtcagatgaccaaacgaatagtaccgttgtttaaccccaacagcaaagtccgttctacaacagatatgccgacatggtggactgtaaaacaccgcgaacccctgaaaaagtctcatatcagccatgttgtctatgacagcacatgggaagccaccgaggcctacaaactggaaaaaaatcctcatgtaaccgcttttgctaaaaatgaccatcttggctttggcgttcaatacacttttaatggcgtatctcgcacatattaccctgatttcctcataaaactggacaacggtaaaactctggtactggaaacaaaagggcaagacaaccagcaagtacaggcaaaacaagccgccctcgccgaatgggtagaagccgtaaactcattaaaagaatacggtgaatggtgctgtgacatttccttcaatgtcgccgatgttgacggaattattgggaagtatttataa

SEQ ID NO: 13980 - protein, 208 aa, Unknown
  Obtained from environmental sample
  misc_feature (1)..(208): Xaa is any amino acid
MLGQVFRWVERYLESGKIILEPALFVQNDPLKRKIMYMLNMNKIVQHLWKFIECQMTKRIVPLFNPNSKVRSTTDMPTWWTVKHREPLKKSHISHVVYDSTWEATEAYKLEKNPHVTAFAKNDHLGFGVQYTFNGVSRTYYPDFLIKLDNGKTLVLETKGQDNQQVQAKQAALAEWVEAVNSLKEYGEWCCDISFNVADVDGIIGKYL

SEQ ID NO: 13981 - DNA, 342 bp, Unknown
  Obtained from environmental sample
  misc_feature (1)..(342): n is a, c, g, or t
ttggctgtggccgcggcctcagccgaaggaaccaccgttattcgcaacgcggcgcgtctgcgtaccaaggaaagcgacaggcttgccgccgtaagcgccgtattacgcgctttgggcgctgacgcggacgagaccgatgacggtctggtcatacacggcggaaaggttttcaaaggtggtcaagtatcttcctgcggggatcaccggatcgctatgtcagcggcaatcgctgcggcagtatgcgccgggccggttgttatcaagggcgctcaggcggtcaataaatcataccccggcttttttgacgatctgcgtttgcttggaggcgaggttgaagaatga

SEQ ID NO: 13982 - protein, 113 aa, Unknown
  Obtained from environmental sample
  misc_feature (1)..(113): Xaa is any amino acid
MAVAAASAEGTTVIRNAARLRTKESDRLAAVSAVLRALGADADETDDGLVIHGGKVFKGGQVSSCGDHRIAMSAAIAAAVCAGPVVIKGAQAVNKSYPGFFDDLRLLGGEVEE

SEQ ID NO: 13983 - DNA, 414 bp, Unknown
  Obtained from environmental sample
  misc_feature (1)..(414): n is a, c, g, or t
atgggacagggatattttctagattcaaatgttattatcggatacctcgcggggaaaattccttcttctggtatggagattgtgtctgaagttgttagcaacagacctaatatttccgtaatttcacagatagaagtattaagattcaacgatacaccggaaaatgaagctgttttggatgaatttataaatatgtctaaagtttatcctttaagcaataatgttgttgaacgaactgttaaattatgcaaacagattaaattaaaattaccagacgcaataatcgcagcaaccgctttacttgaaggttttactttaattactcgtaatattagtgattttaataaaatacccgatcttatacttctaaacccctgggatgttcctgttattgaaattgaaggaaatcgttaa

SEQ ID NO: 13984 - protein, 137 aa, Unknown
  Obtained from environmental sample
  DOMAIN (5)...(125): PIN domain
  misc_feature (1)..(137): Xaa is any amino acid
MGQGYFLDSNVIIGYLAGKIPSSGMEIVSEVVSNRPNISVISQIEVLRFNDTPENEAVLDEFINMSKVYPLSNNVVERTVKLCKQIKLKLPDAIIAATALLEGFTLITRNISDFNKIPDLILLNPWDVPVIEIEGNR

SEQ ID NO: 13985 - DNA, 801 bp, Unknown
  Obtained from environmental sample
  misc_feature (1)..(801): n is a, c, g, or t
gtgctaaacggcgtacgacgtgttgccaataccgtctcggaagatttgtttttggtancagggaaaaagctgaatgtaacaaacattttggagaattgtaaaagcgaacggattattattaccgctacacttggaaacagcgccttgattgattcttttatagaaagaaaaatactgaatgttgatggtataacaggaaaacgcgaatgttatttaataaaggtcatagaaacgcctttcgccgattttccgaaaatcaaacaggctttaataatagcaggcagcgacaaacgaggcactatttacggtttgttccgtctttctgaaatgtgcggagtatcgcctttagttttttggggagacgcagtaccggagaaaaaagacaaaatacaccttgaatttgaaaatgatattgtttcaaaagaaccttcgataaagtatcgcggcttttttataaacgacgaatggcctgcattcggaaagtggtgttcggaaaaatacggcgacgtcaacgcgaaagcatacgataaagtttttgaacttctcttgcggttaaaaggaaattacctatggcctgcaatgtggagatcatcgtttagtgaggacggccccggtttggaaaacgcgcggttagcggatgaatacggtgttataatgggttcatcgcatcacgagccgttatgccgcgcgggtgtggaatggcagaatcattatagccaatacggcaatgacaatacctggagttttatttccaacagcgacgctatcacaaagtttggaaggacggcatgtaagaaataa

SEQ ID NO: 13986 - protein, 266 aa, Unknown
  Obtained from environmental sample
  misc_feature (1)..(266): Xaa is any amino acid
MLNGVRRVANTVSEDLFLVXGKKLNVTNILENCKSERIIITATLGNSALIDSFIERKILNVDGITGKRECYLIKVIETPFADFPKIKQALIIAGSDKRGTIYGLFRLSEMCGVSPLVFWGDAVPEKKDKIHLEFENDIVSKEPSIKYRGFFINDEWPAFGKWCSEKYGDVNAKAYDKVFELLLRLKGNYLWPAMWRSSFSEDGPGLENARLADEYGVIMGSSHHEPLCRAGVEWQNHYSQYGNDNTWSFISNSDAITKFGRTACKK

SEQ ID NO: 13987 - DNA, 822 bp, Unknown
  Obtained from environmental sample
  misc_feature (1)..(822): n is a, c, g, or t
gtgggcattgaaaacacggtggggcggatttatcccgaaagaactctggcttcccaaatcgtaggttttataggggacgatggctttggccttgcgggtatagaatacgcctttgacaatgagttaaaagccgaacaggggatattgggcaggagcggaggtcaaaaaaccggaggtagccaggtctttctgactctggacgtgaatattcagtacctccttgaaagtatcgctactcaggtaatggacgaaaacaaggccgaagcggttatgtttatggctatggatcccagaaccggagatatacttggaagcgcttctctgcccggctacgatcccaacaacaggagaaattcggatgaaatttcccgcatggatcggccagccatctgggcctacgaacccggatcggttttcaaagttttttcactttcagcgctgatggattcaggagccatcaccggcaacactttttttacctgcaacggccactacgaacggactacgggaagaggtgaaaaaataattatcaactgcatgtccgcccacgggaatgtaaacgccagggacataatcatttattcgtgcaactcaggagccgcttacgcggcggatcgtttgggttcacaagcgttctatgaaagcatcacaagcctgggctttggatcgcgcaccggggctggaaaccctggagaaaccgcgggattccttcgccccaccgagcgctggtcggagcgttcccagcccacaatagcgatgggccaggaaaattgccgtctccagcattcagatgctgcangcctgcagcgacgttgccaatga

SEQ ID NO: 13988 - protein, 273 aa, Unknown
  Obtained from environmental sample
  DOMAIN (90)...(270): Penicillin binding protein transpeptidase domain
  misc_feature (1)..(273): Xaa is any amino acid
MGIENTVGRIYPERTLASQIVGFIGDDGFGLAGIEYAFDNELKAEQGILGRSGGQKTGGSQVFLTLDVNIQYLLESIATQVMDENKAEAVMFMAMDPRTGDILGSASLPGYDPNNRRNSDEISRMDRPAIWAYEPGSVFKVFSLSALMDSGAITGNTFFTCNGHYERTTGRGEKIIINCMSAHGNVNARDIIIYSCNSGAAYAADRLGSQAFYESITSLGFGSRTGAGNPGETAGFLRPTERWSERSQPTIAMGQENCRLQHSDAAXLQRRCQ

SEQ ID NO: 13989 - DNA, 741 bp, Unknown
  Obtained from environmental sample
  misc_feature (1)..(741): n is a, c, g, or t
ttgggcggcaagcttcataaatttgagactcaaattaaggagctgagggataaaaacgatgagccggatacagatgacattctgcgtatttccgaagagttaaagaaaattgtacaggacaaggataaatttccggagatactcaagcggcttaaaaattttagctcagcaggcggaaacagaagcgatgatgaggtatttgtagaagccctgaaacaggcctgcaagcgggttgccgaggacgagaataaaaaagctgaagttattgtaaaagcctttgaccgtgaggttctgagcaaaagctctcggaggataatgaaggaaatgcttacccaactggttcgcaattccgtataccacggcatcgaagcgccggaaaagcggctgggtctgggcaaagacgaaaccggaaaaatcactttgtcagttacaattgaaaacgacgcggttcatatcgttcttggcgacgatggcggcggcctggactataaacgcatcgctcaaatagccagggaaaaaggcttgctgaaaaaggacgccgacaccaacaacaagctgcttctttccaacattatcttcagtcccggctttagtacctctgaaactgaaaatatccacgcaggccggggaatcggtcttaacctggtaaaagacagattgagggaagccggcggtagtatgaagctcaaatcaataaaagggcgtggactggtttttgatattcagatacccttaaaatag

SEQ ID NO: 13990 - protein, 246 aa, Unknown
  Obtained from environmental sample
  DOMAIN (105)...(246): Histidine kinase-, DNA gyrase B-, and HSP90-like ATPase
  misc_feature (1)..(246): Xaa is any amino acid
MGGKLHKFETQIKELRDKNDEPDTDDILRISEELKKIVQDKDKFPEILKRLKNFSSAGGNRSDDEVFVEALKQACKRVAEDENKKAEVIVKAFDREVLSKSSRRIMKEMLTQLVRNSVYHGIEAPEKRLGLGKDETGKITLSVTIENDAVHIVLGDDGGGLDYKRIAQIAREKGLLKKDADTNNKLLLSNIIFSPGFSTSETENIHAGRGIGLNLVKDRLREAGGSMKLKSIKGRGLVFDIQIPLK

SEQ ID NO: 13991 - DNA, 417 bp, Unknown
  Obtained from environmental sample
  misc_feature (1)..(417): n is a, c, g, or t
gtgaaataccttctggataccaatataatatccgaaactcagaaatcgaattgcaatccaaaggtaaaggcctttctcgacggactcgccggggaagatatgtatatttgttccattaccgtcggggaaatatgttacggcatagaaaaactccccgcaggaaaaaagaaacatgagttaatggtatggctgtacagcaaactgccggagtggttttacgggcgcgttatttcccttgatacagacgtaatgatggaatgggggaaaatccgcgcccatacggacagaaccctgcccgcggccgattcaatgatcgcctcggctgccataacccatcacatgacgctgataacgaggaacactaaggattttgacggcatcgaaaaccttatgttaatcaacccctgggaatattaa

SEQ ID NO: 13992 - protein, 138 aa, Unknown
  Obtained from environmental sample
  DOMAIN (3)...(135): PIN domain
  misc_feature (1)..(138): Xaa is any amino acid
MKYLLDTNIISETQKSNCNPKVKAFLDGLAGEDMYICSITVGEICYGIEKLPAGKKKHELMVWLYSKLPEWFYGRVISLDTDVMMEWGKIRAHTDRTLPAADSMIASAAITHHMTLITRNTKDFDGIENLMLINPWEY

SEQ ID NO: 13993 - DNA, 369 bp, Unknown
  Obtained from environmental sample
  misc_feature (1)..(369): n is a, c, g, or t
atgtacaaattcaacccggacgaattatcggattttgcgcggtattacggttttcattacgacagcatcaaggcggacgccattgtaaaagaagcgctcattgaaatggatcgcgggctatcaggcgtcccttccagccttcagatgattccggcttatattacgcctgtttcacgcattcccacagggaaaaaagtccttgcccttgacgcgggcggaacaaacttgcgcgtaagccttgtgcaattcaacgaggacggcgaagcgtccgcgcagggaacggcaaaatcgcctatgcccggaacaggcggccatgttacggcgaaagagttctttgacacaatagcgaaagccgcccttcccctataa

SEQ ID NO: 13994 - protein, 122 aa, Unknown
  Obtained from environmental sample
  DOMAIN (10)...(121): Hexokinase
  misc_feature (1)..(122): Xaa is any amino acid
MYKFNPDELSDFARYYGFHYDSIKADAIVKEALIEMDRGLSGVPSSLQMIPAYITPVSRIPTGKKVLALDAGGTNLRVSLVQFNEDGEASAQGTAKSPMPGTGGHVTAKEFFDTIAKAALPL

SEQ ID NO: 13995 - DNA, 375 bp, Unknown
  Obtained from environmental sample
  misc_feature (1)..(375): n is a, c, g, or t
ttggcaagccgctttgtcgtttccccgctggggaaaatcgcagaaagcgcgaaattgcgcgaaaacgaattttcgttcagaagctttttaaaaaacagcgagggaaaggaagtctttattaacggcactatcgacttgttttttgaagattcaggattttttcatgttgtagactttaagaccgacaccagggaaacgcctgttgaacatacggcgcaaatggcctgttattaccaggccgtatccgcccttttcgcggttccggcaaaaaaagaatgcagagcgtggctttactaccttagaaccggccacgccgtggaaatgacggttaaagtaaaacagtttaatcttgaaaacaaagcgtttatccggtaa

SEQ ID NO: 13996 - protein, 124 aa, Unknown
  Obtained from environmental sample
  misc_feature (1)..(124): Xaa is any amino acid
MASRFVVSPLGKIAESAKLRENEFSFRSFLKNSEGKEVFINGTIDLFFEDSGFFHVVDFKTDTRETPVEHTAQMACYYQAVSALFAVPAKKECRAWLYYLRTGHAVEMTVKVKQFNLENKAFIR

SEQ ID NO: 13997 - DNA, 789 bp, Unknown
  Obtained from environmental sample
  misc_feature (1)..(789): n is a, c, g, or t
atgtccagcaacccgtatgtttcctggaaaattccgactggcttgatggtttccaagtttggggaactgacttatacccctagagtttcggcaaccattaaccatgagcttccgccatggcctctggacaggttacacagaggtatatttcttagttttaaccattcgttgggttttgaaaaaatcgactggcatgccaattaccgcaaggggttgtctgtctttatagataattcatacacatataatattaccactaatatttataatatcaatttcaatttcaaaggagtcggacactatgttgtcagtgacttctttgccgtttcttcacggcttatgtatcaatattggtattcttccgataaaacgtcgaaaggagactatatcagttattacctgcgcggaatcgcggataaatccatcatcggatatcaaatgtttttattaaatatggattttcctttccggttgtttatctttaggccttcaaaatggttcaataacaagaaactcagctttttcgattttgaaatgcacgcctcccctgttattgatctggccctgtactaccaaagaagttttgatggagataaaatcctgtataaacccggagatgtagccgtttcgagcggcattgaattcgtggtatttccgctgtttatgcgaaatttgtatatacgccttggtttcgcgatagatctaaaggaatttataaccgcgcgtccggtcaaactgcccgatggcaatcaccgtgaaatatatttaattatgggacacttctattaa

SEQ ID NO: 13998 - protein, 262 aa, Unknown
  Obtained from environmental sample
  misc_feature (1)..(262): Xaa is any amino acid
MSSNPYVSWKIPTGLMVSKFGELTYTPRVSATINHELPPWPLDRLHRGIFLSFNHSLGFEKIDWHANYRKGLSVFIDNSYTYNITTNIYNINFNFKGVGHYVVSDFFAVSSRLMYQYWYSSDKTSKGDYISYYLRGIADKSIIGYQMFLLNMDFPFRLFIFRPSKWFNNKKLSFFDFEMHASPVIDLALYYQRSFDGDKILYKPGDVAVSSGIEFVVFPLFMRNLYIRLGFAIDLKEFITARPVKLPDGNHREIYLIMGHFY

SEQ ID NO: 13999 - DNA, 525 bp, Unknown
  Obtained from environmental sample
  misc_feature (1)..(525): n is a, c, g, or t
atggggttggcggttattgacgttgtatttctgatactcatcgcaatttttgcgcttcgctgcgcgttgcgggggattgtcggcgaactcatgtcaatggcggcgctggtactgggtctcttgtcggcgatattcttcttccgaaaaaccgcggagttaatccggggcaagtttatacccgatgtaaaggcgctccctgagatagtagcctttataggggttttcattatcgttttcgccgccataaaaatacttgaaacaatattaaaagatattattgatagaatacaactcggcgggccggatcgttttcttggcttttttctcggcgttgccgaaggactggttatcgtctgcctgctcctgttcctgatattagtccagccctttgttgatcccgccctcattttagaaggcagctttcttgctgatttactaatgccgtttatcattggaacaaaaaaagaactgatggaatctgtcgtccgtttcaatgaggcggcgggaggattcgcaggtgtttga

SEQ ID NO: 14000 - protein, 174 aa, Unknown
  Obtained from environmental sample
  DOMAIN (5)...(160): Colicin V production protein
  misc_feature (1)..(174): Xaa is any amino acid
MGLAVIDVVFLILIAIFALRCALRGIVGELMSMAALVLGLLSAIFFFRKTAELIRGKFIPDVKALPEIVAFIGVFIIVFAAIKILETILKDIIDRIQLGGPDRFLGFFLGVAEGLVIVCLLLFLILVQPFVDPALILEGSFLADLLMPFIIGTKKELMESVVRFNEAAGGFAGV

SEQ ID NO: 14001 - DNA, 576 bp, Unknown
  Obtained from environmental sample
  misc_feature (1)..(576): n is a, c, g, or t
atggccgaggaacgtgtttttcgcatagcgagaagcacaagcctaaaaggtttgcgaggcattttaacggagcgagaagacggggttattcgcccgatgctggaattcacaaaagaggatttgcaaagatacgcggagcaaaatggcattgagtggcgagaggattccacgaataaaaatgttgagcattttagaaacaaggttcgtctgcaaattttgccaagtatcgaaagcgaatgcaatggcacaataaacagcttggcacatatagcggagctttcgcaaaaaatttacccgaatgtgattaaaattttggattcatattttaacccttttttggttgaccattccaaaggcactttgactttaaagcatttttacttgcctgcgatggctggttatggcgaacttttcaggctgtggcttgggagcaaaggcttttcttgggaagagacaaatgaagacgaaaagctctacgaaaaactgcaaaagaaggattcttttagatttcgtctgggcaaggtgtgttttgagagaaaaaaaggattattttctacattcctcctatggacttaa

SEQ ID NO: 14002 - protein, 191 aa, Unknown
  Obtained from environmental sample
  misc_feature (1)..(191): Xaa is any amino acid
MAEERVFRIARSTSLKGLRGILTEREDGVIRPMLEFTKEDLQRYAEQNGIEWREDSTNKNVEHFRNKVRLQILPSIESECNGTINSLAHIAELSQKIYPNVIKILDSYFNPFLVDHSKGTLTLKHFYLPAMAGYGELFRLWLGSKGFSWEETNEDEKLYEKLQKKDSFRFRLGKVCFERKKGLFSTFLLWT

SEQ ID NO: 14003 - DNA, 306 bp, Unknown
  Obtained from environmental sample
  misc_feature (1)..(306): n is a, c, g, or t
atggacttaaactcttttatcagaaatataccagattttccaaagccgggtgttatattcagggatataacaccaatgctcgcggatgcaaaggcttttgactttgctgtggaaaaaatgatagagccttttgtgggcgagaaaattcaaaaggttgtggctatagaagccagaggttttatttttggctctgtggcggcaaataaacttggagctggttttgtgcctgtgcgcaaaaagggtaagctacctttcanaacggatgaggaaacttattccttggaatatggcgaagccagcatttga

SEQ ID NO: 14004 - protein, 101 aa, Unknown
  Obtained from environmental sample
  misc_feature (1)..(101): Xaa is any amino acid
MDLNSFIRNIPDFPKPGVIFRDITPMLADAKAFDFAVEKMIEPFVGEKIQKVVAIEARGFIFGSVAANKLGAGFVPVRKKGKLPFXTDEETYSLEYGEASI

SEQ ID NO: 14005 - DNA, 630 bp, Unknown
  Obtained from environmental sample
  misc_feature (1)..(630): n is a, c, g, or t
ttgaacctttcttttatacacaggtcggtctcaaacgaagcaaacagcaagttaaacaacgaaaggctggaattcctcggggacgcgatccttggagcggtagcggcgaatctgctctacaggaagctggagggcagaagcgaaggagatctggcaaaaatcaagtcagtggtggtttcggaagccattctttccgcagttgccctggaactacaacttgacaacttgctgattttgggccgtggcgaagagctttcaggcggcaggacaaaaaaagccatacttgccgacgctctggaagcccttattggcgcaatctacctggattcagggtataaaagcgcctattcctttgtcagccgctttttaagcgtcgaaattgatcgggtactggaaaaccgccacacccgtgactataaatcccttttgcaggaattctgccaaaaactatacaaaaattaccccaactaccagcttgtcaaacgaacgggccctgaacatgagcgtatattctgggtggaggttctggttaacggcaaagccttcggcccggcttccggcagaaacaaaaaaagcgccgagcaggaagccgcanagctggcttatgaagcgctggagaaagccttatga

SEQ ID NO: 14006 - protein, 209 aa, Unknown
  Obtained from environmental sample
  DOMAIN (139)...(205): Double-stranded RNA binding motif
  misc_feature (1)..(209): Xaa is any amino acid
MNLSFIHRSVSNEANSKLNNERLEFLGDAILGAVAANLLYRKLEGRSEGDLAKIKSVVVSEAILSAVALELQLDNLLILGRGEELSGGRTKKAILADALEALIGAIYLDSGYKSAYSFVSRFLSVEIDRVLENRHTRDYKSLLQEFCQKLYKNYPNYQLVKRTGPEHERIFWVEVLVNGKAFGPASGRNKKSAEQEAAXLAYEALEKAL

SEQ ID NO: 14007 - DNA, 660 bp, Unknown
  Obtained from environmental sample
  misc_feature (1)..(660): n is a, c, g, or t
ttgatcagattggccgaggcgctcgtttcagaggacaataataaagcggaaacagatgaagtttccggaaaaatcgagatcgaagggctgaataccgaaaagggcatatttttctccggcggaacggaaagagtctatttggaaactcttgcgttattttataaagacggaattgagaaaatagagggcataaaagactgcatgaataatggcaatctggatctgtatacgatccatgttcatgctctaaaaagcgcttcggcaaatataggagcggaaacgctttcaaaagcagcagccgctctggaacaggccggtgaaaggcaggacaaaaaatatatcgaatcgtatacccctgcatttttgacgtcattggagacgatcctaaacaacataatgactgttttggtattgaggcagaaagacagtgaaaaagacagctacaatacggaggaattaagatctgaacttgcggtattaaaggaggctttgaaatcattggatgcggggaccattaacagatcggttgaaactttaggcaatattgtgcggtccggaagcgtaaaaaacagcattattgatatttccgaaaaaatactgataggcgaatatgaagaagccctggatattgttgaaaaacttttggaaggcggagcttga

SEQ ID NO: 14008 - protein, 219 aa, Unknown
  Obtained from environmental sample
  DOMAIN (48)...(131): Hpt domain
  misc_feature (1)..(219): Xaa is any amino acid
MIRLAEALVSEDNNKAETDEVSGKIEIEGLNTEKGIFFSGGTERVYLETLALFYKDGIEKIEGIKDCMNNGNLDLYTIHVHALKSASANIGAETLSKAAAALEQAGERQDKKYIESYTPAFLTSLETILNNIMTVLVLRQKDSEKDSYNTEELRSELAVLKEALKSLDAGTINRSVETLGNIVRSGSVKNSIIDISEKILIGEYEEALDIVEKLLEGGA

SEQ ID NO: 14009 - DNA, 801 bp, Unknown
  Obtained from environmental sample
  misc_feature (1)..(801): n is a, c, g, or t
atgctaaaaaaaataaaagcgtccatagacaacattaccaaatcctccgatgacgtattaaaccgttttggagctatagactcaagcgtaaaaacagtttccgagcatgaacaaaatatcttaagcgccatgcgggaacaggaaacaggcggaaagcaaatacttgaatccataagccgccttcgggacataacccgctcggttaaaaaaggttctgacgatatggcggaatcaggcaagactctggttaaggaaacagacgaattcataaagacaagccagagagcggtagaaggcatgaacgagatattgaagggcgttaatcagattaatatttcggtgagccatataaacgatatgagtatggaaaacaacaggaacttcgatgccctgaaacaggaaacgggaaaatttaatgataccattggcgacgagaagcaaacaatcctcgtagttgatgatgacgttatccatcttgaaatggtggaagcggtattgcaaaataagtatgacatatctaccgccaaatcgggcaaagaagcgctgggtttattttaccagggtcttgttccccaattaatattattggacttaataatgccggatatggacgggtggaaaacctataccagaataaaagcgattagcggtttgtacgataccccgatagcgtttttcacggcttcaagcgatccgaaagacatacaacacgcgcgtgaaatgggggcggttgattatatcaaaaagccctatgataaggacgatctgttacgcangataggaagaatttctgaaaggtaa

SEQ ID NO: 14010 - protein, 266 aa, Unknown
  Obtained from environmental sample
  DOMAIN (147)...(261): Response regulator receiver domain
  misc_feature (1)..(266): Xaa is any amino acid
MLKKIKASIDNITKSSDDVLNRFGAIDSSVKTVSEHEQNILSAMREQETGGKQILESISRLRDITRSVKKGSDDMAESGKTLVKETDEFIKTSQRAVEGMNEILKGVNQINISVSHINDMSMENNRNFDALKQETGKFNDTIGDEKQTILVVDDDVIHLEMVEAVLQNKYDISTAKSGKEALGLFYQGLVPQLILLDLIMPDMDGWKTYTRIKAISGLYDTPIAFFTASSDPKDIQHAREMGAVDYIKKPYDKDDLLRXIGRISER

SEQ ID NO: 14011 - DNA, 531 bp, Unknown
  Obtained from environmental sample
  misc_feature (1)..(531): n is a, c, g, or t
atggaaatactagaaggatgtttagacggacggggcttgaaaattgccattgcagtttctcgcttcaacgaagttgttacaaaaaatcttttagaaggagctgtttctgggctcaaaagaaccgccgttagcgaaggcgatatcaccattgcttgggcaccgggcgcatttgagttgccgggcatagcggctcgctttgcggcaagcggcaaatttgatgcggttatagttttgggggcagttattcgcggagcaactgcgcattttgaatatgtttcaagtgctgttaattcaggcattgcacacctcgcaagagaaggcaaaacaccggttatttttggcgtactaacaacagacaccgttgagcaagcaatggacagagcaggcttaaaatgcggcaacaaaggaacggatgccgccgctgccgcagtggaaatggcaaatttatataaaagggttgccttaatgccctccatttctcgaagacccgcacgggtttttgcccttcaacttttaatgcaatggaaataa

SEQ ID NO: 14012 - protein, 176 aa, Unknown
  Obtained from environmental sample
  DOMAIN (10)...(153): 6,7-dimethyl-8-ribityllumazine synthase
  misc_feature (1)..(176): Xaa is any amino acid
MEILEGCLDGRGLKIAIAVSRFNEVVTKNLLEGAVSGLKRTAVSEGDITIAWAPGAFELPGIAARFAASGKFDAVIVLGAVIRGATAHFEYVSSAVNSGIAHLAREGKTPVIFGVLTTDTVEQAMDRAGLKCGNKGTDAAAAAVEMANLYKRVALMPSISRRPARVFALQLLMQWK

SEQ ID NO: 14013 - DNA, 477 bp, Unknown
  Obtained from environmental sample
  misc_feature (1)..(477): n is a, c, g, or t
atggatgatgttaatattttcttctctgatggatataccactttttataatatgctaaaacatagagatgatttattggatcgattaattaattccgaatcagatagtacaattcttgaagaaattattataaagcaaaaaataactaatttattacataaaataaattcagttgtaaatggtaattttaaagaagttgataataatttgatgtatgctgaacaaggtctgaataaaccaattccgcttgaaaatgtttccgccggtataaagatgtttcttataattaagcggcttttggagctagacgaaataaatgaaagagacatattaatatttgatgaacctgaaattcatcttcatcctgattggcaaataaaatttgccgaaattttaatcttattacaaaaagaatttaatcttacaattttgctggctacacatagtccttattttcttcatgctatgaaattatag

SEQ ID NO: 14014 - protein, 158 aa, Unknown
  Obtained from environmental sample
  misc_feature (1)..(158): Xaa is any amino acid
MDDVNIFFSDGYTTFYNMLKHRDDLLDRLINSESDSTILEEIIIKQKITNLLHKINSVVNGNFKEVDNNLMYAEQGLNKPIPLENVSAGIKMFLIIKRLLELDEINERDILIFDEPEIHLHPDWQIKFAEILILLQKEFNLTILLATHSPYFLHAMKL

SEQ ID NO: 14015 - DNA, 438 bp, Unknown
  Obtained from environmental sample
  misc_feature (1)..(438): n is a, c, g, or t
ttgtatatnttatccgcaaaagaggtaccagatgtaacaaaaatcgaccatatagcaatagcagtgccttctatagaagaagcccgtggctattatgaaaatgtgctaggcttaaagctagaccacatagaagaggttgccgagcaaaaagtcaaaacagctttttttgacatcggcggcgtttggattgagcttctggaacccaccactccagactccacagtcgcaaagttcattgccaataacaacggcaaaggcggtttgcaccacatagcttacagaagcgatgatgtggctgcagagctaaccacagccgagtctaagggcatggctctgttagacaaaactccgcgcaaaggtgcgggtaacatgaacatcgggtttttgcatccaaaatccaccggtggggctttaaccgaattctgctctccggcttga

SEQ ID NO: 14016 - protein, 145 aa, Unknown
  Obtained from environmental sample
  DOMAIN (14)...(141): Glyoxalase/Bleomycin resistance protein/Dioxygenase superfamily
  misc_feature (1)..(145): Xaa is any amino acid
MYXLSAKEVPDVTKIDHIAIAVPSIEEARGYYENVLGLKLDHIEEVAEQKVKTAFFDIGGVWIELLEPTTPDSTVAKFIANNNGKGGLHHIAYRSDDVAAELTTAESKGMALLDKTPRKGAGNMNIGFLHPKSTGGALTEFCSPA

SEQ ID NO: 14017 - DNA, 894 bp, Unknown
  Obtained from environmental sample
  misc_feature (1)..(894): n is a, c, g, or t
atggccgagcggccgagggcagaactcaggtttgaggtgcagtacggaagctataggaagcttggtaccgtcagcttcacggaaccatgggcgttcgacaccccgctatggctcacgggaacggtctttatcgatcagcagatatacagctactcaagcgagggctacgataccaccacgagttacggctttcgtgtcggcgccggccgctcgcgcctctcgtggcccgacaacaaatttcgctttcagtcaatctatcagctcagccaccaacgcgcaaccggcgtcagcaggactaacacaaccgtcggcgacatggatatcatagagacaggcataatgagtaaactgcgactcaacgttgagcgctacgaccttgatatgccgctttttccgaacgaagggtcgcggctgaccgtcacacctgaaatcgccggcctcggcggcgacttccgctatttcaaaaccaccatgtcctacgagaattacttcaggctccccgccaaattagtcttcggtagcgaggtaaagttgggcgcgataacccagctcgtcggcaatcttaaaatatcgagagacgacctattcaccggcggcggcgcctacggcgacgcgatcatcaggggttactcagactgggcgttcggcgggtatcgccgttggtggatgggcgacgggatatcgatgttcgccgtgaatatgtcgctgcgctacccgatcatcgatcagcaggtatacataggcatgttcgccgatatgggcaacacttggccgacaatctccggaattgatctgggcgatttgtaccgcggcgtgggcggcggcctccgcatcaatctgccgatgatccgagtgatgggcgttgatgtcggatacgggcttgaccccgcttga

SEQ ID NO: 14018 - protein, 297 aa, Unknown
  Obtained from environmental sample
  DOMAIN (4)...(290): Surface antigen
  misc_feature (1)..(297): Xaa is any amino acid
MAERPRAELRFEVQYGSYRKLGTVSFTEPWAFDTPLWLTGTVFIDQQIYSYSSEGYDTTTSYGFRVGAGRSRLSWPDNKFRFQSIYQLSHQRATGVSRTNTTVGDMDIIETGIMSKLRLNVERYDLDMPLFPNEGSRLTVTPEIAGLGGDFRYFKTTMSYENYFRLPAKLVFGSEVKLGAITQLVGNLKISRDDLFTGGGAYGDAIIRGYSDWAFGGYRRWWMGDGISMFAVNMSLRYPIIDQQVYIGMFADMGNTWPTISGIDLGDLYRGVGGGLRINLPMIRVMGVDVGYGLDPA

SEQ ID NO: 14019 - DNA, 675 bp, Unknown
  Obtained from environmental sample
  misc_feature (1)..(675): n is a, c, g, or t
gtgatagaacgcggcgtcagcgtaggcgattcaactcgcatagactccggcgccataatacgctacggcacgtggatcggggcgcgggtaataatacagtccggcgcggtgctgggcagcgacggcttcggcaacgcgcgcgacaaaaacggcgttttcgtccgcataccctgcttcggcaacgtggtagtggaggacgacgcggacataggcgccggcacgacgatagaccgcggcaattttgagcccacggtgataggtaaaggggtaaagttagacaacttaatccacatcgcccacaacgtgacaatcggcgaaaacaccgccatagccgcgcaaaccggcatatccggctcgacaaaggtcggcaagcgcgtaataatagcgggtcaggccggatttgtagggcacataaacataggggacgattcattcgtaggggcaaagtccggcgtatctaaggacgtggcccccggagcaaatattaccggctatccggcgagggatctcatgactatgagaaggatagaggcgtcgtcgagccgattgccggatttgctgaaagaagttaagaagctcagggaagaggttgaggagttgaaggtactgccttttacgcatctcgcagaagttaagagattaagggaagaggttgaggagttaaaaaaagtctga

SEQ ID NO: 14020 - protein, 224 aa, Unknown
  Obtained from environmental sample
  misc_feature (1)..(224): Xaa is any amino acid
MIERGVSVGDSTRIDSGAIIRYGTWIGARVIIQSGAVLGSDGFGNARDKNGVFVRIPCFGNVVVEDDADIGAGTTIDRGNFEPTVIGKGVKLDNLIHIAHNVTIGENTAIAAQTGISGSTKVGKRVIIAGQAGFVGHINIGDDSFVGAKSGVSKDVAPGANITGYPARDLMTMRRIEASSSRLPDLLKEVKKLREEVEELKVLPFTHLAEVKRLREEVEELKKV

SEQ ID NO: 14021 - DNA, 984 bp, Unknown
  Obtained from environmental sample
  misc_feature (1)..(984): n is a, c, g, or t
atgctggaacgtgactttgtgagntacaagcacttggccaccaacgtaacgggcggcagttggccggtgtacgcctcgttgtggcacctagccaagtggaaaaaagagaagattgacgtcacggatgccgaaggcaacaccacccaagtggagaggtacccccacaccatcccagccaactngtcgctgagcgggtctcaattgggacagttcaacgccgacatggttgagatggcccttgagcacgacatagtcctagtctgcgcttctggcaacgatggcagtggtctcccgtcttggcctggcagcttggctggtaccatccgcgtgggtcaggtcaacttcaatgacagacgcatcaatacatccaactggggcaacgacatgtcagtcatggcaccaggcttcaacatcctttccgctggcagtaccgccgacaacgcgtacacgctcgcgagcggcacctcatttgccgcgccgcacgtcacgggtctggtgggctacatgctcacattcaacccagacctgaagcccgaccagatcaagacctaccttgagaggaacgccgacccgattgacggccagagaggcttcgacccccactacggctacggtcgcatcaatacctacaggactataggcgcggtggtcgccgacatagatgctaaaacaacgccggcatccgactacgtgctgacccccgtcaagatcaaaacccagaacgccgccggcacaccgctgaacggcgccaaggtctatctctacaactgcaaccaggcaggcaccatcaacaactacaccaacgtcaccgagacgggcacgtccttcgttgatgtcagggacgacaagaccgttccccccgaagacggcgtggccaggttcaacctgctcagacccggctactacaaggcgacagcgtcatacgtcacctacgacctcgacgcgaaaaaggatgtcgcattcgcggcggctcggccgatctga

SEQ ID NO: 14022 - protein, 327 aa, Unknown
  Obtained from environmental sample
  DOMAIN (33)...(205): Subtilase family
  misc_feature (1)..(327): Xaa is any amino acid
MLERDFVXYKHLATNVTGGSWPVYASLWHLAKWKKEKIDVTDAEGNTTQVERYPHTIPANXSLSGSQLGQFNADMVEMALEHDIVLVCASGNDGSGLPSWPGSLAGTIRVGQVNFNDRRINTSNWGNDMSVMAPGFNILSAGSTADNAYTLASGTSFAAPHVTGLVGYMLTFNPDLKPDQIKTYLERNADPIDGQRGFDPHYGYGRINTYRTIGAVVADIDAKTTPASDYVLTPVKIKTQNAAGTPLNGAKVYLYNCNQAGTINNYTNVTETGTSFVDVRDDKTVPPEDGVARFNLLRPGYYKATASYVTYDLDAKKDVAFAAARPI

SEQ ID NO: 14023 - DNA, 381 bp, Unknown
  Obtained from environmental sample
  misc_feature (1)..(381): n is a, c, g, or t
atggagcgtaacatctggaaaaacgccggaatcgatacggccggtcttgccaattataactcggtgggccagggtatgggggaaacattgcaaatggccgatcagctgaaggcttacaccctcaccgaccgggctacatggctcacccttaccagggacaaaaggatcaatcttccggcggtctgcgagaaggccgcggatcttctgaactactacggggtcatcgcggtaaatcccgcgaagcatccggggattaacgcggaaggcgggcaggcctttgttgactggatgcttaaggattccacccagaaactcatcagccagtacggggtggcggaattcggctctccgctctttacgcctaacgccagtgtaaattaa

SEQ ID NO: 14024 - protein, 126 aa, Unknown
  Obtained from environmental sample
  misc_feature (1)..(126): Xaa is any amino acid
MERNIWKNAGIDTAGLANYNSVGQGMGETLQMADQLKAYTLTDRATWLTLTRDKRINLPAVCEKAADLLNYYGVIAVNPAKHPGINAEGGQAFVDWMLKDSTQKLISQYGVAEFGSPLFTPNASVN

SEQ ID NO: 14025 - DNA, 813 bp, Unknown
  Obtained from environmental sample
  misc_feature (1)..(813): n is a, c, g, or t
atgggaatggtgnaagcgggagaagacntgcggaacggggaattactgtttcgccggggaaccctaatccggccccaggaattgggcgccctcgccgccgcgggtatttgcgcatttccggtttttgttcctttgaacctttcccttatttccaccggcgatgaattgatccccccggatcatattccccgtatgggcgaaatccgggatattaacaccaacgctcttaatgccttagcgcttacgcatggatacaaagtgatctcaaagcgcatacttcccgacgatgaagcccaactggaacaggccctgagagaagcccttactgtttccgatgcggcgatcgtttccgggggaagttcccagggagataaggatcttacctgtgacataataaacagagtggcgcagccgggggtgtttacccacggccttgcggtcaaacccggaaagcccgctatattaggctgggacaaagaaagcaaaaccctgctggcgggcctgcccggccatcccgtgtcggcgattatggttttcaaaatcatttttggctggcttacggacacgcttttcagcaagccgccgccccggccggttcccgcccgtatttcctgcaatgtcccgggcgcttccggaaggactgtattacagcctgtaatacttcatgccgcggatgaaggctattccgcggagccggtgttcggcaagtcaggaatgatcacaaccttaacacgggcggacggttatgtcgtcattgatatgaataaggaaggccttaagaagggcgaagccgtcatggttcaccttatgtag

SEQ ID NO: 14026 - protein, 270 aa, Unknown
  Obtained from environmental sample
  DOMAIN (200)...(270): MoeA C-terminal region (domain IV)
  misc_feature (1)..(270): Xaa is any amino acid
MGMVXAGEDXRNGELLFRRGTLIRPQELGALAAAGICAFPVFVPLNLSLISTGDELIPPDHIPRMGEIRDINTNALNALALTHGYKVISKRILPDDEAQLEQALREALTVSDAAIVSGGSSQGDKDLTCDIINRVAQPGVFTHGLAVKPGKPAILGWDKESKTLLAGLPGHPVSAIMVFKIIFGWLTDTLFSKPPPRPVPARISCNVPGASGRTVLQPVILHAADEGYSAEPVFGKSGMITTLTRADGYVVIDMNKEGLKKGEAVMVHLM

SEQ ID NO: 14027 - DNA, 306 bp, Unknown
  Obtained from environmental sample
  misc_feature (1)..(306): n is a, c, g, or t
ttgatggccgaggctcatcgagtttttgcttattcagacggaagtgaatttttgaaaacagtagacacctcagagtacgatctggtttttctggatctaatgatgccaaacgtagacgggtttgaggtgctggatgccctgcagggcaaaaacattccgtatcctatcattgctttttccaccctgaaccagcgggaaaccatgatcagggtcatccagctcggcgttaaaagttacctggttaagcccctgcgtcctgaggatatatttacaaaagccctcgaaattttaaaagcaaatttctaa

SEQ ID NO: 14028 - protein, 101 aa, Unknown
  Obtained from environmental sample
  DOMAIN (2)...(94): Response regulator receiver domain
  misc_feature (1)..(101): Xaa is any amino acid
MMAEAHRVFAYSDGSEFLKTVDTSEYDLVFLDLMMPNVDGFEVLDALQGKNIPYPIIAFSTLNQRETMIRVIQLGVKSYLVKPLRPEDIFTKALEILKANF

SEQ ID NO: 14029 - DNA, 723 bp, Unknown
  Obtained from environmental sample
  misc_feature (1)..(723): n is a, c, g, or t
atggcgaggcatgtcattttggcggatgagataaaccgcgctccggcaaagatgcagtccgccctgcttgaagcaatggaagagcggcaggttactatcggcgaaaccagttatctcctgccggacccgttttttgtgcttgctacggaaaaccccattgaacatgaagggacttatgctctgcctgaggcggaacttgaccggtttctgcttaaactgctggtaacgtaccctacgccgcagcaggaacttgccattgttgaacgcagcccggttctggcttctggcagcgttgacaaacgggaatcactgtccccgatactggacaaaaaggccattgctatgctgcgcggtactgttgattcgattcaccttgacgaaaaaattgccgaatatattgtgtcgattgtcaccactacccggcccaccgccaccaggtcggctgccgccggggtgcaggcggcaaatgcggtcaggtcggctgaaggtttgtaccgttatgtatcatttggcgcgtcaccccgcgcgtcaattgccctgcaccgttgcgctcggatatttgcccttttttccggcaaggaatttgtcggtccggaagatgtaaaagcggcggcttatcctgtcctgcggcaccgtattgtcctttcctatgaggctgaggcggacggcctggatgccgatgcggttatttcccgaatacttgcccatgttccggttccctga

SEQ ID NO: 14030 - protein, 240 aa, Unknown
  Obtained from environmental sample
  DOMAIN (1)...(71): ATPase family associated with various cellular activities (AAA)
  misc_feature (1)..(240): Xaa is any amino acid
MARHVILADEINRAPAKMQSALLEAMEERQVTIGETSYLLPDPFFVLATENPIEHEGTYALPEAELDRFLLKLLVTYPTPQQELAIVERSPVLASGSVDKRESLSPILDKKAIAMLRGTVDSIHLDEKIAEYIVSIVTTTRPTATRSAAAGVQAANAVRSAEGLYRYVSFGASPRASIALHRCARIFALFSGKEFVGPEDVKAAAYPVLRHRIVLSYEAEADGLDADAVISRILAHVPVP

SEQ ID NO: 14031 - DNA, 567 bp, Unknown
  Obtained from environmental sample
  misc_feature (1)..(567): n is a, c, g, or t
atgagcatcatgcgtggccgtccccttccctttctgtttcttttcctcagcctgatcgcggcctgttccgcgcctgttgcggaaaaggcgtcatttggcgatgtttctccggcaacgttcgccatcggcttttcgcccaagggcgagtccctgcccattatcctcaaggccattggcagcgcggaacactccattcttgtggcggcctactccttcaccagcacgcccatagccgcagctctccttgcggcgcacaggcgcggcgtggacgtgcgggtgctggcggacgccaaagccaacagcggccggtattccgcccttgcctttctcgccaatcagggagtgccggcgcggatcaacagccgctacgccatcttccatcacaaattcatggtcattgacaagcgccacctggaaacgggcagtttcaatttttccgctgcggctgccgacaagaacgcggaaaacgtcctgcttttgcgcgatgtgccggaactggccggaatctatgcgcgggaatgggaaaaactctggcaggaaggggaagaagtcaaggcgcggtattga

SEQ ID NO: 14032 - protein, 188 aa, Unknown
  Obtained from environmental sample
  SIGNAL (1)...(27)
  misc_feature (1)..(188): Xaa is any amino acid
MSIMRGRPLPFLFLFLSLIAACSAPVAEKASFGDVSPATFAIGFSPKGESLPIILKAIGSAEHSILVAAYSFTSTPIAAALLAAHRRGVDVRVLADAKANSGRYSALAFLANQGVPARINSRYAIFHHKFMVIDKRHLETGSFNFSAAAADKNAENVLLLRDVPELAGIYAREWEKLWQEGEEVKARY

SEQ ID NO: 14033 - DNA, 609 bp, Unknown
  Obtained from environmental sample
  misc_feature (1)..(609): n is a, c, g, or t
atggccgacgacacagacgacggttttgtagctgtaataagtataaccggtgttaacacttcggttacggtagggaccgtttctcttggcggtaaagtcgttccgtctaacgctacaaatcaaacaatcaaatggtcgatacagcgtgaggaggatgatataaaaggaacgataagcggaaataatttaacaacaactgaggaaggagatattacagtcatggcgactgtagaagacggaatagccgtgggaaaaaattttacgcaaaaattttacatatccgtagagccttttgtggcagtagaaaaaattatttatgatggtccgacctatgacgaagtgggggaaatataccttgacgctactgtttatccggacgatgcaacctacatggacatcgtgtggtctataaagagtaccgggacaacaaaagcgacaatcatgggagatctcttaaccacaaaagctaaagggacagtagtagtcagagcaaccatcatcaacggagcagccaatggtaaaaattatactcaggatttttccatctatgtcagcgattatgatgacagcgatgatgatgatgatgatgattttgatgatccggactga

SEQ ID NO: 14034 - protein, 202 aa, Unknown
  Obtained from environmental sample
  misc_feature (1)..(202): Xaa is any amino acid
MADDTDDGFVAVISITGVNTSVTVGTVSLGGKVVPSNATNQTIKWSIQREEDDIKGTISGNNLTTTEEGDITVMATVEDGIAVGKNFTQKFYISVEPFVAVEKIIYDGPTYDEVGEIYLDATVYPDDATYMDIVWSIKSTGTTKATIMGDLLTTKAKGTVVVRATIINGAANGKNYTQDFSIYVSDYDDSDDDDDDDFDDPD

SEQ ID NO: 14035 - DNA, 894 bp, Unknown
  Obtained from environmental sample
  misc_feature (1)..(894): n is a, c, g, or t
gtggatcccggcatgaacgactatgcgcgncgcgccatagcagaagcggtttctagaaagccagatttaatagtttttgaagtaaatacctttggcggtcgcttagatgccgcctttgacattgtggacacaataacagccttaaaaattccaaccatcactctggtgcaaaaaaaagccataagcgcaggagccttaattgcactttccagcgacaaactctatatgctccccagcacaaccattggcgattgtgcccccatagtgcaaagctccgatggccagcctcaaattgttggcgaaaaaatacaatctccgctaagggcaaaattccgcaatttggcagagcgaaacgggcacccacgcctgctctcagaagcctttgttagccccgacctcggcgttatggaactttccaacagagacacaaccatttatatgaacgttgccgaatacagcgatatgtccgaagatgaacaaaaaaaatgggcaagcaaaaaaactttggtgagggcaggcgagcttttgacgatgacaaacgaagaagcagagcgtttgaaattttcaaaaggaaccccagaaagcatagaagcttttaaaaaagaagtaggcataacaaaaaccgaaattattgaaatatcctgggcagaaaaactaacgagattcataggtgcaatctctgggattttaatgatactgggctttggcgcgctttatatggaatttaaaacgccgggttttggcatttttggcgttattggtattgtgcttttggccaccgtatttttgggacaatatgcgagcaacctgcacgataaactgcccctagttctgctatgcctaggcgttgtatttatgcttttggaaatttttgttttgccgaggtgccagtga

SEQ ID NO: 14036 - protein, 297 aa, Unknown
  Obtained from environmental sample
  misc_feature (1)..(297): Xaa is any amino acid
MDPGMNDYARRAIAEAVSRKPDLIVFEVNTFGGRLDAAFDIVDTITALKIPTITLVQKKAISAGALIALSSDKLYMLPSTTIGDCAPIVQSSDGQPQIVGEKIQSPLRAKFRNLAERNGHPRLLSEAFVSPDLGVMELSNRDTTIYMNVAEYSDMSEDEQKKWASKKTLVRAGELLTMTNEEAERLKFSKGTPESIEAFKKEVGITKTEIIEISWAEKLTRFIGAISGILMILGFGALYMEFKTPGFGIFGVIGIVLLATVFLGQYASNLHDKLPLVLLCLGVVFMLLEIFVLPRCQ

SEQ ID NO: 14037 - DNA, 648 bp, Unknown
  Obtained from environmental sample
  misc_feature (1)..(648): n is a, c, g, or t
atgaaacgtttgcagacaatttccgattttaccgagcttggctcaggtttcaaaatagccatgaaagacatggaaatacgaggggcgggaaatcttttaggcagggaacaatccggcgacatttattccgtaggttttgatttatatgtgaaacttttggaagaagccgtgaaacgtcttgaagactcaaattacgagtcggaaacagagactcttcttgaacttgaatacacaggcttcattcccgactcctacatcgactccccccagcaaaaaatggaagtttacaaaatgatagccgctatacgcgacaaagatgacttggagcgcgtatactcggaattgttagaccgcttcggtccgctccccgacgaagccgcgtccctgcttgccctagccgaaatcagaataatatgccgccaattaacggtctcggtactgaaagaaaggtccggcgttgtgcgtatagagttcgccaaggcggcgcgtgtaaacgtagaccgtcttatccgcatgatgcagcaatccgccggcaaggtgaaactcgatccaaaaaaagcgaacgtgattctgcttacaacaggcagtataggcttaaaagagaaaagcgaattcatccgcgaaaaactatcgtcacttgccggctag

SEQ ID NO: 14038 - protein, 215 aa, Unknown
  Obtained from environmental sample
  DOMAIN (74)...(182): TRCF domain
  misc_feature (1)..(215): Xaa is any amino acid
MKRLQTISDFTELGSGFKIAMKDMEIRGAGNLLGREQSGDIYSVGFDLYVKLLEEAVKRLEDSNYESETETLLELEYTGFIPDSYIDSPQQKMEVYKMIAAIRDKDDLERVYSELLDRFGPLPDEAASLLALAEIRIICRQLTVSVLKERSGVVRIEFAKAARVNVDRLIRMMQQSAGKVKLDPKKANVILLTTGSIGLKEKSEFIREKLSSLAG

SEQ ID NO: 14039 - DNA, 315 bp, Unknown
  Obtained from environmental sample
  misc_feature (1)..(315): n is a, c, g, or t
atgaaaaacatagaaattttgtatgaagatgacaatattatggttattaataaacctgcggggcttgccgttcagggtggaaaaggggtaaaaaccgctctggacgcgattattgccgagattcgtacgcccacgcccctgctggttcataggctggacaaggatacttcgggggtactgcttaccgcaaaagggcgcgaaaatgcggctcgtttttcacgcctgcttaacagccaaaaaattaaaaaacagtatatcgcggtctgcgcaagtcatcctgaaaatgaaaagggtacaataaccgacaaactttaa

SEQ ID NO: 14040 - protein, 104 aa, Unknown
  Obtained from environmental sample
  DOMAIN (12)...(104): RNA pseudouridylate synthase
  misc_feature (1)..(104): Xaa is any amino acid
MKNIEILYEDDNIMVINKPAGLAVQGGKGVKTALDAIIAEIRTPTPLLVHRLDKDTSGVLLTAKGRENAARFSRLLNSQKIKKQYIAVCASHPENEKGTITDKL

SEQ ID NO: 14041 - DNA, 864 bp, Unknown
  Obtained from environmental sample
  misc_feature (1)..(864): n is a, c, g, or t
gtggcgcgtcttagaagccggtcggcgttcgctattcacaggtatttcagggagagggattttcattatctgcacacgccgattatcaccgccggggattgcgaaggcgctggagcgatgtttcaggttacaacccttgatcttgaagcaatagccaaacaatcctcgcaaaaagcggataacgggcgtgcgggtgcgatagattattcaaaagatttttttggaaagaaaacatttttaacggtctcaggccagcttgaaggtgaaacttacgccacggccatctcccgcgtttatacttttggtcccactttccgcgctgaaaattccaacaccgtccgccaccttgcggaattttggatggtggagcctgaagtagcttttgcggaattgaaagacgacatggcgttagctgaagattttttaaagtttgtttttaacgccgcgctgaacgaatgtgccgacgaacttgcgttttttaactcccatgtcgaaaagggaataattgaaaacctgaggcaggtcgcagacgcgaaattttctcatatcacctatacggacgcggttaaagagctggaaaaagcggttgcctcaaaaagcgacctttttgagtttaagccaagctggggttgtgatttacaaagcgagcatgaaaggtttttaactgaaaaaatcgcctgcggcccggtaatcgttacggattacccgaaggaaataaaagctttttatatgaagttaaacgatgacggtaagacggtacgcgccatggacgttcttgtcccccggttaggtgaaattatcggcggctcacaacgcgaggacagccttgaaaaacttgtcaggcgcatggacgaacttggttaa

SEQ ID NO: 14042 - protein, 287 aa, Unknown
  Obtained from environmental sample
  DOMAIN (1)...(287): tRNA synthetases class II (D, K and N)
  misc_feature (1)..(287): Xaa is any amino acid
MARLRSRSAFAIHRYFRERDFHYLHTPIITAGDCEGAGAMFQVTTLDLEAIAKQSSQKADNGRAGAIDYSKDFFGKKTFLTVSGQLEGETYATAISRVYTFGPTFRAENSNTVRHLAEFWMVEPEVAFAELKDDMALAEDFLKFVFNAALNECADELAFFNSHVEKGIIENLRQVADAKFSHITYTDAVKELEKAVASKSDLFEFKPSWGCDLQSEHERFLTEKIACGPVIVTDYPKEIKAFYMKLNDDGKTVRAMDVLVPRLGEIIGGSQREDSLEKLVRRMDELG

SEQ ID NO: 14043 - DNA, 366 bp, Unknown
  Obtained from environmental sample
  misc_feature (1)..(366): n is a, c, g, or t
ttgggaggttgtggcaatataatcagcagctattccagcggcacggtaacaggtgattccagtgttggcggtcttgttggagatatctgtaatcgtcaaataaccaacagctattccataggagccgtgacaggcagaagcaaagtcggcggtctggttggagctattaacgaccgtggtcaaataaccaacagctattacagcaaggaaacgagcgggcaaagcgacaaaggcaaaggcgaaggtaaaacaatggcggagatgaaaaaaagggaaacttttgaaggctgggattttgacaggacttggggaattgacggcaaggtgaacggaggctacccgtatttgcgtagctttaaacgatag

SEQ ID NO: 14044 - protein, 121 aa, Unknown
  Obtained from environmental sample
  misc_feature (1)..(121): Xaa is any amino acid
MGGCGNIISSYSSGTVTGDSSVGGLVGDICNRQITNSYSIGAVTGRSKVGGLVGAINDRGQITNSYYSKETSGQSDKGKGEGKTMAEMKKRETFEGWDFDRTWGIDGKVNGGYPYLRSFKR

SEQ ID NO: 14045 - DNA, 489 bp, Unknown
  Obtained from environmental sample
  misc_feature (1)..(489): n is a, c, g, or t
ttgatcagatcggccgagatgcttgcgctgcgtagcgccttcccgatcaagatatcgagcgtacaggtctacttcctgatagtggtgataatgagcctagtcgggtgggcgggcttcgcgagggttatacggggcatggcgctgtcaataggccggcgcgactacgtgacggcggcgaaggcgctgggcgccgggcatttgcggataatcacgcgtcacatcctgccgcaaactatgtcctacgccatagtgtcggcgacgctgtcggtgccgtcgtacattcttggagagtcggcgcttagcctcatagggctggggatacaagacccgcacgcgtcgtgggggaatttattgagcgcggcaatgaatctgtcgcaaatacagctgcatccgtggatattgctgccgggggtgtttatttttttgacgattgtggcgtttaattttgtgggggatggtctaagagacgcgttagacccgaatagataa

SEQ ID NO: 14046 - protein, 162 aa, Unknown
  Obtained from environmental sample
  DOMAIN (1)...(162): Binding-protein-dependent transport system inner membrane component
  misc_feature (1)..(162): Xaa is any amino acid
MIRSAEMLALRSAFPIKISSVQVYFLIVVIMSLVGWAGFARVIRGMALSIGRRDYVTAAKALGAGHLRIITRHILPQTMSYAIVSATLSVPSYILGESALSLIGLGIQDPHASWGNLLSAAMNLSQIQLHPWILLPGVFIFLTIVAFNFVGDGLRDALDPNR

SEQ ID NO: 14047 - DNA, 747 bp, Unknown
  Obtained from environmental sample
  misc_feature (1)..(747): n is a, c, g, or t
ttgaactgggtaacgcccatgcggaccgtggtaattacgcaactgccatgggttttcctcaacgaggcgggtcggcttgccgttataacggataattccagcctgcttgtccgttcaggcatttcgcgcggcaacgcgctgttcgcgctgggcagcgcggacgaggcctttgaaagctggaataaagccctggaagaggcaacccaggccggaaacaaggaattcgccgctctcagccgcatccatatagcgcgggggaaactgctttcatcaggcggtaaagacgccgcgcagtccattcgtgatgaagtaagccgggaaatggcttcgataaaaaccgacgaactctatatcgcctttgcgtggacggtcatcggccttgcggaaaaggaaatcggccgctatgccgccgcggaagaggctgttcggcgggccctcgcgatacatgaaaagacccgcagtcttgaacttgccgcttacgactggtttatgatagcctctttccgttccctttccggcaattacagcggagccctgaaagccctggaaagcgcgatagaatatgaccgccgcaccgagaattcctgggggcttgccaatgactggcaggcgcttggcgacgtgcaaaaaaaggcaggaaaccttgatgccgcccgcgccgcgtattcgcgcgccgcgaacattttccgcgccctaggcaacgccgaagccgccgaaaaagccctttcaagagggagtagggaatag

SEQ ID NO: 14048 - protein, 248 aa, Unknown
  Obtained from environmental sample
  misc_feature (1)..(248): Xaa is any amino acid
MNWVTPMRTVVITQLPWVFLNEAGRLAVITDNSSLLVRSGISRGNALFALGSADEAFESWNKALEEATQAGNKEFAALSRIHIARGKLLSSGGKDAAQSIRDEVSREMASIKTDELYIAFAWTVIGLAEKEIGRYAAAEEAVRRALAIHEKTRSLELAAYDWFMIASFRSLSGNYSGALKALESAIEYDRRTENSWGLANDWQALGDVQKKAGNLDAARAAYSRAANIFRALGNAEAAEKALSRGSRE

SEQ ID NO: 14049 - DNA, 306 bp, Unknown
  Obtained from environmental sample
  misc_feature (1)..(306): n is a, c, g, or t
atgccctccagccatgccgccctggtcagctctctttgcacatccattgcctttgttaaaggtattgccgacgatttgtttatttnttcgttctggtttgctttggtggttttacgcgacgcgatgggagtcagacggtccgcaggccttcttgccaaagctttgaacagtcttggaagacaggcggctgaaaaaacagggctggaattccgtactgtaaaggaaatccaggggcatactcccctggaagtggtagtaggggcctctttggggataatcatagccgccgggattaacctgctttaa

SEQ ID NO: 14050 - protein, 101 aa, Unknown
  Obtained from environmental sample
  SIGNAL (1)...(19)
  DOMAIN (1)...(98): Divergent PAP2 family
  misc_feature (1)..(101): Xaa is any amino acid
MPSSHAALVSSLCTSIAFVKGIADDLFIXSFWFALVVLRDAMGVRRSAGLLAKALNSLGRQAAEKTGLEFRTVKEIQGHTPLEVVVGASLGIIIAAGINLL

SEQ ID NO: 14051 - DNA, 690 bp, Unknown
  Obtained from environmental sample
  misc_feature (1)..(690): n is a, c, g, or t
ttggttcgtgtttatggctttgggggaaatttgctgggaataatttttacaggcggacagggaccgaaagcgcaggttgtaaaacgtcttttggaaaatgaggcgaaaggcgcgttgtttgtcgccgccgattccggtcttcaggcggcattgaacgccgatataaagcctgattgggttatcggcgacatggattctcttgaagaccaatcgtctctttccgccgtggcacaagaacgtgttattcgccatccgcacgacaaggattttaccgatacggagttggctttttcgcttgcggcggaaaaaggatgcgatgatatttggatattgggcggcggcggcggcaggatagatcatctttttggtattcgttctctttttgaaagagagcgatttccatgccgctggattacagacgcggaagatattcgctgtattgatgcaaagtcgaaacaaaacgaactgtctttgaaacttgaaaaaggcgcggttgtttcagtttttccgcttggcgaaggtcaatggaaagcgtcaagcaaaggattaaaatggcagcttgacggtcttcgctgggatcgaggtttcttcgggctgagcaatgaagcggtagacggaaatttttcggtaacagcgaaagcaggaaggtttatggtgataacttttttggaggatatatgtcggcgataa

SEQ ID NO: 14052 - protein, 229 aa, Unknown
  Obtained from environmental sample
  DOMAIN (18)...(140): Thiamin pyrophosphokinase, catalytic domain
  misc_feature (1)..(229): Xaa is any amino acid
MVRVYGFGGNLLGIIFTGGQGPKAQVVKRLLENEAKGALFVAADSGLQAALNADIKPDWVIGDMDSLEDQSSLSAVAQERVIRHPHDKDFTDTELAFSLAAEKGCDDIWILGGGGGRIDHLFGIRSLFERERFPCRWITDAEDIRCIDAKSKQNELSLKLEKGAVVSVFPLGEGQWKASSKGLKWQLDGLRWDRGFFGLSNEAVDGNFSVTAKAGRFMVITFLEDICRR

SEQ ID NO: 14053 - DNA, 387 bp, Unknown
  Obtained from environmental sample
  misc_feature (1)..(387): n is a, c, g, or t
atgggggcaagacccattgacggctcgtcaaggagcagcaaacgggggcgggccattaacgcgcgtcccattgcaagcatctgctgttcgccgcctgaaagcgttcccgctacctgccgtatacgctcttttaacctggggaaaatatcaaacactttttccatatctttttttatttcctgtttttcagccttggtaacagagcgccgcgaatacgcgcccatttccagattatcacgaacgcttaagtttgcaaatatacgccggccctcgggaacctgcaccaggccggacgcgacaatgctgtcaggcggaacagagcttatatcccgttggtcaaatatcaccgtgccggaagttttctttataatgttggaaatcgcgtga

SEQ ID NO: 14054 - protein, 128 aa, Unknown
  Obtained from environmental sample
  DOMAIN (8)...(46): Protein of unknown function (DUF1602)
  misc_feature (1)..(128): Xaa is any amino acid
MGARPIDGSSRSSKRGRAINARPIASICCSPPESVPATCRIRSFNLGKISNTFSISFFISCFSALVTERREYAPISRLSRTLKFANIRRPSGTCTRPDATMLSGGTELISRWSNITVPEVFFIMLEIA

SEQ ID NO: 14055 - DNA, 774 bp, Unknown
  Obtained from environmental sample
  misc_feature (1)..(774): n is a, c, g, or t
gtgcgttcaaacgaaaacacatattcggtaaccgtttcaagcaagggcgtcggggcgggtgggagccgcaatcacgtgatggcaggcgagggtgtggacataatggccggaacggtgcgcggccaacgattcaaatgctggacatccgcaaacggcaatgtaacttttgccgaatcgtcacgcgcggcgacaaggtttattatgccggcaagcgacgtaacgataacggcgagtttcgatactgttatcgtttcggccgccgatagaaaaacgtataaaacgacggtaatcggcggtaagaggtggatggctgaaaatttgaacgataaaacgtcaagcggttcttggtgctataaaaatgatgatatctactgtgaagaatacggcagattgtacgattgggaagcggcgatggctgcatgccccgcaggatggcatttggcgtccaaccaagagtgggatattttggttacggaggccggcggcaacgagatagcgggtaaaaaactgaaggctaaaaccggatggaacaaagacggtaacggcacggacgattacggattttcggccctgccgggcggagaccgctacctcgatggctttttcgatcttatcgatatcggaaacttcggctattggtggacttctacgggcggagacggaagcgacggcgccatgatacgacgcatgagctaccgggacaataaggtacacgagaccggcttcgtcagcggcgtgggttgctcggttcgctgcgttgcggacggcgaatga

SEQ ID NO: 14056 - protein, 257 aa, Unknown
  Obtained from environmental sample
  misc_feature (1)..(257): Xaa is any amino acid
MRSNENTYSVTVSSKGVGAGGSRNHVMAGEGVDIMAGTVRGQRFKCWTSANGNVTFAESSRAATRFIMPASDVTITASFDTVIVSAADRKTYKTTVIGGKRWMAENLNDKTSSGSWCYKNDDIYCEEYGRLYDWEAAMAACPAGWHLASNQEWDILVTEAGGNEIAGKKLKAKTGWNKDGNGTDDYGFSALPGGDRYLDGFFDLIDIGNFGYWWTSTGGDGSDGAMIRRMSYRDNKVHETGFVSGVGCSVRCVADGE

SEQ ID NO: 14057 - DNA, 660 bp, Unknown
  Obtained from environmental sample
  misc_feature (1)..(660): n is a, c, g, or t
atgacaggcacagggcagcttccaaaatttgaagatgatatgtacaggtgcgataacgatgatttatttttaatcccaaccgcagaagttccggttacaaacctctactcagacgaaattatcccagagagcaacctgcctttaaagctatgcgcatactcggcttgctttcgcagagaagccggcagctatggcaaagacactcgcggcttgctgcgtttgcaccaattcaacaaagtggaaatggtttacttcgctcacccagaaaaaagctacgaaaaccacgaagaattggtagcttgcggagaaaagcttttgcaagaattagggcttccgcacagagttatttcgctttgcaaaggagatttgggttttggagcagcaaagtgctacgatttagaagtgttcgcccctgttgaaaaaaagtggcttgaagtaagttctgtttctaactttgaggattatcaggcgcgcagggcaaatatacgctcaaagataaatggcaaaaatacctttgtgcataccttgaacggctcagggcttgcaactccgcgtgttatggttgcaatttgcgagcaataccaacaagcagacggctcgctcgttattccagaagttttgcggccttatatgggcggaatggtcagtattaaccgctga

SEQ ID NO: 14058 - protein, 219 aa, Unknown
  Obtained from environmental sample
  DOMAIN (1)...(140): tRNA synthetase class II core domain (G, H, P, S and T)
  misc_feature (1)..(219): Xaa is any amino acid
MTGTGQLPKFEDDMYRCDNDDLFLIPTAEVPVTNLYSDEIIPESNLPLKLCAYSACFRREAGSYGKDTRGLLRLHQFNKVEMVYFAHPEKSYENHEELVACGEKLLQELGLPHRVISLCKGDLGFGAAKCYDLEVFAPVEKKWLEVSSVSNFEDYQARRANIRSKINGKNTFVHTLNGSGLATPRVMVAICEQYQQADGSLVIPEVLRPYMGGMVSINR

SEQ ID NO: 14059 - DNA, 711 bp, Unknown
  Obtained from environmental sample
  misc_feature (1)..(711): n is a, c, g, or t
atgatccgttcgcggggctttccgatgttcgatctggacatgaaccgcatattccccggctcatcctcgggatcgctcgcggaggtcgcggcctacgacgttatccgcgacattgagggagcggatatgtgcatagacatacactccagcaacatcttcctgcgcgagataccgcaggtgcgcataagcgaacagaacgaggcggagctgttgccctgggccgtgatgctaaacgtcgatctcgtgtggattcacgcgtccgcgaccgtgctggaatcgacgctggcgcactcgctcaacatgcgcggcgttaagacgctggtggtcgagatgggcgtcgggatgcgcataacggaaagtttctgtacgcagctcgtggacggcatactgaacctgctgcgcaaactgggaatatggaacggggccggtgaaagggctcatccggaaatacgggcgccgctcgtctcaaaggatcacagcgtcggctttctgaattccgacgcgggtgggatatttctcccgcgggccgcgcacgccagccatgtaagctcaggcgattgcataggcattgtgatagacccgcttacaggcaatgtcgtcgaagaaacgcttgccccctgcgacggcttgctgtttacgctgcgggaatacccggtggtattcggcggctcgcttctggcgcggattatggaggactcaaaaaatggttaa

SEQ ID NO: 14060 - protein, 236 aa, Unknown
  Obtained from environmental sample
  DOMAIN (4)...(232): Succinylglutamate desuccinylase / Aspartoacylase family
  misc_feature (1)..(236): Xaa is any amino acid
MIRSRGFPMFDLDMNRIFPGSSSGSLAEVAAYDVIRDIEGADMCIDIHSSNIFLREIPQVRISEQNEAELLPWAVMLNVDLVWIHASATVLESTLAHSLNMRGVKTLVVEMGVGMRITESFCTQLVDGILNLLRKLGIWNGAGERAHPEIRAPLVSKDHSVGFLNSDAGGIFLPRAAHASHVSSGDCIGIVIDPLTGNVVEETLAPCDGLLFTLREYPVVFGGSLLARIMEDSKNG

SEQ ID NO: 14061 - DNA, 945 bp, Unknown
  Obtained from environmental sample
  misc_feature (1)..(945): n is a, c, g, or t
atggccgagntcttgttcggcggctgttcatcagaatatggaatatctttgaaatccgcttatagcgtgattaagcatatagaccttacaaagtatgacccggtattactcggcattacccaatccggagaatggttttatttttcaggcgcgcttgaaagaataaacgacgatacctggaataaccccaacgattgcattagggcaatcatatcgccagaccgcgaaacccacggagttttaatctttgataataatagtacacgttccatacgactggatgcggctatgcctgttcttcatggtaaaaacggcgaggatgggacggttcagggactgttggaacttgcgggaatccctattgtcggctgtaacacgctttcatccgctctttgtatggacaaggacagggcgcacaaaatcgctcatatgatcggtgtccgaatacctggttctgtcgttcttgaaaatgaaatgaccgtggaaacagtttgggagcaaatagcaaatatgggctatcctttatttgtcaaaccagtaagggctggttcatcctatgggattaccaaagttttaaatagagatgagttgccggcagctatcaagctggcctatgagcatgatgacagagttatcattgaagaaaatatatcaggctttgaagtcggctgcgcgattttaggcaatgataagcttgtagtaggagaattgggcgagatagagctttccggcggcttttttgattacaaggagaaatacacgccagaaacatactcctatcatgttccggcgcgaatatcgtcgcanaaaactgaagaaataaaaaccattgcgaagaagatatacagagctttaggctgcactggttttgcgcgtgtggatatgtttttaactcatcangagaagttttttttacgaagtgaacactatccccggatttactga

SEQ ID NO: 14062 - protein, 314 aa, Unknown
  Obtained from environmental sample
  DOMAIN (134)...(308): ATP-grasp domain
  misc_feature (1)..(314): Xaa is any amino acid
MAEXLFGGCSSEYGISLKSAYSVIKHIDLTKYDPVLLGITQSGEWFYFSGALERINDDTWNNPNDCIRAIISPDRETHGVLIFDNNSTRSIRLDAAMPVLHGKNGEDGTVQGLLELAGIPIVGCNTLSSALCMDKDRAHKIAHMIGVRIPGSVVLENEMTVETVWEQIANMGYPLFVKPVRAGSSYGITKVLNRDELPAAIKLAYEHDDRVIIEENISGFEVGCAILGNDKLVVGELGEIELSGGFFDYKEKYTPETYSYHVPARISSXKTEEIKTIAKKIYRALGCTGFARVDMFLTHXEKFFLRSEHYPRIY

SEQ ID NO: 14063 - DNA, 660 bp, Unknown
  Obtained from environmental sample
  misc_feature (1)..(660): n is a, c, g, or t
atgaaggaaaagcggatgatgaaaagaacgtgcagggcgtggattgagcttgacatgaacaatctgcgtcataacgtaagcgttataagagggcgtttacaaaactcatgccaaataatggcctccgtcaaagcaaacgcctacggtcacggagcaatcgaattttgtcgggaactaaacgctctcggcattctctctttttgcgtcgcgtcgattatggaaggcgtggaattacgcaaacatcatattgaaggcgagattttgattctgggatatacacaccctgagctatttcccctgctaataaagtatgctctgacgcagacagtccttgaccttgattacgctgaactgttaaatggtttcggtaaaaaattcgtagtccatgtcaagattgataccggattacgccgtatgggtgaacgttcggaaaacatggacaggattatacggattttcaaatttgaaaatctgaccataaccgggatttattctcatctcagtgctgaaaatgacggagaaacagagaaagcgtttacacaggaacaattagagcgttttcatcatgtccgcgcggaaatagagaaacgctgttttaaaaagcctaaagcgcatatacaaaacagttatggcatattcaaccatccagattggctttga

SEQ ID NO: 14064 - protein, 219 aa, Unknown
  Obtained from environmental sample
  DOMAIN (12)...(219): Alanine racemase, N-terminal domain
  misc_feature (1)..(219): Xaa is any amino acid
MKEKRMMKRTCRAWIELDMNNLRHNVSVIRGRLQNSCQIMASVKANAYGHGAIEFCRELNALGILSFCVASIMEGVELRKHHIEGEILILGYTHPELFPLLIKYALTQTVLDLDYAELLNGFGKKFVVHVKIDTGLRRMGERSENMDRIIRIFKFENLTITGIYSHLSAENDGETEKAFTQEQLERFHHVRAEIEKRCFKKPKAHIQNSYGIFNHPDWL

SEQ ID NO: 14065 - DNA, 606 bp, Unknown
  Obtained from environmental sample
  misc_feature (1)..(606): n is a, c, g, or t
gtggacaaaaacggtcagaattccatagttctctttggcggtggaaacagccttgtaagccgggaagaaattgaccgggttctttcagcgtttgaaaaaggggatcttgtcctgctccagaatgaaatcgcgaacacagatttcattatgaagaaagcaaaaagtcttgggctgcggatcgcgttgaatccctccccatggaatgaaagggcaaagaatctccccctggaattggcggacgttttttttgtcaatgagattgaaggggccggcatggcggaattagggccccatatcccggcggaaaaaatattggaaaatctctgcgcgaagtttccggaaatcgaaataattcttaccctgggcaaagacggcgctttttacggctgcggaaagacgagggccaagggtaacatcatcgatgtatccgtagtggataccaccggagccggggattgtttttccggctatttcctcgccggccgggccaaaggactttcggtccaggattcacttaccattgcctgcaaagcatcgtccattacagtttcccgcaagggtgcaatgggatccattccttacaaggatgaggtcgagggcttttaa

SEQ ID NO: 14066 - protein, 201 aa, Unknown
  Obtained from environmental sample
  misc_feature (1)..(201): Xaa is any amino acid
MDKNGQNSIVLFGGGNSLVSREEIDRVLSAFEKGDLVLLQNEIANTDFIMKKAKSLGLRIALNPSPWNERAKNLPLELADVFFVNEIEGAGMAELGPHIPAEKILENLCAKFPEIEIILTLGKDGAFYGCGKTRAKGNIIDVSVVDTTGAGDCFSGYFLAGRAKGLSVQDSLTIACKASSITVSRKGAMGSIPYKDEVEGF

SEQ ID NO: 14067 - DNA, 876 bp, Unknown
  Obtained from environmental sample
  misc_feature (1)..(876): n is a, c, g, or t
atgctgaacatgatgaacgaattggggcgcgggcatttggatgtaaggctgaaccttaatcgcaaagacgaaataggcgttatggctaatgcggtggatatgttcgccgacgatatgcagaatgtcgttatcggcactatgaaaaaaatctccgtgggcgacctgagcgctaaaatagaacctaaagacgataaggacgaaatctcatacgcgcttaagaaaaccgtggaatctctgcgcgtggtcgtaggcaccatgaagaagatttccgttggcgatctgagcgttcaaatagcgcctaaggacgacaaggacgaaatctccaacgccctcaagaagacgattgaatctctgcacgggcttataatagacgacggcggccgggtttttaacgcggcggccaataaagacttgtcgcaaaggctcacgtgcgagtaccaaggcgagttcgccagaatgaaagataacataaacaccgtcatgcaaaatcttaacgacgctcttaaccaagtaacggttacggtatcgcaggtatccagcgcgagcgatgagatttcgcacggcgctcaggatctcgccgagtgctcaaacgaacaagcaagctctctggaagaggtgtcgtcgagccttgagtctatgtcggctatgactactaagaatgccgataataccaatcaggcgatggttttagcctccgaggcgcgtgtggccgccaatgacggagacctctccatgaagcgtatggccgacgcgatacgccagatcaaagcctcggccgacaataccgcccaaatcatcaaatcgattgacgatatagcgttccagaacaatctgctggctctcgacgcggctgtcgtagccgcccgcgccgtatag

SEQ ID NO: 14068 - protein, 291 aa, Unknown
  Obtained from environmental sample
  misc_feature (1)..(291): Xaa is any amino acid
MLNMMNELGRGHLDVRLNLNRKDEIGVMANAVDMFADDMQNVVIGTMKKISVGDLSAKIEPKDDKDEISYALKKTVESLRVVVGTMKKISVGDLSVQIAPKDDKDEISNALKKTIESLHGLIIDDGGRVFNAAANKDLSQRLTCEYQGEFARMKDNINTVMQNLNDALNQVTVTVSQVSSASDEISHGAQDLAECSNEQASSLEEVSSSLESMSAMTTKNADNTNQAMVLASEARVAANDGDLSMKRMADAIRQIKASADNTAQIIKSIDDIAFQNNLLALDAAVVAARAV

SEQ ID NO: 14069 - DNA, 651 bp, Unknown
  Obtained from environmental sample
  misc_feature (1)..(651): n is a, c, g, or t
ttgatccgcattaccgacagaacgttgtcgtgcctagacggactgccgccggataaaccggcgctttcgcgttttttgtcgctgatgaccgaattagacccgggcgcgatagaactttcggaaactatgtacaagctattgtcgccgctgccggaatatccgttctacgtgctccgtttgtcacgggcggcagatgccgtgaaatatacgaatatctcagaatttgtctgccccgaagaggcgttatccgccgttgatgccggaatccgtgttgaaatatcgcaagacgacgcaagcgaggcggttatcaccgattacctcaatacacgcgtagttggattggacggcgcgctatgcggtgattatccgcaaacgtttgaacgattgaagcgtcgttccgttgagttttgcccgacaaacgacttccgctgcgcgacggcgctcgcggcggagtgggcaatgagcggcgccggcggcggtatcgttaccgcattcggcggactgggcgggttcgcggctaccgaagagctgataatgattttgcggataaacaatctgcttgggctcaacaaaatctatgactttctgccggaaatggccaaggtgttgaacagatcgcgaaaaaagacatgcgccactcggccgatctga

SEQ ID NO: 14070 - protein, 216 aa, Unknown
  Obtained from environmental sample
  misc_feature (1)..(216): Xaa is any amino acid
MIRITDRTLSCLDGLPPDKPALSRFLSLMTELDPGAIELSETMYKLLSPLPEYPFYVLRLSRAADAVKYTNISEFVCPEEALSAVDAGIRVEISQDDASEAVITDYLNTRVVGLDGALCGDYPQTFERLKRRSVEFCPTNDFRCATALAAEWAMSGAGGGIVTAFGGLGGFAATEELIMILRINNLLGLNKIYDFLPEMAKVLNRSRKKTCATRPI

SEQ ID NO: 14071 - DNA, 684 bp, Unknown
  Obtained from environmental sample
  misc_feature (1)..(684): n is a, c, g, or t
ttgccccagcttatcagcgtagattttcgcgtgcagactcccgatacaacaggaaaccccgaagatcgctccaaacttatggtttatttcagaggttcggcggcaacgctggaaatgaaggacaacgaagttcccgaaggtttaataactatcaatccgccgattgagggcgtatggaaatggatcgatgatgatacgctggttttttctacggaacaaagatggaagataggaacccgttacaccgtcaatttctcaaaagatttatttccttcccatataaaagtaaataacagttttaattttgaaactgaagatttttccatgcgaattgccgataatgaattttacatagacccggaagacagcgctattaaacgcgtgttattcacaatacagacaaattatcctattgatccttcttctcttgaaaaaaatatcaccattgagccacagataaacgccgattcaggttcgttaaagaaaaaatcgtatctgtattcattgacatataacgaggatcgtacccgcgcttacattgtatccgaatcattggggatgcccgcaaaaacagttgaaatgcggcttacgatttcttcgggcgtaagggacgctgataatgaaggaaaaccggcgggaagtcagagcgcttatgtgaaattcccggatgctcggccgatctga

SEQ ID NO: 14072 - protein, 227 aa, Unknown
  Obtained from environmental sample
  misc_feature (1)..(227): Xaa is any amino acid
MPQLISVDFRVQTPDTTGNPEDRSKLMVYFRGSAATLEMKDNEVPEGLITINPPIEGVWKWIDDDTLVFSTEQRWKIGTRYTVNFSKDLFPSHIKVNNSFNFETEDFSMRIADNEFYIDPEDSAIKRVLFTIQTNYPIDPSSLEKNITIEPQINADSGSLKKKSYLYSLTYNEDRTRAYIVSESLGMPAKTVEMRLTISSGVRDADNEGKPAGSQSAYVKFPDARPI

SEQ ID NO: 14073 - DNA, 618 bp, Unknown
  Obtained from environmental sample
  misc_feature (1)..(618): n is a, c, g, or t
gtgtacaattcatacggcctctcggaaatgaacggcccaagcgtcgcctttgagtgccagtgcaagagcggaatgcacctgtgggaagacggttacatcgccgagataataaacccggatactctggagcctgtgaaagagggggagataggggagctggtgcttaccattctttgccgtgaagcgacgcccatactccgctaccgtacccgcgatctcaccggcttttacactgagccttgtccctgcggcaggacccaccgccgcctccgccgcataacaggacgcagcgatgatatgctaattattaacggcgtgaatgttttcccaagccagattgaagaagtgatcatgggcatgaaagaagtcggtaacaattacctcatcgtggttgaaaaagacggcgcgcttgaccgtctgacggtaaaaaccgaagtaaacccggacatatttgttgacgacgcacgtcctctcaacgctttgatggaacggataaaggacacacttaggacttcaattttcatcagccccaaggtggaactccacgagagcggcagtttgccggtatcggaaggcaaagcggtgcgcgttatggataagcggcctaaagacgtgtga

SEQ ID NO: 14074 - protein, 205 aa, Unknown
  Obtained from environmental sample
  misc_feature (1)..(205): Xaa is any amino acid
MYNSYGLSEMNGPSVAFECQCKSGMHLWEDGYIAEIINPDTLEPVKEGEIGELVLTILCREATPILRYRTRDLTGFYTEPCPCGRTHRRLRRITGRSDDMLIINGVNVFPSQIEEVIMGMKEVGNNYLIVVEKDGALDRLTVKTEVNPDIFVDDARPLNALMERIKDTLRTSIFISPKVELHESGSLPVSEGKAVRVMDKRPKDV

SEQ ID NO: 14075 - DNA, 372 bp, Unknown
  Obtained from environmental sample
  misc_feature (1)..(372): n is a, c, g, or t
gtgcgggatgtcggaatagcaagcgagttccactttcttcgggtcaatcattatcagccgcagttcctccggcttcttcgtcatcagcatactgcacaccagcgagtttatacacacgctcttcccggcgcccgtctgtccggcgataagaacgtgcggcattttggctatgtcggtcacgtagggcgcgccggagatgttcgtccctatgacgaccgggatgtcggcggtgctcttcttgaacgcgtccgactgcaggacgttcttgaagtagaccgtttgccttgtggggttgggcagttcgatcccgatggccgacttgccggggatcggggcttgtatccgtatcttctgaccgctcaccgccattga

SEQ ID NO: 14076 - protein, 123 aa, Unknown
  Obtained from environmental sample
  misc_feature (1)..(123): Xaa is any amino acid
MRDVGIASEFHFLRVNHYQPQFLRLLRHQHTAHQRVYTHALPGARLSGDKNVRHFGYVGHVGRAGDVRPYDDRDVGGALLERVRLQDVLEVDRLPCGVGQFDPDGRLAGDRGLYPYLLTAHRH

SEQ ID NO: 14077 - DNA, 522 bp, Unknown
  Obtained from environmental sample
  misc_feature (1)..(522): n is a, c, g, or t
ttgacagattggccgagttatcggagcggagatgaggtcaagaaacagatggctgagaccgaccgaaagatagccaatatacacaaggagttaggcggcattggtgagaataacggtcttatcgccgaggagatagtgttccattcgttggagaaagacatggtgtttgccggaataacgtttgactttattgaccacggaaccgtgcggtcgcgtaaatttcccgacggcaagaagataacgggagagtacgacgttcttctttacaacggtacggcggttgcaattatcgaagttaaacatcgggtggggaaagatgcgctcaagcgtttaatagaggtgcagttgcctagattcaagcaggttttcccgcaatacaaggacgccaagatgtatttggggcttggcggcatgtcttttgagaaaggcgtcgcggaagaggcgcgtcagcaaggaatcgccacgctgatgctcaacggcgacgcggtggagatcaacgatgcggatgttaaagcttggtag

SEQ ID NO: 14078 - protein, 173 aa, Unknown
  Obtained from environmental sample
  misc_feature (1)..(173): Xaa is any amino acid
MTDWPSYRSGDEVKKQMAETDRKIANIHKELGGIGENNGLIAEEIVFHSLEKDMVFAGITFDFIDHGTVRSRKFPDGKKITGEYDVLLYNGTAVAIIEVKHRVGKDALKRLIEVQLPRFKQVFPQYKDAKMYLGLGGMSFEKGVAEEARQQGIATLMLNGDAVEINDADVKAW

SEQ ID NO: 14079 - DNA, 810 bp, Unknown
  Obtained from environmental sample
  misc_feature (1)..(810): n is a, c, g, or t
ttgaaaaacgatgaccctcgttgtttgagcaactcgatagattatgagaaagccaaaaaaatgatagacgaccttataaatgcaggtgtgcacggttttgtgcccgttggaacaacagggcagagcgcaacgctcagcaccgagcagcatttggattttatgaaatttgtgctggattatgtggatggcagagtgcctataatagcaggagctggttccaatagcacaagggaatccgttgaaatgataaaagcaattctaaaaattaaagaagttgcaatgctctgcgtgacaggctactacaacaatcctccgcaagaggggatttacgcccatttcaaggcgttgagcagtgaaacaggcgcaaaaattatcctctacaacgtgcccgggcgcaccgcaagctatatacatcccaataccgtgataaaacttgccgaagacaaaaacataataggcttaaagcaatccgttgaatttagaattggcgaaaagcatcacgaagataccaaaagcataattcagcaaacaaaggggatggactttgctgtgatttctggtgaagacggcgcatttatagatatgcttgaactaggcggcgtagggttgattagcgcaacagcaaacatcccagaggcggcaaaaattttcgttgacctttacaacgcttttcaaaaaaacgaagctgaaaaatgcgacaacttgcaagacgaagcccgcgattacgtggaagccngtgttctgccgcaaaaatccaatcccacttggaactttttcaacagcccgctctgctcccgctgctcgcgataa

SEQ ID NO: 14080 - protein, 269 aa, Unknown
  Obtained from environmental sample
  DOMAIN (8)...(251): Dihydrodipicolinate synthetase family
  misc_feature (1)..(269): Xaa is any amino acid
MKNDDPRCLSNSIDYEKAKKMIDDLINAGVHGFVPVGTTGQSATLSTEQHLDFMKFVLDYVDGRVPIIAGAGSNSTRESVEMIKAILKIKEVAMLCVTGYYNNPPQEGIYAHFKALSSETGAKIILYNVPGRTASYIHPNTVIKLAEDKNIIGLKQSVEFRIGEKHHEDTKSIIQQTKGMDFAVISGEDGAFIDMLELGGVGLISATANIPEAAKIFVDLYNAFQKNEAEKCDNLQDEARDYVEAXVLPQKSNPTWNFFNSPLCSRCSR

SEQ ID NO: 14081 - DNA, 576 bp, Unknown
  Obtained from environmental sample
  misc_feature (1)..(576): n is a, c, g, or t
atggcaggcataagaatcgccgcccgcgcggaactgaccggcccggctgaaaaaatccttcgtatcgcggcggcccttgccgccctgatcgcgtccggcctcattatggcgcttatgggctacaatcccgttgaagttttcgcaaaaatgatttccgggtcgctcggttcggcttaccgtttccgcgaaaccattaacaaggcaataccgttaagcgtgttgtcattggggacggcggtggcgttcaggatgaaattctggaacataggccaggaaggacaattttacatgggggcttacggcgcgtcgcttgtcgccttttcccttccgaaccttcccgcgccgcttttgctttccgtgatgtttattgccggaatgatcttcggcggcctgtgggcggtgattcccgcattgttgaaaataacattgtcaaccaatgaaaccctggtaacgctgatgttaaactatatcgccctcaaatggatttcattcctccagtacgtcgcgtggaaagaccccacggcgctggtttccgaaaattgcccccttgtctcggccgatctgatacctggttaa

SEQ ID NO: 14082 - protein, 191 aa, Unknown
  Obtained from environmental sample
  misc_feature (1)..(191): Xaa is any amino acid
MAGIRIAARAELTGPAEKILRIAAALAALIASGLIMALMGYNPVEVFAKMISGSLGSAYRFRETINKAIPLSVLSLGTAVAFRMKFWNIGQEGQFYMGAYGASLVAFSLPNLPAPLLLSVMFIAGMIFGGLWAVIPALLKITLSTNETLVTLMLNYIALKWISFLQYVAWKDPTALVSENCPLVSADLIPG

SEQ ID NO: 14083 - DNA, 708 bp, Unknown
  Obtained from environmental sample
  misc_feature (1)..(708): n is a, c, g, or t
atgatccagggaatagtggagctttcggatacgaccgtaaaggaagttatggttccgcgtattgacgttgattttatcccggccggtgtaagccgggaagagctccttaccaggatcgtggaaagcggacattcccgttttcccgtttatgaagaaacaatcgacaaggtcatcggcatactctatgtaaaagatgtgcttaaaagcctggttgaagcggagaagaattattcggataaagtttcgtttgacataaagaaaattgttcgcagcgctttttttgttcccgaatcaaaacgcatagacgatttacttagggagctgcgcaggcgcaaagttcatatcgcggtggtagtggacgagtacggcggcgtttccggcattgtctgcatggaaaatattattgaagaaataattggagatattcaggatgagttcgataatgaaaatgaagacattatggatcttggcggcgactcgtggctttgcgatacgcggatcaatctgggagatctttccgagcgcatagggatagacctgccggcggataagttcgataccctggggggctttgtctttgaccttttcgggaaaatacctgtaagatatgaaaaggccgtttgggaaggccattactttataatacaggatatggaaggccacaagataaatacggtaaaaataatcctcaataaaaaagaggagtaa

SEQ ID NO: 14084 - protein, 235 aa, Unknown
  Obtained from environmental sample
  DOMAIN (154)...(232): Transporter associated domain
  misc_feature (1)..(235): Xaa is any amino acid
MIQGIVELSDTTVKEVMVPRIDVDFIPAGVSREELLTRIVESGHSRFPVYEETIDKVIGILYVKDVLKSLVEAEKNYSDKVSFDIKKIVRSAFFVPESKRIDDLLRELRRRKVHIAVVVDEYGGVSGIVCMENIIEEIIGDIQDEFDNENEDIMDLGGDSWLCDTRINLGDLSERIGIDLPADKFDTLGGFVFDLFGKIPVRYEKAVWEGHYFIIQDMEGHKINTVKIILNKKEE

SEQ ID NO: 14085 - DNA, 591 bp, Unknown
  Obtained from environmental sample
  misc_feature (1)..(591): n is a, c, g, or t
gtgctggaaaagggcatttattccataccgcagaccggccttgagcatttgaacggcgatgttgtggagctggtccgccagagcgactcaagaattgagcaggagaaaattcccttctgggcggttgtaaccggaaacgaggtgtccgcttccgtggattcctttattgcttccggttcctttacccccggccttgaggtttttgccaatgaattgctgaagcctttcttaaaagaaaatgttttttattctcccgatactacggcgcgccgtattgccgaaatcaggctcaacatagaacctgttatgcggaacatcgaacagggaaggcaaataatcagaaagggctttgttgttaccgagagtgacatggaggaactaagggcgttgcgcatgactttgaagggaaacgatcttccaaaaacatttgcgaatttgattttccttcttattctctttggccttcttatgtttttctcaggcagcaggattattgacagggcgcttacggacagtgaaacatttctgattgccggcctttccgccctgtatatagccggtttccgttttgataaggaatgttcagattga

SEQ ID NO: 14086 - protein, 196 aa, Unknown
  Obtained from environmental sample
  misc_feature (1)..(196): Xaa is any amino acid
MLEKGIYSIPQTGLEHLNGDVVELVRQSDSRIEQEKIPFWAVVTGNEVSASVDSFIASGSFTPGLEVFANELLKPFLKENVFYSPDTTARRIAEIRLNIEPVMRNIEQGRQIIRKGFVVTESDMEELRALRMTLKGNDLPKTFANLIFLLILFGLLMFFSGSRIIDRALTDSETFLIAGLSALYIAGFRFDKECSD

SEQ ID NO: 14087 - DNA, 864 bp, Unknown
  Obtained from environmental sample
  misc_feature (1)..(864): n is a, c, g, or t
atgaaaaacggggaaaatgtgcgccgttttatccgcgagaaagggccgattaaggccgtgctgtccattggcggctggggcgcgggcggtttttcccccgcggtcgccacggtggaacgtcgggaagtttttgcccagtctctggcggatattgtcaatgattacgggtttgacggcgcagacctggactgggaatacccctgcgacggctcggcgggcattgagttttcccccgaagacaagccgaactttaccgcgctggttgctctgctgcgggaaaaactgggtaaagataaaatcgtctccatggcggctggcgcgagcgaaagctgtgtccggagccttgaaattgacaaactggttcctctgatggatctgttcaacattatgacttacgacatggcaaaatggtcggcggcaagccatcataccagcctttacgaatccgatattagccattctatgtacggggacaaggcgatcaaactgtaccgggaggcggggataccaaaggagaaaattaccctgggttcggcattttacgcgcggattttccataacgtggacggcataaactgcgcggctaacggagaagcgccgggattttccggcgggtatcccgatactatggcgaaggtagaagcggcgggcgggcttttatacgatgaaaaggccgaagcgccttacgcgtataacgcgaaggaaagaacctttatcacctttgacaatgagcgttccctaaaggccaaacgcaaatatgtaaaaaccgaagggctggcggggatcatgttttgggagtattcctgcgatgatagccagagtactttactgaacgcggtagnctttggattaattttatcttaa

SEQ ID NO: 14088 - protein, 287 aa, Unknown
  Obtained from environmental sample
  DOMAIN (4)...(270): Glycosyl hydrolases family 18
  misc_feature (1)..(287): Xaa is any amino acid
MKNGENVRRFIREKGPIKAVLSIGGWGAGGFSPAVATVERREVFAQSLADIVNDYGFDGADLDWEYPCDGSAGIEFSPEDKPNFTALVALLREKLGKDKIVSMAAGASESCVRSLEIDKLVPLMDLFNIMTYDMAKWSAASHHTSLYESDISHSMYGDKAIKLYREAGIPKEKITLGSAFYARIFHNVDGINCAANGEAPGFSGGYPDTMAKVEAAGGLLYDEKAEAPYAYNAKERTFITFDNERSLKAKRKYVKTEGLAGIMFWEYSCDDSQSTLLNAVXFGLILS

SEQ ID NO: 14089 - DNA, 495 bp, Unknown
  Obtained from environmental sample
  misc_feature (1)..(495): n is a, c, g, or t
atgtcacatcctttccagcgcaagcatattgagtaccatattcttcagtcttttcccgttacctgcctgaaccgcgatgatgtgggcgcgcccaaaactgcggtggtcggcggcgtttccagggccagggtcagttcccagtgctggaaacgtcaggtgcgccaggaattgcatactctgggcgtaaaaatcggtgtgcgcaccaaacagttggaaggccggatcgccgaagcatgtaaggcgctgggcgcatccgaggaaaacgcccggcagtggggacaggcgtttgccaaggagttggcggacgataccctgtttttcttttcttcccaggaagccgaggcgtttgccgggcatgcgaaatcgttggcctttgacgccgcgaaaatcaaggccaaggagatcgcgaaaattgccaaaaaaaccttggatcccatgcaggatggactggatatcgcgcgttcgggcgcctcggccgatctgatcattggntga

SEQ ID NO: 14090 - protein, 164 aa, Unknown
  Obtained from environmental sample
  misc_feature (1)..(164): Xaa is any amino acid
MSHPFQRKHIEYHILQSFPVTCLNRDDVGAPKTAVVGGVSRARVSSQCWKRQVRQELHTLGVKIGVRTKQLEGRIAEACKALGASEENARQWGQAFAKELADDTLFFFSSQEAEAFAGHAKSLAFDAAKIKAKEIAKIAKKTLDPMQDGLDIARSGASADLIIG

SEQ ID NO: 14091 - DNA, 423 bp, Unknown
  Obtained from environmental sample
  misc_feature (1)..(423): n is a, c, g, or t
gtgaattccctattgttttccaacggccgcccccggcaagcttcntgcgcaagacttgaaacacgtgacatccggaaaaaactgctgacgttttccgcataccgtttggaaatcaccatcaaccccgtcaaacgcgaaagcgcgagcggcaagcttgtgcccctgcgcacacgtgaggcggtcggtgaatggtttgccgccaaagcgccgagttggggctttgagccggcggatctggaggtgcagtccttgaatgtggcccagtttgagaaaaaagggcagccggtgacgctggggcaggccacgctgaccggccttctgcatgtgcgcgatgccgcgcgttttgcgcagagcttcatgcgcggcatcggacggggcaaggctttcggctgcggtctgctgcagatagtgcccgccggctga

SEQ ID NO: 14092 - protein, 140 aa, Unknown
  Obtained from environmental sample
  misc_feature (1)..(140): Xaa is any amino acid
MNSLLFSNGRPRQASCARLETRDIRKKLLTFSAYRLEITINPVKRESASGKLVPLRTREAVGEWFAAKAPSWGFEPADLEVQSLNVAQFEKKGQPVTLGQATLTGLLHVRDAARFAQSFMRGIGRGKAFGCGLLQIVPAG

SEQ ID NO: 14093 - DNA, 726 bp, Unknown
  Obtained from environmental sample
  misc_feature (1)..(726): n is a, c, g, or t
atgccggtttttatttttaagattcttgcggtggctaaaatcatagtctttatgttttaccacattcccatatacttttttgaaaaaattttcagagccagcacaacagatatatggttgcgagaaaaatttttgcattgggcaagattttgcttgaaaaccttgcgaatagatttaaatgttggcggtcaatataatttggcaaaggtagattggagccgtccggttattgcgattgcaaaccacaattcatacacagatattcccgttattttaacttctgcacaaagaccgctcggatttttggcaaaagtagagttatcgcgaattccagttttatattactggatgagaaaaataggctgcgttttcattaaaagacagtcctccaaagccggacagaaatttatggataaaatgctcaattattcctccgaaaaaccaccgcaaatagtgatttttccagagggaacgaggagcaaaactggtgaaatgggagcttggaaaagcggagcgtttagaatggctgcagaattaaaagcaacgattttaccgattacaataaaggggacagcggttagttttgagagaagaaaaagttcanaaactgttcaggaagtatcagcgcaaattttggaaccttttgatgttgctcagtgggaaaatgagaatggaaaggagattgagtacaaggatttgatggctaggctgaaggggtgttattaa

SEQ ID NO: 14094 - protein, 241 aa, Unknown
  Obtained from environmental sample
  DOMAIN (58)...(189): Acyltransferase
  misc_feature (1)..(241): Xaa is any amino acid
MPVFIFKILAVAKIIVFMFYHIPIYFFEKIFRASTTDIWLREKFLHWARFCLKTLRIDLNVGGQYNLAKVDWSRPVIAIANHNSYTDIPVILTSAQRPLGFLAKVELSRIPVLYYWMRKIGCVFIKRQSSKAGQKFMDKMLNYSSEKPPQIVIFPEGTRSKTGEMGAWKSGAFRMAAELKATILPITIKGTAVSFERRKSSXTVQEVSAQILEPFDVAQWENENGKEIEYKDLMARLKGCY

SEQ ID NO: 14095 - DNA, 597 bp, Unknown
  Obtained from environmental sample
  misc_feature (1)..(597): n is a, c, g, or t
atgcctaacgtagctattcgcgaaaacgacattatgataaagctccgcaatttgcgaaagagctttggcaagcaagatgttctgttggatgtgaatctggacattaggcgtggcgaaacaatagtgattatagggcaatccggaggtggaaagtctgttatattgaagcacatgatagggcttttgcagccggatggcggcgaagtgagcgtggataatgtcacaatttccactccaaaattttttgatacccacacaatacgcaaaagaatgggaatgctctttcaaatgggagctttgtttgattcaatgaccactggcgaaaacatagcttttgctttgagagaacaccatcccgaacttaccgagaagcaaattcaagaccaagtgaccgaaaaattgcagctaataaatctggtgccagaattccgcacaaaaatgccaaacgaactttctggcggcatgaaaaagcgtgttgcgctggctagagccatagcccttaacccagaaattcttttatacgatgagccaaccacaggggctagacccaaatacttccgatgttataaacgatttgattttagatatgcagtctaa

SEQ ID NO: 14096 - protein, 198 aa, Unknown
  Obtained from environmental sample
  DOMAIN (38)...(198): ABC transporter
  misc_feature (1)..(198): Xaa is any amino acid
MPNVAIRENDIMIKLRNLRKSFGKQDVLLDVNLDIRRGETIVIIGQSGGGKSVILKHMIGLLQPDGGEVSVDNVTISTPKFFDTHTIRKRMGMLFQMGALFDSMTTGENIAFALREHHPELTEKQIQDQVTEKLQLINLVPEFRTKMPNELSGGMKKRVALARAIALNPEILLYDEPTTGARPKYFRCYKRFDFRYAV

SEQ ID NO: 14097 - DNA, 855 bp, Unknown
  Obtained from environmental sample
  misc_feature (1)..(855): n is a, c, g, or t
gtgatgcggggtatcgtttgcgggtgggtagtgtcggggacaggttctgtaagcggaactcatgtggctgatgcgnnagcgttgcggtatcagcttttgtcaacagcgattgccaatggtaacgcgagtattacgttgacggcaaagtggaatgtaaatacgctgactattaattattcaagcggtggtgggacaggtaacgcgccaaccagtccgacatctgcggcttacggaacttctatcactatgcctgcaaatccatatactaatactggttttacttttgttggctgggaagtgtctggagtgagttctataccaggaacctacacagcagagacatacgttgaggttacagccttgtcaactgccatcgccagcggtaatgcgagtattatgttaatagcgaaatggtcacttggtttagaaatggtttatgttcctagtggcagtttcgagatggggagtaataacggtaattataatgaaaaacctgtacatactgtaacgctgagcggattttacatgggcaaatacgaggtaacgcaggaacaatggacggcggtaatggggagcaatccgagttattctaacggaagttcaggcagagaacctgcgtccggagaagttcagagtaagcgtcccgtggaaaatgtaagctggtatgatgtgcttgtattctgcaacaagttgagcatgagggaaggattaagtcctgcgtacagcatatctggaagcaccgatccggcagattggggaggcgtaccccactacagtgattcgatatggaacgcagtaaaaatagtagccggttctaacggttaccgattgccaacggaggcgcaggggggataa

SEQ ID NO: 14098 - protein, 284 aa, Unknown
  Obtained from environmental sample
  SIGNAL (1)...(22)
  DOMAIN (140)...(283): Domain of unknown function (DUF323)
  misc_feature (1)..(284): Xaa is any amino acid
MMRGIVCGWVVSGTGSVSGTHVADAXALRYQLLSTAIANGNASITLTAKWNVNTLTINYSSGGGTGNAPTSPTSAAYGTSITMPANPYTNTGFTFVGWEVSGVSSIPGTYTAETYVEVTALSTAIASGNASIMLIAKWSLGLEMVYVPSGSFEMGSNNGNYNEKPVHTVTLSGFYMGKYEVTQEQWTAVMGSNPSYSNGSSGREPASGEVQSKRPVENVSWYDVLVFCNKLSMREGLSPAYSISGSTDPADWGGVPHYSDSIWNAVKIVAGSNGYRLPTEAQGG

SEQ ID NO: 14099 - DNA, 669 bp, Unknown
  Obtained from environmental sample
  misc_feature (1)..(669): n is a, c, g, or t
atgaacagaacaggggttttgcctgaaaaactggaagacttctaccttaacgcggttaagatagaaggacttgcgataaaaggctttcactcttacgacggacacctgaaaatagagaacctggacgagcgccgctctgccgcatcttccgccgccgcttatttctttaaagtaaaagaatcccttgagaaacagggccgcgaagttccggttgttgtaatgggcggaactcccacttttccctgccacagggaaacggcaggcgtctttctttcgcccggcactttattcctgcaagactacggctattcttcaaaattctccgacctggattttaccccgggcgcggccattctgagccgcgtaataagccacccaaacgacggccttttcaccctggacacgggcagcaaggccattgcgacagaccccgccgaccgtggagtaatcgccgatttgcctgaggcgaagcctgttttccaaagcgaggagcactgggtctggactcttgagggaaaagagcctccgccaatcggaaaagtactttacattcttccaacccatatatgcccgacctcggccctttaccccggcgttgtggtggtaaaaaacggcaaacagactggctactgggaagtcggggcgcgaaaccggaaaatttccgtataa

SEQ ID NO: 14100 - protein, 222 aa, Unknown
  Obtained from environmental sample
  misc_feature (1)..(222): Xaa is any amino acid
MNRTGVLPEKLEDFYLNAVKIEGLAIKGFHSYDGHLKIENLDERRSAASSAAAYFFKVKESLEKQGREVPVVVMGGTPTFPCHRETAGVFLSPGTLFLQDYGYSSKFSDLDFTPGAAILSRVISHPNDGLFTLDTGSKAIATDPADRGVIADLPEAKPVFQSEEHWVWTLEGKEPPPIGKVLYILPTHICPTSALYPGVVVVKNGKQTGYWEVGARNRKISV

SEQ ID NO: 14101 - DNA, 624 bp, Unknown
  Obtained from environmental sample
  misc_feature (1)..(624): n is a, c, g, or t
atggatcatttgatgcggggcatgaccggcattgaaacgacccgcgcaatacgcgccctcggcacggaatatgcgaaaaacatacctgttatcgctctgacggccaatgcgtccgccggaaacgggcatttattcctggataacggtttcaatacggttctacccaagcccctcagcatagcaaagctggataccttccttaaaaactggattcgtgataaaatgcataataccaatagcacagaaaagggggaaaagcgtatgaaaattgacatacccggggtagatgaaagaaaaattatggacctttatgagggcgatatggatattttcataccggtcctgcgttcatatttttctgccatgcccggtattctggacacagtgcgcgctgtttctgcggaaacgttgcaggattataccgtcagcgtacacggcatcaaaagcaccagtgaaagcatcggcgcggaaggggcgcggaaaatggctgccgaactggaggcattggcaaaggccgggaatctttccgggatactggcaaaaaacacaactttcttgcaacacatggaagatctcttgggtaatataaaaaattggctggcgcggcttgatgccgcacaataa

SEQ ID NO: 14102 - protein, 207 aa, Unknown
  Obtained from environmental sample
  DOMAIN (113)...(206): Hpt domain
  misc_feature (1)..(207): Xaa is any amino acid
MDHLMRGMTGIETTRAIRALGTEYAKNIPVIALTANASAGNGHLFLDNGFNTVLPKPLSIAKLDTFLKNWIRDKMHNTNSTEKGEKRMKIDIPGVDERKIMDLYEGDMDIFIPVLRSYFSAMPGILDTVRAVSAETLQDYTVSVHGIKSTSESIGAEGARKMAAELEALAKAGNLSGILAKNTTFLQHMEDLLGNIKNWLARLDAAQ

SEQ ID NO: 14103 - DNA, 564 bp, Unknown
  Obtained from environmental sample
  misc_feature (1)..(564): n is a, c, g, or t
ttgccgcaaagggcggcagccgtttttatcatgggaatggaacaggccggcattgtctgcgcggtaaaacatttcccgggcagcaccggcgcggatccccatttgtatccgcccgtactgcacggcggcaaagaggccctcgcggaattgacaagccccttcgccgcccttatacaggacggtcacgcgcgcgcggtaatggtttcccactcggcggtctcggcatgggatgaaaaaaatgtttccagcctttcccctgcggtgatgggcggctggctgcggggggaactgggatttgaaggcattatcatcagcgacgacttttcgatggcctctgcaagaggcccgctatccgcagaaaaccagcgttccgaaacggcggcggtgcaatccctggcggcaggaacggacatggttatagtttggccctccgatctgaggcgcacccaccgggaaattcaggcggctattaacggcggcaggcttacccgcgaacggctgcgggaagccgccgaaaggatcatttttgaaaaaatccggctgggcctggttaatgaggaataa

SEQ ID NO: 14104 - protein, 187 aa, Unknown
  Obtained from environmental sample
  DOMAIN (1)...(141): Glycosyl hydrolase family 3 N terminal domain
  misc_feature (1)..(187): Xaa is any amino acid
MPQRAAAVFIMGMEQAGIVCAVKHFPGSTGADPHLYPPVLHGGKEALAELTSPFAALIQDGHARAVMVSHSAVSAWDEKNVSSLSPAVMGGWLRGELGFEGIIISDDFSMASARGPLSAENQRSETAAVQSLAAGTDMVIVWPSDLRRTHREIQAAINGGRLTRERLREAAERIIFEKIRLGLVNEE

SEQ ID NO: 14105 - DNA, 921 bp, Unknown
  Obtained from environmental sample
  misc_feature (1)..(921): n is a, c, g, or t
ttgtcgcggcaacatcgcgggaaagtcggtttgtcatttttaatcgcggaaacaataagcatttcaggttcttctcaatttaatttgcgggaaagcctgaatggaaagggcccttctcccattccgtcaatagggatcagcgccatactcaaacttaaatcgggcagacagcgaatcattggcggcgctttgccatctgacggcgaattggcggtagatttggcggcaaaacccctatacaacggtatctggggcatgggaggaggcgcgacatggactgtgggagtagcggacaaaaatcctccggtgataattttggactaccctgaaacggcgtggatttctcctaacaacgacggcaagtccgattacctggaattccccataagcattacggacgaacgccacataatggaatggatttttgaaatcagcgatgataagggcgcgcccgcaagggtttaccggaacaaggaaatcaggccggagacccagggcgttcaaaattttcttggcagactgcggtcgatcaattccggggtggatgttccggaatccatgcgctgggacggcacgctggattcaggtggaatagcgccggacggaaaatatttctttaccattacagcgaaggatgataacggcaacacatcgaaggcagggccatatgaggtaaacctggataacactgctcctgaaattaccttaaacccatttgcggacgaggttaatatttttgcccccggaagcggaggcggcaggaacacgctgaccataacccaaacaggttccagagaggatctgtgggaaggcggcatttataattcctcaggcatgaaggtaaagacattcaactttacagacaaacagccggccccccatttgtttgggacggtacagacgattcgctttccatcgtaa

SEQ ID NO: 14106 - protein, 306 aa, Unknown
  Obtained from environmental sample
  misc_feature (1)..(306): Xaa is any amino acid
MSRQHRGKVGLSFLIAETISISGSSQFNLRESLNGKGPSPIPSIGISAILKLKSGRQRIIGGALPSDGELAVDLAAKPLYNGIWGMGGGATWTVGVADKNPPVIILDYPETAWISPNNDGKSDYLEFPISITDERHIMEWIFEISDDKGAPARVYRNKEIRPETQGVQNFLGRLRSINSGVDVPESMRWDGTLDSGGIAPDGKYFFTITAKDDNGNTSKAGPYEVNLDNTAPEITLNPFADEVNIFAPGSGGGRNTLTITQTGSREDLWEGGIYNSSGMKVKTFNFTDKQPAPHLFGTVQTIRFPS

SEQ ID NO: 14107 - DNA, 645 bp, Unknown
  Obtained from environmental sample
  misc_feature (1)..(645): n is a, c, g, or t
ttgataaaaaagaggaaggtgataattaggaaaccaggagctttaatgtataatgttgaattggaattacaacatgaaattgaaaatatcttcagaatccataaaaaggaaataaatgtattcaccaaattgataggctcgaattatgtatattcctttgaagtcaaaaatcaaaaatatgttatacgtaaattaatggacacgtcgctaataaactggaaacatgaaaaagccgcatacatttcattaaagtcgttgaatataacagatgagttggtttactgcaataacggtataaagatagccaaatatcttgataacagcaaaacattaagttttggcgaatctgatatgattgaggcgcttgatatgatacgtaaagtccatgagagcggcgtttcaataatatacgattataatattattgagaatatggataagtatatttcactttgcgataaaaaatccaaacggttaaaagagttacaaagttaccgggctcaaattgatataattcaggaaaacgtagatcacttaaatattccgccggttctttgccatggcgacgcttgcgcgataacaaacttcttgcgcttacctgacgggagcattaaattatcgactgggaacagccggtatgtctga

SEQ ID NO: 14108 - protein, 214 aa, Unknown
  Obtained from environmental sample
  misc_feature (1)..(214): Xaa is any amino acid
MIKKRKVIIRKPGALMYNVELELQHEIENIFRIHKKEINVFTKLIGSNYVYSFEVKNQKYVIRKLMDTSLINWKHEKAAYISLKSLNITDELVYCNNGIKIAKYLDNSKTLSFGESDMIEALDMIRKVHESGVSIIYDYNIIENMDKYISLCDKKSKRLKELQSYRAQIDIIQENVDHLNIPPVLCHGDACAITNFLRLPDGSIKLSTGNSRYV

SEQ ID NO: 14109 - DNA, 660 bp, Unknown
  Obtained from environmental sample
  misc_feature (1)..(660): n is a, c, g, or t
gtgctggtggcgggaagaaactgttccacgctcggtttctactggagggcgcgggaatggatgggcactgaaaatctttcctatgcgctgtacgaagatcccgccctgtgcgacagcatgatggaatttaccgccgattttaccattgaaactctgcgccctctgttagacgaaattgctcccgactatatctttataaatgaagatatgtccatgaaaacaggcccgctgttaagccccgatcactaccggcgttatatttttccccacatgaggcggctggtggattttataaaatcaaagggagtcccttacgttattgtcgacagcgacgggaatcccgatctcctcattccccatcttttggaagccggagttgacggaatttggcccatcgaacgcgccgccgaaaaaatggaccccttagacctaagggcaaagtacggcaaggatctccgtctctggggaggggtagataaacgctgcattgctgccggttttgacgcaatcgacagtcatttgcgtacactgattcccctaatcgaagaagggggggttattcccacagtggatcataccgtcccccctgatatatcgcttgaaaattttacttattacatgaagcaaaaaatgaaactcctaaggggtgaaagtttttag

SEQ ID NO: 14110 - protein, 219 aa, Unknown
  Obtained from environmental sample
  misc_feature (1)..(219): Xaa is any amino acid
MLVAGRNCSTLGFYWRAREWMGTENLSYALYEDPALCDSMMEFTADFTIETLRPLLDEIAPDYIFINEDMSMKTGPLLSPDHYRRYIFPHMRRLVDFIKSKGVPYVIVDSDGNPDLLIPHLLEAGVDGIWPIERAAEKMDPLDLRAKYGKDLRLWGGVDKRCIAAGFDAIDSHLRTLIPLIEEGGVIPTVDHTVPPDISLENFTYYMKQKMKLLRGESF

SEQ ID NO: 14111 - DNA, 585 bp, Unknown
  Obtained from environmental sample
  misc_feature (1)..(585): n is a, c, g, or t
atgtcaaacgacacagttaccgctaaggcatccaccgtatcgcccgtatcatacctatacttcaccctcttcttcatatccggcatatcaggcttgatatatgaatcgatatggtcgcagtatctaaaacaatttctcggacacgcggcgtattcgcaaacattggtattagtgatatacatgggcgggatggctttggggtcttggatagcggcggcgtgggccaataggactcgggatttgctcctttggtacgcgatagtcgaaatcgcgctaggggcgctggcgcttgtcttccacgattttttcattcggtatatcgatacgtcattctcgacgatactcccgtttctcagtaaaccggtattaatatctctatataagtggggttcttcggcgctcatcatcttaccgcaatcgatgctgctgggcgctacgtttccgctgatggcgggcgggatattgcggcgatttccagggcttancggttacaagacctctttcatatattttgtcaacacactttggagcctctatagggctattgataagcggattctatttggtgagagaatggggggctaa

SEQ ID NO: 14112 - protein, 194 aa, Unknown
  Obtained from environmental sample
  misc_feature (1)..(194): Xaa is any amino acid
MSNDTVTAKASTVSPVSYLYFTLFFISGISGLIYESIWSQYLKQFLGHAAYSQTLVLVIYMGGMALGSWIAAAWANRTRDLLLWYAIVEIALGALALVFHDFFIRYIDTSFSTILPFLSKPVLISLYKWGSSALIILPQSMLLGATFPLMAGGILRRFPGLXGYKTSFIYFVNTLWSLYRAIDKRILFGERMGG

SEQ ID NO: 14113 - DNA, 726 bp, Unknown
  Obtained from environmental sample
  misc_feature (1)..(726): n is a, c, g, or t
atggattttaacaccatgatagcgactaatatgctatatatatccgctcttgcggacattctgaacgacaaggaaacgagtttccagtacaagcgtcagtatttttccctgaaaacaagaatcaattcgttaatgtataacccgactgacggtttttattacgacatcaacaaaagcgaaaaacaagttcccattaaaacaatcgccgggtattggccgcttttggcggaaattcccaacggggaaaaagccgagcgtattatcgaaaaactttcagacccaaaatatttcggtacagctcacccgtttccctcccttgcgttatctgaaaaagaatttgacgaaacagggcgaggattcagaggatcggtttttccttatctgacattcatggttataaaagggcttgagcgctatcagcgctgggatttggcgcgtgaatgcgcgatcaggcacatgtactttatgcttgattcaatgagcccggacggtaatcatcataggggcaatctgtgggaagcgtatttgccaacaaaggaaggaccggcaaaatggtctggtaagccggcgtttccgcgcccgcagtatttaacctacgatgctctttctaccatttgcctgacaatagaaaatattgtcgggctttcaatttcgcttccgcgtaaaactgtggactgggttattcccaatctggaaattatgggagtggaaaatctttccctttaa

SEQ ID NO: 14114 - protein, 241 aa, Unknown
  Obtained from environmental sample
  misc_feature (1)..(241): Xaa is any amino acid
MDFNTMIATNMLYISALADILNDKETSFQYKRQYFSLKTRINSLMYNPTDGFYYDINKSEKQVPIKTIAGYWPLLAEIPNGEKAERIIEKLSDPKYFGTAHPFPSLALSEKEFDETGRGFRGSVFPYLTFMVIKGLERYQRWDLARECAIRHMYFMLDSMSPDGNHHRGNLWEAYLPTKEGPAKWSGKPAFPRPQYLTYDALSTICLTIENIVGLSISLPRKTVDWVIPNLEIMGVENLSL

SEQ ID NO: 14115 - DNA, 789 bp, Unknown
  Obtained from environmental sample
  misc_feature (1)..(789): n is a, c, g, or t
ttggggcgtcggggcttaatggggccgattatcatgtctttttttttgataaataaaagttcatggaatttggggtatcgagcgattggagcgattcaatgctgtcttgtgacgatattatttatcactatatcactatgggggaaaaataaaactcaaaccagcattgataaaaatgaaacgtccagagaaataaaatttaaagaattatttcatactaggggtgtaaaacaaattttgatggcgtttttctgttattgcagccttgaaaccacagccgggttatggggaagcagttttctggttattgaaaaaaacatatcccctgaaatagccgcgcgatggatttcgctatactatatcggtataaccgccggtcgttttatttccggttttctgaccatgaaattaaataaccgccagatggtccgtttagggcaggctcttatcgcttgtggaattatcgccttaatagtacctgcgggcaaattactattattaccgggcttttttataatcgggcttggctgcgcccccatatatccaagcctgatacacgagactccaagaaattttggcaatgagaaatctcaggaaataattgggatacaaatggcaagcgcatatatcggtactacttttatgcctccgttatttggacaagcggtaacatatttgggttttattttcttcccgttgtttatcgggtgcattttgatactcaatataataatggttgagttattgaataaaaaagtggatgaaaacaggatagtaaaagagggctag

SEQ ID NO: 14116 - protein, 262 aa, Unknown
  Obtained from environmental sample
  misc_feature (1)..(262): Xaa is any amino acid
MGRRGLMGPIIMSFFLINKSSWNLGYRAIGAIQCCLVTILFITISLWGKNKTQTSIDKNETSREIKFKELFHTRGVKQILMAFFCYCSLETTAGLWGSSFLVIEKNISPEIAARWISLYYIGITAGRFISGFLTMKLNNRQMVRLGQALIACGIIALIVPAGKLLLLPGFFIIGLGCAPIYPSLIHETPRNFGNEKSQEIIGIQMASAYIGTTFMPPLFGQAVTYLGFIFFPLFIGCILILNIIMVELLNKKVDENRIVKEG

SEQ ID NO: 14117 - DNA, 300 bp, Unknown
  Obtained from environmental sample
  misc_feature (1)..(300): n is a, c, g, or t
atgaacaattttgttttcagggtgaagccggcgggcaatatgtatgttttcaccgaatttgaactttccgaccggccctattacccgaacataccccaggtgccggccctttgggatgagactcttcctttttcagggtacatggacagcataacgctcggccccggcgagtatttcgtcgtttccgacgacaggagcaattcaggcgattcacgcacatgggggccggttaacgctaaaaagctgctgggaaagcccgtattccggttctggcccatatcgcgaatcggccgaccctag

SEQ ID NO: 14118 - protein, 99 aa, Unknown
  Obtained from environmental sample
  misc_feature (1)..(99): Xaa is any amino acid
MNNFVFRVKPAGNMYVFTEFELSDRPYYPNIPQVPALWDETLPFSGYMDSITLGPGEYFVVSDDRSNSGDSRTWGPVNAKKLLGKPVFRFWPISRIGRP

SEQ ID NO: 14119 - DNA, 885 bp, Unknown
  Obtained from environmental sample
  misc_feature (1)..(885): n is a, c, g, or t
gtgaccgggggtgttcttgttcctcaacgcgcagtcattgggaggcaggaagtcggatnaatganaactcaaaagataaaatcaaaggcggagatggtagcggtggcttgcgcggtcattttggcggtcgcgctcttcaactacgtttccggcaagtttttcttccgaatcgacctgacggaagaccgtaagtacacggtttccgacgcgacgaagcgggttctcaaggggttggacgatatcgtcactgtcaaggccttcttctcgaaagatctgccggcggaggcgcatcttacggtaaacactacgcgcgacctcctgagcgagtacaagagcgtcgccggcggcaagctgcacgtaacgtgggaggatccggcggagagcgacgatatccgcagaatggccatgagcttgggcgtacccgaaattcctgtgcaaacctttaagcgcgacaaggcggagaccatgctgggtttcatggggatagggataatgtacgccgacaagaaagaggctattcccgtcgtccgaaacttggataaccttgagtatgaccttacgcaggccataatgaaagtgaagcgttccaccgtccccaagataggcgtgttaaaatcgcagtccgccgactttataccgccggagataagcgcccgcatgaatatgggggacgataggacggagaggcgcttcgccccgatatttgagaacttcaagcgcgactacgaggttgtaaccgtggacttgtcggaggggaagccgatagataaagatatccgaacactcataattccggggggcgaccgctacaccgaccgcacgctctttgagatagaccagtacttcatgaacggcgggaacattatcgcgctgtcaacgcggtaa

SEQ ID NO: 14120 - protein, 294 aa, Unknown
  Obtained from environmental sample
  misc_feature (1)..(294): Xaa is any amino acid
MTGGVLVPQRAVIGRQEVGXMXTQKIKSKAEMVAVACAVILAVALFNYVSGKFFFRIDLTEDRKYTVSDATKRVLKGLDDIVTVKAFFSKDLPAEAHLTVNTTRDLLSEYKSVAGGKLHVTWEDPAESDDIRRMAMSLGVPEIPVQTFKRDKAETMLGFMGIGIMYADKKEAIPVVRNLDNLEYDLTQAIMKVKRSTVPKIGVLKSQSADFIPPEISARMNMGDDRTERRFAPIFENFKRDYEVVTVDLSEGKPIDKDIRTLIIPGGDRYTDRTLFEIDQYFMNGGNIIALSTR

SEQ ID NO: 14121 - DNA, 564 bp, Unknown
  Obtained from environmental sample
  misc_feature (1)..(564): n is a, c, g, or t
ttgaaaaagaacttaacaaaaaaatcatggaggaaaaattttctcccgccccgncttttgaccaggattggcattaacaccggaaacatggtagccggaaacatgggaaccggaaacaagatgaactatacaatcatgggaaacgccgttaaccttgccgcccgtcttgagggtgttaacaagcagtacagaacatggatactcgcttcggatgacacggtacgggaaacccaggggaagatacttgtccgtatgcttgaccgcgtccgcgtagtcggcatcaacgagccggtacgcctctacgagcttataaacaccgtggaaaactccaggcatgaagaaaaaacgttagttgaaactttcagccaggccctggaattttatgagacccgccaatggaaaaaagcagccgagggcttcagggatgcccttgagatagaggcaaggttcacgctcaaccctgagggcggcccctccgcggtatatcttgaccgctgcgaaagattcagggccagacagcccgcggacgactgggacggcgtttataacttgacggaaaagtag

SEQ ID NO: 14122 - protein, 187 aa, Unknown
  Obtained from environmental sample
  misc_feature (1)..(187): Xaa is any amino acid
MKKNLTKKSWRKNFLPPRLLTRIGINTGNMVAGNMGTGNKMNYTIMGNAVNLAARLEGVNKQYRTWILASDDTVRETQGKILVRMLDRVRVVGINEPVRLYELINTVENSRHEEKTLVETFSQALEFYETRQWKKAAEGFRDALEIEARFTLNPEGGPSAVYLDRCERFRARQPADDWDGVYNLTEK

SEQ ID NO: 14123 - DNA, 303 bp, Unknown
  Obtained from environmental sample
  misc_feature (1)..(303): n is a, c, g, or t
atggacggcataatggaagagtaccgtaaaaatccgcccaagacattaggcggcatagagataaaaaaagtccgcgacataaagaacggcgctgacggtctcccgcccagcgacgtacttcaattcttcctcgcggacggcacagtagtaagcgcccgccccagcggcacagagccaaagattaaattttacgcctcatgctgcgccgagttaggctcaggaagtcttgaaaccgccaaaaccgaagtccagcgcaaactggacgcgattaagaaggacatccgcgcggttattggagaataa

SEQ ID NO: 14124 - protein, 100 aa, Unknown
  Obtained from environmental sample
  misc_feature (1)..(100): Xaa is any amino acid
MDGIMEEYRKNPPKTLGGIEIKKVRDIKNGADGLPPSDVLQFFLADGTVVSARPSGTEPKIKFYASCCAELGSGSLETAKTEVQRKLDAIKKDIRAVIGE

SEQ ID NO: 14125 - DNA, 777 bp, Unknown
  Obtained from environmental sample
  misc_feature (1)..(777): n is a, c, g, or t
ttgcgggagcattttctttttgacaaagtttttattaaagatgaaataagtctttgttacacccacagcgaccgcgtggttttcggcggggccttcccggataaaaagaaacttcgccttgaaggcggcaaagactttgggagcgatgtcttccttgacagacgggaaatcgggattatatgcatctcgggcgaaggcgttgtctccgccgataaaaacgaattcaaaatgaagaaaggcgacggcctttatatcggcaaaggaaccaaggatgtatttttttccgctgccggtaataacccgcccaagttttaccttgcgagcgctccggctcatgttacctacccttcggttcatattcccattgaaaaagccaacccgcgaaagcttggcgaagcggcgacggtgaatgtgcgcactatttatcagtatgtgcatccggcagtctgccagagctgccagcttgtgatgggcatgacggtgctggaagaaggctccgtgtggaacaccatgccctgccacacccatgaacgccgcatggaagtgtacctttactttgacatgaagccagacgcggcggtgttccaccttcacggccagccggacgaaacccgtcatattgtaatgaacaatgaacaggcggtaatttctccgtcatggtcaattcattcgggagttggaacagccgcttatacgtttatatgggccatggccggggagaacccgacctttgacgacatggacaccttgcgtaccacggaactgcgggtaaaataa

SEQ ID NO: 14126 - protein, 258 aa, Unknown
  Obtained from environmental sample
  DOMAIN (1)...(256): 5-keto 4-deoxyuronate isomerase
  misc_feature (1)..(258): Xaa is any amino acid
MREHFLFDKVFIKDEISLCYTHSDRVVFGGAFPDKKKLRLEGGKDFGSDVFLDRREIGIICISGEGVVSADKNEFKMKKGDGLYIGKGTKDVFFSAAGNNPPKFYLASAPAHVTYPSVHIPIEKANPRKLGEAATVNVRTIYQYVHPAVCQSCQLVMGMTVLEEGSVWNTMPCHTHERRMEVYLYFDMKPDAAVFHLHGQPDETRHIVMNNEQAVISPSWSIHSGVGTAAYTFIWAMAGENPTFDDMDTLRTTELRVK

SEQ ID NO: 14127 - DNA, 330 bp, Unknown
  Obtained from environmental sample
  misc_feature (1)..(330): n is a, c, g, or t
ttggccaatgccaatgttcccaattttaagcgtacaacgtcaaattttgaaagcgatttaaaacgtgcgctgatttcggaaaaaaagaggcccgcgatagaaatgaccgtgtcggatacaagacattttccaaattataaggaaagggactaccgtgatgtgcaaattcgccgcgtattggactacacaagcacatataacaacaatgggaacaatgttgatcctgaaagggaattcatgctcgccacgcataaccagatgagttatacgcttttcgcgcagtccgcggcgtttgaattcagtcagataaataaagtattaagaggataa

SEQ ID NO: 14128 - protein, 109 aa, Unknown
  Obtained from environmental sample
  misc_feature (1)..(109): Xaa is any amino acid
MANANVPNFKRTTSNFESDLKRALISEKKRPAIEMTVSDTRHFPNYKERDYRDVQIRRVLDYTSTYNNNGNNVDPEREFMLATHNQMSYTLFAQSAAFEFSQINKVLRG

SEQ ID NO: 14129 - DNA, 798 bp, Unknown
  Obtained from environmental sample
  misc_feature (1)..(798): n is a, c, g, or t
gtgaaaacaaacacatccggcgtcttcaaaggctttacaaagaacagccggaccggcctcgggcagttcggcggcaacggccgcaacgcgctctcccgaataacgcgggacattgccttgccctttccggtcttcagccgcttcacctgcccgacagaggtgtattgcgaggacgccaatacgctggcccgaagtttgcccgccgtggacatggcctacctggacccgccctataaccagcacccttatggttccaactattttatgctcaatctggtgaacgactatcaaaaaccttccgagatcagcaaggtatcaggcatacccattgattggcaacgctccgcctataatacgccccaggcggcctttgacgccttgtcgcgtttatgccgggatctcaaggcgcgttttctgctcatctccttcaattctgaaggctttattacaaaagagcggatgatcgccatgctggccgaaatcggcgctaccgaggtgatagaaaaaaattacaatactttccgtggctcgcgcaatttgcgcgaacgtgacattcatgtgcgcgaatacctgtttttggttgatacattcaagggcggaacaggcacaaatacccgagaacagcgctataacactgttatcaacaccatttccaaacaacaggaaaaagattgtcgctccattgtcacatccttggcggattttctgcgtgaggatatgggcgtcaaattagttttggaaaacccaagtgtacttggnnaggncggttgtttcctcgctgcgcagggatttccctga

SEQ ID NO: 14130 - protein, 265 aa, Unknown
  Obtained from environmental sample
  misc_feature (1)..(265): Xaa is any amino acid
MKTNTSGVFKGFTKNSRTGLGQFGGNGRNALSRITRDIALPFPVFSRFTCPTEVYCEDANTLARSLPAVDMAYLDPPYNQHPYGSNYFMLNLVNDYQKPSEISKVSGIPIDWQRSAYNTPQAAFDALSRLCRDLKARFLLISFNSEGFITKERMIAMLAEIGATEVIEKNYNTFRGSRNLRERDIHVREYLFLVDTFKGGTGTNTREQRYNTVINTISKQQEKDCRSIVTSLADFLREDMGVKLVLENPSVLGXXGCFLAAQGFP

SEQ ID NO: 14131 - DNA, 474 bp, Unknown
  Obtained from environmental sample
  misc_feature (1)..(474): n is a, c, g, or t
gtgcccgtgtttcaacacagcaaacggcaggaagaccgggacgacgatgttgaacacaccatgcgcctggaattcgacgccctgctggaaaaggccgcgaccaccggctgcaagacatcactggacaaactcgccgtgatggcgcaggtggacgcgggcatcgacgcctcgcacaaattcatgttttcggatttcgccctggcgctgcgcaagcggcaatggctggacctggcgttgcttcacgcggaaagagccgtggaactcgggccggacgacgcccatacccacttcaacgtcgcgcgcatccattggcaaagcggcaacgaagacaaggccagaacgtccttggcggaagctctgcgcatcatgccggacatgggatacgccatagcgctgctcaagtatatggacgacacgaaactgggcatgaacgcgggcgtcccgccgcatgacaggccggtcaagagcacatga

SEQ ID NO: 14132 - protein, 157 aa, Unknown
  Obtained from environmental sample
  DOMAIN (93)...(126): Tetratricopeptide repeat
  misc_feature (1)..(157): Xaa is any amino acid
MPVFQHSKRQEDRDDDVEHTMRLEFDALLEKAATTGCKTSLDKLAVMAQVDAGIDASHKFMFSDFALALRKRQWLDLALLHAERAVELGPDDAHTHFNVARIHWQSGNEDKARTSLAEALRIMPDMGYAIALLKYMDDTKLGMNAGVPPHDRPVKST

SEQ ID NO: 14133 - DNA, 672 bp, Unknown
  Obtained from environmental sample
  misc_feature (1)..(672): n is a, c, g, or t
gtgggcaagaaagcggtgtatttggcactcgcgatacgtctggacggtcaaaaagaactgttggcnatgtggattgagaagaatgaaggagcaaaattctggacgggtatcttgaacgaactgaaaaacaggggcgttcaggatatattattggctgcggtggacgggcttaccggatttcccgacgccattaacgcggtatttcaaaagaccgaagttcaactgtgcatagtgcacatggttcgtaactctgtaaaatatgttccgtacaaagaccgcaaggcggttacggcggatctcaaggaaatttatcttgccccgtcagaagacgccgcgggtgtcgctttggaaagttttgccgaaaaatgggatcgaaaatatcctgctatctcaaaatcatggcgtaacaggtggactgaaataattccgttcatgaaattttccccagaaatacggaaagcgatttatacaactaacgccattgagtctgttaattacacgctccaacgtaatttgaaaacccgacagtcattccccaatgacgaggccgcgatgaaattaatatatatgatcttgcaaaggatctcaaaaagatggacaatgccgattaggaattggggcgaggcgttacaccaattttcgctcatttacggggatagagtcccgttatga

SEQ ID NO: 14134 - protein, 223 aa, Unknown
  Obtained from environmental sample
  DOMAIN (1)...(202): Transposase, Mutator family
  misc_feature (1)..(223): Xaa is any amino acid
MGKKAVYLALAIRLDGQKELLAMWIEKNEGAKFWTGILNELKNRGVQDILLAAVDGLTGFPDAINAVFQKTEVQLCIVHMVRNSVKYVPYKDRKAVTADLKEIYLAPSEDAAGVALESFAEKWDRKYPAISKSWRNRWTEIIPFMKFSPEIRKAIYTTNAIESVNYTLQRNLKTRQSFPNDEAAMKLIYMILQRISKRWTMPIRNWGEALHQFSLIYGDRVPL

SEQ ID NO: 14135 - DNA, 636 bp, Unknown
  Obtained from environmental sample
  misc_feature (1)..(636): n is a, c, g, or t
gtgggggttttttcattttacgcgaccaaaaccatcaccaccggggaaggcggcatggtcgttacaagggacaaggcaatcgccgaccgcgtaaaaatcatgcgctcgcacggcattgacaggagcgtctgggatcgttatacgaacataaaagcgtcctggtactaccaggtggtagaacccggctataaatacaatataccggatatactttcagccctgggaagggcccagctccgaagggcctacgatctgctttcaatgcgtgaaaaaattgcggctgtttacgatggggcctttcgcgatgacaggcatttcttaattcccccgacaggaaacggagacgcccgccacctttaccccctgcggctgtgccttgaaaacctttcgctaacccgcaacgaatttgccgaaaaactacaggagaggggcataggcatttcggtacactttattccacttcataccatgccctattataaaaaacgctactctctggaagacaatgatctccccgaaacgcttaaaactttcaaccgcacaatttctttgccaatttggcccggcatgacggaaagccaggttgaccaggtaatagcaatggtcaaatcccttgcttctgaatatactaagtaa

SEQ ID NO: 14136 - protein, 211 aa, Unknown
  Obtained from environmental sample
  DOMAIN (1)...(203): DegT/DnrJ/EryC1/StrS aminotransferase family
  misc_feature (1)..(211): Xaa is any amino acid
MGVFSFYATKTITTGEGGMVVTRDKAIADRVKIMRSHGIDRSVWDRYTNIKASWYYQVVEPGYKYNIPDILSALGRAQLRRAYDLLSMREKIAAVYDGAFRDDRHFLIPPTGNGDARHLYPLRLCLENLSLTRNEFAEKLQERGIGISVHFIPLHTMPYYKKRYSLEDNDLPETLKTFNRTISLPIWPGMTESQVDQVIAMVKSLASEYTK

SEQ ID NO: 14137 - DNA, 636 bp, Unknown
  Obtained from environmental sample
  misc_feature (1)..(636): n is a, c, g, or t
atgacaacatttaaatccggcaggctttacattttcggggcggggtttgcggggcaaactcttgccaatgaaataaagtccaaggggatcttcggggaagtagtagcttttctggacgacgacaaggaaaaaatcggccgccgccttgatgacatcccggttttaggccccattcgcgacgtagcccggcttttaaggctccagagcggcgacgaagctataatcgcaataccaggagcgggaagggaatacctaaaagagctttacgtcattctaaaaaacgccggttttgagaggatccgcatcctgccgggcatttcgcagatcatcgagggcgaggcccacctgatccagacccgctccatcgatccgcaagacctgcttggccgtaccccgatagcggtgaacctgcgcgaaagcctgaagtatttaagaggcaagcgtgtcatggttacgggagcgggcggctcaatagggagcgaactctcaaggcagctcctttcagccggtgcgtcaaggctttaccttttcggccacggcgaaaattcatctaccaatcgacagggaactaaggattttgcaggaggaaggcgtccgcgaaaaagccgttctggtacccataattggagaccttaa

SEQ ID NO: 14138 - protein, 211 aa, Unknown
  Obtained from environmental sample
  SIGNAL (1)...(22)
  misc_feature (1)..(211): Xaa is any amino acid
MTTFKSGRLYIFGAGFAGQTLANEIKSKGIFGEVVAFLDDDKEKIGRRLDDIPVLGPIRDVARLLRLQSGDEAIIAIPGAGREYLKELYVILKNAGFERIRILPGISQIIEGEAHLIQTRSIDPQDLLGRTPIAVNLRESLKYLRGKRVMVTGAGGSIGSELSRQLLSAGASRLYLFGHGENSSTNRQGTKDFAGGRRPRKSRSGTHNWRP

SEQ ID NO: 14139 - DNA, 684 bp, Unknown
  Obtained from environmental sample
  misc_feature (1)..(684): n is a, c, g, or t
ttgaattacggcagcggaggctttatggcagatcagcttaatctggttttttttccgtcaagttattcggagctatttaacgcatggaaccgttatgtcaaagcggtaccctacgcgggcggcaccgcattaatccgcgaacagggcgagcctattcttgaactgccgtccattattctctcgcttgaaaagatggaagaaatgagccgcatcagccgttccgaacgttatctggaaattggcgctatggcaaaactcagccagataattgatctgggaaaaattgtaccctccgcgttacggtattgtctggaaagcatagccggcccgcaactgcgcaatatggctactatagggggcaatctttgttttccgggcgggcggctggatagctccgcggcgctgatggccctggacgcccaatacgaactgcgaaacgcccagtcttcccgctggatttccgcaagccgcttttttgcggcgccgggcctctccgccctgaagccccaggaactgctgaccagaatcagaataccgctggatgattgggactattcggcgtataaanaaatcgccggacaggtaagccacagtaaagtagttgtctttctggcaaagaccaaaaaatgttttagcgatataagaatgtttaaaaaccgatacctggggcggacaaagacatga

SEQ ID NO: 14140 - protein, 227 aa, Unknown
  Obtained from environmental sample
  DOMAIN (14)...(181): FAD binding domain in molybdopterin dehydrogenase
  misc_feature (1)..(227): Xaa is any amino acid
MNYGSGGFMADQLNLVFFPSSYSELFNAWNRYVKAVPYAGGTALIREQGEPILELPSIILSLEKMEEMSRISRSERYLEIGAMAKLSQIIDLGKIVPSALRYCLESIAGPQLRNMATIGGNLCFPGGRLDSSAALMALDAQYELRNAQSSRWISASRFFAAPGLSALKPQELLTRIRIPLDDWDYSAYKXIAGQVSHSKVVVFLAKTKKCFSDIRMFKNRYLGRTKT

SEQ ID NO: 14141 - DNA, 432 bp, Unknown
  Obtained from environmental sample
  misc_feature (1)..(432): n is a, c, g, or t
ttggccgagggaaacctgcgccttggcgcctacatccggacggacgaagacggcatcgccagggacagggagcgggtattcgcgttgtttccccgccttgcggagcgtctgtggcagaagggcggcaccctgtccggcggcgagcagcagatgctcgcggtaggccgtgcgctcatgagccggcccgatctgctcatgctggacgaaccctcgctgggtcttgcgccgctcctggtgcgggacatttttcggatcatccttgagatcaaccgggcgggcacgaccgtgctcctcgtggagcagaacgcgctcgccgccctgaccgcggcgcattacgcctatgtgctggaagtgggccgcgtggtcatggaagggccggggcgggaactcctgcgcgatcccaaggtgcgcggggcgtaccttggcgggtaa

SEQ ID NO: 14142 - protein, 143 aa, Unknown
  Obtained from environmental sample
  DOMAIN (3)...(119): ABC transporter
  misc_feature (1)..(143): Xaa is any amino acid
MAEGNLRLGAYIRTDEDGIARDRERVFALFPRLAERLWQKGGTLSGGEQQMLAVGRALMSRPDLLMLDEPSLGLAPLLVRDIFRIILEINRAGTTVLLVEQNALAALTAAHYAYVLEVGRVVMEGPGRELLRDPKVRGAYLGG

SEQ ID NO: 14143 - DNA, 333 bp, Unknown
  Obtained from environmental sample
  misc_feature (1)..(333): n is a, c, g, or t
gtgacctaccacgatccctgtcacctgaagaagtcgctgcatgtcgacaagcagccgcgcgacgtcatccgcgccaatcccggctgcatgctgaaagaaatggcggaaagcgaccgctgctgcggctccggaggcagcttcaccntgcgccactacgactattccaggcagatcggcaagaaaaaacgcgacatgatcgtggaaaccggcgcgcggatcgcggccacggcctgcccggcatgcatgatgcaactcaacgacgccctgtcccaggcgggcgacaaggtacaagtcaagcacagcatcgagttgtatgccgagagcttgaagtga

SEQ ID NO: 14144 - protein, 110 aa, Unknown
  Obtained from environmental sample
  DOMAIN (24)...(86): Cysteine-rich domain
  misc_feature (1)..(110): Xaa is any amino acid
MTYHDPCHLKKSLHVDKQPRDVIRANPGCMLKEMAESDRCCGSGGSFTXRHYDYSRQIGKKKRDMIVETGARIAATACPACMMQLNDALSQAGDKVQVKHSIELYAESLK

SEQ ID NO: 14145 - DNA, 918 bp, Unknown
  Obtained from environmental sample
  misc_feature (1)..(918): n is a, c, g, or t
gtgaacagtttctgtaggcggcaggttatacccaatattcccggtattccctgggatttcttttttggccccagggagcgcggccctgacggacgcggcgagcgcgggcaggaacgggaacgccggactcagggtcttggctcggggataatagtccgcaagaaggacggtatgtattacgcgctgacaaaccatcatgttgtcgatgacactaccgaaatccgcgtggcgacaaaagacggcaaggagtaccccgccgagcttgtcgggaaggacgagcgcaaggatctggcgatgatctcctttaagacaaacgattactaccccctcgcgtcgctgggtgattccgataccgtgcgcgtgggcgactgggcgatcgccatgggcaaccccctgggcgagcagttttccttttccgtgaccatgggaatcgtaagcgcggtaggccgctcaggcgggctgagcggaaatatcaatgattttatacagaccgacgcgccgataaacgcgggcaattcgggcggccctttggttaatatccgcggcgaggttatcggcattaacacatggatagccagtaattctcctggcggcggcaatgtgggattgggcttcgccattcccatcaataacgccaaacgtaccattgacgaatttatcagttccggcgtggtcagctacggctggctgggcgtatcgctcacggaaaccgataaggaggaaaccgccgctcttggcatcgaaggcaaacgcggcgccctcgcgacgcangtttttatcggctcgcccgctgataagggaggcatctgtcccggcgactttatcacccatgttgaccagaaagaggccagggatgtcaacgcgcttaccagattgttcggcgatcctgagccggggaacaccccttcttttcggtaa

SEQ ID NO: 14146 - protein, 305 aa, Unknown
  Obtained from environmental sample
  DOMAIN (30)...(216): Trypsin
  misc_feature (1)..(305): Xaa is any amino acid
MNSFCRRQVIPNIPGIPWDFFFGPRERGPDGRGERGQERERRTQGLGSGIIVRKKDGMYYALTNHHVVDDTTEIRVATKDGKEYPAELVGKDERKDLAMISFKTNDYYPLASLGDSDTVRVGDWAIAMGNPLGEQFSFSVTMGIVSAVGRSGGLSGNINDFIQTDAPINAGNSGGPLVNIRGEVIGINTWIASNSPGGGNVGLGFAIPINNAKRTIDEFISSGVVSYGWLGVSLTETDKEETAALGIEGKRGALATXVFIGSPADKGGICPGDFITHVDQKEARDVNALTRLFGDPEPGNTPSFR

SEQ ID NO: 14147 - DNA, 519 bp, Unknown
  Obtained from environmental sample
  misc_feature (1)..(519): n is a, c, g, or t
atgnaaggctcaaaaacctgcactattgaagtcaactcctttagcaagccagcgggctttacaggtgtccgtcttggctggactgtggttccaaaagagctaaagtattcaaacggcgaaagcgtcagggtggactgggccagaatttccggaacggtttttaacggcgcctccaacatcgcccaggcaggcggtatggcagcgctggacaatgagggccaaaaagaaatgagggccctttgcgatttttacctggaaaacgcgaggcttatcaggggcgttctccaaaagctgggaatcacctgcgttgggggcgacaactccccttacatctgggcctgtttctccggcaaggacagttgggaagtattcacagaaattctggaaaagtgccagattattaccacccccggatcaggctttggtccggcaggtcagtccttcatccgcttttcagcctttgggcaccgcgctgaggtggaagaagcgtgcggaaggctggaacggatgaaaatgtag

SEQ ID NO: 14148 - protein, 172 aa, Unknown
  Obtained from environmental sample
  misc_feature (1)..(172): Xaa is any amino acid
MXGSKTCTIEVNSFSKPAGFTGVRLGWTVVPKELKYSNGESVRVDWARISGTVFNGASNIAQAGGMAALDNEGQKEMRALCDFYLENARLIRGVLQKLGITCVGGDNSPYIWACFSGKDSWEVFTEILEKCQIITTPGSGFGPAGQSFIRFSAFGHRAEVEEACGRLERMKM

SEQ ID NO: 14149 - DNA, 714 bp, Unknown
  Obtained from environmental sample
  misc_feature (1)..(714): n is a, c, g, or t
atgaagcgggccctgagcgaatacattgtcgggggcctcaaaaccaccatcccctttttcctccgtctcctggatatgcccgagttccgccggggcgagttcaccacccgcttcgtcggccgccggcccgagctgttggagtatcgcgacctggcctccgaggccgtgcgcctggcccgcctggccgctgaaatatccgtcctcggttacaaccccttcgtgggcctgggggcctaccgcacggccgacacgccccgtctgccgcgcttcgaactggtgttgccccccttgggcgccgaggtcctgaacgccccttcgccctatgcccggggcgaccgccgggccctcttggaccagttgcgggattcgaagcgggtccacctggtggacaccacctgccgggacgtcacccagtccaacagcggcaaccgtttccgcctggcggaagacgccctggtgggcccctacctggacaactgcggtttcctggccctggagaccggcggcggagcccacttccatgtggccctcctggccaacatgacctaccccttcaccgaggcggcccgctggaacgagttcgcccccaaaaccctaaagcaggtcctggtccgctccaccaacctcctgggctaccgcccccagccggccaacctcatggaaaaaacgcggggatataatcgcccgccacttccacctggtccgctgttttga

SEQ ID NO: 14150 - protein, 237 aa, Unknown
  Obtained from environmental sample
  misc_feature (1)..(237): Xaa is any amino acid
MKRALSEYIVGGLKTTIPFFLRLLDMPEFRRGEFTTRFVGRRPELLEYRDLASEAVRLARLAAEISVLGYNPFVGLGAYRTADTPRLPRFELVLPPLGAEVLNAPSPYARGDRRALLDQLRDSKRVHLVDTTCRDVTQSNSGNRFRLAEDALVGPYLDNCGFLALETGGGAHFHVALLANMTYPFTEAARWNEFAPKTLKQVLVRSTNLLGYRPQPANLMEKTRGYNRPPLPPGPLF

SEQ ID NO: 14151 - DNA, 441 bp, Unknown
  Obtained from environmental sample
  misc_feature (1)..(441): n is a, c, g, or t
ttggccgagaatcgacgctgccctggacgaggcgaacgtaaaccgttttgtccagtcttgcgggaattcggcgggtcaagccaattcattatcattacccacaacaaaaaaaccgtcatcggcgcccagaccctcctgggagttactatggaagaatcaggggtaagcaaggttatttcggtgcgcctggaaaatgtggatcataccggagtctctgtaaaatcagcggaacacgaagaaccgcctcagcaagaactttggaaccaagattctgggaaccaaggttccttgaacgggagttcctttgaggaagaagacgtagagattgaggaaggccgggaactgcctccgggcgtcgatgatccctcccaggtgagcgaagaagaactcaggcccatcaggtctggcagaagggcgttgtcagagtctagtgagatatag

SEQ ID NO: 14152 - protein, 146 aa, Unknown
  Obtained from environmental sample
  misc_feature (1)..(146): Xaa is any amino acid
MAENRRCPGRGERKPFCPVLREFGGSSQFIIITHNKKTVIGAQTLLGVTMEESGVSKVISVRLENVDHTGVSVKSAEHEEPPQQELWNQDSGNQGSLNGSSFEEEDVEIEEGRELPPGVDDPSQVSEEELRPIRSGRRALSESSEI

SEQ ID NO: 14153 - DNA, 405 bp, Unknown
  Obtained from environmental sample
  misc_feature (1)..(405): n is a, c, g, or t
gtgtcccagtgggggacattttttatggcccagctaaaaccgccaaccacatacaatcaacaaatagagaaactgcgttcaagaggctgtcaagttactgatgttcctttttgtaccaaggttctgtcccagattaactattatcggctatcagcctattttttaccctttaggaagcccgatgggaactatttgcctggtacagacttcaatgacatttatcaaatctatgaatttgacagagaactgcggaatctgctctttacccgcattgaggaagtggagatttatttaagggctcaatttgcctattttcattcccataaatatggcgcantcggctatttagaggcggccaatttatacaccatgcatcgccatgaaaaaattaaaggactgatttga

SEQ ID NO: 14154 - protein, 134 aa, Unknown
  Obtained from environmental sample
  DOMAIN (13)...(134): Abi-like protein
  misc_feature (1)..(134): Xaa is any amino acid
MSQWGTFFMAQLKPPTTYNQQIEKLRSRGCQVTDVPFCTKVLSQINYYRLSAYFLPFRKPDGNYLPGTDFNDIYQIYEFDRELRNLLFTRIEEVEIYLRAQFAYFHSHKYGAXGYLEAANLYTMHRHEKIKGLI

SEQ ID NO: 14155 - DNA, 642 bp, Unknown
  Obtained from environmental sample
  misc_feature (1)..(642): n is a, c, g, or t
ttgccagatgaaacttcccgtacgcattggaatgaatataacgataaaataaaaaagcgtattgcaaggtgtattgcagaactagaaaaaaaatacgcattttttatgataatatcatctgtttatcaaaatggcgaatggaatgacgaaagcatagaaatagaaggtacttgctttattggaaaactaaatgatggtttaattattaaaatattgagaaccggaacggaatatgaactaacacaatactcaaatggggattctatagtagcaaccaaatactcagaaacaattaaataccttgatgatttttcagaatttttttttattattaatgaaggcgatatagcaataatcactcatcaaatggagataaagcaacgaaaaaaagcgcaagaagagcagcgccgtaaagaagaagagctacgttatcaagaagaagaacagcgaaataaagagcaatgccgtcgagaagaagagcgatgccgttgggaagaagaacagcgaaaaatagctcaagaaaagcaacgcttcattgaacaatccaaaaagtggaaaaaacaaggcttgtgccaatattgcggcggtaaactcggcggtgtgttcacaaaaaaatgtaagttatgcggaaaagagaattga

SEQ ID NO: 14156 - protein, 213 aa, Unknown
  Obtained from environmental sample
  misc_feature (1)..(213): Xaa is any amino acid
MPDETSRTHWNEYNDKIKKRIARCIAELEKKYAFFMIISSVYQNGEWNDESIEIEGTCFIGKLNDGLIIKILRTGTEYELTQYSNGDSIVATKYSETIKYLDDFSEFFFIINEGDIAIITHQMEIKQRKKAQEEQRRKEEELRYQEEEQRNKEQCRREEERCRWEEEQRKIAQEKQRFIEQSKKWKKQGLCQYCGGKLGGVFTKKCKLCGKEN

SEQ ID NO: 14157 - DNA, 822 bp, Unknown
  Obtained from environmental sample
  misc_feature (1)..(822): n is a, c, g, or t
atggacacggnaacaacaggggttgaggggcttattaaaaaagcctatgaaaaactaaaagcctcagagcccgaaagcgcggcggcgcttcttgatgaagcgttgcacatcgactttgacaacgaggagacaaaatacgctttaaagtcggtcaactggtggcttgaacaactggataaggtgaaagatataaaaaacctctatgagaaaggaggaacaatactttccctatacaagcgatattgggtttttctggacagcattgccggcgactatgatcggtgccaatacgcgatccggcgttatgtgtgttcttacgcccttgaatgtttcaaggatctgcttggaggcggtgaaaaccagcacgatcccgatcttttactgctggtgggccgctgctacaagggaacgggaaattttgaagaggcgctgaaatactttcagcaggcggcgcgcttcaagcgggaggacggcgaggcgctggcggatcttgccgatgtgaacgcccagttgggcgaggtcgatgacgcgaaggccctgttccgcgaggcttttttccttaatccggaaaaaattgagctgagggcaatggaagcggagatgattgtccggcttagggcaatgctgctcagtgaaaaaaaaatgcgtgaggaagaactgcgtgaatggatacctgtatacggcaggctgttgggggtattctccgtaatacgggagttgaagcccattgaattcggcaggctcaaacagtcgattttcaccctggaaacagagtgcagggccaacccggcccaattcgctatcttaagcccaggctgttaa

SEQ ID NO: 14158 - protein, 273 aa, Unknown
  Obtained from environmental sample
  DOMAIN (124)...(157): Tetratricopeptide repeat
  misc_feature (1)..(273): Xaa is any amino acid
MDTXTTGVEGLIKKAYEKLKASEPESAAALLDEALHIDFDNEETKYALKSVNWWLEQLDKVKDIKNLYEKGGTILSLYKRYWVFLDSIAGDYDRCQYAIRRYVCSYALECFKDLLGGGENQHDPDLLLLVGRCYKGTGNFEEALKYFQQAARFKREDGEALADLADVNAQLGEVDDAKALFREAFFLNPEKIELRAMEAEMIVRLRAMLLSEKKMREEELREWIPVYGRLLGVFSVIRELKPIEFGRLKQSIFTLETECRANPAQFAILSPGC

SEQ ID NO: 14159 - DNA, 639 bp, Unknown
  Obtained from environmental sample
  misc_feature (1)..(639): n is a, c, g, or t
atgggtacgccccagcggtttacccagatttcatctgatattgaaaagggtattgtcgcgcaaaagaatttggcaaaaaagcaaaaggctgttttcattgaccgggacggaaccataaacaaattaaacgggtttattacaagaccggaggattttgaactgatcgacggcgcggcggaagcgatgaaaacaataaacagcctcggtttccttgccattgtcattaccaaccagccggtcatagctcgcggcgaattggatttccaaacccttgaactaattcacatgaaaatggaaaccgatttgggcaggaacggcgcttatattgacgatctttttttctgtccccatcacccggataagggattccccggcgagcggcctgaatacaagatcgactgcgattgccgaaaaccaaaaccgggaatgatattagaagcggcgcgcaaatacaacattgatccggcgcaatcatatatggtcggtgatgatattcgggatgtcaacgccggaatcaatgccggttgcaggtccgttttattaacaggcacagcgaatgaaaaaccggcaacgattgccgagggcgttcaacagttttcctgcttgaaagaatttgccgacgcgctggcggcgcaatga

SEQ ID NO: 14160 - protein, 212 aa, Unknown
  Obtained from environmental sample
  misc_feature (1)..(212): Xaa is any amino acid
MGTPQRFTQISSDIEKGIVAQKNLAKKQKAVFIDRDGTINKLNGFITRPEDFELIDGAAEAMKTINSLGFLAIVITNQPVIARGELDFQTLELIHMKMETDLGRNGAYIDDLFFCPHHPDKGFPGERPEYKIDCDCRKPKPGMILEAARKYNIDPAQSYMVGDDIRDVNAGINAGCRSVLLTGTANEKPATIAEGVQQFSCLKEFADALAAQ

SEQ ID NO: 14161 - DNA, 876 bp, Unknown
  Obtained from environmental sample
  misc_feature (1)..(876): n is a, c, g, or t
ttggttatcgcgagtgttcgggacggcagccgcgtccgaggaaaacggaaaaatactcaggcgatcaattctacttcaaaacaggcgacgagatggccgccncttttccccgaataccccgaagctgttgccaatacggtgcgcatagcgcagcgatgtaacgcggacgttccgaaggtcaaggttaaagagctgcctcaatatctgccggaatttgagattcccgccggttttgacagcgcggacgcgtatctgcggcatcttgccgacgagggacttgccaaacgttacgccaaagaaatggcggcaaacggagacaggtggaataagatacgggaacgggccgaatatgaattaaataccattatcagcatgaactttaccggctactttcttatcgtggctgactttatcaactgggccaaggagcgcaacattcccgtggggccgggcagaggctcgggggcaggttccattgtcgcctacgcgctgcgcataaccgatatcgagccccttaagtacaaccttctgtttgagcgctttctcaatccggaacgcatttcaatgcccgactttgacgttgatttcgccaacgagggccggggcgacgttcttcaatacgttacggaaaaatacggaaaggaaagggtagggcagataataacattcgggacccttggcgcaagggcggttatcaaggacgtggcccgcgctttaagcatatcgattcccgaatcagacatgattaccaagctcatcccaaaagatcccaagataacgttgaagaaggctttcgcggggcgagccaaaactgcgggaaactggaaaaagacccacggtacgccgagcttttttgtcctggcccgcaaactttga

SEQ ID NO: 14162 - protein, 291 aa, Unknown
  Obtained from environmental sample
  DOMAIN (20)...(290): Bacterial DNA polymerase III alpha subunit
  misc_feature (1)..(291): Xaa is any amino acid
MVIASVRDGSRVRGKRKNTQAINSTSKQATRWPPLFPEYPEAVANTVRIAQRCNADVPKVKVKELPQYLPEFEIPAGFDSADAYLRHLADEGLAKRYAKEMAANGDRWNKIRERAEYELNTIISMNFTGYFLIVADFINWAKERNIPVGPGRGSGAGSIVAYALRITDIEPLKYNLLFERFLNPERISMPDFDVDFANEGRGDVLQYVTEKYGKERVGQIITFGTLGARAVIKDVARALSISIPESDMITKLIPKDPKITLKKAFAGRAKTAGNWKKTHGTPSFFVLARKL

SEQ ID NO: 14163 - DNA, 705 bp, Unknown
  Obtained from environmental sample
  misc_feature (1)..(705): n is a, c, g, or t
atggacaaaaaccacagtccggaattttcttctcttgaattttacgaggcttttagcgattacaacgatatgatgctccattttgaaagtatatgcgaaagagcttgcatagctgcaaacggaacaaccaaaatagaatatcagggaaaagaaatagattttaaaactccttggcaacgcctcacgctttacgaggcaattcaaaaatatgcgggagtttctgttgagagcctctcggatgaacaacttaaagccgagcttgaaaaaagacatatagaactaaaaggctcttggtcaaagggcagggcaatactagcactctttgaagagacctgcgaacatgagcttattcagccaacaataataaaagacatgccaaaagaaagcgcaccgctttgcaaagcgcaccgcagcaatccagatttaattgagcaatttgaaccatacataaatggctgggaaattggcaacgcatatagcgagttaaacgaccctgttttgcagaggcagcttttggaagaacaagttgagcgcgggcgcggcggcnaagacgaaacacaccccatggacgaaaattttttgcactccattgaatgtggaatgccgccnactggaggcgtgggcattggcatagatcgcctagttatgctttttacaaatcangcaactataagggatgtgcagttattccccttgatgaaatag

SEQ ID NO: 14164 - protein, 234 aa, Unknown
  Obtained from environmental sample
  DOMAIN (1)...(234): tRNA synthetases class II (D, K and N)
  misc_feature (1)..(234): Xaa is any amino acid
MDKNHSPEFSSLEFYEAFSDYNDMMLHFESICERACIAANGTTKIEYQGKEIDFKTPWQRLTLYEAIQKYAGVSVESLSDEQLKAELEKRHIELKGSWSKGRAILALFEETCEHELIQPTIIKDMPKESAPLCKAHRSNPDLIEQFEPYINGWEIGNAYSELNDPVLQRQLLEEQVERGRGGXDETHPMDENFLHSIECGMPPTGGVGIGIDRLVMLFTNXATIRDVQLFPLMK

SEQ ID NO: 14165 - DNA, 309 bp, Unknown
  Obtained from environmental sample
  misc_feature (1)..(309): n is a, c, g, or t
atggccgaggcgggaaaatccgttgttgaccgtttgaacggcaaacttctctacatcaacgtgatgaaccgcctttcggtggattgcgactgcaacggcaaccccaccgcgccggatatgcacgatatcggcatcctctcatcccttgaccccgtggcgctcgaccaggcctgcgttgaccttgtatacgccgcccctgacggaaaaagcctgatacagcggattgaatcccgcaacggagtccgtaccatcaaccacgcaacggaaatcgggttaggcagtaaaacatacgaactggtaaaattgtaa

SEQ ID NO: 14166 - protein, 102 aa, Unknown
  Obtained from environmental sample
  misc_feature (1)..(102): Xaa is any amino acid
MAEAGKSVVDRLNGKLLYINVMNRLSVDCDCNGNPTAPDMHDIGILSSLDPVALDQACVDLVYAAPDGKSLIQRIESRNGVRTINHATEIGLGSKTYELVKL

SEQ ID NO: 14167 - DNA, 507 bp, Unknown
  Obtained from environmental sample
  misc_feature (1)..(507): n is a, c, g, or t
atgatggaaataataaaaagggaactgatttatctctggtactacttctcgatccagtttgaacaaattgtctggtactggttattcggaatggtattaggttcccttatttccgtattcggtaaagaaaaaatccacgcgctttttgtaaaaatgcgtgacacgagaatgggtgtcttcggcattatccccgcttcccttttgggcatcgcttcgccgctgtgcatgtacggaacaatccccattgccgcttccttcgccgaanaaggcatggcggaagaatggatcgccgcgtttgtaatgagttccattctgcttaacccgcagttgcttttctacagcgccgctctgggcgtacccgcccttggtatacgctttgtctgctgttttctgtgcggcgcggcggcggggctttgtgtgcgcctgtttttcaagaaagaaccgtttttcagggttacccaaattgaagaaatggcaaaccacgacaccgaccaaatccccttatag

SEQ ID NO: 14168 - protein, 168 aa, Unknown
  Obtained from environmental sample
  misc_feature (1)..(168): Xaa is any amino acid
MMEIIKRELIYLWYYFSIQFEQIVWYWLFGMVLGSLISVFGKEKIHALFVKMRDTRMGVFGIIPASLLGIASPLCMYGTIPIAASFAEXGMAEEWIAAFVMSSILLNPQLLFYSAALGVPALGIRFVCCFLCGAAAGLCVRLFFKKEPFFRVTQIEEMANHDTDQIPL

SEQ ID NO: 14169 - DNA, 684 bp, Unknown
  Obtained from environmental sample
  misc_feature (1)..(684): n is a, c, g, or t
ttgagggattgcaaaattcatttgatagatttaaagaacgaaaagaaaaatgaaactatgattttcataacagagggcgatagcgcaagcggctcaataacaacggctcgcgatgtgctaacgcaagcggtgtttagcctgcggggcaagccgctcaacacctatggagtagggcgcaaagtggtttatgaaaacgaggaattcaatcttttgcaacacgcccttgatattgaaaacggcttggaaaacctgcgctacaacaaggtaattatagcaaccgatgccgatgttgacggtatgcacataaggcttttgatggtgtctttctttttgcagtttttcccagagcttgtggaacaggagcatctttacattttgcaaactccgctgttcagggtgcgcaataaaaaagaaaccctctattgctacaacgagcaagagcgcgatacggcgcaggcaaagctaggcgcacaagcagaaacaacccgcttcaaagggcttggcgaaatagacccagaagaattcggtttgttcataggcgaagacatgaggctggaaagcgtgattatgccgcaagaggcttctaccaataaaatgcttgaatattatatgggaaacaacacggctgcccgtaccgagcacgttataaacaatctgagaacagaagccgtggctgatttgtga

SEQ ID NO: 14170 - protein, 227 aa, Unknown
  Obtained from environmental sample
  misc_feature (1)..(227): Xaa is any amino acid
MRDCKIHLIDLKNEKKNETMIFITEGDSASGSITTARDVLTQAVFSLRGKPLNTYGVGRKVVYENEEFNLLQHALDIENGLENLRYNKVIIATDADVDGMHIRLLMVSFFLQFFPELVEQEHLYILQTPLFRVRNKKETLYCYNEQERDTAQAKLGAQAETTRFKGLGEIDPEEFGLFIGEDMRLESVIMPQEASTNKMLEYYMGNNTAARTEHVINNLRTEAVADL

SEQ ID NO: 14171 - DNA, 501 bp, Unknown
  Obtained from environmental sample
  misc_feature (1)..(501): n is a, c, g, or t
ttgcgggcggagcgggaacacaaaagaagcgggcaaaaaatttatggttaccatccccgccggcgtagaaaacggcaagcgcgtgtaattcccaaacagggcgacgcaggtcccaatggcggaccgccgggggacttatacgtttttatcagagtaaaaccgcacgaatattttgaacgccaagccgctgatctttactgcgccgttcccatttcgataactcaagccgctcttggcgcggacattcacgttacaacgcttgataataagacaataaaagtaaaagtaccggcgggtattcaaaacggaaaaatgctccgtatccacaacgaaggcgtgccgatgggtaatcaaagaggcaatctctacatcaaactttttgtgcaaatccccgaaaaactttcccgcaaaggcaaagaactccttgaagaacttgccaaaattgagggacaagacgatagccctaaacctattccgctatcgcagcttggagatgtgtaa

SEQ ID NO: 14172 - protein, 166 aa, Unknown
  Obtained from environmental sample
  DOMAIN (26)...(146): DnaJ C terminal region
  misc_feature (1)..(166): Xaa is any amino acid
MRAEREHKRSGQKIYGYHPRRRRKRQARVIPKQGDAGPNGGPPGDLYVFIRVKPHEYFERQAADLYCAVPISITQAALGADIHVTTLDNKTIKVKVPAGIQNGKMLRIHNEGVPMGNQRGNLYIKLFVQIPEKLSRKGKELLEELAKIEGQDDSPKPIPLSQLGDV

SEQ ID NO: 14173 - DNA, 345 bp, Unknown
  Obtained from environmental sample
  misc_feature (1)..(345): n is a, c, g, or t
atggctctgcaaattgaaagagccggcggcgtttacgcgcttaagaacattgaaggctccggcaacgttacgatttcaatggaagaattcatgaagcaatgcagggattcggacattatcatttacggcagttcgccgcaatactgtccggataaaactttcctgttggaaacagaaccgctaatggcggaattccgcgcgttcaaaaataataatatctatatttatgatctgggttattatatgaacaacgcgaaagtagttgagaaatttgaggatatggtttcaatatttcatcctgagctgtttccggaacgtgaattggttatgtacaaaaaattgtaa

SEQ ID NO: 14174 - protein, 114 aa, Unknown
  Obtained from environmental sample
  misc_feature (1)..(114): Xaa is any amino acid
MALQIERAGGVYALKNIEGSGNVTISMEEFMKQCRDSDIIIYGSSPQYCPDKTFLLETEPLMAEFRAFKNNNIYIYDLGYYMNNAKVVEKFEDMVSIFHPELFPERELVMYKKL

SEQ ID NO: 14175 - DNA, 789 bp, Unknown
  Obtained from environmental sample
  misc_feature (1)..(789): n is a, c, g, or t
ttgcccccatcatggaaaggttttaatctgctcaatatgttttattcaggaggacaggagacagatacgtcctttaatgagaaagaatttaaaatgatatcagactggggatttaattttgtaagaataccgattgactacaggatattaataaggtcaaacaactggaataaaataaatgagtccgcgatgcgccgtctggacaaagccgttgaatacggaattaagtatgatatacatatttgcttaaatttacacagagctcccggatatacggtggcttctccggcggaaacctcaaacctttggactcaggaaaggcctcaggaggcttttgcgcgtatatgggaatttattgccgagcgttataaaaatgtcccgaatgagtatcttagttttaattttttaaatgaaccttcaggtgttgatgaaaaaacgtatgctgttgtgattgaaaaagcggcagatgcagtacgtatgcatagtcccggccgccttttaatagcagatggtcttgatttcggcggcattccgtcttatttaataaaggaacttggtatagcgcaggcaacaaggggttacgcgcctttttcgcttactcattataaggctgattgggtagaagggtctgacaatttacctttgcccgcatggccggcttttttactgccaaaatatctttacgggctccacaaaaatgatgttccaagatcaacattcagaatagaacatgattttaatatagcatataaccttgatgtcaatgtcggatctcggccctcgccataa

SEQ ID NO: 14176 - protein, 262 aa, Unknown
  Obtained from environmental sample
  DOMAIN (8)...(261): Cellulase (glycosyl hydrolase family 5)
  misc_feature (1)..(262): Xaa is any amino acid
MPPSWKGFNLLNMFYSGGQETDTSFNEKEFKMISDWGFNFVRIPIDYRILIRSNNWNKINESAMRRLDKAVEYGIKYDIHICLNLHRAPGYTVASPAETSNLWTQERPQEAFARIWEFIAERYKNVPNEYLSFNFLNEPSGVDEKTYAVVIEKAADAVRMHSPGRLLIADGLDFGGIPSYLIKELGIAQATRGYAPFSLTHYKADWVEGSDNLPLPAWPAFLLPKYLYGLHKNDVPRSTFRIEHDFNIAYNLDVNVGSRPSP

SEQ ID NO: 14177 - DNA, 600 bp, Unknown
  Obtained from environmental sample
  misc_feature (1)..(600): n is a, c, g, or t
atgacacttgaacggcccgtactggccattgccacccttgtaattttcccgcttgcaatcgcgctggcaaaaaaactgggaagcccctttacggcatccgtgcccttaggtcctccgggtggggggggtgcctttaagccgccctataatttaagggggataattaatacgctgtacgcgcttgaatattgcggcatctttctgctttttatcgcggcttcaggccccgttatgcaaatttccgaaacggtatggctgaaccgcggcgcggacattctttttgtccttgacgtcagcccgagcatggcggcgattgacatggacgggtcaaaccggttcaacgccgcccgcaggctgttaaaggatttcgcgggaagccggtcttccgacggtataggcttagtcgtggtgggagacgacgcggccctgttgatcccgccgactaccgaccgcgagctcctcatggcgcggctggaaaatttgcgtatcggcgaaatgggcaacggaaccgcgctcggtatggggatcgcgattgccgcttaccacctggaaaaatccaaagcgccgcgaaaggccgtagtgctatcccggccaatctga

SEQ ID NO: 14178 - protein, 199 aa, Unknown
  Obtained from environmental sample
  SIGNAL (1)...(23)
  misc_feature (1)..(199): Xaa is any amino acid
MTLERPVLAIATLVIFPLAIALAKKLGSPFTASVPLGPPGGGGAFKPPYNLRGIINTLYALEYCGIFLLFIAASGPVMQISETVWLNRGADILFVLDVSPSMAAIDMDGSNRFNAARRLLKDFAGSRSSDGIGLVVVGDDAALLIPPTTDRELLMARLENLRIGEMGNGTALGMGIAIAAYHLEKSKAPRKAVVLSRPI

SEQ ID NO: 14179 - DNA, 522 bp, Unknown
  Obtained from environmental sample
  misc_feature (1)..(522): n is a, c, g, or t
ttgatcagatcggcacgagtcctttacatacctttggtcacctttgttgatgttccgggatttttgccaggcacagaccaagaatacaacggcataattaggcacggtgcaaaattgctctatgcttatgcagaggcaaccgttccaaagctcacggttattttgagaaaaagttatggtggcgcatatatttgcatgtgttccagacatttgggtgcagattttgttgcagcttggccaggcgcagaaatagcggttatgggaccaggtggtgcagtgaacatagtgttcaaaaaagatattgatgcggttaaagaagctggcggcgatgcagatgcgaaaagggaagagtgcaaacaggaatatatagacnagtttgcaaaccccactattgcagcatctcgcggttatgttgacgatgttattgagccttcaaaaactcgcggaaattcttttggctcatctaagagctttggcaaccaaaccaccaaaaaggccccaagaaaaaagcaggaaaaataa

SEQ ID NO: 14180 - protein, 173 aa, Unknown
  Obtained from environmental sample
  DOMAIN (1)...(173): Carboxyl transferase domain
  misc_feature (1)..(173): Xaa is any amino acid
MIRSARVLYIPLVTFVDVPGFLPGTDQEYNGIIRHGAKLLYAYAEATVPKLTVILRKSYGGAYICMCSRHLGADFVAAWPGAEIAVMGPGGAVNIVFKKDIDAVKEAGGDADAKREECKQEYIDXFANPTIAASRGYVDDVIEPSKTRGNSFGSSKSFGNQTTKKAPRKKQEK

SEQ ID NO: 14181 - DNA, 906 bp, Unknown
  Obtained from environmental sample
  misc_feature (1)..(906): n is a, c, g, or t
ttgaagaaattacaccgttattcactcgatgaaataagggaaaattgggcgggactttacagggtttttaatctttttaaccgagaaaacaggctctacaaaatcgtaggtaaccacgacgataaacttttgtttttacggaacacatcatatcccatacatacattaataaaaattgaaaccggagttattccggcttatgtgtaccacggtcatcagttatcatcattttacgtcaaatttaactggttattgggattgttagtccgttttatcctaaaaccctttggcataaaaaatataacggactcccgaagccccttaaagcgttttcagatagagaaaatggcttatgctttttctataaaaaacaactgcctgtcaataatcgggcatacccaccgcgccctctttgaatcattgggacgttttgattacattaaatttgaaatagaaagactctgctacgactatccctcctcttcgggagaagaccgtaaccgcatagaaaacgaagttaccgccctgcggaaagaattaggcaaattaaaacgaaaagaacgccgcgacgttctgcgccaaagcctctacggggacgaacttcccgtcccatgcctgttcaattcaggatgcgccgttgggaagaaaggcttgactgccatagaaatgacaaacaaagacatcgctctagtttactggttcaccgaaggaaaaagcaaaaaattcgtcacacgcggcggttacgaaattgaaaatatcccttcaagaccgtatcacaaggccgtattgaatcataataaactggattacgtcttcgcccgcattaaattactcggcaaaccggaaatcttatcgttattcttttttttctaccacgaacccacacgaaccagcaccgaaccttag

SEQ ID NO: 14182 - protein, 301 aa, Unknown
  Obtained from environmental sample
  misc_feature (1)..(301): Xaa is any amino acid
MKKLHRYSLDEIRENWAGLYRVFNLFNRENRLYKIVGNHDDKLLFLRNTSYPIHTLIKIETGVIPAYVYHGHQLSSFYVKFNWLLGLLVRFILKPFGIKNITDSRSPLKRFQIEKMAYAFSIKNNCLSIIGHTHRALFESLGRFDYIKFEIERLCYDYPSSSGEDRNRIENEVTALRKELGKLKRKERRDVLRQSLYGDELPVPCLFNSGCAVGKKGLTAIEMTNKDIALVYWFTEGKSKKFVTRGGYEIENIPSRPYHKAVLNHNKLDYVFARIKLLGKPEILSLFFFFYHEPTRTSTEP

SEQ ID NO: 14183 - DNA, 756 bp, Unknown
  Obtained from environmental sample
  misc_feature (1)..(756): n is a, c, g, or t
ttgtgcgggagttgcggcaagaaaagtaacgatggcgaagaggcaaaaaagatactggcccggttgttgacggaaattctgttaaaagcaggtccggcaaaacatattgaagaagggaagcttttcttagaaaagccgctggggattattctgcttttgggggtaaacggcgtaggtaaaaccacaaccgcggcgaaactggcggagcgttacaggacgcttgaaaaacgccggcctgttctggccgccgccgatactttccgggccgccgcgattgatcagcttaaaatacacggcgagcgtcttggagtgcgggttgtggcccatcagcacggcggcgatcccgctgcggtaatctacgacgcgattgaagccgccaactctggcggcggtgatctcataatcgcggatacggcggggaggatgcacacaaaatccgccctggtcgaagagcttaaaaagataaaccgtgtgattgagtcaaaagcctcaggctgctgttatatcaagtacctggtgctggatgccacaaccggcagaaacgcccttgcccaggcggagatattcaaagaagcggtaatgccggacgggataatactggcaaaatacgattccagcgccaggggagggacggtcttttcccttgcggaagatttggggctccccgtgatctttctctgtaccggagaaaaatacggggatatcgttccgtttgatccccaacgttatgcggaagaattcatcggccttgagtaa

SEQ ID NO: 14184 - protein, 251 aa, Unknown
  Obtained from environmental sample
  DOMAIN (46)...(249): SRP54-type protein, GTPase domain
  misc_feature (1)..(251): Xaa is any amino acid
MCGSCGKKSNDGEEAKKILARLLTEILLKAGPAKHIEEGKLFLEKPLGIILLLGVNGVGKTTTAAKLAERYRTLEKRRPVLAAADTFRAAAIDQLKIHGERLGVRVVAHQHGGDPAAVIYDAIEAANSGGGDLIIADTAGRMHTKSALVEELKKINRVIESKASGCCYIKYLVLDATTGRNALAQAEIFKEAVMPDGIILAKYDSSARGGTVFSLAEDLGLPVIFLCTGEKYGDIVPFDPQRYAEEFIGLE

SEQ ID NO: 14185 - DNA, 660 bp, Unknown
  Obtained from environmental sample
  misc_feature (1)..(660): n is a, c, g, or t
ttggcgacttggagggggcgtcccttcggcgtgctgatgctcgcgaccggacggagaccacgctcggacagctcttctacttcttcgagaaagccgtggcgctctccggttacatactgcgcgtcaaccccttcgaccagcccgggtggaggcctacaagaagaatatgttcgcgcttctcggcaaggtcgggtacgaaaagcaggcgcaggatctctcgaccagaacgaaggagatctcaatatgaagtcgtaccgcaaagagctgaccttcaacaccaaacaccggcgcgactacataaacatcacgccgcaggtgattgacgcgctacgcgaaagcggtatccgcgaggggatgtgcctcgtaaacgcgatgcacatcaccgccagcgtctacatcaacgacgacgaacgggggctgctaaaagatatcgacgaatggcttgaggggctggcccctcacgagccgaccgaccgctaccgccacaacggcatggaggacaacggcgacgcccacctgaaacgccaagtcatgggacgcgaggtcgtgattgccgtgaccggcggaaagctggacttcggcccctgggagcagatattctacggggaattcgacgggcgcagggataagcgggtgctgattaagatcatcggcgagtaa

SEQ ID NO: 14186 - protein, 219 aa, Unknown
  Obtained from environmental sample
  DOMAIN (99)...(217): Uncharacterised protein family UPF0047
  misc_feature (1)..(219): Xaa is any amino acid
MATWRGRPFGVLMLATGRRPRSDSSSTSSRKPWRSPVTYCASTPSTSPGGGLQEEYVRASRQGRVRKAGAGSLDQNEGDLNMKSYRKELTFNTKHRRDYINITPQVIDALRESGIREGMCLVNAMHITASVYINDDERGLLKDIDEWLEGLAPHEPTDRYRHNGMEDNGDAHLKRQVMGREVVIAVTGGKLDFGPWEQIFYGEFDGRRDKRVLIKIIGE

SEQ ID NO: 14187 - DNA, 315 bp, Unknown
  Obtained from environmental sample
  misc_feature (1)..(315): n is a, c, g, or t
ttggagggggcgtcccttcggcgtgctgatgctcgcgaccggacggagaccacgctcggacagctcttctacttcttcgagaaagccgtggcgctctccggttacatactgcgcgtcaaccccttcgaccagcccgggtggaggcctacaagaagaatatgttcgcgcttctcggcaaggtcgggtacgaaaagcaggcgcaggatctctcgaccagaacgaaggagatctcaatatgaagtcgtaccgcaaagagctgaccttcaacaccaaacaccggcgcgactacataaacatcacgccgcaggtgattga

SEQ ID NO: 14188 - protein, 104 aa, Unknown
  Obtained from environmental sample
  misc_feature (1)..(104): Xaa is any amino acid
MEGASLRRADARDRTETTLGQLFYFFEKAVALSGYILRVNPFDQPGWRPTRRICSRFSARSGTKSRRRISRPERRRSQYEVVPQRADLQHQTPARLHKHHAAGD

SEQ ID NO: 14189 - DNA, 840 bp, Unknown
  Obtained from environmental sample
  misc_feature (1)..(840): n is a, c, g, or t
ttgggcttggcagcatcgccgaccttcccaaactggatgaaagcgaggcagagcgttntgagcttcaaggagagcgctaatatcgccccaatgaggctgcaggtattccttgcccacgcgggcgtcgcttcgcgaagaacagcggagacatttattgcccagggaaaagtctcagtcaatggaaataatgtaactactcccggttttaaggtaatgtctggcgatgaagtgcgtttcgatggaaaaatcgtcaagatcgaaagccgctttctgtacctggccttaaacaagccgccgctttatatttgcagctcaagcgatcctcagggaaggccgcttgcgctggatttgctcccggcttacaggcaaagcgttaccggggaagcagacaacccctcctctatacggctttacaatgttggccggctggattatcgttctacagggctcattatttttacaaatgacggggaatttgccgcccgtcttggccatcctagcgcccaaattgaaaaagaataccttgttgaatctacgtctcctatccctgacagggtagtggaagaatttgaaagggggcttattatcgaggggattctttacagggcaaggtgcatagaaaggacaggcagaaaatccctaagggtggtgcttattgaaggcaaaaacagggaaatccgcagggttttctcccattttcacctgcacccgcagctgctgcaaagggttcgtatagggccggtaagccttggctcgctaaaagaaggggattcgcggccgctgacagcggaagaattggctaaattaaggagcaactcgtccaatctgatcaatggttaa

SEQ ID NO: 14190 - protein, 279 aa, Unknown
  Obtained from environmental sample
  DOMAIN (91)...(232): RNA pseudouridylate synthase
  misc_feature (1)..(279): Xaa is any amino acid
MGLAASPTFPNWMKARQSVXSFKESANIAPMRLQVFLAHAGVASRRTAETFIAQGKVSVNGNNVTTPGFKVMSGDEVRFDGKIVKIESRFLYLALNKPPLYICSSSDPQGRPLALDLLPAYRQSVTGEADNPSSIRLYNVGRLDYRSTGLIIFTNDGEFAARLGHPSAQIEKEYLVESTSPIPDRVVEEFERGLIIEGILYRARCIERTGRKSLRVVLIEGKNREIRRVFSHFHLHPQLLQRVRIGPVSLGSLKEGDSRPLTAEELAKLRSNSSNLING

SEQ ID NO: 14191 - DNA, 855 bp, Unknown
  Obtained from environmental sample
  misc_feature (1)..(855): n is a, c, g, or t
atgatagaccgccttacccttaatccaaaacgagtggaagacatggcgcatggcgtagaagaaattgcctcttttgcagaccctcttggcaaagttctggaacatagagctttaaaaaacggcatagacattagccgcattagcgttccgcttggggcaattttctttatttacgaaagccgccccaatgttacgatagatggagccgccttgtgctttaaagccggcaatgccgttattttgcgcggcggcaaagaatccgtgcattcaagctcttttttggcaaaattattttgcgaggcaattgcagaagaaggtatttcaaaaaacgctgttcaatacatagataacccagaccgtgatttgctcggttgcttgctaaagcagaataattatttggatttggttatacccagaggtggagagggtttgataagggctgtgagcgagcagtctaaaattccggttataaagcatttcaatggaatttgccatgtttatatagacaaaagcgcagatttggaaaaagccgcaagtattttatataacgcaaaagtacaacgtccaagcgtatgcaatgccgcagaaaccgtgcttttccacaagggattaccggagcaagcagtggagaaaattttagctcccttaaaagaagcaggcgtgaaatttcattacgataaatttggaatagaatatttggatttgcaaatttcagtgggctatgtggacggagttaaggaggcttgcgaacacatagagaaatacggcagccatcacacagatgcaatagttgcagaagatggtgaggcattggcatattttgcaaacaatgtgatagctccagcgttatgctga

SEQ ID NO: 14192 - protein, 284 aa, Unknown
  Obtained from environmental sample
  misc_feature (1)..(284): Xaa is any amino acid
MIDRLTLNPKRVEDMAHGVEEIASFADPLGKVLEHRALKNGIDISRISVPLGAIFFIYESRPNVTIDGAALCFKAGNAVILRGGKESVHSSSFLAKLFCEAIAEEGISKNAVQYIDNPDRDLLGCLLKQNNYLDLVIPRGGEGLIRAVSEQSKIPVIKHFNGICHVYIDKSADLEKAASILYNAKVQRPSVCNAAETVLFHKGLPEQAVEKILAPLKEAGVKFHYDKFGIEYLDLQISVGYVDGVKEACEHIEKYGSHHTDAIVAEDGEALAYFANNVIAPALC

SEQ ID NO: 14193 - DNA, 816 bp, Unknown
  Obtained from environmental sample
  misc_feature (1)..(816): n is a, c, g, or t
atgcgcgtttttgtacctgttcccatgaaacacgttaaaggaaaagtagtgcttattaccggcggggcatccggcataggccggctgatggccattgattttgcccgccggggggccctagtggcggtatgggacctgaacgcgtcggccctgcaagcgtttgaagcggaggccgccgggcaggggctttcggttaccggcatggtgtgcgacgttgccgacaaagccgccgtgtatgcgcaggccaaagttctggcgcaaaagctggggccggtggatatcctgatcaacaacgcgggggtcgcgtcgggcaaaaccctgctggaaacgccggacgaaaaaatcgagaaaaccatgcaggtgaatgtgctggccctgttctggacgactaaggcttttctgccttcgatgatcgagcggaaaagcggccacatcgttaccatctcttcggcggcgggcattattggcgtgcggggcctggcggattactgcgccagcaaattcgccgccgtgggccttgacgaatccctccgcatggaactgaagcgcattaaaagcccggtacgcactacggtcatttgccccttctttattgacacgggaatgtttaagggcgttaagacgcggttccccttattgcttcccatcctccagcccgatcatgcggtgaagcgcattgttaaagcggtgttgagaaacaggaaacgccttatcatgccgccctttgccaattcggtgcttatcctcaggctgttcccgcttggattgctggacgcggtccgccgggtttttcggcatcaaccatgctatggatga

SEQ ID NO: 14194 - protein, 271 aa, Unknown
  Obtained from environmental sample
  DOMAIN (15)...(182): short chain dehydrogenase
  misc_feature (1)..(271): Xaa is any amino acid
MRVFVPVPMKHVKGKVVLITGGASGIGRLMAIDFARRGALVAVWDLNASALQAFEAEAAGQGLSVTGMVCDVADKAAVYAQAKVLAQKLGPVDILINNAGVASGKTLLETPDEKIEKTMQVNVLALFWTTKAFLPSMIERKSGHIVTISSAAGIIGVRGLADYCASKFAAVGLDESLRMELKRIKSPVRTTVICPFFIDTGMFKGVKTRFPLLLPILQPDHAVKRIVKAVLRNRKRLIMPPFANSVLILRLFPLGLLDAVRRVFRHQPCYG

SEQ ID NO: 14195 - DNA, 816 bp, Unknown
  Obtained from environmental sample
  misc_feature (1)..(816): n is a, c, g, or t
atgcgtcaaaaccaaaggagaggtattatggtacggtcactttactcaggaatcagcggactccgcacacaccaggtcggtatggacgtaacggccaacaacatctccaacgtcaacaccgtggcgttcaaagccggccgcgcgacgtttaaggaatctatggttcagatgctgcaaggcccctcgcgccccgccggtaaccagggcggcaggaacccgctgcagatcgggctcggcgtggcggtcggctccatcgacaccatgctcaggcagggcaatatgcagacgaccgggcagatcacggatatcgcgcttgaaggcagggcgtatctcgctttctctaacggcaccggcacgtactacagcagaaacggcggtctccagttggacgatcagggacgccttacatcgccgaccaacgggttcaggctgcaagggaagatggcgcagccggacgggacgtttacggggaaagagatgatcagcgacatcaggattccgtggggcgagaaatcgccggctaaggctacggagaatgtgaagttcgggtgtaacttgaacagcgactcggaagcgctcgggacggttacgcatactaataggttcttaacgaaagcaagcgtattgaatggcggtacatacgggaatatgtacgacagcgcgtacggacccagccgcgggaagctgacggacctctttgacgaatacggaaatagccttggggttaaagagggcgataccatttcgttctccgtgggcgatacggggtggccatatttagtttttaagtggaaaagtatccgcctctttgattaa

SEQ ID NO: 14196 - protein, 271 aa, Unknown
  Obtained from environmental sample
  DOMAIN (14)...(44): Flagella basal body rod protein
  misc_feature (1)..(271): Xaa is any amino acid
MRQNQRRGIMVRSLYSGISGLRTHQVGMDVTANNISNVNTVAFKAGRATFKESMVQMLQGPSRPAGNQGGRNPLQIGLGVAVGSIDTMLRQGNMQTTGQITDIALEGRAYLAFSNGTGTYYSRNGGLQLDDQGRLTSPTNGFRLQGKMAQPDGTFTGKEMISDIRIPWGEKSPAKATENVKFGCNLNSDSEALGTVTHTNRFLTKASVLNGGTYGNMYDSAYGPSRGKLTDLFDEYGNSLGVKEGDTISFSVGDTGWPYLVFKWKSIRLFD

SEQ ID NO: 14197 - DNA, 366 bp, Unknown
  Obtained from environmental sample
  misc_feature (1)..(366): n is a, c, g, or t
ttgaccggcagcatgggcttcatcaccgacaggatcgagaacggcatcgcggtgcccaccggtttcgcgcccgtgagaatgtcaagatcaccactggcacggcaaacgatgacgcagtcggcgccgccgagtacggcagcgctgcgaccgccaacaccagccgaggcacgggcgtcagcgccttcatcaccaacttcaaacccagcggcggcgcgctgctcagcggcggctggggcagcagtgatgccaccgcggccggcacggccggcgctgcgggcgtcgtgtatgtcagggcctacaacgaccagcccaccggctacaccggcgccaacgccatcaaccaggacaactacaaagtctggctga

SEQ ID NO: 14198 - protein, 121 aa, Unknown
  Obtained from environmental sample
  misc_feature (1)..(121): Xaa is any amino acid
MTGSMGFITDRIENGIAVPTGFAPVRMSRSPLARQTMTQSAPPSTAALRPPTPAEARASAPSSPTSNPAAARCSAAAGAAVMPPRPARPALRASCMSGPTTTSPPATPAPTPSTRTTTKSG

SEQ ID NO: 14199 - DNA, 816 bp, Unknown
  Obtained from environmental sample
  misc_feature (1)..(816): n is a, c, g, or t
ttggccgagttccacatctcctgcgccaacgcttcgttgagtacatggtggagtggagaaggcgtttatatttggtacggagatattgaggtagtcaccaacaatttaacagtcaatcctgtaaacatctccaacgctactattgccccaatcccggctcagccctataccggtggcccaatccgaccgcaacttaccgtaacctacccatcgggtactgcgaacaacctgcagcgggggtgggattacagtgaagattgggctaataacatcaatgtgggagcaaacgccgaagtaaccataaccggactaaacaactttaccggcaccaaaaaacagacattcaccattaacgtcgcgcccatagaggccgtcaatattaacattaccgctcctgtgacgagcgcgactccagcaacagcggcaacagtgcaagcgggttctccttttaccgcaggggcagtaacatggagtccgaatgataatacgttccaagccggcaaagaatacaccgcatcggtgacgctgacgagaactaacgcaaactataccttcaccggtttgaatgcttctagtgttaaagtaaacagtgctgccgccacggtatcaaacaatacaggcgataaaataaccgtgtcgtacaaattcccgacaacgactgcaaaaacagttacgagtataacgatcgcaacatcgccaaaactggaatacacccacggcgaggcgcttgatttatcagcacttgtggtaaagctgaactatagtgacagcacaagcgataatgtggctttcacggcctttggtacaaataattaa

SEQ ID NO: 14200 - protein, 271 aa, Unknown
  Obtained from environmental sample
  misc_feature (1)..(271): Xaa is any amino acid
MAEFHISCANASLSTWWSGEGVYIWYGDIEVVTNNLTVNPVNISNATIAPIPAQPYTGGPIRPQLTVTYPSGTANNLQRGWDYSEDWANNINVGANAEVTITGLNNFTGTKKQTFTINVAPIEAVNINITAPVTSATPATAATVQAGSPFTAGAVTWSPNDNTFQAGKEYTASVTLTRTNANYTFTGLNASSVKVNSAAATVSNNTGDKITVSYKFPTTTAKTVTSITIATSPKLEYTHGEALDLSALVVKLNYSDSTSDNVAFTAFGTNN

SEQ ID NO: 14201 - DNA, 912 bp, Unknown
  Obtained from environmental sample
  misc_feature (1)..(912): n is a, c, g, or t
ttgtatgacgctgtttcggatgaaatgggttttttactggccggtatccgcgagaactcgttgctaaatgttttaaacgtttcaaatatcgaaagcatgctgattaacggccaggggattgtactctcggcccaggaaaaatcaattatcagcaaccgacttgcgaatagcgatcttctaactttagttttggataataaccggtacgcccgttcggcggttatcggagaaggtaagggacgaagatctgtgttgtttaaacgcacggtggctaatgacgtagtatttatagttatttccgattatttaagtagtatagggcttgcccagataagtaattttgccgttaagtgcctgattgtggcggtaatcggcatcattgtctcggggttagtttccgtttggttatcccggcatctctccgccgctgttattgatcttcagcgggttgtcaggagtttttataatggagatttatcagcgcgttttgtttttcacggtaatgatgacatcacttatataggcgagaaatttaacagcatactggattatatagaagatctctttaaaatacaggagcaggataataaggtaaaacgtaacctggaaatccggctgatgcagtcccagattaaccctcatctgctgtacaacaccctggattctgtaatttggtcattaaaaaacggcgacctccggcgcagtcaggaaataattgcttcattgagcgccttttttaagatatcgctgtcccaggggaattcgttgataccgttacgttccgaactcgccttaatagagaattatattaccatacaaaaactcgcaagggaaaaaaacattgaattatttctggatattccgcagcctttaaccgattacctcatcattaaactatcttgcagcccatga

SEQ ID NO: 14202 - protein, 303 aa, Unknown
  Obtained from environmental sample
  DOMAIN (118)...(187): HAMP domain
  misc_feature (1)..(303): Xaa is any amino acid
MYDAVSDEMGFLLAGIRENSLLNVLNVSNIESMLINGQGIVLSAQEKSIISNRLANSDLLTLVLDNNRYARSAVIGEGKGRRSVLFKRTVANDVVFIVISDYLSSIGLAQISNFAVKCLIVAVIGIIVSGLVSVWLSRHLSAAVIDLQRVVRSFYNGDLSARFVFHGNDDITYIGEKFNSILDYIEDLFKIQEQDNKVKRNLEIRLMQSQINPHLLYNTLDSVIWSLKNGDLRRSQEIIASLSAFFKISLSQGNSLIPLRSELALIENYITIQKLAREKNIELFLDIPQPLTDYLIIKLSCSP

SEQ ID NO: 14203 - DNA, 630 bp, Unknown
  Obtained from environmental sample
  misc_feature (1)..(630): n is a, c, g, or t
atgaggtttttaggagcttctatcttgacagaaattctggacaagctccgtgaaaaggttatcccgaattataaacccgtgaatcccgaattcaaactcacctgtctcagtattttaccttccagccctgggctgcgaaaactggaaatgaaacttgtgaatgcagcaaatagagaacgcagattgcaaagggttataaaaactgtagaagtgaattatgaatatattataatagatgcgccacctagcttaaatctgctcaccataaacacccttacagcggcgaacagcgttgttgtaccggtccagtgcgagtatttttctttgcagggagtggcagaacttttaaatacaataaaacttgtgcagagcaatcttaaccaaggtttgaaaatagaaggtgcgcttctcacgatgtacgataccagaaactccctctccaagcaggttgcagaagaagttcgcggaaattttccgggaaaagtattcaactcaataatacctcgcaatgtaaagttggcagaagccccttcgcatggcaagcctattttgctttacgatattcaaagcgcaggcagccaggcttatatgaagctggcagaggaaattttggagactgccaatgggtaa

SEQ ID NO: 14204 - protein, 209 aa, Unknown
  Obtained from environmental sample
  DOMAIN (1)...(175): CobQ/CobB/MinD/ParA nucleotide binding domain
  misc_feature (1)..(209): Xaa is any amino acid
MRFLGASILTEILDKLREKVIPNYKPVNPEFKLTCLSILPSSPGLRKLEMKLVNAANRERRLQRVIKTVEVNYEYIIIDAPPSLNLLTINTLTAANSVVVPVQCEYFSLQGVAELLNTIKLVQSNLNQGLKIEGALLTMYDTRNSLSKQVAEEVRGNFPGKVFNSIIPRNVKLAEAPSHGKPILLYDIQSAGSQAYMKLAEEILETANG

SEQ ID NO: 14205 - DNA, 903 bp, Unknown
  Obtained from environmental sample
  misc_feature (1)..(903): n is a, c, g, or t
atgcaggaagcgccgccggttgacgatgcgccgttgccggtcgagattacgctggttgaaaaaagactgtctttgcaggattttgcttcggcggtcaaacgtccgctgacggaaatcatgggcgcgctgctcaaagccggcctcttgatcacgattaaccaaaaaatcgaccccgacatcgccaaaaaaatcggcgagctgatcggcgtgaccgtcaaaacggatttctcggagacggaagactctaagatcaaatacgagctgactatgctggagacttcggaagttgaggataagccggaggatttgtgcgcgcggccgccgatcgtgacgatcatggggcacgttgatcacggcaaaaccaaactgctcgatgcgatccgttcctcgcgcgtggtcgagggtgaagtcggaggcatcacgcagcatatcggcgcgtatcaagtctctgttaaaaataaaaaaattacttttctggacacgcccggtcacgaagcttttacggctttgcgcgcccgcggcgctcaagtgacggacattgtggttttggtcgtggcggccaatgacggcattaagccgcagaccgtcgaggcgatcgcccatgccaaggccgccggtgtgccgatcattgtggctattaacaaaatcgacttgccggaagccgatgtgcagagaaccaaacagcaattgacggaacacgagcttatccccgaagattnggggcgcaagacggtctgctgcgagatttccgccaagcaaaaaaacggtctggaaaatcttttggagatgatcctgctcgtggcggacatggaaaactcaaagctaatccccataaaaaagcgcagggcattattatcgaggcgcacctttcccgggagcgcggtcccctggcgacggtgctaa

SEQ ID NO: 14206 - protein, 300 aa, Unknown
  Obtained from environmental sample
  DOMAIN (119)...(268): ADP-ribosylation factor family
  misc_feature (1)..(300): Xaa is any amino acid
MQEAPPVDDAPLPVEITLVEKRLSLQDFASAVKRPLTEIMGALLKAGLLITINQKIDPDIAKKIGELIGVTVKTDFSETEDSKIKYELTMLETSEVEDKPEDLCARPPIVTIMGHVDHGKTKLLDAIRSSRVVEGEVGGITQHIGAYQVSVKNKKITFLDTPGHEAFTALRARGAQVTDIVVLVVAANDGIKPQTVEAIAHAKAAGVPIIVAINKIDLPEADVQRTKQQLTEHELIPEDXGRKTVCCEISAKQKNGLENLLEMILLVADMENSKLIPIKKRRALLSRRTFPGSAVPWRRC

SEQ ID NO: 14207 - DNA, 342 bp, Unknown
  Obtained from environmental sample
  misc_feature (1)..(342): n is a, c, g, or t
gtgcgcctcgataataatgccctgcgcttttttatggggattagctttgagttttccatgtccgccacgagcaggatcatctccaaaagattttccagaccgtttttttgcttggcggaaatctcgcagcagaccgtcttgcgccccnaatcttcggggataagctcgtgttccgtcaattgctgtttggttctctgcacatcggcttccggcaagtcgattttgttaatagccacaatgatcggcacaccggcggccttggcatgggcgatcgcctcgacggtctgcggcttaatgccgtcattggccgccacgaccaaaaccacaatgtccgtcacttga

SEQ ID NO: 14208 - protein, 113 aa, Unknown
  Obtained from environmental sample
  misc_feature (1)..(113): Xaa is any amino acid
MRLDNNALRFFMGISFEFSMSATSRIISKRFSRPFFCLAEISQQTVLRPXSSGISSCSVNCCLVLCTSASGKSILLIATMIGTPAALAWAIASTVCGLMPSLAATTKTTMSVT

SEQ ID NO: 14209 - DNA, 822 bp, Unknown
  Obtained from environmental sample
  misc_feature (1)..(822): n is a, c, g, or t
atgcagagctgcggcaatgattatatttactttaattgctttgatacgaaaatagactcgccagagtcgctgtccgtgtttttgtcagacaggcataccggcgtaggcggcgacggcgttgttctgatactgccgcccgataccggcgcggacgccaagatgaggatgttcaatctagacggcagcgaaggcagcatgagcgggaacgccatccgctgtgtggcaaaatacctgtatgacaataatcttgttaaaaaacacgatatgcagatagaaacaaagagcggcgtaaaaaaactctatctctccacgcgtaaccatgtagtatcatccgtcaaggttgatatgggacgcgccaaattgcgcccccaggatatacccgtgaaattaaccggagagaatgtaattaaaagcaaagtgaccatagggggcgctgagtacgagcttacctgcgtttccatgggcaacccccacgcagtggtgttctgtaaaaatcttgactctcttccgttaggcgaaataggccccctgtttgaaaacgatccgctgtttcccgaccgggttaacgcggaatttgtcaatgttatggacagaaaccacctggaaatacgcgtatgggaacggggaagcggcgaaacccaggccagcggaaccagcgcctgcgcctccgccgtggccgctgtcctgaacgggcactgcgacaaggacacggatataagggtacgcctgcccggcggagagcttattgtcaattacactgacgatgtggtatggctgacaggcgattgcgtaaaagtgtttgacggaacggtagaaatataa

SEQ ID NO: 14210 - protein, 273 aa, Unknown
  Obtained from environmental sample
  DOMAIN (1)...(122): Diaminopimelate epimerase
  misc_feature (1)..(273): Xaa is any amino acid
MQSCGNDYIYFNCFDTKIDSPESLSVFLSDRHTGVGGDGVVLILPPDTGADAKMRMFNLDGSEGSMSGNAIRCVAKYLYDNNLVKKHDMQIETKSGVKKLYLSTRNHVVSSVKVDMGRAKLRPQDIPVKLTGENVIKSKVTIGGAEYELTCVSMGNPHAVVFCKNLDSLPLGEIGPLFENDPLFPDRVNAEFVNVMDRNHLEIRVWERGSGETQASGTSACASAVAAVLNGHCDKDTDIRVRLPGGELIVNYTDDVVWLTGDCVKVFDGTVEI

SEQ ID NO: 14211 - DNA, 453 bp, Unknown
  Obtained from environmental sample
  misc_feature (1)..(453): n is a, c, g, or t
ttgacaataagctctccgccgggcaggcgtacccttatatccgtgtccttgtcgcagtgcccgttcaggacagcggccacggcggaggcgcaggcgctggttccgctggcctgggtttcgccgcttccccgttcccatacgcgtatttccaggtggtttctgtccataacattgacaaattccgcgttaacccggtcgggaaacagcggatcgttttcaaacagggggcctatttcgcctaacggaagagagtcaagatttttacagaacaccactgcgtgggggttgcccatggaaacgcaggtaagctcgtactcagcgccccctatggtcactttgcttttaattacattctctccggttaatttcacgggtatatcctgggggcgcaatttggcgcgtcccatatcaaccttgacggatgatactacatggttacgcgtggagagatag

SEQ ID NO: 14212 - protein, 150 aa, Unknown
  Obtained from environmental sample
  SIGNAL (1)...(25)
  misc_feature (1)..(150): Xaa is any amino acid
MTISSPPGRRTLISVSLSQCPFRTAATAEAQALVPLAWVSPLPRSHTRISRWFLSITLTNSALTRSGNSGSFSNRGPISPNGRESRFLQNTTAWGLPMETQVSSYSAPPMVTLLLITFSPVNFTGISWGRNLARPISTLTDDTTWLRVER

SEQ ID NO: 14213 - DNA, 924 bp, Unknown
  Obtained from environmental sample
  misc_feature (1)..(924): n is a, c, g, or t
gtgttttacccccgaatgaggttattcggcgcccttcccgcctggtccgggatgttttttttggttcaagtgcgggaaagatactcgccccggctttggaggcagcagatggcgtatatcgcccgctgttcgcctttcggcatcaccggtgaaatcgcggaaaaactcacaaagataagccccgcgtccatagaccggtatctcaaaaaagacaaggacattctgaggctgaaagggaaaagccttaccaaacctttggattcccttaaaagccgcatacctatccgtaccttctacaccagtgaggagcgtaagaaaccaggtttttggcaaattgataccgtccaccattgcggacaggccactgaaggccagtatctgcataccttaaccgccaccgacgttgcgtcaggctggatagaactgtgttcccttctcaataacgcgcaaaggtggacgttcgaggctttgtccctcatcaaaacctcttcccttatccccgttctggaatttcacagcgataacggctcggaatttatcaacaaagccacggagttatggtgcaaagacaaaggcataccttttaccagaagccgcgaccataagaaaaacgacaactgcttcgttgagcagaaaaacggcgcggttgtccgtgagtatgtcggctatgaccgccttgaggggatcaaggaacaagccctcctggccgccgtctatcggcctttggtccccttgctcaacttcttcatgcctacgcaaaaactcaaaagcaaaaccagggtcggttccaaagagagcaaggtttacgatgatcccaaaagccctttccagaggcttattgaatcaacggaagtgtcacagctgacaaaagattcccttggagtgcaaatcgctctttacaacccggagctcggccgattctga

SEQ ID NO: 14214 - protein, 307 aa, Unknown
  Obtained from environmental sample
  DOMAIN (102)...(280): Integrase core domain
  misc_feature (1)..(307): Xaa is any amino acid
MFYPRMRLFGALPAWSGMFFLVQVRERYSPRLWRQQMAYIARCSPFGITGEIAEKLTKISPASIDRYLKKDKDILRLKGKSLTKPLDSLKSRIPIRTFYTSEERKKPGFWQIDTVHHCGQATEGQYLHTLTATDVASGWIELCSLLNNAQRWTFEALSLIKTSSLIPVLEFHSDNGSEFINKATELWCKDKGIPFTRSRDHKKNDNCFVEQKNGAVVREYVGYDRLEGIKEQALLAAVYRPLVPLLNFFMPTQKLKSKTRVGSKESKVYDDPKSPFQRLIESTEVSQLTKDSLGVQIALYNPELGRF

SEQ ID NO: 14215 - DNA, 555 bp, Unknown
  Obtained from environmental sample
  misc_feature (1)..(555): n is a, c, g, or t
atgaaagttgccataattcactactggcttgtcaatatgcgcggaggagaaaaggtactcgaagtcctgctcgagatgtttccgcaagccgacatctatacccatgtatacaatccaaaagcgatttctcctttaattaacaatcatcgcgttattacttcccgcataaaccgtctgccctttgcgaaaaaactatatcagttttatatgcccctcatgccgaatgcgctcattgattttgatcttcaatcctacgacctgattatatcaaatgaatccggtccggtaaaaggcgtagttcccaaccctaacgcctatcatctatgttattgcctcagtccgatgcgctacctttgggatatgtatcacgaatatttcaggggaacaaacccgttagtacgcttttttatgaaacgtcttattccgggcctgcggctgtgggatgcggtatccgccaatatggtggatctctttgttgccatttcaacctatgtggagaaacgcatctggcgcttgttacaccgtattgccgaaaattgtttatcctccgggtag

SEQ ID NO: 14216 - protein, 184 aa, Unknown
  Obtained from environmental sample
  misc_feature (1)..(184): Xaa is any amino acid
MKVAIIHYWLVNMRGGEKVLEVLLEMFPQADIYTHVYNPKAISPLINNHRVITSRINRLPFAKKLYQFYMPLMPNALIDFDLQSYDLIISNESGPVKGVVPNPNAYHLCYCLSPMRYLWDMYHEYFRGTNPLVRFFMKRLIPGLRLWDAVSANMVDLFVAISTYVEKRIWRLLHRIAENCLSSG

SEQ ID NO: 14217 - DNA, 360 bp, Unknown
  Obtained from environmental sample
  misc_feature (1)..(360): n is a, c, g, or t
atgaacaggaattctgtcagtcttgggaaagaaggggaagacagggctgttgaagcgctcaaagccgcgggaatgagcattattgcccggaatttccgttcccgccagggtgaaattgacataatcgcccaggacggggaaaccctggtttttgtcgaggtaaaggcatattccagtttcggccttgagagcctggcatacagcgtcagccaaaaaaagcagcgaagaatcatagagacagctaaatatttcctctctatcaatcgacaatattatggaagggccattcgtttcgatgtggtttttatcggaaatgagacggtcagccatcttgcatcagccttcatggagtgtgtataa

SEQ ID NO: 14218 - protein, 119 aa, Unknown
  Obtained from environmental sample
  DOMAIN (11)...(104): Uncharacterised protein family UPF0102
  misc_feature (1)..(119): Xaa is any amino acid
MNRNSVSLGKEGEDRAVEALKAAGMSIIARNFRSRQGEIDIIAQDGETLVFVEVKAYSSFGLESLAYSVSQKKQRRIIETAKYFLSINRQYYGRAIRFDVVFIGNETVSHLASAFMECV

SEQ ID NO: 14219 - DNA, 522 bp, Unknown
  Obtained from environmental sample
  misc_feature (1)..(522): n is a, c, g, or t
gtgaaaaccggattatacaaccacggcttttttatgacccgcttaaaagaggaaatcgtcaggacaaagcgccagccccacgcctcgtcggtaatcgttatggatgtggataaatttaaaaacttcaacgacacttacgggcatcttgcgggagatcaggttctggaaaagctggcgcaggttatcaagcagagcgtccgctcggaggatattccttcgcggtttggaggagaggaatttaccgtccttttgccctccaccgaaatctcgaccgcgtggagaatttccgaacgcctcagaaccagcgtagcggcgatgcgggtgccctgggaaacgcccctgccgcaggtgacaatcagcctgggcgtgttcgcttttgacaaggacagcgaactggataccgttggcatcctccgccgcgccgacgaggcgttatacgtttccaaagcaaagggcagaaactgcagcaccatctgggatcccggcattatcgacagcatacagaaaacaaaagaaaaatga

SEQ ID NO: 14220 - protein, 173 aa, Unknown
  Obtained from environmental sample
  DOMAIN (2)...(155): GGDEF domain
  misc_feature (1)..(173): Xaa is any amino acid
MKTGLYNHGFFMTRLKEEIVRTKRQPHASSVIVMDVDKFKNFNDTYGHLAGDQVLEKLAQVIKQSVRSEDIPSRFGGEEFTVLLPSTEISTAWRISERLRTSVAAMRVPWETPLPQVTISLGVFAFDKDSELDTVGILRRADEALYVSKAKGRNCSTIWDPGIIDSIQKTKEK

SEQ ID NO: 14221 - DNA, 783 bp, Unknown
  Obtained from environmental sample
  misc_feature (1)..(783): n is a, c, g, or t
gtgcggggatcccgatggatgacaaggaacagagcggaagtggaggacaacctaaaaatttatattaccgacgtattaacgcattatcatggaaagatatattcatgggatgtggtaaacgaagtaatgaaggattttccttccgctgccgatgccgcaggagactggaaaaattgtctgcgaacagattccccctggtacaatgcgttaggcgcaagttatattgaaacagccttccgtaccgcgcgggaagccgcccctgacattaccatatattataatgattatttttgttatgatgatctgaataaagttgaagcggtatgtaaaatgattaacgacataaataaccggtataaaaaagaaacaggacaggatcgaaatcttatcgaagggttgggtattcaggctcatcatcaagttaagtattttgatgaaagaaaagtacgcttgcctctggaaaagtttgcgtctctaaatattgaactttcaataagcgaactggacgtaacagccgccagttatgatgaaggtgaggggaaggacattgttatgtcagaatatgataccgcggtacaagccggtatttatgcccgtcttttcaggatataccgggaatacgccgcttatatatcacgaataaccctttggggcgtagatgactacaacagttggctttccgccggaaccccctgcctttttgaccgctacctaaaccccaaaaaagcttttaatgcggtatttaatcctgataaaaatgaaatgaacctcaaccgagcctga

SEQ ID NO: 14222 - protein, 260 aa, Unknown
  Obtained from environmental sample
  DOMAIN (1)...(251): Glycosyl hydrolase family 10
  misc_feature (1)..(260): Xaa is any amino acid
MRGSRWMTRNRAEVEDNLKIYITDVLTHYHGKIYSWDVVNEVMKDFPSAADAAGDWKNCLRTDSPWYNALGASYIETAFRTAREAAPDITIYYNDYFCYDDLNKVEAVCKMINDINNRYKKETGQDRNLIEGLGIQAHHQVKYFDERKVRLPLEKFASLNIELSISELDVTAASYDEGEGKDIVMSEYDTAVQAGIYARLFRIYREYAAYISRITLWGVDDYNSWLSAGTPCLFDRYLNPKKAFNAVFNPDKNEMNLNRA

SEQ ID NO: 14223 - DNA, 834 bp, Unknown
  Obtained from environmental sample
  misc_feature (1)..(834): n is a, c, g, or t
atgctggtggaggttctggcagctgcggaaatttatcttgattacagcgaggatgaatttttatcgccggacgaagaaagcgcggggacgctcccgaataaaaccctggctgaaaaggcggccaaaaggcttaagattctttcggaattatggagccgtgaacggatctacgcggaaggggctttggcggttttggcgggcatgccgaacgcgggaaaatccagcctttttaattatctaatccgcgaggatcgttcaattgttaccgatacccccggcaccaccagagactggattgaggccgtcatctccctggatgacattccgctccgcttggcagatacagcgggcttgaggaagatggacgcgtcgggctcaaagaatgttgacgaagcggaaagaattggcgtagagcggagcatagaacttctggaaaaagccgaccttgtcctttatgtggttgacggcattaaaggcttaactgaagaagacagggagtttctggtgaagcacagtaagatgcaaaaggagaagccgcttataaccctctggaacaaagcggatatcgcgaatccttcgccttcagtttttcctgatgaaataataaaggctcaatttcttccggtcagtgccaaaacaggcgaaggcattcctgagttattgcgtctaatggtcggccttttggaaaaaagccccatatcttcatcaacttccgacgaccaattgcttcaggttgcggggcctggcagcctgaggcagaaagagctaattgatacagcgttgagcgaaacagaggaagccctggaactggctagccgggggggaaagccttga

SEQ ID NO: 14224 - protein, 277 aa, Unknown
  Obtained from environmental sample
  DOMAIN (61)...(188): GTPase of unknown function
  misc_feature (1)..(277): Xaa is any amino acid
MLVEVLAAAEIYLDYSEDEFLSPDEESAGTLPNKTLAEKAAKRLKILSELWSRERIYAEGALAVLAGMPNAGKSSLFNYLIREDRSIVTDTPGTTRDWIEAVISLDDIPLRLADTAGLRKMDASGSKNVDEAERIGVERSIELLEKADLVLYVVDGIKGLTEEDREFLVKHSKMQKEKPLITLWNKADIANPSPSVFPDEIIKAQFLPVSAKTGEGIPELLRLMVGLLEKSPISSSTSDDQLLQVAGPGSLRQKELIDTALSETEEALELASRGGKP

SEQ ID NO: 14225 - DNA, 789 bp, Unknown
  Obtained from environmental sample
  misc_feature (1)..(789): n is a, c, g, or t
ttggtcggcgcttcatacagcagcaccatgtacgcaatggcgaacaaagacggccgtcttagagatactcaggcttcgcttgatcaactccgcgacgaaacagccgcccttcttcgtgaagcccgcagttttgaaagtgctctttccaacgtactttccgcattgggcataggaaataacaattctctctctcaaaatacatcaagcgacttaagccaaatcctcggtttaaaagaaactccgcagggtcttattcaggaagttgatgacgtaaggcgtttagccgcatatcttaacgaagcggtagagccgattaaggaattgggcgatgttatgaattcgcaaagcgctttgttaacggaaatcccgagtatctggcctgtaaaaggcggaatcgggcatattacaatgttctttggtcagaatattcacccgattacgggacaatggcacattcacagaggtattgatatagcgacttaccgttcaggcgatccgatagtcgcaagcgcggacggtcaggtggtaacagccgagtacacttacgattacggcaactttatcattataagacataagcacggctattatacacgttatgcgcacatgcttcgttttaacgtaagcgtcggacagcgaattcaacagggcgatataataggttatatcggcaataccggtatttccacaggtccccaccttcactatgaagttcatataggatccgatgttgtcgatccttacagatacattactatccgcaacagtctcgccaaacaaggacgttaa

SEQ ID NO: 14226 - protein, 262 aa, Unknown
  Obtained from environmental sample
  DOMAIN (151)...(247): Peptidase family M23
  misc_feature (1)..(262): Xaa is any amino acid
MVGASYSSTMYAMANKDGRLRDTQASLDQLRDETAALLREARSFESALSNVLSALGIGNNNSLSQNTSSDLSQILGLKETPQGLIQEVDDVRRLAAYLNEAVEPIKELGDVMNSQSALLTEIPSIWPVKGGIGHITMFFGQNIHPITGQWHIHRGIDIATYRSGDPIVASADGQVVTAEYTYDYGNFIIIRHKHGYYTRYAHMLRFNVSVGQRIQQGDIIGYIGNTGISTGPHLHYEVHIGSDVVDPYRYITIRNSLAKQGR

SEQ ID NO: 14227 - DNA, 312 bp, Unknown
  Obtained from environmental sample
  misc_feature (1)..(312): n is a, c, g, or t
atgtcaaccggaattcacaagggaattgccgttcctcacggaaagacaaaagcggtaaaagacctgcgcattgttcttggaatttcccaaaaaggcgtccaatacgattcgctggacggagaaccggtttatcttctttttatgtttattgctcctatggaagattccgaaaaatatcttaggttgttaaaacacctggcccagcttgtggatatgcctcagtttaaaacagaactgcaatctcaaaaagacccgacaggcgcgttcaaggtaatacgtaaatttgaagaaatgctttccgtcgagagctga

SEQ ID NO: 14228 - protein, 103 aa, Unknown
  Obtained from environmental sample
  misc_feature (1)..(103): Xaa is any amino acid
MSTGIHKGIAVPHGKTKAVKDLRIVLGISQKGVQYDSLDGEPVYLLFMFIAPMEDSEKYLRLLKHLAQLVDMPQFKTELQSQKDPTGAFKVIRKFEEMLSVES

SEQ ID NO: 14229 - DNA, 813 bp, Unknown
  Obtained from environmental sample
  misc_feature (1)..(813): n is a, c, g, or t
atgtacagattcggcacgagccacaccaataaacccctgcaccttggacatttgcgcaacgatgcgcttggagagagcgtctcgcgtattttggcggcttgcggagcggaagtgcggaaagtctgtattataaatgacagaggcattcatatttgtaaatcgatgcttgcctacaaggagcaggggcagggcaagacgcctgaaagtgagggcgtaaagagcgaccgttttgtcggcgactggtatgtaagtttcagtaaggcattgaagaatgaaaccgatgaactgataaagcagggagcggataaggataccgccgaggcgcaaactccgtcgatgaagaaggcgcaggaattattgcgtaattgggaagccggcgacggcgaaactgtggaactgtggaagaagatgaacagttgggcgattgagggaatgaaaaaaacttataatagaaccggcgtttcatttgacaaatactattttgagagcgaaacatatatgctgggcaaagatgaagttttaaaaggcttggaaaaaggcatttttttcagacaggaagacggctccgtcgccgttgatttaagcgaagaaaaattagataaaaaaatactgttaagaagcgacggcacatcaatttatattacgcaagacttcggcacagcgataaaccgttataaagactggcaatttgacgaaatgatctacgttgtcggctccgagcaaaattaccattttaaggttttatttattttgctggaaagttgggctattcatgggcaaagaaccttcatcatctttcctacggcatggtaa

SEQ ID NO: 14230 - protein, 270 aa, Unknown
  Obtained from environmental sample
  DOMAIN (3)...(268): tRNA synthetases class I (R)
  misc_feature (1)..(270): Xaa is any amino acid
MYRFGTSHTNKPLHLGHLRNDALGESVSRILAACGAEVRKVCIINDRGIHICKSMLAYKEQGQGKTPESEGVKSDRFVGDWYVSFSKALKNETDELIKQGADKDTAEAQTPSMKKAQELLRNWEAGDGETVELWKKMNSWAIEGMKKTYNRTGVSFDKYYFESETYMLGKDEVLKGLEKGIFFRQEDGSVAVDLSEEKLDKKILLRSDGTSIYITQDFGTAINRYKDWQFDEMIYVVGSEQNYHFKVLFILLESWAIHGQRTFIIFPTAW

SEQ ID NO: 14231 - DNA, 402 bp, Unknown
  Obtained from environmental sample
  misc_feature (1)..(402): n is a, c, g, or t
gtggccatcataaagcccgacgccgttcgcgcgaaacatgccgggaagatacttgctatgattgaggacggcggacttaacgtcgaggcggtacgcatgttcaggctgacacgcgagattgccgggcggttctacgccgtccacaggggcaagccgttttacgaggggctgctcgacttcatgtcgtcggggccgtgcatcgtgctggcgctcggcggcgaggacgccgtggctaaatggcgggggctgatgggggcgaccgatccggcggcggcggcggacgggactatacgcaaactctacgggacttctgtgcggttcaacgcctgccacggctccgacgcgccggagaccgcggcgcaagagacggctttctttttttccggcgcggagctgccttga

SEQ ID NO: 14232 - protein, 133 aa, Unknown
  Obtained from environmental sample
  DOMAIN (3)...(132): Nucleoside diphosphate kinase
  misc_feature (1)..(133): Xaa is any amino acid
MAIIKPDAVRAKHAGKILAMIEDGGLNVEAVRMFRLTREIAGRFYAVHRGKPFYEGLLDFMSSGPCIVLALGGEDAVAKWRGLMGATDPAAAADGTIRKLYGTSVRFNACHGSDAPETAAQETAFFFSGAELP

SEQ ID NO: 14233 - DNA, 663 bp, Unknown
  Obtained from environmental sample
  misc_feature (1)..(663): n is a, c, g, or t
atgcgtgtgttattgctttgtgatgattattggcatccgggacagatacccattgacggcgttgcacctcttgccgacctgggctttcaattcgacataatcaccaacgcaaacgatttcacgccggatatgctttcaaattaccccgtcgtccttatggataaatgcgatcaagtcagccgtgaagatgacaagacaagctggaaaaccgaggcaacacagcaggcgtttattgcttatgtggagaatggcggaggactgctggttgtccatagcggtactgtggcgggcaagcaaacagaagcattggatcgtttaataggctgccgctttgtcttccaccccaatgcctgtccggtaactgtccagcccattaagccccatcctgttaccgagggtgtggggatgttttgcgaaacagatgagcactaccgcttggaaattctggcgcaggacgcggacatactgatagcttcttattctccgccccaggggaatatggataaatatcaggaagacccctatcataacacaccggcatgggtttgccctgccgggtatgtgcgaacccagggtaagggccgggtctgtgttctgacgccgggacatcttctgccggtatggcaaaatccccaataccaacgaaccattgccaacgcttga

SEQ ID NO: 14234 - protein, 220 aa, Unknown
  Obtained from environmental sample
  misc_feature (1)..(220): Xaa is any amino acid
MRVLLLCDDYWHPGQIPIDGVAPLADLGFQFDIITNANDFTPDMLSNYPVVLMDKCDQVSREDDKTSWKTEATQQAFIAYVENGGGLLVVHSGTVAGKQTEALDRLIGCRFVFHPNACPVTVQPIKPHPVTEGVGMFCETDEHYRLEILAQDADILIASYSPPQGNMDKYQEDPYHNTPAWVCPAGYVRTQGKGRVCVLTPGHLLPVWQNPQYQRTIANA

SEQ ID NO: 14235 - DNA, 783 bp, Unknown
  Obtained from environmental sample
  misc_feature (1)..(783): n is a, c, g, or t
gtgcgccttgacgcgcgtctgttaacggctgaagacgccgcgcatacggtgcagatagaggttaccgacagcgggattggcatcagccccgagaatcaggcccgccttttccattcttttcatcaggccaatttgcacactacgcgcgaatacgcgaaggccgaacttggcctggcaatttccaggcaccttgttgaaattatgggcgggcgtatgtgggttgattccgagcttggcctgggcgcgactgtcggctttacttttccggcaaagcggggcgatgaaaatgaaaacaggctgctgtcaaataataattactgggccgataaacgcgcgctggttgttgacgacgccccgaataccctcgtatacttccgcggcgaggcgtcccggctctctatttcctgcgacgtcgctttaagcggggaggcggcgcttgatctgatcgggaaaaacggcccgtatgacatctgctttatcgactggaagatgcccggcatgaacggcattgaaaccgccgccaggctcagggaacagggggccgccaggcctttaatagttttaatgatctccgctgccgagtggaagctggtagaggatgacgctaaaaaagcgggcgttgaatattatttgcaaaaaccgctgttccgttccgatattattgactgccttaataactgcttcggtccgaagcccgcggaagacgctcaaccgcaagtcaaaaaagataatttttacggcttccgcatattgcttgttgatgacctggagataaaccngtga

SEQ ID NO: 14236 - protein, 260 aa, Unknown
  Obtained from environmental sample
  DOMAIN (3)...(91): Histidine kinase-, DNA gyrase B-, and HSP90-like ATPase
  misc_feature (1)..(260): Xaa is any amino acid
MRLDARLLTAEDAAHTVQIEVTDSGIGISPENQARLFHSFHQANLHTTREYAKAELGLAISRHLVEIMGGRMWVDSELGLGATVGFTFPAKRGDENENRLLSNNNYWADKRALVVDDAPNTLVYFRGEASRLSISCDVALSGEAALDLIGKNGPYDICFIDWKMPGMNGIETAARLREQGAARPLIVLMISAAEWKLVEDDAKKAGVEYYLQKPLFRSDIIDCLNNCFGPKPAEDAQPQVKKDNFYGFRILLVDDLEINX

SEQ ID NO: 14237 - DNA, 789 bp, Unknown
  Obtained from environmental sample
  misc_feature (1)..(789): n is a, c, g, or t
gtgcaggcgcattgcggcgcggacgctaatctgcttgcgtactgggcaattctcagtacacgagttgaaaatccggcgctggaaaaattaggcgaaaccaatctttataaattaaccgattcacaatggaacgagttaagggtttctctggggaaccagcgccttttgggtttggattactattccggcggacatttaactcatggttacagaaataatctttcagggcgtatgtttgaaattcacgggtattccgtatccgccgaaaacggaatgttggattacgacgatatcgaaaaacaggcgatggaagtgcgcccgttaattttattggcaggctattccgcctatccgcggaaaataaattttaagcgcatgagggaaatcgctgataaagccggcgctgtgttcatggtagacatggctcactttgcgggacttgtcgcgggcaaagtttttacaggcgaatatgatcctgtgccctggtcgcatgttgtaacaagcactacgcacaaaaccctgcgcggtccccgctccggagttgtgctctccacaagcgagttcgcggaagctctggacaagggctgtccgttgacaatgggcggaccactcccccacgttatcgcggcaaaggcggtcgctttccgcgaagccgccgccccggagttcaggcagtacgcgcagaanattgtagattactgcaaagcgcttgcggcgagctgcatgaaaaacggtcttgatggttttacgggcggtaccgacaaaccaccttttactggtaaaatgtaa

SEQ ID NO: 14238 - protein, 262 aa, Unknown
  Obtained from environmental sample
  DOMAIN (7)...(262): Serine hydroxymethyltransferase
  misc_feature (1)..(262): Xaa is any amino acid
MQAHCGADANLLAYWAILSTRVENPALEKLGETNLYKLTDSQWNELRVSLGNQRLLGLDYYSGGHLTHGYRNNLSGRMFEIHGYSVSAENGMLDYDDIEKQAMEVRPLILLAGYSAYPRKINFKRMREIADKAGAVFMVDMAHFAGLVAGKVFTGEYDPVPWSHVVTSTTHKTLRGPRSGVVLSTSEFAEALDKGCPLTMGGPLPHVIAAKAVAFREAAAPEFRQYAQXIVDYCKALAASCMKNGLDGFTGGTDKPPFTGKM

SEQ ID NO: 14239 - DNA, 750 bp, Unknown
  Obtained from environmental sample
  misc_feature (1)..(750): n is a, c, g, or t
gtggggtacctcaacagagggagaatagagacaagctacgcgaccggagacgtcttcggaaaagactccgtgggcggccttttgggggcgggggttctggatacggtaaggggcggctacgcgaccggaaccgtcacgggaagcggcaactacgtgggcggtcttacgggaaagagttccgccgccgcgaacagcgtgggatatacgataaactcctacgcgaccggagacgtgatcggcggttattacgtgggcgggctggtcggaagcagcgcgggcaatatcgtgaacagctacgcgggacgctcgatgggtgttgaccagaacgccggccccatgacgagcttggtctccggcgacacatacgtgggcggtctggtgggcgcaaaaaccggcggcgctatgaaaaacagctacgccatagggcaggtctccggaaaatcgtccgccggggcgatagcgggttccgttgacggcagcgccacaaccatatactgctactacgacaaaaacgtcaaatccccgcaaaacggattcggcatcccgaacgacgatatgacgagcgaagaatttatcagcctgctgaacgtcgccgcgtgcgcgcttaaaaacaancagtacaaggagggtacgaacgagtggttctacaccatagatcagtatcctaaactgagcatatatcctgtaacggagagcatcttgtccacctgtttcggcggcggagcggcgaaaaggcatccgtacagatag

SEQ ID NO: 14240 - protein, 249 aa, Unknown
  Obtained from environmental sample
  misc_feature (1)..(249): Xaa is any amino acid
MGYLNRGRIETSYATGDVFGKDSVGGLLGAGVLDTVRGGYATGTVTGSGNYVGGLTGKSSAAANSVGYTINSYATGDVIGGYYVGGLVGSSAGNIVNSYAGRSMGVDQNAGPMTSLVSGDTYVGGLVGAKTGGAMKNSYAIGQVSGKSSAGAIAGSVDGSATTIYCYYDKNVKSPQNGFGIPNDDMTSEEFISLLNVAACALKNXQYKEGTNEWFYTIDQYPKLSIYPVTESILSTCFGGGAAKRHPYR

SEQ ID NO: 14241 - DNA, 870 bp, Unknown
  Obtained from environmental sample
  misc_feature (1)..(870): n is a, c, g, or t
gtgagcggcggatataacggcatgttgcaaaagggcaaatacgaaatctccgtaacgccggtaaaaccgcagaattacagcccatacgagttgtcggtcatgacgagcgatttggtcgcgggtatcggttacgacgtttacagtgatagaacgttgcgcgtgcaggtcggcgaacgcggcggttacgaaatattctcgcaggggcgcagcgaagtcgcggcgcggctctacgctaacgataagaaaacggagatcgcccgcagcggcggcgatcagctggattggaacttcttcatatcggagcggttagactccgggagctatcacctgcaattgactgggttcaaatacgacgacgatccgccggcaaaggtgtttatgcgccgcacggcagacaccgtgctatcgcaggtaaagctggagaacgcgaccgccgaaaagtggaacgtgcctctgtcttggaagcaagttgttatccccatagagaatcaatcgggcaacgtgctgaacatatcggtaagcggcgggtcgcaactcgtgtgcgatctggagccggcaaaacaagggagcgcaaggacctccgcgcgccgccgcggcaatcgggtcaacatatccgccgccgtagagaagggcgcggcgtacacgttgaggatccggtccgaagataggatagacgatgttgcggcggttgaaatcagggcgacggaagcaataccgctcaccttcgagaacgcgcagagcggcgtcaccggtcaagcgcggaaagaggaagagaatacagtcttctataggatagacggtatggacgccggcccggggcactacgagctggtaacgaccgaaaacgaattgtccgcgtatcccgcatga

SEQ ID NO: 14242 - protein, 289 aa, Unknown
  Obtained from environmental sample
  misc_feature (1)..(289): Xaa is any amino acid
MSGGYNGMLQKGKYEISVTPVKPQNYSPYELSVMTSDLVAGIGYDVYSDRTLRVQVGERGGYEIFSQGRSEVAARLYANDKKTEIARSGGDQLDWNFFISERLDSGSYHLQLTGFKYDDDPPAKVFMRRTADTVLSQVKLENATAEKWNVPLSWKQVVIPIENQSGNVLNISVSGGSQLVCDLEPAKQGSARTSARRRGNRVNISAAVEKGAAYTLRIRSEDRIDDVAAVEIRATEAIPLTFENAQSGVTGQARKEEENTVFYRIDGMDAGPGHYELVTTENELSAYPA

SEQ ID NO: 14243 - DNA, 531 bp, Unknown
  Obtained from environmental sample
  misc_feature (1)..(531): n is a, c, g, or t
atggtctctacagacgacaaaatcggcgctattcgggagttttgggaaaccctccgctgggacatacgctanccggccggcaaacacataataggcataaaaccgctgacaagcggatcgctctccggcataccgctgaccgtgggcttctatcctatactcctatgnacggaggagaagccgttacagttgcaaatcatggcgtcgcaaaataggttggccaagttcgagttgcaaaaaaagagcaagatcggcctaggcctctcaacgcaggggcaaccggcggaggctgcgttgcttgacggaaagggaaaagagatcaacagaggtagccagatattcacagaacttgataagggcgcctaccacgtgttgctctcagtaccgtccggatcaacccaaaatggcgtaagcgtaacagtgcgtctattcggccaagacaacccgccgacagacccgccgatcgagcggatcaagaagataatcaaagacgacagagacgatagcccggagtcgcgggcgagtcgttag

SEQ ID NO: 14244 - protein, 176 aa, Unknown
  Obtained from environmental sample
  misc_feature (1)..(176): Xaa is any amino acid
MVSTDDKIGAIREFWETLRWDIRXPAGKHIIGIKPLTSGSLSGIPLTVGFYPILLXTEEKPLQLQIMASQNRLAKFELQKKSKIGLGLSTQGQPAEAALLDGKGKEINRGSQIFTELDKGAYHVLLSVPSGSTQNGVSVTVRLFGQDNPPTDPPIERIKKIIKDDRDDSPESRASR

SEQ ID NO: 14245 - DNA, 846 bp, Unknown
  Obtained from environmental sample
  misc_feature (1)..(846): n is a, c, g, or t
atgggcgacgccgtctctaccctgttttccggggtgctggcaataaacaggcaggcggggattgcgccggtaaaagtccgcgccgatttaatcgcggtgcttgaggcggcgctgcgttacgccgaattaagcggcggcgcttttgatcccaccatagggccgctggtaaaactctggggcattgggactgaaacacagcaaatccccacggtcaatgagattgcagccgcgcttgaacttgtaaactttcgtgatttgataattgaccgcaattcaggtaccgcgtttttgcggaggcagggcatggagcttgatcttggcggcattgccaaaggctacgccgcggacgaggccgcccgtattgccagagagggcagggtaagacgcggcataatcgaccttggcggaaacatcctcgcgctgggctggcgctgggaaaaaaagaaggattcgaccccatggcgtatcggcgtccaaaacccctttaatgcccgcggcgaatctatcggcgcgctggcggtccatgacacaagcgtagtaacaagcggcgtttacgagcgtttttttgataacgacgggacgcgttaccatcacattctttctacggtaaacggataccctgtggataacggcctgttatccgtaactattgtaacggaacgttctatagacgccgacgctctttccaccgccgtttttgccctgggctttgaacagggcaaagcattgatagattcactgcccggtacggatgctgtctttgtgttcgcggacaggagcgtgaaaataaccaaaggcctctccggtattttcacgctcactgacaatgaatttacatttttttaa

SEQ ID NO: 14246 - protein, 281 aa, Unknown
  Obtained from environmental sample
  DOMAIN (1)...(265): ApbE family
  misc_feature (1)..(281): Xaa is any amino acid
MGDAVSTLFSGVLAINRQAGIAPVKVRADLIAVLEAALRYAELSGGAFDPTIGPLVKLWGIGTETQQIPTVNEIAAALELVNFRDLIIDRNSGTAFLRRQGMELDLGGIAKGYAADEAARIAREGRVRRGIIDLGGNILALGWRWEKKKDSTPWRIGVQNPFNARGESIGALAVHDTSVVTSGVYERFFDNDGTRYHHILSTVNGYPVDNGLLSVTIVTERSIDADALSTAVFALGFEQGKALIDSLPGTDAVFVFADRSVKITKGLSGIFTLTDNEFTFF

SEQ ID NO: 14247 - DNA, 891 bp, Unknown
  Obtained from environmental sample
  misc_feature (1)..(891): n is a, c, g, or t
ttgattatcccacgcgacgtagaagtatcaccgccaaacgaattcggttacagaatacgggcgcagattaaagttgactatggggataacgccgccggattttttcgcaaaaggacccaacgatgtggtgagggtggacaagtgcctgcttttgacgggcggctgaacggcgtgttagccgagttgaacgctgacggtaccgatagtatcaataataacggcggcaaacggtttcacgcggataaaaaatatatagacggcgtaagcagcgtaaagatattggccggggagagcgtggcgagcgatccggttatcgacggattgacgaatgccgccacagagatcaacgtatcgggcataaagtttttggcggacggcgggagcttctttcagtccaacggatttttattggaacggttggggcgttgggcgaaagggcgtcttggcggcgggttttgcttggacttgtacggcgggataggctttttttcgcttatgctggcggacgatttcgacgagatagtcttggttgagaatgtcgccggtcaggtgcgcgccgcagagcggaacttcgccgtcaacaaaaaagacggcataaaggcggtattggccgacgtggaacgcggcggcggtttgcagaaggcggccggaaaccgccgccccgactgcgtggtggtcgacccgccgcgcccggggcttgtcaagactatgcgcaaatggctgatagacacggcgccgcgccgcgttttgtacgtttcgtgcaacccgtccaccttcgcccgagacgccaaggcgctgcttgccggagggtacgggctgacggagttggcgctcttcgatctatacccgaatacgcatcacatggaggtcgccgggatatttgtcagatag

SEQ ID NO: 14248 - protein, 296 aa, Unknown
  Obtained from environmental sample
  DOMAIN (1)...(296): tRNA (Uracil-5-)-methyltransferase
  misc_feature (1)..(296): Xaa is any amino acid
MIIPRDVEVSPPNEFGYRIRAQIKVDYGDNAAGFFRKRTQRCGEGGQVPAFDGRLNGVLAELNADGTDSINNNGGKRFHADKKYIDGVSSVKILAGESVASDPVIDGLTNAATEINVSGIKFLADGGSFFQSNGFLLERLGRWAKGRLGGGFCLDLYGGIGFFSLMLADDFDEIVLVENVAGQVRAAERNFAVNKKDGIKAVLADVERGGGLQKAAGNRRPDCVVVDPPRPGLVKTMRKWLIDTAPRRVLYVSCNPSTFARDAKALLAGGYGLTELALFDLYPNTHHMEVAGIFVR

SEQ ID NO: 14249 - DNA, 381 bp, Unknown
  Obtained from environmental sample
  misc_feature (1)..(381): n is a, c, g, or t
atggcgagatttcaaatgattgccgccgtcagggaaaaggacgaacttgagcgcgtctacggcgaacttatcgaccgtttcggcccgctgccggatgaagccgcttcccttcttgcgctcgccgagatacggatcatctgccgtaaacttgctgtctcttcgataaaggaaaggggcggcgttgtccgcatcgagtttgcgaaagtcgcccgtgttaaaatagacacgcttgtgcgcatgatgcaggaatcgcggggcaaaataaaaatcgaccccaaaaagccgaacgtgcttctgcttgcggcaggaaatatcggcttaaaggaaaagagcgaatttatccgcgaaaaactgtccgtattaacggccgggtatctttaa

SEQ ID NO: 14250 - protein, 126 aa, Unknown
  Obtained from environmental sample
  DOMAIN (3)...(90): TRCF domain
  misc_feature (1)..(126): Xaa is any amino acid
MARFQMIAAVREKDELERVYGELIDRFGPLPDEAASLLALAEIRIICRKLAVSSIKERGGVVRIEFAKVARVKIDTLVRMMQESRGKIKIDPKKPNVLLLAAGNIGLKEKSEFIREKLSVLTAGYL

SEQ ID NO: 14251 - DNA, 780 bp, Unknown
  Obtained from environmental sample
  misc_feature (1)..(780): n is a, c, g, or t
atgctcgccaaaaccgcggcagaaacgaagattcggcttcccgtccacctgaaaatcgacacaggcatgggcagaatgggctgtacgcccgccgaagcccccgttttggcggggaagatcgccgcctgcagctttcttgaatacgcgggaaccgccacccaccttgccgtgtcggattccgcagccccggaagaccgcgcctatacggaacaacagatcgccggattcaaggaagcgctggagcagatacggggggccggcgttgatccgggcattgtccatgccgcgaattcgggcgcggttgtcctgcaccctgaggtctggtttgacatggtgcggcccggaattatcctgtacggatataatcttacgggaaccccttccccggaggtaaagccggtaatggaactgagaaccaatgtcgccctgatcaagcgggtgaaaaaaggcgaaaccgtatcttacggccgtatctggactagtcctcaagacacggcaatcgccgttttgcctgtcgggtatgccgacggcctgccccgccttgcaagcaacaaatggcaggcggtaatcaacggtaaaacatatcccctggtggggcggatttgcatggatcagtgcatggccgaccttggccccgggccaaatgtgcgtcgctgggatgaagcctcaattttcggcggcccggcgcccggtgccgcgctcctcgccgaaaggatagggactataccctacgagattacgtgtaatatcaacaagcgcgtaccgagaatatacagttga

SEQ ID NO: 14252 - protein, 259 aa, Unknown
  Obtained from environmental sample
  DOMAIN (1)...(124): Alanine racemase, N-terminal domain
  misc_feature (1)..(259): Xaa is any amino acid
MLAKTAAETKIRLPVHLKIDTGMGRMGCTPAEAPVLAGKIAACSFLEYAGTATHLAVSDSAAPEDRAYTEQQIAGFKEALEQIRGAGVDPGIVHAANSGAVVLHPEVWFDMVRPGIILYGYNLTGTPSPEVKPVMELRTNVALIKRVKKGETVSYGRIWTSPQDTAIAVLPVGYADGLPRLASNKWQAVINGKTYPLVGRICMDQCMADLGPGPNVRRWDEASIFGGPAPGAALLAERIGTIPYEITCNINKRVPRIYS

SEQ ID NO: 14253 - DNA, 900 bp, Unknown
  Obtained from environmental sample
  misc_feature (1)..(900): n is a, c, g, or t
atggaagaggaccgggacgccgtggaggaacttcttaagggcgcggacatgctgtttataaccgcggggatgggcggtggaacaggcaccggaggcgcgccggtggtagctgagatcgcaaaggaactcggcatactcacggtcgccatagtgacgaagcccttcctcttcgagggaactcagcgcaataaacacgccgcggagggcatcatcgagttgcggaaacacgtcgatacgataatcgtcatccccaaccaaaaattgctctccatctcggatcagaaaacgaccctgataaacgcgttcaaaagcgccgacgaagtgctccaccaaggcgtaaagggcatctccgacgtaatcacgaagtccggcctcgtaaacttagacttcgcggacgtcaggacgattatgacggggacgggcgacgcgctcatgggcacaggctacgcgagcggcgacgaccccaaccgcgccgtcaccgccatcgaaagcgcgatccacagcccgttgctcgacgacatttccatcgccggcgcgaaaggcatgctggtcaatatcaccggtggcgaggatatcacgatgtacgaagtaaacgacgccatcaccgccgcccaaaatacgatcggcgaaaactcggacactcttataatcttcggcaccgtgatagaccctgagatgaaaggccaaataaagatcactgtcatagccacaggtttcaaccaagacaccattgcgcaaggcaaggggtcgcacagttcaggccagggcatgccggtcgtcgcggcgcccaaacgcgaaccagtagtttcacagacaagcctcgaatttgtgtccgcgtcgccaatacccccatggcggccgcaaacccgatggggctaccgaaccattcgattgcattga

SEQ ID NO: 14254 - protein, 299 aa, Unknown
  Obtained from environmental sample
  DOMAIN (126)...(253): Tubulin/FtsZ family, C-terminal domain
  misc_feature (1)..(299): Xaa is any amino acid
MEEDRDAVEELLKGADMLFITAGMGGGTGTGGAPVVAEIAKELGILTVAIVTKPFLFEGTQRNKHAAEGIIELRKHVDTIIVIPNQKLLSISDQKTTLINAFKSADEVLHQGVKGISDVITKSGLVNLDFADVRTIMTGTGDALMGTGYASGDDPNRAVTAIESAIHSPLLDDISIAGAKGMLVNITGGEDITMYEVNDAITAAQNTIGENSDTLIIFGTVIDPEMKGQIKITVIATGFNQDTIAQGKGSHSSGQGMPVVAAPKREPVVSQTSLEFVSASPIPPWRPQTRWGYRTIRLH

SEQ ID NO: 14255 - DNA, 762 bp, Unknown
  Obtained from environmental sample
  misc_feature (1)..(762): n is a, c, g, or t
atgatggccgagcataccgaatatgttaagcaggtaatcaggggaccaaagaaactcgccgacccgttcatcaaccggcctgttggcgaagaaccggttcctatccaggcctgccaatataataaaaaactgtacctgatagacaatcccgaacgcgaagcgttcgtcaactctgaattgaaatcctttggcggcgttgattgcgacgacgatgaaattagtacggaaagaatcctgttctacagcgcggtttatggactgttcccctatgatttattaaaattttccccgccaaggaagagtcaaaccgccacactggaagccggagagtataataaggcgtattttgatatgataggccgcatagggccgaacccgcttgatacaaaggtaatcacgccgcatctccataaacattggcatcttatttccgaactgcctgaccttaacgataaactgcaaagggaacaggaaaaaaccatattcaaagcccttgtgcttggaattctgtataaacggattcgatatgaaaaagccggagaaaattacaaatacagcctgtggctgaaagacagcattaaagaaatccagcttgtggtttcaaacggaacgccatgcgatgctttctatgaaattatcgatgccttgactatcaatccggtggttgttaagaaaatactgagcgccattgatgatgaactggaaaccgcgcgtaagaaaaataaaattaattttgagcagagtgcgctggctgaaggataa

SEQ ID NO: 14256 - protein, 253 aa, Unknown
  Obtained from environmental sample
  misc_feature (1)..(253): Xaa is any amino acid
MMAEHTEYVKQVIRGPKKLADPFINRPVGEEPVPIQACQYNKKLYLIDNPEREAFVNSELKSFGGVDCDDDEISTERILFYSAVYGLFPYDLLKFSPPRKSQTATLEAGEYNKAYFDMIGRIGPNPLDTKVITPHLHKHWHLISELPDLNDKLQREQEKTIFKALVLGILYKRIRYEKAGENYKYSLWLKDSIKEIQLVVSNGTPCDAFYEIIDALTINPVVVKKILSAIDDELETARKKNKINFEQSALAEG

SEQ ID NO: 14257 - DNA, 372 bp, Unknown
  Obtained from environmental sample
  misc_feature (1)..(372): n is a, c, g, or t
atgaaggtctgcccgtccggttggcgtctggcgtcttgggactatgattggagcgagctaccgaacggcggcgctgacggtaccggcgcgaagagcaagaacctgaaagcgtcgagcggttgggagggaaagttcggctataacggcaacggcacgaacgactacggtttctcggccctgccgggcggcgacggatccgacgagtacggcgacggcgtcttcggcgcgtggtggacgtctgacgacgatacggatttcagcttcgttacgcatgtcctattaaggctccatgacgactacataggcggttacggcgacgacaataagggcgacatgctgtcggttaggtgcgtcgcgggggccgcgccatag

SEQ ID NO: 14258 - protein, 123 aa, Unknown
  Obtained from environmental sample
  misc_feature (1)..(123): Xaa is any amino acid
MKVCPSGWRLASWDYDWSELPNGGADGTGAKSKNLKASSGWEGKFGYNGNGTNDYGFSALPGGDGSDEYGDGVFGAWWTSDDDTDFSFVTHVLLRLHDDYIGGYGDDNKGDMLSVRCVAGAAP

SEQ ID NO: 14259 - DNA, 702 bp, Unknown
  Obtained from environmental sample
  misc_feature (1)..(702): n is a, c, g, or t
ttgccggctttgcaagagatgggcgttgagatcgagggagttgggtcgaacctgatcaccgtgcatgggcgcggcgacttcggggcggcggtccacgagatcggcggcgactacatcgaggcggggtcgttcatcgggatggcggcgctgaccgattccgatttgacaatcagcggtgtggacgccggcgttatgcgaatgatactcttccaattcgagcggatcggcatcgtggcggagaccgaccccgcggcgcggacgctgcgggtggcaagtaaccagccgctgaaggtgcgcaaagatataggcggagcgatcccccggatagaggacagcccgtggcccggcttccccaccgacctgctgtcgatacttttagtctgcgccacgcaatcggagggtacgtgtttgatacacgagaagatgttcgagtcccgcctgttttttgttgacaagctggtaggcatgggtgcctcgataatactgtgcgacccgcaccgggcggtggtagcgggaaaatcgcaactgtacgggacggcgatgtccagccccgacatccgcgccggaatggcgctgctcatagccgcgatggcggcgcaggggcatagcaccattaaacatatagagcagatagacaggggctaccagcgcatagacgaacgtctgaacgcgctgggagcaagcgtcgtcaggcacgattag

SEQ ID NO: 14260 - protein, 233 aa, Unknown
  Obtained from environmental sample
  misc_feature (1)..(233): Xaa is any amino acid
MPALQEMGVEIEGVGSNLITVHGRGDFGAAVHEIGGDYIEAGSFIGMAALTDSDLTISGVDAGVMRMILFQFERIGIVAETDPAARTLRVASNQPLKVRKDIGGAIPRIEDSPWPGFPTDLLSILLVCATQSEGTCLIHEKMFESRLFFVDKLVGMGASIILCDPHRAVVAGKSQLYGTAMSSPDIRAGMALLIAAMAAQGHSTIKHIEQIDRGYQRIDERLNALGASVVRHD

SEQ ID NO: 14261 - DNA, 585 bp, Unknown
  Obtained from environmental sample
  misc_feature (1)..(585): n is a, c, g, or t
atgcgtatcaatcacaaccttatcgcgatcaatacccaccggcagttgggcatcagcgagaacaacggttcgaagtcgatggagaagctgtccagcggctatcgcatcaaccgtgccggcgacgacgctgcggggctcgcaatatccgagaagatgcgcggacaagtgcgcggattagccatggcttccagaaacgcgcaagacactatctcccttatacaaacggcggaaggggcgctggccgaaacgcacgacattctgcagagaatacgcgaactggccgtgcagtcggcaaacgacacgaacacggacgcggacaggtctgaaatacaagctgaagtcacgcagctgcgttatgagatagaccggatagccaacaccacggagttcaatacgcggaaactgctgggaggcagcgcccaaggcgtggccgacgaggtgcaagggacggggcggctcaacaataactcccggatcaccatagactccactaagatgggttctctgatgaaaagcgtgtcggaagataaaagctgggtgttcgacggagcgtacatgctcataaagacaaatcaaacgttttga

SEQ ID NO: 14262 - protein, 194 aa, Unknown
  Obtained from environmental sample
  DOMAIN (27)...(167): Bacterial flagellin N-terminus
  misc_feature (1)..(194): Xaa is any amino acid
MRINHNLIAINTHRQLGISENNGSKSMEKLSSGYRINRAGDDAAGLAISEKMRGQVRGLAMASRNAQDTISLIQTAEGALAETHDILQRIRELAVQSANDTNTDADRSEIQAEVTQLRYEIDRIANTTEFNTRKLLGGSAQGVADEVQGTGRLNNNSRITIDSTKMGSLMKSVSEDKSWVFDGAYMLIKTNQTF

SEQ ID NO: 14263 - DNA, 855 bp, Unknown
  Obtained from environmental sample
  misc_feature (1)..(855): n is a, c, g, or t
ttgcaggggaaaaccttgcgggactgggttcggcggcacaatatcaaagatttttttgatattggtagaaatggcgtttgccacgcgattttccccgaaaaggggtttgtccgcccgggctttacgattatcatgggcgacagccacacctgtacccatggggcgttcggcgcttttgccgccggagtcggaactaccgatcttgaggtgggtatactgaaaggtgtctgcgccttccgcaagccggaaactttgcggattaacctgcttgggcaactgccgtccggcgtttccccgaaagacgtaatcctcgctatcatcgccaaaataagcgtttcaggcgcgtcgggaaaagttatggaactgcgcgggcctgtaatttccgcaatgagcatggaaggaagaatgacaatctgcaacatggcaatcgaggcgggagcgactagcggcgtgtgtatgcccgacatgacaactgtaaactacctgtggccctttatcgggcctggcgcttgcgttgcaagcggaagcgataaaacttattcaagcaaagaagaagcgcttgcggatttttcaaaatgggcaagcgatgacgacgctgagtattcgggcgttgtcgatattgactgctcaaaactggagccgcttgttactgtcggatacaaaccggacgaggtaaagcctgtgcgggaacttgcgggaacaaaaatagatcaagtgtacataggctcctgtaccaacggcagaatcgaagatttgcgcgtggcggcggctgtcctgtacggcaaaaaaatcgccgactcggtacgcgcgatcatcgcgtccgctaccacggacatttacgcacaggcgctttaa

SEQ ID NO: 14264 - protein, 284 aa, Unknown
  Obtained from environmental sample
  DOMAIN (1)...(284): Aconitase family (aconitate hydratase)
  misc_feature (1)..(284): Xaa is any amino acid
MQGKTLRDWVRRHNIKDFFDIGRNGVCHAIFPEKGFVRPGFTIIMGDSHTCTHGAFGAFAAGVGTTDLEVGILKGVCAFRKPETLRINLLGQLPSGVSPKDVILAIIAKISVSGASGKVMELRGPVISAMSMEGRMTICNMAIEAGATSGVCMPDMTTVNYLWPFIGPGACVASGSDKTYSSKEEALADFSKWASDDDAEYSGVVDIDCSKLEPLVTVGYKPDEVKPVRELAGTKIDQVYIGSCTNGRIEDLRVAAAVLYGKKIADSVRAIIASATTDIYAQAL

SEQ ID NO: 14265 - DNA, 486 bp, Unknown
  Obtained from environmental sample
  misc_feature (1)..(486): n is a, c, g, or t
atgacaaatataaacgatgatacggatattgttatctgggaagaaaaatattctgtaggaattcatttgattgacagccagcacaaggagcttttctcccttaccaatgaacttttccgcgcctgtatgggtgaaggagatacgcttgacagcgtattcaaggaaactatggagcgaatggttgcctatgtccgtttccattttggggccgaacaggtactgttgcagcggataaagtatcccgattatcatgaacacgtaaagcagcacgaaacactgacacgggaaattcttgaagcggtaaaggaatataattattctaaaagacttgtacctaaccagtttgtccgcatcttaagagactggatattaagccatatcgcccattatgacaagctttatgcggcttatatcgcagcccagagggaaaaggcttgctcagcgacaaggattttaacgcataattttctagttatctttgggtga

SEQ ID NO: 14266 - protein, 161 aa, Unknown
  Obtained from environmental sample
  DOMAIN (20)...(78): Hemerythrin HHE cation binding domain
  misc_feature (1)..(161): Xaa is any amino acid
MTNINDDTDIVIWEEKYSVGIHLIDSQHKELFSLTNELFRACMGEGDTLDSVFKETMERMVAYVRFHFGAEQVLLQRIKYPDYHEHVKQHETLTREILEAVKEYNYSKRLVPNQFVRILRDWILSHIAHYDKLYAAYIAAQREKACSATRILTHNFLVIFG

SEQ ID NO: 14267 - DNA, 693 bp, Unknown
  Obtained from environmental sample
  misc_feature (1)..(693): n is a, c, g, or t
atgtccgtccgcgttggtcgtaaacagcccttatacgcggaacaggcacaattattaggagttattgtggatacaatttggttaagcatttcagcgggaagcggcccggaggaatgcgcccatgccgccgcgcttaccgttcaggtaatactgagggaaacgcgggaaccggatcttaagatcagcgttattgaaagcgaaagcgcccgtgaaaaagggaatataaggtctgccctgcttgcccttgagggggaaggcgcgaaagcgtttgccgattcctggaccggcgtcatccaatgggtttggcagagcagttaccggccacatcacaaacggaaaaactggtttgtgcaggtgaggctctttgccgagcctgagccgtgggaaatgttctcttcggccgacgtgcgttttgagacggcgcgtgcaggcgggccgggcggccagcacgttaataaaaccgaaaccagcgtgcgcgccgtccatatacccacgggaaaaagcgctattgcgagaggcgagcgttcccagttaatgaataaacgccttgccctcgcccggcttgcctccctctttaccgatgaacaaacggaaaaagaaaaacagtcccgatccgcgctgcgccacagccattgggagcttgaacggggaaaccctgtccgcgtctatgacggggaaaccatgaagctataa

SEQ ID NO: 14268 - protein, 230 aa, Unknown
  Obtained from environmental sample
  DOMAIN (123)...(229): Peptidyl-tRNA hydrolase domain
  misc_feature (1)..(230): Xaa is any amino acid
MSVRVGRKQPLYAEQAQLLGVIVDTIWLSISAGSGPEECAHAAALTVQVILRETREPDLKISVIESESAREKGNIRSALLALEGEGAKAFADSWTGVIQWVWQSSYRPHHKRKNWFVQVRLFAEPEPWEMFSSADVRFETARAGGPGGQHVNKTETSVRAVHIPTGKSAIARGERSQLMNKRLALARLASLFTDEQTEKEKQSRSALRHSHWELERGNPVRVYDGETMKL

SEQ ID NO: 14269 - DNA, 360 bp, Unknown
  Obtained from environmental sample
  misc_feature (1)..(360): n is a, c, g, or t
atgtgcggtgtcggcgggacgatgcgggcgctctacaagctcaacaacgcgatcttcgggtcgccgccggaaaaccgcacggtactcgtgaaaaacgccaaaaagatactcggcttgatagccaccgacacgaaattaatggtcggcaggatactgcagatagcgccggagcgcatccatacaataacgccggggttgatcatattaaacacgatcataaaaaaatacgattgcaaaaccatctctgtcagcgaatccggcgtgcgagagggatatctgataagaaacgtattgcatagagacatagggaaaaccggatctcccgttacgcttaccgctttcggttgcaagggatcttga

SEQ ID NO: 14270 - protein, 119 aa, Unknown
  Obtained from environmental sample
  misc_feature (1)..(119): Xaa is any amino acid
MCGVGGTMRALYKLNNAIFGSPPENRTVLVKNAKKILGLIATDTKLMVGRILQIAPERIHTITPGLIILNTIIKKYDCKTISVSESGVREGYLIRNVLHRDIGKTGSPVTLTAFGCKGS

SEQ ID NO: 14271 - DNA, 717 bp, Unknown
  Obtained from environmental sample
  misc_feature (1)..(717): n is a, c, g, or t
ttgagggagcggctctggaagcgtccctcgtttaatgccatgaaaagcggtcctgacccggattttccgtatttaaccgaacaagactactacagatttagaaatcccaaagaatggctcgacgacatagtcgcggtaggcgggaatctttcgcccggaatgctgctttccgcgtatgaacagggaattttcccctggtataaccccgaagaccccattctttggcaatcgcccgacccgcgctgcgtgattttccccgataaaatacacatttccgactctatgcgcaaaattctgaaaaaagacgtatataaaattacatttaacaaagattttacgggcgtaatgaacggctgcgcgaatacaaaacgccggaatcagaacggaacatggatttccggcgatattatcaaggcttatacggaaatgcaccgccttggatgggctcattccgcggaagcgtggcaaaacggggaacttgtaggcggctgttacggcgtgttgatgggcaaggcgtttttcggtgaatctatgttctccttaaagccgaactcgtcaaaagccgcctttttaagccttgcggtaacgctttttactcatggaatagcctttatagactgccaggtgcctacccctcacctgctcagtctgggcggcgaggtaatgccgcgcaaggaatttctggctctgttaaaaatgtctggaatttcacgttaa

SEQ ID NO: 14272 - protein, 238 aa, Unknown
  Obtained from environmental sample
  DOMAIN (51)...(224): Leucyl/phenylalanyl-tRNA protein transferase
  misc_feature (1)..(238): Xaa is any amino acid
MRERLWKRPSFNAMKSGPDPDFPYLTEQDYYRFRNPKEWLDDIVAVGGNLSPGMLLSAYEQGIFPWYNPEDPILWQSPDPRCVIFPDKIHISDSMRKILKKDVYKITFNKDFTGVMNGCANTKRRNQNGTWISGDIIKAYTEMHRLGWAHSAEAWQNGELVGGCYGVLMGKAFFGESMFSLKPNSSKAAFLSLAVTLFTHGIAFIDCQVPTPHLLSLGGEVMPRKEFLALLKMSGISR

SEQ ID NO: 14273 - DNA, 606 bp, Unknown
  Obtained from environmental sample
  misc_feature (1)..(606): n is a, c, g, or t
atgcttatcggaatgttgatcaacatgatgtttatgatcacctcgatgggtttggcctcgctcgttgacgaccacgagatcgactttaatcaggagatgctggtatcgccggtttcgcggtattcgctgatcataggcaagatactcggttcggcgttcgccgcgattgtgagtttggcgggtacgcttatcgtggggtttgctatgggtattaccctatccgtcggcaaattgcttttaatcctggcgctctcgccgctcatgtgcctcgccgccggcgcgttcacaatgatcgtcataggccttataaaggacaagaaagccgcgaacctcgcggtgatgctcgtcaccatgccgcagatgttcctttccggggcaatcatcccgatcaacgacacgaacggcgtgctgctggtgcttaatcgcttaatgcccatgacctactgcctggacttggcgcgggcggtcgtatatgccggtacgccggagtatgacaagatcgtgatgttcaatccggcggtcaacttcgccgccatagccgcgctcacggccgtctgccttaccgtcggaacgctcctcttcgcgtggtcggaaagaaacaggtag

SEQ ID NO: 14274 - protein, 201 aa, Unknown
  Obtained from environmental sample
  SIGNAL (1)...(19)
  misc_feature (1)..(201): Xaa is any amino acid
MLIGMLINMMFMITSMGLASLVDDHEIDFNQEMLVSPVSRYSLIIGKILGSAFAAIVSLAGTLIVGFAMGITLSVGKLLLILALSPLMCLAAGAFTMIVIGLIKDKKAANLAVMLVTMPQMFLSGAIIPINDTNGVLLVLNRLMPMTYCLDLARAVVYAGTPEYDKIVMFNPAVNFAAIAALTAVCLTVGTLLFAWSERNR

SEQ ID NO: 14275 - DNA, 486 bp, Unknown
  Obtained from environmental sample
  misc_feature (1)..(486): n is a, c, g, or t
atgacgaagggcaatctcgcgcatatccggctttcaaaagaagccgtgtcagccgcccttgaaaagataagcgagcgttatgcgcaaaacgcctgcggtcttgagcttgcccgtataggcggcggtataatgatttccgcaaaacgcgaatactgggaaaatcttaaagaaagatacggcagaaagagcgaaggaaaaatatcccgcgccgccatggaaaccctggctattgtggcttatatgcagccagtaacgcgcccggaaattgaaaaaatacgcggagtgtccgcggacaatatgattaggcttcttcttgaaaaaggtcttgttgacgaagccggaaaaaaagacattcccggaaggcccgttatgtacaaaacgacaaaagaattccttaaaatattcggactttcctcgatagcggagcttccgaaactcggagaaagcgacatcgaaaaattcgagcttgagggggagaagtattag

SEQ ID NO: 14276 - protein, 161 aa, Unknown
  Obtained from environmental sample
  DOMAIN (1)...(146): Putative transcriptional regulators (Ypuh-like)
  misc_feature (1)..(161): Xaa is any amino acid
MTKGNLAHIRLSKEAVSAALEKISERYAQNACGLELARIGGGIMISAKREYWENLKERYGRKSEGKISRAAMETLAIVAYMQPVTRPEIEKIRGVSADNMIRLLLEKGLVDEAGKKDIPGRPVMYKTTKEFLKIFGLSSIAELPKLGESDIEKFELEGEKY

SEQ ID NO: 14277 - DNA, 846 bp, Unknown
  Obtained from environmental sample
  misc_feature (1)..(846): n is a, c, g, or t
atggtaaaagttgaatccggtaaaaaaagaatttatcttgattgggcggcgtcttcgccttattcaaaaaccgacaattccgtcccctttggaaacccgtcgtctaaccacagcgaaggccgccttgcaagacagtctcttgaggacgcaagacggcggtgcgcggaggttttaaacgtaccgcctgaaacgctgtactttacgtcgggcggaaccgagtccaacagtatcgcgcttttttcaaatttgacccgtccgggaaaaggaagggttatttcgtctcttgcggaacacgcctctgtaagagaaggaatggtaactttggacaaaatgggaaaatccacaggaagcgttacggttgattccgccggaatggtaacgcctgaaacttttacaaaagctcttgataaatacggcgacgtacgttttgcggcgattatgtcggtaaataatgagacgggggctgtaacagatgtcgcttctttaaaggaagttgtcaaaaaaaggaaagaatccgcgcctatacattttcattgcgatctcgtacaggcaatcgggaaaataccgattgatatttcaaattgggaaattgattcggcttccataagcgcccataaaatttcaggtccgcgagggattgggcttttgtacctgcgtaaacctttggaagcgttttattcaggcggcggtcaggaaaaagggataaggggcggaacggagaacacgcagggagctgcggaactagctaattgtcttgctcaatacgcggacgcaaagacggtacaatttgagtacgaacgcgcagtgtcccgttggaaaaatttgatatttctcttgcggctatag

SEQ ID NO: 14278 - protein, 281 aa, Unknown
  Obtained from environmental sample
  DOMAIN (41)...(268): Beta-eliminating lyase
  misc_feature (1)..(281): Xaa is any amino acid
MVKVESGKKRIYLDWAASSPYSKTDNSVPFGNPSSNHSEGRLARQSLEDARRRCAEVLNVPPETLYFTSGGTESNSIALFSNLTRPGKGRVISSLAEHASVREGMVTLDKMGKSTGSVTVDSAGMVTPETFTKALDKYGDVRFAAIMSVNNETGAVTDVASLKEVVKKRKESAPIHFHCDLVQAIGKIPIDISNWEIDSASISAHKISGPRGIGLLYLRKPLEAFYSGGGQEKGIRGGTENTQGAAELANCLAQYADAKTVQFEYERAVSRWKNLIFLLRL

SEQ ID NO: 14279 - DNA, 780 bp, Unknown
  Obtained from environmental sample
  misc_feature (1)..(780): n is a, c, g, or t
gtggcggaaataaaaactggtacaactttatcgctaaaagatttattttcacagggaatgagaaaagccgcaggagcggcttccagttttgcgagtaaaacgctcggagcgattggaaaagttgacagagcggtctctggcacagccgccaaactcgcggcatttggattaacgctttccgtaggtgcggcggcaaaaggcgttattgagatggatcaccgtatgacacggcttggtgtgtccgcaaatgcgtctgctgaacaaatctcaaaaatgaaaagagccatttttgacgccgctcaagctccggacattaaaattgatccagataaaattgtaagcggtctcgaaattattaaagaccaaaccagtgatctaaaattcgccgaggataacatcagaaacatcgctcttgcgatacaggcgacaggcgaatccggcgagtcaatgggagcgcttttttcggaatttagaaaatttgaatattcaactgaacaaatatcattgatcatggatgatatggtcgcacaagctaatcagggcgctttttcgttagccgattttgcaaaagcggctccgcaaatattttcctcattagaggcaaaaaaaataggagccacgccggaaaatataaaaagcattaacgccgcattgcaaatcatcaatgccggagcaaaaaatccgactaaaacatttgccgctttcaattccgtacttgaggaaataactgatccctcaaaacaaaaggctttaagaaagttggtaaggttaaggagataa

SEQ ID NO: 14280 - protein, 259 aa, Unknown
  Obtained from environmental sample
  misc_feature (1)..(259): Xaa is any amino acid
MAEIKTGTTLSLKDLFSQGMRKAAGAASSFASKTLGAIGKVDRAVSGTAAKLAAFGLTLSVGAAAKGVIEMDHRMTRLGVSANASAEQISKMKRAIFDAAQAPDIKIDPDKIVSGLEIIKDQTSDLKFAEDNIRNIALAIQATGESGESMGALFSEFRKFEYSTEQISLIMDDMVAQANQGAFSLADFAKAAPQIFSSLEAKKIGATPENIKSINAALQIINAGAKNPTKTFAAFNSVLEEITDPSKQKALRKLVRLRR

SEQ ID NO: 14281 - DNA, 618 bp, Unknown
  Obtained from environmental sample
  misc_feature (1)..(618): n is a, c, g, or t
atgcaggtaacagtcctgtttcaatggatatatttgattttatggacgagtttggagagaggtatgggcaagagatctaattttgaggaacttgttaaaggctatgtaaaagaaccaaatgaacttaataatcatgatgtgcaaactgaatcaaatataccccccttacatgatcaacagcacgtatatgatgaacaaaaaacgcaggatgtacaaaatgaattaaacaatcatccgatacaacaagtacaaccagtaaaagatgtacataatgaattagatagtcaaccattacaggatttacaaactttacaggaaaaacagcctgtatatgaagagcataaaatacattatgttcaacctgaacaaaataatcaacatatacaaaatgtaaaacttatacaaacaatacaaaatgaacatgttgtacagtctgtacatgatgtacaacatatcaatttagctatatcaaaagaacaatattataatttaaaaattatttcatccataaaattaatgaatatgacaaaaacgataaatactgtaattgatgaatatattaataataacaaattaataatcgaaaaatatggtgaattttgtaagaatattaaataa

SEQ ID NO: 14282 - protein, 205 aa, Unknown
  Obtained from environmental sample
  misc_feature (1)..(205): Xaa is any amino acid
MQVTVLFQWIYLILWTSLERGMGKRSNFEELVKGYVKEPNELNNHDVQTESNIPPLHDQQHVYDEQKTQDVQNELNNHPIQQVQPVKDVHNELDSQPLQDLQTLQEKQPVYEEHKIHYVQPEQNNQHIQNVKLIQTIQNEHVVQSVHDVQHINLAISKEQYYNLKIISSIKLMNMTKTINTVIDEYINNNKLIIEKYGEFCKNIK

SEQ ID NO: 14283 - DNA, 708 bp, Unknown
  Obtained from environmental sample
  misc_feature (1)..(708): n is a, c, g, or t
atgagggaaatctatcgtcgttttggcgcgtccgaagcggaagcatggcgtataacagacattgcaagggctgtattgagccgcacaagccttaatatttggacggacaaatccgcgcctttccgtggtgagcaaacaaaatttgacgccgttgattttgccgccttggttattgaagaaaattatcaaagtgaagactttaggcgcatattgggaatcaacttttttaacgatgtggcgtggtttaacaaagagggatttgaagacgcattgttctactcatcggtatttttcatggtagaaagcgacaacatcgtaaaagtcccgattgatgaacgaatcgatcgcattgccaaaatttatgaagtactgatcaaagctgaggaaaattcgaaatatcgttttgataaccttattgacattttgacttcaaaactctcaaaagtcaaaataattgctggaaaagcgaaggccgtcacgaagatgactgagccaaagacgaaagaaaagtctgccgagaagaaggttgagcagaagccaaaagcgaaaattacaacaaagaaaactgaaccaaaggcaaaagcaaaaaccgccacgaaaaaggctgagccgaaaacgaaggcgaaggctataacgaagaaaactgaacctaaggctaaagcgaagaccaatacaaagaaggttgaagcaaaagcgaagactgcctaa

SEQ ID NO: 14284 - protein, 235 aa, Unknown
  Obtained from environmental sample
  misc_feature (1)..(235): Xaa is any amino acid
MREIYRRFGASEAEAWRITDIARAVLSRTSLNIWTDKSAPFRGEQTKFDAVDFAALVIEENYQSEDFRRILGINFFNDVAWFNKEGFEDALFYSSVFFMVESDNIVKVPIDERIDRIAKIYEVLIKAEENSKYRFDNLIDILTSKLSKVKIIAGKAKAVTKMTEPKTKEKSAEKKVEQKPKAKITTKKTEPKAKAKTATKKAEPKTKAKAITKKTEPKAKAKTNTKKVEAKAKTA

SEQ ID NO: 14285 - DNA, 411 bp, Unknown
  Obtained from environmental sample
  misc_feature (1)..(411): n is a, c, g, or t
atggaagggattatttcttttcccgaacaggaagacggtttttatactttggaattttccaaacagggttatatcacgtcccgcattgagtttgaagttgtaaataacaatgtatataacggacgcttttcaatatctcccgttatgaggggcgattatctgcgtatagtccttgattggggcagaactcccgccgacatagaccttcatcttataaaagaaggcggttatcacatttcctatcgggatatgcacaatgccgctgacaactccgtaacgcttgaccgcgactcgcgtaacggctttggccccgaaaccattacgataatggaaacagatttgcgggctgtttatcaggtttacgtccatgactacaccaacagaaacagaagtcgtctcgtgccgatctga

SEQ ID NO: 14286 - protein, 136 aa, Unknown
  Obtained from environmental sample
  misc_feature (1)..(136): Xaa is any amino acid
MEGIISFPEQEDGFYTLEFSKQGYITSRIEFEVVNNNVYNGRFSISPVMRGDYLRIVLDWGRTPADIDLHLIKEGGYHISYRDMHNAADNSVTLDRDSRNGFGPETITIMETDLRAVYQVYVHDYTNRNRSRLVPI

SEQ ID NO: 14287 - DNA, 783 bp, Unknown
  Obtained from environmental sample
  misc_feature (1)..(783): n is a, c, g, or t
ttgtacgattggactaccgctatgaacgtggagagcaaatataaaacgtattggtgggagggaaatacgtccaaccatcagggaatttgccccgacggttggcgtatgcccgacaccggagattggaaagcgttgctggcgttcgtgggcgacccttctgttgctggtactaagttgaaagcggaaattgggtggagtttttttgttgacgagacgacggggcacagagacaacagcggtacggacgactacggattttcggcgctgccgggaggtgaaatgaggggcggtagcggttcattcaatggaataggaggttcaggtcattggtgggctatcaaccaagataaacgcgttaatgacatgggtaaccgcgtcgccatgtattatatactcgcaagcgcccacgcggtatacaacacgcacgtcttgaaagatcgagaactctcggtaagatgcgttgcgtatacggaaaatttcaatgtttatgtcaatagcaacggcagtacgaacccgaccggcagcggcatctacaagacgggcgataccgttaccgtaacagcgggaacggcgaatgaagacatgaggttcttaatgtggaccgtgcaaaacggcagcgtaactttacgcgacgctaaaaaagatacgactacgtttatcatgccgagaaacgatgtgacgctgacggcgatcttcgagcggagttatacggttgtgctcatgaatgtcggcgcgggcgcggaaggtaacggcgtatattgggagaagatacggttaagataa

SEQ ID NO: 14288 - protein, 260 aa, Unknown
  Obtained from environmental sample
  misc_feature (1)..(260): Xaa is any amino acid
MYDWTTAMNVESKYKTYWWEGNTSNHQGICPDGWRMPDTGDWKALLAFVGDPSVAGTKLKAEIGWSFFVDETTGHRDNSGTDDYGFSALPGGEMRGGSGSFNGIGGSGHWWAINQDKRVNDMGNRVAMYYILASAHAVYNTHVLKDRELSVRCVAYTENFNVYVNSNGSTNPTGSGIYKTGDTVTVTAGTANEDMRFLMWTVQNGSVTLRDAKKDTTTFIMPRNDVTLTAIFERSYTVVLMNVGAGAEGNGVYWEKIRLR

SEQ ID NO: 14289 - DNA, 411 bp, Unknown
  Obtained from environmental sample
  misc_feature (1)..(411): n is a, c, g, or t
gtgttagttgaagacaagctcttcgcgaccttagacgccacaacccgccgctttgaaccgtctcccggaaagcccgtcctgctcacggacacagtgggctttatcaggcggcttccccactcgctcatcaaagccttccgttcaactttggaagaggcgtcgcactccaatctgttgattcacgtccttgacgcctccgaccccgcctgcgaagaatgttacaagacgacacttgccgtacttgcggaattgggcgcgggagagataccggttataaccgcactgaataaagttgacaagctggacgacacggcgcttgttgagggaaaatttcctgattgcatagcgatttccgttaaaagcgggtacgggctggatgaactgaagcgccggatagcggaacttttgtaa

SEQ ID NO: 14290 - protein, 136 aa, Unknown
  Obtained from environmental sample
  DOMAIN (2)...(99): GTPase of unknown function
  misc_feature (1)..(136): Xaa is any amino acid
MLVEDKLFATLDATTRRFEPSPGKPVLLTDTVGFIRRLPHSLIKAFRSTLEEASHSNLLIHVLDASDPACEECYKTTLAVLAELGAGEIPVITALNKVDKLDDTALVEGKFPDCIAISVKSGYGLDELKRRIAELL

SEQ ID NO: 14291 - DNA, 621 bp, Unknown
  Obtained from environmental sample
  misc_feature (1)..(621): n is a, c, g, or t
atgacaagtacagccctaaataaagtttcgtcgagtacggcggttttggacattgcgaatgatcccgcggtaattaagcttattgaatacgccaaggaaaagaagtccctttccaatgaagaactttcggattatctccccgagtatatcgccgacaagatcgatcaggtgttggtgcttttaattgccaataatgttcatattattgatgaagatacgaccggagaggatgaaacggagccggaggaacggaaaggcgcgggcgccgaaaaaaaacgcctggtctataatgagaaagaatccaccgtcgatgatcccatcaggctctatttgcgggaaatcggtcgggaaaacctccttaccggggaacaggaaattgagctttctaaaaaaatggaggaaggggagaacattatcaaaagggtgatcaaaaaatccggtatgatcatcccggaattctaccatattgcccaaaaggccttttcaaaacgggatcttagggagttgaacctctccaaaaaagagattaccgaacacatgaccgaaagacggcggctcaatcagttttataaggaaactctgcgccttaatctgacggatctaaagactatatcgatatga

SEQ ID NO: 14292 - protein, 206 aa, Unknown
  Obtained from environmental sample
  DOMAIN (16)...(85): Sigma-70 factor, region 1.1
  misc_feature (1)..(206): Xaa is any amino acid
MTSTALNKVSSSTAVLDIANDPAVIKLIEYAKEKKSLSNEELSDYLPEYIADKIDQVLVLLIANNVHIIDEDTTGEDETEPEERKGAGAEKKRLVYNEKESTVDDPIRLYLREIGRENLLTGEQEIELSKKMEEGENIIKRVIKKSGMIIPEFYHIAQKAFSKRDLRELNLSKKEITEHMTERRRLNQFYKETLRLNLTDLKTISI

SEQ ID NO: 14293 - DNA, 777 bp, Unknown
  Obtained from environmental sample
  misc_feature (1)..(777): n is a, c, g, or t
ttggaacatgcatttcaggaaatcccaaagctccttcttacccaggaggactttctggcaaggctcaagagaacctttattgagaaaaaccaggaatacgataaggcgaagaccgcggaagcggaatttcggaatctcctctttgaggcggaaacccttagggaaaaagcggaaaaaaacatggatgccatctccacccagcgggagtatgaggctctggacaaagaaattcgggacgcggcggagaaagaacagcagttccgcaaggatcttcagcgggaggagcggataatctccgacttggacgagcaaatgaagcagagttccgccctaatcgaacagcaggaagcggaattggcggaacgccggaaaggcgttgaggcagaaatcgcggcaaagaaagcccatgtcgatgaactcaccgaaagggaaaaaagcgtcaccagggatatggatccggaagttctttttaagtttgaacggatcatcagaaataaaatgggcaaaggcattgtcgccattaaaggcggggtttgcctgggctgccacatgattctccccgctcaatttgccaatgatgtccggctgggcaaggaaatagttttttgcccctattgttcccggattttattctacgaagagtccgaagagggagaggaagaatttttcgatgccgaggattcaggcagcctttcggatctggatgatattgacgaagaagactacgaagaggaagaagaggaagacgaaaaggttaatatagattacgatgagtaa

SEQ ID NO: 14294 - protein, 258 aa, Unknown
  Obtained from environmental sample
  DOMAIN (1)...(214): Uncharacterized ACR, COG1579
  misc_feature (1)..(258): Xaa is any amino acid
MEHAFQEIPKLLLTQEDFLARLKRTFIEKNQEYDKAKTAEAEFRNLLFEAETLREKAEKNMDAISTQREYEALDKEIRDAAEKEQQFRKDLQREERIISDLDEQMKQSSALIEQQEAELAERRKGVEAEIAAKKAHVDELTEREKSVTRDMDPEVLFKFERIIRNKMGKGIVAIKGGVCLGCHMILPAQFANDVRLGKEIVFCPYCSRILFYEESEEGEEEFFDAEDSGSLSDLDDIDEEDYEEEEEEDEKVNIDYDE

SEQ ID NO: 14295 - DNA, 525 bp, Unknown
  Obtained from environmental sample
  misc_feature (1)..(525): n is a, c, g, or t
gtgtatgtttgcaatccggcggttgtaatattaccggctatggtacttgttccggtaacactaactgatgccgcgcctaacgtaccgcttgctaacctaaaatctccgttaactgataaagcgcctatactgcttccgccgtttagtacgccgttacctgttattgttaatgcgtgcgaacctccggtaatggttccaagcgttacggttgaaccttgtaatgttaaattaccgccaagcgttaccgcccctgtatatgtttgtgttcctgttgtggtaatatctgtgttaatggttgcagtccctgatactgacaaagtattaatgccgcttccgccgcttaaagttccattaccggtgattattaatgatttcccatttcccgtaattgttccaagcgctgccataccggaagttgtagttaatgttacatcattgtcaagaattactgctccgtatgttttgatttcccgcagttgtcgtaacatttgcgcctatatgacttgttccggttacactaactga

SEQ ID NO: 14296 - protein, 174 aa, Unknown
  Obtained from environmental sample
  misc_feature (1)..(174): Xaa is any amino acid
MYVCNPAVVILPAMVLVPVTLTDAAPNVPLANLKSPLTDKAPILLPPFSTPLPVIVNACEPPVMVPSVTVEPCNVKLPPSVTAPVYVCVPVVVISVLMVAVPDTDKVLMPLPPLKVPLPVIINDFPFPVIVPSAAIPEVVVNVTSLSRITAPYVLISRSCRNICAYMTCSGYTN

SEQ ID NO: 14297 - DNA, 879 bp, Unknown
  Obtained from environmental sample
  misc_feature (1)..(879): n is a, c, g, or t
atggtcagatcggccgagatgcggttcgttaacgcggtatcaatcaatgttacaggaacaagttctataaacgcagatgtttcgacaacaggaaatcaggcatatacaggatcggtaacgcttggcggttcgggtacaaggactttaacaagtacaggcggcagtattacctttacaggtactgtaacaggcgcgggtattacagttaacgcgtatcatggaatatcgcttgcaaatgccgcaaacgcgttgagcggaaccgtaacgcttaataatactcaatcgggaaccccagccggtaatattactttcacaaatacttccgcaacaattaatttgtcggcggaaaatgaagctgtcgccggaaatataataataaaacagacaggaaatttatctgttgtctcgctaaaaacaaatacaagcggcgatattacaattacggcgacaggctcggtaactcagacaggcgcgataaacacagacagcctgacagtagagaccgacgccggaattacgcttggcggaagtaatgcagttaatactgtaaatttaaaaagtaatgccgtatcttccgcgcagggaagtatcacctataataataatgctggagcgtcaaatacgcttgaagtaacagcggctgcaccgggaaatataacaataatcgagacaacaggaacgattgatattgacagtattacatcaggcgttgatcttattttaactgncaatgctgatattaataccaaaggaataaatgtttcaggtaaaataacgctgaatgccggcggagatataaccgttagcggaggtataaccgcacatcagcttgcagcgacagcaaacgggtaccggtattgttacagtaaacacggttaa

SEQ ID NO: 14298 - protein, 292 aa, Unknown
  Obtained from environmental sample
  misc_feature (1)..(292): Xaa is any amino acid
MVRSAEMRFVNAVSINVTGTSSINADVSTTGNQAYTGSVTLGGSGTRTLTSTGGSITFTGTVTGAGITVNAYHGISLANAANALSGTVTLNNTQSGTPAGNITFTNTSATINLSAENEAVAGNIIIKQTGNLSVVSLKTNTSGDITITATGSVTQTGAINTDSLTVETDAGITLGGSNAVNTVNLKSNAVSSAQGSITYNNNAGASNTLEVTAAAPGNITIIETTGTIDIDSITSGVDLILTXNADINTKGINVSGKITLNAGGDITVSGGITAHQLAATANGYRYCYSKHG

SEQ ID NO: 14299 - DNA, 771 bp, Unknown
  Obtained from environmental sample
  misc_feature (1)..(771): n is a, c, g, or t
atgaccatcgaagaaatcggaaatcttggaacaggccatattgggggagccatgtcaattgttgaccttttggctctgttatactttcacaggatgaaagttgatccgcagaacccgcgctgggaagaacgcgatcagctggtagtgtccaaaggccactcgggccctgccgtttacgcgactttggcgcttaagggcttttttcccaaggactggcttactaccctgaataagggcggaacaagcctccccagccactgcgaccgtaacaagactcccggcatcgacatgaccacaggctcccttgggcagggtttttcagccgcaatcggcatcgccctcggcttaaagatggataaaaaaacacagaccgtatacgcgattatcggtgacggcgaatccaacgaagggcaggtttgggaaggcgcgttattcgcgggctttcaaaagctccccaacttaatcgcctttactgattacaataaacaacagcttgatggctttaccaaagacattttggacatgggaaacatcgccgcaaagtgggaacaattcggttggttcactcaggaagttgacggtcacgacattgtcgctttagatgccgcgattgaaaaagctctagcggaaaaagaaagggcttcgatgatcgttatgaacacaatcaagggaaagggctgttcctttgcggaaggcgtagagaaaaatcacagtatggcttttgacatggaaaaggcaaaagaagccattgccgcgttggataaggagtaa

SEQ ID NO: 14300 - protein, 256 aa, Unknown
  Obtained from environmental sample
  DOMAIN (79)...(219): Thiamine pyrophosphate enzyme, C-terminal TPP binding domain
  misc_feature (1)..(256): Xaa is any amino acid
MTIEEIGNLGTGHIGGAMSIVDLLALLYFHRMKVDPQNPRWEERDQLVVSKGHSGPAVYATLALKGFFPKDWLTTLNKGGTSLPSHCDRNKTPGIDMTTGSLGQGFSAAIGIALGLKMDKKTQTVYAIIGDGESNEGQVWEGALFAGFQKLPNLIAFTDYNKQQLDGFTKDILDMGNIAAKWEQFGWFTQEVDGHDIVALDAAIEKALAEKERASMIVMNTIKGKGCSFAEGVEKNHSMAFDMEKAKEAIAALDKE

SEQ ID NO: 14301 - DNA, 603 bp, Unknown
  Obtained from environmental sample
  misc_feature (1)..(603): n is a, c, g, or t
atgtcctgcgggaataggcgtatcggcatactcggcggggtctttgacccggtgcatagcgggcatcttgccgttgcgctcttggccagggagcatttcgggctaagcgaggtggtgtttgtgccgagcggcgcgccgccgcacaagccggcggtggccgtttctcccgaagatcgtttgaatatgctcaatttggcgcttacgggcttggacgggtgcagcgtttgggacggggagctgcgccgcagcgggtattcctatactattgatactttgaatgagttgagcgaacggtacggggccgcgaagttttattttatcataggcacggacaacctgccggagatagttaaatggcgctcgtacgaggggataatagagcgtgtgacgttctgcgcggcctttcgtcctggctacgccgccgaccgtccggaggcgctcgccgcggcggatatacaggatttcccggggcctatgtggggctcgagttccacgatgctacgcgagtatttgagcaaggggcactcgtgcaaattcctgataccggacgccgtcctcggntacatacgggatagggggttgtatggatattcaaacgggtaa

SEQ ID NO: 14302 - protein, 200 aa, Unknown
  Obtained from environmental sample
  DOMAIN (10)...(170): Cytidylyltransferase
  misc_feature (1)..(200): Xaa is any amino acid
MSCGNRRIGILGGVFDPVHSGHLAVALLAREHFGLSEVVFVPSGAPPHKPAVAVSPEDRLNMLNLALTGLDGCSVWDGELRRSGYSYTIDTLNELSERYGAAKFYFIIGTDNLPEIVKWRSYEGIIERVTFCAAFRPGYAADRPEALAAADIQDFPGPMWGSSSTMLREYLSKGHSCKFLIPDAVLGYIRDRGLYGYSNG

SEQ ID NO: 14303 - DNA, 747 bp, Unknown
  Obtained from environmental sample
  misc_feature (1)..(747): n is a, c, g, or t
atgcggataaaaacccatttaggcggcaacgatgcaagtatcgttctgctcatagctatagtgctgcttctggcgggcggcatcgttattgcgatatacggcttacgcagtgatccggtggatgaaatactctccagtgaccgcgtcattagcgtattgtatattatcgagaaagatcaaaaacccctcagtacctttgtgctgatgtgttaccccaaaacccgcagggcggcgattttcgacattcccggcgaaatagggacgttgctgcgacggattaaccgcgttgaccggattgataccgtgtacaaccccaacaggatttccccttttgaaagtgaaattgaaagcctgctgggattagatattattttttcgattgttgttagcgccgaaaatcttggcaaggcggtagaccttattgagggggtggagctttttattccctcgcgggtggatatacatgacgaagaaaagctggtgttgttcccttccggcataagccgcctagacggggacaaggctatgacctatataagctatctggcgccggacgaagacgctgaaatggccgtattccggcggcagcgcttttttctgggttttctcaagcgtcaggcggagatgaatgatgtgttgaaaagcgccgctgtttcccatctatatcagtcttttttgcacaccaacctgaatcagcgtacccgaatccgcctgtttgatgaattgccgccatctcggccgatctga

SEQ ID NO: 14304 - protein, 248 aa, Unknown
  Obtained from environmental sample
  misc_feature (1)..(248): Xaa is any amino acid
MRIKTHLGGNDASIVLLIAIVLLLAGGIVIAIYGLRSDPVDEILSSDRVISVLYIIEKDQKPLSTFVLMCYPKTRRAAIFDIPGEIGTLLRRINRVDRIDTVYNPNRISPFESEIESLLGLDIIFSIVVSAENLGKAVDLIEGVELFIPSRVDIHDEEKLVLFPSGISRLDGDKAMTYISYLAPDEDAEMAVFRRQRFFLGFLKRQAEMNDVLKSAAVSHLYQSFLHTNLNQRTRIRLFDELPPSRPI

SEQ ID NO: 14305 - DNA, 630 bp, Unknown
  Obtained from environmental sample
  misc_feature (1)..(630): n is a, c, g, or t
atgaacaccaacctacatgtactggaagcctacacaaacctagtccgcgcctgcggagacaagcgcgcgcataaggcgctggaatctctattgcacataacgcttgaaaaaattatcaaccgtgattttcactttgagttgttttttgacatggattggaattcactgacaaaaaatatttcctacggtcatgatattgaaggaagctggctattatatgaagcggcattggctgtcggcgatgaaagccttatttccaaagtaaagcaaaccgccttagctattgcggaagttacctataatgccgccatcgaccgcaaaaacggcggactaatcagcggttgtaattcggagggacacaacgccaaaaaagaatggtggacccaagcggaagctgttgtgggtttttacaatgcgtatgaattatccggcgagcaaaaatattttgacgccgcggataacatttggggttacattcagaaatattttgtggatcacacaaatggcgaatggcacaatgaattgtttattgataattcgccggatgtaagtatgcctaaggctgggttttggaagtgtccttatcataatgcaagagcttgtttggaagtggtgagaaggatggggtaa

SEQ ID NO: 14306 - protein, 209 aa, Unknown
  Obtained from environmental sample
  misc_feature (1)..(209): Xaa is any amino acid
MNTNLHVLEAYTNLVRACGDKRAHKALESLLHITLEKIINRDFHFELFFDMDWNSLTKNISYGHDIEGSWLLYEAALAVGDESLISKVKQTALAIAEVTYNAAIDRKNGGLISGCNSEGHNAKKEWWTQAEAVVGFYNAYELSGEQKYFDAADNIWGYIQKYFVDHTNGEWHNELFIDNSPDVSMPKAGFWKCPYHNARACLEVVRRMG

SEQ ID NO: 14307 - DNA, 576 bp, Unknown
  Obtained from environmental sample
  misc_feature (1)..(576): n is a, c, g, or t
gtgccgcttatcggcatggttacgcggcttgtcgagcagaaaggggtaggggagtgtttcgggcccacttatggctccatgtggaacatctgcagggacatggatctgcaaattgtgcttataggcaccggcgagtcatggtgcgagcatgagataggcagcctttcatacaggcttccgaatttcaaggcgcacatcggctacagcgaggaaataagccacctcatagaagccggctccgatttcttccttatgccaagccgttatgagccatgcggccttaaccagatgtattcgctcgtctatggcacgcttcccatcgtaaggagaaccggcggccttgttgacactgttgaaaactacaatgagaaaaagggaaccggcacgggctttatgtttgaccatctggacccttcctcgatttacaacacggtgggctgggctgtctgggcctggtacaacaagcccgagcacatcaaagcgatgcaaataaaggcgatgaagcagaatttttcctgggaaaaatccgcgaaaaaatacgtggagctgtacgagaagacgcttaacaagctttga

SEQ ID NO: 14308 - protein, 191 aa, Unknown
  Obtained from environmental sample
  misc_feature (1)..(191): Xaa is any amino acid
MPLIGMVTRLVEQKGVGECFGPTYGSMWNICRDMDLQIVLIGTGESWCEHEIGSLSYRLPNFKAHIGYSEEISHLIEAGSDFFLMPSRYEPCGLNQMYSLVYGTLPIVRRTGGLVDTVENYNEKKGTGTGFMFDHLDPSSIYNTVGWAVWAWYNKPEHIKAMQIKAMKQNFSWEKSAKKYVELYEKTLNKL

SEQ ID NO: 14309 - DNA, 819 bp, Unknown
  Obtained from environmental sample
  misc_feature (1)..(819): n is a, c, g, or t
atgccgcaaaacgaactcactaatatcaacgaacagatacaagaggccgccggagtaattcgccgcggtggggtggttgcgtttcctaccgagacggtgtacgggcttggggccaacgcgtttgacgccgaggctgtggcgcgtgtttttgaggttaagcggcggccttattttgatcctttgatagtgcatatttgcgaaagagagcagcttggcggcttggcggttgatgtccccgcggccgctcaaaggcttattgacgtcctttggccggggccgctgaccgtcgttctccctaagaagcccgccgttcccgatatagtgaccgccggcctgccgggcgtcgcgttgcgtatgccttcaaacgagatcgctcgcgggctgatacgcgccgccggcgtccccgtcgccgcgccgagcgccaatctattcggttcagtcagccctactgcggcggatcacgtgcgggagcagctcggttccgtggtggatatgatcatcgacgggggagagtgtacggtggggatagagtcgaccatcgtctcgtttttgggggatcagcccgcgttgttgcggccgggcggggcggcgcttgaggagatagaggagatcgtgggcccggtggccgtgccggggaacgaggagtcggtcaaccagtcgccgggacggagcgggacgcactacgccacccgtacgccgttggtattggtagacggggttagcggaattggcggtctttccggaaaaatcggtctgattgcgctctcgccggcatccgtcccggatccgccgccctgccgccttctgtcgtcaagatag

SEQ ID NO: 14310 - protein, 272 aa, Unknown
  Obtained from environmental sample
  DOMAIN (17)...(194): yrdC domain
  misc_feature (1)..(272): Xaa is any amino acid
MPQNELTNINEQIQEAAGVIRRGGVVAFPTETVYGLGANAFDAEAVARVFEVKRRPYFDPLIVHICEREQLGGLAVDVPAAAQRLIDVLWPGPLTVVLPKKPAVPDIVTAGLPGVALRMPSNEIARGLIRAAGVPVAAPSANLFGSVSPTAADHVREQLGSVVDMIIDGGECTVGIESTIVSFLGDQPALLRPGGAALEEIEEIVGPVAVPGNEESVNQSPGRSGTHYATRTPLVLVDGVSGIGGLSGKIGLIALSPASVPDPPPCRLLSSR

SEQ ID NO: 14311 - DNA, 846 bp, Unknown
  Obtained from environmental sample
  misc_feature (1)..(846): n is a, c, g, or t
ttggatatcgacgtgtatntgcgcatcgcccccgagacgtacttgaagcgggctatcgccggcgggtttgaccgagtgtacgagttcgccagatcgttccgcaacgagggcgtggacgcctcgcacttaccagatttcacgttgctcgaatactacgccgcctattggaattacgtggacaacatggcgtttaccgagaaattgatgaagcacttattgatggaggtaaagggtgggttgaaattgacgtatgagaatacggagatcgattttgacggggattggccgaggatatcgtttagggatttgattttgagggattgcggcatagatattgacaaattcgcgacaaaagaggagttgcaaaaggagcttgacaatcacgatatgaagtttgataccgatgtgaacgtggcgaaggcgggtcgcgggacgcttatagacttattgtacaagaaagtttcccgtccgtcgctgataaaaccgatcttcatcacccatcacccgcttgacttgtcgccgctggctcgcagtaacgacgacaatccggcggtggttgatcgtttccagcttgtggtaaacggttgggaggtggtaaacgcttactcggagcttgtagaccctgtggaccaagcggcccgcttccgccagcaagccgcggccagggcgcaaggagacacggagaccatggacatcgacaacgactttctgctctgcatggagtacggaatgccgcctatttcggggtgggggatgggcatagacaggatcgtggcgctgttgacgaacgcctttacgttgcgtgacgctgtactctttccgctattgagaccggagaacaactaa

SEQ ID NO: 14312 - protein, 281 aa, Unknown
  Obtained from environmental sample
  DOMAIN (1)...(278): tRNA synthetases class II (D, K and N)
  misc_feature (1)..(281): Xaa is any amino acid
MDIDVYXRIAPETYLKRAIAGGFDRVYEFARSFRNEGVDASHLPDFTLLEYYAAYWNYVDNMAFTEKLMKHLLMEVKGGLKLTYENTEIDFDGDWPRISFRDLILRDCGIDIDKFATKEELQKELDNHDMKFDTDVNVAKAGRGTLIDLLYKKVSRPSLIKPIFITHHPLDLSPLARSNDDNPAVVDRFQLVVNGWEVVNAYSELVDPVDQAARFRQQAAARAQGDTETMDIDNDFLLCMEYGMPPISGWGMGIDRIVALLTNAFTLRDAVLFPLLRPENN

SEQ ID NO: 14313 - DNA, 402 bp, Unknown
  Obtained from environmental sample
  misc_feature (1)..(402): n is a, c, g, or t
gtgataggcgcttgcctttgtcatacggagctggaacagcacgaatgtccccaggacatacagggaaaaatagaaattgccgtggaagagatttttgtaaacatcgcgagttatgcctacagcccgggcaatggcaatgctgtcatatttatttccgttaccgaccaaatagtaatccggtttgaagatacgggtaagccctataaccctcttgcgaaaccggagccggatttggacaaaccgttgatggatcgtgacataggcggcttgggcgtttttcttgtaaagaaactgatggacaatgttgaatatacgcgtgttgggaataagaatgtgctggtgatgaccaagggactggggatcagggacttgggatcggggactgaagatcgttgttcgtaa

SEQ ID NO: 14314 - protein, 133 aa, Unknown
  Obtained from environmental sample
  misc_feature (1)..(133): Xaa is any amino acid
MIGACLCHTELEQHECPQDIQGKIEIAVEEIFVNIASYAYSPGNGNAVIFISVTDQIVIRFEDTGKPYNPLAKPEPDLDKPLMDRDIGGLGVFLVKKLMDNVEYTRVGNKNVLVMTKGLGIRDLGSGTEDRCS

SEQ ID NO: 14315 - DNA, 402 bp, Unknown
  Obtained from environmental sample
  misc_feature (1)..(402): n is a, c, g, or t
atggaaaactggctgggcgcggggcccgcaggttccggaacgatcatcaatgataaaacaggcacgggaaagcggtcaacttatccggaagatattgaaagctaccttagtataccacgcccccgcatcgatcacgccgtagtagaagaattgagcaggacagacctgattaaggaaacactgctcatgggattcagatattgcgaagggccggacaaggcgcttttcaaacagcgctttggctgcgggattgaggacattatccccgaaacaatcgccctctggagcggacgggatttttttcagacagggcaattaaagccgtcaaaacagggcctgctttttgtaaatggcttcttacacgatgcctttagagaattggaaatagggactggggactga

SEQ ID NO: 14316 - protein, 133 aa, Unknown
  Obtained from environmental sample
  DOMAIN (2)...(114): HemN C-terminal region
  misc_feature (1)..(133): Xaa is any amino acid
MENWLGAGPAGSGTIINDKTGTGKRSTYPEDIESYLSIPRPRIDHAVVEELSRTDLIKETLLMGFRYCEGPDKALFKQRFGCGIEDIIPETIALWSGRDFFQTGQLKPSKQGLLFVNGFLHDAFRELEIGTGD

SEQ ID NO: 14317 - DNA, 468 bp, Unknown
  Obtained from environmental sample
  misc_feature (1)..(468): n is a, c, g, or t
atgaacagcacgacagacgcggtttctatgctgaaaagcagcgcgcggaaaaactcggcggcgatagcttcgcccgaggctgcccggcagaataaattaaaagttctaaaaaagcatatagccggccgcccggacaatattacgcggtttattattctgacgaatgactctctggtgaaaaaacagtcctgcccgctaaaaggcgcggtgacttctctggttttttcctgttgtaaaaaccggccgggcggcttgtacgaaatcctgggttttttggccaaagaaaaaattaacatgaccaagattgaatcgcggccgagcaaagcggcgatgggtgattatattttctttatcgatattgacggcagtccgcaaaatgagaaaattaacacggctctgcaaaatattgagaaacacagcgcgccgggcagttttaaaatactcggtgtgtaccaacggcagaaatag

SEQ ID NO: 14318 - protein, 155 aa, Unknown
  Obtained from environmental sample
  DOMAIN (72)...(150): ACT domain
  misc_feature (1)..(155): Xaa is any amino acid
MNSTTDAVSMLKSSARKNSAAIASPEAARQNKLKVLKKHIAGRPDNITRFIILTNDSLVKKQSCPLKGAVTSLVFSCCKNRPGGLYEILGFLAKEKINMTKIESRPSKAAMGDYIFFIDIDGSPQNEKINTALQNIEKHSAPGSFKILGVYQRQK

SEQ ID NO: 14319 - DNA, 411 bp, Unknown
  Obtained from environmental sample
  misc_feature (1)..(411): n is a, c, g, or t
atgctagaccagaggatacttagagaaaatcctgaagcggcgcgcgcgctgctgagcaaacgcaattttgacttaaccttactggacgattttctggcggctgaccggcgttggaaagacgcgcagagtgcgttggatgaactgcgcgcaaagctcanagcggcgtccaaaaccaagcccacgccggaaatcatcgcggccaataaaaaactttcggaagaaataaaacaaaaagaaaaagaaacggcagttctggaggaagaacaaaaactaaattgttgtttattcctaatttgccggatgaaaccactcctgacggcnaatccgaggcggataatcaagaaatacgccgttggggtgagccggcccagcgggattttccggtcttggcgcatgatgaaatcggcgtga

SEQ ID NO: 14320 - protein, 136 aa, Unknown
  Obtained from environmental sample
  DOMAIN (1)...(99): Seryl-tRNA synthetase N-terminal domain
  misc_feature (1)..(136): Xaa is any amino acid
MLDQRILRENPEAARALLSKRNFDLTLLDDFLAADRRWKDAQSALDELRAKLXAASKTKPTPEIIAANKKLSEEIKQKEKETAVLEEEQKLNCCLFLICRMKPLLTANPRRIIKKYAVGVSRPSGIFRSWRMMKSA

SEQ ID NO: 14321 - DNA, 801 bp, Unknown
  Obtained from environmental sample
  misc_feature (1)..(801): n is a, c, g, or t
atggatctgatcaagaaaatgagccgagaggcggtgaacgaaaggataaagtccggggaagatgtcataaaaaccctgcaagatgatcttgcggctttgacttcgggattcgacagcccaagaattgccgcggcggacaaatgctataacctcattgcttccatgaagcaatttgttttttttgattttagttccgccatcagaaaattcgatacggagtttaaagaaggcgattttcttacccagttgaaatttgtcccggtggatatttccgttctggcttccgatctgtctgtttttttgtctgtgctgccgtcagcggggaaagaagacgactggaaaaccgtttttgaaataattaagtattgtaaaggcgggaccgatgtcattcccctggcgcagtggaacaacattttattgaatttagccgatcttaagcattcaaggatttttgaacttcttgggaggcttgcaacaggtaatcctgttctggagatcaagcccaacgttccgcatgaagccttgtccgcagtttggctggaacgcaaaaccagcgaaataagggaaatgatcaacggtataaacgaaattcagcggcaagcccaaataaactccctggaacaatcggtttttggtccccttgcggttatacggcttaatttttatacaccggaaagggggagagctcttatggagagaggggtagatggctatagctacgccatggcgctgaaccacctcattgcttacattcaggaatttctcagcaaagagattcaggagctttgcgacatactttga

SEQ ID NO: 14322 - protein, 266 aa, Unknown
  Obtained from environmental sample
  misc_feature (1)..(266): Xaa is any amino acid
MDLIKKMSREAVNERIKSGEDVIKTLQDDLAALTSGFDSPRIAAADKCYNLIASMKQFVFFDFSSAIRKFDTEFKEGDFLTQLKFVPVDISVLASDLSVFLSVLPSAGKEDDWKTVFEIIKYCKGGTDVIPLAQWNNILLNLADLKHSRIFELLGRLATGNPVLEIKPNVPHEALSAVWLERKTSEIREMINGINEIQRQAQINSLEQSVFGPLAVIRLNFYTPERGRALMERGVDGYSYAMALNHLIAYIQEFLSKEIQELCDIL

SEQ ID NO: 14323 - DNA, 789 bp, Unknown
  Obtained from environmental sample
  misc_feature (1)..(789): n is a, c, g, or t
atgccgtccaacggaacttacgggcttgcgtccggaaacgacaacgcgtttaaactgcccgccgtttccttaaaaaacaacgaagatgataacgcaaactggcaaattgtttcccgctttaaacctttaggcgaaggcgagatttattccgtgcaattcggctccgccgatgtaaccgcgtcgttaagcgttaaaaaatcaaaccttattttatcattaacttccgcttccaaaaccgctcaggaaacgttaaaactgcccaaagaagacgattcatttgccgccgtctccgtaaaatttattattaacaacggattgttatcggcaaaacttgcttttgtaaagccaaatgaaaattttaacagccaaaaagaacctgttataaatccaatcagcgtgtcggccgaggttgataaagattttaaagtcatacttggaaaccggcaaaaaaaaccggcggacaacgcgcaaaccgcggaggacaagaacccttcggtttcagaacctccggtttcgggatctccggttcaggaaccatcggttaaagaaccatcggctaaagagccgccggttaaagagccgccggctaaagaaccgccggttccaaaacaatcctttacggcgctttgggacgaatttgcgattcttcgccttcccgaagtaaaaattattaatatcaaaaaaaatacgaaagaagccaaagttgatgagactgcagctgtcgaaactgaactgccggaaacgcccgcagctaatatccacgatgacgaatcggctttacctgaataa

SEQ ID NO: 14324 - protein, 262 aa, Unknown
  Obtained from environmental sample
  misc_feature (1)..(262): Xaa is any amino acid
MPSNGTYGLASGNDNAFKLPAVSLKNNEDDNANWQIVSRFKPLGEGEIYSVQFGSADVTASLSVKKSNLILSLTSASKTAQETLKLPKEDDSFAAVSVKFIINNGLLSAKLAFVKPNENFNSQKEPVINPISVSAEVDKDFKVILGNRQKKPADNAQTAEDKNPSVSEPPVSGSPVQEPSVKEPSAKEPPVKEPPAKEPPVPKQSFTALWDEFAILRLPEVKIINIKKNTKEAKVDETAAVETELPETPAANIHDDESALPE

SEQ ID NO: 14325 - DNA, 438 bp, Unknown
  Obtained from environmental sample
  misc_feature (1)..(438): n is a, c, g, or t
gtgcaatccgcaacgcggacccgacgacatcaatcgcaaatcgttgcaaatctttccaagtttgatggccaaacgtttcaaaattcccgaatagcccaccatacaagaggtgtccgaagttacttccaccaaatttttggccaaatgaacatcccaaccggtaatttttttcagttccttgatgcacagttcgctgtagccgggctcggagcaaatgcctgttccgatggcggttgcgcccatattgcattcgagaaaatctttggaaacaaactcctgcttgcgcaattcgcttttcagcaaatcggcaaaaccctgaaacgtttgtcccaacgtcatcggcacagcatcttgcaactgcgtacgtcccattttgatgatatgcttgtatgctttcgctttcttatcaagcgcctcaatcagatagtttatggctaa

SEQ ID NO: 14326 - protein, 145 aa, Unknown
  Obtained from environmental sample
  misc_feature (1)..(145): Xaa is any amino acid
MQSATRTRRHQSQIVANLSKFDGQTFQNSRIAHHTRGVRSYFHQIFGQMNIPTGNFFQFLDAQFAVAGLGANACSDGGCAHIAFEKIFGNKLLLAQFAFQQIGKTLKRLSQRHRHSILQLRTSHFDDMLVCFRFLIKRLNQIVYG

SEQ ID NO: 14327 - DNA, 546 bp, Unknown
  Obtained from environmental sample
  misc_feature (1)..(546): n is a, c, g, or t
atggagcaagaaaataagagacgaaattgcagaagcaacggtgaacgttgcaaaaagcataaggtgagaattttaggcggtgataccacaggcggggatttaggtgttttttcagtaacggtttttggcaaagcaaatggcaaaattttattgagaagcgcggcaaaagctggcgatgatgtgtggctcgcaggctcgccaagcggtttagaaataggtccaataaccgtaaatccaccacttgacttaggaaaagaactcgcaaaaataaaaggcattggagcctgcatagatacaagcgattccatcgcggagagtttgcagcatatatctgaaaaatcgaaagttcgtttggatgtggaaaatgttattttaaatagtgcggaggatttttgtttattattcacggcaagggaatcggcgagggatagtattttgaaactcacaaaaaaatttcccataaataaaataggtaaagcaaaaaagggtagcggaatttttttaaagggaaaaaaaattgaggtgaagggctggcagcatttttag

SEQ ID NO: 14328 - protein, 181 aa, Unknown
  Obtained from environmental sample
  misc_feature (1)..(181): Xaa is any amino acid
MEQENKRRNCRSNGERCKKHKVRILGGDTTGGDLGVFSVTVFGKANGKILLRSAAKAGDDVWLAGSPSGLEIGPITVNPPLDLGKELAKIKGIGACIDTSDSIAESLQHISEKSKVRLDVENVILNSAEDFCLLFTARESARDSILKLTKKFPINKIGKAKKGSGIFLKGKKIEVKGWQHF

SEQ ID NO: 14329 - DNA, 726 bp, Unknown
  Obtained from environmental sample
  misc_feature (1)..(726): n is a, c, g, or t
gtgatgcttgcagcccctgtttttaaagatgagagcaaaggcgctcctgttttgggcgtagtcgtcgcgcgtaaagagggcagtaaattccttagcagtctggtaaatcacatactaaccaactataaaaccgagtacgggtttttggtaaacagcgagggaacaatcgaagcccatcctgatatggaactggtgaacaagcagagtaatcccatcaaagaagcggaaacggatcctacccaaaaaccgttagctgacatgatagcgaaagtcatagaagaaaagacgggcagcgcccaatataccaataacgggaaagagatggtctgcgccttcacgccgcttcccggctacgattggatacttattcaaaacgtggagaaaagcgaagtgatggcccccgtagtccatatccgcaataccatgttaataatcggtttaatctgcggcgcgttaggcgctatagtcgcgatttttgccggacgttccattacaaaaccattaactgacatgacaaaaatagtaaagtataccggcagcggagacttaaaccaggcgcgtcatatcaaatcaaaagacgagattggcgaactagcgaatggttttaatacaatgcttgacaaatataaaaaccttataactaccataaagcaggagtctgaacatctggccaaactaagcaaccctcttaacggccagttcaaccaaaacttgccccggcggtaa

SEQ ID NO: 14330 - protein, 241 aa, Unknown
  Obtained from environmental sample
  DOMAIN (142)...(211): HAMP domain
  misc_feature (1)..(241): Xaa is any amino acid
MMLAAPVFKDESKGAPVLGVVVARKEGSKFLSSLVNHILTNYKTEYGFLVNSEGTIEAHPDMELVNKQSNPIKEAETDPTQKPLADMIAKVIEEKTGSAQYTNNGKEMVCAFTPLPGYDWILIQNVEKSEVMAPVVHIRNTMLIIGLICGALGAIVAIFAGRSITKPLTDMTKIVKYTGSGDLNQARHIKSKDEIGELANGFNTMLDKYKNLITTIKQESEHLAKLSNPLNGQFNQNLPRR

SEQ ID NO: 14331 - DNA, 348 bp, Unknown
  Obtained from environmental sample
  misc_feature (1)..(348): n is a, c, g, or t
atgcgttacaccaacggcataaatcagtttacggatttccaaatgttcatggaagcaacaaagcttattccaaggcttttgtggaatcgccttgtgcacggccgctttttggatattcttcttacccacgcgccgccaaagggtatacatgatatgaaagacaaatgtcattgggggtttaaaacatatctttggtttatgaagacatttaaacccaaatatttagttcacggtcatattcacctgtacgatttatcggccgtgcgctgtaccaagtgggagagcacaaccgtaattaacgcttacggtcattgtataattgaattgggagattttaatggaaattga

SEQ ID NO: 14332 - protein, 115 aa, Unknown
  Obtained from environmental sample
  misc_feature (1)..(115): Xaa is any amino acid
MRYTNGINQFTDFQMFMEATKLIPRLLWNRLVHGRFLDILLTHAPPKGIHDMKDKCHWGFKTYLWFMKTFKPKYLVHGHIHLYDLSAVRCTKWESTTVINAYGHCIIELGDFNGN

SEQ ID NO: 14333 - DNA, 498 bp, Unknown
  Obtained from environmental sample
  misc_feature (1)..(498): n is a, c, g, or t
gtggtggaagttcttcgcctaccattaactaatttccagtttgttttaataaacttggaatactttaactctgttattatcgctctgcgaattttattgcctgtcggattatggactgttgcaaactggagtcttacaacgcttatggacggcaaagggcgaatgtttgaaatttatatggccgtttgttacgcgcttacgccctatgtaatcatcaatgcgattatgatcctgttaagccaaataatcacttttgaagaaggcgcgatttacatggttcttgcgggcttttccgcagcatggacgggtgtactgctccttgccgcgatgatgatggttcacgattattcattggcaaaaacaattggctccagtttgcttaccatagttggaatgggcataatagtttttatatttgtaattttcttcagtcttgtcagcgatgctatcgcttactttatatccttgtataaggaaatactttttagggtactttag

SEQ ID NO: 14334 - protein, 165 aa, Unknown
  Obtained from environmental sample
  misc_feature (1)..(165): Xaa is any amino acid
MVEVLRLPLTNFQFVLINLEYFNSVIIALRILLPVGLWTVANWSLTTLMDGKGRMFEIYMAVCYALTPYVIINAIMILLSQIITFEEGAIYMVLAGFSAAWTGVLLLAAMMMVHDYSLAKTIGSSLLTIVGMGIIVFIFVIFFSLVSDAIAYFISLYKEILFRVL

SEQ ID NO: 14335 - DNA, 735 bp, Unknown
  Obtained from environmental sample
  misc_feature (1)..(735): n is a, c, g, or t
atgcgcatantcaacagtctcgccagtgtctcggacactcccattgataaatgggcgcgtcctaccctgaaaagcatcattcctgaatataatatccgcaccaccgccattgtaccgccctggtctacttctcctgaacttaccttccgcaggcccgcggataaaatatttaccctggaggaattacgcgatgacgaccgtctttcaccacagctatacgacctgatagtatctcacatcgaaaaacgcagcaatattgtcatctctggttctaccggttcagggaaaactaccttcactaacgcctgtatcgaaaaaatgtttgaatttgcccccgatgaacgcatatacattgtcgaagatacgccggaactgcaatgccgcaacccgaacaaaacccagttgtatatccgcaaggaacaggcggtattggctatccaaaccgccctccgctggactcccaaacgtatcatcttcggcgaattgagatcgggcgacgtcgccgccgaactgctgcaagcatggaataccggccatccggggaatgtcactaccattcacgcggacagcgcggcctcaaccattccccgcctcgaagggctgctgaggcaggtcatcctgggaaccttgcccaaccttgcggataccatccacctaattgtacatctcgccaaccgcagggtggttgaagccttgaccgtcagggaaatacaggagggtagaactatgagttaa

SEQ ID NO: 14336 - protein, 244 aa, Unknown
  Obtained from environmental sample
  DOMAIN (10)...(227): Type II/IV secretion system protein
  misc_feature (1)..(244): Xaa is any amino acid
MRIXNSLASVSDTPIDKWARPTLKSIIPEYNIRTTAIVPPWSTSPELTFRRPADKIFTLEELRDDDRLSPQLYDLIVSHIEKRSNIVISGSTGSGKTTFTNACIEKMFEFAPDERIYIVEDTPELQCRNPNKTQLYIRKEQAVLAIQTALRWTPKRIIFGELRSGDVAAELLQAWNTGHPGNVTTIHADSAASTIPRLEGLLRQVILGTLPNLADTIHLIVHLANRRVVEALTVREIQEGRTMS

SEQ ID NO: 14337 - DNA, 342 bp, Unknown
  Obtained from environmental sample
  misc_feature (1)..(342): n is a, c, g, or t
ttgacaaattgcaaaaaaattgctatatttgtgtgtatgaaagaaggaattcatccggaatatcgtaaaaccgtgtttatagatgcaaatacgggcaaggaatttttgactcgtagcacaaaggtttccagcgaaaaacgcactataaacggcgaggaatatcaagttatctctttggaaataacctcggatactcatccgttttggaccggcaaaatgcaccatctggatacagcaggtcgcatagatcgcttcaacaagcggtttggtgggcagatagttggcgcaaagcgcaaaaccgctcgcaaggcggcagcaaccgaagaaagcgaagaaacttaa

SEQ ID NO: 14338 - protein, 113 aa, Unknown
  Obtained from environmental sample
  DOMAIN (13)...(92): Ribosomal protein L31
  misc_feature (1)..(113): Xaa is any amino acid
MTNCKKIAIFVCMKEGIHPEYRKTVFIDANTGKEFLTRSTKVSSEKRTINGEEYQVISLEITSDTHPFWTGKMHHLDTAGRIDRFNKRFGGQIVGAKRKTARKAAATEESEET

SEQ ID NO: 14339 - DNA, 387 bp, Unknown
  Obtained from environmental sample
  misc_feature (1)..(387): n is a, c, g, or t
ttgatgaaaatacatttttggggagtacgcggttctattccgacatcggtatcgccctcatgtattaaaagcaaaatttcggcaatcgtagaacagatcactgtcgatgatttagcaagcgcggaaagcagggaaaagtttttatcaggacttccgccttggttgttcggcactacaggcggaaatagtccgtgcgtcagcgtgtcgcttaacaattcanaagaagagtgtattgtctttgactgcggttcgggtttgcgggagtttggaatagcgcaggcaagcgcagaaaataaaataaatcattatcatatttttctttcgcattttcactgggatcatatacaagggcttccgttttttggtcccgatatagtcccgcggtaa

SEQ ID NO: 14340 - protein, 128 aa, Unknown
  Obtained from environmental sample
  misc_feature (1)..(128): Xaa is any amino acid
MMKIHFWGVRGSIPTSVSPSCIKSKISAIVEQITVDDLASAESREKFLSGLPPWLFGTTGGNSPCVSVSLNNSXEECIVFDCGSGLREFGIAQASAENKINHYHIFLSHFHWDHIQGLPFFGPDIVPR

SEQ ID NO: 14341 - DNA, 624 bp, Unknown
  Obtained from environmental sample
  misc_feature (1)..(624): n is a, c, g, or t
ttgattgaatttacggcgttcgttcccggttatctgaaacttcccgcaatcgaaatcggcgatgaatatatttccggccttgccataactgtcaattccgttattgattcgcgcagatcttttgagctttccgggtacgcgtcctcgctggcaatgccgggaacggcgctgatactttacggggctatggcggcatttatactttttctccttttgctgctctggtttatttttaaggggcgcgccttttttaaattgctgatgaataaatggaaacgccttcgtctttttacttttataagaaacattgaaagccgtctgcaaaaagcgctgataaaaggcggagacaaacggtctattctggataaaatttccgatacgttcagggagtttctttccgttctgacaaactcaaactgccgctccatgacagcccgcgaattcagcaacctgcccgaagaattaatacagaacggcgtttttctgggctattttttccgtcaatgcgacaggctccgtttctccggcgaagacgtcagcgtacaggacatctcaggtttgttagacgatctgcgcaaatacattgaaaaactgtatttgcaaaagagcggggtaaaagcgtga

SEQ ID NO: 14342 - protein, 207 aa, Unknown
  Obtained from environmental sample
  misc_feature (1)..(207): Xaa is any amino acid
MIEFTAFVPGYLKLPAIEIGDEYISGLAITVNSVIDSRRSFELSGYASSLAMPGTALILYGAMAAFILFLLLLLWFIFKGRAFFKLLMNKWKRLRLFTFIRNIESRLQKALIKGGDKRSILDKISDTFREFLSVLTNSNCRSMTAREFSNLPEELIQNGVFLGYFFRQCDRLRFSGEDVSVQDISGLLDDLRKYIEKLYLQKSGVKA

SEQ ID NO: 14343 - DNA, 810 bp, Unknown
  Obtained from environmental sample
  misc_feature (1)..(810): n is a, c, g, or t
ttggacgaaaacgaaataacggttcaaatatcccgcttgagaaaccgcaggcattcggtgtcaatttattttttaattaccgccgtattgcttgtcgcggcggtctggatattcaagaggcttctttacaaacataaaataagcggggaactcggcagaaaaatgaaagtatccgccgtttttttctttttattcgccgcgttagccgttaccgccgttataaatccaaagtgggggacgcaatataccgtttccgaataccgccggggactggacgcggtttttgccatcgacgtatctcacagcatggatatccgcgacgcgcagcaagacagccccaagtcgcgccttgagcggggcgtatcaatcgcgagggaaaccatcaaaacggcttccggcgcgcgctttgccgccgctatcggcagaagcaggggatatttgtccgttccgcttacatgggacaacgaagcgccgttagcttttctgcagtcgcttgacgcgtcttccatgacgggcagaagcaccaatctggaagcgcttgtagaagcggccgccgacgcttttgaagagtcgtctcccgccaaaaaagtgattgttcttgtttcggacggcgagtcgctgggcggaatcctgggaaacgcgcttaacaggtgcataaaagaggacattatcgtaaataccgtcgctctcggcagcgacacggggcgtcccgtaccgcagtaccagaacagcgcggaattatccgccgttatcagccgcagagacgccgccgttatgcgcatggccgcctcgtgccgaatctgtcattga

SEQ ID NO: 14344 - protein, 269 aa, Unknown
  Obtained from environmental sample
  misc_feature (1)..(269): Xaa is any amino acid
MDENEITVQISRLRNRRHSVSIYFLITAVLLVAAVWIFKRLLYKHKISGELGRKMKVSAVFFFLFAALAVTAVINPKWGTQYTVSEYRRGLDAVFAIDVSHSMDIRDAQQDSPKSRLERGVSIARETIKTASGARFAAAIGRSRGYLSVPLTWDNEAPLAFLQSLDASSMTGRSTNLEALVEAAADAFEESSPAKKVIVLVSDGESLGGILGNALNRCIKEDIIVNTVALGSDTGRPVPQYQNSAELSAVISRRDAAVMRMAASCRICH

SEQ ID NO: 14345 - DNA, 678 bp, Unknown
  Obtained from environmental sample
  misc_feature (1)..(678): n is a, c, g, or t
ttgaccggtatcgtacttcaggcccgccttgattccacgcgtctgcctgaaaaagcgctgctttctgtagacggaaagccgcttatctttcgcgtaatggaagcgttaaattttattcccgccgatttgcgtatacttgcctgtgcgcaggattcactttcctctttttcaccgcttgcggcgcaggccggctttgaaatattcgccggtcctaaagacgacgttcttgaaagatactgtcaggttatcaggcgctttaacattacgcgcgtaatcagggcgacgggagacaatccttttgtttttacggacgccgccgcagctatcaacgcagaggctctggcgcttaacgccgattatgccggttactcggaacttccttacggcgcgggagttgagtcggtatgtgccgccgcccttcttcgcgccgaaagcgaaacagccttgccttacgaccgcgaacatgtatgcccttatttatacactcatccggagcttttcagccttcaccgcccgcttgccccgcttcgctggcagggttcaaacatccggctaaccgtagacacgcaggaagattttgaccgcgcccttcttttatacgacgccttaaaaaacgagcctcttagtcattatggatttacaataattaaaaagtacgcggagatattaaaaaaatga

SEQ ID NO: 14346 - protein, 225 aa, Unknown
  Obtained from environmental sample
  DOMAIN (3)...(215): Cytidylyltransferase
  misc_feature (1)..(225): Xaa is any amino acid
MTGIVLQARLDSTRLPEKALLSVDGKPLIFRVMEALNFIPADLRILACAQDSLSSFSPLAAQAGFEIFAGPKDDVLERYCQVIRRFNITRVIRATGDNPFVFTDAAAAINAEALALNADYAGYSELPYGAGVESVCAAALLRAESETALPYDREHVCPYLYTHPELFSLHRPLAPLRWQGSNIRLTVDTQEDFDRALLLYDALKNEPLSHYGFTIIKKYAEILKK

SEQ ID NO: 14347 - DNA, 813 bp, Unknown
  Obtained from environmental sample
  misc_feature (1)..(813): n is a, c, g, or t
gtgtcgcccaaaaagcacgcggtgacggccgccatcgccgcttccagaaacgagataatcgtatttacagacgccgaatgcgtcgcgccgcaaacatggctttcgtgcatagacgcgtacttcgccgctgacgccgaagccgccctcctgcaagggatcacaacctactcatatccgcccggcatgagccgcctcttctgggggttgcagtcggtagatttcctgtcccacgggataatagccgccgcggccatagccgccgacttgcccataaacgcgaacgcgaacaacatggccttccggcgggaggtcttcgagagggtggggggctacggagggaacaccgacgtagttcccggcgacgacgatcaattattacaacgcgtttggggacgcaaaataggccatgtggtctttatgaccgatcccgccggagccgtggagaccgcccccacgcgcaccctgtccatgctcttcgagcagcgccgccggtggggcgccgttaccgtctactacggagcgcggcaaatcgccctcttatccgccgtgttcgcgttctacttgacaatcgcggccaccgcggttatatcaatattttcgccgaccctctgcctgccggttttcttatcgctgatgtttgtgaaactcgccggagagttggtattgatgataccggggacgcgtatcttcggtaaaaagaacctgcgtaaatacatcataccggcatcaatagtgcatttacccatggtattgttatcggtgctcttcggggtgttcggcgggttcaagtggaaggggcgtaagacggggtga

SEQ ID NO: 14348 - protein, 270 aa, Unknown
  Obtained from environmental sample
  misc_feature (1)..(270): Xaa is any amino acid
MSPKKHAVTAAIAASRNEIIVFTDAECVAPQTWLSCIDAYFAADAEAALLQGITTYSYPPGMSRLFWGLQSVDFLSHGIIAAAAIAADLPINANANNMAFRREVFERVGGYGGNTDVVPGDDDQLLQRVWGRKIGHVVFMTDPAGAVETAPTRTLSMLFEQRRRWGAVTVYYGARQIALLSAVFAFYLTIAATAVISIFSPTLCLPVFLSLMFVKLAGELVLMIPGTRIFGKKNLRKYIIPASIVHLPMVLLSVLFGVFGGFKWKGRKTG

SEQ ID NO: 14349 - DNA, 831 bp, Unknown
  Obtained from environmental sample
  misc_feature (1)..(831): n is a, c, g, or t
atgcgtatcgccgccggcgaggttattgaccgccctgccgcgcttgtgagggaattccttgacaatgccatagatgcgggctctttaaacattgaagtttccattgaagaaggcggttgtaaaaaagttgaagtctccgatgacggcagcggcatgacccgcgaagatttggctatatgttcccttacccacgcaaccagtaaaatacgcggtcttgacgacttaactgtttcccacacgcttggttttcgcggagaggcgttagccgccgcctgcgccgtcgcgcggttggaaattatctgttccgttgacggaagggaagcatggcggctggataccggtcccggagaaagccgctccccgacaatcgaacaaacgcgcagaacaaaaggcacgacggtgagggcgttaaatctttatgagacaatcccggcgcgcaaacgttttttaaaaagggaaggaagcgaagcgtccctgtgccgccaggtctttattgaaaaagccctcgcctttaacggtataaattttcgttatgtgcaagacggcaaattaaaagattttctgcaggccgttaaaacaaaaaaagaacgattcgcggtggtgttacaacatggcgaagaaaaattcctgcatgaaataaatgtaacgggagcgggtttttccaccgtaatagttatcggcggaccggaactttacagaaacgacagacggcagctttttattttcgcgaacggcagacgggtacaggattattctcttggttcagccgttggatacggctctcaaggctggttcccaaacgcatccaccctatcgcggcggtttacgtga

SEQ ID NO: 14350 - protein, 276 aa, Unknown
  Obtained from environmental sample
  DOMAIN (7)...(141): Histidine kinase-, DNA gyrase B-, and HSP90-like ATPase
  misc_feature (1)..(276): Xaa is any amino acid
MRIAAGEVIDRPAALVREFLDNAIDAGSLNIEVSIEEGGCKKVEVSDDGSGMTREDLAICSLTHATSKIRGLDDLTVSHTLGFRGEALAAACAVARLEIICSVDGREAWRLDTGPGESRSPTIEQTRRTKGTTVRALNLYETIPARKRFLKREGSEASLCRQVFIEKALAFNGINFRYVQDGKLKDFLQAVKTKKERFAVVLQHGEEKFLHEINVTGAGFSTVIVIGGPELYRNDRRQLFIFANGRRVQDYSLGSAVGYGSQGWFPNASTLSRRFT

SEQ ID NO: 14351 - DNA, 660 bp, Unknown
  Obtained from environmental sample
  misc_feature (1)..(660): n is a, c, g, or t
gtgagaaagcccaaagagaaagccagcgtagaacgggccgtcggcatgcgttcaacctggataaccgccgcattacggaaccggcaggttttctccctgtgggaattgaatgaggggatgcggcagaagctgacggaatttaaccgcaagccgagaactaaagttctttaccagaaaaagccggggaaccgggaaagcgcgcgaacctttggttcgattgccgaggaactgcccttcctcatgccgcttccctcaaagccattcgagctttcggcctggaagatcgcaaccgtaccactcaattaccacatcgccgcagataagatgaattatagtgtgccttatgagtatatcacgcataaagtggatgtccggcttaccacgtacatggttgaaatattctaccagggtaaacggatagccagccacacacggctttatggccattctgggcactatagtaccaatgtggagcatatgccggagaagcaccggcaatatacccagtggaatgcagcacggtttatacgatgggcctgtgatataggcccccatacagaacaggccgtgaaagccattatcgcctcccgtaaagtagagcaacagagctatatcgaaccggaggttcgcaacctgcatagcgctcctcaaactggctga

SEQ ID NO: 14352 - protein, 219 aa, Unknown
  Obtained from environmental sample
  misc_feature (1)..(219): Xaa is any amino acid
MRKPKEKASVERAVGMRSTWITAALRNRQVFSLWELNEGMRQKLTEFNRKPRTKVLYQKKPGNRESARTFGSIAEELPFLMPLPSKPFELSAWKIATVPLNYHIAADKMNYSVPYEYITHKVDVRLTTYMVEIFYQGKRIASHTRLYGHSGHYSTNVEHMPEKHRQYTQWNAARFIRWACDIGPHTEQAVKAIIASRKVEQQSYIEPEVRNLHSAPQTG

SEQ ID NO: 14353 - DNA, 318 bp, Unknown
  Obtained from environmental sample
  misc_feature (1)..(318): n is a, c, g, or t
ttggtaaaaaaaatattggaagatgagtatgacgttgctacagccgactcaggcgatgccgccttaaatgtgatcaaaaatgggtttattccaaatttaattttgttggatttatatatggctggattgagtggttggggtacccttctcagtttacgaggaatgagtgaattatctgaaaccaagatagtgatgcacacgtcatctgatgacatacaaggtatggcaaaaatgaaagattttggtgcatcttattatatgctcaagtcaaccaacgcaagcgaactgcgttacaaagtagcaagattattagattaa

SEQ ID NO: 14354 - protein, 105 aa, Unknown
  Obtained from environmental sample
  DOMAIN (2)...(101): Response regulator receiver domain
  misc_feature (1)..(105): Xaa is any amino acid
MVKKILEDEYDVATADSGDAALNVIKNGFIPNLILLDLYMAGLSGWGTLLSLRGMSELSETKIVMHTSSDDIQGMAKMKDFGASYYMLKSTNASELRYKVARLLD

SEQ ID NO: 14355 - DNA, 441 bp, Unknown
  Obtained from environmental sample
  misc_feature (1)..(441): n is a, c, g, or t
gtgagtacgctgatgtatcatatagtatgtcccgcaaaatatcggagagcggtaataagtgccgaggtagataaggaactgcgcgaaatatgtcttgggatagagtcaagatatgaaataaattttttagaaataggaacagaaaaagaccatgtgcattttctggttcagtcagtaccgacatatagccctgaacagatagtacggacaataaaaagtataacagcgagaaaaatattcgagatgtgtccagaagtaaaaaagttgctatggggaggggaattttggacgcgaggatattatgtaagaaccgtaggcgaacatggggatgagaaggtaatacaagaatacgtgaagaatcaagggcgaaatccagatgactatcagaaaatacatgaagggaaacagctcgaattgtttacatatcagaataaagcatga

SEQ ID NO: 14356 - protein, 146 aa, Unknown
  Obtained from environmental sample
  DOMAIN (8)...(113): Transposase IS200 like
  misc_feature (1)..(146): Xaa is any amino acid
MSTLMYHIVCPAKYRRAVISAEVDKELREICLGIESRYEINFLEIGTEKDHVHFLVQSVPTYSPEQIVRTIKSITARKIFEMCPEVKKLLWGGEFWTRGYYVRTVGEHGDEKVIQEYVKNQGRNPDDYQKIHEGKQLELFTYQNKA

SEQ ID NO: 14357 - DNA, 399 bp, Unknown
  Obtained from environmental sample
  misc_feature (1)..(399): n is a, c, g, or t
atgtacgcaagtacatcgtatatgcgtaaaacgtatatacaagcgtgcccggacgtacgcaggcaagaattgccgttaaaagacaattcaagtttgttccgggtgaaggatttttttaaaatggccaagaaactgtatgtcggcaatctctcttacaacaccaccgaagaaggtcttcgcacccttttctcaggctttggcaatgtcgcttcagcgaagatcattcttgatcgtgaaaccggcaactccaaagggttcggctttgtcgaaatgggcagcgaggaagaagttaacgctgctatcgcgggtacaaacggacgcgaatttgacgggcggcagctgcgtgtaaacgaagctatggacaaaccgcgtaacgaacgcggcggcggtaagtggtaa

SEQ ID NO: 14358 - protein, 132 aa, Unknown
  Obtained from environmental sample
  DOMAIN (45)...(116): RNA recognition motif. (a.k.a. RRM, RBD, or RNP domain)
  misc_feature (1)..(132): Xaa is any amino acid
MYASTSYMRKTYIQACPDVRRQELPLKDNSSLFRVKDFFKMAKKLYVGNLSYNTTEEGLRTLFSGFGNVASAKIILDRETGNSKGFGFVEMGSEEEVNAAIAGTNGREFDGRQLRVNEAMDKPRNERGGGKW

SEQ ID NO: 14359 - DNA, 918 bp, Unknown
  Obtained from environmental sample
  misc_feature (1)..(918): n is a, c, g, or t
atgtatagtgtgggtntttccaaattagcttacacgtttttggggagaaagattaatatgtccggttttcaggggatgaaaataaaccctaaaaggtttcatatatcccagttaaaattttatatggtgataatccccatcgccctattcatgaccttgcccatagtctatatcataaaccaggcatttaagcccctggatgaaattttccgctttccccctacgtttattgtgcgccgtcccaccatgcaaaatttccgcatgattttaacccttacttccaatacgggcattcccatgtcccgcttccttattaacactatcattattactgtcttgactgttgttttatccatttttataaccgccatgtcggcctacgccttttccaagaaaaaattcagaattaaagaatggctgttcaggctgaatcaggcggcgctgatgtttgtacccgcggcggtgagcatcccacggtatttgattatcgttaaattggggcttaacaataattttctggtgcatattttgccaatccttgcaatgccggtgggcttatttttggtaaagcaatttgtagaccaggtgccggattccctgattgaatccgcaagaatagacggagccggggaattcctggtaatgttcaggatcgtattccctcttattatacccgcccttgccacggtaggtatcctctgcttccagatagtatggggtgcaacggaagcttccaatttatacctggtggatgatacgttaaaatcctttgctttttatttaagtaccctggccaccctgaatacgccagccatggcgggggtgcaggcggcggcttcgctcattatgtttttgcccaatttgattatttttatcgccatgcaatcanagggtcatgaatacctcgtgccgatctga

SEQ ID NO: 14360 - protein, 305 aa, Unknown
  Obtained from environmental sample
  DOMAIN (100)...(303): Binding-protein-dependent transport system inner membrane component
  misc_feature (1)..(305): Xaa is any amino acid
MYSVGXSKLAYTFLGRKINMSGFQGMKINPKRFHISQLKFYMVIIPIALFMTLPIVYIINQAFKPLDEIFRFPPTFIVRRPTMQNFRMILTLTSNTGIPMSRFLINTIIITVLTVVLSIFITAMSAYAFSKKKFRIKEWLFRLNQAALMFVPAAVSIPRYLIIVKLGLNNNFLVHILPILAMPVGLFLVKQFVDQVPDSLIESARIDGAGEFLVMFRIVFPLIIPALATVGILCFQIVWGATEASNLYLVDDTLKSFAFYLSTLATLNTPAMAGVQAAASLIMFLPNLIIFIAMQSXGHEYLVPI

SEQ ID NO: 14361 - DNA, 840 bp, Unknown
  Obtained from environmental sample
  misc_feature (1)..(840): n is a, c, g, or t
atgagcgaaggtacaaacgagggtattattgagaataaaccttaccccagtattaaaaacgccatatttttgtgccttttacttttaggatttcaattagtagtcggaataattccatggataactacctatatattcgaaattgatacagagtcacttttatctgtgatagggaaaatttttattagtttattgccttccggtttggttatttatatcggatataaaaaatcccataaaaaattcgatgaaatatttgtgtttaacgatgtatcatcgaacctttggattgcgacaaccgtatttatgtttggatttgttattttatcttcggaattaagtaatatattgaattattttttaccgctgccaagatatttacaggaagtatttgatacaatgctggataataaatatattattatatcggtagtatctgtaggtataataccggcatttattgaggaaatgttattcagaggtataattcttaatggttttaaagaaaattattcccgtaaaaaagccataatagtaagttccctgttgtttggaattgttcatttaaatccctggcaatttgtaaccgcattcatcatgggtatggtttccgcgtgggtatgtttaaaattaaagtctctgacactaagtatatatatgcacatgtttaataatacagcggctgtttttgcagtgaaaaccagagacatcgtgcttattaaaggttttaatacgggaccttctgtacagacatttcaaccattatggtttgacgctcttgggatagtgcttgtgtctataggaataatattatttcttggcgaaattgaggagaactaa

SEQ ID NO: 14362 - protein, 279 aa, Unknown
  Obtained from environmental sample
  DOMAIN (142)...(232): CAAX amino terminal protease family
  misc_feature (1)..(279): Xaa is any amino acid
MSEGTNEGIIENKPYPSIKNAIFLCLLLLGFQLVVGIIPWITTYIFEIDTESLLSVIGKIFISLLPSGLVIYIGYKKSHKKFDEIFVFNDVSSNLWIATTVFMFGFVILSSELSNILNYFLPLPRYLQEVFDTMLDNKYIIISVVSVGIIPAFIEEMLFRGIILNGFKENYSRKKAIIVSSLLFGIVHLNPWQFVTAFIMGMVSAWVCLKLKSLTLSIYMHMFNNTAAVFAVKTRDIVLIKGFNTGPSVQTFQPLWFDALGIVLVSIGIILFLGEIEEN

SEQ ID NO: 14363 - DNA, 675 bp, Unknown
  Obtained from environmental sample
  misc_feature (1)..(675): n is a, c, g, or t
ttgggtctgccggtaatcattgtagacgacggtaacgacgcggaaaccaagaacctgcttacggaatgtgccgtaaaaacgccgggggccgcgctggcgagcctgaagaaaaacagcggcaagggaggagccgttatctgcggtcttaaaaaagcctcggaactggggttgacacatgtactgcaaatagacgccgacggccagcatgatgccgggaaagccgctttctttttggaagagtccgccaagcatcctgacatggtaatctgcggatacccggaatttgatgaaaccgctcccaggagcagggtggcaggacggaagatttccaatttctgggcctctgtggttacgctttcaacggaactcagggacgtgctttgcggtttcagagtatacccggtggctgtatcattacgcataactagatgtctctttcttgacaagcgcatgggctttgacccggaaatcctgatacgcctgtactggaacaaagtatttccggtattccaccccataataataaattacccgccggacggggtttccaatttccgtaatgtcagggataatatccgcataagcctgatgtttagccggctgtttgtagggatgattctgcgcctgccgctgttgattgccttgagaaaaaaaagaggaaaagaaagacgttga

SEQ ID NO: 14364 - protein, 224 aa, Unknown
  Obtained from environmental sample
  misc_feature (1)..(224): Xaa is any amino acid
MGLPVIIVDDGNDAETKNLLTECAVKTPGAALASLKKNSGKGGAVICGLKKASELGLTHVLQIDADGQHDAGKAAFFLEESAKHPDMVICGYPEFDETAPRSRVAGRKISNFWASVVTLSTELRDVLCGFRVYPVAVSLRITRCLFLDKRMGFDPEILIRLYWNKVFPVFHPIIINYPPDGVSNFRNVRDNIRISLMFSRLFVGMILRLPLLIALRKKRGKERR

SEQ ID NO: 14365 - DNA, 402 bp, Unknown
  Obtained from environmental sample
  misc_feature (1)..(402): n is a, c, g, or t
atgggcaaagacgattttacaaaatgcccttccggcgcgcccggcattgaggagcgcatcccgcttatgtatggcgcggtcgcgagcggcaaacttaccctgcggcgttttaccgatctatgctgcactagccccgcgaagatattcggcctgtacccccaaaaaggcgtcctggccgtcggctctgacgccgacatcgtaataatcgaccctcaactgaaccggacaatatcgcataacaacatgcacggcaatgtagactacagcgcgtatgagggtataaacgtacagggctggcctgtctgcactgtttcgcgcggagaggtaatagccagagacggggaattttgcggcagacaggggcgggggaagtttttgaagaggaaagggagtggggagtag

SEQ ID NO: 14366 - protein, 133 aa, Unknown
  Obtained from environmental sample
  misc_feature (1)..(133): Xaa is any amino acid
MGKDDFTKCPSGAPGIEERIPLMYGAVASGKLTLRRFTDLCCTSPAKIFGLYPQKGVLAVGSDADIVIIDPQLNRTISHNNMHGNVDYSAYEGINVQGWPVCTVSRGEVIARDGEFCGRQGRGKFLKRKGSGE

SEQ ID NO: 14367 - DNA, 753 bp, Unknown
  Obtained from environmental sample
  misc_feature (1)..(753): n is a, c, g, or t
atgatggaacggaacgccggacatgatgagatacttgactatctcacccttacaaccgaatggcttcgccagagagatcaaggtttaatgggttacaccggcatttacggatttgtcaatggggaattttatgacagcataaaccttaacccgggcgatgattatatcccccaaacgcgtccatggtatcagataggaatacgaagcggtaaatccaccgcttttaccgcaccctacagagactggcgcaccggagataccataatatccgccgtaaagaacatctacaaaaaaaacggcaatataataggattactcgtcatagacattgacatcggctggctggtggattatgtaggctcgctcgcgcttgcctcaggcggttatggaatgttactcagccaaaacctgacattcatgacctaccccgacagctcgtatttagggcggcagcttcaagatttaggcggtgaatatcttgagatagccagaaaattacgttcaaaaggggaaatgacctcagtccgaataaaaaataaggacggcagttccgcaatcgtttttttcaaacacatttttaacaactggtatatagggatagttaccccccaatcccgtttttaccgcgacctttatgaatccgcgcggatacttgtcgcattgggaatagttcttgccctgttactgtgcttgctgctcctgcgattaaacagagcgaaaacacgcgccattggaaaatccttcagcctttga

SEQ ID NO: 14368 - protein, 250 aa, Unknown
  Obtained from environmental sample
  DOMAIN (75)...(155): Cache domain
  misc_feature (1)..(250): Xaa is any amino acid
MMERNAGHDEILDYLTLTTEWLRQRDQGLMGYTGIYGFVNGEFYDSINLNPGDDYIPQTRPWYQIGIRSGKSTAFTAPYRDWRTGDTIISAVKNIYKKNGNIIGLLVIDIDIGWLVDYVGSLALASGGYGMLLSQNLTFMTYPDSSYLGRQLQDLGGEYLEIARKLRSKGEMTSVRIKNKDGSSAIVFFKHIFNNWYIGIVTPQSRFYRDLYESARILVALGIVLALLLCLLLLRLNRAKTRAIGKSFSL

SEQ ID NO: 14369 - DNA, 825 bp, Unknown
  Obtained from environmental sample
  misc_feature (1)..(825): n is a, c, g, or t
gtgcttggcggtcctgtgcttggctttgcatacggaggagagatctattatagacagaataatggaataccttattattctaatatcaatgatggtaatttgagtgactacgcctttggtttggatattggagtaggcttaaagcatcctttcttaatcaaaaaatttgttatcattccaggttttgaaaccatttatcactttggcttaaccaatacttatagcgataaggaactttccgatgattcctatattttgaattcaagttcttacaaagttagagggagccgtgcccatcgcggtcttgagtttggaacagttgtctccattccgctagcaaactttaagaaaactaaaaaacctaagccagcacctaagcccgaaccaccacctataatatatgtgccaccaccagaacccataccggaaccaataaaattgtgctataccattgacgaaatgaaagaactcattctcactgggcaagatatctatggcaaaaagatctgcgccattaagcaagttaattttaaatttggaagttccgaattgcttcctgaagataaaatttatctgaacgaaattgttgcccttttggaaacaaataagttgctaaaaataagggtaaacggacatacggataatgttggcatagaagaatacaacataaatctgtctcgcgagcgagctaaatctgttcaagaatacctcaaaacaaggggtatagatccttcgcgcttgtcttacacattttatggctcaacgcgcccaatagccgataacgatacggaagaaggcagagccattaaccgccgcgtgaattga

SEQ ID NO: 14370 - protein, 274 aa, Unknown
  Obtained from environmental sample
  DOMAIN (176)...(271): OmpA family
  misc_feature (1)..(274): Xaa is any amino acid
MLGGPVLGFAYGGEIYYRQNNGIPYYSNINDGNLSDYAFGLDIGVGLKHPFLIKKFVIIPGFETIYHFGLTNTYSDKELSDDSYILNSSSYKVRGSRAHRGLEFGTVVSIPLANFKKTKKPKPAPKPEPPPIIYVPPPEPIPEPIKLCYTIDEMKELILTGQDIYGKKICAIKQVNFKFGSSELLPEDKIYLNEIVALLETNKLLKIRVNGHTDNVGIEEYNINLSRERAKSVQEYLKTRGIDPSRLSYTFYGSTRPIADNDTEEGRAINRRVN

SEQ ID NO: 14371 - DNA, 312 bp, Unknown
  Obtained from environmental sample
  misc_feature (1)..(312): n is a, c, g, or t
atggacaatcttgacatacatactatgggttccctgtataaggcgtttcctcctgaagaagcaaaacgaataagagacaaacttgaagtgcattacacaccgaagcatgggagctgggtcaatatggcggaaatagaaaacaatgtacttataaaccatggcctttcaaaacggattccaacaattgagcaaatgaaaaaagaagtggcggcatggacggaagcccggaaccaaagtgcgagcacaatcaattggaggtttaccacagacgacgcgcggattaaacttaaacgcctttatccacaattataa

SEQ ID NO: 14372 - protein, 103 aa, Unknown
  Obtained from environmental sample
  misc_feature (1)..(103): Xaa is any amino acid
MDNLDIHTMGSLYKAFPPEEAKRIRDKLEVHYTPKHGSWVNMAEIENNVLINHGLSKRIPTIEQMKKEVAAWTEARNQSASTINWRFTTDDARIKLKRLYPQL

SEQ ID NO: 14373 - DNA, 585 bp, Unknown
  Obtained from environmental sample
  misc_feature (1)..(585): n is a, c, g, or t
gtgttcatggccaatattatgccgcatattccggtgaagggctcggcgtttgaggggcttgatcgtgttaccaataaagaaatcgaggtgttgcgcgcggattgcggcgcgtacgttaagcagatgtcgcactgccgccagtgccgctccgacgccgtcgggacgctcgacgaggatcactctgtggatttctacgacggcggggaggctaaggcggcgccgccgtccggcaagcggatgcgcttcgccgtcgcgacgaagagcggcgcgattgtggacatgcacttcggccacgccggcgaattctacatatacgagagcgacgcgtcggacacgcgcttcgtggaaaagcgctatgtggagaagtattgcaacgggccggattgcaacggcaaagaggacaaatgggaaccgattatccgagccgtcgaggattgcgtcgcggtgctcgctatgcggataggccccacgccggagaaacgattgaaagaaaaaggcattgacgccgttatgacttacgacagagtcgaaaccgccgtcgctcgcgcggcaaaagaaaggagtgctgttcatggtatcgcctaa

SEQ ID NO: 14374 - protein, 194 aa, Unknown
  Obtained from environmental sample
  DOMAIN (88)...(185): Dinitrogenase iron-molybdenum cofactor
  misc_feature (1)..(194): Xaa is any amino acid
MFMANIMPHIPVKGSAFEGLDRVTNKEIEVLRADCGAYVKQMSHCRQCRSDAVGTLDEDHSVDFYDGGEAKAAPPSGKRMRFAVATKSGAIVDMHFGHAGEFYIYESDASDTRFVEKRYVEKYCNGPDCNGKEDKWEPIIRAVEDCVAVLAMRIGPTPEKRLKEKGIDAVMTYDRVETAVARAAKERSAVHGIA

SEQ ID NO: 14375 - DNA, 318 bp, Unknown
  Obtained from environmental sample
  misc_feature (1)..(318): n is a, c, g, or t
gtgctgttcatggtatcgcctaagtatcacattttcgtatgcggaagcagccgtatcaacggaacgcagaacgggacgtgccacaagaagggcgcggtcggcctcgtgcagaaattcatgcaggagatcgaggacagggacatctcgtccgactgcctcgtgaccaacaccgggtgcttcagcatctgcgacaaagggccggtcgcggtcgtctatcccgaangaacttggtacgggaacctcaccgaagacgcggtggaggagatctgcgaacagcacttcgagggcgggaagcctgtgngaaagtacaagatatga

SEQ ID NO: 14376 - protein, 105 aa, Unknown
  Obtained from environmental sample
  misc_feature (1)..(105): Xaa is any amino acid
MLFMVSPKYHIFVCGSSRINGTQNGTCHKKGAVGLVQKFMQEIEDRDISSDCLVTNTGCFSICDKGPVAVVYPEXTWYGNLTEDAVEEICEQHFEGGKPVXKYKI

SEQ ID NO: 14377 - DNA, 552 bp, Unknown
  Obtained from environmental sample
  misc_feature (1)..(552): n is a, c, g, or t
atgctgtcgtcggtgtcgccgtcgcgtcttacganggaaatttttaaaataatccattctccgcaggccgaggcgatngtcgacgcgcttgacaacataggcctttacgcctacctgcagcccaaagccgctgcacttatgaaggaaaatccggctttcaaggtacggtatttaaaaagcatggccgcccttagcaaaaactccgcagaaagtcaaaaccgccacggcaacgcgcttgtcgcgcttataaatgattatcttgaggacacggcggaccttaaacaaaatatcgccgataacttcaaggcgattttcgccagcgcgagaagttttgttttgccgatgaacccgccccgttatgaactggaacgcgcgctaaagctttttttatccgctcacggagtaaatgtaaagaaaatatacgcagagcgtcctatagccagacacctcggcgacagggaacaggataaagccgcgaaaacgccacatcacagaagaacgtaccgaaaaccgcagtctcccaatcaacctcgccctgaagctccccattga

SEQ ID NO: 14378 - protein, 183 aa, Unknown
  Obtained from environmental sample
  misc_feature (1)..(183): Xaa is any amino acid
MLSSVSPSRLTXEIFKIIHSPQAEAXVDALDNIGLYAYLQPKAAALMKENPAFKVRYLKSMAALSKNSAESQNRHGNALVALINDYLEDTADLKQNIADNFKAIFASARSFVLPMNPPRYELERALKLFLSAHGVNVKKIYAERPIARHLGDREQDKAAKTPHHRRTYRKPQSPNQPRPEAPH

SEQ ID NO: 14379 - DNA, 882 bp, Unknown
  Obtained from environmental sample
  misc_feature (1)..(882): n is a, c, g, or t
ttggagggggtgcgggcgatagacggtttggtgacggtcggcaaggggcagcggctcgggattttcgctggcagcggcgtcgggaagagcgtgctcatggggatgctcgcccggaactgccgttccgacgtgaacgtgatagcgctcatcggggagcgcgggcgcgaggtattggagttcatagagcgcgatcttggcgaggagggtttgcggcggtcggtactagtagtcgctacgagcgaccaaccggcgctgatacgcataaagggggcgctggtcgcggcgtcgatcgcggagcacttcagggatcagggaaaggacgtcttgtttctggccgactctgtgacgcgcttggctatggcgcagcgggaggtggggctggccatcggggaaccgccggcctcaaaggggtacacgccgtcggtcttcgcgaccctgccgcaatttttggagcgggcggggacgtcggaggtaggaaccatcaccggcctgttcacggtgcttgtggacggagacgatatggacgagccgatagcggacgccgtgcgctctatcttagacggccacttggtgctgtcgcgccgcctcgcccacaggaaccactaccccgccatcgacgtgctgcaaagcatatcgcggtgtatgtccgacatcgcgaccaaggagcatcgggcggcggccggaaaggtgaaggacgctatggcggcctacgcggagagcgaggacttgatacagataggcgcctacgctatgggaacaaacgagcgtatagaccgggcgatccgcctaaacacgccgataacggagttcctgcggcaagcgcgggacaactccacgacgctggaggaaacgctgaagaagctcgaggcgatagcgaagtga

SEQ ID NO: 14380 - protein, 293 aa, Unknown
  Obtained from environmental sample
  DOMAIN (2)...(212): ATP synthase alpha/beta family, nucleotide-binding domain
  misc_feature (1)..(293): Xaa is any amino acid
MEGVRAIDGLVTVGKGQRLGIFAGSGVGKSVLMGMLARNCRSDVNVIALIGERGREVLEFIERDLGEEGLRRSVLVVATSDQPALIRIKGALVAASIAEHFRDQGKDVLFLADSVTRLAMAQREVGLAIGEPPASKGYTPSVFATLPQFLERAGTSEVGTITGLFTVLVDGDDMDEPIADAVRSILDGHLVLSRRLAHRNHYPAIDVLQSISRCMSDIATKEHRAAAGKVKDAMAAYAESEDLIQIGAYAMGTNERIDRAIRLNTPITEFLRQARDNSTTLEETLKKLEAIAK

SEQ ID NO: 14381 - DNA, 831 bp, Unknown
  Obtained from environmental sample
  misc_feature (1)..(831): n is a, c, g, or t
gtgtacagcacgagcagtaccagaccgggcagccccgttccaaactacgcaagcgccgttacgcttactaacggcgtctggaaggacggtgagcttaccggcgcaagcagccttgacgtgtatcaatttactgttactgcgaatacaacatactacctctggtggaatcagggcagtaatgccagcaggggcaatcaaacaaaaacagcgcaagtccatgtcagggcggaggacagttcccacaatgtgattctcaactggcaggataacggctggacaaccggcaaccagtcaattacccccaccttcagcggtactgtttatttgatagtacgcccatacaacgaaatgggtacctatatcggtacttacgcgatagtatacagtaccagtaacgcttccaatccgccgagtatagacaccgtaacactcaacaacgtaaacaccgttggttcaccgaccaccacggacttgaccctgacctttgacaaggcgattgccggactgagcgccgccgacattaccctgagcggcgttttcggcataagcaaaggaaccctcagcggtaccgggccggtttacaccctgccaatcagtttccccgcaggcggaactttggacgtggcggttgcaaaaacgctttacacgatcaacggctcgcctacacaggttcccatcaccggcggaacatctgtcgctcttgttgaaaacacatgggtaaacggcgacctccccagcggaagcagcgttgactggtatacccttaccgtaaccgacacaacgacatactatgtctggtggaatgacaaagaccaggggccccactcctaa

SEQ ID NO: 14382 - protein, 276 aa, Unknown
  Obtained from environmental sample
  misc_feature (1)..(276): Xaa is any amino acid
MYSTSSTRPGSPVPNYASAVTLTNGVWKDGELTGASSLDVYQFTVTANTTYYLWWNQGSNASRGNQTKTAQVHVRAEDSSHNVILNWQDNGWTTGNQSITPTFSGTVYLIVRPYNEMGTYIGTYAIVYSTSNASNPPSIDTVTLNNVNTVGSPTTTDLTLTFDKAIAGLSAADITLSGVFGISKGTLSGTGPVYTLPISFPAGGTLDVAVAKTLYTINGSPTQVPITGGTSVALVENTWVNGDLPSGSSVDWYTLTVTDTTTYYVWWNDKDQGPHS

SEQ ID NO: 14383 - DNA, 693 bp, Unknown
  Obtained from environmental sample
  misc_feature (1)..(693): n is a, c, g, or t
ttgacccacagcgttgccactactttcccctcttccttcactttcaccgattcgtacccagccacgtacacatcgttgcctgacacaaagaccgaacttgcgcgagagttgtctttcccgttgcccaagcgctgcgctttgccgttcttccacagcgtggccacgtatggctccccatctgttttgccgaatgattgccccgccatatacacgtcgccgcctgacacaaaaatggattcggagctgccggtgccgccaaggcactgcgccacaccgtttttccacagcgtcacaatgcgggctcctttatcatcgttctccgaccccgccacatacacgtcgccgcccgacacaaaaatggattcgacctcgccagtgtcgccaaggcgctgcgccacgccgttcttccacagcgtaggcaggaatgtcccgtcctcgttttcggatggcaggcgcacataccccaccaggtacacgtctttgcccgagacgaaaatggactgggcggcggcatcgctgcccaaacccaagggaacctccacaccgttcttccacagcgcgggcacggtggcctcgccttcatccgactcggctcccgtccccttggtcccaaggacgtacacatcgggtcccgcaaccttatttgagcggcgactggcgcgaatggaacaacgccgcggcaactcgcgataa

SEQ ID NO: 14384 - protein, 230 aa, Unknown
  Obtained from environmental sample
  misc_feature (1)..(230): Xaa is any amino acid
MTHSVATTFPSSFTFTDSYPATYTSLPDTKTELARELSFPLPKRCALPFFHSVATYGSPSVLPNDCPAIYTSPPDTKMDSELPVPPRHCATPFFHSVTMRAPLSSFSDPATYTSPPDTKMDSTSPVSPRRCATPFFHSVGRNVPSSFSDGRRTYPTRYTSLPETKMDWAAASLPKPKGTSTPFFHSAGTVASPSSDSAPVPLVPRTYTSGPATLFERRLARMEQRRGNSR

SEQ ID NO: 14385 - DNA, 693 bp, Unknown
  Obtained from environmental sample
  misc_feature (1)..(693): n is a, c, g, or t
atgcattcggaaaccgggattgatttttctgttttgcaacctgaaattcttcgcttttatgagctttcagttgatgccttctgcgcggttgtcaatgcgtggatgagcgagcttccggtcactgagcagataatccggtttggcaaaaaaatccttgcatctcaaaaaacgattacaggcaataacggatcaaaccaacgcggaaaaattgaaacaatgcggcgtaaagcggcgaaaatagccgcgactgaccgcggcgatccggatgcgcaggctgtgcgggaggcggcatacaaagtctggcatgaaatcaataggttaaccggtcttctgcgtttttgtcccgatgaaaaaggcgtatatacagcccaatgcgagccggatcattttgtgctgcccgctttgggcccgcatttcatggaacgctttggtgaaacgccctggacaataattgataataagcgccgtctcagtcttggctgtgaaacggggcagtcaggcgctcccggcagaacccttattttttcagccaataccgaaaaccaattaatttttaaaaaagggcagacaggcgaatgggagaatctgtggaagcattaccataaaaccatcaacaacgaaagcaggaataaccccgatctgcaaaaacgcttcatgcccacgcggtattggaaatacttaacagaggtgtaa

SEQ ID NO: 14386 - protein, 230 aa, Unknown
  Obtained from environmental sample
  misc_feature (1)..(230): Xaa is any amino acid
MHSETGIDFSVLQPEILRFYELSVDAFCAVVNAWMSELPVTEQIIRFGKKILASQKTITGNNGSNQRGKIETMRRKAAKIAATDRGDPDAQAVREAAYKVWHEINRLTGLLRFCPDEKGVYTAQCEPDHFVLPALGPHFMERFGETPWTIIDNKRRLSLGCETGQSGAPGRTLIFSANTENQLIFKKGQTGEWENLWKHYHKTINNESRNNPDLQKRFMPTRYWKYLTEV

SEQ ID NO: 14387 - DNA, 555 bp, Unknown
  Obtained from environmental sample
  misc_feature (1)..(555): n is a, c, g, or t
gtgcttcatgccttcccgggattattgcttcttatactgctacagctcttcgcctccgtgtcgggactttttccggttacggcatacccgccatttcccttttcgcaagctccgggcaagtttgtcttctcttacatgcaccacatattcctaccgctttttgcctcattccttagcggtattggcggctccttgcggatgatccgcgccaccatgcttgaccagctaggtcagccttacatcatgtcattgcgctcacgcggcattgccgaatggcgcgtttattttgcccacgctttccgcaacacgcttaacccctacatcacgggaagcgccaatcttttagccggactgttttccggctctttgatactggaaattatttttgcctaccccggcgtaggaaggctcatgtatgaagccgtccttcagcaggacattaatctggtactggcaaatataatgtttatttccttccttgtactgacaggcatggtgttagccgacataatgctggcgttggtagacccccgtatcagatacgggaaagagtag

SEQ ID NO: 14388 - protein, 184 aa, Unknown
  Obtained from environmental sample
  SIGNAL (1)...(28)
  DOMAIN (4)...(181): Binding-protein-dependent transport system inner membrane component
  misc_feature (1)..(184): Xaa is any amino acid
MLHAFPGLLLLILLQLFASVSGLFPVTAYPPFPFSQAPGKFVFSYMHHIFLPLFASFLSGIGGSLRMIRATMLDQLGQPYIMSLRSRGIAEWRVYFAHAFRNTLNPYITGSANLLAGLFSGSLILEIIFAYPGVGRLMYEAVLQQDINLVLANIMFISFLVLTGMVLADIMLALVDPRIRYGKE

SEQ ID NO: 14389 - DNA, 396 bp, Unknown
  Obtained from environmental sample
  misc_feature (1)..(396): n is a, c, g, or t
atgggcgacgtattccgcgaaatcgcccagccccgcaaagcggagggcgggtatttcagcgtcctttccggcgacgacgggtttactctgccccttgcggccctgggcggagacggcatcatctcggtcatttccaacctgctgcccgcgaaagtaaaggcccttgcctgggccagtcttgagggaaggttcgacgaggcccgtaagctccactacgaactgctcccctttgtcaaagcggcctttgtggaaaccaatcccgttcccattaagcaggccatgagttgggcgggccttccggccggtccggcgcggctgcccctgggcaggctttcagccgcaagcgaggcggttctaaagaaggcgatggttgacgcggggattttgaagggctga

SEQ ID NO: 14390 - protein, 131 aa, Unknown
  Obtained from environmental sample
  DOMAIN (1)...(127): Dihydrodipicolinate synthetase family
  misc_feature (1)..(131): Xaa is any amino acid
MGDVFREIAQPRKAEGGYFSVLSGDDGFTLPLAALGGDGIISVISNLLPAKVKALAWASLEGRFDEARKLHYELLPFVKAAFVETNPVPIKQAMSWAGLPAGPARLPLGRLSAASEAVLKKAMVDAGILKG

SEQ ID NO: 14391 - DNA, 696 bp, Unknown
  Obtained from environmental sample
  misc_feature (1)..(696): n is a, c, g, or t
gtgttggaaacgcacctccgcatggcgggctgggagttgggccgcaaaatcgcggaaaccttggacgacatcaggaataagcgcgcgtcgacggacgatntgcgccgcggaatcggaaaaatatacggcaaggaatccgaaacggcgctgtcgaaaatgacggataccgaggttcgcgtccaggcgtcgctgctggccgaaggggtggcgttcgcgacgccatcgttcgacggcgcgaattcggacgatataaagcggtacctgaaaatggcggatttgcccgaatcgggccagttcacgttgtacgacggaatgacgggcgaaaaattcatgcgcccggtgactgtcggcgtgatgtacatgatgaagttgcaccatttggtcgacgaaaaaatccacgcgcgctcggtcggtccgtactcgctcgtaacgcagcagccgttgagcggtaaatcgcacttcggcggacagcggctcggcgaaatggaggtgtgggcgcttgaggcgcacggcgcggcgcacctgttgaaggaaatgctgaccgtaaagtccgacgacataacgggccgcaacaagatgtacgaatcgataatcgcgggttcgaacgacatacaaaccggcacgcccgaggcgtacaacgtgtttgtgcgcgagcttcgcggacttggattgaacctgacgccgaagtcagaataa

SEQ ID NO: 14392 - protein, 231 aa, Unknown
  Obtained from environmental sample
  DOMAIN (8)...(153): RNA polymerase Rpb2, domain 6
  misc_feature (1)..(231): Xaa is any amino acid
MLETHLRMAGWELGRKIAETLDDIRNKRASTDDXRRGIGKIYGKESETALSKMTDTEVRVQASLLAEGVAFATPSFDGANSDDIKRYLKMADLPESGQFTLYDGMTGEKFMRPVTVGVMYMMKLHHLVDEKIHARSVGPYSLVTQQPLSGKSHFGGQRLGEMEVWALEAHGAAHLLKEMLTVKSDDITGRNKMYESIIAGSNDIQTGTPEAYNVFVRELRGLGLNLTPKSE

SEQ ID NO: 14393 - DNA, 558 bp, Unknown
  Obtained from environmental sample
  misc_feature (1)..(558): n is a, c, g, or t
atgaaatttaaaaaaataacgatatttttagcggtggttttttgggctgcggggaatgtcggcgcgcaggaacaacccggtacggatactgacgcgccgctatgcttccttaatttccagccgcttccggggctgaacgtgttcggccgtccttttgaaaaaacaaccgatattttcctgattggaaccatagtgggctatggatacaatcttaaaggatttggcaccgcttcgacgggcttgataaattcgggccgcgtttatggcgttcagctgtccggtatttttaatttcgccaatgcgggcatgtacggattccaaacgtccggcgttttcaatgtcgcgaaaggcgccgtcaggggcgtccaggccgcgggactatacaattacgcgtccggaacatttgcgggccttcaggcgtcgggctttatgaaccggattgaaggagacgtgtgggggattcagttagcgccggttaatatccgcggggaaggaggcggggccggagttcaggtcggcctgttaaatttttctgaatcgggaaatgtaatcccctag

SEQ ID NO: 14394 - protein, 185 aa, Unknown
  Obtained from environmental sample
  SIGNAL (1)...(22)
  misc_feature (1)..(185): Xaa is any amino acid
MKFKKITIFLAVVFWAAGNVGAQEQPGTDTDAPLCFLNFQPLPGLNVFGRPFEKTTDIFLIGTIVGYGYNLKGFGTASTGLINSGRVYGVQLSGIFNFANAGMYGFQTSGVFNVAKGAVRGVQAAGLYNYASGTFAGLQASGFMNRIEGDVWGIQLAPVNIRGEGGGAGVQVGLLNFSESGNVIP

SEQ ID NO: 14395 - DNA, 774 bp, Unknown
  Obtained from environmental sample
  misc_feature (1)..(774): n is a, c, g, or t
atggtttccggcgtggttttctttgagggaattgccaagggcaaacgcaagatcacggtcaaagacgcgtttggcagggaattccagcattttatcccgatggcaaagcgtcttttggttcgagacggcgacacggtggaagccggagagcctctctgcgccggcaatgttaatccccacgacgttttaaaaatcatgggcgaaagctacctccagacctatctgatggacgaaatccagcaggtataccggcttcagggcgtgtcgattaacgacaagcacatcggcgttatagtccgccagatgatgcggaaagttcagatctactttgtgggcgacacaaggtttatctacgaccagatggtagacaagtaccgcttccacgaggaaaacgccagggttataaaagaaggcggccagcccgcaattgccaagcctttattccagggcataaccaaggcgtcattgaatatcgattcgttcctttcggcggccagcttccaggaaaccacccgcgtactgaccaacgccgccattgccggcagcaccgattatctgcgcggcctgaaggaaaacatcatcattggccatccaatacccgcgggcaccggcatgaagcgttaccgtaacgtcaagctgtacgacgaagacagccaggatttggaaaagcagatgcaggagatccttgaacagcgaaggcttgaggcggagtatatcgccgaagcggcaaaatcaatggaaatgatgcccatggaggatgtggacgacgactaa

SEQ ID NO: 14396 - protein, 257 aa, Unknown
  Obtained from environmental sample
  DOMAIN (2)...(164): RNA polymerase Rpb1, domain 5
  misc_feature (1)..(257): Xaa is any amino acid
MVSGVVFFEGIAKGKRKITVKDAFGREFQHFIPMAKRLLVRDGDTVEAGEPLCAGNVNPHDVLKIMGESYLQTYLMDEIQQVYRLQGVSINDKHIGVIVRQMMRKVQIYFVGDTRFIYDQMVDKYRFHEENARVIKEGGQPAIAKPLFQGITKASLNIDSFLSAASFQETTRVLTNAAIAGSTDYLRGLKENIIIGHPIPAGTGMKRYRNVKLYDEDSQDLEKQMQEILEQRRLEAEYIAEAAKSMEMMPMEDVDDD

SEQ ID NO: 14397 - DNA, 774 bp, Unknown
  Obtained from environmental sample
  misc_feature (1)..(774): n is a, c, g, or t
ttgagattagtaaaagttacagcacttatctngatatttgtttcttcgctttttcatactgtactttttaatagatggattaatttttattattcgcttactgcgaattttttaagatatattttatgttttacaacatatcctggctttcgattgattacattaattattagttttttacttgcaggatttggtttatttagattattagtacttcagagagatcaacgattaattaaaaaacttgatgtaaaaggtgcagtaattgaaatgttcaacgatagcgatgaatcatactttgataaatatttaaatgaagtattatatttattctctaacacagaaaaagatgtaattgtgtttgaagatatggacagatttaatagtaatgtgatatttgagcgtttgcgtgaaataaatacacttataaatcattcacatcaaacaaagaataaaccaattcggtttttttatctaattcgagatgatattttcattaataaagatagaacaaaattttttgacctaatcattccagtagttcccattattgatggctcaaactcatatgacaaatttattgatgtatttaaaaagtatggtttatttgagcattttgatagttcatttttacaaggcttttcactttatattgatgaaatgcgtctgcttatcaatatttgtaatgaatatcaaatctatttccaacaaatatctagcactgagactgagatagatcaaaacaaaatgctgcaatattctcggccgatctag

SEQ ID NO: 14398 - protein, 257 aa, Unknown
  Obtained from environmental sample
  SIGNAL (1)...(20)
  misc_feature (1)..(257): Xaa is any amino acid
MRLVKVTALIXIFVSSLFHTVLFNRWINFYYSLTANFLRYILCFTTYPGFRLITLIISFLLAGFGLFRLLVLQRDQRLIKKLDVKGAVIEMFNDSDESYFDKYLNEVLYLFSNTEKDVIVFEDMDRFNSNVIFERLREINTLINHSHQTKNKPIRFFYLIRDDIFINKDRTKFFDLIIPVVPIIDGSNSYDKFIDVFKKYGLFEHFDSSFLQGFSLYIDEMRLLINICNEYQIYFQQISSTETEIDQNKMLQYSRPI

SEQ ID NO: 14399 - DNA, 684 bp, Unknown
  Obtained from environmental sample
  misc_feature (1)..(684): n is a, c, g, or t
gtggtggacgacgcgaacacgaatttgcgcgtggcggagggcctgctctcgccctacaaaatgcgcgtagacatctgccggagcggtcccgacgcgatagaggcggtgcaggcggaacgctacgatatagtcttcatggaccacatgatgccaggaatggacggtttggaggctacaaagcgcataagggccatacgcggcggcggcgactactacagaaaactgccgatcatcgccctcaccgcgaacgccgtggccggcgcgcgcgaaatgttcctgagcgagggcctgaacgactttatctcaaagccaatagacgtagccaagttgaaagccgtcctcgacaagtggataccgcaagagttgcgcaaatcgccgaccgaggttatcgcgtcaggctctgagaacggcgaagacgacataatagacgtgcggaagatcaagatagacggcgtggacgtggaaaaagggctggcgatctccggcggcaaggggacgcactacatccgcaccatcaccatgttctacgaagacggcttcgagaagatcaaggagataagaaactgcatggagataggcgacatgcagctctacgccacgcacgtccacggcctgaaaagcgcctcggcaagcataggcgcggcggcggtctccgaagaggcgagggcgcttgaggcggcgtga

SEQ ID NO: 14400 - protein, 227 aa, Unknown
  Obtained from environmental sample
  DOMAIN (2)...(115): Response regulator receiver domain
  misc_feature (1)..(227): Xaa is any amino acid
MVDDANTNLRVAEGLLSPYKMRVDICRSGPDAIEAVQAERYDIVFMDHMMPGMDGLEATKRIRAIRGGGDYYRKLPIIALTANAVAGAREMFLSEGLNDFISKPIDVAKLKAVLDKWIPQELRKSPTEVIASGSENGEDDIIDVRKIKIDGVDVEKGLAISGGKGTHYIRTITMFYEDGFEKIKEIRNCMEIGDMQLYATHVHGLKSASASIGAAAVSEEARALEAA

SEQ ID NO: 14401 - DNA, 957 bp, Unknown
  Obtained from environmental sample
  misc_feature (1)..(957): n is a, c, g, or t
atgcgccttgccgcgaccggtcagaaccccgacagcatagacacaaaaaaattacttagcgagtgcctcggcgacctcgtagacaacaaggtgctccttgtccgcgcaatggaggacaccatgataaatgttcggaacgatgaggtagagagcacgctaaacaaccacataaacatgattctgcgtcagaacaacataactatggagcagcttgaggcgcagatccgcatacagcaggggagtacaatagcccgttttaagtcggagatgcgcagggcgattcgcgagcagttgtacaagcagaagttgcagcagggttactacttctcggccaagatcaaccgccgcgacgtggagcgcttctacgcgcagtacgccgacagcctgccggaggtgggcgagagctttgaactcctgaaactcagtttgcgtttagaaacgcaggattcggtgcgtcaggcggctttcgacaagatccgcgccgccaagcgggagattgacgcggggatgagttttgaggaggcggccaagaagtactctgagagccctgagggggcgtcggggggcgacctcggttttttggctaagggttcgaccaccgagctggtcttcgaggagcgcgcgttctctctgccggtcgggcgtacgagcgagccgtttgagacgcgcttggggtatcacatagtaaaggtggaagagaagcaaggcatgagcgtgcggctccgccatattttagtcaggcacgcgccgaccgagggtcagcgcgaggcgcttgtggcaaagctcgattcgctgcgcggcgccgtaaaagatagggctggttttgaagtttgcgttagggncatgagcgtagacnacgcgacgcgttcgcgcggcggcgaattgggctggctcaccctgctggaaatgccgccgtcagtacgcgaagcggtgcaaggcttggaggcgggcaaatag

SEQ ID NO: 14402 - protein, 318 aa, Unknown
  Obtained from environmental sample
  DOMAIN (138)...(233): PPIC-type PPIASE domain
  misc_feature (1)..(318): Xaa is any amino acid
MRLAATGQNPDSIDTKKLLSECLGDLVDNKVLLVRAMEDTMINVRNDEVESTLNNHINMILRQNNITMEQLEAQIRIQQGSTIARFKSEMRRAIREQLYKQKLQQGYYFSAKINRRDVERFYAQYADSLPEVGESFELLKLSLRLETQDSVRQAAFDKIRAAKREIDAGMSFEEAAKKYSESPEGASGGDLGFLAKGSTTELVFEERAFSLPVGRTSEPFETRLGYHIVKVEEKQGMSVRLRHILVRHAPTEGQREALVAKLDSLRGAVKDRAGFEVCVRXMSVDXATRSRGGELGWLTLLEMPPSVREAVQGLEAGK

SEQ ID NO: 14403 - DNA, 585 bp, Unknown
  Obtained from environmental sample
  misc_feature (1)..(585): n is a, c, g, or t
atggccgagggtttgatatttaatgtaatagacgctaaagatgttaccggccccattatggatttccttaggcctttgcccggtataggccgcctgataccgtcgggggcaggccgtacccagcctttgttctctgatgacggcgacttgaacctggacgcggaacgctttgccattcgcatggaagcgctggaactgcaaaaaatggagatggacaaacaggagcaggaaatgcagggccggctgggccaaatagagcaaatggcccaggaattggaagaaagacaaaaagctattgaagaaagggagagatcccttaatgcccagctctcagacgccgaaattaaagataggaacgttgaacggaatgccatcaatctgaccagtatgccgccggagcgagcggtgggtattctgtcagcaatggatgatcaggatgtaatcgacgttctccggaaaaccgatgagcttgcccaggcgggtggaagccagtctatcgtaccttactggctgtctttgatggacagccaaagagcggcggaaataagccgtaaaatggttacgaggccttcctccctgaattaa

SEQ ID NO: 14404 - protein, 194 aa, Unknown
  Obtained from environmental sample
  misc_feature (1)..(194): Xaa is any amino acid
MAEGLIFNVIDAKDVTGPIMDFLRPLPGIGRLIPSGAGRTQPLFSDDGDLNLDAERFAIRMEALELQKMEMDKQEQEMQGRLGQIEQMAQELEERQKAIEERERSLNAQLSDAEIKDRNVERNAINLTSMPPERAVGILSAMDDQDVIDVLRKTDELAQAGGSQSIVPYWLSLMDSQRAAEISRKMVTRPSSLN

SEQ ID NO: 14405 - DNA, 900 bp, Unknown
  Obtained from environmental sample
  misc_feature (1)..(900): n is a, c, g, or t
atgtttcttgtctccgtattctgcttcctcgctttcagcgttatcaggggagacacggcaagttttctcgcaggaaccgaaggctctccagaatatttagcggcgttacgtgaacagataggtcttaaccgaagcgtttttttgcgctactttgactggctgtgcggttttctttcaggcaatccgggaaactccctgcgttttcacggacaggaaatatccgcgctgattaaggaacgtcttcccgtcagtttttcgcttgccctgttttcaattattttaatactgataatttcggtgtccgtttcgctttttactgtcaggcgcgaaggaaacgccgcagatcgtattgtaaacttttttacagccgcgggaataagcgcgcccggattttttctcggccttatttttatatggctcttcggttttaccgcgaaactgttcgttcccggcctttttattgattacagggaaagtttaccgggctttatcggctgccttttctttccggccctttcaatagcaattccaaactcggcaatattgacaaaatttttaagaggctctctttttcaggaacttcaaagctgttatgtaagaacggcaaaaagcaagggagcgggaaatttgactattcttcgccgtcatgttttaaaaaacgcggttattccttccgttaccatgttggctatgatcattgccgaagttttttcgggaagcattattatcgaacaggtatttacaattccggggataggaaggctacttattgcggcaatcagttcaagggattatcctttaatacaggcattaatggttnacacagcgtttatagttgtcttagcaaatacccttgccgatattgtcataatgattcttgatccaagatcagaacggtaa

SEQ ID NO: 14406 - protein, 299 aa, Unknown
  Obtained from environmental sample
  SIGNAL (1)...(24)
  DOMAIN (81)...(299): Binding-protein-dependent transport system inner membrane component
  misc_feature (1)..(299): Xaa is any amino acid
MFLVSVFCFLAFSVIRGDTASFLAGTEGSPEYLAALREQIGLNRSVFLRYFDWLCGFLSGNPGNSLRFHGQEISALIKERLPVSFSLALFSIILILIISVSVSLFTVRREGNAADRIVNFFTAAGISAPGFFLGLIFIWLFGFTAKLFVPGLFIDYRESLPGFIGCLFFPALSIAIPNSAILTKFLRGSLFQELQSCYVRTAKSKGAGNLTILRRHVLKNAVIPSVTMLAMIIAEVFSGSIIIEQVFTIPGIGRLLIAAISSRDYPLIQALMVXTAFIVVLANTLADIVIMILDPRSER

SEQ ID NO: 14407 - DNA, 585 bp, Unknown
  Obtained from environmental sample
  misc_feature (1)..(585): n is a, c, g, or t
atggaaaccatagacatgctgttcaaaaaagccgctctcaaaccggaagatctttcaggcattgtatgcatgggggggccgggatcttttaccggccttcgcataggtttttccctggccaaaggcctggctctggctcttggctgcccatttgccgcgattcccaccctcgactgcatagcaaggccattgtcttcactaaagggtttagccgtgccggttcttgacgcgaagagaagttcctttttctgcgcattgtacagggacggcgcaagaatatgcgccgacatggacgccggcccctcggcaatagccacggtaattgctgatgcggcttccacagggcaggcaaaacaggtattgctgttcggccctggcgcggaaatgctttacggcaaattaacgcagttgcctcaaagcccgttagcagacattaatatacttgtcggaaaaggccttcgctggggaaacgcgcaaaccctgctggagatcgcgctggagacggatatttttgcgaacagcgttacggatttttccgcgggaccggagtatatacgcaaaagcgacgcggaagaaaaaaaatga

SEQ ID NO: 14408 - protein, 194 aa, Unknown
  Obtained from environmental sample
  DOMAIN (2)...(194): Glycoprotease family
  misc_feature (1)..(194): Xaa is any amino acid
METIDMLFKKAALKPEDLSGIVCMGGPGSFTGLRIGFSLAKGLALALGCPFAAIPTLDCIARPLSSLKGLAVPVLDAKRSSFFCALYRDGARICADMDAGPSAIATVIADAASTGQAKQVLLFGPGAEMLYGKLTQLPQSPLADINILVGKGLRWGNAQTLLEIALETDIFANSVTDFSAGPEYIRKSDAEEKK

SEQ ID NO: 14409 - DNA, 420 bp, Unknown
  Obtained from environmental sample
  misc_feature (1)..(420): n is a, c, g, or t
ttgaatatatttttgaatacctgttccgtctgcgccttaacatcgccttccaccaacttccccgttttggaatcaactggtatttgcccagaaaaaagcaccagcccgcctgcatccacgccaagcgaatacgggcctacagccgtaatatcctttgaacaaatttcttttctcgccatatctgcctccgagggttttgttaaatgtagaaaattgtcatgttgtcttgttttatatatttcaggcatgaaatataatcccgatttacatcatagacattcaattcgtttacaggattatgattacgcaaatttaggggcatattttgtaacgatatgttgccaaaaccgatataaaccngtttcggggaaatcgtcaacaatgaggggcagggtctgccctcggccgatctgtccatga

SEQ ID NO: 14410 - protein, 139 aa, Unknown
  Obtained from environmental sample
  SIGNAL (1)...(24)
  misc_feature (1)..(139): Xaa is any amino acid
MNIFLNTCSVCALTSPSTNFPVLESTGICPEKSTSPPASTPSEYGPTAVISFEQISFLAISASEGFVKCRKLSCCLVLYISGMKYNPDLHHRHSIRLQDYDYANLGAYFVTICCQNRYKPVSGKSSTMRGRVCPRPICP

SEQ ID NO: 14411 - DNA, 447 bp, Unknown
  Obtained from environmental sample
  misc_feature (1)..(447): n is a, c, g, or t
atgcctgaaatatataaaacaagacaacatgacaattttctacatttaacaaaaccctcggaggcagatatggcgagaaaagaaatttgttcaaaggatattacggctgtaggcccgtattcgcttggcgtggatgcaggcgggctggtgcttttttctgggcaaataccagttgattccaaaacggggaagttggtggaaggcgatgttaaggcgcagacggaacaggtattcaaaaatatattcaatttgctggaaagcgcaggcttgaccgcagatgatgttcaaaaggtaaatgtttttctaaccgatatgaatgactttcaggcgatgaatgaggtgtataaagataaattcaataaaccctatccagcacgtagcactctaggcgttgccgctttgcctttaggctcaaaagttgaaatagaaataatcgcgaaaaaatga

SEQ ID NO: 14412 - protein, 148 aa, Unknown
  Obtained from environmental sample
  DOMAIN (30)...(148): Endoribonuclease L-PSP
  misc_feature (1)..(148): Xaa is any amino acid
MPEIYKTRQHDNFLHLTKPSEADMARKEICSKDITAVGPYSLGVDAGGLVLFSGQIPVDSKTGKLVEGDVKAQTEQVFKNIFNLLESAGLTADDVQKVNVFLTDMNDFQAMNEVYKDKFNKPYPARSTLGVAALPLGSKVEIEIIAKK

SEQ ID NO: 14413 - DNA, 873 bp, Unknown
  Obtained from environmental sample
  misc_feature (1)..(873): n is a, c, g, or t
atgagcgtttttgttgtcgtaatactgctggcttttgccgcttgtaaaagtactacgaaagctgatatcgaagaagtcaaaggcgtagtcggaaccaaaaccgaaacagaaacaaagaccgaaacccatactgaatacaaaaccgagaccaaaaccgagccaaaggccgagtcaaaaaccgaaacaaaggccaaaaccgaagcctccggtaaatcaaacagtatttgggcattactgcagaaaggggacagcaaggcaaaagattacttcgttggcgaagttgaagtaaacgcgagagatcccgaaggcaggacaccccttcattatgccgcagaaaggggcgattcagggcttgccgcttttttcatttcactcggagcaaatgtcaatgtcacggataattcaaatatgagtcctttgggaatcagcgtcgaaaaaggcgatgccaggattacggaattgctggttaacgcaaaagccgacatctttttgccaatcaggggaaacacaaccgtggcaaaaattgctctttcaaaaaacgcctctcttattagagctattataactccctttacggtcgaagcggctgacaaagacgggaaaaccatccttcatcttgcaagtatagagggcaatgttcttgccgtacataacatactggaaacaacatcttccggcgcagttgtaaacaaaaaggatacttatcaaaaaaacgcgcttgattacgcgttagcgagacccgactcaagaaatcacatggaaattgctgaaaagnctgatattggcgggaggaaattccgaagatccaatattttattaccttgcgccggccgtgcgcagagccaactacaacatccgccgcctcgccgataa

SEQ ID NO: 14414 - protein, 290 aa, Unknown
  Obtained from environmental sample
  SIGNAL (1)...(20)
  DOMAIN (199)...(234): Ankyrin repeat
  misc_feature (1)..(290): Xaa is any amino acid
MSVFVVVILLAFAACKSTTKADIEEVKGVVGTKTETETKTETHTEYKTETKTEPKAESKTETKAKTEASGKSNSIWALLQKGDSKAKDYFVGEVEVNARDPEGRTPLHYAAERGDSGLAAFFISLGANVNVTDNSNMSPLGISVEKGDARITELLVNAKADIFLPIRGNTTVAKIALSKNASLIRAIITPFTVEAADKDGKTILHLASIEGNVLAVHNILETTSSGAVVNKKDTYQKNALDYALARPDSRNHMEIAEKXDIGGRKFRRSNILLPCAGRAQSQLQHPPPRR

SEQ ID NO: 14415 - DNA, 567 bp, Unknown
  Obtained from environmental sample
  misc_feature (1)..(567): n is a, c, g, or t
atggacataaaactcgccggcatcacggctgagatcatgaaagaggcgctatccaaggccaaggtcgcccgcttcaagatactcgacatcatgtcggaagcgctgccctcggcccgcaaggagatgtccgccttcgcgccgcgcataaccacgatcacaatagacaaggacaagatccgcgaggtcataggcccgggcggcaagatgatccgcgacatccaagacaccaccggcgccacgatcttcatagacgacgacggcacagtgcagatcgcggcctccaacaaggagtcaagagacgccgcgctgcgccgcataaaaggcatcgtcgcggaaccggaactcaacgcgatctacgaaggcacggtcaagacaatcgtggagttcggcgcgttcgtggagtacctgccgggtaaagacgggttgctgcatatatcggagcttgaacacagccgggtcaacaaagtggaggatgtgctgcagcttggggataaggttaaggtgaagttgattgggtttgacaggatggggaaggttaaacttagccggaaagcgttgttggagtag

SEQ ID NO: 14416 - protein, 188 aa, Unknown
  Obtained from environmental sample
  DOMAIN (49)...(106): KH domain
  misc_feature (1)..(188): Xaa is any amino acid
MDIKLAGITAEIMKEALSKAKVARFKILDIMSEALPSARKEMSAFAPRITTITIDKDKIREVIGPGGKMIRDIQDTTGATIFIDDDGTVQIAASNKESRDAALRRIKGIVAEPELNAIYEGTVKTIVEFGAFVEYLPGKDGLLHISELEHSRVNKVEDVLQLGDKVKVKLIGFDRMGKVKLSRKALLE

SEQ ID NO: 14417 - DNA, 402 bp, Unknown
  Obtained from environmental sample
  misc_feature (1)..(402): n is a, c, g, or t
gtgatacgcggcgcattcgcgctgattccagaacgagaaaccgcaatcgatttgcccatttcgcccaaaatatgcaaacgtccttgcaacgcttgtttcaacgcaatgtccatgatttcagttgtaatcgatgtgattttaatgtccatttgcaaagccgtaacccctttgttcgtgccagcaaccttaaaatccatatcgcccaaatggtcttcatcgcccaaaatatccgttaaaacagcgaattcagaaccttctttaatcaagcccattgcaatcccagccacaggacgcgccatcggcacacctgcgtccatcaacgacatcgacgaaccgcacacagtcgccatcgatgacgaaccattggattccataatgtccgacacaatgcgaatggtatag

SEQ ID NO: 14418 - protein, 133 aa, Unknown
  Obtained from environmental sample
  misc_feature (1)..(133): Xaa is any amino acid
MIRGAFALIPERETAIDLPISPKICKRPCNACFNAMSMISVVIDVILMSICKAVTPLFVPATLKSISPKWSSSPKISVKTANSEPSLIKPIAIPATGRAIGTPASINDIDEPHTVAIDDEPLDSIMSDTMRMV

SEQ ID NO: 14419 - DNA, 387 bp, Unknown
  Obtained from environmental sample
  misc_feature (1)..(387): n is a, c, g, or t
ttgcgtcaccgattcatcaacggcggcaattttcacaagcccgtcatcgctgatgtcaattttcgcgcctgttttttcgacgatttcacgaatgactttgccaccagacccaatcacttcgcggattttgtccttatggatttgaatcgtcgtgatacgcggcgcattcgcgctgattccagaacgagaaaccgcaatcgatttgcccatttcgcccaaaatatgcaaacgtccttgcaacgcttgtttcaacgcaatgtccatgatttcagttgtaatcgatgtgattttaatgtccatttgcaaagccgtaacccctttgttcgtgccagcaaccttaaaatccatatcgcccaaatggtcttcatcgcccaaaatatccgttaa

SEQ ID NO: 14420 - protein, 128 aa, Unknown
  Obtained from environmental sample
  misc_feature (1)..(128): Xaa is any amino acid
MRHRFINGGNFHKPVIADVNFRACFFDDFTNDFATRPNHFADFVLMDLNRRDTRRIRADSRTRNRNRFAHFAQNMQTSLQRLFQRNVHDFSCNRCDFNVHLQSRNPFVRASNLKIHIAQMVFIAQNIR

SEQ ID NO: 14421 - DNA, 432 bp, Unknown
  Obtained from environmental sample
  misc_feature (1)..(432): n is a, c, g, or t
atggggttgacccattcaagacctgaagacgcggatttggtggaagtcccgttacttggaacagtcgccgcgggcactcctcttttagcggaggaaaattttgacggaaatattctgattcaccgttccatgttgaagagaaacaaaaaatattttgcgcttaaagtaaaaggcgattcaatgatcggcgcgggtattctggaaggagatatagcgattattgaaaaacagcatatagttcaaaataaagagattgccgtagtggtcataatggaaaaagattcatctgaagaaggcataacattgaaacggttttttaaagaaagcgcaagaattcgattggaagcggaaaatcctgagtacaagccgcgttattacacccatgatataaaagttttgggcagattatctacagtaataagatcatattga

SEQ ID NO: 14422 - protein, 143 aa, Unknown
  Obtained from environmental sample
  DOMAIN (55)...(129): Peptidase S24-like
  misc_feature (1)..(143): Xaa is any amino acid
MGLTHSRPEDADLVEVPLLGTVAAGTPLLAEENFDGNILIHRSMLKRNKKYFALKVKGDSMIGAGILEGDIAIIEKQHIVQNKEIAVVVIMEKDSSEEGITLKRFFKESARIRLEAENPEYKPRYYTHDIKVLGRLSTVIRSY

SEQ ID NO: 14423 - DNA, 867 bp, Unknown
  Obtained from environmental sample
  misc_feature (1)..(867): n is a, c, g, or t
atggcaatcaaactgggagccaaagaaaaggccgacgtggtaatggctacggacccggacgcggaccgtttcgggatagcggttcccaatacatcaggcggcttcaccctggtaacgggaaaccagatgggctctctgttagccgactacatcttcctctccctcaaagagcagggaaaactaccgaaaaacgcggcaatggtcaattccatcgttacaaccggaatgcagaaacaagtagcacagcattacggcgctgaatgtttcgagtgccttaccggcttcaagtggatagccgatgttatgcgcaagtgggaaaacggcgaagccggggcaaagagctttgtatacggcacggaggaaagctacggctacctcgtggagaccgaagtccgcgacaaggatggcgtttccgccgcggccctgacagcggagatgaccctgtactggcgcagcaagggcaagagcctccttgaccggctggacgacctgtacgccatctgcggtttctggcaggaactcggcatatccaaatacttccaggggcccgaaggcccggccatcatgaagggcataatggaggaataccggaagaaccccccaaagctcctgggcgggatcgaagtcgtcaaagtgcgggatattgaaaacggcgcggacggccttccgccgagcgacgtgcttcagttcttcctgaaggacggaaccgtggtaagcgcccggcccagcggaacagagccgaaaatcaaattctacgcaacctgccgtgccgaaaccggctcaggcggacttgccgccgcccgtgccgaggccgcccgcaaactggacgcgattaaaaaggacatccgtcaggtaattggcgattaa

SEQ ID NO: 14424 - protein, 288 aa, Unknown
  Obtained from environmental sample
  DOMAIN (39)...(164): Phosphoglucomutase/phosphomannomutase, alpha/beta/alpha domain III
  misc_feature (1)..(288): Xaa is any amino acid
MAIKLGAKEKADVVMATDPDADRFGIAVPNTSGGFTLVTGNQMGSLLADYIFLSLKEQGKLPKNAAMVNSIVTTGMQKQVAQHYGAECFECLTGFKWIADVMRKWENGEAGAKSFVYGTEESYGYLVETEVRDKDGVSAAALTAEMTLYWRSKGKSLLDRLDDLYAICGFWQELGISKYFQGPEGPAIMKGIMEEYRKNPPKLLGGIEVVKVRDIENGADGLPPSDVLQFFLKDGTVVSARPSGTEPKIKFYATCRAETGSGGLAAARAEAARKLDAIKKDIRQVIGD

SEQ ID NO: 14425 - DNA, 591 bp, Unknown
  Obtained from environmental sample
  misc_feature (1)..(591): n is a, c, g, or t
gtggcgtatattggcgtttcggcggtcttcgggctggggttgatcgggtgcgggggggatgataatccgtcgggcggggataacaacggcggcgggagcaataccggcggcggatctgtgccgatagagaagtggatgaagacgaatctgaacgtggagacggcggattcttggtgttatgacgacgaccccgctaactgtgagaagtacgggaggctgtatacgtgggaggcggcgaaagcggcttgtcagtcggttgggaagaggctgccgactaatcaggagtggactgcattggtgacggcggctggcggttcatctacggcaggtacgaaattaaagtcaacgagcggatggaataacaatggtaatggtactaatgatttcggattttcggccttgcccggcggctaccgctacgacacgaaagaccgtttctacgatgccggcgtccgcggcacctggtggacggcctcggagtatgggaatgacggcgccttcaaatggagcatgagctgctacggcagcatcgcggacaattactacagcggcaatagatacggcttctcggcgcgctgtgttgacgactga

SEQ ID NO: 14426 - protein, 196 aa, Unknown
  Obtained from environmental sample
  misc_feature (1)..(196): Xaa is any amino acid
MAYIGVSAVFGLGLIGCGGDDNPSGGDNNGGGSNTGGGSVPIEKWMKTNLNVETADSWCYDDDPANCEKYGRLYTWEAAKAACQSVGKRLPTNQEWTALVTAAGGSSTAGTKLKSTSGWNNNGNGTNDFGFSALPGGYRYDTKDRFYDAGVRGTWWTASEYGNDGAFKWSMSCYGSIADNYYSGNRYGFSARCVDD

SEQ ID NO: 14427 - DNA, 519 bp, Unknown
  Obtained from environmental sample
  misc_feature (1)..(519): n is a, c, g, or t
atgaagaaaattcaagtcaggttatttaattctttagttaacaagactttttttgttttttcatgcgtccttttcctgattattaccctgtcggctattaccgcttataccatttccgcccatcaaaataacctttcttttattaaacaacagctttccatagcttccgaaacaacgcgtctgcgtctggcttcgacggtaaacagcgaacttgcccttgttctaaaaatggcagacacccccgttataaggcagcattttatgaatccttatgatccttatcttagaactctggcttataccgaattggaactttataaggaacactttgaaaatcanacagttttttgggtcagcgatgcggacagaatattttactcgacgggaaacgagccgtacgttgttaatcccgacgatccggcgtcttattggtatcatttaacgctgtacgaaacagaaatatttaattttaacattaattacaacccgaaatttggatcaaatcaaccttttgggtaa

SEQ ID NO: 14428 - protein, 172 aa, Unknown
  Obtained from environmental sample
  misc_feature (1)..(172): Xaa is any amino acid
MKKIQVRLFNSLVNKTFFVFSCVLFLIITLSAITAYTISAHQNNLSFIKQQLSIASETTRLRLASTVNSELALVLKMADTPVIRQHFMNPYDPYLRTLAYTELELYKEHFENXTVFWVSDADRIFYSTGNEPYVVNPDDPASYWYHLTLYETEIFNFNINYNPKFGSNQPFG

SEQ ID NO: 14429 - DNA, 321 bp, Unknown
  Obtained from environmental sample
  misc_feature (1)..(321): n is a, c, g, or t
ttgggggaaagcataatggctaatgttacggtgacttttactattaccgaattttgcctgcataccggcatctctgaagaggagttgaatgaaattgtcggtttgggggtggttgaaccgcgtgagatccaggaaacaacctgggtatttgacgaccatgccgccattgtggtgcaacgcgcggtacgcctgcgtcatgaactggctctggactggccggggatcgcggtggcgctgacgttaatggatgatattgcgcacctgaagcaggaaaaccgcctgctgcgccagcggctttcccggtttgtagctcatccgtga

SEQ ID NO: 14430 - protein, 106 aa, Unknown
  Obtained from environmental sample
  misc_feature (1)..(106): Xaa is any amino acid
MGESIMANVTVTFTITEFCLHTGISEEELNEIVGLGVVEPREIQETTWVFDDHAAIVVQRAVRLRHELALDWPGIAVALTLMDDIAHLKQENRLLRQRLSRFVAHP

SEQ ID NO: 14431 - DNA, 336 bp, Unknown
  Obtained from environmental sample
  misc_feature (1)..(336): n is a, c, g, or t
gtgtattcgggaaatgccacacaatacggagaattaggagattgccaatgtggacggatagattatgaattaggcattattcaagaaaaggggttttcatcatatttcctgactatagacgacattgtaagaatggctttccacacttgcggtcgtggttcgggtgcggcttctattgtttcttacggactgagtattaccaatgtagacgcttcacgccataacctttattttgagaggtttcttaatccggcccagcctgactcgccagatttggacattgattttgcgtgggatgagcgagatgagctaattaaggcggttattgaaaattag

SEQ ID NO: 14432 - protein, 111 aa, Unknown
  Obtained from environmental sample
  misc_feature (1)..(111): Xaa is any amino acid
MYSGNATQYGELGDCQCGRIDYELGIIQEKGFSSYFLTIDDIVRMAFHTCGRGSGAASIVSYGLSITNVDASRHNLYFERFLNPAQPDSPDLDIDFAWDERDELIKAVIEN

SEQ ID NO: 14433 - DNA, 348 bp, Unknown
  Obtained from environmental sample
  misc_feature (1)..(348): n is a, c, g, or t
atgaaagcgcggctgcagattttggccgacgacctgaagatcgaaataacagtgttgcatttccctcctggaaccagcaagtggaataggattgagcataggctgttgcgtttcacaagcaaaaactggcgcggcaaaccgttaatctcgttggcattgatcgtcaatcttattggatcgacaaagacaggcgatggaaataaagttgagtgtgtcattgacaggcacaaatacaagcccggcgtggaaatatcagacgaagaatttgatgctataaatattaagcatcataaatttcatggcgaatggaattataagattgtgccccatatgaaaaacaagttgtaa

SEQ ID NO: 14434 - protein, 115 aa, Unknown
  Obtained from environmental sample
  misc_feature (1)..(115): Xaa is any amino acid
MKARLQILADDLKIEITVLHFPPGTSKWNRIEHRLLRFTSKNWRGKPLISLALIVNLIGSTKTGDGNKVECVIDRHKYKPGVEISDEEFDAINIKHHKFHGEWNYKIVPHMKNKL

SEQ ID NO: 14435 - DNA, 492 bp, Unknown
  Obtained from environmental sample
  misc_feature (1)..(492): n is a, c, g, or t
atggccgcggtgacaaagttcggctccatagacccagccaaggccaaagaatacggctggaagcagatggacgcgggcgcctggatagagcagcccgtgaccatcctggtccccgccgcacaggagaacatggtcaacgccagcaacgtcgagaagatcaaggacaccgtcaaggtgatagccgaaggcgccaacggtccgaccacgcccgaggccgacgccgtcattcagaagaagggcatattcatgatccccgacttcctctgcaacgccggcggcgtgacctgctcctacttcgagcaggtgcagaacaacatgaactactactgggaaaaggaagaggtcctgaccaagctggaccagaagatgaccaacgccttcaaggccgtgtccgccatggccaaggagcgcaaggtttacatgcgcgacgccgcctacatggtctccatcaagcgcgttgcagacgcctgccgcgtgaggggctgggtctag

SEQ ID NO: 14436 - protein, 163 aa, Unknown
  Obtained from environmental sample
  DOMAIN (1)...(161): Glutamate/Leucine/Phenylalanine/Valine dehydrogenase
  misc_feature (1)..(163): Xaa is any amino acid
MAAVTKFGSIDPAKAKEYGWKQMDAGAWIEQPVTILVPAAQENMVNASNVEKIKDTVKVIAEGANGPTTPEADAVIQKKGIFMIPDFLCNAGGVTCSYFEQVQNNMNYYWEKEEVLTKLDQKMTNAFKAVSAMAKERKVYMRDAAYMVSIKRVADACRVRGWV

SEQ ID NO: 14437 - DNA, 912 bp, Unknown
  Obtained from environmental sample
  misc_feature (1)..(912): n is a, c, g, or t
atgcagaccaaacccaacatggggaagatcgtacaggtcgtaggcccaataattgatatcaaatttacccgcaacaatatcccctccatccgcaacgccatagaaattcacgtcgccgccgatcccgacacgaataccccggaacgtctggtgacctgcgaagtctccatgcagatgagcggcggtatagtgcgctgcgtctcgatgtcgcccaccgaggggctttcccgcggcatggacgccatagataccgacaagcctatccttgttcccgtggggaaagaggttctcggacgcctcttcaacgctctgggcgaacccattgataccctcggcgatttttcaagcaataacgaacgcgtctcgatacgatccaacccgccgcacttcgcggatattgaatccagcgactcggtttttgagacgggcatcaaggtgatcgacctgatgtcgccgtttgtcaagggaggcaagaccggcctctttggcggcgcgggtgtgggcaaaaccgttatcattatggaactcatccacaacatggccaccaaacacggcggtatctcggttttcgcgggcgtcggtgaacgcacacgcgagggcaacgacctctggctcgagatgaaagaatcgggcgtgctcgaaaaaaccgcgatggtctttggccagatgggcgaactccccggcgcgcgcatgatcaccccgctgaccgcgctcaccatggcggagcatttccgcgacaaggagcagcaggacgtactcttcttcatggacaatgttttccgcttcgtgcaggccggaagcgaagtctccacgctgcttggccgtatgccttcggcggttggctaccagcccaccctggcgatagagatgggaagattgcaggaacggatcgatcgacctcggccgatctga

SEQ ID NO: 14438 - protein, 303 aa, Unknown
  Obtained from environmental sample
  DOMAIN (10)...(85): ATP synthase alpha/beta family, beta-barrel domain
  misc_feature (1)..(303): Xaa is any amino acid
MQTKPNMGKIVQVVGPIIDIKFTRNNIPSIRNAIEIHVAADPDTNTPERLVTCEVSMQMSGGIVRCVSMSPTEGLSRGMDAIDTDKPILVPVGKEVLGRLFNALGEPIDTLGDFSSNNERVSIRSNPPHFADIESSDSVFETGIKVIDLMSPFVKGGKTGLFGGAGVGKTVIIMELIHNMATKHGGISVFAGVGERTREGNDLWLEMKESGVLEKTAMVFGQMGELPGARMITPLTALTMAEHFRDKEQQDVLFFMDNVFRFVQAGSEVSTLLGRMPSAVGYQPTLAIEMGRLQERIDRPRPI

SEQ ID NO: 14439 - DNA, 705 bp, Unknown
  Obtained from environmental sample
  misc_feature (1)..(705): n is a, c, g, or t
gtggagacttcgcttccggcctgcacgaagcggaaaacattgtccatgaagaagagtacgtcctgctgctccttgtcgcggaaatgctccgccatggtgagcgcggtcagcggggtgatcatgcgcgcgccggggagttcgcccatctggccaaagaccatcgcggttttttcgagcacgcccgattctttcatctcgagccagaggtcgttgccctcgcgtgtgcgttcaccgacgcccgcgaaaaccgagataccgccgtgtttggtggccatgttgtggatgagttccataatgataacggttttgcccacacccgcgccgccaaagaggccggtcttgcctcccttgacaaacggcgacatcaggtcgatcaccttgatgcccgtctcaaaaaccgagtcgctggattcaatatccgcgaagtgcggcgggttggatcgtatcgagacgcgttcgttattgcttgaaaaatcgccgagggtatcaatgggttcgcccagagcgttgaagaggcgtccgagaacctctttccccacgggaacaaggataggcttgtcggtatctatggcgtccatgccgcgggaaagcccctcggtgggcgacatcgagacgcagcgcactataccgccgctcatctgcatggagacttcgcaggtcaccagacgttccggggtattcgtgtcgggatcggcggcgacgtga

SEQ ID NO: 14440 - protein, 234 aa, Unknown
  Obtained from environmental sample
  misc_feature (1)..(234): Xaa is any amino acid
METSLPACTKRKTLSMKKSTSCCSLSRKCSAMVSAVSGVIMRAPGSSPIWPKTIAVFSSTPDSFISSQRSLPSRVRSPTPAKTEIPPCLVAMLWMSSIMITVLPTPAPPKRPVLPPLTNGDIRSITLMPVSKTESLDSISAKCGGLDRIETRSLLLEKSPRVSMGSPRALKRRPRTSFPTGTRIGLSVSMASMPRESPSVGDIETQRTIPPLICMETSQVTRRSGVFVSGSAAT

SEQ ID NO: 14441 - DNA, 387 bp, Unknown
  Obtained from environmental sample
  misc_feature (1)..(387): n is a, c, g, or t
atgctccgccatggtgagcgcggtcagcggggtgatcatgcgcgcgccggggagttcgcccatctggccaaagaccatcgcggttttttcgagcacgcccgattctttcatctcgagccagaggtcgttgccctcgcgtgtgcgttcaccgacgcccgcgaaaaccgagataccgccgtgtttggtggccatgttgtggatgagttccataatgataacggttttgcccacacccgcgccgccaaagaggccggtcttgcctcccttgacaaacggcgacatcaggtcgatcaccttgatgcccgtctcaaaaaccgagtcgctggattcaatatccgcgaagtgcggcgggttggatcgtatcgagacgcgttcgttattgcttga

SEQ ID NO: 14442 - protein, 128 aa, Unknown
  Obtained from environmental sample
  misc_feature (1)..(128): Xaa is any amino acid
MLRHGERGQRGDHARAGEFAHLAKDHRGFFEHARFFHLEPEVVALACAFTDARENRDTAVFGGHVVDEFHNDNGFAHTRAAKEAGLASLDKRRHQVDHLDARLKNRVAGFNIREVRRVGSYRDAFVIA

SEQ ID NO: 14443 - DNA, 807 bp, Unknown
  Obtained from environmental sample
  misc_feature (1)..(807): n is a, c, g, or t
atggcgagcttaatggtgatgagtatgcgtatcaacaataacaaaacgccgataacattaggcgacctgatcgactggtcagccggaaagtcagaactttccgaaactgcccgtagacgtaaggtcgccacggtctggaatgactcgcgtaaggtcacttccggcggcggcgatgtatttatcgctttgcgcggcgacgccgacgacggccaccgttatgttgaatcggcgttcaaaagcggagccgtttcagccgttgttgataagaagggaatctataccgttcctgagaaatatcgtaaaaaatgcatagtcgtcagcgatacgcttaaatcaatacaaaaagcggcggcgcggtatcgcaaagagatggggctcttggtcgtaggcattaccggttcaaacggcaagacgaccacgcgcagctttatctcggcggttctcagaagcgctgtaaaggtaggggagacgtatacgaattggaataaccacatcggcgtcccgcagagcatactgaggttcgacggcgacgagtgggccggggttttggagatgggggctaatcacgtgggcgaaatcggcccgctcacaaagatttgcagaccggacatcgcggtcgtcacgaacatcgggtacgcccacgtggggctgttcgggtcgctcgataggacgacggaggccaagttcgagatcgcggagggattgggtcggggcgggttcatgttgctcaacggcgacgacagccggttggtgaccggagcgcggaagcgcggtctcaagtcggtactcttcggaacgtcgccctaa

SEQ ID NO: 14444 - protein, 268 aa, Unknown
  Obtained from environmental sample
  DOMAIN (41)...(121): Mur ligase family, catalytic domain
  misc_feature (1)..(268): Xaa is any amino acid
MASLMVMSMRINNNKTPITLGDLIDWSAGKSELSETARRRKVATVWNDSRKVTSGGGDVFIALRGDADDGHRYVESAFKSGAVSAVVDKKGIYTVPEKYRKKCIVVSDTLKSIQKAAARYRKEMGLLVVGITGSNGKTTTRSFISAVLRSAVKVGETYTNWNNHIGVPQSILRFDGDEWAGVLEMGANHVGEIGPLTKICRPDIAVVTNIGYAHVGLFGSLDRTTEAKFEIAEGLGRGGFMLLNGDDSRLVTGARKRGLKSVLFGTSP

SEQ ID NO: 14445 - DNA, 519 bp, Unknown
  Obtained from environmental sample
  misc_feature (1)..(519): n is a, c, g, or t
ttgcaggttctggccgagcgtaaaagagtgcgcagcgttaggctttatgtttctcaaaaggatttacaggcacatttaaccattccttattatgcaagcgaaaaatttgcgcttgattttttgagtaaaaactatgagtggctaaaaagaacaatggaaaaaataaaggaaaatccgccgccagctttgcgaaaagagcaagaaatttcaaaaggtgaaatggaaaaacttaaaagaatcatctcaaatttgctcccccagtgggaatttaggcttggggtcaaggcaaaagactggaaactgcgtaaaatgaaaacccagtggggaaattgcaaaatgaaaaccagagagataactttcagcacaggcttgataaaaaaacctctccggtgcatagaatacgtagtagcccacgaactcgctcatttaatagaagcaaaccactccgaaaaattctacgcagttatagcaaaacactttccgtattggaaggaagttaggaaagagttgaatgggtga

SEQ ID NO: 14446 - protein, 172 aa, Unknown
  Obtained from environmental sample
  DOMAIN (11)...(172): Protein of unknown function DUF45
  misc_feature (1)..(172): Xaa is any amino acid
MQVLAERKRVRSVRLYVSQKDLQAHLTIPYYASEKFALDFLSKNYEWLKRTMEKIKENPPPALRKEQEISKGEMEKLKRIISNLLPQWEFRLGVKAKDWKLRKMKTQWGNCKMKTREITFSTGLIKKPLRCIEYVVAHELAHLIEANHSEKFYAVIAKHFPYWKEVRKELNG

SEQ ID NO: 14447 - DNA, 822 bp, Unknown
  Obtained from environmental sample
  misc_feature (1)..(822): n is a, c, g, or t
gtggccgtggatcacgaagggggaacggtaaaccgctttcgacccggcgttgcggatttgccgtctgcggcctcttaccgggaaatgactcaagacgacgctattgcgggcattaacgccggcagttttaacgcaggaacggctattagcgctctgggcattaacctgaatttagcgccggtggcggaatacttaaacgcggataaccgtgattttttggaagaccgttcctatgggtctgacccggcatttaccgccgaagccgccgccgcctttattgccggaatggaacaggccggcatcctctgcgtggtcaagcattttcccggcagcgccgggactgacccccaccgctttctttccatattaaaaggcggcagggagacccttgcggaattgacggcacctattgccgcccttatccgcagcggtcacgcgcgggcgattatggtttcccattcgtcggttccggcctgggacagccagaacatagccagcctttccccggtagttatgggcgattggctgcggcaggaattgggttttgaggggataatcatatgtgatgacttttcgatggcctccgcaggaggcccggcagctgcaggaggtcaaagccacctaaaacccgaaaccgcggtggtgctgtccctggccgccggcgcggatatggtgctggtgtggccgcctgatatccggcggactcaccgcgcgattttggcagcccttaacgacggcaggctttcccgcgagcgtctgcgggaagcggcggggcgaatcatctttgaaaaaatacggacgggtctgttacatgacgactaa

SEQ ID NO: 14448 - protein, 273 aa, Unknown
  Obtained from environmental sample
  DOMAIN (1)...(227): Glycosyl hydrolase family 3 N terminal domain
  misc_feature (1)..(273): Xaa is any amino acid
MAVDHEGGTVNRFRPGVADLPSAASYREMTQDDAIAGINAGSFNAGTAISALGINLNLAPVAEYLNADNRDFLEDRSYGSDPAFTAEAAAAFIAGMEQAGILCVVKHFPGSAGTDPHRFLSILKGGRETLAELTAPIAALIRSGHARAIMVSHSSVPAWDSQNIASLSPVVMGDWLRQELGFEGIIICDDFSMASAGGPAAAGGQSHLKPETAVVLSLAAGADMVLVWPPDIRRTHRAILAALNDGRLSRERLREAAGRIIFEKIRTGLLHDD

SEQ ID NO: 14449 - DNA, 669 bp, Unknown
  Obtained from environmental sample
  misc_feature (1)..(669): n is a, c, g, or t
ttgtttaccgtgatttccgccccggcgacattctgcattctctggcggatatcagcttggccgaacgcctgctcggctacgcgccggaatacgatttcgcccgggggcttgccagatgcgccaagtggtacgcggaacgcttgggccgggagtgtcccggtttgccgtgatgcttcgtcagcgctgctgtcgccaaaccggaacactcccaaggccgctttgctgtcttgttcttcattgtgtgaggatgtcaggatgaagtgccgcaaatgcaattccgaagatattgtcaaaaacggatttatggatggagcgcagagatataaatgcaaaaactgctccttccagttcacgaaagaagttccccacggcaaacccgcgcaggacaagatcatcgccctggttctgcatcttgccgggctgtccatgaacatgaccgcgaagatcatcggcgtgagcgcccagacgatcctgcgctggatgcggcttttttgccggcagtttgaggaagatatgcagtccgcctcccttatcgaagaaattgaagctgctgaactggcggcattcattgagaaaaaaaagactctgcccggctcgggaaaactgttgatcgtcacccttgcaagctcatcaggcggcagtgtgctgatcgtggcgccaaaaccgtga

SEQ ID NO: 14450 - protein, 222 aa, Unknown
  Obtained from environmental sample
  DOMAIN (83)...(162): Insertion element protein
  misc_feature (1)..(222): Xaa is any amino acid
MFTVISAPATFCILWRISAWPNACSATRRNTISPGGLPDAPSGTRNAWAGSVPVCRDASSALLSPNRNTPKAALLSCSSLCEDVRMKCRKCNSEDIVKNGFMDGAQRYKCKNCSFQFTKEVPHGKPAQDKIIALVLHLAGLSMNMTAKIIGVSAQTILRWMRLFCRQFEEDMQSASLIEEIEAAELAAFIEKKKTLPGSGKLLIVTLASSSGGSVLIVAPKP

SEQ ID NO: 14451 - DNA, 312 bp, Unknown
  Obtained from environmental sample
  misc_feature (1)..(312): n is a, c, g, or t
ttgggcgcgaaagccgacaagccggaggcttggaacagggcgtacaacgtggctgtgggcgcaagggtggatttgaacaggctgtgcgagctgatccgccgggaagcagccgcgttttcgcccttggccgggcaagcgcctgttgtttaccgtgatttccgccccggcgacattctgcattctctggcggatatcagcttggccgaacgcctgctcggctacgcgccggaatacgatttcgcccgggggcttgccagatgcgccaagtggtacgcggaacgcttgggccgggagtgtcccggtttgccgtga

SEQ ID NO: 14452 - protein, 103 aa, Unknown
  Obtained from environmental sample
  misc_feature (1)..(103): Xaa is any amino acid
MGAKADKPEAWNRAYNVAVGARVDLNRLCELIRREAAAFSPLAGQAPVVYRDFRPGDILHSLADISLAERLLGYAPEYDFARGLARCAKWYAERLGRECPGLP

SEQ ID NO: 14453 - DNA, 789 bp, Unknown
  Obtained from environmental sample
  misc_feature (1)..(789): n is a, c, g, or t
atgaacagcttccgcaatctcgaaaaagcgctcgattacgaggcgcggcggcaggaggaggtgctaaggtccggcggacacgtcatacaacaaacgttcttgtggaacccaagcgaaaaccgctccgtacccatgcgcacaaaagaggacgccgacgactaccgctacttccccgaccccgacctcatgccgcttgtcgtgggggacgatctggttgacaatatgagaaaatctctgcctgaactgccggcgccgcgccgccgcagattcgagagcggctataaggtcaccccctacgccgccgaggtgcttaccggctcgcgccctctcgccgactatttcgagcggtgcgtgagcaactgcaacgacgcaaagtccgccgccaactgggtgatgacggacattatgagaatgatgaacgacgcgaaaatagagagcccgtttgagctaaagaccaaacctgagcggcttggcgaattgataaagctgataaacaacggcggcgtctccgccaaggccgcgaagagagtgttagacctgatggagagcgaggacaaagaaccgggcgcggtgataaaagaacaaggcttagaacaggtgtctgacacatcggcgcttgaggcggtggtaaaaagcgtggtagacgcgtaccccgccgaggttcaaagatacaaggacggcgataaaaaactatcaagtttcttcatgggccaggtaatgaaagcctccaaaggcgccgctaaccccaaagaagctatggctattttagataggttgattttgggatga

SEQ ID NO: 14454 - protein, 262 aa, Unknown
  Obtained from environmental sample
  DOMAIN (42)...(110): PET112 family, C terminal region
  misc_feature (1)..(262): Xaa is any amino acid
MNSFRNLEKALDYEARRQEEVLRSGGHVIQQTFLWNPSENRSVPMRTKEDADDYRYFPDPDLMPLVVGDDLVDNMRKSLPELPAPRRRRFESGYKVTPYAAEVLTGSRPLADYFERCVSNCNDAKSAANWVMTDIMRMMNDAKIESPFELKTKPERLGELIKLINNGGVSAKAAKRVLDLMESEDKEPGAVIKEQGLEQVSDTSALEAVVKSVVDAYPAEVQRYKDGDKKLSSFFMGQVMKASKGAANPKEAMAILDRLILG

SEQ ID NO: 14455 - DNA, 315 bp, Unknown
  Obtained from environmental sample
  misc_feature (1)..(315): n is a, c, g, or t
gtgtacagatcggccgagcattctcccgagccgaagaacgcgctggtcaagcagtaccagaagctcttcattatggagggggttacgttaacgtttacgaaagaggcgctgaaggagactgtggacaccgcgttgcggaagaagaccggcgcgagggggttgcgcaacgtgcttgagtcgtgcctgctaccggtgatgtttgaactgccgtcgcgccacgacgtggcggaggtggcggtgacgaaagacgttattatgaaaaaagcgctgccggagtatgtgtttaaagacgaagaagacaagaagagcgcgtga

SEQ ID NO: 14456 - protein, 104 aa, Unknown
  Obtained from environmental sample
  misc_feature (1)..(104): Xaa is any amino acid
MYRSAEHSPEPKNALVKQYQKLFIMEGVTLTFTKEALKETVDTALRKKTGARGLRNVLESCLLPVMFELPSRHDVAEVAVTKDVIMKKALPEYVFKDEEDKKSA

SEQ ID NO: 14457 - DNA, 624 bp, Unknown
  Obtained from environmental sample
  misc_feature (1)..(624): n is a, c, g, or t
ttggatataagcccagaacacagccttaaaattttgcaaaacataaatttgtgttttttatttgcgcaaaactaccacctctcaatgaaatatgttgcgccagttcgcaaagaactcggcataagaaccatattcaacattttgggaccattggtaaaccctgcaggtgcctctatgcagttgctcggcgtttatgaaaaagaactcttggagcctatggcacaagtgcttttgaatttgggcgttaaaagcggaatggttgtttttgggcaagacggcttagacgaaatttcaatgagtgctcccacaagtgtttgcgaatttagaaatggacagttaaaaaattatgaaataaccccagaacagtttggttttaagcgttgcaaaaaagaagagcttgttggcggaactcccgaagaaaacgcaaaaataacaacggatattctctctggagttagaggaccaaaatttgatacagtgctattgaattccgccgctgccattcatatagcaagacctaacctctcaattgaagatgcccttaaggttgccgcacaaaacatagatagcggaaaagcccttgatcagctcaaaaattttgtaaaactcagcaatgagaactaa

SEQ ID NO: 14458 - protein, 207 aa, Unknown
  Obtained from environmental sample
  DOMAIN (1)...(194): Glycosyl transferase family, a/b domain
  misc_feature (1)..(207): Xaa is any amino acid
MDISPEHSLKILQNINLCFLFAQNYHLSMKYVAPVRKELGIRTIFNILGPLVNPAGASMQLLGVYEKELLEPMAQVLLNLGVKSGMVVFGQDGLDEISMSAPTSVCEFRNGQLKNYEITPEQFGFKRCKKEELVGGTPEENAKITTDILSGVRGPKFDTVLLNSAAAIHIARPNLSIEDALKVAAQNIDSGKALDQLKNFVKLSNEN

SEQ ID NO: 14459 - DNA, 330 bp, Unknown
  Obtained from environmental sample
  misc_feature (1)..(330): n is a, c, g, or t
gtgttagtagaaaacggcatagctaccgtaggcattaccgactatgcacaaagccagttgggcgacattgtatttgttgacgtaaccaccgaaggcgaaactcttgcagaaggtgacatcttcggtgctattgaagctgtaaaaaccgtggccgacgcctttatgccggttgcaggcgaggtggcagaagtaaatgctgaactcgaaggggcaccccaattagtgaactccgacccttatggaaaaggctggattattaaaataaaaatgagcgacccaaacgacgaaacgaaactacttggagtagaggaatatagtaaattaatttaa

SEQ ID NO: 14460 - protein, 109 aa, Unknown
  Obtained from environmental sample
  DOMAIN (2)...(109): Glycine cleavage H-protein
  misc_feature (1)..(109): Xaa is any amino acid
MLVENGIATVGITDYAQSQLGDIVFVDVTTEGETLAEGDIFGAIEAVKTVADAFMPVAGEVAEVNAELEGAPQLVNSDPYGKGWIIKIKMSDPNDETKLLGVEEYSKLI

SEQ ID NO: 14461 - DNA, 402 bp, Unknown
  Obtained from environmental sample
  misc_feature (1)..(402): n is a, c, g, or t
ttgttcgtaaaaaccatttcgccaaacgggccggtgttaaaggaaatcaagccttccgcaccgataaaggtcggcgataaaattaccgtgcgcatcgaaatccgcaccgaccgcgatatggaatatgtacacctgaaagatatgcgcgccgcggcgtntgagccgctcaacgtgctgtcgggctaccggtggcaggacggtttcgggtactacgaaagcacccgcgacgctgctacgaacttctttatctcttacctgcgcaaaggaacatacgtgttcgagtacgatatgtttgctacgcaagccggcgaattttccaacggcatcacttcgttgcaatgtatgtatgcgccggaatttactacgcacagcgaagggatacgcgtgagggtgaaggattga

SEQ ID NO: 14462 - protein, 133 aa, Unknown
  Obtained from environmental sample
  misc_feature (1)..(133): Xaa is any amino acid
MFVKTISPNGPVLKEIKPSAPIKVGDKITVRIEIRTDRDMEYVHLKDMRAAAXEPLNVLSGYRWQDGFGYYESTRDAATNFFISYLRKGTYVFEYDMFATQAGEFSNGITSLQCMYAPEFTTHSEGIRVRVKD

SEQ ID NO: 14463 - DNA, 375 bp, Unknown
  Obtained from environmental sample
  misc_feature (1)..(375): n is a, c, g, or t
atgaacttcctcaatgtaaaagtacaggaagagggcaattccattgtattggacgaaggctcatttaaaatcaaagccgacggcgctcatattgattatttaaggaaatatgccggcagagaagtttttttcggcatacgcccggaagatttgatctataccgaatcctcaggcggcggcataaagtcaaaagttaccgtcgttgagcctttaggcgccgacatacgactttggctgacagccggttctcattcattgatagcgcttgcggaaccgcgtcatttcttcagtgtcggcgatacggcggaattcattcctaaaatggaaaaagcccgttattttgacaaggaaacagaatcggcgataattccgtaa

SEQ ID NO: 14464 - protein, 124 aa, Unknown
  Obtained from environmental sample
  DOMAIN (55)...(113): TOBE domain
  misc_feature (1)..(124): Xaa is any amino acid
MNFLNVKVQEEGNSIVLDEGSFKIKADGAHIDYLRKYAGREVFFGIRPEDLIYTESSGGGIKSKVTVVEPLGADIRLWLTAGSHSLIALAEPRHFFSVGDTAEFIPKMEKARYFDKETESAIIP

SEQ ID NO: 14465 - DNA, 960 bp, Unknown
  Obtained from environmental sample
  misc_feature (1)..(960): n is a, c, g, or t
atggcaaaacccgtaactttcagcggttattcgcttgacggtgatgatgcggacaattatgaactttcagcacaaccgcaaagcgtactggcggatattacagccttgcagcttactatagcaaatccgacacttacagcgaataagaagtatgacggcaccaacatggtaacaggaacggttaccgtcggcgctcttaacaataaagttggaggagacacggtaaatgcatcagcagccactgcaacttataatgcggaaactgtggggtcgcacacgattaccgttgtttattccatctccggcgcagacgcgggaaactacatcgcaccagttaatttcacgactaccggctcaatcaccaaagcggatggtagaacggtcaccgccccaacagtggcttccagaaaagccaccagcattaccgtcaatgcggtaaccttacaatcgcctcagttgggacaagtcgccgaatacgcagccgcaacaggaactaccgcaccgtcatccggctggacgacagaccttactatcagcggattaaccgccaataccgcttattatgtctttgcccggtcaaaagcagatgacaactgcaatgaaggcacagcgatgagatcggcaacaacaacaacaacgatgattaccgacgatgtgaacagaatggtggtggttgattttgaaaatgacgatataaataaaacgtatggcggtaatgctacgtcgaaggtcgttactgacccggctaatgagtcacaaaaatcactgcagattaactctagcggttatggccagtatgttcttattccgattaatctgcccttagcgctgtccagctatgggcagtttacgttcaggtttagactggtgagtgtaactcctggaacagatttaagtaataagcaaattgaggtntacgctgcgcagagggtgctgcatgaatcttctgtctcgaattga

SEQ ID NO: 14466 - protein, 319 aa, Unknown
  Obtained from environmental sample
  misc_feature (1)..(319): Xaa is any amino acid
MAKPVTFSGYSLDGDDADNYELSAQPQSVLADITALQLTIANPTLTANKKYDGTNMVTGTVTVGALNNKVGGDTVNASAATATYNAETVGSHTITVVYSISGADAGNYIAPVNFTTTGSITKADGRTVTAPTVASRKATSITVNAVTLQSPQLGQVAEYAAATGTTAPSSGWTTDLTISGLTANTAYYVFARSKADDNCNEGTAMRSATTTTTMITDDVNRMVVVDFENDDINKTYGGNATSKVVTDPANESQKSLQINSSGYGQYVLIPINLPLALSSYGQFTFRFRLVSVTPGTDLSNKQIEVYAAQRVLHESSVSN

SEQ ID NO: 14467 - DNA, 843 bp, Unknown
  Obtained from environmental sample
  misc_feature (1)..(843): n is a, c, g, or t
ttgcaggtttcttccggagcgcgcaaatacgcaaaccagaatattctgaaaaatatggctcgcggagcggtagaatacgcccatgagcttggatatgacattccaatcgtcctgcaccttgaccacggcgacagttttgaactctgcaaggactgtattgagaccggattttcttcggtaatgatagacgggtcgcatttgagctatgacgaaaatgtggcgcttaccaaaaaggtctgcgaattggctcattcacaaaaagattatgttacggtagaaggagaacttggggttctcgccggagtggaagacgatgtttcatcggaacacagccattacacccagccttccgaagtcgtggatttcgtaggaaaaacaaaggtcgattctttggctatttccatcggcacaagccacggaagagcgaagttcaaacccgaacaatgcaccagagatgccgacggcattcttatcccccctccgctgcgcttcgacatacttgaagaaattgaaaaacaaatacccggcttcccgattgttctgcacggctcttcgtcagttcccattgaatatgtgcacatgatagaaaagttcggcggaaaacttacggactcagtcggcatacccgaagaacagcttcgtaaagcggcaaagagcgcagtctgcaagattaatatcgattcagacggacgccttgcaatgacggctttaatccgcaagattttagtcgagaaaccggatgagttcgatccgcgcaagatactcggacctgcgcgcgatgagcttaaaaaactttattctcacaagaatcaaaatgttcttggctcggcgggacgtgcgtga

SEQ ID NO: 14468 - protein, 280 aa, Unknown
  Obtained from environmental sample
  DOMAIN (1)...(280): Fructose-bisphosphate aldolase class-II
  misc_feature (1)..(280): Xaa is any amino acid
MQVSSGARKYANQNILKNMARGAVEYAHELGYDIPIVLHLDHGDSFELCKDCIETGFSSVMIDGSHLSYDENVALTKKVCELAHSQKDYVTVEGELGVLAGVEDDVSSEHSHYTQPSEVVDFVGKTKVDSLAISIGTSHGRAKFKPEQCTRDADGILIPPPLRFDILEEIEKQIPGFPIVLHGSSSVPIEYVHMIEKFGGKLTDSVGIPEEQLRKAAKSAVCKINIDSDGRLAMTALIRKILVEKPDEFDPRKILGPARDELKKLYSHKNQNVLGSAGRA

SEQ ID NO: 14469 - DNA, 876 bp, Unknown
  Obtained from environmental sample
  misc_feature (1)..(876): n is a, c, g, or t
atgagcggngaggttgaaaagatttacgttgactataactcaccggttcgcaagggggacattctggcggagctgaataccgatatgctcaggcttaagcgcgaacagcaatacgccgctgtaatcaaggcgcgggcaaattatgaattgcagctcctcaattaccaaaaccaggtgattcttgccggaaaaaatttaatttctgaatatgaactgaaaacaagcaagacaactgtggataatctagcagctgaccttgccgttgccgaggcaaatttgagaagcattgacaccgagatcaaccagtttgcctttattacttcgcctatcgacggtatcgtgcttgaccgtaggatcaatataggcgacaccgttgtagacagttccagcaacaattcatcgcacatttttacgcttgcggaaaaccttatggaaatgcagatcgaggcgacggtaagcgaattggatattgccagcattcaaaaagggcagactgtgcgttttactatggagagcctgcccgggcagactttcaccggaattgtagatgccgtgcgcatggttcctgtggtgtcgaataacgtagtttcctacacggtaattatcagagttgaaaataccagaggctctctttttgccggaatgacgtgcgcggtggaatttattgtggagaaaagcgagaatgtgctcgtagtgcccaatgccgccctacgttaccagccatctaatttgagcgcggaaactatcgcggatatgttattcaacgccagccttgaaaatatgagtgacgagcagcgtcaggccgcgctgactgcaagagaacagtcaaagacacagaacacaagctcaacagcgaatactgggtttactgaataa

SEQ ID NO: 14470 - protein, 291 aa, Unknown
  Obtained from environmental sample
  misc_feature (1)..(291): Xaa is any amino acid
MSGEVEKIYVDYNSPVRKGDILAELNTDMLRLKREQQYAAVIKARANYELQLLNYQNQVILAGKNLISEYELKTSKTTVDNLAADLAVAEANLRSIDTEINQFAFITSPIDGIVLDRRINIGDTVVDSSSNNSSHIFTLAENLMEMQIEATVSELDIASIQKGQTVRFTMESLPGQTFTGIVDAVRMVPVVSNNVVSYTVIIRVENTRGSLFAGMTCAVEFIVEKSENVLVVPNAALRYQPSNLSAETIADMLFNASLENMSDEQRQAALTAREQSKTQNTSSTANTGFTE

SEQ ID NO: 14471 - DNA, 870 bp, Unknown
  Obtained from environmental sample
  misc_feature (1)..(870): n is a, c, g, or t
atgggcactaatctgctgcaaatcatgccgagacggcagatgagccgctccggacagaatatgcagatgcggatcaccggctttagcaaaaaggacgttcaaaaacttaaagctgaatcgagttatgcagcggcgatttccggagttgccaacaccagcgccaatgtttcaggcgctataagtaatacccaggtttcaattatgggcgttgaacctgatttcctgattgcgcgaaactacaatgttaatgccgggattttttttgacgacgatgatttgaaaaaccgcaatatggttgcggttctgggacgcaccacggcaaaaaatctgtttggcgacgccgaaagcgcgttgtctcaaaaaatacgaataggaacaagttactttaccgttattgggcttttggaaagcaaaggggccggtgtcggaggcaatgatcaggacgatgttatcatggttcctctggacacggcaattaccagaatcagcaatacacagagtattggcacgattgtaataagcgttaaaagcaaggaatacatggacgctgcccagaaagaagttaagtcgattctatgcgaatcacgaagaattgccgatgaagcaaacgccgattttgacattatgaatcagtctgatatgatcgacatggcatccgccacttcaaaatcactgacaacgctgttagctgcaattgccggagtatcgctgcttgtaggcggcatcggaattatgaacattatgctggtttccgtaaccgagcgcacgcgcgaaattggcatacgaatggcaataggcggacgaaaacgggacatgctttttcagtttctgacagaatnccgtgatcntanctcggccgatctgtcatga

SEQ ID NO: 14472 - protein, 289 aa, Unknown
  Obtained from environmental sample
  DOMAIN (168)...(288): Predicted permease
  misc_feature (1)..(289): Xaa is any amino acid
MGTNLLQIMPRRQMSRSGQNMQMRITGFSKKDVQKLKAESSYAAAISGVANTSANVSGAISNTQVSIMGVEPDFLIARNYNVNAGIFFDDDDLKNRNMVAVLGRTTAKNLFGDAESALSQKIRIGTSYFTVIGLLESKGAGVGGNDQDDVIMVPLDTAITRISNTQSIGTIVISVKSKEYMDAAQKEVKSILCESRRIADEANADFDIMNQSDMIDMASATSKSLTTLLAAIAGVSLLVGGIGIMNIMLVSVTERTREIGIRMAIGGRKRDMLFQFLTEXRDXXSADLS

SEQ ID NO: 14473 - DNA, 762 bp, Unknown
  Obtained from environmental sample
  misc_feature (1)..(762): n is a, c, g, or t
gtgattttctttgagggaattgcaaagggcaagcgcaagatcacggtcaaagacacttttggaagggaattccagcactttatccccatggcaaagcgtcttttggttcgagacggcgacacggtggaagccggagagcctctctgcgccggcaatgttaatccccacgacgttttaaccatcatgggtgaaagctatctccagacctatttgatggatgaaatccagcaggtataccggcttcagggcgtgtcgattaacgacaagcatatcggcgttatagtccgccagatgatgcggaaagttcagatctgttttgtgggcgacacaaggtttatctacgaccagatggtagacaagtaccgcttccacgaggaaaacgccagggttataaaagaaggcggtcagcccgcaattgcccggcctctcttccagggcataaccaaggcgtcgctgaacatcgattcgttcctttcggcggccagcttccaggaaaccacccgcgtgcttaccaacgccgccattgccggcagcaccgactatctgcgagggctaaaggaaaacatcatcatcggccacccgatacccgccggcaccggcatgaagcgttaccgcgacatcaagctttatgacgaagacagccaggacctggaaaagcagatgcaggagatccttgaacagcgcaggcttgaggccgagttcgccgcggaggccgccaaagccgcggaaatgatgcccgttgaggacaccgaggaagattaa

SEQ ID NO: 14474 - protein, 253 aa, Unknown
  Obtained from environmental sample
  DOMAIN (3)...(160): RNA polymerase Rpb1, domain 5
  misc_feature (1)..(253): Xaa is any amino acid
MIFFEGIAKGKRKITVKDTFGREFQHFIPMAKRLLVRDGDTVEAGEPLCAGNVNPHDVLTIMGESYLQTYLMDEIQQVYRLQGVSINDKHIGVIVRQMMRKVQICFVGDTRFIYDQMVDKYRFHEENARVIKEGGQPAIARPLFQGITKASLNIDSFLSAASFQETTRVLTNAAIAGSTDYLRGLKENIIIGHPIPAGTGMKRYRDIKLYDEDSQDLEKQMQEILEQRRLEAEFAAEAAKAAEMMPVEDTEED

SEQ ID NO: 14475 - DNA, 879 bp, Unknown
  Obtained from environmental sample
  misc_feature (1)..(879): n is a, c, g, or t
atgggcattgtgagggacaaagtcataaaaaaccactacgcttcggaatatatttacaacgcctacaaagacgaaaaaacctgtgatgtaattgaagacgaccctgtctccggcattacccgaatagccgaacccatcggtctggtagcggcggtaatccctaccaccaaccccacttccaccgcgatattcaaggcgcttatctgccttaaaacccgcaacgggattatcatttcgccgcacccccgcgccaaaggctgcacctgcgccgccgccaaaattgtgctggacgcggcggttgccgccggagcgcccgagggaatcatcggctggatagacgaaccaagccttgaaatgaccaacatggtgatgaaggaagccgacatcatccttgctaccggcgggcccggcatggtcaagtcagcctattcctccggcaaacccgccattggcgtcgggtcgggcaatacccccgcaatcatcgacgacagcgcggatatacttctggcagtgaactcaatcatccactcaaaaacatttgacaacggaatgatatgcgcgtccgagcaatcggtaatcgccctgcaaagtatttacgaaaaagtgaaagctgaattcacacgccggggctgttacttccttacgcctgaagaaaccgagaaggtaaggaaaacgattcttgttaacggatcgctgaacgcgaaaattgtcggacagaaagcggcgaaaattgcggagcttgccggcgtaaaggtttccgatacaacgaaaatactcatcggcgaagttgaaagcgtggagctttcggaagagtttgcccacgaaaaactttccccggtactggcgatgtacaaggcgaaagatttgacgatgcgctga

SEQ ID NO: 14476 - protein, 292 aa, Unknown
  Obtained from environmental sample
  misc_feature (1)..(292): Xaa is any amino acid
MGIVRDKVIKNHYASEYIYNAYKDEKTCDVIEDDPVSGITRIAEPIGLVAAVIPTTNPTSTAIFKALICLKTRNGIIISPHPRAKGCTCAAAKIVLDAAVAAGAPEGIIGWIDEPSLEMTNMVMKEADIILATGGPGMVKSAYSSGKPAIGVGSGNTPAIIDDSADILLAVNSIIHSKTFDNGMICASEQSVIALQSIYEKVKAEFTRRGCYFLTPEETEKVRKTILVNGSLNAKIVGQKAAKIAELAGVKVSDTTKILIGEVESVELSEEFAHEKLSPVLAMYKAKDLTMR

SEQ ID NO: 14477 - DNA, 312 bp, Unknown
  Obtained from environmental sample
  misc_feature (1)..(312): n is a, c, g, or t
atggatagcagaatacatttttttagtcagaaggaagtgatccccagcaaaatcgaaagcgagaaactggggataagaggtcggcaggccaatgaatttgcggaattgggctttcctattctgccaggtttcattttggatacggacatagctacggacataaagatcgatgaggtaaaaaaagatgtcgcagttttgctggataagtgcggggctatagtcggcaagaagtttggggatagccaaaacccgatgcttcttaaagtggtcatatcttcaaacttggcaattaccacgttccggcgctgctaa

SEQ ID NO: 14478 - protein, 103 aa, Unknown
  Obtained from environmental sample
  misc_feature (1)..(103): Xaa is any amino acid
MDSRIHFFSQKEVIPSKIESEKLGIRGRQANEFAELGFPILPGFILDTDIATDIKIDEVKKDVAVLLDKCGAIVGKKFGDSQNPMLLKVVISSNLAITTFRRC

SEQ ID NO: 14479 - DNA, 372 bp, Unknown
  Obtained from environmental sample
  misc_feature (1)..(372): n is a, c, g, or t
gtggttaccgctgccgctcctgctatttcaaagggcccgatgaagatgacgccgatgtattcggtggttgtcgccaacgagctctttcataacggaaacgtggaagcgtggaagcgcattgtcgcaagttactcagccaaatacccggagctccaggtgtatatttattacgaaggcgagcgcattttggacatcaactccctgtttaagtgggggaaggtgaaacacggaagctcgattcagtttgctgtttccgggaacgatattaaagacgtggccaaattgcagcgttatctgattcagggagccagcaagcaatttgaagcgttcctgcacggcccggtgaacaatgtgctgaagctctttggttag

SEQ ID NO: 14480 - protein, 123 aa, Unknown
  Obtained from environmental sample
  misc_feature (1)..(123): Xaa is any amino acid
MVTAAAPAISKGPMKMTPMYSVVVANELFHNGNVEAWKRIVASYSAKYPELQVYIYYEGERILDINSLFKWGKVKHGSSIQFAVSGNDIKDVAKLQRYLIQGASKQFEAFLHGPVNNVLKLFG

SEQ ID NO: 14481 - DNA, 573 bp, Unknown
  Obtained from environmental sample
  misc_feature (1)..(573): n is a, c, g, or t
atgaaaaaattactgtttgtaacaatttttattttaacaggtttacatgcgttctgtcaggatgcgtttatagaccaacttacgggcactgtagaaattaaacagccaaaagaaacttcatttaaaaccgcaaacaaaggcgataaaatttttcaagacacaattatatcaacaagttttaaaagttacgcgattgtcaaaattggttccacgctcataacggtgcgccctttaacggcattaacgttggcggaaattcaaaaagttgaagaaactgaaaccctgaatataaatttacagtcgggaagggttcgcgtggaagttaaaccgcccgccggaacaaaaacaatcatgaagataggttcaccaactgcgacggcgtccgtccgaggcaccagctttgaatttgataccaacaacctttatgtaagggaaggcacagtcaattttgtaggaaacaatgggcagaatattcttgtcagcgccggcggaattagccaggttgaacaaatgggacaggcatcaagcccaagggacgaaaggaacgcgaacttaatgcctccaggtcagtag

SEQ ID NO: 14482 - protein, 190 aa, Unknown
  Obtained from environmental sample
  misc_feature (1)..(190): Xaa is any amino acid
MKKLLFVTIFILTGLHAFCQDAFIDQLTGTVEIKQPKETSFKTANKGDKIFQDTIISTSFKSYAIVKIGSTLITVRPLTALTLAEIQKVEETETLNINLQSGRVRVEVKPPAGTKTIMKIGSPTATASVRGTSFEFDTNNLYVREGTVNFVGNNGQNILVSAGGISQVEQMGQASSPRDERNANLMPPGQ

SEQ ID NO: 14483 - DNA, 666 bp, Unknown
  Obtained from environmental sample
  misc_feature (1)..(666): n is a, c, g, or t
atgcataactttgacgaatcaattaaaaatttcgcccgcgcctgttttatctacgcaatctcggaaaaacttcccatttggtttgcgacaaaagatacaatttccaaaatatacgacggcagatttaaagctatttttaatgatgtatacgaaaccgaatttaaagaaaaatgcaaagacgccggcgttgattattattacacattgatagacgacgctgtcgcgcgcgtggtaaaaagcgaaggcggatttttgtgggcgtgtaaaaattacgacggcgacgttcaaagcgacatgatagcaagcgcgtcgggaagccttgccatgatgacaagcgttcttgtctcgccttccggtatttttgaatatgaagcggctcacggaactgttcaacagcattactatcgctataaaaaaggggaaaaaaccagcacaaacccaaccgctcttatttttgcgtggagcggtgctctcgcgaaacgcgctgaacttgacaacctgcccgaccttgctaatttcgcgaaaagacttgaagaagcggtaattggcgcggtagaagacggaataatgacgggagatttggcaaaactttccaatcctcagcccgataggacttataattcatgggaatttattgacgccatagttgagcggttaaaacattaa

SEQ ID NO: 14484 - protein, 221 aa, Unknown
  Obtained from environmental sample
  DOMAIN (2)...(215): Isocitrate/isopropylmalate dehydrogenase
  misc_feature (1)..(221): Xaa is any amino acid
MHNFDESIKNFARACFIYAISEKLPIWFATKDTISKIYDGRFKAIFNDVYETEFKEKCKDAGVDYYYTLIDDAVARVVKSEGGFLWACKNYDGDVQSDMIASASGSLAMMTSVLVSPSGIFEYEAAHGTVQQHYYRYKKGEKTSTNPTALIFAWSGALAKRAELDNLPDLANFAKRLEEAVIGAVEDGIMTGDLAKLSNPQPDRTYNSWEFIDAIVERLKH

SEQ ID NO: 14485 - DNA, 846 bp, Unknown
  Obtained from environmental sample
  misc_feature (1)..(846): n is a, c, g, or t
atgggcgttttgggtgttgtttccgggcaggtcaaaggcaaagccgtcgcgtccgccaatgtcttcggcaagggcggtttttctacggacatagacgcgattctttccggcacgggcggactcaaggcgggcggcgacggcggcgtaggccgtaaaggtacggcagggttaggatacggatcaggattcggcggaagcggcggaagcgacagagaaatagacgatcttttgggcggattaatgggcggaaacggcgacggccttccactgaggaaaaacaccggcgaaccgaaaatatcctctcccgatttcctgaaaggcggcaaccttaccggcggcaggagcagggcggctatccaacgcaccattatgcaaaatatggccgcgttccgctacgcctacaacaaacgcttgcgagatgtaccgggtttaagcggtaaagtaaccatcagattcgctatcgatgagttcggaagtgtgatattcgctcaaattgtggaatccacgctcttcgaccgcgaactggaaaataccgcgctgtcgagagttaagagctggaactttggaaaaatcgacaagcccggagacgtgacggaggtcgtttatccatttgtgttctcaaacgacggagccgcgacgacaacacaaaacaacgcaaagacgactcagaattactgggacccaagcgcgctaaacggagcgctcgtagcggcaaacaacctgtctttctggtggactcgcgacttcacgctcccgccgaaatccaagtatcccacaccggataaattcaataaaatagcgggcgccgccgacatagcatccgtgaccaaagataacggctactag

SEQ ID NO: 14486 - protein, 281 aa, Unknown
  Obtained from environmental sample
  misc_feature (1)..(281): Xaa is any amino acid
MGVLGVVSGQVKGKAVASANVFGKGGFSTDIDAILSGTGGLKAGGDGGVGRKGTAGLGYGSGFGGSGGSDREIDDLLGGLMGGNGDGLPLRKNTGEPKISSPDFLKGGNLTGGRSRAAIQRTIMQNMAAFRYAYNKRLRDVPGLSGKVTIRFAIDEFGSVIFAQIVESTLFDRELENTALSRVKSWNFGKIDKPGDVTEVVYPFVFSNDGAATTTQNNAKTTQNYWDPSALNGALVAANNLSFWWTRDFTLPPKSKYPTPDKFNKIAGAADIASVTKDNGY

SEQ ID NO: 14487 - DNA, 372 bp, Unknown
  Obtained from environmental sample
  misc_feature (1)..(372): n is a, c, g, or t
atggtgcgttggatagccgccctgctcctgccgccggtaaggttgccgcctttcaggaaatcgggagaggatattttcggttcgccggtgtttttcctcagtggaaggccgtcgccgtttccgcccattaatccgcccaaaagatcgtctatttctctgtcgcttccgccgcttccgccgaatcctgatccgtatcctaaccctgccgtacctttacggcctacgccgccgtcgccgcccgccttgagtccgcccgtgccggaaagaatcgcgtctatgtccgtagaaaaaccgcccttgccgaagacattggcggacgcgacggctttgcctttgacctgcccggaaacaacacccaaaacgcccatctga

SEQ ID NO: 14488 - protein, 123 aa, Unknown
  Obtained from environmental sample
  misc_feature (1)..(123): Xaa is any amino acid
MVRWIAALLLPPVRLPPFRKSGEDIFGSPVFFLSGRPSPFPPINPPKRSSISLSLPPLPPNPDPYPNPAVPLRPTPPSPPALSPPVPERIASMSVEKPPLPKTLADATALPLTCPETTPKTPI

SEQ ID NO: 14489 - DNA, 489 bp, Unknown
  Obtained from environmental sample
  misc_feature (1)..(489): n is a, c, g, or t
atggtttctgaattgcgccacaaaattatgtcgcgtatcaggagcaacggtacttcgatagaagtcttgctatgcaaggcattgtggcgtgatggcattcgctacaggaaaaaccttagaacgctgccaggcaagccggacattgtaataacaaaacacaagatcgccgtcttttgcgacggcgaattttggcatgggaagaattgggaatccaaaaaagacaagattaaagaaaatcgtgattattggattcccaaaattgaaaggaatattgcccgggacaatgtaaccgaaaaaaagctaatcaaaatgggatgggttgtgcttcgcttttggggcaaggacatcaaaaaagaccttaatggctgtgtcaatgaaataaaggaagcaatttacgagaaaacaaacggcgttgataatatggactacaacagcatggtcgatttatacgccgctgaaagcgaaccggactatcttactgaagattag

SEQ ID NO: 14490 - protein, 162 aa, Unknown
  Obtained from environmental sample
  DOMAIN (3)...(72): DNA mismatch endonuclease Vsr
  misc_feature (1)..(162): Xaa is any amino acid
MVSELRHKIMSRIRSNGTSIEVLLCKALWRDGIRYRKNLRTLPGKPDIVITKHKIAVFCDGEFWHGKNWESKKDKIKENRDYWIPKIERNIARDNVTEKKLIKMGWVVLRFWGKDIKKDLNGCVNEIKEAIYEKTNGVDNMDYNSMVDLYAAESEPDYLTED

SEQ ID NO: 14491 - DNA, 777 bp, Unknown
  Obtained from environmental sample
  misc_feature (1)..(777): n is a, c, g, or t
atgatatgcgttatttatggcaatggctttgcccaaaagccccattgctacaccagtcctaattccttgaatatcttcttgtacgagtcaaagtattcggattttgcgaattcttcgattttatcttcagggagagattccagaagacgatccatgtatgacaacacgcttttaagctcagtcttgaaatttgccggaatatcaatatcttcggtattagccccggtagttttggctgcggaggtttcaggcaggcttatttccccttcgtcaaaagcttccagatcgtcatcaacaagagcttcttccgcgtttatttcaaaagcttcgggaatgaccccggtaaggtcgtcatcggcaaggctgccgatagaatcgttgtcttctttttcgtcaagagcgatacctgcgtcaaaatcatccagagcaagatcgccggcaagattgtcggtaaggccgctgtcttctgctcctgtatcaagctctacgcttgtctcagtatcatccagggcgatgtcatcggcaaggctcaggccatcggacggatcgccggtcgggccgctgtcttctgctcctgtatcaagctctacgcttgtctcagtattatccagggcgaggtcatcggcaaggctgatatcttctgctcccgtatcaagttctacgcttgtctcagtattatccagggcaaggtcatcggcaaggctgatatcttctactcccgtatcaagttctacgcttgtctcagtttatccagggcgagtcatcggcccgcgataa

SEQ ID NO: 14492 - protein, 258 aa, Unknown
  Obtained from environmental sample
  misc_feature (1)..(258): Xaa is any amino acid
MICVIYGNGFAQKPHCYTSPNSLNIFLYESKYSDFANSSILSSGRDSRRRSMYDNTLLSSVLKFAGISISSVLAPVVLAAEVSGRLISPSSKASRSSSTRASSAFISKASGMTPVRSSSARLPIESLSSFSSRAIPASKSSRARSPARLSVRPLSSAPVSSSTLVSVSSRAMSSARLRPSDGSPVGPLSSAPVSSSTLVSVLSRARSSARLISSAPVSSSTLVSVLSRARSSARLISSTPVSSSTLVSVYPGRVIGPR

SEQ ID NO: 14493 - DNA, 879 bp, Unknown
  Obtained from environmental sample
  misc_feature (1)..(879): n is a, c, g, or t
gtgttcacagctttccctgcggaaacaacgcgcgggcgctacaaatttctggattctctttccggggagttgatacccgccctcgttgaccgcagcggtgcggcccacgcccttcactctaccgttgatccggtcagagaggcggaacggctggtctcaactttatcaaaagacaaaaacggccagcttgccgaaggctttgtggtcttcatgggcctgggcgcgggtttcgcccccctcgcggcattgaacagcggcgtatcccatgtgctgattattgattatgacattaacggcattgcagaattattgagttcccgcgactacattgcgcttctgggagacccccgcagtaccctgctggtggatccgccgcccggccttattgaaagcgtcatacttgagttataccggcccgccctgtgcgggggaatcagggcgctgcccctgcgcgcccggacagagctggacaaacaaaacttcggcctagccgccgatgcgatacaacaaaccatagagaaagtgtcctcggattattcggtgcaggcgcattttggcatgcgctggtttgccaatatcatacgcaatctgggagcggcccagcgccagaaccggagcgccccgcccatccgtgaggccgccatctgcgcggcggggccttcgctggacgatcagcttcctctcctcgtccggcaaaaaaaacaggcggaagcgcaaaaactgtttgttatttccgcggataccgcactcccggccatgctgcaccacggtctcaggcccgatgcggttgtttccattgattgccagcatatcagttattatcattttatggggacggacagcgccgcaattccgcgtttctatactcggccgatctga

SEQ ID NO: 14494 - protein, 292 aa, Unknown
  Obtained from environmental sample
  misc_feature (1)..(292): Xaa is any amino acid
MFTAFPAETTRGRYKFLDSLSGELIPALVDRSGAAHALHSTVDPVREAERLVSTLSKDKNGQLAEGFVVFMGLGAGFAPLAALNSGVSHVLIIDYDINGIAELLSSRDYIALLGDPRSTLLVDPPPGLIESVILELYRPALCGGIRALPLRARTELDKQNFGLAADAIQQTIEKVSSDYSVQAHFGMRWFANIIRNLGAAQRQNRSAPPIREAAICAAGPSLDDQLPLLVRQKKQAEAQKLFVISADTALPAMLHHGLRPDAVVSIDCQHISYYHFMGTDSAAIPRFYTRPI

SEQ ID NO: 14495 - DNA, 732 bp, Unknown
  Obtained from environmental sample
  misc_feature (1)..(732): n is a, c, g, or t
gtgaacgggaacataaccgttacggctaacttcagcaacggtaaccccggcaacggtaaccccggcagcggtaaccctacccccgtgagaggcgacaccgtcaaggtagaggcggagaattactcgagcaaagtcggcgacggtatgaagactgaagcgggcgcgatcggctggatcgaaaacgggtactcggcgacctacaacataaacatcggaaaggccggatcggccaccatgcagttcatgatcgccaccgaggttcaaagcaatttcaccgtgaaagtgaacggcacgaatgtcgggacgatatcccaaggcagcacgggcagctggagcacattcaaaatcgtgcagctcggcaacgccgtgaacctcaggcaaggcacgaacacgatagttctggagttcgggtcagccgtcaatgtcgactacttcctgctcataggcgacataaagggcactacgtcggtcaggcgcgccgccgcgaaagagggagccggacattccatagcgcttaaacccgtccgcaacggtttcagcgccctattaccggcaaaccacggctacacgtcgtataagttgatcgacgtgctcggcagggagatcagaagcggcaagatcggcgccgacgcanacgacctgaatataatcggcctanagcaaagcgtattcttcctaaggcttgaaggcaagggcaagacgccgacggcgctgaaagtcgtgaccaattga

SEQ ID NO: 14496 - protein, 243 aa, Unknown
  Obtained from environmental sample
  DOMAIN (37)...(149): Carbohydrate binding module (family 6)
  misc_feature (1)..(243): Xaa is any amino acid
MNGNITVTANFSNGNPGNGNPGSGNPTPVRGDTVKVEAENYSSKVGDGMKTEAGAIGWIENGYSATYNINIGKAGSATMQFMIATEVQSNFTVKVNGTNVGTISQGSTGSWSTFKIVQLGNAVNLRQGTNTIVLEFGSAVNVDYFLLIGDIKGTTSVRRAAAKEGAGHSIALKPVRNGFSALLPANHGYTSYKLIDVLGREIRSGKIGADAXDLNIIGLXQSVFFLRLEGKGKTPTALKVVTN

SEQ ID NO: 14497 - DNA, 420 bp, Unknown
  Obtained from environmental sample
  misc_feature (1)..(420): n is a, c, g, or t
atgagaagaagaaaagaccgccagcggcaggtgataagcgacctcaacctcaccaacctgattgacgtcgtcttcgcgctcctgatcatattcatgatcacggcgccgatgatgacgcagggcgtgcaggtggacttgccgcagacggagtctgagaacgtggagtcaaacgagtctatacaggtgacgataaacgacctcggcgagatatacgtcgaccacgagccggtttcgcttgtggagttccgcaagcggtttgccgaggttttcgcgggcaggagcgacgttccggtcttcataaacgccgataagaaggtgccatacgggctattcgtccgcgtgatctccgaggtgcagaacgtgggcgttgtgaagctcggatttcttacgacggcgctagacggaaagagcgagtactga

SEQ ID NO: 14498 - protein, 139 aa, Unknown
  Obtained from environmental sample
  DOMAIN (8)...(133): Biopolymer transport protein ExbD/TolR
  misc_feature (1)..(139): Xaa is any amino acid
MRRRKDRQRQVISDLNLTNLIDVVFALLIIFMITAPMMTQGVQVDLPQTESENVESNESIQVTINDLGEIYVDHEPVSLVEFRKRFAEVFAGRSDVPVFINADKKVPYGLFVRVISEVQNVGVVKLGFLTTALDGKSEY

SEQ ID NO: 14499 - DNA, 474 bp, Unknown
  Obtained from environmental sample
  misc_feature (1)..(474): n is a, c, g, or t
gtgaagacgcacacgagggtgaacgactggtcgtttttcttggagagccagttcacgatggcccgcgagcgcatagacagcgcgctcgccagcatagtggcgcctttcgactccggggttttcctcttggccatgataagcagcgtcgcgccgtttttggggcttctgggcacggtgtggggcatcatgaactcgttctacgagatcggcaggcaggggtcggccggcctgcccgtggtcgcgccgggtatcgcgtcggcgctcatcaccacgatagtcggccttgccgtggccattccggcgctgttcttttacaactactgcaaccacaaggcggagcgcgcggcggacgatatggaggagttcaaggatattctggtggtgcgtttgcgtagggagatattcagcgcgttcttcgcggagagccagccggcgccggtcgcgccgagatcgcccattggcgggggttactga

SEQ ID NO: 14500 - protein, 157 aa, Unknown
  Obtained from environmental sample
  DOMAIN (1)...(124): MotA/TolQ/ExbB proton channel family
  misc_feature (1)..(157): Xaa is any amino acid
MKTHTRVNDWSFFLESQFTMARERIDSALASIVAPFDSGVFLLAMISSVAPFLGLLGTVWGIMNSFYEIGRQGSAGLPVVAPGIASALITTIVGLAVAIPALFFYNYCNHKAERAADDMEEFKDILVVRLRREIFSAFFAESQPAPVAPRSPIGGGY

SEQ ID NO: 14501 - DNA, 834 bp, Unknown
  Obtained from environmental sample
  misc_feature (1)..(834): n is a, c, g, or t
atggtaatacattttcacaggtacggctgtctgccggatataaacgcgtttaaggaatttttggatctttcacaaaaactgaaccagcccctatggcttggggaaaccggggaaaacgcgcttgaatggtttacagccatgtatcctctgtcccttgatctcggcattggatataacatatggccctggaaaaaaatggagacttttaattcgcccttatcggttaaaaaacccgttcaatgggaaaagataacaggttacgctgaaggagggccgcgcccgtcctatgaggaagcccaggcgatccttcgggaataccttgaaaatatgcttataaaaaattgcgcgcataataccaacgttacgcgccattgcctgaggcagccgggctgcgttgtacggggaacggattttgaccttttccccgggaaaggcgtttcttacagcggcatccgtaaagagggtgataaaccgttttaccggtctgactgcggcatggagataaagccgggaagggaaaaagaaaaaaagagaaaaatcgggtttgactgcggctgggactcgcttactttggaactgattcagggcgaatttgccgtttacagtattaacgatacatccgggcagggaaaaatcgctttgcaaatggttgtcatggaggattcacttattgatatttcggccggagagactctgcttgaaaccctggacttaaaagcttncaaagatgtcattactaccaaaagcgtattactgccgaaagtcgaaaaggttcaggtaaagataaacggttcaaaaagccttatccagcttgataaaggtatttttttctga

SEQ ID NO: 14502 - protein, 277 aa, Unknown
  Obtained from environmental sample
  misc_feature (1)..(277): Xaa is any amino acid
MVIHFHRYGCLPDINAFKEFLDLSQKLNQPLWLGETGENALEWFTAMYPLSLDLGIGYNIWPWKKMETFNSPLSVKKPVQWEKITGYAEGGPRPSYEEAQAILREYLENMLIKNCAHNTNVTRHCLRQPGCVVRGTDFDLFPGKGVSYSGIRKEGDKPFYRSDCGMEIKPGREKEKKRKIGFDCGWDSLTLELIQGEFAVYSINDTSGQGKIALQMVVMEDSLIDISAGETLLETLDLKAXKDVITTKSVLLPKVEKVQVKINGSKSLIQLDKGIFF

SEQ ID NO: 14503 - DNA, 699 bp, Unknown
  Obtained from environmental sample
  misc_feature (1)..(699): n is a, c, g, or t
atgcccagtattttacatccgcttttacctatgtcactgcaatccgcagacggtgaaccggcggtatcagccggagactcgcttcgtaaaatcagaagttttgtcctgcgcggcggccgtttaaccgttgcccagaaacgttcatacaactccctttcagggaagtttttattaccctacgaaaacaaaacattggattttgccggaattttcggtaacgacaaccccgtcatcgttgaaatcggttttggcatgggcagggcaaccgcccttatcgccggggaaaacccgcaaaaaaactacatagggcttgagatccacaaaccggggatagggcggctcctctgggaaattgaacagcgccccctttcaaatgtcaggataatagaacatgacgcaactgaggttttccaaaacatgatcccggcaaattcgctggaaggggtgcatattttcttcccggatccctggcccaagaagcggcaccacaagcgcaggttgatacagcggccttttacggattgtataagttcaaaattgaaatccggaggctatatctatatggtcagcgactggtcagactacgctgactgggcattgtctgtgttaaccaacaccgaaggtatggntaacacatgtaacggctttgcggaacctcagtcctgggcgcccagacgagctttgagaaaaaaggcttga

SEQ ID NO: 14504 - protein, 232 aa, Unknown
  Obtained from environmental sample
  DOMAIN (50)...(232): Putative methyltransferase
  misc_feature (1)..(232): Xaa is any amino acid
MPSILHPLLPMSLQSADGEPAVSAGDSLRKIRSFVLRGGRLTVAQKRSYNSLSGKFLLPYENKTLDFAGIFGNDNPVIVEIGFGMGRATALIAGENPQKNYIGLEIHKPGIGRLLWEIEQRPLSNVRIIEHDATEVFQNMIPANSLEGVHIFFPDPWPKKRHHKRRLIQRPFTDCISSKLKSGGYIYMVSDWSDYADWALSVLTNTEGMXNTCNGFAEPQSWAPRRALRKKA

SEQ ID NO: 14505 - DNA, 609 bp, Unknown
  Obtained from environmental sample
  misc_feature (1)..(609): n is a, c, g, or t
atggaaaaatcaaaacgtctgtacattatcggagcgggatttgccggacgtacccttgcgagcgaaataacatcaaaggcgatttttggcgaagtagtcgcgttcctggacgatgacccgaaaaaaataggcaagaaaattgacggtatccccgtactgggtccaatccgcgacgtcgctcttttattaaaaacaaacccggctgatgaagcgataatagccattccaagcgcaagcaaagattaccttaaagaactctactctatccttaaaaaagccaactttcagaaaatcagaatcctccccggaatctcgcaaattgtcgaaggagacgcgcactttatccagacgcgctccatagatttacaggacttacttgggcgcaaccccgtaacgattaaacttaaacaaagcctttcctatgtgcgcggaaaacgcgttttagtaacaggcgcgggcggctcaatcggcagtgaattatgccgccaactgctgtcgggcggagtgtcaaggctgtacctgctgggacacggcgagaactccatctatctaatcgacaaggaactgcggcttttacaggacgaaggggtcggagaaaagccgcaatag

SEQ ID NO: 14506 - protein, 202 aa, Unknown
  Obtained from environmental sample
  SIGNAL (1)...(20)
  misc_feature (1)..(202): Xaa is any amino acid
MEKSKRLYIIGAGFAGRTLASEITSKAIFGEVVAFLDDDPKKIGKKIDGIPVLGPIRDVALLLKTNPADEAIIAIPSASKDYLKELYSILKKANFQKIRILPGISQIVEGDAHFIQTRSIDLQDLLGRNPVTIKLKQSLSYVRGKRVLVTGAGGSIGSELCRQLLSGGVSRLYLLGHGENSIYLIDKELRLLQDEGVGEKPQ

SEQ ID NO: 14507 - DNA, 711 bp, Unknown
  Obtained from environmental sample
  misc_feature (1)..(711): n is a, c, g, or t
gtgaggctgtttcccaatggagaaataaagccttatcaggcatcaaatgccggcggttacactttagaggcattatttggcattattcctaatggtatcgctgaacctgattttaaaggatgggaattaaaagctttttctcgtaccagaataacactcatgacaccggaacccgatcaaggattttatcacgaaaaaggagctaaagtgtttgtcttaaaatacggccatgacgctccagatgtaataaaatattttactggtactcataaagttgatacacagaatacaacatcgaagatgacattagtaataaaaggttttgatttcaaaaaaggaacaataagcgatatggcaggcggactttacttgcttgatgataataacattcctgcggctatatggacatttaatggattaataactcattggagtaaaaaacattctcgtgcttgttatgtaaattataaagctgaagaaaagaaaggaaaatccggatacatttataattcaccaatttatttaggtgaaaataccgatctagcattattcttacaaacattgcaatctggtctaattgtatatgatccagcaacgaaagtaatgataaattctaaaggtaatatgagtatcaaggcaagaagtcaattcagaatanattttaaaaacttgaaatgcttatatgaaaaattttatatcccaaatgtatga

SEQ ID NO: 14508 - protein, 236 aa, Unknown
  Obtained from environmental sample
  misc_feature (1)..(236): Xaa is any amino acid
MRLFPNGEIKPYQASNAGGYTLEALFGIIPNGIAEPDFKGWELKAFSRTRITLMTPEPDQGFYHEKGAKVFVLKYGHDAPDVIKYFTGTHKVDTQNTTSKMTLVIKGFDFKKGTISDMAGGLYLLDDNNIPAAIWTFNGLITHWSKKHSRACYVNYKAEEKKGKSGYIYNSPIYLGENTDLALFLQTLQSGLIVYDPATKVMINSKGNMSIKARSQFRIXFKNLKCLYEKFYIPNV

SEQ ID NO: 14509 - DNA, 825 bp, Unknown
  Obtained from environmental sample
  misc_feature (1)..(825): n is a, c, g, or t
atgatgcgggcgggcgctcggcttcctggcaccagtttcctctacaccgcgaaaagggcggcggtgctgctggggcaggatcctttcaagaccaatctcgtaatctgccatttggggaacggcgcttcggtaaacgccgttaaaaacggctgctcctttgacacgagcatgggaatgaccccgctggagggccttatcatgggaacccgctccggcgacatcgatcccgcgcttcccttttatataatgaaaaaaaccggcatgagcgcctccgaggttgaaagcgtcctgaacaaaaaatccgggcttttgggcctgaccgggcagtacaccgaccgccgcgacatacaggccgccgccgtgaaaggagacaagcaggcgctccttgcgcagcatgttgaggcacaccatgtaaagaagtacatcggcgcgtaccaggccacgctcggcagggtagacgccctggtctttaccgccggcgtgggggaattcgcatggttcatgcggaacaagatccttgacgggctggaaggcatcggcatggtatacgatcccaaaaagaacgaaatgtcccatacccgcaacaccgagaccataatcagcaagcccgaatcgaaaatacccatttacataatcccgaccgacgaggaactggtgatgactgaggacacctacgccctgatgaagggtacctatgacatccatacaaaattcacctattccttccagagcaagaactatgtgaacaagggcagagccgaaagcctggaacacgagcttgccaaacacccggaattggcggagatagttgcaaagccaagatag

SEQ ID NO: 14510 - protein, 274 aa, Unknown
  Obtained from environmental sample
  DOMAIN (1)...(222): Acetokinase family
  misc_feature (1)..(274): Xaa is any amino acid
MMRAGARLPGTSFLYTAKRAAVLLGQDPFKTNLVICHLGNGASVNAVKNGCSFDTSMGMTPLEGLIMGTRSGDIDPALPFYIMKKTGMSASEVESVLNKKSGLLGLTGQYTDRRDIQAAAVKGDKQALLAQHVEAHHVKKYIGAYQATLGRVDALVFTAGVGEFAWFMRNKILDGLEGIGMVYDPKKNEMSHTRNTETIISKPESKIPIYIIPTDEELVMTEDTYALMKGTYDIHTKFTYSFQSKNYVNKGRAESLEHELAKHPELAEIVAKPR

SEQ ID NO: 14511 - DNA, 879 bp, Unknown
  Obtained from environmental sample
  misc_feature (1)..(879): n is a, c, g, or t
atgattatatttntactcaggagattaatatgtcagaccaatcgctctttcattacagatacgtcaaaaccgaaaaaattccgtaattttacttcaagcggcggctttaaaatcgccgtgcttatcatactgattttaattttattgatacctgtttccatggttcgctcattaataagcgagcgcagttaccggtcgaatgaggcggaaagggaaatcatggaagcctggggcagtcagtttaaattgtacggccccatagtccgtattcctgttgtagaacgtacggaagtcaggacaaaaacagaaaaggaaggggaaaaaatcgaaataattacgcaaaattacacgctttggattacgccgaataatgttgatatttatgccgatttttccgcccagaaaaaacgccggggcattttttccgtcgccctgttttcgggtaacctttccatctccggagacttcaatcttgaaagggctaaaactgagttaaaacaaaaccagacaatgactcttgaacaggctgaaatcatcatagggctggcaagccaaaaaggaatacgcagggtaatcaaggcggactggaacggaagcgaactttcttttaagccgggcaaccgtagttttactcttggtctttcaaacaacaacggcgtcaatgctttaagtcccttcaaagcaaacggatcaaatactttcgacattcaattcgcggtgcagggcggaaaatcgcttagagcgcttcccataggcgaaaccactcgtgtgcgcgtaaagaccgattggccgtctccctcgtttcagggaggttttctgccggtaagttatacgctgtccgaaagcgnttttgacgccgaatgggaaataagtatttaa

SEQ ID NO: 14512 - protein, 292 aa, Unknown
  Obtained from environmental sample
  DOMAIN (32)...(292): Inner membrane protein CreD
  misc_feature (1)..(292): Xaa is any amino acid
MIIFXLRRLICQTNRSFITDTSKPKKFRNFTSSGGFKIAVLIILILILLIPVSMVRSLISERSYRSNEAEREIMEAWGSQFKLYGPIVRIPVVERTEVRTKTEKEGEKIEIITQNYTLWITPNNVDIYADFSAQKKRRGIFSVALFSGNLSISGDFNLERAKTELKQNQTMTLEQAEIIIGLASQKGIRRVIKADWNGSELSFKPGNRSFTLGLSNNNGVNALSPFKANGSNTFDIQFAVQGGKSLRALPIGETTRVRVKTDWPSPSFQGGFLPVSYTLSESXFDAEWEISI

SEQ ID NO: 14513 - DNA, 864 bp, Unknown
  Obtained from environmental sample
  misc_feature (1)..(864): n is a, c, g, or t
gtgacaagagcaattatcaatgagcaaaaagcaatgaacagacgcattaatcgaatatcgcgcttttttctttgctctttattatttgctatttgtaattttgcttacgggcagacggcggttataaaagaaattaccggcactgtggagctaaagctttccggggcggcggattttattcccgccggtgtgggagtagaagtcgcgcagaatacaattatttccaccggctttaggagtaccgccattgtacaggcggggagcacggtaataaccgtgcggccccttacccgccttacccttatggaaatccagaatttgcaaggaacagaaaaccttagtatgaaccttcaagccgggagggtgcgggtagatgtgaatccccctgccggaattaagtcgtctcttaaaatagcaagcccaagctccgtcgcatcagtgcgcgggacaagttttgattttgacaccagaaacctccgcgtgcacagcgggacagtaacttttatgggcaagtggggatacgaaataacggtacaggaaggccaaagcagcgtagtaggggcgtcaggcactgccacattcatttcccggacagactatggctacgacagcacagcagcgcccaccggcggcacaggcgttattagcagcggctcangcggaggcgggggttctggcggaggaggaggatcgggcggaggcggaggctcangcagcggacccggcggcggcgatccggttaaatcaaataatccacctaaccctccaaacccacccgaatcgcctaacccaccaaacccgccaaacgatgataacaccgatgtgatagtgagggttaataaaatggtgtcagtcaccttttaa

SEQ ID NO: 14514 - protein, 287 aa, Unknown
  Obtained from environmental sample
  misc_feature (1)..(287): Xaa is any amino acid
MTRAIINEQKAMNRRINRISRFFLCSLLFAICNFAYGQTAVIKEITGTVELKLSGAADFIPAGVGVEVAQNTIISTGFRSTAIVQAGSTVITVRPLTRLTLMEIQNLQGTENLSMNLQAGRVRVDVNPPAGIKSSLKIASPSSVASVRGTSFDFDTRNLRVHSGTVTFMGKWGYEITVQEGQSSVVGASGTATFISRTDYGYDSTAAPTGGTGVISSGSXGGGGSGGGGGSGGGGGSXSGPGGGDPVKSNNPPNPPNPPESPNPPNPPNDDNTDVIVRVNKMVSVTF

SEQ ID NO: 14515 - DNA, 603 bp, Unknown
  Obtained from environmental sample
  misc_feature (1)..(603): n is a, c, g, or t
atgggtgttttatcaaaacttgcggcggataaaattgaaaatattcttgcattaaggggcgacataccaaacgggcaggaatttccaaatgacgctcagtatcaccatgcctgcgaattaatgaaagagattcaaaacgcaggcgatttttgcataggcggcgcgtgttatcctgaagggcatcccgaatcggaaagtcttgaaaaggacattgaaagccttaaaatcaaggttgattgcggctgccgttttttgacgacacagatgttttttgataatggcattttatataactttttgtaccgtttattaaatcataaaattgaagtgcctgtaattgccggaataatgcctgtcatcaacggaaagcagattgcgcgcatctgtaaaatttccggtacggttctgccgccgcgtttccgcgcgattgtggataaattttcaggcgacagcgccgcaatgagtcaggcgggcattgcctacgctacagagcagattattgaccttatcgcaaacgatgtccgccatatccatatttataccatgaacaaacctgatattgcagcgaagatcatgaataatttgtcggaaatattcaaataa

SEQ ID NO: 14516 - protein, 200 aa, Unknown
  Obtained from environmental sample
  DOMAIN (1)...(196): Methylenetetrahydrofolate reductase
  misc_feature (1)..(200): Xaa is any amino acid
MGVLSKLAADKIENILALRGDIPNGQEFPNDAQYHHACELMKEIQNAGDFCIGGACYPEGHPESESLEKDIESLKIKVDCGCRFLTTQMFFDNGILYNFLYRLLNHKIEVPVIAGIMPVINGKQIARICKISGTVLPPRFRAIVDKFSGDSAAMSQAGIAYATEQIIDLIANDVRHIHIYTMNKPDIAAKIMNNLSEIFK

SEQ ID NO: 14517 - DNA, 870 bp, Unknown
  Obtained from environmental sample
  misc_feature (1)..(870): n is a, c, g, or t
gtgctgggatttttccgtatttgggcaagttcaagaagagacaattccaattcctctgtacttggccgttttgtgccgtacaagcctataacttcaggtgatttaaaaaaaatgggttatgataaaaacagaatccgctggttgtcacgtccccatatacccacaggagaagtttgggacacgctgcggaataaccggagcgcttcttttaccgaagaaaaaatatccgccgccgccgagaaagtttttttaaaagcgcttgaaagggtaaacgatgaagaactttggctttttaaaaagaagatcaagggagaaaaagatattgttaatcttggtttagatacttctttacacggttatctttttaaaaagtggcacgacagagtttttttggaatacgaaaagggcagatttttccctgtctggtattacagggatgtcaccgcgtggaaaactctgtcaggtgaagaacagaaaaatctggaagcccttgttgaaagacaacgtataaaatccgaaaaagcgtgggctgtacaggggaaaaaacttcttacaatattatctgaatcttctcatatgctgccgtgcgccgaagaccttggcgctgttcccgaatgtgttccgaaggtgctttctaaattgaaaattttgggtcttcgtgtgattcgctggttccgtatttgggataaaaacgggcagccgtatataccttttgacgaatatccggcactaagcgtttgtacaccggcggttcatgacagttctacagtccgtgaatggtgggagaaagaagtaaatcagcagcaattttccggttttatcggcgttccttcgcttccaaaaaatataatcccggcactgcaaaaataa

SEQ ID NO: 14518 - protein, 289 aa, Unknown
  Obtained from environmental sample
  misc_feature (1)..(289): Xaa is any amino acid
MLGFFRIWASSRRDNSNSSVLGRFVPYKPITSGDLKKMGYDKNRIRWLSRPHIPTGEVWDTLRNNRSASFTEEKISAAAEKVFLKALERVNDEELWLFKKKIKGEKDIVNLGLDTSLHGYLFKKWHDRVFLEYEKGRFFPVWYYRDVTAWKTLSGEEQKNLEALVERQRIKSEKAWAVQGKKLLTILSESSHMLPCAEDLGAVPECVPKVLSKLKILGLRVIRWFRIWDKNGQPYIPFDEYPALSVCTPAVHDSSTVREWWEKEVNQQQFSGFIGVPSLPKNIIPALQK

SEQ ID NO: 14519 - DNA, 771 bp, Unknown
  Obtained from environmental sample
  misc_feature (1)..(771): n is a, c, g, or t
atgaatgacatccccgataaaagtatagatttaatattatgcgatttaccctatggaataaccaattgccggtgggatgttaaaattccttttgacattttatggcggcaatacaaccgtataaaaaaaataaatactcctataattttattttctaaccagccgtttacatccgtccttataaattcaaacttgaaacaataccgctataattggtattggataaaaaataacgacacaggttttgcctttgcaaacaaccagcctatgcgatgtgtagaggatatatgcgtattttatgaacgcgctccgctatacaaccctataggcttatttccggcggaaattaaaaagcatagaaaggcaacagcggactctgtttataaaagcgcaactctacaaaaaaaatatgttcaaaaactttccgggtatcccaataatattttatattttgaaacggacgcaatcggcgcgaaccgttaccatgaaacacaaaagccagttaaattattagaatatttaatccgtacttacacaaagttaaatgacatagttttagacaatacaatgggaagcggctccaccggcgttgccgccgtcaataccgggcggagtttcatcggcattgaaaaaaaagaacatcattttataaacgctgaaaaaagaattaaggccgccgaaaagcaagccgcgcaaaatctttttgatattgaaaccatagagggaagcatgaaagcccccccccgtcaagaggatgatttattcaaatga

SEQ ID NO: 14520 - protein, 256 aa, Unknown
  Obtained from environmental sample
  DOMAIN (9)...(221): DNA methylase
  misc_feature (1)..(256): Xaa is any amino acid
MNDIPDKSIDLILCDLPYGITNCRWDVKIPFDILWRQYNRIKKINTPIILFSNQPFTSVLINSNLKQYRYNWYWIKNNDTGFAFANNQPMRCVEDICVFYERAPLYNPIGLFPAEIKKHRKATADSVYKSATLQKKYVQKLSGYPNNILYFETDAIGANRYHETQKPVKLLEYLIRTYTKLNDIVLDNTMGSGSTGVAAVNTGRSFIGIEKKEHHFINAEKRIKAAEKQAAQNLFDIETIEGSMKAPPRQEDDLFK

SEQ ID NO: 14521 - DNA, 453 bp, Unknown
  Obtained from environmental sample
  misc_feature (1)..(453): n is a, c, g, or t
atgaatacctctatgttggacccgaatttatcaagcgagcttctcataagcaagctgcgcgccggcggcataaaggatgagcggatattggaggcttttcggaaggttccgcgccatctctttgtcgacaaccccgtgcaggcttacgacgacatcgcgctctccataggatacggccaaacgatcagccagccgacgctggtggcgcagatgacggaactcttgaacctcggcaaagatcagaagatactcgaaatcggcacggggtcgggcttccaaacggcgatactggcgcagttttcgcggcgcgtatttacgatagagcgccacaaggagctgggcgacaaggcgcggctgcggctgcgggagatgggctacgcgaacgtcacattcaaggtgggcgacggcacgtgcggctgggttcagcacagcccgtcgacctcggccatctga

SEQ ID NO: 14522 - protein, 150 aa, Unknown
  Obtained from environmental sample
  DOMAIN (10)...(149): Protein-L-isoaspartate(D-aspartate) O-methyltransferase (PCMT)
  misc_feature (1)..(150): Xaa is any amino acid
MNTSMLDPNLSSELLISKLRAGGIKDERILEAFRKVPRHLFVDNPVQAYDDIALSIGYGQTISQPTLVAQMTELLNLGKDQKILEIGTGSGFQTAILAQFSRRVFTIERHKELGDKARLRLREMGYANVTFKVGDGTCGWVQHSPSTSAI

SEQ ID NO: 14523 - DNA, 354 bp, Unknown
  Obtained from environmental sample
  misc_feature (1)..(354): n is a, c, g, or t
atgcgcccccgttctatgcccttagcgcggattatttccaaccggctgacctcgtttatcctctccgtcctcaccgggcgtcgcattgcggatagtcagtgcgggtaccgtatctactcggcggagttcgtgaaatcgatacaaattgagtataaccgtttccaagcggagtcggagttgatacaaaaagccgccgcgaaacattttcctattcgctttacgggtgtgcggacattatatttaaaaggtgggtcaagccacatctcgcaccttttagacacgttgcgctgggttgcggcggtggcgcggatttggttcaaattaacgtttacggacggaaagcgtggtctttag

SEQ ID NO: 14524 - protein, 117 aa, Unknown
  Obtained from environmental sample
  misc_feature (1)..(117): Xaa is any amino acid
MRPRSMPLARIISNRLTSFILSVLTGRRIADSQCGYRIYSAEFVKSIQIEYNRFQAESELIQKAAAKHFPIRFTGVRTLYLKGGSSHISHLLDTLRWVAAVARIWFKLTFTDGKRGL

SEQ ID NO: 14525 - DNA, 642 bp, Unknown
  Obtained from environmental sample
  misc_feature (1)..(642): n is a, c, g, or t
atgaaagactggggtacccttctaacggaaggaattgcaattttacgcgatggcgacagggagatcgacagggtaatcaccccgcgcaaagatgaatttatttttcaccttaaacgctacgtaaaagaaattgaactttttaattccgcttatggccttgtgggtacaaacgacacaaacgaactgataataaaacacatactcgactctcttgcgcctcttggaataatcataaaattgcttagagactcaggcgcggtaaaagcggcgaaaatagctgatgtcggatcaggcgcgggactgcctggcatcccattggcgattgtcctgcctcaatacgaatttacgctcattgagcgcatgggacgcagggcgggatttttacttaatacgaaagcagtattatccctttccaacgttaccatagaggaaggcgaatttgaaaaagcgggaaacggcgttttcaaccttgtcacatttcgcgccttaaaatccatggatcaaaaattaattaaaaccttaattaanaaatgcgatcaaggcggaattatcgccgcttacaagggaaggcgcgaaaaaatagaaacggaaatggcgtcattgcaaaaatttgcgaaaattgggaaagcatccagtatgtaa

SEQ ID NO: 14526 - protein, 213 aa, Unknown
  Obtained from environmental sample
  DOMAIN (33)...(213): Glucose inhibited division protein
  misc_feature (1)..(213): Xaa is any amino acid
MKDWGTLLTEGIAILRDGDREIDRVITPRKDEFIFHLKRYVKEIELFNSAYGLVGTNDTNELIIKHILDSLAPLGIIIKLLRDSGAVKAAKIADVGSGAGLPGIPLAIVLPQYEFTLIERMGRRAGFLLNTKAVLSLSNVTIEEGEFEKAGNGVFNLVTFRALKSMDQKLIKTLIXKCDQGGIIAAYKGRREKIETEMASLQKFAKIGKASSM

SEQ ID NO: 14527 - DNA, 798 bp, Unknown
  Obtained from environmental sample
  misc_feature (1)..(798): n is a, c, g, or t
atgatcgccgntgatacatcagccgaggcccagggagaaccttccatcgaaatggtgatttcttccaacgccaacggcgatattctggccgatgccattgatctggacaccggttcaaacggcgaacaccaggttttaagcgtttcccttagatcgcttgaggatgctggtcgggatgtggatattcccgattttgaacttgaaaacaatgaagagccgccttccgggctgtatgaacaggccaaaataatacggcaaaaaaagtccggttctttcccctggctgattgtgattcttgtcggggtgataattatcctggcccttgctttgctctggcttttccttttctgcggcaaagataaattagcatccggcgagggcaagccttctgtcgaacaaagcgtatcgcagccggaacagccgcccgcgccgccgccggtacaaccggcccaggaagcgccgccgccggtaacgcagccccaggttgcgcaaccgatagagccgcctcaggatgcgaagcctccagttatacaggcgcctgttgcgccgccaccggccaccccaacgcctgcggtgcgcaagcgtccgcccgccccggttgcctcctataaagtaccggctgtcattcccaaagagggagtgccatacacaatccggtggggcgacacgctgtgggacatcgcggacgcgttttaccggaatccctggctctatccccggatcgcccggtttaacaatatccgtaatccgaatctgattatttcaggcagaacgatccggattccgcccaaaaactga

SEQ ID NO: 14528 - protein, 265 aa, Unknown
  Obtained from environmental sample
  DOMAIN (216)...(262): LysM domain
  misc_feature (1)..(265): Xaa is any amino acid
MIAXDTSAEAQGEPSIEMVISSNANGDILADAIDLDTGSNGEHQVLSVSLRSLEDAGRDVDIPDFELENNEEPPSGLYEQAKIIRQKKSGSFPWLIVILVGVIIILALALLWLFLFCGKDKLASGEGKPSVEQSVSQPEQPPAPPPVQPAQEAPPPVTQPQVAQPIEPPQDAKPPVIQAPVAPPPATPTPAVRKRPPAPVASYKVPAVIPKEGVPYTIRWGDTLWDIADAFYRNPWLYPRIARFNNIRNPNLIISGRTIRIPPKN

SEQ ID NO: 14529 - DNA, 462 bp, Unknown
  Obtained from environmental sample
  misc_feature (1)..(462): n is a, c, g, or t
atggacggcatcatcaaaaccctgagccctgaagaatggaacaagccactgggcggtttttttccgtctgtgcgcagcctttgctcccatatatacatctgcgattttaactggcttaagcgttttaagaacgtccggcaatttacttccctggaagattcgttttttgacaagaattattcttttaaggaaaccctctttgaggacataggggaatacctttccaaacggccggacatggacagccggatgctctctttcgcggaagaattaaccgatgccgatatggccggtgtctttgtgtttaccgattccgcaggcaaaagccatgaacggaatttcggcggagctttactgcaattccttaaccacgaaacccaccaccggggcatgatttccctgtaccttgaaatgctgggcagagaaaacgatttcagttctctggcgcaggttctaaagtag

SEQ ID NO: 14530 - protein, 153 aa, Unknown
  Obtained from environmental sample
  DOMAIN (1)...(153): DinB family
  misc_feature (1)..(153): Xaa is any amino acid
MDGIIKTLSPEEWNKPLGGFFPSVRSLCSHIYICDFNWLKRFKNVRQFTSLEDSFFDKNYSFKETLFEDIGEYLSKRPDMDSRMLSFAEELTDADMAGVFVFTDSAGKSHERNFGGALLQFLNHETHHRGMISLYLEMLGRENDFSSLAQVLK

SEQ ID NO: 14531 - DNA, 759 bp, Unknown
  Obtained from environmental sample
  misc_feature (1)..(759): n is a, c, g, or t
atggacagtgagcggccgcgcatactcacaatcgcggcgatgatcgacggcgacttgggcgggatgacggaaaagcgcgccggcttgttggccgagcatggggaattcctaaacaaaaaccgcataagggccttcccggaggtgctgattacgccggatcacaatacgggaataaaccacttccttcaggcaaactccataggccccataaagcccaacctagccatcttcggctggtcgggcgacacggcgtacgccgcctcgttcatggaaaaaatcagaatcgccgcaaaactcaacatgagcgtaggcctgatctacggcagcgaactgcccgaaccaaacccgcgcaaccgccgcaaccgccgcatagacatctggtggcgcggtatgcgcaacggctcgctgatggtcatcctagcccacctgatgtccctaaactcggagtggaccggcgcaaagatacgcatactgcgcgtcgcctacacgccggaggaacaagcaaaggctagggaggagttggagcggttgatcgatgccgcgagaatggacatagagatagagccgataatatccgacgacaccttcccgaatttgctaaggcgctattccggtctgtcaaccgcggtattcttaggcttcaacgccgccgagaacacagatccggcaaagttccaagaggcgtactcggggttgctgcaaggtatgccgactaccattatgattcagtctacgggcgaggctgatttgctgtcttga

SEQ ID NO: 14532 - protein, 252 aa, Unknown
  Obtained from environmental sample
  misc_feature (1)..(252): Xaa is any amino acid
MDSERPRILTIAAMIDGDLGGMTEKRAGLLAEHGEFLNKNRIRAFPEVLITPDHNTGINHFLQANSIGPIKPNLAIFGWSGDTAYAASFMEKIRIAAKLNMSVGLIYGSELPEPNPRNRRNRRIDIWWRGMRNGSLMVILAHLMSLNSEWTGAKIRILRVAYTPEEQAKAREELERLIDAARMDIEIEPIISDDTFPNLLRRYSGLSTAVFLGFNAAENTDPAKFQEAYSGLLQGMPTTIMIQSTGEADLLS

SEQ ID NO: 14533 - DNA, 789 bp, Unknown
  Obtained from environmental sample
  misc_feature (1)..(789): n is a, c, g, or t
atgaaccggcttaccttatgccgtgtcggaggcaggctgcatcttcttccgttatacggaaggctcggcaaggaagagcaggaacgggtgttcgaggcggccccaaaaggcaaaacaaaggtagtgttatcaacgaatatagcggaaacgtcggttactatagaaggaattaccgcggttattgattcggggctgtcaaaactcaactggtacaacccgaacacctttacctccagccttgtggaagcgccaatctccatagcgtcggcgaaccagcgcaaaggacgggccgggcgcacctgcgaagggagctgttaccggctgtacacccgcggggattttgaaaagcgccctctcttcaccaccgaggagatattccgtacggatctttccgaggtgatattacggatggccgaccttgggatcaccgattttgaagattttgactttatctcaactcccggaagggaagggattgaagccggaatagaaacattgaacctgcttcacgcccttgaaagcgaccgcagcctttccggcatcggcaaaatgatgacggaattccccctcgccccccggcagtcaaggatcattgtggaggcgatcctccattatcccaaagtgctccgcgagacgctgattgcggcggcgtttctttccacgcaaagcccccatatcctgccgccgggggaagagaccgaggcgcgcanagcccacagccgcttcagcgaccaacagggggattttgtttcataccttaaatcttcaaagcctactgcgattccgtga

SEQ ID NO: 14534 - protein, 262 aa, Unknown
  Obtained from environmental sample
  DOMAIN (12)...(101): Helicase conserved C-terminal domain
  misc_feature (1)..(262): Xaa is any amino acid
MNRLTLCRVGGRLHLLPLYGRLGKEEQERVFEAAPKGKTKVVLSTNIAETSVTIEGITAVIDSGLSKLNWYNPNTFTSSLVEAPISIASANQRKGRAGRTCEGSCYRLYTRGDFEKRPLFTTEEIFRTDLSEVILRMADLGITDFEDFDFISTPGREGIEAGIETLNLLHALESDRSLSGIGKMMTEFPLAPRQSRIIVEAILHYPKVLRETLIAAAFLSTQSPHILPPGEETEARXAHSRFSDQQGDFVSYLKSSKPTAIP

SEQ ID NO: 14535 - DNA, 522 bp, Unknown
  Obtained from environmental sample
  misc_feature (1)..(522): n is a, c, g, or t
ttgctttggaaagcgcatacaggcgcggtttttcaagcggatttagccgccatttttcccggagactggaatcatgtagtcgcaagaagttatcatgaaatcaattacagaggttacaccgccgcggcaaagtatgaatcatggtcttttgaagatgacagcgggtatcagggagaaaactgtaacgggtttaattattacggtaatctgcttatcggatatcaaatgcctattttccttaatatgacagcgtttcttgcggaagccaatctatatttatacgacacgcccggtcgcgacaagtggggagatgatttaatacgctggactttttcctgtattctaaatttttctttaactaaaaaaatcgatcttgccataatcactcagttttggacgcaaagaaattatctggaaacggactggcaggacttgtattaccgtaaacggacactggataactccaacccgactcatttgaaattctaccaggcagtcgccattttatctttgaagttatag

SEQ ID NO: 14536 - protein, 173 aa, Unknown
  Obtained from environmental sample
  misc_feature (1)..(173): Xaa is any amino acid
MLWKAHTGAVFQADLAAIFPGDWNHVVARSYHEINYRGYTAAAKYESWSFEDDSGYQGENCNGFNYYGNLLIGYQMPIFLNMTAFLAEANLYLYDTPGRDKWGDDLIRWTFSCILNFSLTKKIDLAIITQFWTQRNYLETDWQDLYYRKRTLDNSNPTHLKFYQAVAILSLKL

SEQ ID NO: 14537 - DNA, 615 bp, Unknown
  Obtained from environmental sample
  misc_feature (1)..(615): n is a, c, g, or t
atgaaattcttttacaaaatagttatacaaaatgatattttaagagaacaacatcgcccgcgtcaggacaaacgccttcccatagttttgtcaaaggacgagatcaaaaaaatctttatgaaggaaaaaaattttaagcaccgccttcttttgatgattgtatacgcctccggcttgcgggtcagtgaagtggtatgcctaaaacagcaaaacatagacatcgacagaaaattaatcaacataaaatcggccaaaggccgcaaggaccgttgtactataatgtcggaaatggtcatcaacgcccttacagaatattattcccgatacaatattactaactggcttttcagcggcaataatcctgataaacatttatccatacgttctgcccaacacatatttgaagacgcgctcaaagaagccaaaattgtaaaagccgcttcgattcacagcctgcgccactctttcgccacccacctgcttgaagccggaaccgacatccgctgcattcaggaacttttgggacacacatcagtcagtaccaccgaacgctacacccatgtcgccaagcgaagaactttggcaataacaagtcctcttgatactataaattaa

SEQ ID NO: 14538 - protein, 204 aa, Unknown
  Obtained from environmental sample
  DOMAIN (29)...(195): Phage integrase family
  misc_feature (1)..(204): Xaa is any amino acid
MKFFYKIVIQNDILREQHRPRQDKRLPIVLSKDEIKKIFMKEKNFKHRLLLMIVYASGLRVSEVVCLKQQNIDIDRKLINIKSAKGRKDRCTIMSEMVINALTEYYSRYNITNWLFSGNNPDKHLSIRSAQHIFEDALKEAKIVKAASIHSLRHSFATHLLEAGTDIRCIQELLGHTSVSTTERYTHVAKRRTLAITSPLDTIN

SEQ ID NO: 14539 - DNA, 684 bp, Unknown
  Obtained from environmental sample
  misc_feature (1)..(684): n is a, c, g, or t
atgaggctttttaacgtgcattggaaattttttatcgaggttttaggcaagtcaggaatgatatttatctccgaattctcatgggtcagctccgaaactataatgaccgccatgtataaccggcgcgggggcgcggaagtcgtcgccggtatggcggcgggttttacaatcgcgaatattttctttatgcttttcggcgggatatggaccgcttctggggtccttataggaggggcgctgggcgccggaaaacttgacgaagcccgcagccgcgccgcctggttaaaatccggctgcatcgcggcgggcgttattctggcgcttttcggggcggcattttccgccctgcttgtcccccttgttttttccaatctcagttccgcggcgcgttttaactgcatcggccttgtgtatgtgatcctggcctatcttcctttatggggttttctcaatctgcagttcgccatatcccgcgcaggaggcgacgcggcgacgggaatgtacaccgatctgtcggttaacaccattctggttgtccccggcgcggtgctcctttcgtatttcacgtcattgccgcccgtgcccatgttcgccctgataaagctttcagacttcgccaaaatgtttatcgctaggcatttcctgaaaaaagaacgctgggtgaagaatttgacaaanagataa

SEQ ID NO: 14540 - protein, 227 aa, Unknown
  Obtained from environmental sample
  DOMAIN (19)...(184): MatE
  misc_feature (1)..(227): Xaa is any amino acid
MRLFNVHWKFFIEVLGKSGMIFISEFSWVSSETIMTAMYNRRGGAEVVAGMAAGFTIANIFFMLFGGIWTASGVLIGGALGAGKLDEARSRAAWLKSGCIAAGVILALFGAAFSALLVPLVFSNLSSAARFNCIGLVYVILAYLPLWGFLNLQFAISRAGGDAATGMYTDLSVNTILVVPGAVLLSYFTSLPPVPMFALIKLSDFAKMFIARHFLKKERWVKNLTXR

SEQ ID NO: 14541 - DNA, 405 bp, Unknown
  Obtained from environmental sample
  misc_feature (1)..(405): n is a, c, g, or t
gtgcgcctcggcgatccggagacgcaggcggtattgccgctaatggattttgaccttgttgatctctgtagcgcgatgatctcaggcgatgaatttaacttaacatggaaacatggggccgtctgcgcccctgtcgccgtcgccgaaggctaccccggcccctgccgcaagggcgacgctattaccattgacgcggccgccctcaaaaaagccggcgcgaaagtattcatcagcggcgcctgtaaagaccctgactcccatactctgcttacatccggcggcagggtgctgaccgtttccgcccatggacacaacgccaacgacgcttacgaacgcgcctacaagggccttggggcggtcaaatttgagggcatgggcttccgctgggacataggcagggaataa

SEQ ID NO: 14542 - protein, 134 aa, Unknown
  Obtained from environmental sample
  DOMAIN (40)...(132): Phosphoribosylglycinamide synthetase, C domain
  misc_feature (1)..(134): Xaa is any amino acid
MRLGDPETQAVLPLMDFDLVDLCSAMISGDEFNLTWKHGAVCAPVAVAEGYPGPCRKGDAITIDAAALKKAGAKVFISGACKDPDSHTLLTSGGRVLTVSAHGHNANDAYERAYKGLGAVKFEGMGFRWDIGRE
